United States Patent Application Publication US 2013/0129668 A1 - sequence listing, part 27

SEQ ID NO: 448962 - DNA, 122 bp, Homo sapiens
gcacagctgctggtagaggtagcccctgcgggccggctcgcagcccccgtccagccagcacggccgctccagcaagacctccctcggcgaggcaaaggcgccccccgcccccgacatgccgg

SEQ ID NO: 448963 - DNA, 122 bp, Homo sapiens
gcgctgggcgcacccgggtccgggctccggagtctgggtctgcgtgaagccttaggtctccgtgcactgggcgcacccgggtccgggctccggagtcaggatctgcgtgaagccttaggcct

SEQ ID NO: 448964 - DNA, 122 bp, Homo sapiens
gtataaagcaataaaactgccacgtctacctgctggtattgaggacattacaaacagtctcggcgcgcagcccgcgtgtaccgagagcgcactagggttgggagtgggaaggtggggtggga

SEQ ID NO: 448965 - DNA, 122 bp, Homo sapiens
caggcgtgcaggaggaggcattgtatagatgggtgcacccacgtgctggctgaaggcctgcgctggaccttcgttccccgtcagtgactcaagggccttggtgtgggggtaacagcctctca

SEQ ID NO: 448966 - DNA, 122 bp, Homo sapiens
agcacgcggcggtgtcgcagttccagttttggccaggctgctgggtgcgcagtggcgcctcgccctacgacataagacacggaccatctttccacatgtggatttgccatctgtgtctcttc

SEQ ID NO: 448967 - DNA, 122 bp, Homo sapiens
gggcccagccccctctggggacctccccgctgcccagggctgactcggactcagggcttccggctgagctacttatatagatggagagaagtgcaaagggtcctatatcctgcccctgctgg

SEQ ID NO: 448968 - DNA, 122 bp, Homo sapiens
acagcctgcagctgtgggaagccagcagaggtgaggttgtacagcggctcggtcacctcgcggggcagcaccatctaatggtgactgtgttgacaggcaggtccccagaggaggcaaagctc

SEQ ID NO: 448969 - DNA, 122 bp, Homo sapiens
gatttttctctgactgctaccagagacagttggaaatacaagacagtgggggaagcacctcgcgggcagtaggaggtaataaataacagttcggcgcggctctctctttttcagggcaggct

SEQ ID NO: 448970 - DNA, 122 bp, Homo sapiens
ccccccgcgccgcgcctcccgcagctccccacgcgcgcgggcgccccccagcaccagtctcggcccgccccctccgcccgaccattggctgctgctcccgtcactttcaggccacagccaag

SEQ ID NO: 448971 - DNA, 122 bp, Homo sapiens
agctttccccagcgcaattcagaaatgctgtggcggtcgccagactcttcgggtagctcccggcagctccgaggtagcgctcccctccccaaccatcgccctccgggatgggccgcaccgaa

SEQ ID NO: 448972 - DNA, 122 bp, Homo sapiens
ttctgcatagagtcaggcatctttctctgcatggcagtagacagatacatagccatctgtcgccctcttcagtacccctccatagtcactaaagcttttgtcttcaaagccacagggttcat

SEQ ID NO: 448973 - DNA, 122 bp, Homo sapiens
ccacagaccccgggtctccttggctgtctgtgggccgcccctggccaccttgtcctggctcgcagggtgcaggagcgcctcgttctctgggtggccggcttgctgctccggtttgggctgtc

SEQ ID NO: 448974 - DNA, 122 bp, Homo sapiens
acagcgggaggggacgccagcgcctgcagaggctgagcagggaaaaagccagtgccccagcggaagcacagctcagagctggtctgccatggacatcctggtcccactcctgcagctgctgg

SEQ ID NO: 448975 - DNA, 122 bp, Homo sapiens
aacttcgggtgctccttttccagccgggacgtattaaagggaccggagcggggcagttcccgacgccgcagcgctcgctttcccttccctcctctctggccctccctcctcccacccactgg

SEQ ID NO: 448976 - DNA, 122 bp, Homo sapiens
gccccgtgggcgccatggcctggcggttggggggttgcggggagtccgggtcggtcccctcggcgcccgcgctctcggccgggactgggaacccgtttcccggcagggctggggccccggct

SEQ ID NO: 448977 - DNA, 122 bp, Homo sapiens
gtttaaggaccaatgatgtagagatgacttctccaggtagcgatggtaactgtaacttgtcggcaaagaaatccaataattagccaaaatgcatgatttcttgagttccctgggtttgaata

SEQ ID NO: 448978 - DNA, 122 bp, Homo sapiens
acaccctctccggcggcccggcgcacgagtcgcggggcccgggggcactgggtggaggtccggccactcccgccccgcgccccacgtcccgggtctcccttcgaggccagacgcgcccggac

SEQ ID NO: 448979 - DNA, 122 bp, Homo sapiens
aggtgggagccaagcctttgtagaaaacctgggggccttcgctcctatacatggtccccacggcgtggcgcagcgtattatagacctggacacacacacgcactttgaatgagctcagtgaa

SEQ ID NO: 448980 - DNA, 122 bp, Homo sapiens
tgggctcctgacttgttggctgctgtcttttaaagccttaggcactgtccctctctctgccgtgacttgggggaacaaccaacagggaacagcagcagctacctgctcattccccctcacta

SEQ ID NO: 448981 - DNA, 122 bp, Homo sapiens
cccattagggacgtgactggcgcgggcaacacacacagcagcgacagccgggaggtaagccgcgtcccagcggctccgcggccgggctcgcagtcgccccagtgatgccgtggcccccgagg

SEQ ID NO: 448982 - DNA, 122 bp, Homo sapiens
gagagcaagtgccctctaccttacgtgcagaggaaccagtcatgcctctaaagcacccatcgcaccccatttaaatgtctattcactcatctgttttcctcattagactgtaaatttctaaa

SEQ ID NO: 448983 - DNA, 122 bp, Homo sapiens
ccgcctttgccttggggggtgccgggagaccctcatcgccctcgctgtcagagctgcagccgctgacgtcggtgatctccagctccgagtcgctgtcctccttcccaccaagggcagcctct

SEQ ID NO: 448984 - DNA, 122 bp, Homo sapiens
ggagggggctccctgaccgagtcctccccagacactaccaaacactcggtccgaagcatccgggaaacagtcccttggagctgaaggtcaagaacagaaaatgtagccgctatcttgcctcc

SEQ ID NO: 448985 - DNA, 122 bp, Homo sapiens
atgtaggcacctggcacacacgtcgtctttgacctgcttttaaagcacattcccgtgtgtcgtgaacaacgctgtccccggcgtctgctcatcaagaggtgcgaggtgcttctgccggtttc

SEQ ID NO: 448986 - DNA, 122 bp, Homo sapiens
tccacaagcgggggctcgattttggcttgggtggggtcctctccccatcgcggcgctccccgcccacgcccgcgcccccagactcaccctctccggggtacaggtggcccgcggcgcccagt

SEQ ID NO: 448987 - DNA, 122 bp, Homo sapiens
tcttccaatttctggaaactctgagggaatagggtgcctaaatatgtgggtgtgcacacacgctcacacacaccctaatggagatacactgaagcaaaatgtccctgtgtttgtgacttctg

SEQ ID NO: 448988 - DNA, 122 bp, Homo sapiens
ccccgtgggtcaatttctggccaggtgagcacgtggcagctggccatagcatagctgggtcgaagggactgcagagcccagcacaacccccatgcctcctccagtgcttccccaggaggcag

SEQ ID NO: 448989 - DNA, 122 bp, Homo sapiens
cgctcctgcgaggtggacggggtcgccatggcggcgactaaagagaggcggctgcagcggcggcgctggagcggcggcggggggaccttggggcggtctgagggggcggtgaagaggtgacg

SEQ ID NO: 448990 - DNA, 122 bp, Homo sapiens
tattcctcctccccctcctcctcctgttcttattcctcctccccctcctccatattctcacggttttctcaggaccttctgtccagccttcgccttcttggccttggtgtccgctgcttggg

SEQ ID NO: 448991 - DNA, 122 bp, Homo sapiens
tccgacaacgggcggggcggagcggcccagggaggcgtagcccgagactccaacgccgcccgctccgccccggcttcctggagccgcccccactgccagccactcaggaaccttccagaagc

SEQ ID NO: 448992 - DNA, 122 bp, Homo sapiens
taacacgcgggcctgtcacttgtgagtgcgccaggacttgaccttgccaaccacgacgaccgacacccctgcagggtcccatgggtgtgtgtggtcctccgtgctgtggtgtgaacgccttc

SEQ ID NO: 448993 - DNA, 122 bp, Homo sapiens
taatccacttccagctgacgcccccagctctctgcgacggattgaggtttgtgtgcaggacgtctggcatacggcccatgaggactttgtcgtgtaaagcaaatgggaacgttgaggcatgt

SEQ ID NO: 448994 - DNA, 122 bp, Homo sapiens
ccccagaaataagaatcaagagcagctattgttatccttagagtgttttccgtctagggccggctcgtgaacagccacatatccttgcacctgacactgtccccacacaaatagctggcttt

SEQ ID NO: 448995 - DNA, 122 bp, Homo sapiens
actcaccgttggcgcgtttgagggcattttccggcctctgaaaataggccggcatcttggcggcaggctcagctcacccggcgtcagcgaactctctagtggcccgggccgggagaggagac

SEQ ID NO: 448996 - DNA, 122 bp, Homo sapiens
catgttggccaggctgctctcaaattccttaccccaggtgatctgcctgcccaggcctcccgaaatgctggggttacagcgtgagccgctgtgcccggcccagccacttcttcttattggag

SEQ ID NO: 448997 - DNA, 122 bp, Homo sapiens
ttaagcgtttctctacctgtccatgcatctcgtaaatacagtaagcatggcaagccctttcgctggttaaccccggcgtccgtgtgctcactgccgccctgcacgcacgaggtcgcggatgg

SEQ ID NO: 448998 - DNA, 122 bp, Homo sapiens
atcggcgctaccggattggacaacttggcatggggcggggcctctgggaggcgtggcctccggccggctcctctgctgttgccaagggaaactgccgcgaggaggcggaaggagcagaggac

SEQ ID NO: 448999 - DNA, 122 bp, Homo sapiens
agcggaggacccaagcaagggcaaagagttccaacccagccagagccgcacctcttgcagcgactccggcaccagcgcgggcacgatgggccgcttcacgccgcgctgctccttctccttct

SEQ ID NO: 449000 - DNA, 122 bp, Homo sapiens
acagaattttcaaaaataggaactcaacttaaagatttaaaattgaggtaaagtggccttcggaaaaatatgtaaatacaagatcatttgctcgccccaatcgtggaagcttgattcaaata

SEQ ID NO: 449001 - DNA, 122 bp, Homo sapiens
cgatggtgtcaggcctctggcttgggcgccgcccctcggcgacgtcactgggtactgtgacgtcactgggtgctgtgacatcagggcaattagcccaggacccacagccctggcgctccgca

SEQ ID NO: 449002 - DNA, 122 bp, Homo sapiens
catcctagactacaacgaggccttcaacgcgctgcgccgggcgctgcggcacgacctgggcggcaagaggctctccaagatcgccacgctgcgcagggccatccaccgcatcgccgcgctct

SEQ ID NO: 449003 - DNA, 122 bp, Homo sapiens
gaaatgaaaaagtcaggccggattctcaggctttctttgccacctgcttaagaaagtgcccgttttactgaacgcacaacacaaaagtttccatcttcttcctcatatggaaattttatgtg

SEQ ID NO: 449004 - DNA, 122 bp, Homo sapiens
agggaaattaacagatatttacaaacattgaaggattctctgtgttggctgtaacttctgcgcccctcttcctacctaaagatactctttctatcccactaatattttttgtgaatatagat

SEQ ID NO: 449005 - DNA, 122 bp, Homo sapiens
tcttactgcacactgcctcctcgccccgcccccgaacccaagccattggttgccgggcaccgccccattcgtctattgggccaaagaagatgccgttcggtcacctagaatggcatatgtgg

SEQ ID NO: 449006 - DNA, 122 bp, Homo sapiens
caggtgcacattaactaagtggcagaaggccatcggcttggcaattgcctgaggcctttccgggactcgctggtttttaggttccatgaagggcatccagatctaggatgatacgaaaagtg

SEQ ID NO: 449007 - DNA, 122 bp, Homo sapiens
cccaccaccaaccccagaatctgggagagaacagagacaaggtcagagctgctggctccccgcttggggttatataactccccgactcctcaagtccctggaaactgaggccaattccctgg

SEQ ID NO: 449008 - DNA, 122 bp, Homo sapiens
gtggtgttcccggccagacatcgagaagtgcccaaaaggttagagctccggctctggtgccggaagacgtggattctgctgcaccacctgctactgtgtgactccaggaaggaaccttgagc

SEQ ID NO: 449009 - DNA, 122 bp, Homo sapiens
aatgttaatcagttggccttggggagggaggtgtgccaggattagctggggcgggggcagcgttcaggctgggattttaaagtccatgattaggaatcctgagatagaagttggagaacccc

SEQ ID NO: 449010 - DNA, 122 bp, Homo sapiens
gtaatccatatgaaatctaactgcacggacatggaagattcttgtattagtctgctctcacgctgctcataaagacatacccaagattgggtaacttataaagaaaagaggtttaactgact

SEQ ID NO: 449011 - DNA, 122 bp, Homo sapiens
gttcagaacatccaaaatgccacgttcagtgggacgattccactgacacgttgatgttgccgcagcgtccgattgcactaattctacgtgctcgctctaagttcctgtaccggcctcactga

SEQ ID NO: 449012 - DNA, 122 bp, Homo sapiens
gcaatgccctcccttaggactgtgacccccatccctctgccccagctgctcacctgctcacgtctgggcacagagagcagacattctgctttatactccagggccctgagcctctggcacca

SEQ ID NO: 449013 - DNA, 122 bp, Homo sapiens
cgcgccccgaggggagggaggaagtgggaagtcacccctgtccccgccgagaagggctgtcgcaggctccacccttgccaccgcagaggcccggggctgaaagcaggcagccaggcccaggc

SEQ ID NO: 449014 - DNA, 122 bp, Homo sapiens
tgtcaagatcatatttacaaaaaaatattttttcccataaatagtcgggacagaggctgccggtgctgggccacaccaatgacagcctgtactcctggagagtgctctgggctttaaaagtc

SEQ ID NO: 449015 - DNA, 122 bp, Homo sapiens
tacaggcgtaagccactgtgtccagcccatttatatttttaagcacaatgcactactctacgttcaccccaatatgctcaatttccttctcttctgtgctctttgtttggatactataccca

SEQ ID NO: 449016 - DNA, 122 bp, Homo sapiens
ggacaataatatggatttctggttccctttggaaaagaaaaaaagaaaatcagtccactccgggctcccattcctggatggtgataatcagccaggctgagttgtgtgatgataagttagct

SEQ ID NO: 449017 - DNA, 122 bp, Homo sapiens
ctccttctcggcggccccgtgcgtctgcgcgcgcgcgcgctcgtccggccgcgaccagcgcgtgggagccgctcttatagtgaccaccagcaaggacagcgcaggtgatgcacctgtagcta

SEQ ID NO: 449018 - DNA, 122 bp, Homo sapiens
ggccgtggtgatgcagaggtttaaccagcatccgccgggagccccggggtccaggcccggcgctggagtcccgcagcgaagcctcgcagcccccacgcctctcgactctaggcttgtgccct

SEQ ID NO: 449019 - DNA, 122 bp, Homo sapiens
gggagatttcagaacgcggacagcgccctggctgcgggccataggggactgggtggaactcgggaagcccccagagcaggggcttactcgcttcaagtttggggaaccccgggcagcgggtg

SEQ ID NO: 449020 - DNA, 122 bp, Homo sapiens
attttgcaaatgcggaatttgaggcacagagaagttaaacatttgatgagggtcacacagcggtgcttcagtttgaaccaaagaagtctgctctgaaacttgtatttttattttattttatt

SEQ ID NO: 449021 - DNA, 122 bp, Homo sapiens
cgggtaaggaatttcctcgctaattcatcacaacctaagcggaatggcagataggtgaggcgtattgagcatggccaagggtggccgggccccacaggatccgtgcgaaatccggaacctcg

SEQ ID NO: 449022 - DNA, 122 bp, Homo sapiens
gcccacgttcgccgcggccggttctggacggttccaaccagctctttcccacttttgggacgcctgaccctgcacacgcaccatttcccggcttccgggatgttccagggtcctccctctgc

SEQ ID NO: 449023 - DNA, 122 bp, Homo sapiens
cctgagtccccacgttgcgcatcaggctgcaccaaagttccgcgagtgccggaagtgccccgggacttaagaaaacaggagcaccacaaggaaggccagtccatgttatggagatggcaaca

SEQ ID NO: 449024 - DNA, 122 bp, Homo sapiens
ggcccaggggttggggacccctgttttaaggtattgcagaattgtcccctccacacacagcgaagtgtaaatccgtttaatctctgaactatctaaagatgaatatgctgctgctctcctgc

SEQ ID NO: 449025 - DNA, 122 bp, Homo sapiens
atcctcccaaactgtgagctgggaactagcaagaatcaaaaagccagtgtatgcttcctgcgaaccacacagcctgaactgctgtagggtgatgtccctgtgtgacagactggggtggggag

SEQ ID NO: 449026 - DNA, 122 bp, Homo sapiens
agcggttaacactgggcctggaatggtagatactcaataattaaggttacttcttattctcggttcttttttccaaacctagcgcgtctaatctcttctaggccccgccccttctgagcccc

SEQ ID NO: 449027 - DNA, 122 bp, Homo sapiens
tttatccttttttttccctttccccatggaggcatctctccctccttctctctttcctttcgtggctctagcagtaagcttgcagctcccatgttccccaggaggcagcggagttgctcaca

SEQ ID NO: 449028 - DNA, 122 bp, Homo sapiens
gttgcacggagacggcaggtagtctctgccttccaggttggagtcagcagtgcgaagaagcgttcgtattcggtaggagagagagggctgcctggagtggaggcctgagtcgaatcctgggc

SEQ ID NO: 449029 - DNA, 122 bp, Homo sapiens
tggctccaggccggaagagggagtctgtaggggcgggccggctggcgtcccctttccggccggtccccatggaggcgctggggaagctgaagcagttcgatgcctaccccaagactttggag

SEQ ID NO: 449030 - DNA, 122 bp, Homo sapiens
agggtgtgctctgatcacatggactgtgcatttccttagagcacctcccttcccagcccacggaatccagaaagaagctgctgtgctgctgtgtgacctccatcagtgcagtggattccttt

SEQ ID NO: 449031 - DNA, 122 bp, Homo sapiens
agagggagctgggtagggacggggagggcaacgcctgatggggactggtgagacccgggacgcactggcgcgatctaggtagaaaactcgctgctccctggctccggggagaggcagcgcgg

SEQ ID NO: 449032 - DNA, 122 bp, Homo sapiens
taatatacttttgtttctggtcgaataggcagtgggtccgggtgctctgccctgaggacacgaccagtcaactgaggcccagacgaagagtgagacgaagccacacgatggcaggaggctgg

SEQ ID NO: 449033 - DNA, 122 bp, Homo sapiens
gtggtagtctatgaagaagaggaagaggatggcaccctgaaacagcacaaagaagccaagcgcttcgaaatcgctaggtctcaacctgaagacacccctgaaaacacagtgaggaggcaaga

SEQ ID NO: 449034 - DNA, 122 bp, Homo sapiens
cggagctggcaggtcaggtctggccgttgcgactggaggagacactcaccttcacctagccggcgggggcgggcccgcggcctccaatggtcgagccgcgtccaaagcttggcaacgcgatt

SEQ ID NO: 449035 - DNA, 122 bp, Homo sapiens
aaggtgcgtccgagccatggccgctgccaacccgtgggacccggcgtccgcgcctaacggcgctgggctagtgctaggccacttcatagcttcggggatggtcaatcaggtacgtgggggtg

SEQ ID NO: 449036 - DNA, 122 bp, Homo sapiens
catgtctagtgcatcatccgtgcctctcttgttaggagatcatctgaagaactagggttacggtgctgccagctgactaatgactgtttttcagttttgtcaggaaacagaattaccactca

SEQ ID NO: 449037 - DNA, 122 bp, Homo sapiens
ggcgtttagaacccagggactgactcccagcccaaagatcttccgtgacccattgccagccgcaagcaggctctagggagtcctaagagagctgaagaaggttctacatcgagcctgcctac

SEQ ID NO: 449038 - DNA, 122 bp, Homo sapiens
cgcccaggggtgggagccgagctagccccacctcccggtggcttctcgcgatcgtggagacgcagcgagcctatgtaacttccggtcgcgacccatcagctcctcggcgattggtccgtttc

SEQ ID NO: 449039 - DNA, 122 bp, Homo sapiens
ctgccagtcccctgggtgggagacgagtcgggtacttcgcttccacctgcgggcccccagcgcagagcctggaattggctggacggagctagccgcgccggcgccccgtaggacggcgcggg

SEQ ID NO: 449040 - DNA, 122 bp, Homo sapiens
ctgatgaacttagccccaggcagttggaattaataaagttttcagtagatgtccatgttccgtttgaattctagctcctgttaactccccagttaatcctcatgtaatgtctacccaaaaat

SEQ ID NO: 449041 - DNA, 122 bp, Homo sapiens
acattagcccactgatggtctgcaacattctatgccctccaggcttctacctcttccctgcgctgattagactgtggatgagccaatgagtgaggggtaagggtgaagccacctctgcaccc

SEQ ID NO: 449042 - DNA, 122 bp, Homo sapiens
ggcagaggtgatccagtctgtggtcaacggggcagatggctgcgtgttctgtttcggccacgccaaactgggttcgtgagagtttcactttctcatgcggctcgttgagctccctgtcatcc

SEQ ID NO: 449043 - DNA, 122 bp, Homo sapiens
tcttatcatctgcgaggtcgaagggactggaacacaggcttccttgggtccttcctagcacggagtaatctagggatgggaaagccggctctgagcggagaatcccgggggctgaggacatc

SEQ ID NO: 449044 - DNA, 122 bp, Homo sapiens
ggtgcaatggcgcggaccccggacccggtgcccaaggtcgcctatccccgccgcggcatgcggtggttcgctctccgcacttccctgtttggggcagttaggtccgcagaagtctgtccgcg

SEQ ID NO: 449045 - DNA, 122 bp, Homo sapiens
aggaaaaggatgtcctaatgttccctgaccagagacctaaattggaatttggaagagtttcgtaattaaaatcattgttaagattttattgtcctgtaccctgtagtgtgtgtgtgtgtgtg

SEQ ID NO: 449046 - DNA, 122 bp, Homo sapiens
gctgagacttccctctcccacgtgaattttgtgggatctggaaccacaaacctcgggtcccggaggctccacgaagctgctcccacgtgagttttgtggggtctagaaccacaaacctcggg

SEQ ID NO: 449047 - DNA, 122 bp, Homo sapiens
catggacaggcgagagtcgtggggcaggggctgcccacctcgcacccagcgcacggcccccgctgcacccactcggcctgtctccacttcgagacacacatcctggccttcctctgcccgca

SEQ ID NO: 449048 - DNA, 122 bp, Homo sapiens
agaggttctttctctccccacagttacatgctgagggtgcaagggactcttagactttctcgctggttgactggcagagcaacttctggacccagcagagttcagctttgcatgtccctata

SEQ ID NO: 449049 - DNA, 122 bp, Homo sapiens
tgctattaacattgaccagcttcttctagtaaggagaggagacagtattttttcaaagtgcggtcctaagaccacctgcaagagaattaattacatgctgggaatgtgtagattaaaaactc

SEQ ID NO: 449050 - DNA, 122 bp, Homo sapiens
tgaactcctgacctcaggtgatctgcccaccatggcctcccaaagtgctgggattacaggcgtgagccaccgcacccggccaggcatgattcttaaaaggaggctgggttggcccaaggtac

SEQ ID NO: 449051 - DNA, 122 bp, Homo sapiens
atcaggcctcaaactccttatccgcagttcgttctcaaaaaacagccaacgcggcagctccgggtgaccaggattgcaacaccaaatgtgtttgttccccatgtttgtgaaatacctcagag

SEQ ID NO: 449052 - DNA, 122 bp, Homo sapiens
tactgactttgaggtttaggggctgggctcaccctcgtgagcaaagccacaggtgcttcccgccctcatggagcttgcaggcttgaggcgggtttagtttactcacagatagtcacacagat

SEQ ID NO: 449053 - DNA, 122 bp, Homo sapiens
cattacaactgttattctagcaaaatcctgctagccagccttgacaagtaaatcctgcagcgctgtgagttttgatacatgattcaataatgacctaggattctcagattaaaagtgctgtg

SEQ ID NO: 449054 - DNA, 122 bp, Homo sapiens
cttttgtgtgcgtgtgtgtctgtgttttctgattcaacacatttatgcatctgcggctcccggtccccgcccgccccggcgctccccctcctaccccgcgccgcacacgcacgctcacatcc

SEQ ID NO: 449055 - DNA, 122 bp, Homo sapiens
taacgtgcgcgcggccactgggccgcggggcgtgtggggatggcgaagggctggctccggcgtccctgccgaggtcctgcgtcctcgtcccgggctggccgggtccacggggcagccaggga

SEQ ID NO: 449056 - DNA, 122 bp, Homo sapiens
gtgttttggggaggccagaggacctacccattgcttcacattcttggtgccaactgtgaccgttaaatatgtggattctgtacatgcttcaagattgttcctggaggtcaagccttgtctga

SEQ ID NO: 449057 - DNA, 122 bp, Homo sapiens
ggcggggcttgagccggaggccgcctggagcagccgggcggagggcggggcttggagctgcggacgcctggagcggccggtaggtggcggggtctagcctagaggatgcctggagcagccgg

SEQ ID NO: 449058 - DNA, 122 bp, Homo sapiens
cctggtccctgagggcagcacccttagattgcccaggctgccgcggaggaggacgatcgccgcgcgggctccgctctcgccgtctgggccaccggcgcgcacccctaggaacttctctggcc

SEQ ID NO: 449059 - DNA, 122 bp, Homo sapiens
caaggatgtgtttttggaggggtcatttggaaagggaagagaaatgatgggaggagaaaacgataatcaaacctctgtgggagagagggtcacacagattttaacacctttaacatgggaag

SEQ ID NO: 449060 - DNA, 122 bp, Homo sapiens
caattgcaagcagaagagagtgagtgttctctgccggcaaactccgccagggtcccggcccgtagagagtcgtcaagggtctggaacccccgtgccaacacctgcccctgcttcgcagcccc

SEQ ID NO: 449061 - DNA, 122 bp, Homo sapiens
tgttaccgcagggtcaccggttagtgttgtaaaataagactggtggttgtggatactaaacgtgtgcatgagatctacacggtaaaaaggccaaacaattttttaagcagtgatagaatttt

SEQ ID NO: 449062 - DNA, 122 bp, Homo sapiens
cagatgtcctcttcccacacatctttttctgtgccacttgctagaagtttggtgtatttacgaccagattgttttcaatgtgtcacatatgtttgtgttatataaaaacatactttaaaaat

SEQ ID NO: 449063 - DNA, 122 bp, Homo sapiens
tgacaaattttaaataattactttgtttcagagtcatgaggatggaaagaagatagcctgcgttgagttgaagtaaagtaaaaatattatgaatatgtgtaactaggtgacatcctctctgc

SEQ ID NO: 449064 - DNA, 122 bp, Homo sapiens
cccctagaggccacaaggccaggcagtgcctggagttgacagcagggactcaggaggccccgtgggccaggatttcctggctgctgggcccattcccaccctcctgtccaggaagtgggggc

SEQ ID NO: 449065 - DNA, 122 bp, Homo sapiens
ggaggcggtaacctgagctgctccgcaggactggaaaccgcacaacctcgaaaccagctgcgcaggagaaggggaaccccatccaccataaacatcccctctgcgaagcctcaggagctgga

SEQ ID NO: 449066 - DNA, 122 bp, Homo sapiens
cacaggtgggctcagaagcaggctgggggcgggtagagggactgtcaccgtgagcatcctcgcgagtggagtgtgtggggagtgcggcctgcatggccctcacgggggcacagagaggcctc

SEQ ID NO: 449067 - DNA, 122 bp, Homo sapiens
gggcttccttaaagatacaaagcactatttactccctgttcgggtggccagttcacaccacggcgttagactccaccttggaaggctgtatttgcccaataaggcaagcaggtactgtcccc

SEQ ID NO: 449068 - DNA, 122 bp, Homo sapiens
ctcgaacttgatctgcaagacgcagagagagggaccgccaagtaattcgtggcaaagaaacgtgttctcagcactttgccctcccagggccaagcagggggccactcacctgcttgcgtctc

SEQ ID NO: 449069 - DNA, 122 bp, Homo sapiens
aatggccaggcgaggaggctgttttaaacggcagagcccgctggccaatcaggcggctctcgtggaggcagctagcgcgaggctggggagcgctgagccgcgcgtcgtgccctgcgctgccc

SEQ ID NO: 449070 - DNA, 122 bp, Homo sapiens
cattttagcaatccgccaccaggtggaagagtcgaattaagaatagagtcgctccactgccgtcctccgacagcaatagtcgggaccgcaaaaaccgcgggacggagatctgaccgtagagg

SEQ ID NO: 449071 - DNA, 122 bp, Homo sapiens
gtttggcaggagtggtcgcagaggctgtgaggggctgctaggcaggccctggcccaactgcggctccaggctagccacttcagactttgccctcctgggggatccccgggaagtcctggcgc

SEQ ID NO: 449072 - DNA, 122 bp, Homo sapiens
gctcctttacatactcaaagtcacctaaaatcatattgtaccgacagccagttgtgctgtcgcgtgcaaatgctgacacaaatcacataccgtctcgcgtagaatcagtcacgtacccagcc

SEQ ID NO: 449073 - DNA, 122 bp, Homo sapiens
aggtcagtggaggatgcagccagtggccagaggtcacctccctcatgggttgggggacagcgtcccagccccgagggcaagcactgatccctcacaggacggggaagcctgtccttgtgcgc

SEQ ID NO: 449074 - DNA, 122 bp, Homo sapiens
tgctctgcccttgggtctcgtctgaggccccagcagcctgaggcgcagaagaaactgaaccgtttaggtggctgtggcctgcaggagcccttctctgtccaacacaccaaaaggagtgagaa

SEQ ID NO: 449075 - DNA, 122 bp, Homo sapiens
gggcaggtccagcctggggcctgctccccactgcagcatttccaggcccccagagtgggccgaagggggacatgggcgtgtctttccacattaagtagcaggagattccctgagtaaaaggc

SEQ ID NO: 449076 - DNA, 122 bp, Homo sapiens
ggcatcagatcctcttcaggtccctagagactggacccttcttatagctcctgcctgcgtcgcacccagaccatcttgggatgttgaaagtccactgtatttggaaagacaacagcaccttt

SEQ ID NO: 449077 - DNA, 122 bp, Homo sapiens
tctccaggtcctcaggacttcggctggactcgtcctcagtcgtgggattcccatcagactcgctggccggagaaatggctgtcagctggggtcccttagcctgtggggcctcccgcatagcc

SEQ ID NO: 449078 - DNA, 122 bp, Homo sapiens
cacaaaagagcagttgcagtaacccacatcatcctctacgcctggctgtccatcaagaggcgaaaagcagccctatataggttctatccttggatagttccagttgtaaagtttaaaatatg

SEQ ID NO: 449079 - DNA, 122 bp, Homo sapiens
gacggaggggacaaggaaggaggtcttccagctatacaagttcctgtgggttggcagcgtcgtgtggatcaaaatggagtgctttatgtcaggtaagttcttattattacctgtggtacctg

SEQ ID NO: 449080 - DNA, 122 bp, Homo sapiens
ctccgagcttggggaagagacagttaaaccttccccgtgagagcgagttatatcacgcagcgccagtgccaggtcagcagtctggctggagctggaccggctggtggcgccaggcagtgcca

SEQ ID NO: 449081 - DNA, 122 bp, Homo sapiens
tgcacgtctgtcatcgcggcttttgagcgcttccttggtgcaggtgtccactgaacgccacgcacgccttggtccatttcatcttcgaaagggtgtcatgagtaggcactgccggtctcccc

SEQ ID NO: 449082 - DNA, 122 bp, Homo sapiens
gcagtgtttctcagccaagacctgactcccagggagtttatactccaacatgttgggagacgggatatagacaataaagatacaagagattttggtacatctgccataggaacttgaagccg

SEQ ID NO: 449083 - DNA, 122 bp, Homo sapiens
cgactgggcggtgggctgaaccctgggcttgtccgtgccctggccatcagccccagtggccgtagtgtcgtggccggcttctcctcaggcttcatggtgctcctggacacccgcacaggcct

SEQ ID NO: 449084 - DNA, 122 bp, Homo sapiens
gcccagcctcagagtcccctttgcctgaggcgcagcgggctgggctggtggcctcagggccgtctctgacctccgccccctatgccatgacctacgccccggcctccgctttctgctcttcc

SEQ ID NO: 449085 - DNA, 122 bp, Homo sapiens
tccctggctgggtgagacacaagttcctgtttatgcaccagatcagggttagcatacaatcgttttcaacagcttggtcacagcatgtgcctcctgtccccatgtgactgtgctaagtctgc

SEQ ID NO: 449086 - DNA, 122 bp, Homo sapiens
gggactgacccgcgggccggcccccctcagccggcgggccccctccctgcgcgctcctggcggcccctgctgccaacgcgccccaccactaagggaccctcaccccaaggcccgacccctgc

SEQ ID NO: 449087 - DNA, 122 bp, Homo sapiens
cacccaggccctggcgcacctcgcactgtgcactcgaggggacgggcacccaggccctggcgcacctcgcactgtgcactcgaggggacgggcacccaggccctggcacatcgtgcactgtg

SEQ ID NO: 449088 - DNA, 122 bp, Homo sapiens
tttttctgcatctcaccacttcgtgttattctgtatgcctttaacaaagtccaagcctatcgggcggggtggctcacccctttaatcccagcactttgggaggccgaggccggcggatcacc

SEQ ID NO: 449089 - DNA, 122 bp, Homo sapiens
tcctcttcccggatacttggagacagcagcgtcagtggcattgtttggcgtctctgaacgcggctttggcagagccctccggagccagctgtagttcccggagacgccactaggtgacaatg

SEQ ID NO: 449090 - DNA, 122 bp, Homo sapiens
ggcgtgtgtctctctgatcatagggggacggcttcgcaggcgtgtctctctgatcatacacgtcagcacgtgtggcaagtgtgttgtttgcatctctgtgtggctctaaatgtttgtttttt

SEQ ID NO: 449091 - DNA, 122 bp, Homo sapiens
gtggctcagcacctgcaccagcagctccgggggcagcgcgtccagggccagggatgggtccgccggcagccgtcgccgcgatagccgggcgcccatctccagtagccagagtcctgcaggtc

SEQ ID NO: 449092 - DNA, 122 bp, Homo sapiens
gccctcctttctttcgatccccaccgccacaggcgtcctgtgcctcttcctcggaggggccgtggtgagtctccagtatgttcggcccagcgctcttcgcacccttctggaccaaagcgcca

SEQ ID NO: 449093 - DNA, 122 bp, Homo sapiens
ggggaggtgagggcaaggagaggccgcacccagccctgcagcctctgacccctgagcacccgggctgggatggcaagaagaagactgacgggcagcctcactcatgcttcctgacgacaaat

SEQ ID NO: 449094 - DNA, 122 bp, Homo sapiens
tgagattaagtcaagtggttgggtcaggggaggcagccacctgccctggaggatcagcctcgaagtatcgatccagcagggcctccacctctccctcctcatagtcccacacctggaaccga

SEQ ID NO: 449095 - DNA, 122 bp, Homo sapiens
gaatgaagtggctttaatacctggtgaacagtaatgccactgagcgagactgggaagactcggggaggaacaagtgctggcagagaatcaagagttctgttggtccaaacacgaacacattc

SEQ ID NO: 449096 - DNA, 122 bp, Homo sapiens
tgtaattgatgatgtcccagatgacaggtgagagtgctctggaggcagctctgcactccacgtcagccaggcctccgctccctcctgctccaccttccccttcatctgctaactaactcatc

SEQ ID NO: 449097 - DNA, 122 bp, Homo sapiens
acacatagaaaaaagatgtctatttaccacatcactatggaatgacagcttttggcactacgctaggcaccctgctggtggtgttggagagggagtagttaagaaggcaagttggactaaga

SEQ ID NO: 449098 - DNA, 122 bp, Homo sapiens
cggggtagaggtaggccataaacacagtggataagacccagaggaactgacttcccagtacgaatgcagtgataattcgttttgtcaaactgttacggggcagaagagtgactttttttttt

SEQ ID NO: 449099 - DNA, 122 bp, Homo sapiens
tttatagagagagcagtggcccttaaggaactggagagaatgctctgatttacttctgtccggcatggtgaacagcaggattggctgtagctgttctctttgccaaggacagatctgatctg

SEQ ID NO: 449100 - DNA, 122 bp, Homo sapiens
ctcggccgcaccgaatccgattgcttagacagtctccttaagcagcagtgtctggcaggccgctttcctttagcacgtggagcctctctcctccctggactctccccactgggccgatgagg

SEQ ID NO: 449101 - DNA, 122 bp, Homo sapiens
acagctactctcttggtggcttgtgtgtgttatggcccttatgatggagataactccgtgcgccctccttccctgctatttggcaggcactgcacactagccataggctttgtgaccacaga

SEQ ID NO: 449102 - DNA, 122 bp, Homo sapiens
gatggaatgaactaagtagaggaaggccagcagggtcgaccaaatgacgtaggctcagtacgtaagagtggacacacaggtggagctgagaaaaatgcccttgtctgaaagtttaaatattt

SEQ ID NO: 449103 - DNA, 122 bp, Homo sapiens
tcttggggcgcatctgccgcaccccttacttaggcacccgcaactgtggcgcgtatctcccgatccaggctcccgccgcaggagcccagggaccctcatgctagcctcgcccctaaatcgga

SEQ ID NO: 449104 - DNA, 122 bp, Homo sapiens
tccccgggaaccccagagaaagtctcaggcgtcctccatggtccacccaggccaagtgagcgtgagcttccagtcagggcactggctttgtaaatactccaagttcctgcaagcaacagagg

SEQ ID NO: 449105 - DNA, 122 bp, Homo sapiens
cggcggagcgcatttatttgcatatttctacctttgttccctgccagcggccaatcagcgcgcggggcgagacgaaggggctgggcggggctcgggctcctgctccggctcagctgcggcgg

SEQ ID NO: 449106 - DNA, 122 bp, Homo sapiens
tggaggaagcagattttcctccagctcagcagggcagagtgtcagggactggtgcgtgggcgttacctgctgcagcacgctagctgtgaattgcatggcctggtggtgctgctcctccagca

SEQ ID NO: 449107 - DNA, 122 bp, Homo sapiens
tcgcgctgggcttggggggttcgccgtgcagctgcgccttgtgcctgagcgcacgaccgccgtcactggatgttgtttcaagttttggtggactagatgagtgagcctggggttctttgcat

SEQ ID NO: 449108 - DNA, 122 bp, Homo sapiens
taaaaaaagtgatgtgcccccttttgcagcttgtgagctctcctctgattaatacaatcccgttagaacctacaaggcatagagggaaggatagtacaaagaagttttgatgaagggaaatg

SEQ ID NO: 449109 - DNA, 122 bp, Homo sapiens
gcagctgctcctcgctgaccacctggctgctgatgggcttggtggccagcagagctgccccgttttgtctgtgcagagtcagccagacgtggctcagcgcagctctttccctcggtttcatg

SEQ ID NO: 449110 - DNA, 122 bp, Homo sapiens
gcacgtgacagctccagcaggtctccaacaggtggtgttctgctggtgaggtcggcgatccgggtgtagctggggttgcaggcttggcaggcacggcggcggtatcgggaggcacagcgatc

SEQ ID NO: 449111 - DNA, 122 bp, Homo sapiens
ttgaagtggctttgaaacctgattggagaaacagactgctcagctgttaagaacacacagcgctccagaaaactggtgttcaacacaacgcgtcactccggcttccactgctgctgcggaga

SEQ ID NO: 449112 - DNA, 122 bp, Homo sapiens
cccacaccggcactgcagggacagccacgtggcgttcaggggctgctgggctgcggggaccggggggaagcggatggggcagagtggggtggacgtacctgcagtgaaccacgatggggccg

SEQ ID NO: 449113 - DNA, 122 bp, Homo sapiens
aaacaacactcctccggttatcccggcgctggagaatcaggcacaggatgggacagagcacgtggataaaatgttctcccgattaaatgtaggccagaagtcaggggaggtggggagtgggg

SEQ ID NO: 449114 - DNA, 122 bp, Homo sapiens
attggcgtcaaattcagccgtgaccgcgagagtcgctcccccttcctcaaacctgacgagcgggcccccactgagatggccaaagcagctccgggcagcaccaagcccaaaaagaccaaggt

SEQ ID NO: 449115 - DNA, 122 bp, Homo sapiens
caggctcctggggtgttcttctgcagcaggacccctcgctggccgctgccagcccacttccggaggagttggcctcgtctagccaacagttcagtgggatttctttcttggacataacttca

SEQ ID NO: 449116 - DNA, 122 bp, Homo sapiens
cagttgtcgacgacgacgagcgcggtgatagcatcatccatggtgagctggcggcgggtgcggacgcaaggcgcagcggcaaggacaaggttctgtgctcgctgggctgacgcggtctccgc

SEQ ID NO: 449117 - DNA, 122 bp, Homo sapiens
cccacacccaccctgggcctgacaagctcatcctgaacacgtgagaccggttttggggctcggggtcgagggaagggtgttgcctaccggccacagcctcctggagggcagtttgcttgtgt

SEQ ID NO: 449118 - DNA, 122 bp, Homo sapiens
cagactcttgagtgttggagggtgtctggagggcctggggacaagcaccgcctgcactcccgggagctcggccccgccccaccatggctcttggtgcaggtgcactggaaggaactgggtgg

SEQ ID NO: 449119 - DNA, 122 bp, Homo sapiens
gtgatctctaaggagggaggcagcgcattgcagggttagcaaacctttagaagatcctcccggtgttcttcctcccgctcctgccctgcccatagcagaaatcaacaacacgtgggcactga

SEQ ID NO: 449120 - DNA, 122 bp, Homo sapiens
gcggcagctcatcctcctcctcctcttcttcctcctcgtcttgttcctctgtcttgatcacgatcccctctgctccagggacagagagagaaagtcgttagctgctgcctggcgcccctaac

SEQ ID NO: 449121 - DNA, 122 bp, Homo sapiens
gctggcttcacccagtggatcccgcaccagggctgccggtggagctgcgtgccagtcctgcgccctgcgtccgcactcctcagcccttgggtggtcgatgggactgggcgccgtggagcagg

SEQ ID NO: 449122 - DNA, 122 bp, Homo sapiens
tagctctgctctgccaggaacagtactgttcagtaaagatgccatctaacaccacctgctcgcccttaaaagaaataaaagaaaaagaaagaaaggggcgggtgcggtggctcacgcctgta

SEQ ID NO: 449123 - DNA, 122 bp, Homo sapiens
agcttctgccccatcgtccgcacccagggcaccatctccgtaacggcgaggccgagactgcgctactggctgaggcagaggtcaaggcgaccccccatccacacctcgcgtccccgccccac

SEQ ID NO: 449124 - DNA, 122 bp, Homo sapiens
aaatacaaaaggtagccgggcgtgggtggtgcgtgtctgtaatgacagccagtcgaggcgcggaggcaggagaatcacttgaatctggaggtggagattgcagtgagccaagatcgcgacac

SEQ ID NO: 449125 - DNA, 122 bp, Homo sapiens
gagtctgtgagggatcttcaagccctgaagttcttagcttgagaacctggtataaacttgcgtgctaaggagctacagagaggcaaaagttcagttcccatcctcaaacagctcttagtctg

SEQ ID NO: 449126 - DNA, 122 bp, Homo sapiens
aggaaggcggggcgcggcagggcaggttcaagcatcacccccctctggccttcctgcaggcggccgcatcgaccatggtcatcatgagggtgtggcttaccaggcactcactgaggcggtca

SEQ ID NO: 449127 - DNA, 122 bp, Homo sapiens
tagagccagggctgcccagcgacgtgctcttcaccagcacctgcgccttcccgtccagcacgctgcctgcacgccgccagcaccagcacccccacccgcccgtcggccccggtgccacccct

SEQ ID NO: 449128 - DNA, 122 bp, Homo sapiens
aattcggtaggtgaatcccatgattacgccaggattctgctgggaacaatgtcctggccacgatgcaacaagacagagtgtgagcagagcatggctgtcacactgaccggggaggcatggaa

SEQ ID NO: 449129 - DNA, 122 bp, Homo sapiens
ggcattttaaaaataatgtgaatggtgtatccctttgtgatcatcatcactttttccctgcgagtcccaatcaatgcgggtgtgactgctgtatgaagtctcaggaagcccaccccagtgga

SEQ ID NO: 449130 - DNA, 122 bp, Homo sapiens
tcatttagctctacccactgtagcagccgcctcagtgcgtctcaggctattggcttgatccgaaggcctcatccgtcttggatgccacacaggagcccacaagactgtccctcaggctactg

SEQ ID NO: 449131 - DNA, 122 bp, Homo sapiens
accaacgcctgatccagaaaccttgccatccttcgcgacaggaacggagggccaggacagcgagacgcgctcagcgaggcccctcccccacgaccccccatctctatagttaccagctaagg

SEQ ID NO: 449132 - DNA, 122 bp, Homo sapiens
tagagactcactgactcatgcgtgtgtggtaggaatcttccaggaagtccccgtcccgttcgccctctctgcctgggcggggacggcaactgcctctgtcactgcagactaatgggacggag

SEQ ID NO: 449133 - DNA, 122 bp, Homo sapiens
atccacacattaaaactgatttccactgctgatttatacattatctagttgtttaaaaatcgcaatcaacatcccaacatctttttaagagtacaatgggcaaagatcaaagacagataaat

SEQ ID NO: 449134 - DNA, 122 bp, Homo sapiens
cgcgcacgccgccgccgcgcagcaagagcagcgcggacccctagtgaccccagcgtcccccgccccagccagctgattggatgctggctgggacctcggagagcagacacagccccatggcc

SEQ ID NO: 449135 - DNA, 122 bp, Homo sapiens
cctgctgtctattgaggtgtcttcttgtttgcctcaggcctcagtggtaaactgaccagccgaggagtttgtgtctgcatcagtactgcttttgaggggaacctattggattcctattttgt

SEQ ID NO: 449136 - DNA, 122 bp, Homo sapiens
cacctcccacctgctgggggacgccgggagcccctacctcattggctttgtgagtagccccggggtggggctggccagggcaggctgggggactgcaggagggctctgccctgacatccacc

SEQ ID NO: 449137 - DNA, 122 bp, Homo sapiens
gcgtgacctcgaacatgaggcccagccccagggcgagggcccagcggaggatctggcaggcgggagccatagaggccacgtgtccacatgtctctccccagccccggctgccggcagccccc

SEQ ID NO: 449138 - DNA, 122 bp, Homo sapiens
tcagcgcccccacatccttccctgccccaccaggaggcgattcttgcgtctcaggtagcgcgaaggggctaaaccacccaccattgtggagaagggagttgctctaggccgggagaccgggc

SEQ ID NO: 449139 - DNA, 122 bp, Homo sapiens
tctgagctgggactgggacccagagtcctcagtcaggctcttccctccgaggtggggaggcgagcccggggatccgcacctgcccaggtggactccgctgctgcgtggcgcctgccctggga

SEQ ID NO: 449140 - DNA, 122 bp, Homo sapiens
gagggcgtctcggggaggccagggacaggtctgcgacgaagtccagcaccgtagtgtccacgcagctctccggataggccgccatcgcttcggcttggccctgcctctcatcggttttccgc

SEQ ID NO: 449141 - DNA, 122 bp, Homo sapiens
tgcgtgctcaggaaaagaagccacgcacaagagaccgcacgcggcgtggatacagtgacacgaaacacccaaaatctcttttgaaagggaaaccaggcacagtggctcatgcctataatccc

SEQ ID NO: 449142 - DNA, 122 bp, Homo sapiens
caattacttcaagtgtgtcctgaacttttcttctatgtgctttttgctctacctggaatccggtggaatctctcaaaagcctgttcttccctccaggccctgtcagaggtagcctcctgctt

SEQ ID NO: 449143 - DNA, 122 bp, Homo sapiens
cccacccgcctcagacctgggctgggtagtccaggatccactgctccctcggcttctcttcgtaggtcaccacggcctctgggatttcgtgccggagggtagagcacattcggtccagcact

SEQ ID NO: 449144 - DNA, 122 bp, Homo sapiens
tctcccagtcctggttaggatctgtgcctgaggccttttgtggggagttggggtgggggccggagaacatctcaatctgatctcaggagagataaagacacaggagtgagaactgccagttc

SEQ ID NO: 449145 - DNA, 122 bp, Homo sapiens
agaatgattctgtctagattttatacgaagatactacgttttctacccttggcctgaaagcgcttgaaatctccacatgcaaattccacaaaaagagtgtatcaaatgtgctctgtctaaag

SEQ ID NO: 449146 - DNA, 122 bp, Homo sapiens
ccagagcctgaaggcaccacgtgtcagcctttcccagactctcaggggcggggagagagacgaatacccacaggcccagtacttcgttggttggtggcttcctccagtcccgcccatactgg

SEQ ID NO: 449147 - DNA, 122 bp, Homo sapiens
agccctgggggagtcactaccattgcagccctacccagaggtcctgggtccaccctccctcgccaatcctccccagggttccagagatggccaccagcctcggctctcccacgtctacaccc

SEQ ID NO: 449148 - DNA, 122 bp, Homo sapiens
agtgtgtgtgtgtgtgtgtgtgtgtgtgtgtgtgtgtgtgtgtctgtgtgtgtatgtggtcgttggagagagacccaggctattccatatcgctgaagagatccgtttcttccttatctcac

SEQ ID NO: 449149 - DNA, 122 bp, Homo sapiens
cctgtcgccgtgagccgccttctgccagctgtggaggccccggggcctcggtgccacccgcgggggctgagccactgtgtcgccctcgtccccgctgctgctgctctctccgtgctcggggt

SEQ ID NO: 449150 - DNA, 122 bp, Homo sapiens
aatgatataaaagtattgtaggaccgctgcgaggtcaatttctttgcgctcggggttggtcggagggaaaaacaggaagcggaaaggctgcgaacgcaaagcagtgtgggttgattctgagg

SEQ ID NO: 449151 - DNA, 122 bp, Homo sapiens
gagaactcctgcacctgggtcagggtctcagccacggacaaggggcgtggctctgcagagcgaagcagcagctccacccgttcgcagggagggagggggcggaggtggcctcactgcctgag

SEQ ID NO: 449152 - DNA, 122 bp, Homo sapiens
aggtgtgtctactgatgcctgtgtgaagtggtgtgtggatgtgcacgggagcgtgtgtgccgcgctgtgctcaggtgtgtacaggtgtctaatgatacgtatgtctgcgtgcatgtatctgt

SEQ ID NO: 449153 - DNA, 122 bp, Homo sapiens
acctggcccagcacagcgggatttccagtacccgctgcaccctcagcgctgagcaggtgccgctcacctggccacagccggctcttcactgcgtgccccgcccgaggaagaccgacgctgtc

SEQ ID NO: 449154 - DNA, 122 bp, Homo sapiens
caattcccttcacatctttttcttgttccctttcctcatcacccgttcatccccgggtcccgcccctccaggatggcgaaggcgagagccaacccaggatcttggaggcccgtgagcaagcg

SEQ ID NO: 449155 - DNA, 122 bp, Homo sapiens
aggcctttcatggaccgatactcctgccgtttgcgaagggcctcccgccgggccctcaggcgccgttcccgctccagttgttccccgtagtgggcctggtagaaggcgtcaaagttgaacat

SEQ ID NO: 449156 - DNA, 122 bp, Homo sapiens
ccttcctcggcaacctttctagcttgaattgtactgtgactccttctcacggaccactcccggagactggtgaaagttgggcccattcttgaagcctctgcttctaaatcatgttttccata

SEQ ID NO: 449157 - DNA, 122 bp, Homo sapiens
ggcacgtccgtgcaggccctcgccacgttcctggtgaacgggcctgtgacacagccccgccgtccgcatcagttctgaggctgttcacgtgcactgcgagaaaacccacccttcttgcatgc

SEQ ID NO: 449158 - DNA, 122 bp, Homo sapiens
cctgggtgccaaccagcctaacccgccggggccaccaaacagaagtgcttctgacattaacgcgacacacagaaggtgtgtagggtgggtagtggaagtgaccgcagaggcctctggggatt

SEQ ID NO: 449159 - DNA, 122 bp, Homo sapiens
gtaggctcactcaggagcagctcctagctccccactccgccacggccctgcgggaaacagcggaggtagagatgtggtggtaaagcagaagtgtgagaagctacagtcattttccttagggt

SEQ ID NO: 449160 - DNA, 122 bp, Homo sapiens
aaaggtactgagccaagctgtcaagggcgatttcacagaaacccacgggcccagattctccggggcatgaggggtatttcaaattctggctgccaggttatttttggatctactgtctgcaa

SEQ ID NO: 449161 - DNA, 122 bp, Homo sapiens
cggccttcccgcgtaaaccccggcctcccggagccaaaaccttcaggaaggcatgaatgtcgccacattgcccttttggagggaggccctgcctccgagaagaggcgtagggcccaacgtat

SEQ ID NO: 449162 - DNA, 122 bp, Homo sapiens
catgcgcgccctcggcagctgtctttccttattagccctttgctctcctcaagcgcgacccggaccccgaacgctggacgcctcaactgcgaccctcactccacacttctcaccttgcgccc

SEQ ID NO: 449163 - DNA, 122 bp, Homo sapiens
cccttcccgctttcacactgcaggcagctaagtcgccgagaaaggcagcaacttgacgcccgaccccgccacccaaacccgctcgctctgcgaccccagagcagccggcgccaacccgtccc

SEQ ID NO: 449164 - DNA, 122 bp, Homo sapiens
ctctttactgatcttcaagtactctgccacagggcaggcaagcagcgagtcaaatgcctgcgcatatggagctgctcctgcttttgaaggactatctccatatccacggtgcatgtcagagg

SEQ ID NO: 449165 - DNA, 122 bp, Homo sapiens
aacctttaaaactcactgagatacatatatgactaaaaaaaatacctgcaggaatgggttcggaaatggtggattttggaacttgttaatacttgtgattgacaggtcagtgggatccattg

SEQ ID NO: 449166 - DNA, 122 bp, Homo sapiens
tttcctatgctatataaattcctcaacctgacttctgaagtgctccacaaactgctcccccgcaccatatagtccaatctcagcttatgtttctctctacatcaaacagagggagagtttcc

SEQ ID NO: 449167 - DNA, 122 bp, Homo sapiens
tcacgccgaggtcacacccatagtgatgcatttgtgacacccatccgctggcggtcaaaccgagtgtcccccagccatgtgcacaccactgctgatggtcacacacatacccttcgccctcc

SEQ ID NO: 449168 - DNA, 122 bp, Homo sapiens
cagagccaggtgcagggaaccggctctgcgggagcgtgggtaaaagctgacgcgctctcgcgagttcccacttagggaacttaaaggagagttttaatttgtcctccctgccgttcgggggc

SEQ ID NO: 449169 - DNA, 122 bp, Homo sapiens
aatgtagtgacagccaagaaggatattttgaagtttgaaatgatccctatataaatagaacggatcagcataactttgggataaaattagccgacagtttgtggactctccagcatgcgcct

SEQ ID NO: 449170 - DNA, 122 bp, Homo sapiens
ggatgctccactccatgtctcacgtgctgcccagcggccgcctgctctcagaaaggcttgcgtgaacccagctaccgcatctcgcccgcttcactgtgggcataaggcaaccatccccgccc

SEQ ID NO: 449171 - DNA, 122 bp, Homo sapiens
tgaggacatggccgaaccccggacactcgtgtgccgggagccaccacagctcaaggtgaccggcagcacccagctctgtgaccaagacagatgttcacacgtgggggcatcgtaagcgctac

SEQ ID NO: 449172 - DNA, 122 bp, Homo sapiens
cccgcccccgctccctgtctggtggcttcctacctcctcctttctggtctggctgcgaaacgctccactgagcttgagagggggcaggggggctacgcctctgccctcatcctcccacctct

SEQ ID NO: 449173 - DNA, 122 bp, Homo sapiens
cgaacaaagggcgcaggatttaacctcggctctctgggcgtgcctttgcaggccctcgtgcgctctgctggggaaaagaaaaaaagcttctgccaatgccagtgcagctgtgtgtccgctgt

SEQ ID NO: 449174 - DNA, 122 bp, Homo sapiens
acttcaagagttaaaaaaaattactaaatggaaaagtcagctctcaaagggacagttccccgagcccaacccctttctagcttcacatccttccaggaagatttcatgggtggtttagctct

SEQ ID NO: 449175 - DNA, 122 bp, Homo sapiens
ccgccctgcggcttgtcctcataatacttaggcatgacggcgcttcccctccgatgcggacgcgactttctcccaccgcaacacttgcaaccgggtcgggagcgagcgaggccccagtctca

SEQ ID NO: 449176 - DNA, 122 bp, Homo sapiens
ataagtgacgcaacactcgttgcataaatttgcgctccgccagcccggagcatttaggggcggttggctttgttgggtgagcttgtttgtgtccctgtgggtggacgtggttggtgattggc

SEQ ID NO: 449177 - DNA, 122 bp, Homo sapiens
tggccactagtattctctaacactctgatgtcaggcatggcctcagtcctgagccacatccgtgggtggatttttgcccctctcctcactccagatcttccacgcttgtgttgtaattattg

SEQ ID NO: 449178 - DNA, 122 bp, Homo sapiens
tcttcagcagcggggtgtccaggctgaccggcaggttggcgcaggtggagcacttgacgtcgttgttgctccgggaggccttcaccgcctgctcgctgatggtgttgtaggcctccaggaag

SEQ ID NO: 449179 - DNA, 122 bp, Homo sapiens
gaggcaccccttgcactaaggccagctcctccactctgcagtagcactatgggcacctgtcggggcgcagtgaccttccccaccccgtgccccgtggcatccccccgccccccacctatgct

SEQ ID NO: 449180 - DNA, 122 bp, Homo sapiens
tttttgagacagaacctcactcagttgcccaacccagggtataatggcatgatcacagctcgctgcagcctggggcttaagcgattctccctccttagccacctgagtagctaagacacagg

SEQ ID NO: 449181 - DNA, 122 bp, Homo sapiens
caccccccggaaatccgggagagggcgggcagccccggaggcgggcgggggtccgggcaccgcctcctggtccctgacacattccagatgcctgggccgactcgaagcccttataaggcgcg

SEQ ID NO: 449182 - DNA, 122 bp, Homo sapiens
aggcacttccgtgttccccacatttgaatttgctcccgattcgagagaggcaggcatccgcggcagcagcttccaacccagacaggcttaagccgcgcgagggtgcccgggtgggtggctgc

SEQ ID NO: 449183 - DNA, 122 bp, Homo sapiens
gtgacatccgattcaaaggtttactgttgcctcttacagtctcccttcactccaaaaccacgcacttctgtgcgctcactatgagaagctgtgtttactcgctccgtgctcgtcacaggaaa

SEQ ID NO: 449184 - DNA, 122 bp, Homo sapiens
agaaacttccctgggggaaatgcttgttcaaatagagaacacgcagaagatgcacttcaccggcctcctctggctgctgagcccgtactctctctttggctcaggctaggcctcttcttctc

SEQ ID NO: 449185 - DNA, 122 bp, Homo sapiens
gctctgcgagactgccttcttgcagcttccaagaggaggcacggaggttcccgggctggacgccctgcagggaggggacatacttcagctgctctaccaggagccacacgatcagggcagaa

SEQ ID NO: 449186 - DNA, 122 bp, Homo sapiens
ggtccacggctgtctgtgtgtgtccttattttcccctgtgtgcccatgaagctctgtttgcgactgtgcgtgggtaggcggccgtccatctgtgcgacctcactttcccggctgtacgggtg

SEQ ID NO: 449187 - DNA, 122 bp, Homo sapiens
tcacccacctcccaaatcagggctttttgacctcgaaagggtctgagattcggactctgtcggtctggtctgggaatctacactctaagttaaagtgtcccaatggattctgctgcaggggt

SEQ ID NO: 449188 - DNA, 122 bp, Homo sapiens
tctaaactgacgtagaggagagaagagaaagatttcactctgacccataagtggctggagcggaaagatggcttcggacatttcccgtgtttcagacgctgctcctcctcctcctcctcctc

SEQ ID NO: 449189 - DNA, 122 bp, Homo sapiens
taaagtgggaccgtatttgcaggcgctgagaaactttctcaacagtaagaaccaatcaggcgcagtgcgcaggcgccttcagtgggtcctgggtccgcctcttccgcccggtgcgggcgccg

SEQ ID NO: 449190 - DNA, 122 bp, Homo sapiens
tttttaggtgggatgcaaactttcaatattatgactaattttttccctcttaatggtacacgttctgcctaagtagcctagacgctcccgtgcgcccggggcgggtaggcctggccgaaaat

SEQ ID NO: 449191 - DNA, 122 bp, Homo sapiens
ggcccctccgagctcggcctgtcctgggggtggaggaggaagttcgccccgcgcctgcctcgcaaccgcagccgcctccgtgcgcttcctgcccgcgccgccctccacactgcgctccgtgt

SEQ ID NO: 449192 - DNA, 122 bp, Homo sapiens
ttggtattgttttttttctctttttcttttctttattttttggcccgggggcagcagcggcgaagcgcccactgcctgcctctttcctcagctctgcggccgtcaggctctttctctagtct

SEQ ID NO: 449193 - DNA, 122 bp, Homo sapiens
gaagagaaggggcgggggctgccggagggaaatgggaactgatgcttccctgccggagcgcgcttgttcaatgttaagatctttgacaattcttcctgcggagagttcagatctgatagcga

SEQ ID NO: 449194 - DNA, 122 bp, Homo sapiens
gccgccctggctgtctctccggctgcttagcgctttgctggggccgaggtggagactgcgcgctgggtgggaatgcaggatggctgcccggcacagccacacaggctccccaggcggccatt

SEQ ID NO: 449195 - DNA, 122 bp, Homo sapiens
gttgtcagttgggatcagctgatcggagtgaacttctcccagctcggactaacaggaaggcgtgagcggtgcagcccagaaagggaggagcgagagagggaggatcccggcgccagcaaggg

SEQ ID NO: 449196 - DNA, 122 bp, Homo sapiens
gcattccttcacgggagcatcacaggggggcatggcagttttgaaacgcaagaagtctgtcgcctgctatctcaggctgaagctcacctcatgtgaatgattgagccatggagtggaattaa

SEQ ID NO: 449197 - DNA, 122 bp, Homo sapiens
tgtaaaagggatatgggagtaggagatgcagaggattgtggtttaaaaaggaagataactcgaggtcacacctcacttgtatttcagtaagcttttactgcacttgattaaaccaagttgct

SEQ ID NO: 449198 - DNA, 122 bp, Homo sapiens
aaacattgtataaggtctgtaagtttggcagaataatggagctcaggcttttacagttaacgctaagtgacagttgacttctctttaggattgtatacattgtttgccttgattagtgcaga

SEQ ID NO: 449199 - DNA, 122 bp, Homo sapiens
agaagtcattctcactatctcacactggccgtcttgacccagagcagttctttactttctcgggacacaaacgggatgaaagtccagggctgggacttcctccttggaatgtttgacaagga

SEQ ID NO: 449200 - DNA, 122 bp, Homo sapiens
gtaccgccgcccggtgggcttctgggccctcaggcgggcgatctggcgctttttttctcccgacctcgccagaggtagggtgggaccgcgagcccggatcctcccggctccggacttcctgg

SEQ ID NO: 449201 - DNA, 122 bp, Homo sapiens
gcaacgcactcagtatgcggaccagtccagggttccggggacgcaggggtacaggtagagcgggggagggggttgttggggttggggtttgcaccacgcaggcacctgcctggcccagggga

SEQ ID NO: 449202 - DNA, 122 bp, Homo sapiens
agatgtcgttagatcatccagtttggtcccttaaatttgtgggtaagggaaaggaacttccggtcagtgcaagtgacttggtcaaggttatagagctagtcactgttagattaccagaacac

SEQ ID NO: 449203 - DNA, 122 bp, Homo sapiens
cggcgggagggccgccggaggaaacgctgtcactgtggaaacggtaatgctgtcaggcgacgcgcaggaggcgggggccgaggccgggcggcccttcgcggaccctccgagctcatagtctt

SEQ ID NO: 449204 - DNA, 122 bp, Homo sapiens
ttgaggccataatctatgtaaagtccttaaaacacacctagaatatagtgtccattagaccggaaggaaataacaatagtaatgatgacaataatcataatttatgttggcctataaacttt

SEQ ID NO: 449205 - DNA, 122 bp, Homo sapiens
acaggagaatttaaatgagtttctctccgctcttggctctctcttctattctttctcaagcggttctttgcaggaaacccagagaggtctccgtagggcacaggcctcccctggaatgcctt

SEQ ID NO: 449206 - DNA, 122 bp, Homo sapiens
agtcttcaaagtgcagattgtaggctcagcacccttcatggtggtgagccgtcctctctccggtctgcccttttttttttttttttttttttttgagagacagagtctcattctgtcaccca

SEQ ID NO: 449207 - DNA, 122 bp, Homo sapiens
cgtctcagacgatgggcggcggggcagagacgctcctcacttcctagatgggttggtggccgggaagaggcgctcctcacttcctagatgggatggcggccgggcagagacgctcctcactt

SEQ ID NO: 449208 - DNA, 122 bp, Homo sapiens
gcgggtccaggccgctctcccccggggcagggtgggcactcactgggtccgcttcacctccgcgctggcgatggcactgatgaatggcaccaccctgccatagtgtaggaagagccgcacca

SEQ ID NO: 449209 - DNA, 122 bp, Homo sapiens
ctactcttctcaatctggtctgagctaccattattcccagaccagaatactatagtattccgtattttgactggcttctctgtttctggccttgctctcttgctcgagcttcacagagtgtc

SEQ ID NO: 449210 - DNA, 122 bp, Homo sapiens
gctctttcttttctgcttattaatagctctgattaaattatctctgaaaaacctacgtggcgtgcaccaatgggggctgggctccctccgggctctggcctagatcacagcaatgagggcag

SEQ ID NO: 449211 - DNA, 122 bp, Homo sapiens
cgaagcgggctcggaagactagggctcctcaggtagtagaatgcagcggccggcagatggcgtcacagcggcggaggccatggccctgcgcaagcgcattcggcgatgccagggagggcgaa

SEQ ID NO: 449212 - DNA, 122 bp, Homo sapiens
tgtgactcatctgcttggatacctccagtccccaaactgtgttccaggagttttcttggccgaagctgcccgatgtttgagccttttcttcccagagaagaagatggactgaaagctgccag

SEQ ID NO: 449213 - DNA, 122 bp, Homo sapiens
taatcttgcaactgaaagggatcatagagacccaggtcttcaagttgaagggaaacttgccgagggccacacaggcactcagaggcaggcccagatttgactgttctctctccaagtccatt

SEQ ID NO: 449214 - DNA, 122 bp, Homo sapiens
tggttaccatgcagccagagaaaaggattccaaagccggggcacacttggggggacagggcgcctaagccttggcagttcctctcgtctacagcaaagcatgaagtcatgtctgctccccat

SEQ ID NO: 449215 - DNA, 122 bp, Homo sapiens
aggggcgtccatgtggcggaatggatttatggtttggggctgatcagtgggtcttatggccgagtctctctggttagtggagacagcttaccaggcctgggatctggggagtttggaggtgc

SEQ ID NO: 449216 - DNA, 122 bp, Homo sapiens
aagagacagagtgccttcaggactgcagagaaccaagttttgacagttcctgggctctcccgaacactgtcatccacaactatagattgacgcgtgtcaatcaaagcgaaaccaggctgtgg

SEQ ID NO: 449217 - DNA, 122 bp, Homo sapiens
ttgaccgtaactgccagagccctgccctgaattcctgtccttactccctctttaagattgcgtacccactgcagagtgctgaagacggggtagccacgaggtgagaggctctctggtgtagg

SEQ ID NO: 449218 - DNA, 122 bp, Homo sapiens
cagtgggtttgcccccttggtctggtgccccttcgcgagcgaggccctgggatgccggtgcgagggtgtgagtagtccctttgtgcgcaaccccccgctgcccgtgcctcggccggtgcgtg

SEQ ID NO: 449219 - DNA, 122 bp, Homo sapiens
ttttgaccctcacaacaaacatgtgccactgagtattttactgaatcagtggctcaggttcgttgcaaggattaaggagacaacatttgtagactctttgggaacctagaaaaaaacaaaga

SEQ ID NO: 449220 - DNA, 122 bp, Homo sapiens
caggcctggcttcccccctgcttatgaggggctcacttcaggagcactgagcctgtctaccggccccgtggccctgcccgggggtgcgatgcagatccaggtcctgagaagagatgggccgg

SEQ ID NO: 449221 - DNA, 122 bp, Homo sapiens
gtcccttcagatagttgatttggctgacctgacccaactagtggacagttgtaaatctaccgttgtctggatgctggaggccttagagggcctgtcgggccaagagctgacggaccacatgg

SEQ ID NO: 449222 - DNA, 122 bp, Homo sapiens
gggagcgactgcgggggatcccacatccctgcgcggctcttgcctcgggcagccccaccacgcccctcccagcacccagggtgtctcggccctgcccagccgggacccacctcgcaggccct

SEQ ID NO: 449223 - DNA, 122 bp, Homo sapiens
gcctctgcctgtttcctgcctagggggctgttgggccagccacgggcttgtggggcagtccgcggccttgctggtccatgtcacctctgaccctgagcatgcatatccctggctggggctca

SEQ ID NO: 449224 - DNA, 122 bp, Homo sapiens
tggcagtatacaccgaggcctccccagctaaactctgagctctttgagggcaggtgctgacggctgatcctgatcttcacagtatctggactcatcacacatcttagatgaatattcattga

SEQ ID NO: 449225 - DNA, 122 bp, Homo sapiens
actaacagcaacccacacctcaaaatgaaattcaccagcatttcccttcaccccactcagcgtgtgtcactcacagcagcccaagagatactaatgccggttagatgagaggataacctact

SEQ ID NO: 449226 - DNA, 122 bp, Homo sapiens
gcctgtaacagtgctcggatctcttccaccttagagtcacttttctttcatagggcttcacgtgaacttggagttgctgttctcactttccttcttttgctcagtccttcattgtcttctgg

SEQ ID NO: 449227 - DNA, 122 bp, Homo sapiens
caatacagcaacagcaacgaggacaaacatgccacacggtgggtccaagtctgaactgcccggggctaagtcagtcaccgcacaatcgagtatggtgtagctccaaagaatggatcgggcga

SEQ ID NO: 449228 - DNA, 122 bp, Homo sapiens
actgcgaccgactgtttcgggtttcctgccttcacagtctgggttctttccaccacagcgcgatagaaccctgtcattgcaccagtaattgtttgctttctctggacttgttttgggaccct

SEQ ID NO: 449229 - DNA, 122 bp, Homo sapiens
ctgtgggcgtggcttgtactggatcctccccggggcgtggctaaaacaagaccgaggtcccgggacgaggttgggggcgtggtctttcgcgcaatcctccaacgcccaattaccctgataaa

SEQ ID NO: 449230 - DNA, 122 bp, Homo sapiens
ttcgcatccgttcagtgtctgcgcgccctcgctggttctggtccagctccgcgtgccccccggccccattcggccctcgccgccctggcctgtgccctcttggtgcccgcgtgcgtgttggt

SEQ ID NO: 449231 - DNA, 122 bp, Homo sapiens
tctccctttgtttctctctctcccttttttcttttcagtgcagaagtttttaattttgaccgagccaaatctatcaatctaggcctggcgccgcgtcagcagagggggcggggaggcgagcg

SEQ ID NO: 449232 - DNA, 122 bp, Homo sapiens
gacggttcccgactttcctcctcagggagtggcagccgcgccgtgtgcgcctggaaactccgacagcaggaggcaccttaaagtggaaggggcgacgtggcttcatttcaggagtttctttt

SEQ ID NO: 449233 - DNA, 122 bp, Homo sapiens
tgcccttctcccgggcgtgggcgttgtttcggggcggcagccaggccagcggctgcagtccgcggctttcagcacccctcccttctctgtgccgggcttttcggccgaacgttctcgctcct

SEQ ID NO: 449234 - DNA, 122 bp, Homo sapiens
tttcttgaggtcctcggactggggggaggccgcctgggactcggagatccgctgggtggacgcggaggacgagccagcggagctacccggccccaacttccttcacacacacaacccatttg

SEQ ID NO: 449235 - DNA, 122 bp, Homo sapiens
caccactaactctggcctcacgcctgtgggccggccctgtctacggcactggccctcccccgccctggcaggcctgacctcacccctgaggtcacaatggttccagtgtccacagcatcctt

SEQ ID NO: 449236 - DNA, 122 bp, Homo sapiens
agggcacagaacgggctggctgccagtgttgggtccagcaccctgaggagtgtcatttgtcggagccacttttatgaaacagaagccctcttttgtgtatttgtacctgtgaaagggagcag

SEQ ID NO: 449237 - DNA, 122 bp, Homo sapiens
agtcctcccagccgagtcgggccagtgctcgccactggggactcggcctcccacgcctggcgccatgagccagcggaggaccccaacagcgccgcaccaacaccctcatcgcctcggccgcc

SEQ ID NO: 449238 - DNA, 122 bp, Homo sapiens
gagcacccagccctccaagggccctatgagtcccgccccttagcaactgaagagagagggcgggaaaagcagctttcagcctattggaaaatgggttctcaccctagcagtggcgacaggaa

SEQ ID NO: 449239 - DNA, 122 bp, Homo sapiens
acccagctcaggccacccacccaccttcggtcctgaggcctggttgctctctgccggcttcgccctgacctgtttctgacctgtgttccctccgctgtgccagaacaggccccatgctgctc

SEQ ID NO: 449240 - DNA, 122 bp, Homo sapiens
tgctgctgtacagtttgtcgtacttgagactgtggcagatgtagcagtagcggttgatggcgatgccggtgatgttgaatatggagccgatgacgctcaggcccatcaggaacccactgact

SEQ ID NO: 449241 - DNA, 122 bp, Homo sapiens
gcgtcagctgagcccctccgggtgccaatgcatggggcggggtaagggcggggcagggggcggggcatggagtccttgacccacctcctccagagccaaattccacgggacgggaaggggcg

SEQ ID NO: 449242 - DNA, 122 bp, Homo sapiens
tcaattcaatacactcacacttctgctgtgctcccaggactacgagaagcgggtagggggcgactcccggcctctttcacttcgtaaaggccttcaactgggtctctcggtcaacccctcag

SEQ ID NO: 449243 - DNA, 122 bp, Homo sapiens
cccggccaacactgcgaaaccctgtctccaccaaaaaatacaaaaaccagtcaggcgtggcggcgcgcgcctgcaatcccaggcactcggcaggctgagggaggagaatcaggcagggaggt

SEQ ID NO: 449244 - DNA, 122 bp, Homo sapiens
agggttgggctgccctgggccggcacccatgctggagaaatgatcaggaccctggcttggcgtcattacattggaagccgggctggaaaccatccccagggaatcgtcctaatgaacacggg

SEQ ID NO: 449245 - DNA, 122 bp, Homo sapiens
tgccccgcccctccggccgcgcgccagcgggcggaagtgacgtgtgcccagagccatttccggcggcccgaaactaggaagaaacttggagctgttcaggcgatccagcctccaatcgctgc

SEQ ID NO: 449246 - DNA, 122 bp, Homo sapiens
gaaaacacctgtataaatagcacagtttttcagctgggtggggacctaggcatggaaccacggctttgacatgccctcggcagtcagtgattgacaggtcccgtgcctggttagcagggtcc

SEQ ID NO: 449247 - DNA, 122 bp, Homo sapiens
aaaccatactccaggcctccaggaggtgtttgtcgcgacaacacctgcagagggcccgtgcggagtcccttagtgagcggaccgaaaaccgccaccctggaaggatattggcatgccctagg

SEQ ID NO: 449248 - DNA, 122 bp, Homo sapiens
gaagtgagcggagggagggctgggagggccctgccagccggccgcgtgcgctcggggacgcgggtgcctctgagccccgttcggctgtgcccaccccggagtcacaggccagggggcgggca

SEQ ID NO: 449249 - DNA, 122 bp, Homo sapiens
cgcgcgtgagggggcggctggaaaggggcggctaaagtgccccagacgctcgcgctagttcgctcctgctcccgctccccttcgcgatcccctttcctggcagcgccttccttccctggccc

SEQ ID NO: 449250 - DNA, 122 bp, Homo sapiens
gcctggcaccccatgttttctgaatgtgtgaatgaaagaacccttcctctcagcaaacaccgcaggcctccctgcatgctttttgcatcacagctattccttaacttctctgtgatggcttt

SEQ ID NO: 449251 - DNA, 122 bp, Homo sapiens
gccttgcaccccgtcttcgtcccgccccgcgccgtggccccgcccacacgccgtcagcttcgcgtctgtcctcgccccgccctgcatcatcgccccgccctgcatcatcgccccgcccacac

SEQ ID NO: 449252 - DNA, 122 bp, Homo sapiens
ggcgacgcctgccgcaccttgcccgctgccgcgcccctcccgggcacccctcgccctcggcgcccctgcccccgcccccagtgccagggcggaggcagtcccggctcgcaggtaattattgc

SEQ ID NO: 449253 - DNA, 122 bp, Homo sapiens
acacttgaacttctggttccgatatttcctttttaggcgctccagagtccatttctcctgcgcagaccagccctcttgcgcattcaacaaaaccacgggcttgtaaggtctttcataccgct

SEQ ID NO: 449254 - DNA, 122 bp, Homo sapiens
gctcagggaccggggtcccagcgggggtcctgccccctgggccggaggctgagagcagggcggtccaggccctggtgttgctgacgtggcgggcgaaggggctctggggaccgcagtcctct

SEQ ID NO: 449255 - DNA, 122 bp, Homo sapiens
ttgccctgcacctacccaccagatcgccgccctggtgggcgctcctggccctgtcctccgcgcttagtttgtcattgggcgcccagatccggaaccccagcctcgaagcttccggtggccgg

SEQ ID NO: 449256 - DNA, 122 bp, Homo sapiens
ctccgcgagccgttgagccccgcaaaatttcaaaccgcgccacggggcgaagcctcgtcgcgattggcgtcgcgtcccgtcgctccaagaaaatccccgcccctcgggctgaagtcgcgggt

SEQ ID NO: 449257 - DNA, 122 bp, Homo sapiens
ctccaacctctttgctcagcccgggaggctcggctggctggggcgggcgtaaccgtggggcgaggcccgccggtctttctgatttccgcgggcggcgtgggcgctgaggcagccgcggtcag

SEQ ID NO: 449258 - DNA, 122 bp, Homo sapiens
acactcacaggcagtggctgaggtggggatgacagtcccgcacctgggtttcccaggccccgtgcctgtcctaggcctggagcagccggtctgcgactcaacgtcccacgtgggttggtggg

SEQ ID NO: 449259 - DNA, 122 bp, Homo sapiens
cagcgcaccctctgtagctgctggcccgggtgctacgcccctcactgcccgggccggcagcgcccgccggcctgagtgcagggcctgctgagcccacgcccacccggaactcgcgctggccc

SEQ ID NO: 449260 - DNA, 122 bp, Homo sapiens
cctgaactgagcagagatgtgaaaacttacttctttccgctttctcgaagcgctccaggacgcaggtggcacgctcaacgcggggaggcgccacctacaggacagaggaagacctgcagctt

SEQ ID NO: 449261 - DNA, 122 bp, Homo sapiens
actcgccggcgtgcaggatgagtgcctcgctgctcctggtgctgacggtcagctcatgctcggtggagttgaagacatccaggagcaggtgacactgccgggtactgcgttaaagaaaaaag

SEQ ID NO: 449262 - DNA, 122 bp, Homo sapiens
aagaggcggccctgagctggctcatgcgggccagtctcggcagggtggctgggcagggctcgcgaggccacggctcggagcccagaccggggcccaggaggcgagcgccgttttggagagga

SEQ ID NO: 449263 - DNA, 122 bp, Homo sapiens
ggggctcagacaacagtgggtgaaaacgagagggaaagggtcaatacagtggatctgacacgtgtagcactggtaattagttagggagcttattaaattgcagatgcccagacacatgccca

SEQ ID NO: 449264 - DNA, 122 bp, Homo sapiens
ctcaccactgatgacagccacgggacctgcacacaccaagagagacgcaggacctggtgacgtcacatccggccagtttccagccctgtccacagacaacccccaactactgttcccatcac

SEQ ID NO: 449265 - DNA, 122 bp, Homo sapiens
aggcctgggcccgccacccagtgggtctcgaaggtacagcgagtgatggcagcgctaacgcgcctgctatctagagactcagggtaaccaacatgtcgactcaaaccatccttcagcagcca

SEQ ID NO: 449266 - DNA, 122 bp, Homo sapiens
gcccagcccctgcccagctgtacctgtctcagctcatagacgtacaccttgcctcgctcacggccctcgttgaagtacatgggtgcgcccaccagcaggacatcagtcacgccgtcgccgtc

SEQ ID NO: 449267 - DNA, 122 bp, Homo sapiens
gaggctggaggggggcagtccagtctctcccagcagactcagttccccagtattgctctccgaaagtcccctgcaatccctccttggcttccctcttcctcctcctcttgttattacctgtt

SEQ ID NO: 449268 - DNA, 122 bp, Homo sapiens
ggcccacagccggatgtgggacaccgggaaaaagtggtcatagcacacatttttgcatcccggttgcagtgtgttgcagacgaagtcctcttgctcgtcaccccacacttcctgggcagcca

SEQ ID NO: 449269 - DNA, 122 bp, Homo sapiens
tgcctggctgctgtggtacttttcaagaacactattcttgcagttggtgaggggaagctacggttccatgagaatacctggtagggcaagaattgggtagagaaggaagtaaagtcaggagg

SEQ ID NO: 449270 - DNA, 122 bp, Homo sapiens
aggaatcttaagctccccattgccctggggtgttggtcccagctgccccatccctgcacgcggatgctgcaattacccaagagcacgaaacctggcttcccacctgactgagtcagctgaga

SEQ ID NO: 449271 - DNA, 122 bp, Homo sapiens
aagatgttgttactctgcttcagtgtcagctcttaattatacagagcacatggctgagaacgacaatgctctcttttaaccaaaagagaaaaaggaggatactgcagcagtgaaaggcatat

SEQ ID NO: 449272 - DNA, 122 bp, Homo sapiens
gcgggaagccacggaggggcaggtcagcctcggctaatctcagctcacacaagcaccccgcgatttcaggccaaaggaaggagagagctgctgtcagcagaatataggaaatcgggcaaaag

SEQ ID NO: 449273 - DNA, 122 bp, Homo sapiens
gtagcagggtattgcatgggattttatgttaatgatgttcaggggatgataattctcacccgggaaggaaatgatccattagttacactctcagtctgtgtcttaggccagcatgaagccat

SEQ ID NO: 449274 - DNA, 122 bp, Homo sapiens
cagtgggctcaggccagggaacgcaagctctctaggccgccattctacacacagaaaactcggtgcaaggtttacatatacctttttaaagtaacatttaaaattacttcctttaatataaa

SEQ ID NO: 449275 - DNA, 122 bp, Homo sapiens
caaagggcaatgcttctgcaaggtcctgaaaacctgaaccgggccacccaaagtattgaacgttctcatcagattgccacggagactgaccagattggctcagaaaccatagaagagctggg

SEQ ID NO: 449276 - DNA, 122 bp, Homo sapiens
attcctcctgtaacatggtccaatctcacgcttgttctgctttacaagaaagttgacccacgctggtgtcccctgaagaaatcacaggcacagaggagggacaggtggatttcagggctgtg

SEQ ID NO: 449277 - DNA, 122 bp, Homo sapiens
tacgctctttctccgcgaatgcggcgagcgagctggatgtctttgggcataatagtcactcgcttagcatggatggcgcaaaggtttgtgtcctcaaagagccctaccaagtaggcctcaca

SEQ ID NO: 449278 - DNA, 122 bp, Homo sapiens
aacacttcccctgcaacaggtagagaaacgggggcatatagctttcagcaaacctctcaccgtgtacactaatgatagagtttgccagccactcacagggtatcaaaatgcccagacattaa

SEQ ID NO: 449279 - DNA, 122 bp, Homo sapiens
tctgcatgggaaggaaaaggatggtagagaacatggacatcctgtctcccactgcaagggcgtggaacatggtaaggatacccagctgtgacaggacgtggcaaggcaacaagatgccttgt

SEQ ID NO: 449280 - DNA, 122 bp, Homo sapiens
ccctttaagcagatacaaaggctcggcttgttttgttacagttcattctattccgcgccgcggagcgcagcggccggcgacaggagacgcgcgcgcatgcgccccgcggccgccagccggcc

SEQ ID NO: 449281 - DNA, 122 bp, Homo sapiens
aaaagggcctttgagaaggacatgtccaggggcagacacgaaatccactgatacgcaaaacgaatgtaaacccttttctttcctcacatcttgtggcccttcacacctctgcagttcagagg

SEQ ID NO: 449282 - DNA, 122 bp, Homo sapiens
gtctgcttttgaggaaacccaaactaagacaatatcaagttgccaacatttattgagcaccgtctctgtgctaagcatcgtgctcagcatttcacaagtcttaactcatttaatcctatgac

SEQ ID NO: 449283 - DNA, 122 bp, Homo sapiens
ctccaggcctcgtgaggcacggcgccgccctcaccctcccctcaccttcgagtcataggccgactgtttgatgacctcgggtgccatccagaatggggtgcccacgaaggtgttccttttga

SEQ ID NO: 449284 - DNA, 122 bp, Homo sapiens
ctggggctcaatggaggcggggcccggccgctgtcaccgggcaggagagaacgttgcttacgtgcgcccggagtccattggccaaggcgggccacactcccgggtctggattgggtcgtggc

SEQ ID NO: 449285 - DNA, 122 bp, Homo sapiens
tcaagctttggcctcaagtgatccacccaccttggcctcccaaagtgctggaattacagacgtgagccactgtgcctggactaaattttttaggtatttgaatttttaaaaattagaataga

SEQ ID NO: 449286 - DNA, 122 bp, Homo sapiens
ctacaaacacttcctccgagttttaggaaaataatagcccttgcggtgccgcgatgagtccgcagagggtagggaatcttgggccgtgagagcgtggcgccgggagctgaccagttctgcat

SEQ ID NO: 449287 - DNA, 122 bp, Homo sapiens
gcagtgtttcttgtgtgttccccaggaaatcagcatctccatcacctggaacttgttagacgtgtactctctgctccaccctagtagcaccaaatcagaaactctggggctggagtccagaa

SEQ ID NO: 449288 - DNA, 122 bp, Homo sapiens
aaagatttctaggccccgccctcagagtttctgattcattagatctgggctgaggcctgacgatttgcatttttagtaagttctcaggtgattctgatgctggtggaccagcaaccacagtt

SEQ ID NO: 449289 - DNA, 122 bp, Homo sapiens
atgagttaatacatgtgaagtgtttagtaaagcaccagcatgtacaatgtgctcacagcccgcagagaactgcaagggcagggaccctttcagctgcacctcaactgtcactccctgtcttc

SEQ ID NO: 449290 - DNA, 122 bp, Homo sapiens
atcaactttgaaaattaaggtcctgtttagtcactggcaatcgcaccaccaaaacgccttcgggcattttgttcagccaacagggtgatagaggccgaagaggcccaggtctggctggctca

SEQ ID NO: 449291 - DNA, 122 bp, Homo sapiens
gtgtgggtgtgcacacgcatgtgtgggtgtgagtttacactgtcaatgtaaacccagctccgagggaagcagcgcgccaggcacgcagcccctctgagactagagagggaaagaagagttct

SEQ ID NO: 449292 - DNA, 122 bp, Homo sapiens
agacaacagggttctgtctccgctgccaccgtttctgatgaatgagatttgccaggtacacgcaaggcttttatttgttcttagcactgttctgttcgtgaaacgctacgtggaggtctttt

SEQ ID NO: 449293 - DNA, 122 bp, Homo sapiens
ttgaattaaatacagtgacttgaagaaggaagaactctacagagtctactctggcaacaccgggaacagaagcaacaggacattcagcttccagaaactgcagcggtgcagttccaatggtt

SEQ ID NO: 449294 - DNA, 122 bp, Homo sapiens
ttgaatggctgaaatacagtgtaaatgctggggtttattgtgttgacaatatgcagtcaccgtgcaatcaccatggctgccacatcccgaggacatcgtcactttcttgactacctagcttg

SEQ ID NO: 449295 - DNA, 122 bp, Homo sapiens
ggggcggggtggaggctgaggcagagcacacgcagagccagcgggccgggcaggagccagcgccatgcatccagccaaggagagggcaggtgagatcccggcggcacatcaggccccacagt

SEQ ID NO: 449296 - DNA, 122 bp, Homo sapiens
ctgaaaacagacgtttctgcggtacccgcaccctgggctgggtaaatattttaaaagaatcgcgatgaacagtgtgttttggatcgaatggggcattggctgcggtgaaactgtaaattaag

SEQ ID NO: 449297 - DNA, 122 bp, Homo sapiens
gatccggggacgtgacgacgactgtgttgcagatggtgagtgcgatgaagaaatcaaagacgtcagacagctcaggcgagaggtgggccagcaggtgctcctgatgcctcgccacggctagg

SEQ ID NO: 449298 - DNA, 122 bp, Homo sapiens
tggcgggggggggggggggagcggctctggccccctctgcgttctggtgacgttcctccgcgggggtggctcggcctccaagcccagacaactttctcgcaccagctgcaggcagccccggc

SEQ ID NO: 449299 - DNA, 122 bp, Homo sapiens
caagggagaaggggagggaacaggactcccttcttttccctccttccttcctgtaggcctcgactacacaccacactgccagggaacccaacaagtggcctgcagtcctccacttctgagca

SEQ ID NO: 449300 - DNA, 122 bp, Homo sapiens
tcctatctattggaggaggaggctcaggtataaacccccgtttcctctgttatttcggcccggtgatattagggtggagggaagaggaggtgataaggcaggtgacattttctcctccttgc

SEQ ID NO: 449301 - DNA, 122 bp, Homo sapiens
accacttcttccatcacctgcatgtggtgatgcagagaaacgttgttgaagaactgcctgcgggccaggagggaagggacagagggtcacggtgacgcccccgggctgggcaggcggagcag

SEQ ID NO: 449302 - DNA, 122 bp, Homo sapiens
ggcagccaatcggggagcgctgagtctctgtccagccaatgagaagccaggttgttttagcgcctcgcccctcctctccggtccgcgagccttgggtatctccagcttttttccgccagagc

SEQ ID NO: 449303 - DNA, 122 bp, Homo sapiens
caacaccgaggtggccatcgcgcagggaccaccgactccgccgccgtccctagaccgaggcgacactgccccccgccgctcagctccgtctcctgcccccgcccgaggtccggacttgtcta

SEQ ID NO: 449304 - DNA, 122 bp, Homo sapiens
ttagctgcctccccgcagggcagggctcgggacctgcagcccgccatgcctgagcctccccgccctgccctgggctcctgcacagcccgagcctccctgatgagcgccgcttcctgctccaa

SEQ ID NO: 449305 - DNA, 122 bp, Homo sapiens
aaggaaaacaattcaatgttatgtataaaaaacacactatgactattaagaccatgtgtacgaaatggctaagtttattcaacatctcggatattcatctggatattgggtttgttttgtga

SEQ ID NO: 449306 - DNA, 122 bp, Homo sapiens
tggccactcacagctgtagccaggaggaagtggaagggcaggaactcaagccgtgttactcggtcacagcggcggatacagtggagctcaatgccctgattgtcatagatgtggagccagcg

SEQ ID NO: 449307 - DNA, 122 bp, Homo sapiens
tggttttttttttttttttttcaggtgttccaacgccaagccaagaaattctgcggcacacgctgaacacgctggtacgggagaggaagatctacccaactccagatggctacttcatcgtg

SEQ ID NO: 449308 - DNA, 122 bp, Homo sapiens
tgtattcatgtgtctgagcatgcgtgtgtgtgcgtgcatgtgtgagtgagcatgagtgtgcgtgcatatgcttgcatgtgtgttagtgtgtatccgtgcacgcgtgtgtatgcatgcgtgtg

SEQ ID NO: 449309 - DNA, 122 bp, Homo sapiens
acaggagctgggggcggggaggggcagccgctgcaggtggacggagcgcgctcgagggcccggccacccccgctcccgcgccctggaattccagtccgcgctttcgggcccgcctgccgctc

SEQ ID NO: 449310 - DNA, 122 bp, Homo sapiens
cgctgcaggtagtgctgagttgctccaggtaagctcctcctctcaaaaagctctaggaaccgagccaccctcgccctaggagcaacgcccctgagtaatatggggtttcgtcggatttctgc

SEQ ID NO: 449311 - DNA, 122 bp, Homo sapiens
ctgcaggctctggtatgttcagacgcagttcctggaggagaggccctgctggctctgagccgggaacccgccacgacgtgcaaagtcgagattgcaaagacagcgcaggtcacacatcctgc

SEQ ID NO: 449312 - DNA, 122 bp, Homo sapiens
gtgtggttgtaactaaactactggctaattaccacgatcgtgggaagtgtcccaggtcggcgctatgagcttctgccactagggggaaccagggctatttctctgcaggctccaggctgtga

SEQ ID NO: 449313 - DNA, 122 bp, Homo sapiens
ccctgagcagtgaaaggaaatactttgacagatttccaagaactttccaggaaaacggggcggggccccgcgagctgaccaatcgcgacgctgaaggtggagccgagcggtcggggagggcc

SEQ ID NO: 449314 - DNA, 122 bp, Homo sapiens
atttacattaccttctcttattcatatccattccatacccacaccaacttggataccatacggacataataaaaaaccaaccatatcaccaggtatttatcttacccatattcggttggaaa

SEQ ID NO: 449315 - DNA, 122 bp, Homo sapiens
ttcaagtgatcctcccgccttggccaaagtgctgggattacaggcatgagccaccatgcccggccctgtcatacagttttagaggctgggagctagaagggttgaccaggatggcagcctgt

SEQ ID NO: 449316 - DNA, 122 bp, Homo sapiens
ttagatgtttggagtgccaaacacactttccccatacaaattgagttacagatggtggttcgttatccagtccagataccaaatggctgtgtagacaaaatccaggtgaacgatgatcttaa

SEQ ID NO: 449317 - DNA, 122 bp, Homo sapiens
gaattgcgtgggtccagaggaagttatacaggctcagggcctacacccctttgagtgcagcgcctgcagttggaagaatgcgcatctgcggagctggtgcccgccgtcaggtggtcggcagc

SEQ ID NO: 449318 - DNA, 122 bp, Homo sapiens
acatggggccggtgaaacctgaggccagcgccccgtggccaggcagcagcgtgtgcatgtcgccggctgtgcccacggcgtggctgcggagcacgtggatggcctcgtccaggtggtcttct

SEQ ID NO: 449319 - DNA, 122 bp, Homo sapiens
tgagaaatatgggatctctgtcttcttgcactcccttggagctaatggtgtgatgtgagccgagaacagttggggctttagtattagacatatagtacttggcttagaattgggctttgtta

SEQ ID NO: 449320 - DNA, 122 bp, Homo sapiens
gtctcggcgaggcccagtagccgacggggctggtcggctgaagcgggcggtgctcgggggcgccggagcagaactctgggctcggccgcttcctcctccacccgccctcttgtctgagggac

SEQ ID NO: 449321 - DNA, 122 bp, Homo sapiens
gggccctcgggcttggagggctgggccgggcggggaacgggcggggcgggccggaggcggcggcggctgactcgccttctctccggggctgcgaccccgaggcaaccggctgcagatgggag

SEQ ID NO: 449322 - DNA, 122 bp, Homo sapiens
ctgcatacagtaggcgcccataggatgtttgcctgctctctagggcagccctcaatccttcggttaatggggaaccttctcgatctcgagaaaaaccttctcccgagttcttttaagatttc

SEQ ID NO: 449323 - DNA, 122 bp, Homo sapiens
ccgccgcctacttgggcctcctcggggctcctggagccgggccgagagcgtgcagcctgccggcttgcggctggggatttcactcggagccgctacatttggaacccattatttaatcatta

SEQ ID NO: 449324 - DNA, 122 bp, Homo sapiens
caaagggtcaggtcacagagcagagcactgtatgatgggacagtctacgcattgtactggcgtgcctagccaagggggtgggggcagctggcatccagcctgtgccccactggccagactgc

SEQ ID NO: 449325 - DNA, 122 bp, Homo sapiens
caaaggttttaaaggaactgtgtccaagcaatcagcacggtgtcataattgaacttcagacgtcattagagtttcaatctttttggtaagactattgtccactttcaactttgctatttatt

SEQ ID NO: 449326 - DNA, 122 bp, Homo sapiens
aacaatgttgtggaaatgaaatggtgataatttacaagggcaaattgttttacattccagcggagttggctcccaagccgaactcttcctgcagaagttgaggtggtgtgtgagtcattgtt

SEQ ID NO: 449327 - DNA, 122 bp, Homo sapiens
ccaaagaatgcgaagcaaccagagcgtgaagaaaagcgggttttgggtctggtgttgctgcgtggggagaacttggtatccatgactgtggaggggccaccccccaaagatgtaaggaagat

SEQ ID NO: 449328 - DNA, 122 bp, Homo sapiens
ccctctcttttgcagtaaacctttgttactgcaaaaccatttgcaaataaacaaggtgagcggatctggactggtgctgtgcaagcaacgggacaccggtgcaaagcctagccccgccttgc

SEQ ID NO: 449329 - DNA, 122 bp, Homo sapiens
ccggccgcccacggacgccgccacccactccaggctcccggccgcgcacggacgctgcgacgcacaccagggtcccggtagggcccttcgtcctcacttgctttgaacatcacacaaatcac

SEQ ID NO: 449330 - DNA, 122 bp, Homo sapiens
gaagcggccccgcgcctcctccctcgcaattaccgccgggtcggaggcatccgggcggtgcgaagtcagcaccgtgccgagcagttgagagcagacggtgttttcttttcattgttccctcg

SEQ ID NO: 449331 - DNA, 122 bp, Homo sapiens
gtgtgtgtctttgtgtgtgtgtgtgtgtgtgtgtgtgtgtgtatgtttatccactttattcgggtgtcataatgaattgatcaatccacgtgctttattctcttaatggaaataaccagtct

SEQ ID NO: 449332 - DNA, 122 bp, Homo sapiens
aattcttgcttttctggaacaatcagagggtgactcttagtgttgccaaacagaggaaagcgggaagtggccctgaacctcctgatggatgagcatgaccctgactttctttgtgtagttgg

SEQ ID NO: 449333 - DNA, 122 bp, Homo sapiens
ccggaggttagaaatgttcaactgcaacattgatttgtgtctgtccctctccctctccctcgctggcctttttctcgttaatgaggactagaatgtttccacatcagttaactgccttcata

SEQ ID NO: 449334 - DNA, 122 bp, Homo sapiens
tcgcgctagactccatttcccagaaaccccggtgtcttggtggagacagcatttcccgggcgccccctcacggggcggggcagtgcggcgcggctccggttcccggcggccctcgcggcagg

SEQ ID NO: 449335 - DNA, 122 bp, Homo sapiens
ggagcctgaacccctttcctggttatggccggtagctgtctccagggctaacgtgggcagcgcaggggggcggaaaccgggttttagccaaatgcctcgacatcgccgcgcctccgcctcct

SEQ ID NO: 449336 - DNA, 122 bp, Homo sapiens
gaggagacagtagtggcgcttcggccgcgcccagggccgcggttcgctcttccccgcgtgcgaccaggctgccagcactggggacctctggcgcccgcccgtccgcagccagcggggacagc

SEQ ID NO: 449337 - DNA, 122 bp, Homo sapiens
ccggccggcgtgcagctcccggcgacccggccccgactccgttcggctgcgctcggtccgcgggcaacaaaggctgcagggcccgcccccttggccgctgcagaggcaaagaaaagacaaga

SEQ ID NO: 449338 - DNA, 122 bp, Homo sapiens
attctggacatctgggagatacattcgggggaaagaggacgagttcagttttgcagatggcgtattctcgacatccgggagatacattctggggaaagaggatgagttcagttttgcagatg

SEQ ID NO: 449339 - DNA, 122 bp, Homo sapiens
tcttctggaggccactaaagcaggaatagcattttcatgttagcgtgcacgggcggtctccgcagcccctcctcgtgccggagcctgtcctggggcctgcggggcggctccgggcctcgggc

SEQ ID NO: 449340 - DNA, 122 bp, Homo sapiens
gcagatggaggttgagctctgagctgtgagctcatggagagtttgattctccctgccgtgcgccaagcttctgctcagagccttcctccctcgctcagagcctttcgccgcccgcgcccttt

SEQ ID NO: 449341 - DNA, 122 bp, Homo sapiens
caggggcccccttatctcgagggtagtggtgggggggtccatgggggagcaggagcccagcgggatgcctcgctccccggacgtacctccagccccgtctgcagggtccttcctgcctgggg

SEQ ID NO: 449342 - DNA, 122 bp, Homo sapiens
gcccgcccgaagaaccaggcgccccagtgccctctccgggagaaagcgtgcccctgtcggcgagcctgttgccaacgtatggttccaagttcccaagagcagaggccagctggaaggggttt

SEQ ID NO: 449343 - DNA, 122 bp, Homo sapiens
aagataatagaaattctgtaggagaattttgtggctagacaagtttggaaaaatctgcatcgggtactcttttggggtttacagtgcactttagtgtaattggatccctgagaagtcttata

SEQ ID NO: 449344 - DNA, 122 bp, Homo sapiens
tagcgtgtgttggggggaagatggtgcaaagagctctgaacaacagctgcagctgagaaccgtgcagcctctcccatctgcggctccggctgcctcggagccatggaatggtttcaacaact

SEQ ID NO: 449345 - DNA, 122 bp, Homo sapiens
aagaggagttttgctttgtgccaaagaatctcacgattgctgcctattggaatgcgaaaacgcaagcgtgacaaccagtgggatgccaggggttgaggactttggaatcgcagagtgtaatg

SEQ ID NO: 449346 - DNA, 122 bp, Homo sapiens
caggtagaaactctacgcagacgggtgctgttctttgggatgagagcagtgtccccgttccgttgtagacacaacacgcttgctttctgtaggggaacggctctccccgcgcccaggtgccc

SEQ ID NO: 449347 - DNA, 122 bp, Homo sapiens
ctctggccattcaatgaccaagtggcagggtcacccactggactggggtaccctctggaccggccctgcagccctgagctcctgcacctctctccctcctgatgactcctgttcctcctcca

SEQ ID NO: 449348 - DNA, 122 bp, Homo sapiens
cttcgcagcccgtcggggggcggcggggagggggcccggagccggaggagggggcggccgcgggcacccccgcctgtgccccggcgtccccgggcaccatgctgtccaactcccagggccag

SEQ ID NO: 449349 - DNA, 122 bp, Homo sapiens
cttagtttgatgaaaggactgcgcaggaaaggccgtgggacactcattctgagatcttaccgttgattggaccaaattgttactcccttattttcattggaccttacggcagccggcgcgcg

SEQ ID NO: 449350 - DNA, 122 bp, Homo sapiens
aaggagcaatgctgcaagtcagcatccaggatagggaaccaggacagctgggctctaattcgggtggtaattttggaaacagtatatttcctctaggcagttcattcaaccaccaaaaattt

SEQ ID NO: 449351 - DNA, 122 bp, Homo sapiens
gcctgcggaggatggaaactgaggtcacgctggttttagggctgtgtccccctccttctccgccttcaccggggccacctgagccaggctccggcgccacaccctgaggagccctagctctg

SEQ ID NO: 449352 - DNA, 122 bp, Homo sapiens
ttccaaacgcagcccatctaggtgcctgaatctagcagccatcactgccattcacattagcgcagggtgacccggaaggcgatggggctgggccccactgtgactgggaacgccagctcgtc

SEQ ID NO: 449353 - DNA, 122 bp, Homo sapiens
acaaacaaatacaaaaatctatattggcactctctgccacagttggttctgaaataaccacgttaagtctacagctgtaattagtgaatatattctagatgattaatagaacaatttctaaa

SEQ ID NO: 449354 - DNA, 122 bp, Homo sapiens
ttcctctgtgtatttgactttcttctatgacctccaaaatattctaccctggtttttttccgtctatcatttcttctctgtgtctatgcctcttccatagccctatacctaaatgttggtat

SEQ ID NO: 449355 - DNA, 122 bp, Homo sapiens
agggaaaaggagggcacagctgatatttgggaatatctggagtcaggggctcagagttcacgacaactctcccactcccactctcacctcttctctccacttctctccaggtgcctatttca

SEQ ID NO: 449356 - DNA, 122 bp, Homo sapiens
gaggaacagctcgtacacatccaggctctccagcagctcctcttcttgttctgaggctgccgccaggcgcccacgggctgccacatagtcggagttgtagaagcaggcctcgctggctgcct

SEQ ID NO: 449357 - DNA, 122 bp, Homo sapiens
agacaggctgcaccctggccacacacctcccaggtctccagctccaaggatctgggaaggcgcttctggagtctgcctgcatccagacagagcccagaagtctgagggacctcatggagggc

SEQ ID NO: 449358 - DNA, 122 bp, Homo sapiens
gtcggtctttggtgagcctttttcggcgtctctccctgggtcctgtggccagttgtccatcgttttcctgtcggttccactttgggtttgtgaaggcctcgacaacgtgaggagatgcgtcg

SEQ ID NO: 449359 - DNA, 122 bp, Homo sapiens
aaaccctccctgggactgtgcactgccagctggggctcgggaaagcatggagtctgaattcgccctcagacctgggctggaaagctcagacagggaagtcaaagactgtggccccggaggct

SEQ ID NO: 449360 - DNA, 122 bp, Homo sapiens
ttcccaatcagcaggtccgccgagcctcccccgtgcccgaggctgaaagagaagggggcgcggagcgcggggcacgctggtcattgtagtccagtccatatgagctcccggggcactggact

SEQ ID NO: 449361 - DNA, 122 bp, Homo sapiens
cagacgcgaatccgctcaacacaagttgaccaagtttttcgcctggctaagcggcaggggcgtcccctcctccctgcgccacctccccaccgactggcttcccctgacatttctcatgcgcc

SEQ ID NO: 449362 - DNA, 122 bp, Homo sapiens
gctaggttgtctcttgaattttgaggccctagagatagtcattttgcaagtaaagagcaacgggaccctttctaaaaacgttggttgaaggacctaaatacctggccataccatagatttgg

SEQ ID NO: 449363 - DNA, 122 bp, Homo sapiens
gacgcggcgggcgggtggggccgcctcccggctgggcacgcctccaagccagactggacgcgaaggaaaccggaacctgtctgcctacggtgcctgtttccggaagcagcttgagtccggac

SEQ ID NO: 449364 - DNA, 122 bp, Homo sapiens
gcccggccttggagcctctcttcaatgctctccagcaagcactgaataatccacctgcttcgttttagggaatctttgtttcagtgaaataaacctctctgtccttaaattttggattcact

SEQ ID NO: 449365 - DNA, 122 bp, Homo sapiens
atttcaagcatgactttgtgggacctcagttcaagcacgctcctttgcctgtatgactttcggggactcacccagtttctctgggcctcagtttttcatttgtcaagaggccatgctaacct

SEQ ID NO: 449366 - DNA, 122 bp, Homo sapiens
atactggtttagccccttggcctctgtgagactcagttttcccatctgtaaaatgggcgccgaaattctccctggctgttctcattacaaggctgggtggttcagcaagaaagaggtttgta

SEQ ID NO: 449367 - DNA, 122 bp, Homo sapiens
cgaggctatgccaggctgggctagaggtgccgtgctgggcacaggctctccacgggatggcgggactgctgggcacaggctctccacggggacggcggggctgctgggcacaggctctccac

SEQ ID NO: 449368 - DNA, 122 bp, Homo sapiens
tcaaaaactgaggaacataaacagaggtgcagactctgaaggcagtgctgaaccctgcaacgttagcaaaatgggggcgcgcggactctcctgggggctgcgcttaactgggggagaggaaa

SEQ ID NO: 449369 - DNA, 122 bp, Homo sapiens
aaaaaaaaactgctgtaatcaagacctggcgcatctttgcaaattacagataattgtaaacgtccagattatgataatagcatcctaatccagcctgcaatataattattacagagtgttac

SEQ ID NO: 449370 - DNA, 122 bp, Homo sapiens
ggctgctccctggctctgttctaaattaataaggccaatcagaaatgcacaaagcctggacggccaatcattcttctcgaggcttttgccatctcctccgcggtcagataaatcatgttaaa

SEQ ID NO: 449371 - DNA, 122 bp, Homo sapiens
tgctaaataaatttcagttgaatgaatatattgattaaatttcagctgctgtttttatcacggtaacaactgttgtcagccagaggccgactggcaaagctgtatgtgggtgtagcttctag

SEQ ID NO: 449372 - DNA, 122 bp, Homo sapiens
tgggcgaggagggcctaggccgggcagaccagtgcagggagccgattcttctcggctcaccgtagacacaggagagagatggcctctccttaagcccaggagaacagaggaaacattaggaa

SEQ ID NO: 449373 - DNA, 122 bp, Homo sapiens
aggttctctccgtcgctcccacctggggacgtctcttctggctctccgccgccgcgcacacgcactagctgggcagcaggagaccagtcaatgagactgcaaacgttgtttgcttttattta

SEQ ID NO: 449374 - DNA, 122 bp, Homo sapiens
gaggggggaggcaggtctccaaggggaccctgagacccatgcctgcccccaggaggtgtgcggggctgggcggaggaggggagaagggagaactgagagcctgcagcatgtgccagtggagg

SEQ ID NO: 449375 - DNA, 122 bp, Homo sapiens
cggatgcccgcgggctgcaaacctctcccccgtgaacccagcagggaggccggggaggcacgctgctccccctctcagccttgcccagtgtccagacctttcaaaagaagccagaaaattca

SEQ ID NO: 449376 - DNA, 122 bp, Homo sapiens
caccagaggaaggctgggaggagcagatgtgtgtcaaactctcggaggtaatgcgggtcccgtggccgttgatagcgggcgatgctggctgcattgctttaatcaggatcccaagtgggacg

SEQ ID NO: 449377 - DNA, 122 bp, Homo sapiens
ttatagatattttgaaatggtgactgactcttttgaaattttaagttctttagaatgtgacgcttttaatatagcctctggttttagatggagaaacactatgctattgtcattaaaaatta

SEQ ID NO: 449378 - DNA, 122 bp, Homo sapiens
gaaactgcgcatgcgcggcgtcagggtcgggcggaagttgacgccgccgtgccgccgccgcgtgacgcatttcctgtttgttgttggagaaaggagagaaaggaaagcgcgaggagccgccg

SEQ ID NO: 449379 - DNA, 122 bp, Homo sapiens
ctttgcccctttatcgcctgaccgtagcagccgcggacgccagagggcgctgcgcatcagcgtcctcgcccacaggacaccttggggtaaacaggtgaaagccagggcagccaatccaaaag

SEQ ID NO: 449380 - DNA, 122 bp, Homo sapiens
ttctggagaccggggggatgcattttgaggaagcgcctctgactccatgcctcccacacacgcggtctgtgcagctaacaccaggcgcctacccggaggactcagctgttctgtttacatcg

SEQ ID NO: 449381 - DNA, 122 bp, Homo sapiens
tggcgaaataattaattcagcacgtcccttaagaaacacggagtcgtcattaatctgccacgcaaagggctctctccgacttggaaagtgcagggatcccaagaatatcacccgtccagggg

SEQ ID NO: 449382 - DNA, 122 bp, Homo sapiens
cgtctggtttctctgcccacgaacttccccaaggccctgtcagttagccaggatggtccccgaagccagcattctggtcttctgcaattggctgccctgctctgggactggaagtataaagg

SEQ ID NO: 449383 - DNA, 122 bp, Homo sapiens
ggggatatttctaaactttccgcgaaagatcataacgagtaccttcctatagccagacatcgcccccagaaaccgcaagtcccactaggatgcacacgaagcacactgggtgcagcactctc

SEQ ID NO: 449384 - DNA, 122 bp, Homo sapiens
cctttagttcgctcctcatttgctggtccaccttaattgacaaactgtacgcccaacgaacggccaaacgccactactcctggctccgcccaccttcccagacgccgctcgctggctgaggt

SEQ ID NO: 449385 - DNA, 122 bp, Homo sapiens
cactctgctgcccgtgggcctcctcccagatgaactggagcatgtccagagccatttccacgaggccgagcttgaggcgcgccagcttcctcatcaggggcgtgttgacgttctgcaactga

SEQ ID NO: 449386 - DNA, 122 bp, Homo sapiens
actccctgttggtttttggctaaaggctgcagatcctctcagaggcccttgctgcaggtccgagtcccctgactttgagtagttactccctccccttccttttcttcaagcttaggaggagt

SEQ ID NO: 449387 - DNA, 122 bp, Homo sapiens
ctttctgaatgaatgagtgaactcgggagaatcaggagcccgtgtgattggccgggacttcgcaagggctttctgaatgaatgagtgaactcggaagaatcaggagcccgtgtgattggccg

SEQ ID NO: 449388 - DNA, 122 bp, Homo sapiens
ctggctgtgtgtgccaagagctggctgattcaggccagtgttctgggaggaagaagggcccgcatcccaggccatggcctctcttgacaccacctcctggggacccagggttgggtgggaag

SEQ ID NO: 449389 - DNA, 122 bp, Homo sapiens
cagcccaagtgcaagtgcagacctcgcagccgccgcagcagcagagcccccagctcacgacggtcacggccccaaggcctggtgccctgctgacgggcaccaccgtggccaacctccaggtg

SEQ ID NO: 449390 - DNA, 122 bp, Homo sapiens
tttttcctcccggtaccaaagcggttttgtttgctgtttatactctaccccgtggaaaggcggctagctggctaaagggttttatgcctgggggaggatgagtcgctatttggtcgtgactt

SEQ ID NO: 449391 - DNA, 122 bp, Homo sapiens
gccctccatctacagcttctcccaaataaccagaagcttgtttctcagcaatggtgtggccgccaacgacaaactccttctgtccagcaatcgcatcaccgccattgtcaatgcctcggtgg

SEQ ID NO: 449392 - DNA, 122 bp, Homo sapiens
tggatcaaatatttgggacatgatttgggctgtgcttggaactgaaaggctcagaaacggcgagggcgtcctcggccgtgcacacgccatcaacacgcaagccgctgctgagagccccggtg

SEQ ID NO: 449393 - DNA, 122 bp, Homo sapiens
tcctagccccttcccctcctggtaggcaggctgcttcagacccaaggttttctctttggccgttcacctggggcccttgcaactccctccttcatctgtacccgtaggtatctggcagtccc

SEQ ID NO: 449394 - DNA, 122 bp, Homo sapiens
agaaaaacacctatactcatacccagagtccctctcatctgctgacagcttcccaggaagcgtacaaatagctacccttccttgagccttattgaaacttgctcttcagatacccacaccat

SEQ ID NO: 449395 - DNA, 122 bp, Homo sapiens
gatctcgctgggctaaaatacagcagccccgcattccttcgggaagtgctaggaagagctcgcctccttgcctgctccagctgttagaggcagccctcattcctccatccgtggcaccacag

SEQ ID NO: 449396 - DNA, 122 bp, Homo sapiens
atccccggggagaggctctcaatggggagtcccatctgcaggctgcgggtctgcggtgcacggctgctgcttcctgtccagctctgcatcctgggggtgcggatgaattagaggtgaacgag

SEQ ID NO: 449397 - DNA, 122 bp, Homo sapiens
ggctcaggcgggtggacgagtgaattctgggaactgtagtccatcaacttcatggaatggcggaccctttggctcaagcagttgaaccggggaattctgggaagtggagtccagacgctctg

SEQ ID NO: 449398 - DNA, 122 bp, Homo sapiens
taggggcatcatggatacctggtagcatcaagggctagggttaaaacccgtggagtaatacgccctcctattgtgttcctctcctctaaaaatgaaggtgaaactgtttcaggtgagcgctg

SEQ ID NO: 449399 - DNA, 122 bp, Homo sapiens
agtggggccagcggacacgtcagctgcggctgagagcgcggatctgggctggggctagctcgaggcaaggggctggagaaggggcggcctccgggctgggcagccctggccttgagtgcctc

SEQ ID NO: 449400 - DNA, 122 bp, Homo sapiens
ttagaccgtagtagaatcagaaatgctgaacccatgggaattgcttgtgtgagtcttgcacgggaattgcacagtaggtctttgaactttctgaggttgtgtacaaatttggtatgaatatg

SEQ ID NO: 449401 - DNA, 122 bp, Homo sapiens
aagtccatgggaacagagccagcccctggatggcacctaacttatattttagtactttcccgccagccaggcaggggaggtactcagcagttgctgagttagtgaatgaatggtgctaaatg

SEQ ID NO: 449402 - DNA, 122 bp, Homo sapiens
ggccactctcttcccgctaaatccccttcggggtcagtgctctaccagcaccgggccgcgcgcctctcctgccagccgtgtggctcttaaagagctgcacccctcctccgccctgcgcgatc

SEQ ID NO: 449403 - DNA, 122 bp, Homo sapiens
gtaacgcacttccggcggtctacgcgaggaagatggctgcatcccagcagcaagcttcagcggcttcctcagctgctggtgtatcgggtcctagttcggctggcggcccgggtccccagcag

SEQ ID NO: 449404 - DNA, 122 bp, Homo sapiens
tgggcccaatggacccaggccagtggccatcagccaggtgcccaccctggtgtgctgaagcgcgggacctacctgttgtcctggtttcctacactgagctgaggtgagcacatctgggtccc

SEQ ID NO: 449405 - DNA, 122 bp, Homo sapiens
atttgcaccaatcaagagtctaaggagacataaatactaaatgcactgtggggccctggacggggtctgggaacagaaataggatattagtggaaagactggtgaaattcaaatagcctgga

SEQ ID NO: 449406 - DNA, 122 bp, Homo sapiens
caggtgaggaagccgagtcccaggctggtggcgatctaggaccagccagccgggcagggccgtagtcacactgcagaccagctctccactgccaggtgcctgcctggctttccctgatgcag

SEQ ID NO: 449407 - DNA, 122 bp, Homo sapiens
gaatcctggtaacctggttaactctatacacaccagaatggctcagagttgatcagcctgcgtaggggtttggttgcagtacaaagggatttgtgcaatttaattaaaatcatctttatcct

SEQ ID NO: 449408 - DNA, 122 bp, Homo sapiens
agagctaaagccggggagggcaagcgagggggcactggcagcggatctgggaatggagcccgcgagttcctgcttcctggttccccggagcaagtgtcctttggtgggagccgcaggaaggg

SEQ ID NO: 449409 - DNA, 122 bp, Homo sapiens
aatgggttacagaacattactttatctagatacatatttagagtaaggattaaaagaccacgtttcagtgaggtgtaaattagtgggaatatgcatgaacctggtttgtagggtaagaatcc

SEQ ID NO: 449410 - DNA, 122 bp, Homo sapiens
agcgagcccaggttcccgcggccttgcgagggcacgcagggcaaacagtgctttatctttcgcagcggcgatgagctggtgacttttgggggtcatcctgagggacatagacgaaactggtt

SEQ ID NO: 449411 - DNA, 122 bp, Homo sapiens
ccctcctcccccgggcccggccaacgcacacactaacttgctcccccgtggcgccggtggcgaatgctccaataggcggagagctggtcagcgctcacagcctattggctcggaggagctgc

SEQ ID NO: 449412 - DNA, 122 bp, Homo sapiens
gcggggggggcgggacgcgggggcggaaccggaaccggcagtggcttgggggcgggacctcgcggactgctgtggcggcagctggagcggcggccgcggtggcagaaccgggggcggccgct

SEQ ID NO: 449413 - DNA, 122 bp, Homo sapiens
attccaagtcttcatttggattttagcagttttttccactaatttttttttttctgttaccgaggcttcttgcaaatgttcacatcaccaaggcatgaggcaatgtgtaacacagtaggttg

SEQ ID NO: 449414 - DNA, 122 bp, Homo sapiens
ccagcacagggtgtctttgacactcacggaggcagcacctcgagtgcgcctggcaggggccggccgtcgtcccctactggggccagcgctgtgtcacccacttctctcgctgcccttcccat

SEQ ID NO: 449415 - DNA, 122 bp, Homo sapiens
gcctctcctcctccctgcctggggagcccagtggccagggaggggagtggtggagccagtcgctgtaacactgagcctcagagacgaaccaaaaccagctgggctgagctcagatccagggg

SEQ ID NO: 449416 - DNA, 122 bp, Homo sapiens
gcaaaaccctgtctctacaacaaatacaaaaattaactgggcatagtggtcccagctcctcgggaggttgaggtgggaggatcacttgaatctaggaggcggaggttgcagtgagccgtgat

SEQ ID NO: 449417 - DNA, 122 bp, Homo sapiens
acagggcgcagaagcgggatgtacttctgttggggcgccgactccagggagctgcagcgccggaggacggcgggcagccccggggctgagctactgcaggcggccagcggggagcgccactc

SEQ ID NO: 449418 - DNA, 122 bp, Homo sapiens
atgctttcttttctaaaaagaagtcttgctaccacctcactgttcactttattttttatgcggtctaacctgggtttttcgtaagagctcctttatttcttatattttaaggaaagggatag

SEQ ID NO: 449419 - DNA, 122 bp, Homo sapiens
tggttggcatctgctacttgggagcagaggatggaagaacacagcaaacaaaagtttcatcgttaagctgtgaagcagagggaacaggcagctagccaaaacttatgtggttcttcaaattt

SEQ ID NO: 449420 - DNA, 122 bp, Homo sapiens
gacgtgtctgtctgtgaggcgctgggtgcacgtccccagggctctgggctaggaaggcagcggcgaggtgcctccccacgtacccctcgcgggcccagccgagcaacgtggggcgaaggcgg

SEQ ID NO: 449421 - DNA, 122 bp, Homo sapiens
tccaggggcccgagggtggcgccggggagcgggcagcaggcgaggctgaagctaagactccgccgttctctgcctgcgcgccccgagcattatacaatggtggaggcggcggcggcaggcag

SEQ ID NO: 449422 - DNA, 122 bp, Homo sapiens
gtgcttggtgtggggccatggagggttccagaaggtcctggtgaataaaggcccagggggcgtgctcttgaagtgtgctcgtggtgcagcgccggcgggggccaggagggggagctgcaacc

SEQ ID NO: 449423 - DNA, 122 bp, Homo sapiens
agtgtcagtctgaaaagatcagttgagtcttcctctaccagaccccaacttgtctggtctcgtgaagaaagacagaaatggatggaaaaccattcttatcaccttcttgctggagagttagg

SEQ ID NO: 449424 - DNA, 122 bp, Homo sapiens
cgtctacagaaagccgctgagaaggcaggtggggtccggcgctgcccaccgttctccagccgtgctggccaccactgggctcccagaccaaggcccatggactgtcccccatgcctgtctac

SEQ ID NO: 449425 - DNA, 122 bp, Homo sapiens
taaaaaaaaaatctgcctattccagggttgcaataatatatcttccagaagattcagtttcggcttttaagtctgtaacacatctcttaacttgtgtgtgttgtgtgaggaagagcctgagg

SEQ ID NO: 449426 - DNA, 122 bp, Homo sapiens
gtcaggctctcggctgagggtccagagcaccagcagcgtgatgcacgtggtcttcacatccggcaacgtgtccatgaaggtctccagagtggtcagccccttagtctgaatcggtggattcc

SEQ ID NO: 449427 - DNA, 122 bp, Homo sapiens
aagagataagtctcccttgcagaagaattccccatccttcatgtagatgagttgttgtcacgaggggagctcagaaccctacttcctgagtgtgggatgtgcgcagctatgtggttccgaag

SEQ ID NO: 449428 - DNA, 122 bp, Homo sapiens
cgacccataataaccagaatgttattccacggttgcggtttgtttatttcatcagagttgcgtcttcacctatttccctccctactcttaattgtttatccaagttagtgttttccattctt

SEQ ID NO: 449429 - DNA, 122 bp, Homo sapiens
cgctgccccggctcctgttccggaaacccgagctatcgctgctcctgttctggctgccgccgctgctgctggaactgctgctgtaaccggatgagtggaccgctgtgacagggaggtagggc

SEQ ID NO: 449430 - DNA, 122 bp, Homo sapiens
gagggtgcttaggaaaagatacaaggaataactacacacatctacatagaaaattacatacggcctgtcttgactcaacttgtgtttccataaactaattagcctatctgtgattggtaaat

SEQ ID NO: 449431 - DNA, 122 bp, Homo sapiens
gaggcagcaaagacgtaaaaactgctgtagaattgcatttcacgttactccatcctgctacgctgtttacatacaaaagacattcagcgtgcattttatactgcacctacaaagcaggctgc

SEQ ID NO: 449432 - DNA, 122 bp, Homo sapiens
gcagtttaaattagagctgcttggcgtatggcagccaggcctgggatgagtgttttgtctcgggggatggagagggatcattaaaagttatctatgtattttttatctttgaccctactgtc

SEQ ID NO: 449433 - DNA, 122 bp, Homo sapiens
caaggccatccaagcaaccagccagaattccagaacatttcagaaatgtcaggaattccacgatggctgtcaggtgagggtccctccagaagtcctgaaagcttgtctctcattgcctcagc

SEQ ID NO: 449434 - DNA, 122 bp, Homo sapiens
gcaactgctccagctgcagcttctcctggtgcgcctgcatcttgcggatgatctcctcctcgttctcggggactgtggcgttctcccgcgggaacagcagcgggtggttgatgatggccgtc

SEQ ID NO: 449435 - DNA, 122 bp, Homo sapiens
ctcagcaggttccttgacccctgggaagccgggatccccccgtcaggaaggtcagggctccgctgaggatgggtttgcaggttgggaagctgctgctgtgttctccctgctgaggcaggcag

SEQ ID NO: 449436 - DNA, 122 bp, Homo sapiens
ttcaaggtgtttactgagattttgaaaggcttctcgacaggagccgtaacttttagtagccggcagaaatccattcccgtgaccaaggttattgagggaacgagtgtccgaatcacgcccct

SEQ ID NO: 449437 - DNA, 122 bp, Homo sapiens
tcctgcagcctgagcctcaggaaactttccttactgagtcaacaggacccggacgggcctcgggaagaacagaatcggggtttgtgcaggtgtggacatgtgcatccttaaaccttctaaaa

SEQ ID NO: 449438 - DNA, 122 bp, Homo sapiens
tgggttacgtgaggaagctgggggtttcgcgggcagctttagagccccagtcagggaaaccgaggccgggcttcctggctgcctcgcgagcctcttcatggctctcgccgccgccctgaggt

SEQ ID NO: 449439 - DNA, 122 bp, Homo sapiens
tagaaagtccccgaatgcggtgaatcagttccagcgttcaggaggatccaaccccaccctcgacgggcttgaggggttagcccgcctcccgcagcccgggcgccccagatgtgcagcctgct

SEQ ID NO: 449440 - DNA, 122 bp, Homo sapiens
cttcgttgcagaaaccgcatcggagcacatcgcgtagtgcaggacacacggggcgtgggacggtgtctgtgtgagagcagcatctgtgtgtatgcagtgttatctaaggacacacccacaga

SEQ ID NO: 449441 - DNA, 122 bp, Homo sapiens
gaaaaagtggggctttatgcccgcactgaccgcaggcccatccagcatggtgattttgtccggagtgccccaatccgccagcggtactgggcgagaaacttcgtaggctggcctcaattctc

SEQ ID NO: 449442 - DNA, 122 bp, Homo sapiens
tccccggcccgggcctagagccacccctaaccagaggccggagacagctggagcggctgccgcatcccggcccagcctcccctaccatccctcccccttccactggacatctggaccctagg

SEQ ID NO: 449443 - DNA, 122 bp, Homo sapiens
gtggactccaccattccaccatgtatcctgtattatattatcgttattgtttgtagataccggggtctcactatgttgcccaggctggtgtctcttttttttttttttaattgagacaggat

SEQ ID NO: 449444 - DNA, 122 bp, Homo sapiens
cgcctcacttggaaacggggctgcggtagccacaaccctccggtagcggtagcgtaaccccgttcggtgatccagccgcacagcgcaacgggtacaaagaaccccactggctaaggccgacc

SEQ ID NO: 449445 - DNA, 122 bp, Homo sapiens
ctcacgtgtctcagcattgatcgatacctggctattgttcacccaatgaagtcccgccttcgacgcacaatgcttgtagccaaagtcacctgcatcatcatttggctgctggcaggcttggc

SEQ ID NO: 449446 - DNA, 122 bp, Homo sapiens
gcgcttccagaaggctgcaaatgggaattccagacaaacccacttgggtgaatcccagcacgcgggctgcggcgtagggggagagctcctcacgcggctcagagtgtagcccaggcccgcag

SEQ ID NO: 449447 - DNA, 122 bp, Homo sapiens
ctgtctctacccttggagaataccaacacctaacttatccctcagatgagtccccgaatccggcttgcctctggctcagagcagagcaggctgtgtgctgatgacacaccatgccatcagtc

SEQ ID NO: 449448 - DNA, 122 bp, Homo sapiens
agccggtcccaggctgcgcggcgacgtcagagttcatttacatagcgcttatttgggttgcgcagtcgtgggcggggtctggacgtcgctgcggaccaatcgcgtgcgtctatgcaaatagc

SEQ ID NO: 449449 - DNA, 122 bp, Homo sapiens
gcgggaagccccgcgtgcccgggagcccagagagcaggtgctgcgggtcggacgctaccccgggtgcccaacagctgctgccctcctcagaaccgcatgcacgagagcctgcacctgttcaa

SEQ ID NO: 449450 - DNA, 122 bp, Homo sapiens
tcagttcagcaaatccccttgtaacactgactcccattaaaaagtcagaaatgggccaggcgcagtggctcacacctgtaatcccagcactttgagaggctgagacaggtggatcacttgag

SEQ ID NO: 449451 - DNA, 122 bp, Homo sapiens
ttgacccccacgaactggaggctcctccggtgggccgtggggtctgcaacctcctctttccgtttcatgatagatcgcacgcctgccgggggcccgcctggaggggaggacagcggaggtgc

SEQ ID NO: 449452 - DNA, 122 bp, Homo sapiens
cctgggccagggaatggctccttataccaaagatgctggcacatagcagaacccagtgcacgtcctccccttcccacccacctctggctgaaggtgctcaagagggaagcaattataaggtg

SEQ ID NO: 449453 - DNA, 122 bp, Homo sapiens
cttttcgctcctcctactgccgtaaatggcctactagagttgtcgtgaaatgctcctccccgccctccatgtggcgaaaatgcaatcacgcttgacggcgcgaggtggctcagccgcaagat

SEQ ID NO: 449454 - DNA, 122 bp, Homo sapiens
aataaagttatttcttgctttgtagccttatcttcctgggtaggaatttcctgggacagacgtgggtgacttatcatgtgaacaaagacactcttggttttcagtgtatggctggaggtgtt

SEQ ID NO: 449455 - DNA, 122 bp, Homo sapiens
agaatcacagaaaaaagaaatggaccagctgctgacagtaaactacaagcacaccaggttcggcggggaggtggagagggcagggaacggtatggtagggagaggggtttataaagagacag

SEQ ID NO: 449456 - DNA, 122 bp, Homo sapiens
aaaaaaaagtttttggagaaaaattgttcctttcataataatgccactttttgagcgattcgttttttaaaaagttcacaaacatctgtgtcattcttggggaataagtgtagaaagaacat

SEQ ID NO: 449457 - DNA, 122 bp, Homo sapiens
tccgtcgcgcacgaggtggcctcgttggctttaccttggttcgcggtcgtccttggttatcgtgagcgtccgcgagtctctgggaggccaagcctaggggcgccacagcgcctgcgcgcgta

SEQ ID NO: 449458 - DNA, 122 bp, Homo sapiens
gaggcagaggttgcagtgagccgagatcgcgtcattgcaccctagcctgggcgacaagagcgaaactccatctcaaaaaaaaagtgtggtttctactggtgatgcgagtgctgccactacta

SEQ ID NO: 449459 - DNA, 122 bp, Homo sapiens
gccgggcctgtcgcctgcctgtcccacactggcttccccagccggcgccccacatttgcgcggccccttcttgcacccagaatccccacctggttgtcgccagggttcccacatcctccggt

SEQ ID NO: 449460 - DNA, 122 bp, Homo sapiens
gttgaatagatttaaaacaggccaagaggggtaaaattttccaggtagaaggtccaaatccgtgtaacagctgtgtaaaatgccaagcattgggtctgttattatgaagggcttagttggcc

SEQ ID NO: 449461 - DNA, 122 bp, Homo sapiens
tctgcccggcggatcctggcctcccctcctggtagagcaggcatggggcggcctggaccccgcatactgccggcggcggcggagtccctccgtgcccgccccgggggacgggagagaaatgg

SEQ ID NO: 449462 - DNA, 122 bp, Homo sapiens
gctggtggagtagatcgttgtgtcagcccaaggtgatcaagatgcctgagcaagagtggccgagagtcaggaaattgacaggactttaaaagggcagagtgatgaagacagcagatggacag

SEQ ID NO: 449463 - DNA, 122 bp, Homo sapiens
cgatgctaccgaagaggatcgcaagtcatcttgtgtttacttaacacacttacagaagagcggcagctgggaggacaggggaggcaggcgcagagccgggagggagcacagacacagatgga

SEQ ID NO: 449464 - DNA, 122 bp, Homo sapiens
tagttcacaccaaaaaaagttgtacaactcttcagggttgaagcagtgttaggcgctggccgtggagacagggagtcacacagtcgcaaggagcttgtatgcagacgggctttacacccagt

SEQ ID NO: 449465 - DNA, 122 bp, Homo sapiens
cgaggtgggcggggcgggcaggcgagactaggtctttccctgtttggcctccgtagccggcgccggcgggtcgttctgtttgaatgaatgatcccagcagccgcgcccaatgggcgtccacg

SEQ ID NO: 449466 - DNA, 122 bp, Homo sapiens
tgtgaagcctgaacctggaagactaaagtgggtaggggtgagatctttgtagtgtctgtgcgagacagagtctcgcacagaaaggcagagctttgggcgcagaaagcccacagttcaaattc

SEQ ID NO: 449467 - DNA, 122 bp, Homo sapiens
ctgagcccctggaaataagaaagcctcacctgggtcattttcaggaagtccaaggatgggcgtgtccacctggcgtcctcctcacgcctccgtttgcgccggctcctcttcccactgagcac

SEQ ID NO: 449468 - DNA, 122 bp, Homo sapiens
cagaatggaacagaaatgatactgccttcgtccattccataagcagctctgatcaagccacgcctattcctagaagaaaggaaatgtctgctttcctaatgccatgactcagaattccattt

SEQ ID NO: 449469 - DNA, 122 bp, Homo sapiens
ttcaagaccattggctattggaggggcggtacatgggaggccactggccaatgggaagcacggaagggggcaacgagggtaaagctgcatggtcaccttggataccaaggacgcgacttctt

SEQ ID NO: 449470 - DNA, 122 bp, Homo sapiens
agtggaaacaatgtgaaattcaccagctctgaaatcaacaagctgccggctccggtgttacggagccagcaccagcgtctccatttaaagggacagcgcacccagtggaaaggaaaataaat

SEQ ID NO: 449471 - DNA, 122 bp, Homo sapiens
agtgcttctgtttccaaagcaaaccaggctgctgtgtgaagccattggtgccgatcctcacgagtcactgagatcagagacacaagtgcacgtccaccaccgtggactaactcacatctcag

SEQ ID NO: 449472 - DNA, 122 bp, Homo sapiens
aaggacaggtttgggtgggggtcaggggcaagcctgtgcgggacccctgctgggggcgggcgcgatcggtgctacgacctgtttgtccagccgcccggccaggcagggctcctcggaaacgc

SEQ ID NO: 449473 - DNA, 122 bp, Homo sapiens
tttatgatttgatcggcttgaactgtacctcacgcttggctctcttattgcctaattacacgtgcagcgttgacaaatggcatgcccctccgtgccgtcagcacactgacgttgtcaccatt

SEQ ID NO: 449474 - DNA, 122 bp, Homo sapiens
gcgcgtgcgtccacacgggtcgcccttcgcggttgcaaacctgctttgatgccctgggagcgcaggggggcccctaagtgaggcagttcataaataatagatttggaaatactcgatagagt

SEQ ID NO: 449475 - DNA, 122 bp, Homo sapiens
ttggcggagggcggggccccacggctctcaaacttgcgcgccaaagacggagccacctggcgtactggtggaaagcgcagacttcagagccacacccgtagttaagtattcggactctgaga

SEQ ID NO: 449476 - DNA, 122 bp, Homo sapiens
agggagccagggcagagggtgcagtttccgctcctgcctgagtcaccttcgctttctcagcgattcttcattcacaagggcgtggcccatcacacgcactcacacacttgtgaacttgcacg

SEQ ID NO: 449477 - DNA, 122 bp, Homo sapiens
gggtcctcagagacaaactgtgttcagtgtgagttaatactttacagcagggctggggcccggcttgctgcgggctggccgggctgctggctcgccttgaagagaacaccagggcaggggct

SEQ ID NO: 449478 - DNA, 122 bp, Homo sapiens
acttcgtgatccacccgctttggccttccaaagtgctgggattacaggcctgagccactgcgccaggctgctcatagtttaatctccattgtacagccatgacaagagagaattaggaagac

SEQ ID NO: 449479 - DNA, 122 bp, Homo sapiens
agaaatatttagattaaaaagtagaatgttctgccctggtatcgtgactctgacattccacgtgtctttctctttacactggcctgaattcttttattcactacctccctccccaggtctct

SEQ ID NO: 449480 - DNA, 122 bp, Homo sapiens
ctcaggcgatccacccgcctcagcctcccaaagtgctgggattacaggcgtgaaccactgcgcccggccaaactattgattctcaagtccagacccagaccttcagatttagaatttggtga

SEQ ID NO: 449481 - DNA, 122 bp, Homo sapiens
tcctcggaactcacccaggccagtgaggccttaactctgaaaggcaaaaagactctcaggcgctcacagccggcgtcacaaaaggaacggcgcaccgctgacgtcatttacgctctccgcct

SEQ ID NO: 449482 - DNA, 122 bp, Homo sapiens
atcttaggcgtgctgcttgatgagttttaacaaaccctgtccgccgggcgcagtggcttacgcctgtaatcccagcactttgggaggccgtgggcaggtggatgacctgagctcaggaattt

SEQ ID NO: 449483 - DNA, 122 bp, Homo sapiens
ctgaaagaggccgttcagagggatgagccaggcctaaagaggtcatcgggatgcaggagccgggcctgcggaggccgccaaaaagcaggagcctggcctgggggaggtcacggtgaggcacg

SEQ ID NO: 449484 - DNA, 122 bp, Homo sapiens
cctttctgatctgtgtctggttgtgctgcacagaggccaggggcagtgtgaacccagcctcgctctggtggtgttttcagggacagccccgggcctgccgggtccagtagaggtttttcttc

SEQ ID NO: 449485 - DNA, 122 bp, Homo sapiens
gtgttgagaatatgctgtaagagctgtgtcgagataccagtttttatattcttgtaccttcgactgctgcagaactccccaagcaagaagttcttccacagtgtccccaaattgtggaagag

SEQ ID NO: 449486 - DNA, 122 bp, Homo sapiens
ccgctggagctgcgggaagcggaagtgctcgttgggggtgcacaaggcgcgttcgagcagcggcgaccgacgcggcgaaggagcgcgccatggagcatgtgacagagggctcctgggagtcg

SEQ ID NO: 449487 - DNA, 122 bp, Homo sapiens
ctgccaggttgaagtgttggctgcaacccccaaaagaaaggaaatagagagttaagactgcgaggctgggcaggcactttggagactgagtaattgaagacatccattgctagagaaagagt

SEQ ID NO: 449488 - DNA, 122 bp, Homo sapiens
aaaacacagccttgcaaagatatgacatcaacaaaaaaaatgtgctacaatacaaagacacgacatcaatgaaaaaaaatgtaccacaatctcatattgaaaccatgcactacttggagcca

SEQ ID NO: 449489 - DNA, 122 bp, Homo sapiens
ttcccgggctcgggtaaccggagtgctggtatctaatcgtcgctcaaaagctcctaggtgcgcgggtggatataattcccggcttctcgagaagacactacagcctcaaggaggtgtgcttc

SEQ ID NO: 449490 - DNA, 122 bp, Homo sapiens
atttgtaaaccgtgagaaatacccacaggaactcacatttccatccagatttcaagttgacgtttggctctgacatccatcttactattcgagaaccctaagacctccatggctgaacataa

SEQ ID NO: 449491 - DNA, 122 bp, Homo sapiens
acacacgtggttctgtcctggccagatcagtggacttccagtgtccttcctgagtcacaccgaggtgaattgcatagaccagaaacccacattttaaaaagaataaaataaaataagtggcc

SEQ ID NO: 449492 - DNA, 122 bp, Homo sapiens
gagccttagctgggagtggcgcggctgcttcccgcccgcgcaggatcaggccggcccccgcgggcctggagctggatccagagctagggaaactggaaaaacaggcacaaactcggaagccg

SEQ ID NO: 449493 - DNA, 122 bp, Homo sapiens
agccaagaggaaaagcagaagttccattcagccgtcccagtgtatagtcggggtttcttgcgctcctttcaatatgttgcagctgcgaaattgtgttggaaaaattttccactccagtcacg

SEQ ID NO: 449494 - DNA, 122 bp, Homo sapiens
tccccggcagcacagtgtggctgtttgtctccttgcccgccaaagttctgcccagtccaacgactccacgcagctcgcccttggtaaggggtcggggaggggcacaagctcttctttactag

SEQ ID NO: 449495 - DNA, 122 bp, Homo sapiens
gagtgagaaataactcgtctctcctctctcctctccattcagcattgtcttatttaagggcggaaagcgcgcttttcggcagagctggttagtttttaatgcgggctttttttttctcaccc

SEQ ID NO: 449496 - DNA, 122 bp, Homo sapiens
ctctgccagcttcagtgtccctggtcccagctgcagcctccagaccccacctcgccccttcgtcccagagccctgccctccgggatggatataggtacaacagagacgctctggcctgcctc

SEQ ID NO: 449497 - DNA, 122 bp, Homo sapiens
ttcagattgggcgactgacttcaaaggggggggcaaacagggaacgcgcaggtataggagcgctggctggaggctcctcgagagctccccagacacgcccccgtgcgtacgcccccgtgcgt

SEQ ID NO: 449498 - DNA, 122 bp, Homo sapiens
gttggccaacactaggcaagtcggaagcctagcaagccatactggagggccacctggcagcgtgcagagcaaacacccgactcaaggagagctttcaagagaaataagacgtcctgcgctgt

SEQ ID NO: 449499 - DNA, 122 bp, Homo sapiens
ggaggcatggactgttcctcatttgcctcggatttctcaattcgcattctgccccaggcacgtggaaggtaacactgcaatgggtctcttcatgcagatggggctgggacagagacaggttg

SEQ ID NO: 449500 - DNA, 122 bp, Homo sapiens
cccgcggggtccggaggggggcgcggtggctctaggagccgcaggtccacagaggaaatccggcctggccccgatttcccagctgctggcgccgccgcacttaacgcgggggcaaacaggcg

SEQ ID NO: 449501 - DNA, 122 bp, Homo sapiens
ggagaccccgctgcctgggctgcctgccatggcggcccccagacccggggactcccggagcgtcctacacgccgccgtctaccgcctccccagccaaagcctggccgggctggggaaggcgg

SEQ ID NO: 449502 - DNA, 122 bp, Homo sapiens
ggggagctggcagggacacaggctgcagagatgcccggcttcctgtggttccgggcacagcgcgcctcagtctgcattgggctgacaccagagagcatgtggggattttcctagttgccgaa

SEQ ID NO: 449503 - DNA, 122 bp, Homo sapiens
acacggtgcatctcacgccggcgagcaggtcccccctgaccacggcgcatctcacacgggcgagcaggtccccctgaccacggcgcatctcacacgggcgagcaggtcccccctgaccacgg

SEQ ID NO: 449504 - DNA, 122 bp, Homo sapiens
agggtgggagatgggggtgatattactccccgcatggggggggggtcgcccgcccccctgcgttgtggatcctcgtatccatgtggggaatggggggtgatattactccccgagtggcgggg

SEQ ID NO: 449505 - DNA, 122 bp, Homo sapiens
actgagcatgcccaggcccctgctagacccatggaaagctgtatggagattccacttctccggggtttggtagtgattgggcggggatacctgagagggtgccaggaaagggtccagcagtc

SEQ ID NO: 449506 - DNA, 122 bp, Homo sapiens
ttcccgggggcagctgcttcagggagagctgcagagcaaagctcttggaggcatagagcacgaagaaacaaaaattgctcttttgcaaggtcgcttctctctgcaggatcatctcgtagagt

SEQ ID NO: 449507 - DNA, 122 bp, Homo sapiens
gcaacgcacgaggattccagcttctccgcatcttcaccagcacttgtacttcctggttttcggcagtcatctgactaggtgtgcgaggtggtttctcactgcggtttgatctgcacgcccct

SEQ ID NO: 449508 - DNA, 122 bp, Homo sapiens
aaactcggacttcactgctttgacacagggctctggcgttgatcttttttaaaagctccccggatgattctaatatgcagccaggtggagaaccactactttaaactaatgcaggctcttcg

SEQ ID NO: 449509 - DNA, 122 bp, Homo sapiens
aaaaaaaaagaagattattagcccagcataataagttgtacagaagtcaaggctcctgtgcgcctgctggggtggctcaggcagccgtggggacctcctgtgggcttgcccccaggacggga

SEQ ID NO: 449510 - DNA, 122 bp, Homo sapiens
atccggcctcggccacgtggtgggcggaccggggcggtcctgagcctgcgacctcgcaggcgacctcgctggaccctaagtccaggccacagtcagggaagggcgctgagaggcgagcgtga

SEQ ID NO: 449511 - DNA, 122 bp, Homo sapiens
aggctgcactgagctgggtttgcaccactgcaccactccagcctgtgcagtagagtgagacggtgccaaaaaaaaaaaaaaaagagaaagaaagaaagaaggaaacaaagaaagaaagaaag

SEQ ID NO: 449512 - DNA, 122 bp, Homo sapiens
tcctaatcaaccgggagtccagccccgccccttcagattacaactcgcgatcagggaccacggcccctccaacaagccccgacagctccctgctccgatgagccaggggtaaccccaagcag

SEQ ID NO: 449513 - DNA, 122 bp, Homo sapiens
agtggcgttggctggggggctggaggctggggctgaagccatggagctggcggtgggctccggagggggaggctggcccagggctcgctgcgtggtgactcgaatgaggccccggcgtgacg

SEQ ID NO: 449514 - DNA, 122 bp, Homo sapiens
agaccaccttcccgggaggcggaacccagctgggttccagcctgctctgggagaggagcacgcctcccttgagctgcaggcgggtccggctctgacgaaacgctgcgagaatgccagacagt

SEQ ID NO: 449515 - DNA, 122 bp, Homo sapiens
cactcaaaagtttaaagtggtaaaatttaatacggagaattattcattataacaggtgaacggcataatgagagattggctaacccaaagtaaagagaactctagagaatacaggactagcc

SEQ ID NO: 449516 - DNA, 122 bp, Homo sapiens
ccatcagatttcacaacccctcatcaaggagtcactttggacccgagaaaagcaagtgcccgcgtcagcagaaaaggaacgaggagcgaggccgccagatcgacgggaaacaggcggagaga

SEQ ID NO: 449517 - DNA, 122 bp, Homo sapiens
aagcacatggccctgagaagccagaggcactggctgcactggacccaagcatagccagggcggtgaggcccactccccacctcccaccccaactcttccatcttggggccccttgctggaca

SEQ ID NO: 449518 - DNA, 122 bp, Homo sapiens
gctggtgtggggttgagtcagttgtgggacccggagctgctgacccagcgggtggcccaccgaaccggtgacacagcggcaggcgttagggctcgggagccgcgagcctggcctcgtcctag

SEQ ID NO: 449519 - DNA, 122 bp, Homo sapiens
cgagacgctctcccagatgaaccgggaccagctgcagaagttcgtgcagtacctcatcagcgcccatcacactgaggtgctgcccactgctcagcgcttggctgatgagatcctcctgctgg

SEQ ID NO: 449520 - DNA, 122 bp, Homo sapiens
ggattggcagcaaccgagagatcccgcatggacttttaggaaagattctaggccacagcacggggcctcctccgtctcagccaggataattctggcatcagcccccggcccaggcgtgttcc

SEQ ID NO: 449521 - DNA, 122 bp, Homo sapiens
tcgcattcctgtccctcggtccctgtcccccacggcccaggttctgagagtgagtggtcgcgttcctgtccctcggtccctgtcccccacggcccaggaatgaatctggtatgacctcttct

SEQ ID NO: 449522 - DNA, 122 bp, Homo sapiens
atctgcctgcctgggcctcccaaagtgctaggattacaggcgtgagccgctgcgtctggccgaccctctcagatttccgactcagaaatgtaaacagtggaaagaaggcgagagagcaggct

SEQ ID NO: 449523 - DNA, 122 bp, Homo sapiens
gcagctttagggtgtgggcaggcagagtcctggctgggactccaggaggcctcgagcccccgctgaccctcaggccccgctggccccagatggtcgggggtggagctctggcttatctctcc

SEQ ID NO: 449524 - DNA, 122 bp, Homo sapiens
cgcgccccgggagcgcgggagggggaggcgggaccggaggggcggccgaggatgacctgacgtcaccgaagggacactcacctgaaccggaagtcgtggcccccacccctccttgcccaggt

SEQ ID NO: 449525 - DNA, 122 bp, Homo sapiens
ccctgagggcccgaggactcagtgcaagggatgctgtcacaatagctgaagatagggtggcggcacatcctgcatgtgggggactcagatccagtcttgcctgtatcggtgacttgggctgt

SEQ ID NO: 449526 - DNA, 122 bp, Homo sapiens
tatgatacatttcccgcagaaggggaaacgttttaattaaagccataactgacgtggagccggaagaagcctgtgaaaggacgttcttgcatcgacctgccaggcctttgtgctgccttaga

SEQ ID NO: 449527 - DNA, 122 bp, Homo sapiens
tccagttagaggctgcacacctgtccgggcgtgtcccgggatttgggtagcaggtgggggcggctgaggcgacatggaggggatggcgggttcagggcctgggaaccccgggggtgaacttc

SEQ ID NO: 449528 - DNA, 122 bp, Homo sapiens
ctctgttccttaggtttgcatgatttccaaaccccaccccacccctgggtgaccctcttccgcataaacatcaattttaaatagtctttcagtgggatatccttttgtgccacttcgtgggc

SEQ ID NO: 449529 - DNA, 122 bp, Homo sapiens
ctacctatatacttagtttgaagttagtaacttcctgagatgctaaagacttacagcctgcgattatacaaggatttacacatgcttcctctggtgctttacttcccaaacctaaaaaagca

SEQ ID NO: 449530 - DNA, 122 bp, Homo sapiens
atgtggaataacgccagccctgctgtgccccatcacacccggcatctacacaagatccgccgggccacagagctcgaggctgtcttcaccagctgggctgggccagcctggccctgcagggc

SEQ ID NO: 449531 - DNA, 122 bp, Homo sapiens
cacgctgagactgtggggcgtcagcaaacctccaagtgcacggcggactgagttgtacttcgcagctctctggacattaattacctcctgcaccttccatttgggggagggtgaggaagaag

SEQ ID NO: 449532 - DNA, 122 bp, Homo sapiens
cctaggaccctacaaccttcaccccactctgtcttcccttgaaatcagcctgccactccacgaggggagcagagcccacaggagcctagagctaagggacatttctagccaccatgagcagg

SEQ ID NO: 449533 - DNA, 122 bp, Homo sapiens
aaagacccacgccgagggaggggagtgcagcagccagggaaccgttttcatttgctggatcgcacgaagccttgctcatggtaacacaatatcgctggggaagaaagccgcagctttcgcag

SEQ ID NO: 449534 - DNA, 122 bp, Homo sapiens
tagaaaaagaaattatgaagagcctggaaaatccacaaaccagacagtcagcccctgaggcgtggagacgccttcccttcctgggtttctggcgcgggcgcagacccttccccagcctggag

SEQ ID NO: 449535 - DNA, 122 bp, Homo sapiens
cttagataggagtctatactgggctacctacagaagaacccaggtcgccgctggcggcctcgcagctgcaccccgacagccactttcttggctggttgccgtgaggtcacattggaaaccag

SEQ ID NO: 449536 - DNA, 122 bp, Homo sapiens
actgggaggccaggccatgcctcacgcttcatggaggacacagcagcagagaagctggtacgtggcaccccaggagggagtctgggagttcaggaggctctatcctgaggccactgtcccat

SEQ ID NO: 449537 - DNA, 122 bp, Homo sapiens
gccgggatcccggcgacctcggaccggaagaagaaatgaagtgaagcggctcaagacattcggctaacggagagggaaccaagggactcgcaggacgcaaataactgaccacttcggtttgg

SEQ ID NO: 449538 - DNA, 122 bp, Homo sapiens
atagggacagatggagaatccagctcagacccaggtaagctgctttggaaggcagagaaccgccggtacctgctttaacgttagcgtcgctgggggtaagcgggaagcagccatgtccacca

SEQ ID NO: 449539 - DNA, 122 bp, Homo sapiens
gggattacagtagtgagccactgcaaacatttctttttttgagacggagtctggctctgtcgcccaggctggagtgcagtggcgccatctcggctcactgcaagctccacctcccgggttca

SEQ ID NO: 449540 - DNA, 122 bp, Homo sapiens
taattgtctcgagccaaagtgctcaggcttctgatccgcggcaatcactgaagcctgcgtcggggtcaaagtcttactaaaaatcaaacacaagagacacattaaaatgccatcgaaggtcc

SEQ ID NO: 449541 - DNA, 122 bp, Homo sapiens
atcatgccacgtcaccgcttcatgtctgcgtacgagcagaggatcgagcctccggaccggcgctggcagtacctgctcatggccgccgagccctacgagaccattgccttcaaggtagcgtg

SEQ ID NO: 449542 - DNA, 122 bp, Homo sapiens
agcctaacgccgggtcctctaggaacctcgggccgggcagcacccgcgggattctgctggcgtcctccgctgccatgaagcgggaccggctgggccgcttcctgtctcctgggtcgtcccga

SEQ ID NO: 449543 - DNA, 122 bp, Homo sapiens
tacatccttattctcattacatctccccataaaactttcatcaatttgaaaattgtaaaacgcattcctttttatgcagacatttaatctatggttaaatgacaattgcgcaatatatcctc

SEQ ID NO: 449544 - DNA, 122 bp, Homo sapiens
ctatgtgtggccttatgaatcaatccttgccaatggaaagtgaatggaagtgatgtgtgtcggtcccaggactgaccatagacctcctgcatgtgctcctttatgctatttcttcagttcag

SEQ ID NO: 449545 - DNA, 122 bp, Homo sapiens
ctccgcgggggagtctcctttcttcctagctctccgttgggaatgaaataatcccgcggccgccaggaggccggctaaggatgcggcccggagcgcgccggactgggatcccgagctgcagc

SEQ ID NO: 449546 - DNA, 122 bp, Homo sapiens
ctcagaatccccaaggggagcgggcttcgtgttctcgtcctcaaatagtcgaagtaccaccgaacccactgagcactggggtataggttcctatttccccaggggagcaaataacaaagccg

SEQ ID NO: 449547 - DNA, 122 bp, Homo sapiens
gggtacctccttctctgaggaactgggctgttagggattttccttaggccctttggtttccgcctacggagaggtttcccccattggttgctcttcctcagccagggttacttcctggtctg

SEQ ID NO: 449548 - DNA, 122 bp, Homo sapiens
ataggctccgggctgacttgggaagattgaaaatatgcccccattcacaggctctggggacgctatcctgggaagctttgtggggctggtgcttagtcctgcctttccagctgtattagtcc

SEQ ID NO: 449549 - DNA, 122 bp, Homo sapiens
ctgcctacctttccagtttcattgctgggtcagaacgcctcacctaagccccacattgaccgatatggaatcaatgtttacagccggtgtgtacttaatcaacccccttccccgactgcgac

SEQ ID NO: 449550 - DNA, 122 bp, Homo sapiens
cgctttatgtacggctgagggcgcgagacctcacaattgggcacgcaagcggcggtgccacgccacaatgagatgatgtaaaaaccggccctgccggaaaccaggcggcacttagtaccgcc

SEQ ID NO: 449551 - DNA, 122 bp, Homo sapiens
cgttttaacttagcaggactgaatcaggcagaaagaaacctaatcaccggtctccaaaatcggcccaaacctctggcggccgcgtcactcggctccaccagtctgtgccgcctgcaagcgcc

SEQ ID NO: 449552 - DNA, 122 bp, Homo sapiens
gagttcctactagaaagagatacatcctcaatgtatagttgcggaggttactggcacaggcgcacagccctgcagggcccagactccaccagagttcacttccatctcagagtccttacttt

SEQ ID NO: 449553 - DNA, 122 bp, Homo sapiens
tatggctggaaggcatgcataatcacaacagattcttcctggaggagctgccttaatttgcggctgcaatgacatgttctgatgtgacgtcagtctggtgtcagacttccagagtggcaggc

SEQ ID NO: 449554 - DNA, 122 bp, Homo sapiens
ctttcagcaccaccgagatggcgctggcgctgaaccgctacctgtgcctggccgtgctgccgctcatcaccaagtgtgcgccgctctttgcgggcacagaacaccgcgccatcatggtggac

SEQ ID NO: 449555 - DNA, 122 bp, Homo sapiens
gagagcaggtaagagagtgaccagcagcaggccggggtcacttccacgcttcctgcccatcggaggaatgttccagaggttatcccagagagaggtgaagcccaacatggtctttcagccac

SEQ ID NO: 449556 - DNA, 122 bp, Homo sapiens
cagcccgcgccaaccagcattcctgagatgtttgagaattctggaacgcgcagacagagccgacgtcactgcaacacgcggcgcctccgccggcccgtataaaaggcgggctccggggcgcc

SEQ ID NO: 449557 - DNA, 122 bp, Homo sapiens
gcaatggactccagcttttccaggaagctccagctccccagcaaccgagtcctcccccatcgctatttaacagctcccaccaggtggcgccagaacactgcgaggcctggaattcctggcag

SEQ ID NO: 449558 - DNA, 122 bp, Homo sapiens
acacgcccctcccctcgcttccttggcctggtttcacgcgactagagaaagttaaagacccgtgtgactgaagaggagctcacagttcccagcgtctgctcccacggtgtccagcgcccaga

SEQ ID NO: 449559 - DNA, 122 bp, Homo sapiens
tcctgccagccagctgcttcctcctgttccgcccctacattgtgaaacaaatgacgcagccggactttagacagaaaccctgcttatcagggagtccaggcagatgaactctgggttctcaa

SEQ ID NO: 449560 - DNA, 122 bp, Homo sapiens
gcactgaattgatggcttatcagagcaaccgcagttttcaggaagaaattcaatgccatgcgttgaaaatatccccctagcaataagggattatttttaaaaaagaatgaataaagatgttc

SEQ ID NO: 449561 - DNA, 122 bp, Homo sapiens
cctccccgcccagcccagcccagcccttccgcccgcccaggatggaggcgcccgccagcgcgcagaccccgcacccgcacgagcccatcagcttcggcatcgaccagatccttaacagcccg

SEQ ID NO: 449562 - DNA, 122 bp, Homo sapiens
gcccagcttcattgccgtgggctacgtggacgacacgcagttcgtgcgggtcgacagtgacgccgtgagtctgaggatgaagacgcgggcgcggtgggtggagcaggaggggccggagtatt

SEQ ID NO: 449563 - DNA, 122 bp, Homo sapiens
gtacctggctccgagctgagccccaggctggggatggaagggaatgcaggggtctctgcacggtggggcccacgaggctagccctctggggcacacccttgcccacccctgcatttccccag

SEQ ID NO: 449564 - DNA, 122 bp, Homo sapiens
gagagaggggttcagagctttggttgtggggtctgctggtggacatgcgggtgcggcacccgggcacctgggctctgtgggatgtgctgtctaagccctcgtcttgtctttgccctcagagc

SEQ ID NO: 449565 - DNA, 122 bp, Homo sapiens
ctccccagccatgtggaattgggtcagttaaacctctttcctttataaattacccagtctcggcagttctttgtagtaatgtgagaatagactaagtcggcaactataggctttattttctt

SEQ ID NO: 449566 - DNA, 122 bp, Homo sapiens
cgaactcccgacctcaggtgatccgcccgccttggcctcccaaagtgctgggattacaggcgtaagccaccacacccagccaatcagggctctttgaattccttcactgatttatccccagt

SEQ ID NO: 449567 - DNA, 122 bp, Homo sapiens
aaaatgtcattataaagggcaaggaggtataatgaaggttcctaggtgacaaaaatcagacgagcatgggaaagtttggataaatgaacaaacatcatcgttgggagttcatagtctatttc

SEQ ID NO: 449568 - DNA, 122 bp, Homo sapiens
ggagaacgcgcagatcgcgaccgccgcgccactgcccgcttttatctccgcgcgccggggcggccccgcgctgctccctgccctcgccggcgccctccccacggcccgttactctcccgggg

SEQ ID NO: 449569 - DNA, 122 bp, Homo sapiens
cggagccatgggtcgtgattcctttgtcaggcgttctgattggttcctggcttccctctgcggtggtcgtataccttgtgtgtggttctgggagctcatgaacaacaggaatcaaggacact

SEQ ID NO: 449570 - DNA, 122 bp, Homo sapiens
ttggtgacacaggccaagctaccatgccgaaaagtttaccaacttccactgccacccgcgcgtgcaagcggggccctgtctccgattatggattattttaatctttgccaatcctaaaagga

SEQ ID NO: 449571 - DNA, 122 bp, Homo sapiens
cttcccggccacggccctgggctccgatgaggccacctctgtgagtgggtgtgtgcctgccggtcgcaggtcgagaatgtcttaatgacttgtgccgcgtgtgcgcgctcgatgagcagagg

SEQ ID NO: 449572 - DNA, 122 bp, Homo sapiens
tgtctttgataatgtacctgcttcgtgccgatagagggagaccggattccacagcacacacgccatgcgtccctgctgtccggtagagggcagtagcggccacgctgcaaccctgagaagtg

SEQ ID NO: 449573 - DNA, 122 bp, Homo sapiens
gggctcagcagaaatgactgtcctgggggctggaacggacgatgtggcgacatcatcagccgaccgtaaacaccaggctcacactggcctattttaaaaacaaacgcaagacaaactcatcc

SEQ ID NO: 449574 - DNA, 122 bp, Homo sapiens
aattaggatttgagcccagccattctgactctagattgactgcccttaattcttatgctgcgaattacattattatttacccaaaatataacatccctccactgccctatgatataatgttt

SEQ ID NO: 449575 - DNA, 122 bp, Homo sapiens
aaactgatttttgggggagagaagatctgcttttttttgcccccgctgctgtcttggaaacggagcgcttttatgctcagtgactcgggcgctttgcttcaggtcccgtagaccgaagatct

SEQ ID NO: 449576 - DNA, 122 bp, Homo sapiens
cgcctcatccggacacgtcgctgattggctggacgcagagcgcaggcgtgaactgggtggcgaggctccgcccccatggggcgattgcgcgcccaaatagctggcccagggtgctttggccg

SEQ ID NO: 449577 - DNA, 122 bp, Homo sapiens
atcgccggagaccctgggccttggaagaagtcgcctccccagatctctaagcaggccgcgcgaccctcgagtctcaggtaagcgggaaatcccacttcacaagaaagcccctctctccgagg

SEQ ID NO: 449578 - DNA, 122 bp, Homo sapiens
ggggggccgcgccggggcccggcagcctctcagggccgcgtcctccggcggcggcgacggcggcggctgctccggagccccatgtccgtcggtccgtcctcgcctctccccggggcccaggg

SEQ ID NO: 449579 - DNA, 122 bp, Homo sapiens
ggtcaggcggtcgctctctgcaggtcacaaaccctcggcgcaaaagtagggctttgaacgcgacaccgcaccagagcgcccagctaagcgagctgcctccacccccactgtgtcgggcggcg

SEQ ID NO: 449580 - DNA, 122 bp, Homo sapiens
gtgagagcaggggccctctgctttgaaaaataactactggagaggaagactggggtgctccggggtgggggcactcaactgtctgattgacactttccaacgtgagtgcagaagggcagcat

SEQ ID NO: 449581 - DNA, 122 bp, Homo sapiens
agagaaagccagatggcaccagctgctccggatgtgcctgcccacattgggggacagggccgggcctgggctcggttcccaggtttgagctctgcagcctctctcctggagtgagggggctg

SEQ ID NO: 449582 - DNA, 122 bp, Homo sapiens
cagcaggctctcggccagtgcatatcctgggcctagcaagtttcaggtccaagcaggccccgggccagtgcacacccggcgcccagcgaggttcgggcccgagcaggcattcccctcgtgca

SEQ ID NO: 449583 - DNA, 122 bp, Homo sapiens
cacttgttaagaactgtgctggtattgcaagcttagtttataagattggttttcatcgggcgcggtggctcaggcctgtaatcccagcactttgggaggccaaggcaggtggatcacctgag

SEQ ID NO: 449584 - DNA, 122 bp, Homo sapiens
agacagcgagagcgttgaagagtgaggaattcctgcagtgggaggatctgatccattttgcgggacgcccttgctgaaggcaatactcacttgaaagaaaatcccagccactgattccactt

SEQ ID NO: 449585 - DNA, 122 bp, Homo sapiens
caagcgtgggtagcttccctgagagccaccagcccagtcatggggactgctcaggggagacgcgggggccctcttaggaggggtctgcaaacctagagcataggaaacactgcctgggagca

SEQ ID NO: 449586 - DNA, 122 bp, Homo sapiens
gctgctgggtgccggggggcagcatacgacccagtggcctgaagttctccaacatgtcctcgtgtcctcggctccctcggctggccaggctccgcccccggccctccctgcgcccggccggt

SEQ ID NO: 449587 - DNA, 122 bp, Homo sapiens
atcctctgtccagcttcagggggcgttctttcctgcccggcctctctggagttaggaagtcggcctggacggatgggtttgggccaagtgtggatgggcaggctctgattcatggactggaa

SEQ ID NO: 449588 - DNA, 122 bp, Homo sapiens
agagagtccttcacacagaggtggcctgcaagccagacagaacaactgtaaattcacctacgatacagaggaaagagcttctttgtcccactgatcaccagctgatgatacctgccaccagc

SEQ ID NO: 449589 - DNA, 122 bp, Homo sapiens
tttcattacttaaacataccaggtaacagcagcacaaagaaatagcaagtttatgacagacggtctttctggacaggctacagtcaaagcagcagagttttgctcaggactttaaagctaac

SEQ ID NO: 449590 - DNA, 122 bp, Homo sapiens
gattcggagccgttcccttttatttcccctccgttgccctcacagctcggcaggaccgcccggcagctgccaacaatgagctgtgtttcttagggctttggccacagttaatataggcattt

SEQ ID NO: 449591 - DNA, 122 bp, Homo sapiens
agcagccaacagggaagagtgtcgcacccaggagaaagttaatgcaacaggaccacagttcgtgagtggagtgattgtgaagatcattagcacagagcctctacctggcaggaaacaagtcc

SEQ ID NO: 449592 - DNA, 122 bp, Homo sapiens
cccagccgcaggcgcctgagcggccagagccgccaccgaacacgccgcaccggccaccgccgttccctgatagattgctgatgcctggccgcgggaacgcccacggaacccgcgtccacggg

SEQ ID NO: 449593 - DNA, 122 bp, Homo sapiens
gaggcttgacttagcgaacaccctgcagtccgcaaaagcgcatgtcctggctgaaatcaccgtcttccaggtggccccaaacgaatcccaaaaggggcagagttttcagtcctcacacctct

SEQ ID NO: 449594 - DNA, 122 bp, Homo sapiens
gtggatctttcaacgccagagggagtgcgtctcttaacactccccaaaatgtctctactgcgagtttccttccgctctctaccctgcctttctgcttttatctgccggggcttgcaggtccg

SEQ ID NO: 449595 - DNA, 122 bp, Homo sapiens
agagcccccaaaaacggcaacctggaaaccagactccaaacattggcaatttgtccctcccgctttccgtattctgccccagatgccctggcatgttggctgtagttatccccggataatgc

SEQ ID NO: 449596 - DNA, 122 bp, Homo sapiens
ccatacagtaggcgctcaataaatgtctgctgcacgaatgagaaaatgagtcagctggggcgagatcatcccctagcgttggtgtgcaattgcgtggggatccattgcttccgacgctactc

SEQ ID NO: 449597 - DNA, 122 bp, Homo sapiens
ggtaggagaggatatccaggctgccagacggactttctgcggcgcgcaagtgatgcccggcgcaggcagaggaaacgcagcgaccacacattgaccgctctcccggggtcccgggactcagt

SEQ ID NO: 449598 - DNA, 122 bp, Homo sapiens
aaggccttgggagcttatgctcataacggaaggtgaaaggggagcaggcacatcccatggcgaaagcatgttcaaattaacataagaagaaagagaacttggccaggcacgatgtctcatgc

SEQ ID NO: 449599 - DNA, 122 bp, Homo sapiens
cagcggcccagacgatggcgccccccacccttctacctacggcggtttgtgcgaggcccccggccccccaaccagcagcagcctatagagggcactgatggggtagaaccaaacagacagcc

SEQ ID NO: 449600 - DNA, 122 bp, Homo sapiens
agaaacggtcgaacgggaggatggatgggtgggcaaggacagcagatgatggctagagatcgcagatagacaaaaggagacaggagggctgggcagacagacatgggttcataagggaaggt

SEQ ID NO: 449601 - DNA, 122 bp, Homo sapiens
tcggtgagtgctccagctggagattcagggacagagcacatgctggccatttactgatctcgtactacctgtattatcataggtacccagggagggaggccttgccaaccccatttcacaag

SEQ ID NO: 449602 - DNA, 122 bp, Homo sapiens
gcaagggcttttttgctgtgtcatacaatggcagaaggcatcatatgggagaaagagacacgcacagaaagaactaaagagcattagaaccagaagaggcaaattcatccttttataaaagc

SEQ ID NO: 449603 - DNA, 122 bp, Homo sapiens
aggtagagagaagctttctctgcaggctctcctggggaaaaaatacatggagttagagaccggtccccatagccctgaaccagaccggctgctcctgggagcaaagggcttcaccagcagtc

SEQ ID NO: 449604 - DNA, 122 bp, Homo sapiens
gccggcagcctgtctccggaaggccgggagggaaaggcttcctggctgcagtgtccacatcggccaccagggggcagcgcagggctgccttttagcgcctcctggtctccagtgagctggtc

SEQ ID NO: 449605 - DNA, 122 bp, Homo sapiens
cccccggtttccgggacacttgggttgcggaggccggctggccggagtcacggttggggacgggcgcgcctcggagcgcacggctgcgctggaagccgcgtctggggcgcaggaccaacggg

SEQ ID NO: 449606 - DNA, 122 bp, Homo sapiens
aaactccactctaagctccttgagggcaaaaccaggcgctctcacacactgggtgctcaacgaatactgaacgagggaatctcagcatagctggtgctcaaacattgctttctgatgaactg

SEQ ID NO: 449607 - DNA, 122 bp, Homo sapiens
tgaaaactttgtatctaaaaagcagtttgacagtgtgttcccagaagcttagcttggagtcggtatttactctggcaggcggacgggtgaagccgggctaggtagtaaatcagcctcctgct

SEQ ID NO: 449608 - DNA, 122 bp, Homo sapiens
gctcaccccgacctacattcagaatagtccaccttatattggggaaccctccaagcaggacgtttcatgcagccaccccacaggggaaaacagaccaggagaaagtaaggtggcctcaccaa

SEQ ID NO: 449609 - DNA, 122 bp, Homo sapiens
ttttttttttttttttgcccctggctatgagtaagagatcctggtttcgcacaaagtgaacgtgcagtacattgtttcagttgttaattcgccatgcaatacatcgttagtcacgtattatt

SEQ ID NO: 449610 - DNA, 122 bp, Homo sapiens
tccccgagtgacccgtgcgcggtgtgcagggacctcagggtcgtgtgcactaagggcgctcgtgcccgtctctctgcactaaggaacgcacctccacatgtctgagtgcacgtccctctcca

SEQ ID NO: 449611 - DNA, 122 bp, Homo sapiens
cacactcaccctagctgtcaccaagcccagggcacatggcaaccagctgtgggaggtgcgcgcgcacacacacacacacacacagaatgacaggtgctcacgcacgtaacacctcccactcc

SEQ ID NO: 449612 - DNA, 122 bp, Homo sapiens
agaaatccataatggcaggagattccggattatcagagaatctggaacacaaatgggagacgtaaaaggtgagtgcctctgaaaccggggtgttctgaaatagctgtgcacctcaaacccta

SEQ ID NO: 449613 - DNA, 122 bp, Homo sapiens
gaggaggagagtgtgggaacgcgggcgcccgagcctgggcatgcgaggctcagaaaggtgcggggcatgtcaacaacctcgcaccctgcaaggtccgcgcgcggagcagcaaagccgtgtcc

SEQ ID NO: 449614 - DNA, 122 bp, Homo sapiens
tctcaagataggtcaaccaaagtcactaatataagcaaatttcaccagacaccagaaaaccgctttgggaaagaaagcgaaaagtggccagaacattgccccaagcttgctggaagggcctt

SEQ ID NO: 449615 - DNA, 122 bp, Homo sapiens
cccagattgggatctgcccaggcccgctttatggactagtgtgggcggcaggctcctttccgtccctgccctgctgtaccccgctccttggagaccccctgtatccctcccgcaaggtggaa

SEQ ID NO: 449616 - DNA, 122 bp, Homo sapiens
tccgtagccccgcaggcaaagccagagtctggcacaagccagggaccgagtgactacctgcggaacagaatgattagaattgcgtctggggttcctggagggtgggccttggctgggcggat

SEQ ID NO: 449617 - DNA, 122 bp, Homo sapiens
caaccggagggacagaaaacacgatgcgacgtcggaaagcaggaagggaattgaaattcccgcagtcacgtcacagaaatcttagcagaacctcatcatcgcccaagggaactgggagtggc

SEQ ID NO: 449618 - DNA, 122 bp, Homo sapiens
gataaaaaaaattttttttcaaccaatgtggaccaggtgttggcctcgaactcgcactctcgaaccctcgcctccctgaaggcccgagggcaggcgcaaccggccggagccacaatggctcc

SEQ ID NO: 449619 - DNA, 122 bp, Homo sapiens
tcaggagggcggcacagctgctgcaggtgagaagtgctggggacggtcgagatcactggacgccctcagaaatggtactgcggctggagaaatcattaacgaggaaagaaataacccaattt

SEQ ID NO: 449620 - DNA, 122 bp, Homo sapiens
cggttgcggccactagtgcagggatgtgcctcggcccgtcctcattgaaatgcggcgcttcgcacagcctcactccagcctctctctccagaggagggcggcggcggcggcggcggcgggcg

SEQ ID NO: 449621 - DNA, 122 bp, Homo sapiens
ggtttctcctcggtctttaacacactgcagccatagtagttattttttaaaggtctagtccggtccagttaatctcccaacccgcgtcctccccgaaaaagcccgccacaacaggtgtgttc

SEQ ID NO: 449622 - DNA, 122 bp, Homo sapiens
cgccagcaccggctgcggctccggttcccgctgcggctccagcctcatcctcagaccctgcggcagcatcggctacaactgcggctcctggccagaccccggcctcagcgcaagctccagcg

SEQ ID NO: 449623 - DNA, 122 bp, Homo sapiens
cgcagccttcccggcgccggcgggctgggtcttgggaattctggtttgctttggctcactcgctttttacaaaccactggatcttacatgcctctgtaccccccacttccactccatgtccc

SEQ ID NO: 449624 - DNA, 122 bp, Homo sapiens
aatgcatataggaggtaatctttgatatttaggatgaggcaatgaatacatgaatgaatacgtcaatgaatgaattaatcaatgaatggagagacaaggagaatcagactctcttggactca

SEQ ID NO: 449625 - DNA, 122 bp, Homo sapiens
gtcagtttgaggcccatgcagctcaggcacccaactcatgagaactcttgaaggccactccgccacaagagatgaccctattggcttcttttaggaagaagggaagtgaggcgcaaagagga

SEQ ID NO: 449626 - DNA, 122 bp, Homo sapiens
tttgccactttctaattgcaggactttgggtcttggcttcctttccataaagtaattcagcgagatgctatggaaagaatggggtaagacatatgaggtggctgttgacatggtgtgaggag

SEQ ID NO: 449627 - DNA, 122 bp, Homo sapiens
gcggcgcgggtcttggggccgctacacgccgggcgcgcgcgttcggggcgttccttgcagcggcggggcctgccaggccctccgcggccgccgccactctcaaaccccccgactgctcctgg

SEQ ID NO: 449628 - DNA, 122 bp, Homo sapiens
ctgggattcagcctccacacaacacatggtgttttctctagcaggtttctccaacgagtccggcctttctttggctcccttaactgagaccaacacacaccattcctatgaccccagttgcg

SEQ ID NO: 449629 - DNA, 122 bp, Homo sapiens
aggtaatatatttgaaaatacaaaaaatggtgaattttgtcattgattcctgtgtagtcacgtgaattcttggagtttctaaaaggggattttttttacattggtttacatcccatttcacg

SEQ ID NO: 449630 - DNA, 122 bp, Homo sapiens
gcagctcgctcatgcccacagcgctgggcacaagggcagccacgagctgtttgatttctgcgtccccagcagatggcttggtgcacaggggcagggctcgtctgtccctctcactgctgcgt

SEQ ID NO: 449631 - DNA, 122 bp, Homo sapiens
cggcgctcggaccgctgtcctccaacagcgcagggcagagcggctggcgccgccggagcgcggagccacgaccctccctggccgcctttgtctactggccgtgcggcccggaaccgccactc

SEQ ID NO: 449632 - DNA, 122 bp, Homo sapiens
ctcaggtgatctgcccatctcgaccccccaaagtgctgggattacaggcgtgagctaccacgcccggctgaggatagacatttttaatagaaaatctcattttggctcccttagacttctca

SEQ ID NO: 449633 - DNA, 122 bp, Homo sapiens
tgataattttaaaaaggggtctctcctcccacccccacttccagcccccacccccaccttcgcaggacaataggatcagggtcctaactgcaaactttaaacgtgtaaaccagaagcagttt

SEQ ID NO: 449634 - DNA, 122 bp, Homo sapiens
gtgtgccggtcggtttcagccagccgctcctgcaggatctgggctccctcctggaccttgcgcagctgctggctgtagcgctggactttctgctcgatgtcggtcagcgtgcgggccgtgtc

SEQ ID NO: 449635 - DNA, 122 bp, Homo sapiens
tcttcctctgacagagaaaggcagtttcttaacagatagaaaacacgtgaaactggtggtcggtcacttcccaataagatctcaggagtggggagaaataacacaagatttaggaactatgc

SEQ ID NO: 449636 - DNA, 122 bp, Homo sapiens
ttagaaaggtgaagtagcatgtcccagggcaaatagctaacacaatttatggtggagctgcgagaatatgattgaagggcagtgaatagaaagagataggggggtcagtaaattgtatgggg

SEQ ID NO: 449637 - DNA, 122 bp, Homo sapiens
tgtccccagtgcagggggcggcgtttatagcaccttgtcccatgggggccccttggagggcgggggtcagccaatcactcctccatcccactgcctccgggtggtatctgcgagtccccgag

SEQ ID NO: 449638 - DNA, 122 bp, Homo sapiens
aaaccgcgccgccctttgtttgctggtaaatactctcctgtgaacttcagcgtgtctctccgcgcgcactcctggcattgggtgccccaccccgctggttctctcgcggacccaaagagctg

SEQ ID NO: 449639 - DNA, 122 bp, Homo sapiens
ggagcagccggcagggcagggccgagcgaggaatcctgactttcctgctctttaactttgcgggaggggggaggctgcacaaaggagcaggtgtgcgcctcccctgccgccccgcgcccaca

SEQ ID NO: 449640 - DNA, 122 bp, Homo sapiens
acagcctggcttagctgtccgtggctgtctcctgcggtggaggagcacactggagtggcccgtgcagtggaccagagcttccacccacactgtgttctgtctcctttcctagaacacaactg

SEQ ID NO: 449641 - DNA, 122 bp, Homo sapiens
ttggaaatggctttaggcaattctcggaaggattctcaaggagagactgacccctggaggcggacagagctctcttttggccagacctggctttcgttattcccagatatcaggtaaagaac

SEQ ID NO: 449642 - DNA, 122 bp, Homo sapiens
ctcactgacattaaaaggaagagaggaagagagagagaaaagagcagagaagcgggtgcacgtgggaagctctcggttagcaggtgacagggcaaaagcaccaccaggacctggaagaacgt

SEQ ID NO: 449643 - DNA, 122 bp, Homo sapiens
aaggagtaactgttattgaagttgccgttcaggggcagggtgtccatgccacaggcttcccggcctcccaaggggtgctctgcagggcagaaaggggctggtcaggttgaagaggggccctg

SEQ ID NO: 449644 - DNA, 122 bp, Homo sapiens
gcggctgtccacgttttccaaggagctgttctgtgggatgtggtaggtcaccacggttttcgactcactggtttgccaatatacgtaaacatcatttaaatcaaaacggcttccttcagggc

SEQ ID NO: 449645 - DNA, 122 bp, Homo sapiens
aacgagttgggtaaaacagtttattctttatcactcagacacacaagctttgaaaggtgccggttaaagatggaactatgtatttagcagtgtaagacagtaacatctaatggattttaatt

SEQ ID NO: 449646 - DNA, 122 bp, Homo sapiens
agtctacttcagggagggccgtctgcttactcttccagaagccccctcaacaggcatgcccggaagtcatgtacagccagctactagggcgtcccgtgcccagtcaaggtgaccgttgaatt

SEQ ID NO: 449647 - DNA, 122 bp, Homo sapiens
agaatgtgtggaagtactaagtgccatcaatgacgcccatcaagttactgtgtcatgacacgcacacacatttcatcaagtgacgcccttaagttaactctgtgacagcacacgcacaacac

SEQ ID NO: 449648 - DNA, 122 bp, Homo sapiens
gcttcatgcagtaggccagcgactggagccagatgtgagctgagcccaagcggacgacctcgacaggatcccagaaagggtcgtcatctcgagccacagggccgtgatctccatctagaaag

SEQ ID NO: 449649 - DNA, 122 bp, Homo sapiens
agatcatatactttataaatccacctctcatctttcttctggacagaccacatctgacttcgaacgtacttactgcaatcaaaagtgttttgtaaaggaccctcctcaggaataaacaagct

SEQ ID NO: 449650 - DNA, 122 bp, Homo sapiens
acgcccccctcttccccgccccccaccgtaccctctgcagcgccacccgcgtcgcctctccgccgtgcgccaccctgagggctcccgcgattgcatcttcttgagcacagttaccaatgcgt

SEQ ID NO: 449651 - DNA, 122 bp, Homo sapiens
aacttggatgttccccagagtgagcacagggtcagacgtgtttttcaagatagtcatgatcggtcttttccagggtggggcccacagtgaaaaacagtgatagattaatggttaataattaa

SEQ ID NO: 449652 - DNA, 122 bp, Homo sapiens
gcgggcgggcgtggcgttgaggcccagaccggaacttcctttcggcctcagtttcccggccggccccgcccccggcgcccgtacatgcggcccctttaaggactttctgcgccctcccgcct

SEQ ID NO: 449653 - DNA, 122 bp, Homo sapiens
tctggaaaaggatattaataagtaacttgtggtggtgttgtaaaggtcaagaacaatgtacgtaaagcaaaggagagggccaggcacatgaaggtgctgaaaagtcatctgaggaaaaggag

SEQ ID NO: 449654 - DNA, 122 bp, Homo sapiens
gcgaggggaagggggcccgggcgtgatgtcacccgcgccctctctcttctctctccacaccgccaggacaccccccaaatgcgcgccctggcactcgtgctgcgtcctgtctgctcccatct

SEQ ID NO: 449655 - DNA, 122 bp, Homo sapiens
gatgggcccagaaggcaggggtctaagccttaagggtaggcattgataggatgtgcagcccgagcctcctaacaggcactgtggtccggcagagggaaggcaacagcatcgtgactggtacc

SEQ ID NO: 449656 - DNA, 122 bp, Homo sapiens
acctttgacctttctccttttcttataccccatatccaacctatcagattactataggttcgaacccaaatcctatgaaacagaggatatggttataattttgagggaagattttttttttc

SEQ ID NO: 449657 - DNA, 122 bp, Homo sapiens
gacagaggaacccggccctggaggtctgagttgggacgggtcccctccagtgaggacgcccgtggaacagggccggtcggcttggctgggaggaagggggagagttcttctgtcttggcaac

SEQ ID NO: 449658 - DNA, 122 bp, Homo sapiens
gggcgtagaccgagggggctgcccccaccgcggggctgcagacgccgccgccgcccccgccgggcgcagagccagtttggaggtgagagttcacttgcccgactgttcatccgtcaggcccg

SEQ ID NO: 449659 - DNA, 122 bp, Homo sapiens
ccgggccaacatcccctcactcagggcagaactgggcaggggtcctccactgcaacaggacggtggtgggtggagggggcttacctggacaagcactctccggcagagccctgctttcacca

SEQ ID NO: 449660 - DNA, 122 bp, Homo sapiens
ccgggtaaggtccagccgtatccgcctccttcatgtcccgctgtgggaggggctctggagcgccgggactgtgagatggccaatgacggtctgacccgttgggccgggccaggtcgcggaca

SEQ ID NO: 449661 - DNA, 122 bp, Homo sapiens
gctgtgccctgctcagcccggcctcccgcttcccgcggaagcgcaccccgtgcttgttggcggtcaggtaatccttcatcgccttctgcaggcgcgggttcagcattttggaagagacgttc

SEQ ID NO: 449662 - DNA, 122 bp, Homo sapiens
taagagaaactaatatttcttatgatctttgtctttgtattagtgctcaactgagtctgccgtgcttcagaagcagccttcattttataaaatctattatttctccttccagttttttctct

SEQ ID NO: 449663 - DNA, 122 bp, Homo sapiens
tcatgaaatgtaggaaaagatcttattaggaagagaaaccatgtggcccagtccctgagacgggaagggcctgcgtggtcctgatgacatctgcggatcttttaaaatcatacgatcatgtc

SEQ ID NO: 449664 - DNA, 122 bp, Homo sapiens
gatgagcagtgacttcagggcttgggctactctggcttaacgggaccagtagcagagcgccgcccgtcctgcttgctgctgggtccggttgccgaggcggaaaagtcgcaagctccttcagt

SEQ ID NO: 449665 - DNA, 122 bp, Homo sapiens
tgccttccagccagctagcttgcttcctgcttctgttatcttgctgacgcatgccgctggcgcaagtggtctttactttgggactgggcctgagaagggcagagttattcaccaccctccac

SEQ ID NO: 449666 - DNA, 122 bp, Homo sapiens
gcgagtgcaggaggacggaggcgggaaccctggggctcgattaggcctccatcccagccgcgttcccagagcatccagggcgctaagttgatccagctgaaactcccacacttcttaaagcg

SEQ ID NO: 449667 - DNA, 122 bp, Homo sapiens
ctgcctcccagactcaagcaatcctcccacctcagcctccagagtagctgggaccgcaaacgtcaacaccacacccagctaattttttgcatttttggtacagacggggttttgccatgtgg

SEQ ID NO: 449668 - DNA, 122 bp, Homo sapiens
acattgtaagatttatggttgacgaaattcagatccagagaagtgacttgttcagggtcacgccggacgaagtggtaggacaggcgatccaggtgagtctcctcagggtcacttccctagat

SEQ ID NO: 449669 - DNA, 122 bp, Homo sapiens
agtgccacttcatggtgcgaagtgaacactgtagtcttgttgttttcccaaagagaactccgtatgttctcttaggttgagtaacccactctgaattctggttacatgtgtttttctctccc

SEQ ID NO: 449670 - DNA, 122 bp, Homo sapiens
gcttttgacacaacagttttggttgtcatagtgactgcttgggtcaacccagctcttcatcgtcagaagcatcgaatgtcagaaattcaaaaagagcaaagcccaataacattgaaccacag

SEQ ID NO: 449671 - DNA, 122 bp, Homo sapiens
gacctggccgggagtgagcgacttgaccccggcttagccctcggccccggggagcgggaacgccttcgggaaacacaggccattaacagcagcctgtccacgctggggctggttatcatggc

SEQ ID NO: 449672 - DNA, 122 bp, Homo sapiens
ctcaccatcgacgagatggagagtgcagccagcaccctgcttaatgggaacgtgcgtccccgagccaacggggatgtgggccccctctcacaccggcaggactatgagctacaggactttgg

SEQ ID NO: 449673 - DNA, 122 bp, Homo sapiens
ggcggacggtggcggagagcccggccgtgaccccctccccgcagtgctgcagttcggcttcgtcaccatcttcgtggccgcctgtccgctcgcgccgctcttcgccctgctcaacaactggg

SEQ ID NO: 449674 - DNA, 122 bp, Homo sapiens
tgctgctctggatggggctagaggctcgccattgttcctgcgtggctaagtgcccgggttcgtcctaatcgagctgaacactagtcgcgggggtccacggttctcttccgtgacccatggct

SEQ ID NO: 449675 - DNA, 122 bp, Homo sapiens
ctcacctcccctttcccagtcccctctggataaggcagtccacatttttctttgtcaccacgcatctttattttcggttacataaaacacagctgggctgggaagtgtgccttccctgaacc

SEQ ID NO: 449676 - DNA, 122 bp, Homo sapiens
cagcggcacatggcagcaggtgggggcgactcagagtggggggcgcccccagaacaggggcggcgcaggccggtcactcgccctctcctcctcgggagccccccgcatgatccagacggagc

SEQ ID NO: 449677 - DNA, 122 bp, Homo sapiens
cagcctggccctgcccagtggccatgcaggttggttcccagtcatggcaggcaccaactgcggactccctaggggtgggaagaaaacgtctcctactaatacccctttgatggggttcacct

SEQ ID NO: 449678 - DNA, 122 bp, Homo sapiens
gaagaaatcaaaggaccattcacctccaagtgaacatagcacatgtgagagaaatgtaagcggtagttacagcagcaaatttaaacattttaggccatcttccccctagaacatgttcatgc

SEQ ID NO: 449679 - DNA, 122 bp, Homo sapiens
ggtatgggaggaggaggcataagggtacagccccagcggcaataggaactgggaactcagcgtccaaatgcttccctaaccacatctattttcccatgacttgtcctcattctgtacatttt

SEQ ID NO: 449680 - DNA, 122 bp, Homo sapiens
ggaagtatcccagactccgtgttctgcggatgtggtggaaagacgtggggacgcctggggcgggaggggtaggggccgggccgcagtaacaaaggcctctccctccaacaagcaaccccccc

SEQ ID NO: 449681 - DNA, 122 bp, Homo sapiens
ttttgagtattttctctttcctcctgatcaagtttaaggtgtgtgctcataaacaagatacgcaactgtcaataatcatcttttcagcaaatagagccaaagttaatttattaaacccggca

SEQ ID NO: 449682 - DNA, 122 bp, Homo sapiens
aagggtcaacgtccccattgaaccgtttaaatatattttgggatactcgacttttcaaagcggctttaaatatcaactcccaaggcagttcagcagacaaataggaaggcaggggcttcttg

SEQ ID NO: 449683 - DNA, 122 bp, Homo sapiens
ttatctactttaataagcctttggttgatcatttctgaagattactgtctacttatttcacgagggtatcacccctgcatgccttaagcaaagattctatttggggttgtgttttccttctt

SEQ ID NO: 449684 - DNA, 122 bp, Homo sapiens
ttatcttcttcattgccgtactctctaggctgtctttggcaaggagggcccctgcggaatcgtggtctatatccccgatacatattctgcctcactggtctaccttgttctcctgcaccctg

SEQ ID NO: 449685 - DNA, 122 bp, Homo sapiens
gttctcatagcaggtttttgcaacgtggccacggcctgcactccctgatgggtagcttgccggctcccatttctccaccctggactcatccatggggaatcatacttccatggccaatccgt

SEQ ID NO: 449686 - DNA, 122 bp, Homo sapiens
acagcggaactggagcccgaactctggttcgcactgtacaggcctgcaatgagtctcactcgcctttagtggcggttactctgggatataaaactgcaaaaatgtttctttatcattaagta

SEQ ID NO: 449687 - DNA, 122 bp, Homo sapiens
acgctttcagctccatgacaatcttacggcgccaccgccacctgtggggtgtgccgttgacggcaaagtccctgtttggtgccgggctgtatctgagcacctcggctcatccagaaggggtc

SEQ ID NO: 449688 - DNA, 122 bp, Homo sapiens
cacctggaaaatcgggtcactcccacccgaatactgcgcttttccaatgggcttaaaaaacggcgcaccacgaaattatatcccgcacctggctcggagggtcctaccccacggagtctcgc

SEQ ID NO: 449689 - DNA, 122 bp, Homo sapiens
tatcaggcccaacctcaccagagacactgaaaggccggagcgcacgaatctgaaaccacccgcctccaaaggtccgtcacaaaggccagaaaggtcggtactttcacgtgccgctgccgtca

SEQ ID NO: 449690 - DNA, 122 bp, Homo sapiens
cagagcgtgggcctgggccgaacctttccctgtgagcagcagcatcagcgtctagaacgacggccctcccggtccacggtggaaggtgcggagctcccgtggtgtgctggcagcgattcgca

SEQ ID NO: 449691 - DNA, 122 bp, Homo sapiens
ggcgtcagaggctcgttgcggacgctccgccctcgccgtccgcgaattggtggacgcggccgccactctgggtcgaccctgttattcattgggcaacgcgtcttttgaaaccgaactgaagg

SEQ ID NO: 449692 - DNA, 122 bp, Homo sapiens
gcccgccgggggtcacgtgttcatcgagacggcccccgcctccgcagccctggatccttccgctcccgcccaagcactgacaaggtttcgcggcaaaggagctttattgctgcggcggcaga

SEQ ID NO: 449693 - DNA, 122 bp, Homo sapiens
ctgcattttagcagggccttttgggaaccaggcacacaagtagggttgccatttaaaatacgctctgcccggttaaatttgaatttcagataaacaacaacaacaacaaaagacccattttg

SEQ ID NO: 449694 - DNA, 122 bp, Homo sapiens
acccctcccccaacccagtctccctctcgccgacttccctcgtccctccgccctcccggccgccgatgacgctactgatttcagccaatcatgaggcaagaaagtagtcacgctcacgtaag

SEQ ID NO: 449695 - DNA, 122 bp, Homo sapiens
tattaaggcccagcagcctgttgataagctaccctgtctcaccatgtgctggtgtggaaacggggcccagccagcacgcctcaaggtagatggaatccccactggtcagagaaaaagctatg

SEQ ID NO: 449696 - DNA, 122 bp, Homo sapiens
gggaagctattggcctgaggaaacttctctgacttggggaggcaggggcagtctttctggcgatgtttatgcacactttacttagaagcggagtagtcatgttgttacttgacttttagagt

SEQ ID NO: 449697 - DNA, 122 bp, Homo sapiens
aggctggggtgactgtggcagtctctctgccttgactgctattcccttaggtatcagcctcgcatttcattcagatgtcttaatgtcaccttattagagatgcctttactgatcacttcaga

SEQ ID NO: 449698 - DNA, 122 bp, Homo sapiens
ataattgatggtgggagagagtaaatatcagcagaggcacccagctgcatcaccccggcccgtctggctgggacccagggcggctgcttgtccactaatatgcctataaattattgaagtta

SEQ ID NO: 449699 - DNA, 122 bp, Homo sapiens
ggccgctgggaaatggagtccacgagaggacacctgcattcggggaagtgtagttccatgcgtttgaggcggggtcccggctgagctgttacgcgcccacatgccacaagagggcccctgtg

SEQ ID NO: 449700 - DNA, 122 bp, Homo sapiens
tcctgggtgttgacaagctgaagaagttgtgtggggcctgctgccagtaaccctgggtgacgaagcgtgactcaccactccgaggtcagtggggggatggaaggcaggggagtcagctgaca

SEQ ID NO: 449701 - DNA, 122 bp, Homo sapiens
agatggcacggtctccatcacatcccttctcctgccctgaatgcagacccactcctgggccgcccaggtcatcgcaccgccatggtgggccttcaggaggatgacagcctctgtggcaacgg

SEQ ID NO: 449702 - DNA, 122 bp, Homo sapiens
gaactctcattttgaccagaaccccagctgtcatatcacagaggaatttaagctgcttgacgatctcagggacctgattagacacagtttcccctgggaatttctccaagatctgtctctat

SEQ ID NO: 449703 - DNA, 122 bp, Homo sapiens
gagctcatagtccggcaggatgtccctgcggctattcacgtcctccagcgccatctccaccgcgggctggcaggcctggccccctggccagcccccgctcatgggaaacagtgccccgatgt

SEQ ID NO: 449704 - DNA, 122 bp, Homo sapiens
gcaggtctaacacccagagtctacatacctttcatctactagtgctcaagacaacctatccgtgtcagtgtcacaagctctataagcaaatctgtactgcagacacattaagtaatttgaac

SEQ ID NO: 449705 - DNA, 122 bp, Homo sapiens
cctcctggccgctggccctcccctaaggcttcctcatcctaaacagcaagtgaagccaaacgaaaaccctgtctctcccgccgttccctccctcctggcctccgtcccccgggctcgcctgc

SEQ ID NO: 449706 - DNA, 122 bp, Homo sapiens
ggagagatacagcaaaagaactggggcctcaccggctgctgggttcttcccagtggaagtcgactggccagctccggaagtcaaagttgtagttggcaagctgcctctgcagtgggcacgag

SEQ ID NO: 449707 - DNA, 122 bp, Homo sapiens
ccacctcctgtttacaggaaatacagggacagagaaacaggttaagcgcccccaagggaacgtagtcagcagatccagacgatgagaagccctacggggcaaacagctccttccttcaccaa

SEQ ID NO: 449708 - DNA, 122 bp, Homo sapiens
catctgatagacaacggtgatcacctctttctacctagcccctgatgcccaaatctcctccgaggcggctactgttcagcttctgctcacgtcaggagacagcccgttccattgacgtgtag

SEQ ID NO: 449709 - DNA, 122 bp, Homo sapiens
atcaggtcttggttaatgatcagctcttctcaatcttgcagggttagttcctggtgtcggcgtggctcctggagttggcgtggctcctggtgtcggtgtggctcctggagttggcttggctc

SEQ ID NO: 449710 - DNA, 122 bp, Homo sapiens
tatttatacaaggatccaggttttgatgttcaaaatgagttgtaatactgggttggaaaccgctagtttagactgatagcaattgagggactgactataaaacccagtataagacctgtcat

SEQ ID NO: 449711 - DNA, 122 bp, Homo sapiens
ctgtcctcagagtgctggatggagccacagtgctcaggaactgatataaactcacctttgcgcccctgcccctgggtccaatgcagccccttcagagatgcccttgtgcagggcacaacatg

SEQ ID NO: 449712 - DNA, 122 bp, Homo sapiens
tgctctctcggctttacgtaccggtcatagtgtgtttagggcacctcaggcggggctccccgccgccttacacatggtgaggagcgaaggcggcggcggcgggagaggatgcgggaagcggc

SEQ ID NO: 449713 - DNA, 122 bp, Homo sapiens
gttttaagtgttgtattgagcgactacgggtgcgtagcaagatgcgcggtgcgcacgcggcgcattagattgtctggtttggttaaattcttggagtctgataagagtgagataggcttgtc

SEQ ID NO: 449714 - DNA, 122 bp, Homo sapiens
tcaccaatagaacagcgatagcagcagcgacgattgttggtgcggaggctccaatagatgcgcgtggcctcgtagcccacgggatagagggcagtggcactatgaaagtcagccatctggtg

SEQ ID NO: 449715 - DNA, 122 bp, Homo sapiens
ggttagaaggcagcccgcgagtgggctacgaggggagctgggctcggcagttggggaccccgagggggcaagcgggcggggagcaggagaggggcggagctccggggccggggccggggccg

SEQ ID NO: 449716 - DNA, 122 bp, Homo sapiens
catggaccagggccgggtggcagacggtttcaggatgattcaagcacattacgtgtattgcgcactttacttctattattattacattgtaatatataataaaataattatacaactcacca

SEQ ID NO: 449717 - DNA, 122 bp, Homo sapiens
caaggataggcctggtgacccccgactctccacctccttccgaccaggaccgcacccccccggcctaacctgaccggaaactcgaaatcagtcgcccagcgatgacgcacgacgccggaacc

SEQ ID NO: 449718 - DNA, 122 bp, Homo sapiens
tccttgggaccatgatgttgttcagtgcaaggtgaaagcctgagaagaacagatgagagacgctgtttagagtgacagacatgtagtaagtggctgcctttgattgtaggatttcaagaaaa

SEQ ID NO: 449719 - DNA, 122 bp, Homo sapiens
gcggttcggtcagtccgtgaaggggcttctcacggagaaggtgaccacctgtggtactgacgtaatcgcgctcaccaagcaggtgctgaaaggctcccggagctccgaggtgagctggaagt

SEQ ID NO: 449720 - DNA, 122 bp, Homo sapiens
gtggtgacttcagacagagacgcaatcacaaagtgacttaaatggaaaaacttgtattcacggctggaacttcaaaatgttaggtagttaaattcttcaatttaagaaattgccttagattt

SEQ ID NO: 449721 - DNA, 122 bp, Homo sapiens
tataaggaggaactaaaatggtgattgtaaaaggatagctcctaggacactgaggtttggcgtgaacccagaagatgactgtaacgattgtagggaagctggaatagcaggaaaaccatgcc

SEQ ID NO: 449722 - DNA, 122 bp, Homo sapiens
ggggagcgacaggagaagcaggtgtggctgaagatgcaaaggtctgaggttcctttgctgcgtgtcaactcctggcctcgcagctgtgaatgcccagctttttaccttctccgtgttatgac

SEQ ID NO: 449723 - DNA, 122 bp, Homo sapiens
ctgcgcgcgcaacctttcgggctagcgggccggcaacaagtgagcaactttattgataggcgcggacatggacatggatcgcgcgcacgcgccggggaccggcctggaggaagagagtagca

SEQ ID NO: 449724 - DNA, 122 bp, Homo sapiens
gggcccgggagccgagggccgccgtgtgggactacctagcggggtgggtcagaagggcggcggggcgggccactaagtaaggcgaaagcccgggaggcgtggtgctgggcggggcgtcaggg

SEQ ID NO: 449725 - DNA, 122 bp, Homo sapiens
gcattcattcgctccctcatttgcttcctgcccactgcagcgggccaggtccagcccagacgcaggggtgcaggccacaggtacactcccaagggactagctttgggaagggtacgaggtgc

SEQ ID NO: 449726 - DNA, 122 bp, Homo sapiens
tgttatcatcagcccatttttttccttgcaggaatcttcctaagccacttgtccattctgcgtgggttagtttatctagctttaactgacctacacacaatagtcaaacagcttaagaagat

SEQ ID NO: 449727 - DNA, 122 bp, Homo sapiens
aggcatgatgcgcgccctggagcttcatcgatgctgttgagtggggatgacggtgtgcatcgccacatcctcagctttccagttgtttcagctgcgccctccaagctgccctgttccgcggg

SEQ ID NO: 449728 - DNA, 122 bp, Homo sapiens
cactgttctcatctcaggccatccagatcctgggcggcatgggctacgtgacagagatgccggcagagcggcactaccgcgacgcccgcatcactgagatctacgagggcaccagcgaaatc

SEQ ID NO: 449729 - DNA, 122 bp, Homo sapiens
gggcccgcaggaatggaatactttttcttcctgtgtttaaatttctacggaaaatctgaccggcgcggccaccgcccctgccataggcgggcggagagcgcttatatctttaaggcaaaggc

SEQ ID NO: 449730 - DNA, 122 bp, Homo sapiens
actttaggacttcagaactcctccaccgtgccgtggaggaacagcccttcttccacctcacgcacaccctaccacggcagaaccaatcgaagactatcccagccggggaccccccttttttt

SEQ ID NO: 449731 - DNA, 122 bp, Homo sapiens
ttgctcccgagggagctgcgctggggtttgcacattagttatgatgagcactcgctgggacggaagcagaaccccaggacgcctcattgtttaatcaggacgggtaatatcaagttgattaa

SEQ ID NO: 449732 - DNA, 122 bp, Homo sapiens
gagattccttcagccttttctttctgaggctccccacaaagaaataaatgatagggttggcgctgctgtttataatgaggaacaaggaaattaaataggaggtggtgacaaacattttgaaa

SEQ ID NO: 449733 - DNA, 122 bp, Homo sapiens
ggttaccattttggcagggggttggcacggagctgcatccctgccgggttctgtgcagtccggccctttactgcagctcgaacccaggaccgtctcggacggcaggggctgtggcttatgtc

SEQ ID NO: 449734 - DNA, 122 bp, Homo sapiens
cggccccgaagaccaactcagaccccaccagacaaactggaaagtctccaagctctcagtcgccccagtcggcgggggagtgagtggggccgaccggccttgcggccctgccacctttcggg

SEQ ID NO: 449735 - DNA, 122 bp, Homo sapiens
ttcctaacttggggagtggcactgagggccatcccggcgcaccctgctgtgctgagccgccgtgcatggccattctgtgcactcaaggggtcccaggctgttgagacgtcctccctggcccc

SEQ ID NO: 449736 - DNA, 122 bp, Homo sapiens
ccctccgctgtctgggtggcgcatctccaaccccaccccgttccggcgctctggccaggacgtattgcaactctgtccaggcggggattccgccgcccttcccagcctccctgggagctggg

SEQ ID NO: 449737 - DNA, 122 bp, Homo sapiens
aggaagggggcgggagcggggctgtggtgcctgtcctcttacttcattctctgcacagcccgaccggtttcctgtgcgtaacgtcacacggttcattcaaaaaaagaagaaagaaagagccc

SEQ ID NO: 449738 - DNA, 122 bp, Homo sapiens
gctccacgagggagcaagtaacactggactcctttcggcactccgagaatggggtgggggcgtcttcaaaggatttccctcccttcccagtgcttgtccctgctctcggtccgttttctgct

SEQ ID NO: 449739 - DNA, 122 bp, Homo sapiens
cctcccgctccccgagggtttgcagcccgcttttcatgtgctattgatgctgcccccacccgctgtcacttggagtcattcagtcaatcacatggagaatcagaggagaggcttgggatggc

SEQ ID NO: 449740 - DNA, 122 bp, Homo sapiens
tgctggggcctagcgcaggggctgatgggaaggtaccttcatcggtgcgtatccaggccccgcttctcaaagctgcggatttttttctccgcccctggtgcctcaccttcccctcactggcc

SEQ ID NO: 449741 - DNA, 122 bp, Homo sapiens
agccactcgagggtagagagcatctgttgttcaccattgcatcctcggtgctgagcactgcgtctgacatattatttagaaggtcagtaagtgctagtgggattcaggctcccagtgggtgg

SEQ ID NO: 449742 - DNA, 122 bp, Homo sapiens
ggggaggtgtggggagcggaaggccgcaggagcatctttgcggagaaagtactttggctgcggcgggcgcagggcgggccggctagccccgcgccccacctgttctgtgcgtcgcgctcgcc

SEQ ID NO: 449743 - DNA, 122 bp, Homo sapiens
gggctcggctcagcatcctgcggccgaacttggcagtaagaacacgtgtcggtaccggagcggtggggagcagtggcgagcagggcggtcctcgcaacccgccggggctctgggaagctgga

SEQ ID NO: 449744 - DNA, 122 bp, Homo sapiens
gctcgccaggcggaagtggttggagactgcgtgttttcctagaaagtcctcgaccttcgtcggggagaggaggggagtgataaattggaaggcggacaagcgacaagtgcggtactggaaag

SEQ ID NO: 449745 - DNA, 122 bp, Homo sapiens
ccccaaccagcaaggagcccacccccaggccagtaacgtcctaccctctcggggggggcccggagccgcacgtctgaggaccaggctccagtgaggtcttctcaacccctcccatgctcacg

SEQ ID NO: 449746 - DNA, 122 bp, Homo sapiens
caatttgatccatcatcaaacagatgggaagtaaagcggtgtgggctccagcatgtggcccgtgacagaggacatggaaaatgtcagtggccccagtgcatctgtgacagccgctttggcct

SEQ ID NO: 449747 - DNA, 122 bp, Homo sapiens
gctagccaccctcgccgtgtcccccttccacccccagaacccgcaggagaacgtggtggccgatatccagatcgtggtggacaagagccccctgccgctgggcttctcccccgtctgcgacc

SEQ ID NO: 449748 - DNA, 122 bp, Homo sapiens
gcgcgcgcgcgtgcgcgagacccccctttggccccctaccctgcagcaagggtagcgtgacgtaatgcaacctcagcatgtcagcagcaatataaaggagaatgaggcggcgcgcctcccag

SEQ ID NO: 449749 - DNA, 122 bp, Homo sapiens
gcgggctggaagtcgtcatcccccagcaccaaaggccaccatggccctgccctttccttccgccttgccaaagcccagaaagcgccccacctggcttcctctgacatctagtgaatgagggt

SEQ ID NO: 449750 - DNA, 122 bp, Homo sapiens
ggctgctggcagccatcttgtgaccatgaggcaagtcagcgcaggccgaagctgacgacgcgaagacaatgaggagagggagaaagagccgatctttggtgtgtattggctgtgacgtgctg

SEQ ID NO: 449751 - DNA, 122 bp, Homo sapiens
gccgtggattcctgtctcctctacactttccatccttactgggtctcacccaatcgcaatcgcctcaccagagtgactcaccttccagtgcctagtgtggggctggctgagtaaggatgtca

SEQ ID NO: 449752 - DNA, 122 bp, Homo sapiens
cattcccctctgctgatctcagtcggcttctcagaaccatgcccttgattctctctgacccgcaatgcacaagtcagcagcatcacatccggccccctagggcttccctgggttgaaatcag

SEQ ID NO: 449753 - DNA, 122 bp, Homo sapiens
tggcctgtatttcttttagagacagggtctcactctgtcgcccaggctggagcgcagtggcgcgatctcgggtcactgcaacctccaacttttgggctcaaacgatctttctgcctcagcct

SEQ ID NO: 449754 - DNA, 122 bp, Homo sapiens
acgccccaacctccccggccgaatggatggtggtgcgcgcgcgtcctactccggcggtgccggccttttctgttgccaaaactagacccaaacctctgcatgggattcgtctttgggtcccc

SEQ ID NO: 449755 - DNA, 122 bp, Homo sapiens
ttcaggcttctgagagggacctcgtgggccccggaaaaggtatttagaaaaacaggagttcggccttgggttcatccgtggcgtggccttcccccagccgccttgccctgggctgggcgccg

SEQ ID NO: 449756 - DNA, 122 bp, Homo sapiens
cttcaagtcattcagacacctcacttgccattaaattaagaacagatgtagcaacaccagcgtaatctactagagtgaaaccttgtgtactagtcagctcgagttgctataactaaatacca

SEQ ID NO: 449757 - DNA, 122 bp, Homo sapiens
gcagggaaggaaatggcaggtttcaccaagggtcattgaaattctggacgcacactcaaacgtgtcactcacaccacgtcccaaatccccccagtttgtcactatggtaaataggaaagcgt

SEQ ID NO: 449758 - DNA, 122 bp, Homo sapiens
ggccccgccaggtgtgcgggccaggcagccgtggaaggtgcccatttctcccagattcctcgcgcgcacggccacgagcgcggaggctgccaaacccgccagccctgggttccgaagccgcc

SEQ ID NO: 449759 - DNA, 122 bp, Homo sapiens
cacccgggacagaacctgggctccgggcagcaggtaataggaggatattctacccagggccggaacaagccaggtccagcctcaactgctctgtggctagtaagtgcgaggatgctgtgtca

SEQ ID NO: 449760 - DNA, 122 bp, Homo sapiens
cagcagttgtaagaaaatatttctagtaggctgggaaggcagctgcttcaagggatgccacgtgcctaagatgtgcaggaacgaaggggcgtatataaatcagagcctgacagatgggagag

SEQ ID NO: 449761 - DNA, 122 bp, Homo sapiens
aagccccagcggcccagacggcttggggagtcctcgggagcaggtggccagagacaggtgcgtgccaggccctccgcacccagagcggggccgggaggagagaggaggccccttgttcgcgc

SEQ ID NO: 449762 - DNA, 122 bp, Homo sapiens
cttctctccccgcaggtccagcgcctcgcgacgctgccgggccaccctgggcttctcgcccggctgctgcttggatggtctcccaaaccccagcagcccgagtccatgggtgtcccggcagc

SEQ ID NO: 449763 - DNA, 122 bp, Homo sapiens
gttttactccacctcccaggacggtttcaccgcccttatctgaccaccccctggttctgccgcagcccgggccggaacaaaactgcaacccccagaatacctcacgacggggcactgcgtcg

SEQ ID NO: 449764 - DNA, 122 bp, Homo sapiens
cacacccggcaggctctgtcctggaaacaggcttcaacgggcttccccgaaaaccttccccgcttctggatatgaaattcaagctgcttgctgagtcctattgccggctgctgggagccagg

SEQ ID NO: 449765 - DNA, 122 bp, Homo sapiens
tttattatgattatgtcagtgtgacagtcacctgagtctgtttttctcctctgagacacacgtgtagaggcagctcctgtcacagccaggattcgaacccaggaagtttcactccagacccg

SEQ ID NO: 449766 - DNA, 122 bp, Homo sapiens
gtcctacctgcgctagctgctggctctgctgcaacatccgacgtgtcttgtgcctggcgacgtgggctgctcgctccgcgcctcccgggctcgctctgcggctccaggcgcctcttgcacca

SEQ ID NO: 449767 - DNA, 122 bp, Homo sapiens
attcaaaaaagcaactgttccaacccaagtttccttagagcattgagtggataaagaaaacgtggtatgtaatacaccatggaatactactcagctgtaaaaaagaatgatatgatgtcttt

SEQ ID NO: 449768 - DNA, 122 bp, Homo sapiens
tacccgctgggttttctgttccagcccagccaaggacaagtaacattctggaggagtcttcgcccaagggccattagctgagggaacctccctgagctcctttcctgtcgtgctgctttctg

SEQ ID NO: 449769 - DNA, 122 bp, Homo sapiens
gcttcggtggcggaggtcacggtggcctccatcctaaagggctgcgggcgtcccggacggcggtcccaagcgctgctcacgctgctcttaagtgagccctggacgaggcgcggtgggccctc

SEQ ID NO: 449770 - DNA, 122 bp, Homo sapiens
ctgtgggaattgtagtcccgggccggaaacgcaggagacgccagaaacccaagtttgggacggcgcgtcccaagggtttctggaagttgtaacctgtgctccgagtgcgtaggcgcaggaac

SEQ ID NO: 449771 - DNA, 122 bp, Homo sapiens
taagtgttccggccccctggagttcccgcagagactccgcgtcatcgggcgctggggctccgctaggtctcctgggggcatatgagtgcgcgcttcaactccgagcccccctcatctcccgc

SEQ ID NO: 449772 - DNA, 122 bp, Homo sapiens
tccctgcacagactggtgatccccgccccgcccagccatacctgtaccagggttgtgaagcgctccttgtctacggcagggctcccctggcttcctgggtactcccagtcaaggtcaaggcc

SEQ ID NO: 449773 - DNA, 122 bp, Homo sapiens
gacgagttgcagacaaaactcctcagacaccggattaaagaaggaagaggtttttttattcggccgggagagtcagcagactcgtgtcttaagagccgagctccctgaaaaagaaattccta

SEQ ID NO: 449774 - DNA, 122 bp, Homo sapiens
tcagtaccagctggccctggaacgatacgagtggaatgaggtgaagaacgtcaaatccatcgtgcccatgattcacgtgtcatggaacgtggctcgcacggtcaaaatcagcgaccccgact

SEQ ID NO: 449775 - DNA, 122 bp, Homo sapiens
ctgccccttctcaggtggccgaaaaagtcgtgatcctggtgaccgatgccaatgatgaggcgcccaggttcatccaggagccttatgttgccctggttcccgaggtaagtgaggagctgcta

SEQ ID NO: 449776 - DNA, 122 bp, Homo sapiens
ttctgctgaggtaaagactgcaggataaagaaaacccaagttgcacagtggcacaacttccgtgctccctggctcagtgaagttagtgtgcataaaccccgtgagcctcgaggcttgccgga

SEQ ID NO: 449777 - DNA, 122 bp, Homo sapiens
atttgtcatgccgcaaggaaagcctgtaccccttaagcagttaatccccattcccctttccgctcagctcctggcaaccaccagtctgcattctgtttctatggattcacctattttgcata

SEQ ID NO: 449778 - DNA, 122 bp, Homo sapiens
gtctctgtcctccaaatcgaagtgagggttgaagttgatcataattctctggtatgggtccggagcctgaatcagccattcgcatttttcacttgggtgataagaatgaggataaccaggag

SEQ ID NO: 449779 - DNA, 122 bp, Homo sapiens
cggggattccccctttgggaatttcagtttcctcatctaaaaataattggctctggtgggcgcggtggctcactgttgtaatcccagcactttgggaggccgggtagggaggatcgtttgag

SEQ ID NO: 449780 - DNA, 122 bp, Homo sapiens
ccaggaagaatccagaatagttcagacaagcttcaggtccgccagaaccggggaaaacaacgtgtagggtttgttttaaagggcttttaaatggggtttgggagatccaggtagattagaat

SEQ ID NO: 449781 - DNA, 122 bp, Homo sapiens
acctacctgaatgatctgcgctgtgccctcttaagactcaggcggaccaaagagagtgcccgaggccaggaggaaaaaggctttagcacctcccctgacttcttcctggccctgagccactg

SEQ ID NO: 449782 - DNA, 122 bp, Homo sapiens
cggcgctgtgtgcgtagcgtgccctccctgtgcggtgtggaccacaccgagcgccgcgggcgcctgcagctggagatccgggctcccacagcagatgagatccacgtaactggtgaggcccc

SEQ ID NO: 449783 - DNA, 122 bp, Homo sapiens
gggggctcccagcgtgccagcaggctgccctcgggggtctgctgcaccgacagggttgggcggcccagcactgcggggatacggggcaggtgtcagggtcccagcgccatccgccagcccag

SEQ ID NO: 449784 - DNA, 122 bp, Homo sapiens
ctttaatattcggctttgtctgtactgaaacaatatttctgtttcctctgtccacacagacgccagtctcctgcctggaaaaagccagagacagcacacattcaatccccaactccaccccc

SEQ ID NO: 449785 - DNA, 122 bp, Homo sapiens
ggcttgctgtaggtacttagccacatcatgccagaccatcagagaacacagcaggacctccgtttttgttctccttactgggaccattgatgttttaattcatacctttcattctacaccat

SEQ ID NO: 449786 - DNA, 122 bp, Homo sapiens
tctttactaggcagggtccaggtttcgtcacagtctcctctgtccaatccctgtgcctggcgccgggcgcggctaccaatcagacggctgaaaccgcgttgggttgcatcatgtgcccctgg

SEQ ID NO: 449787 - DNA, 122 bp, Homo sapiens
tctataggtagtcccgagcaaattgcttatggctttggttatgactgacaactactcagacgaataaagccctccttggccaggcgacagcgtgtagcgagttattaccaatcccttggcat

SEQ ID NO: 449788 - DNA, 122 bp, Homo sapiens
ctaccttgctcacggggcctcaggcttcagtgcttacctcgatgtctcatacctctgcagcggggtactgctccaacccgggcatccccattggcacaaggaaggtgggcagccagtaccgc

SEQ ID NO: 449789 - DNA, 122 bp, Homo sapiens
ttagaagctggacagttacaggctttggtctcttcaagaatccaattcacccctgggtttcgcttggcacacaccccaggagaacgtcgatgcacacagctgtgtagctgcaaacggaaacc

SEQ ID NO: 449790 - DNA, 122 bp, Homo sapiens
gcactcctcagcccttgggctgccgatgggaccaggcgctgcagagcagggggcggtgcccgtcggggaggctcgggcttcacgggagcccaccgcaggagggctcgggcatggcgggctgc

SEQ ID NO: 449791 - DNA, 122 bp, Homo sapiens
tttagagatttcagttccccagtaccctggcaagggatttgacgaacgtagcaagaacgtcgtgaactttgagctaatttatatcattgttcatttgtctgtttaataaataaaagcaagaa

SEQ ID NO: 449792 - DNA, 122 bp, Homo sapiens
atccatcttgagttgatttttgtataaggtgagagataaagattcagtttcattcttctacgtggatcttgccaactatcccaccaccatttgttgaataaggtgtccttttcccactttat

SEQ ID NO: 449793 - DNA, 122 bp, Homo sapiens
ctcaggttttcctcctcactgagtatggaggggtggccctgagccttcatgtcggacaaacgagtggggggcaggatgtcaggggagcagagccagcttccaccacaggcccttctcctggc

SEQ ID NO: 449794 - DNA, 122 bp, Homo sapiens
tggcctgtaacctcctgttttccttctggttggtagcatttctggggaccaacagctggccgaggctcagggatagagacggctgctccagctaaaggtcagttgtgatgtacattgcctgt

SEQ ID NO: 449795 - DNA, 122 bp, Homo sapiens
cgagcgcacgcgcacagcgccgggccgcacacctccgggctctgggcggagcgcctcgggcgttgtaggcgggaccggaccctctggcccgcccctccgtgtcccttctggtcgccagtgga

SEQ ID NO: 449796 - DNA, 122 bp, Homo sapiens
tcttggagagttcatactctggtttcctggagaattctaaaatcattaaaataatcctctcgaccattacaatgactgctagatgaaatttctgagagcacagcttccgagtttccctgctg

SEQ ID NO: 449797 - DNA, 122 bp, Homo sapiens
aagtgtgaataggacgagcaggggaagttgaagtgtcatcaggagaaataagttggctgtcgaccaagaagtgtcacaggacaactttactctagcaaaaatgtctccagtttcgtaagaag

SEQ ID NO: 449798 - DNA, 122 bp, Homo sapiens
aaagccacccccggcagcagcccgccccgagcgcgccgcctgtttattcagccgggagtccggcacgcgccaggcgcacgcactgcaacaacaaacccagctgaatggagagtttgcaagga

SEQ ID NO: 449799 - DNA, 122 bp, Homo sapiens
ttcaacctgggttttaaacaagcctcccgggtgattctgacactcactggatttgagaaccgtggggttgttcagacagcagggacgttgatgttgttccttctgcgttcctggtgatgctg

SEQ ID NO: 449800 - DNA, 122 bp, Homo sapiens
gctcccatctctccctcaccgagaccccgcccccgtctgcctccctccgggtggctaagccgcacctgaagccgcacctggtcgcagaggctactgctggggaaaccgttgggccagcggcg

SEQ ID NO: 449801 - DNA, 122 bp, Homo sapiens
gatgtacatcatcaacgagggcaagctggccgtggtggctgatgatggggtcacccagttcgtggtcctcagcgatggcagctacttcggggagatcagcattctgaacatcaaggggagca

SEQ ID NO: 449802 - DNA, 122 bp, Homo sapiens
gttgtggcctcaaacagtgaatttacatccatgagaatcaatttcctcatctgccaagtacggatcctaactcaagttcctctaagccttaaaactgttcttccacaatattaatttcttca

SEQ ID NO: 449803 - DNA, 122 bp, Homo sapiens
ggttgggggcctccttgggctggattctaggaaagaaaaacaaccagagactttgagatccggccgtctgttagggcacagccactccaggttctctggcagagactgcggccactttgcca

SEQ ID NO: 449804 - DNA, 122 bp, Homo sapiens
tcaggcgtggcttctgggggggcggggcggggggaggaaaggggcacgggttcccggtctcgtagacgctgcagcggagcagagcctctaggcatgccctcatctagagcagctgctgcgga

SEQ ID NO: 449805 - DNA, 122 bp, Homo sapiens
agcagacgtggcagcgcacggcgatgacgtcagctacgcgaccgcggtctgccccagccgcgagtgcgtccccggaatcagccggcacgacaacccctaccatttgcacctgcgcagtgggg

SEQ ID NO: 449806 - DNA, 122 bp, Homo sapiens
gccaaggcgcgtttccatcaggggcgactcctggggcgcctgagagcaacctcctcccggcgcgcccccaccctgcttaaaggcaccgggttgcgccgggccagcacctgggagctccccag

SEQ ID NO: 449807 - DNA, 122 bp, Homo sapiens
cctggactttggctgtgtttgtagccctgtcccagcgctccgggtgggaatggcaggctgcgtcccactgctccagggcctggtcctggtcctcgccctccatcgtgtggagccctcaggta

SEQ ID NO: 449808 - DNA, 122 bp, Homo sapiens
acacacaggcgccctaagtgcacagtcactttctctgtgtgtgcgtgttttacgcgcatacggtgaaaaaaaactttccaagggcacagaagaccatactgtgggtgcccctcgccgccccc

SEQ ID NO: 449809 - DNA, 122 bp, Homo sapiens
gtcctcctatacttcgtcctgatcactccatctaaaaaactggtgttcccataagaattacgtggacaacctcttctaattaacccctttccccccacccccacttttagcagtattgtatt

SEQ ID NO: 449810 - DNA, 122 bp, Homo sapiens
tttcggttttggtcccagcttacatctcgtcctaaggattaagtgtttgtgcagctgagccgcagttctcaggtgagctgcagggctccagcatggcacctgcctgggcagtcctgagagag

SEQ ID NO: 449811 - DNA, 122 bp, Homo sapiens
gggccctcaggctgggcgcgctggcaatcccaaggccgaccaggccatgcacttccagcccgcctgggcacccgagcttcagccgccttctgcgtgcaggcagcagcctccaggcaactccc

SEQ ID NO: 449812 - DNA, 122 bp, Homo sapiens
cccccaacgcccactcgcacgagccgcaccagcactcaccttctccagctgcgaaagctccgttcacccgggagatagtgacttccgactcctgccggaagcggaaacccctctcctacttt

SEQ ID NO: 449813 - DNA, 122 bp, Homo sapiens
aaccccagactcgaaagcgtttcccataactcaggacaaggaatcacgcaagtgggaaaccgtccttgcgagcgcctcacgtgagccacagtcaccgcacaaagtctccatcgcgttggacg

SEQ ID NO: 449814 - DNA, 122 bp, Homo sapiens
tgacatttttctctttgctgtgtaaagtgctatgcagaggcaacttcacgtcccctagctcgctctgttccacctagatggcgccctaagccccgcctgtatggagattcggagcagccatc

SEQ ID NO: 449815 - DNA, 122 bp, Homo sapiens
ggaatccagctaaccacctgtattgttaccaggtgttctgaagtgacaatgcaatctgttcgccagatataaaaggacaatcagagaggaagaacttgtcagcatttgtccagccctgctgg

SEQ ID NO: 449816 - DNA, 122 bp, Homo sapiens
gaaggcctctaagggctgggagccgatccggccaggatgcaagcctcccccaccgcttcccggctgcgccgtacagaacccccacctctgttacttggccttcgcagcatcccccttcccat

SEQ ID NO: 449817 - DNA, 122 bp, Homo sapiens
acgcggtctgtcctcttctgcttcccggagcgcttgccgtcgatgttgaggctcatgttccggcgcgtctccagcgtcagcagctcctggaagagctccttgacgttgtagttcatcttggc

SEQ ID NO: 449818 - DNA, 122 bp, Homo sapiens
agtggctgcctgggacttgggcttagggtggagccggctgactgcgaggcggagcccggccggaactttttttttttttttgagacggagtcttactctgtcgcccaggctggagtgcagtg

SEQ ID NO: 449819 - DNA, 122 bp, Homo sapiens
ggtctcctgcgaactgggaatgacggtccagctctttaaaatagggcaatgggccgggcacggtggctcacgtctgtaatcccagcactttgggaggccaagaaggggaaatcgcttgagct

SEQ ID NO: 449820 - DNA, 122 bp, Homo sapiens
agccatcgacagtgacgctgtaggtgaagcggctgttgccctcggcgcggatctcgatctcgttggagccctggaggagcagggccttcttgaggttgccagtctgctggtccatgtaggcc

SEQ ID NO: 449821 - DNA, 122 bp, Homo sapiens
catctcttgctctcagcacctgctccggaggccggtggagctgccaggaggttccatgcccgggtacctgctctgtgcttggaggtgcccacttctcaacgtttgacgggaagcaatacacg

SEQ ID NO: 449822 - DNA, 122 bp, Homo sapiens
acattggcagaaataatggaggtatggtgtttctgccacccaagcctcatctggagtgttcgcctaattttcagcccagcattttaaatggatcattgataaactattgtacatccagtggt

SEQ ID NO: 449823 - DNA, 122 bp, Homo sapiens
gaagctgagaaagagatggcactttaagggttagtgggagagggtccagcattttacccacggaagaaaatttttctgtagaaagaaaaacaagtttttactgaagtaagtggccaagaaag

SEQ ID NO: 449824 - DNA, 122 bp, Homo sapiens
caaatccataagcagcgcgcatctgctctttaaaatatgtacgattgcaggcagcaaagacggagcagggagaagcacagcctgagtcggcaggcagaacccggcacggttcgtaatcagca

SEQ ID NO: 449825 - DNA, 122 bp, Homo sapiens
tgggggcggaggggacgcggtgggtgcggcctgggcgcgggtgggctagagcctggagaccgccgggagcccgacttcctggcgctttgccctttggggagcggagccaaggaacagcgcca

SEQ ID NO: 449826 - DNA, 122 bp, Homo sapiens
cccctcatcacatggacttcagggcctgcagccctggcttccgctgagcctctggggacccgtactgtgggggccacaagcccaccccctccatgtcttagatagtgcgggaggtcctcaaa

SEQ ID NO: 449827 - DNA, 122 bp, Homo sapiens
agggtaattcctcccctgcagtcgtgctttccgggctcagcaatgacctgctacctgccacgtctagggatctgtcccctcagtcctcacgctcacgctttctgagtccataacctccttcc

SEQ ID NO: 449828 - DNA, 122 bp, Homo sapiens
gcagaggatgcaagtggtaggactcctgacagagtgtgggtaggacacaggcctgggagccggagccttggaagggcgtgaggaaagaaggagatagggcagtgagcctcttaggcctctct

SEQ ID NO: 449829 - DNA, 122 bp, Homo sapiens
gctggggacacgggagaaggagccacagcttcactctggggcttgacggcgctggggacacgggagaaggagccacactgctcttagcaagtagcgcagggaaagcccgctcgctcctggcg

SEQ ID NO: 449830 - DNA, 122 bp, Homo sapiens
gaacatggtagaagctcaatgcctggcagagccttttcccttagataaagtagatagcttcgtcactcagtctgcctcctgagtagctgggactacaggtgtgtgccaccatgcccagctaa

SEQ ID NO: 449831 - DNA, 122 bp, Homo sapiens
catcgggtcctgcgcacgcgtccagcggccactccaatgggcccgcgggcacggagcgtgcgtgggagccccgcctcgaaatccgcctccaaaggggaggagcgtttccagggggcccggcg

SEQ ID NO: 449832 - DNA, 122 bp, Homo sapiens
tcgtctcccaggagacatctcgccgtgcaaaatggcacgccacgaggtggagtacctgcccgacgagaaacaagaggcgggactgcaactcccagaagcctccgcggccaaggcctcaggcc

SEQ ID NO: 449833 - DNA, 122 bp, Homo sapiens
ccggcgggggcgggggcgctgtgctcctacgtgactcggtgggaacaggccctggcccggcgcccgcgggcggtgcgtgcgcggtttgtttacgtccgagggcgggcgtgtgttccctggcg

SEQ ID NO: 449834 - DNA, 122 bp, Homo sapiens
gaactagaagagaagtaatatataacagattatctaggccaatctatttagtgttgggcccgcttaatatgaattagatgtatgtatcagtcagggtccaaccagaagatagaaaccacaca

SEQ ID NO: 449835 - DNA, 122 bp, Homo sapiens
ggcccgctctgcgacgctgctcggggaccccttgaggaaagcccagcgacgccgggccagcgcattcttattttatgtatgagcaaactatggaatggaaaagagattatgagttattactt

SEQ ID NO: 449836 - DNA, 122 bp, Homo sapiens
gaagagggcgccaggagcgctggggtcccgaggtggctcagatggaagccatgggacggccgtccccaggcccgcgcacccgcacctcagtttcccctttgtgaaatgggaagcttatgctt

SEQ ID NO: 449837 - DNA, 122 bp, Homo sapiens
gaaagtgatcatgggtcctaccaagccctgcatgttccacctcaaagttacacgacagagcgggagactgagttcagaaaaagagaattgatggaatgttctcagtgtgctgtgcagaacta

SEQ ID NO: 449838 - DNA, 122 bp, Homo sapiens
cattatgggaagggagggggagataagtggagaattgaggaaagcataggatcctaggcacgcatctggaattcctgggatattggacactcagggatgtcagactctcaactctcatgtcc

SEQ ID NO: 449839 - DNA, 122 bp, Homo sapiens
tcttttcactttatggcttctgaattttgattcttggtgataaaggccttccccactccacgggtataaaggaattcagccatattttctgtgacttatatttcttttgcagtgaaatatac

SEQ ID NO: 449840 - DNA, 122 bp, Homo sapiens
cactgactgggacccacagatccacacccccagcgatgcgtacacagaccgaccgacgggcgttccagggtccacaaagtcacgtgcaggcagagcccagaggatgtactcacagacacaag

SEQ ID NO: 449841 - DNA, 122 bp, Homo sapiens
gcgtgttccgaagcctttccggccaccagccaactgactgccctgctctttgggaatgggcggggcgcacaggtgagggaagagccagcaccagtctgtaaacaggctctttcccaggccct

SEQ ID NO: 449842 - DNA, 122 bp, Homo sapiens
ccactgagcccagtctttgtatgtcttttgaatgttgcacaaatgaaagtatctgctatccggaaaaaaatcattccagtcacggtgtctcatgcctgtaatcccagcactttgggaggccg

SEQ ID NO: 449843 - DNA, 122 bp, Homo sapiens
tcgcaccgagacgctcctagcaagcccctcacgcgagcgaatgactggcgccaggagaaacgcataggacctcccgaagccgccgagagcaaaaggacccatcagagctgtgctgagacccg

SEQ ID NO: 449844 - DNA, 122 bp, Homo sapiens
gcccggacttcgccataattctggaagttctcctccgcctcaacccaggatgaagttgagcgggtctgctgcgcttccgggaagtggtcatgtgatacccaggcgcctgcgctctctttcta

SEQ ID NO: 449845 - DNA, 122 bp, Homo sapiens
gtaaatccagcctagtctctttgttaactgaatctctccattttgggtgatgccctagcccgactcttgaacttgtgcccaacactctgactctcagatcctcacacatggcctgttgtgag

SEQ ID NO: 449846 - DNA, 122 bp, Homo sapiens
tgctgtagccccagcaccaagaaccgtggctggcacacagtaaattcacagtaaaaatgtcgagtcaatgaacaatcttgacttggctaattgatagggtttggctgtgtccccacccaaat

SEQ ID NO: 449847 - DNA, 122 bp, Homo sapiens
actcagaaaagatgcaagaaacgtgcaatgaactcctatatatccttcatccaaattctccgattcttaacattggttacatttgctttatctgtgtgtgtatacatatacatatatagaat

SEQ ID NO: 449848 - DNA, 122 bp, Homo sapiens
aaaagcggaaggggagggtcgtccccagccttggcctcagaggagccttctagatcccagcgcatctggaccaggagcccacaccgtgtgtctttcttctggatgtcacctccccctccctc

SEQ ID NO: 449849 - DNA, 122 bp, Homo sapiens
tgggagtgtctggctgtgtggctgcacggaggcctgtctgggtaggagtgtcggtgggggcggtcccacacggccatggtttgtgtctgccacggcctcagccccgttgcttcggtcgatgc

SEQ ID NO: 449850 - DNA, 122 bp, Homo sapiens
ccccagctctctggcaaaacctgtttgaggttgtccttttgccctctggagatgagccaccgttagcactaggctggccgtaccagaaaagcctgaagaagcacttttgcctgtgttcccaa

SEQ ID NO: 449851 - DNA, 122 bp, Homo sapiens
cgtggaatgttcttgagaaaagtcagatctactcatcagtaccttgttttgatcagagttcgggaggatgaatgcagaggtttcaccactgcttgcaaaaatagttaaacccttatctacct

SEQ ID NO: 449852 - DNA, 122 bp, Homo sapiens
tcgtctcccccacggaacacaaggctgacgtctcaacacggagccaagaaccaaatgacacggaacccgcatccgcccatcaatgagtgttttttttttttttttttttttttttttttgag

SEQ ID NO: 449853 - DNA, 122 bp, Homo sapiens
tcccaaggtgctgccctctggcctgccctgccctgcccaaccccccaacgctgcccgctgcgcccccgcggggcccagccagatgtcagctgcagttattagcctgggcgggagacacaggc

SEQ ID NO: 449854 - DNA, 122 bp, Homo sapiens
cagctggtgggggcgccgcaggttagagacgtgaggccgcgaggctgagggctgtgaaggcggtgggcacgcacggcgtgccggggccgcctggcttcgcggcgggggaggtaacactgcga

SEQ ID NO: 449855 - DNA, 122 bp, Homo sapiens
ttatcacactaataaaatcaactgtaatgaactagtacccagtttataatcagattccctcggaaaggaatttcctttttgaaagactaaaatatgcctttcaaaaattcttttcagagttg

SEQ ID NO: 449856 - DNA, 122 bp, Homo sapiens
cagcagccctcggtttggagctcaacggactcggcaaccacctggtgaaggcaccagcctcggccccccgacccccaccagcggcgcgccccagggatgccccccgctgggcaccgcaggca

SEQ ID NO: 449857 - DNA, 122 bp, Homo sapiens
ggaactccttctccagacatgcttcctgaggctggctccctgtggctactgaagctgctccgggacatccagttggcccagttttactggcccatccttgaggagcttaatgtcactcggcc

SEQ ID NO: 449858 - DNA, 122 bp, Homo sapiens
gatccctgcgctgcctgtcccgatccaaggccaggctgtggcgtcagcgtaagcgtcccgcgccctcggccctggctactgtcctcaccggcacccggtccgggtatttctttcggatcttc

SEQ ID NO: 449859 - DNA, 122 bp, Homo sapiens
cctttgcctatctaggagcctcagacacataggctagacaaaggcctcatccacatgatgcgcaggtatgggtctagctcctgcatgagctcaacatctgggcctgtctgagctgcacagct

SEQ ID NO: 449860 - DNA, 122 bp, Homo sapiens
ccctatcaatattgcaggagttggagagttaaagaatccctaaggtcacttccaatctgacgctctaaggttctacgaatagggttaaagagaatagggaccagagagtgcgtccccatcct

SEQ ID NO: 449861 - DNA, 122 bp, Homo sapiens
agaaggttgaccaaatcgaaatggcggcttagatggaagtgttcctacattactagaagacgccgaaaaagcactaggctgctgcccactgaaaggattagttgggttcatcttctgctcca

SEQ ID NO: 449862 - DNA, 122 bp, Homo sapiens
gcaatgcttatccatccttcattctcaagtgtggttgggtttatgtgctattcaggaagccgtgggtacttcaatgatgaacagagcagaggacacttatgagcaactgtggagtagttaaa

SEQ ID NO: 449863 - DNA, 122 bp, Homo sapiens
gcacttaaaatgtgctaggctccgagctaagcactttcattttctaacttgttgaatcttcgcaacaaccttaatataagtactgttattatctgttttacaaatgagcaagttaggaaata

SEQ ID NO: 449864 - DNA, 122 bp, Homo sapiens
cgtgtttctctgtgaatttacgcaccgagagcagagcgggtccagtgcgtagcgtacggacggcgcccacccccagctgccagggcctcggcgggcagggcgcggcgggtgacgggaccgcg

SEQ ID NO: 449865 - DNA, 122 bp, Homo sapiens
tatgattctcatttcctgtgccctcaacaatgaacagcattcctttgacttattcttgatcggcaccctctccagcccccttagtgactacttcaaactccagccccctcttcagctccaca

SEQ ID NO: 449866 - DNA, 122 bp, Homo sapiens
cctatatcgaatcatctgatatcaaatcctacaaatgagctcggccaaaaggttgagccacgctgtctgactgtatcatgttctccagttgcaatgcaagactgaggcaatcagttgtgagc

SEQ ID NO: 449867 - DNA, 122 bp, Homo sapiens
gggagcgcaggggcgtgcttaggcgggcggggtcgcctccctcctccccgggcggccagtcgaccccagggtggggtcctgcaggccccctgcccgaccgagggccaaaccggcctggccgt

SEQ ID NO: 449868 - DNA, 122 bp, Homo sapiens
tcgttttagtgacaggatgagagagcccttcgtgttctgagggaccgagtgggcgaaaagcgccggagagttggagagtctgtggttcagaatgcgaggtgacaacgtgctagcagccctcg

SEQ ID NO: 449869 - DNA, 122 bp, Homo sapiens
cgctgtttctgcccaagacaggttgacagattagcagctatttttaagccatgacacacacgtcgaagcagggttcaaatcagcgtgtgcgctggtgacataaagggactcggtctcacatt

SEQ ID NO: 449870 - DNA, 122 bp, Homo sapiens
tggaggctcctgagtcttctgtttcatttgctggcagcttctgtgtgcctcaggtgccagcggcctggctactcttgtttctcacagtgtgctgaagtatcatggggtttgtccctagcagg

SEQ ID NO: 449871 - DNA, 122 bp, Homo sapiens
ggggcctcctggagcgccttcagcgcctcgtgttttctttccttgggtccctgttagcgtcgccgcatgcacagcgctccctgtcatttggtccctgagcttgggtgtttttcacatttcat

SEQ ID NO: 449872 - DNA, 122 bp, Homo sapiens
tttcctggggaagaaggccagcaaaggcccagcacagtcacctacttttccctaccatgtcgccacaaaccactctctcaacacagcccgccaaggcccaagagttccatccacatttccca

SEQ ID NO: 449873 - DNA, 122 bp, Homo sapiens
aacatcacccgacctcaactacttgtctggttaaattctccagtgaacaggacaatttttcggatgtggctgcagccagcagaccagacctgggcagcaatggatgctgccgcgggtgcacg

SEQ ID NO: 449874 - DNA, 122 bp, Homo sapiens
agagccatggattattattctcaggccttgcttcaagggctttcctctaaagctagagaccgagaactgaagcccaggtcgcctctgctctggatccccaaatccatgtgagggatctgtct

SEQ ID NO: 449875 - DNA, 122 bp, Homo sapiens
gagcgcgcagacgctattggtaagactcgcgggaaaagaaagggtgagcgcggctggaagcgcgcatgcgctgtggctaatgccgtaggctccttcagggctgagccatcccgcgtgtcttg

SEQ ID NO: 449876 - DNA, 122 bp, Homo sapiens
agagaatttcagtctctcatggtccagtgtttgtaagaagatattcaaagaagcacaatccgaagaccaaaattaacttgtaaatgcattttaataacttcttgttctcaaaagtaaaggaa

SEQ ID NO: 449877 - DNA, 122 bp, Homo sapiens
tacttcggggcccatctgctgaagacggtgcgcctgctgcgcctgctgcgcctgcttccgcggctggaccggtactcgcagtacagcgccgtggtgctgacactgctcatggccgtgttcgc

SEQ ID NO: 449878 - DNA, 122 bp, Homo sapiens
catggggttaatatatagggccagtgctaacgagttagttatatggccaaataacgcctgcggcaagagaaacgggagttgacgtcctgacatttattttcaaaatagctgaacattttcca

SEQ ID NO: 449879 - DNA, 122 bp, Homo sapiens
tggaggagcgagggcactggtgctgattgagcggcaggagcccccgaggcggagtcccagcggctgcagccctcctttggatcaagccctcgcgtcttccgggcaggcggaagggaggcgtc

SEQ ID NO: 449880 - DNA, 122 bp, Homo sapiens
cggtgccattgtcagcagcagaggacgcagacctgggcagggtctcctccctgagaagcccgccctccgcgcccgcacctcccctctgtctgccgcgccccttccccgccgagcccatctgc

SEQ ID NO: 449881 - DNA, 122 bp, Homo sapiens
cagcgtgtaccggcccaaccagaacggccgcggtgagtacggccccggcgcccctccggccgcgcgtacccctggccactggaaactgctccgggccccccgggcccctccttagaacttcc

SEQ ID NO: 449882 - DNA, 122 bp, Homo sapiens
actgcgggtgctgggcgggatcagggtgtccccgcctgctccagagtgtccacacggtggcgcgcgcggtccagagacgtgacttgggcgccgcggctgccggggggcgtttccaccccgag

SEQ ID NO: 449883 - DNA, 122 bp, Homo sapiens
ttccccactcaacctcagaactcctctggcgccgactggccccactcgggcaaaggatggcggtggataggatgacccgaaccaccagagccagcaaacttaccccagccgccatggtgatt

SEQ ID NO: 449884 - DNA, 122 bp, Homo sapiens
ggcatgtactcggtgctcaggatgttgcagctactgaattattatcattgatttcttctgcgtgtgacctggatccacaagtcaaatgcaaaaatttgtcttgactgatggtcctctcctgt

SEQ ID NO: 449885 - DNA, 122 bp, Homo sapiens
cccagggcgccctctgcccagcggacccacttcccgaggcaggcgaactgggcgaggcagcgctgtgtcacccaccccgagcgctcaccgggcgcccaagctcgctcagcggaaccgtctcg

SEQ ID NO: 449886 - DNA, 122 bp, Homo sapiens
gcgggcgccggagcacgacgggtcaagtcggaatcgccacgtggaaacagctctcagcatcgcgaactccaaatcccgacgtgcaacgcggggcgggatgggaacagtttgcaggaactgca

SEQ ID NO: 449887 - DNA, 122 bp, Homo sapiens
tcctggcaggcagcagttaggttgaattgaattgaattggtgggcacccagcagctgtcccgtgacaaatccctcgcgtggtcacagaagtcttctgggttgactgttgtgcacagtgagag

SEQ ID NO: 449888 - DNA, 122 bp, Homo sapiens
tgatgagatattattggagctactgaaaagttaaacattaaaaatagtgtcctaaggaagcgctcatgacaacattccttaaaaagaaaaaatgcaaaatgcagaccaagaagccagattta

SEQ ID NO: 449889 - DNA, 122 bp, Homo sapiens
agtctccagctttgaaaactgggcaggcgtccccccatccgcacccccaccccttccccacgcattccccgctcggtcacggctgtccaccggccaagctcaggcgcgtcctggcccagggc

SEQ ID NO: 449890 - DNA, 122 bp, Homo sapiens
tagtggtgttctccaagtccccggtggtgcgtaacaccatgacaggcatggccaggagggcggccagcacccaaagaactgccgtggccacggccccgctgacccgcagcctcagccgagca

SEQ ID NO: 449891 - DNA, 122 bp, Homo sapiens
gtttgttttctcacggcacaggggcggcttccggggcgcggcgtgctgggggttgtagtccgcgctctgcctcctacttccattacagaaggcgatgggccgagagctgaggaactacaact

SEQ ID NO: 449892 - DNA, 122 bp, Homo sapiens
tgtctgtctttagggtgacaaaggtgccccagggagagcaggcctgtatggcgagattggcgcgactggtgatttcggtgagtgttgcccgtccagtgaaaacagggagtccacaattcaga

SEQ ID NO: 449893 - DNA, 122 bp, Homo sapiens
tcccaagtagctaggaccacaggtgcgtgtcaccatgcttggctaatttttttgcagaaacgaggcctcactatattgtccaggctgagtggctcttttattaaccagtcattacactgcgg

SEQ ID NO: 449894 - DNA, 122 bp, Homo sapiens
gacagttggggaccaggtttcactttctctgaaagatagcgatcttaggttggtcctctgcgaaagggccctgggaacagcgcctccctagtcaaactgctactttactgtggggtaaactg

SEQ ID NO: 449895 - DNA, 122 bp, Homo sapiens
ataacattagaaaaacttcccatcaaaaacaaacaacacaggaaagaggtagaaaaattccgattacaatttaatactttttaaagaagaggcagagagcaaaggggggtgtgtgtgtcagg

SEQ ID NO: 449896 - DNA, 122 bp, Homo sapiens
tcctgtagtttattctcatgctgccatctataggtgctttcatattatcacacgcttagccgggcctctgaattttctgtctggtagaagtcagagatataagtgggcgctgagtcagactc

SEQ ID NO: 449897 - DNA, 122 bp, Homo sapiens
accccagccaaggcaaaccccccgtacctgccagtcccccattttggcaagtatggacatcgcggctctgcgctcctggcgactggtccccgccgggcatgggctggagggctcggtcgggc

SEQ ID NO: 449898 - DNA, 122 bp, Homo sapiens
ggccctggcagcagtggcacacggagtgtgcacatggatcctagtcagccttttgcagggcgctgaagccagtgggggcccccagggaggttttgggggagtgttgagggggcctgaagggt

SEQ ID NO: 449899 - DNA, 122 bp, Homo sapiens
ttacctgcattcagcctgctggtggactgctgtttcctaacacctctgtaccaatggggacgatgttgaaattaaccatcaaaactgtttctctcgatgacagaggcaatgtcttagtgcct

SEQ ID NO: 449900 - DNA, 122 bp, Homo sapiens
taaataaatacaggtaggtagaggtcattctaagtgggatattaaacaattttttttttccggtgaatgttgaacttcttgtgtggcacaatgctctagtgtgcgaccttctacttgacagc

SEQ ID NO: 449901 - DNA, 122 bp, Homo sapiens
ctcaatctcttgacctcatgatctgctcgccttggcctcccaaagtgctgggattacaggcgtgagccactgcgccagtcctaatgagtcttgatgaccgcataggagtttgccaagggaaa

SEQ ID NO: 449902 - DNA, 122 bp, Homo sapiens
tgcaggaccactgtgggcgaggggctgtgaccgtcccggcccgtgaaggatcaatgtgggcgaggggccgtgaccgtcacggcccgtgcaggatcaatgtgggcgaggggccgtgaccgtcc

SEQ ID NO: 449903 - DNA, 122 bp, Homo sapiens
ggcatcgatggtgggcagctcctgtgttctgcacagagggatccccaggttgaaggatgacgtggaagcaatgacgtcgtggtcagggacgtctgcagggagcaaaatgaagcgagtttctt

SEQ ID NO: 449904 - DNA, 122 bp, Homo sapiens
tgaagcagcctttcagggccagaggggctgtggtctcccttcctctccttaaatagccagcgttccacccacagcggcaaggagccccctgccaccaccgacacccacgggcggagatcacc

SEQ ID NO: 449905 - DNA, 122 bp, Homo sapiens
attcctgctagtgcaggcctccaggtgaggaccgtgctgggcgaccttgggggtgcggggcggcacggtggatcttcactgctccacgcgctgcccggcgtcatgcaggtgacctcactcgg

SEQ ID NO: 449906 - DNA, 122 bp, Homo sapiens
ccgggtttccccagtgccgagtcccttccccgccgcgcccagcgcctgcgccccgggaggcggaagcaacaggggggttcctccccgcggcctctgacctctgccctctgccctctgccccc

SEQ ID NO: 449907 - DNA, 122 bp, Homo sapiens
acgaaacacaaaccacaactgacacaggaaaccaacacccaaagcatggactaaccccaacgcacaggaaaaggtagcttacctgacacaagaggaataagaatggagcagtacatgggaaa

SEQ ID NO: 449908 - DNA, 122 bp, Homo sapiens
agggagagccgcagcaccactcggtctcacacagacacaagcttcctggttctgtctgaacgcaccctgagaagcgaccatcagttgcttctcacacaaaccaaccgacagcaacacaactc

SEQ ID NO: 449909 - DNA, 122 bp, Homo sapiens
cactctggtgaaggaaatcgtcccctataacatggcccacaatgcagagcatgaggcttgcgacctgcttatggaaattgagcaggtggacatgctggagaaggacattgatgaaaatgcat

SEQ ID NO: 449910 - DNA, 122 bp, Homo sapiens
tctttacccccgactccctggagcttggtctcgggatgccaacttggggcacggaggcgacgggctgctccgaagctggagggtttctgcttgggtcagagggatcacgacctcagcagagc

SEQ ID NO: 449911 - DNA, 122 bp, Homo sapiens
ttgccttccaggaaatgggcttttcaggaagtgaattgatgaggactgtccccatgcccacggatgctcagcagcccgccgcactggggcagatgtctcccctgccactcctcaaactcgca

SEQ ID NO: 449912 - DNA, 122 bp, Homo sapiens
aaactagtgaacccggaagtgcttcgcggcggaggcccgggcaactcttttgaatggaatcgggctgattcatcgccggtttgcagacagagccgcgtcgggtgtgcgccgctgctgctgtt

SEQ ID NO: 449913 - DNA, 122 bp, Homo sapiens
aagcccagttggcttcacctctcaccatcatggccaatatcaagctatcaacaatgtcaacgtgcagctgggaagatgtgcaatagcacattttacagtatttctaccagacagatacaaca

SEQ ID NO: 449914 - DNA, 122 bp, Homo sapiens
ggcatgctcaagtgggagtggccaaggagagtttaaaggaagggttagaaagaagtgagccggatcgggagaccattatgggatggggaagcctttaccatacctaggcctgggaggttgag

SEQ ID NO: 449915 - DNA, 122 bp, Homo sapiens
agacaaatgctctttcaggggtcctaattaagtgtggaggcctgactttccttccgaatccgccccaggtgttccaccccgagcttcccctcgggcttcccctcgccacgcagcctctgaag

SEQ ID NO: 449916 - DNA, 122 bp, Homo sapiens
tggtcggccgcatctttccagatccttcccgcaaagaagcatatttgctccttcctgtctcggccacactgtgacgggagaatttaaccctagaaacttaaatttccttttttttttttttt

SEQ ID NO: 449917 - DNA, 122 bp, Homo sapiens
cgctgtcattcaccccgctcctctccgcgcacagccaatggagagacccagtcgaaaccgcgaagctctcttgcaccgggctttttcgcctggtgattgatgtcccagagtcaacagcgagc

SEQ ID NO: 449918 - DNA, 122 bp, Homo sapiens
ctgcgaaacagaaaagacaaggcgcctgtcgggcggggtgtggcttcgggtggcggagaacgctgcgattggccctcggctgtggcgacagcgacgattggtccctgcgtgcagagcgcggt

SEQ ID NO: 449919 - DNA, 122 bp, Homo sapiens
gggaggaggggggctgcccgatccttgggagtctgcggctttcagacgctcctgggggctcggctactggggtcctaaggaggcgagctggccccctcattccgccccgcaggccgtgcctc

SEQ ID NO: 449920 - DNA, 122 bp, Homo sapiens
ttaggtgccagtcctctccctgtaccgatgaggaaaaggaggtgattctttccacaaccccgcccatcatgagtcaggacttagaaataaacaaacaccagctcggagcaacaaaagccctg

SEQ ID NO: 449921 - DNA, 122 bp, Homo sapiens
ggtgtggcctcctgtggatggcccctgtcctgggtggtactgctgcaggacctgggtttccgggggtgtccgggagtcggatgggcctcactctcctggcctccactgggtccaggagtggc

SEQ ID NO: 449922 - DNA, 122 bp, Homo sapiens
atcgcggaatgtaggtgctcataagctggagacccacggaaagaacctagaagctccgagcggttgcagacagcactgcattgagccaacgactcctgctctactgatggtgattccacagc

SEQ ID NO: 449923 - DNA, 122 bp, Homo sapiens
gggaggtggccaggcccggcagggtgagggcgctggcgttggccgagagtccctgggcagcggcggcgggaacgcggaaggttccctccacccccaccccaacccccacccccacccccggg

SEQ ID NO: 449924 - DNA, 122 bp, Homo sapiens
atcatgcccttttccagtttggacactgctagggggcctcctcctccctgggagtttccacgccaggctgaccatcagctggctggaaggttcttccaatgtgcagacctccaggccctgca

SEQ ID NO: 449925 - DNA, 122 bp, Homo sapiens
tatatggcagttagcaaaggtcacttctgatggaacgaccggtctatgtggtgagcgcaacgcacaccaaacttaacaggttaaatggagctggagcggagcgctgcaggcaggtgcggggc

SEQ ID NO: 449926 - DNA, 122 bp, Homo sapiens
gccaggcccacaatgtccaggactccactgacgaggaccttactgacaaggcctcactgacgaggtccttactgacaaggcctcactgatcaggttccaccgatcatgaccccattgtctgg

SEQ ID NO: 449927 - DNA, 122 bp, Homo sapiens
tctcttggtactcaaaattgcaaagtaaaacggaggcagccctgactcttgtcctcctcccgttcgttcggggcattgttctcccctggggacacgcctgtccctttctccccactccggag

SEQ ID NO: 449928 - DNA, 122 bp, Homo sapiens
ctccgtttagctgttctggagctccagcatattgcacgaacagcggcggcagatagtccacgcattgggtagcccgagcgcagcgccctctccactgtccctgcttcccgcagcgcttctag

SEQ ID NO: 449929 - DNA, 122 bp, Homo sapiens
cgtccgctgctctgcggggcctgaccggggcggcgacctctgggatccgcggcggtgcgacgccgcgccctggccaagcaacccgcacaccactgactggggatccgggcccaacctcaagg

SEQ ID NO: 449930 - DNA, 122 bp, Homo sapiens
cccacctcccggcggggagaggcctggggcgggcgccagccccatccagcccgaagccggcgcctgctggtgtagagctgggtccccagagacctgggtcctcggcccataaaagccctggc

SEQ ID NO: 449931 - DNA, 122 bp, Homo sapiens
acacatgtcatgtcaggtccctctctcatggcatatgtgcagattctacatggagggggacgctgtgctgtgtcctccactccagcactaagcccttctaaccctacagtagtgtggttcca

SEQ ID NO: 449932 - DNA, 122 bp, Homo sapiens
gcccactgcgcctgagcacgtagcggtgcatttcgggacctgtagttttccccggcaggacggtagaagtcgtggtttgtgcgcggccaggcgctggagcctccgctgccgggagcagtaag

SEQ ID NO: 449933 - DNA, 122 bp, Homo sapiens
gccggagggcccaggacagccccgggagggcggcgaggcggagcaggagcgccccggctccggccacattctcagagtcaggaaaaggggcgagaggccacatgtctccctctcgcccaact

SEQ ID NO: 449934 - DNA, 122 bp, Homo sapiens
cttatgagtcttgagctgcatttccactggggttgtttgctgtgggaggctggtttgctccggtttatggaactgtccctccaagatagttttagctttgcctctgctgaggcctactctat

SEQ ID NO: 449935 - DNA, 122 bp, Homo sapiens
aaagagagacttaacagcaagcattaaaaattggatcaagataacaaagtcaatagctctcggtgtttaatgccagctatgaacaggagtcttgtttgagtacatttcttagtattaagagt

SEQ ID NO: 449936 - DNA, 122 bp, Homo sapiens
tttcaaagtggaaactaccctatatagagtttctgaagcaccttcaaggatattatttcacgaagttgaatctaattttacagatgaggaaaccctttccagaaagataggtgggcttgcat

SEQ ID NO: 449937 - DNA, 122 bp, Homo sapiens
aggctgagcgtcccagagcgcaacctccctttcccccagcagcgccggcgccgcagaagccgcgtgtccccaggcgcactcccccaaggtgaacccccgccccccacggaggcggctgggtc

SEQ ID NO: 449938 - DNA, 122 bp, Homo sapiens
cctagaagaaactgggatggaaggccgggaagtaggaggtgtttgctcaacttctgaggacgtcacgcctctgcctcccgtagccaatcagcagccgccctgagggaacaaccttctcatct

SEQ ID NO: 449939 - DNA, 122 bp, Homo sapiens
cgagacccggcatctcaccgcgcacgttagtctgggggacccccggcccctggcacgcggcggagactcgtatttgtgctgcctccggtacaccatagacgcgtccacagagtgggggaccc

SEQ ID NO: 449940 - DNA, 122 bp, Homo sapiens
tggggtgctgtgggagcctggatctggcaggactgctctggccagtgtcccggctgccagcggctgggcagggaacccgaaggagcccggagcccctccccccccccccgctccctgtgcgt

SEQ ID NO: 449941 - DNA, 122 bp, Homo sapiens
gcttccaggtctaactggatcttttctctgtgcacatcctccgcagactgccaccatgtgcgaggaaaccggaaggatgagtctgccatggcagatggcaggtgagccaggtgaggataggc

SEQ ID NO: 449942 - DNA, 122 bp, Homo sapiens
ctacaggaaatttgtatcagctacttggactgctgtcagcgggagcgcagccgccacagccgccacaagatcctcaggtgccagctggggacatggttgtgcagctgggctctggggtcctc

SEQ ID NO: 449943 - DNA, 122 bp, Homo sapiens
ccggagacccccgtggggcttggcaaaaaaaaaaaaacccatctcgggcgctgctgggggcggaaaggcgtcaggcgcatggagccaacatactccctggcagcctccgcccggcgggcccc

SEQ ID NO: 449944 - DNA, 122 bp, Homo sapiens
tattaaggtaaccaggttgaatcttccaatttgagaacccatgtatgggttgcagtgagccgagatcatgccactgcactccatcctgggcaacaagaacgaaactccgtctcaaaaacaaa

SEQ ID NO: 449945 - DNA, 122 bp, Homo sapiens
acagccgcacaatctgggaagacgcggagctgtgggcatggagctgccccagagagggcgcgggagccggggccgcagttgctgcgcagaaacgggacaggacgcccggggtcccggctgcc

SEQ ID NO: 449946 - DNA, 122 bp, Homo sapiens
aaaagcaatttgtccagagattatgttaccataaagactgaaggtggtaatgctttaaaccgcatattgaactcaagtgtgagcttgtctgtgcctgggggtatttgttaatgggtacccag

SEQ ID NO: 449947 - DNA, 122 bp, Homo sapiens
gagagttagacttgaaggggattcaaatctggcatgtgttgggggatgtctcaaataagacgtagatgccccagagccatgccctcccatgggaggagggaaaatgggatttttcactcggc

SEQ ID NO: 449948 - DNA, 122 bp, Homo sapiens
gagccagagagtctgctagcaagttggaagttagctttgaggatgccctttctggtattgcgttagaaaggaggagaagaaagtcgcatgtttttaattcaggttgcccttcaaaactaagt

SEQ ID NO: 449949 - DNA, 122 bp, Homo sapiens
cagccaacccgggattagcgagccagccgcttcaaaagtctaggcgagaggaagccgagacgcgtcggccttcgccgggctggagcccctgccagatttagcctcccgcctggccttttctc

SEQ ID NO: 449950 - DNA, 122 bp, Homo sapiens
atgcttggagagcaccaatgctctatgaagttaccattactgcagtcaaaaatccattagcgttgacaccactctgtcaacattttattccttggggagaagcaacaccaacatccagagtc

SEQ ID NO: 449951 - DNA, 122 bp, Homo sapiens
ttggccgtctagggggcatgtggcctccctgagtccccttaagccttggggaccctgactcgggtctgtggcgagggggcccaggcaggaggggaggctgcggtggctttggccgccgtctc

SEQ ID NO: 449952 - DNA, 122 bp, Homo sapiens
ttgctgctagcaggaagtggctaagctggccatcgtatcacagggtaatggcacctggtgcgctggacacatcaggatgggtatgagttgctggcaggaagctcttctcttgcccttcgtcc

SEQ ID NO: 449953 - DNA, 122 bp, Homo sapiens
cttcatgttcccagggagagatcttcaggcccatgaggcctctgcttcctcgagaacccccggcctgcctcggggcctgggaggaccctctgtgggagccggtggtcagggggagtctcatg

SEQ ID NO: 449954 - DNA, 122 bp, Homo sapiens
gcctcggcctcccaaagtgctgggattacaggcttgagccactgcgctggcctaattgttcgatattttaaatgtttaaatgaccggcaagtcgtaggtgctcaacaaatatttgttgaatg

SEQ ID NO: 449955 - DNA, 122 bp, Homo sapiens
ggcgccaacggccgcgggcagtgaccagcttagcacctgggccagcagctgtagaggttgcgccgggtccctcagcactgccggtccgcccgcgcagcgcttgaattctcgccgggcctcag

SEQ ID NO: 449956 - DNA, 122 bp, Homo sapiens
gtgtgctgacaccagtatctggagacacatcgtgagggacagacacagtgtggggggtgccggacaaaggcataggtggtcctgcaatgtgtgcggcagccaaagtcacccatgtccaactc

SEQ ID NO: 449957 - DNA, 122 bp, Homo sapiens
agcagggatgaacttacccgtgtggattctggcaactccggcagggagggctccagcaggcgctgagggaagaactttcaagcagagccgggtctcttcaggagcgactgcagcaaccctga

SEQ ID NO: 449958 - DNA, 122 bp, Homo sapiens
tgatgaggcaaacgagaacaaagcagtcgaacagcaccatgatcgacgatactttgggggcggcgtgatcagaggattccccttcccgggaacttgcgtctagtcctctgacgcatcctagt

SEQ ID NO: 449959 - DNA, 122 bp, Homo sapiens
ctgtggtcccagctactcgagaggctgagatgggaggatcggttgagcctgggagttccacgctgtagtcatccgtgattgcaccactgcactgcaggctgggcaacaggaagaccctgtct

SEQ ID NO: 449960 - DNA, 122 bp, Homo sapiens
tttatatcccttaattttgagctcataatgtttctgctctgggtttataagagataccaccgaagaaaaatctcaattagagtgagataatttgtaaagtaataagtagggttttttttgtt

SEQ ID NO: 449961 - DNA, 122 bp, Homo sapiens
tttgcaaccgggtcttgctgtgtaccacaaacaccgcctgtctctgggatgacacggatgcgacagtttggctttgatcctaggattccacctgagcggaaacatccgcgagccagggagtc

SEQ ID NO: 449962 - DNA, 122 bp, Homo sapiens
caaataatgagaaaagtgagtgttgaatttcccttgacataacccttttggaaaatgcagcggcagatgcaagaagaatgtgacttatattataatgaaagcaaaaatattttcaaatagat

SEQ ID NO: 449963 - DNA, 122 bp, Homo sapiens
cctgaggatgcgccgctcaggtgggagcttccggggagctcgcgcgacagcctgggggagcgcggattcgtctctgcgctacggcggctgcagagggtcaacccgcggaggcggcgcttcgc

SEQ ID NO: 449964 - DNA, 122 bp, Homo sapiens
agttccttgttcttttcactgaagactgcccattcattcaatctttcacctatttgctgccgccttaaggagagctgaaaagtttaaaatgggagaataggcaaaatgattatcagagagaa

SEQ ID NO: 449965 - DNA, 122 bp, Homo sapiens
tgctctgcgtcctctgttcctagaggccaagccactgtggccttgtgttctgcaggtatccgcagatttatggctaaaagaccgggatcccctggaagccgagaaatggtgagtgctgggtc

SEQ ID NO: 449966 - DNA, 122 bp, Homo sapiens
gtgggtgctgtctgagctggtggactgaggaatccagtgcttctcttctggctaccccctcgttgtcaggaaggacccccaggccacagatggggatgacagcaggtcccttgtctctggct

SEQ ID NO: 449967 - DNA, 122 bp, Homo sapiens
cagccttctctgctccccacacctatatgttgatgatgcccaaatctctgtctccagccacgacctctctttccccaagctccatttgcataaactgtctctgatgagatttagggcgctta

SEQ ID NO: 449968 - DNA, 122 bp, Homo sapiens
gggggtggaagggtggctcctgatttaggctcccgggcagaggatgtgagctcagccggccgccccagcacaccccatttcctctggccaaagaaggagattgttcagaaaagggagtggtg

SEQ ID NO: 449969 - DNA, 122 bp, Homo sapiens
aacgtccgatccaagcgccaaattcaaatttgcggccatcttgagcgggcggaattcagtcgcgcgcggtgcagtcgggaggtggaggcaccggctgcattgttttcgggatcgaggggtga

SEQ ID NO: 449970 - DNA, 122 bp, Homo sapiens
tttgctcagagggagggtggggagaaagcttggtgggtggaggttttggtaattcatgcccgcatgactataagagagcttccaggaaaccacgttaccagcatagcaattgttttcactgc

SEQ ID NO: 449971 - DNA, 122 bp, Homo sapiens
ccatcccgaaagcgctccccacccttccccggtccgtggaaaaagtgtcttccacgaagccggtccctggtgcgctggtttcacagatgcggagtctcagtttagccaggtgagagttccgg

SEQ ID NO: 449972 - DNA, 122 bp, Homo sapiens
gctgagcagactggtgactagaagcagctccccgtcgggctgcaccctccctctgtccctcgcgggggcatctgcagaagggcactgaatgcgctccccaccccaggaaacccagcccctcc

SEQ ID NO: 449973 - DNA, 122 bp, Homo sapiens
ttcccaaactgtagctctgtccccactccactcaccccaccgccctccccaggccctggccgcccccagttgacttttctgtctccggatgtgactgctctgggtgcctgctcctcgtggga

SEQ ID NO: 449974 - DNA, 122 bp, Homo sapiens
acaccattggagaaaacacagcccagtgtggctcctctcctactgatgccccacactcggcgtggtccctggagctgcagccctgcctccagatcctagagttccaacttgggcaagcagga

SEQ ID NO: 449975 - DNA, 122 bp, Homo sapiens
tttctcctctgtcaaatggaagcttattctaccctaggaggacgccttagggttctgactcgaatatcccatcatgttaggggaagaaaaagttgtttttagtgtctttagtatcttggtac

SEQ ID NO: 449976 - DNA, 122 bp, Homo sapiens
cctccaccttgctccctccctggctgccggcttccttttgtctttctgggcggcgatgagcgcagggccggcgcagcagctgcgggcgcacggaggcccgcgctgctagtcactcctcccgg

SEQ ID NO: 449977 - DNA, 122 bp, Homo sapiens
cacagcgacatccaacagattcattaacatagcaatcgcaggagagaaaagaagcccaggcgattctggtgaatgctgagccttgttctaaattctcatatagaatctccatagaaccagga

SEQ ID NO: 449978 - DNA, 122 bp, Homo sapiens
atgaatttgtgttggggcacattcaaagccgtcctgggcccacatgcggcccatgggctgcgggttggacaaacttgatgtagaagtggaggggatgggctacacaaagtaaccaaggaatg

SEQ ID NO: 449979 - DNA, 122 bp, Homo sapiens
tcctgctctgcctcagctggcctctgtccctgcccctctcccagcctcagcttccacatccgtagaaggtggatgctaatagcacagggttttgtgacacttttacaagcgtgtctctccat

SEQ ID NO: 449980 - DNA, 122 bp, Homo sapiens
gcagcacagagaggaattagcggtgggggaaattttcatcaccaccggtgatgtgtgcaccgatggtagatggctatccagagtgtaaaaatgtgattctgggaccaaagggtcagctctag

SEQ ID NO: 449981 - DNA, 122 bp, Homo sapiens
tacgtacgtttttcgtcgctttcccacgatcacacagatctcaggtccaggaggacgcatcgtctttttagtaacagtgcatgctgtgaggcttgtagagtcgcctctctcttcaggcgcag

SEQ ID NO: 449982 - DNA, 122 bp, Homo sapiens
ccgcctgaggagccgaagcagccccggccccgccgccgccgcctgcccgccggacaaagccgagagcccgcgcccacagccatgtcctcgtcagccggcagcggccaccagcccagccagag

SEQ ID NO: 449983 - DNA, 122 bp, Homo sapiens
cccgacggtctgtcctcacccagctgtgtgtgtttctcacacagctgttatcttgtgctccgaaaccccaagcccgccacggcggtgcttccgcgggcccacagctgccctcctctcctggc

SEQ ID NO: 449984 - DNA, 122 bp, Homo sapiens
tcggcgtggcccaagaacgggaagcggcagcgtcctggcgtcctaggtgagacttcaagacggctccctgctcccacctgggctaaaggtggaaccccaggtgtaaagagccccctggggta

SEQ ID NO: 449985 - DNA, 122 bp, Homo sapiens
cgggggttggggtggcgtggtgcaggagcacagtcgcacgcccctgtgctgggggtggggcgcggtgcaggcgcggagacgggtggaacctcagtaattcgaaaagccgggctcgaccgccc

SEQ ID NO: 449986 - DNA, 122 bp, Homo sapiens
atgcctagtggcttaggcagaggtggatccacgcctgacacagcagggtccggtagctcacggggcacaggggaggggtgctgcctggagccccactgggccctgaactgacttgtccttgg

SEQ ID NO: 449987 - DNA, 122 bp, Homo sapiens
ttccctcaactctgtttttagcagatcttattccaaactgcctcagagccactcccagctcggtgggggcagctgggtgtggtgagcacaggacactcctttggacagatggacgggcggag

SEQ ID NO: 449988 - DNA, 122 bp, Homo sapiens
caccggtgtgtggcaccacaccaggctaattttcttatatgtttgatagagacagggtttcgttatgttgcctaggctggtctcgaactcctgaaggagctcaagccatctgcctgctttgg

SEQ ID NO: 449989 - DNA, 122 bp, Homo sapiens
tcgggctcagagagagatcgtttagacacacacacaactttggaatgaaacatttacagccgggcgcggtggcgcgtgcctgtagtcccagctacttgggaggctgaggctggaggatcgct

SEQ ID NO: 449990 - DNA, 122 bp, Homo sapiens
tcaagccgggaggcgcgcagtaaccaggaggatgagagggccgggtttgggctaggaaagcggccttttaaaacagatgtcagggggactgcagccccgagccatgagaaaaaagttaaagg

SEQ ID NO: 449991 - DNA, 122 bp, Homo sapiens
ggtacaatccctaaactggagttgggtagtagtgagctggcactcccttatgacctctggcgcaatagcctcagaatcagacatggtccagaacttgaaggacttagaggaatggctgcata

SEQ ID NO: 449992 - DNA, 122 bp, Homo sapiens
tgcaaacaaagactcttgatcaagagggaggctgaagaattcagtgtgtggggaaggagacgtaggaatggaggaaagggcagaggaacagcaaacatcaagctacagggacacgaccttca

SEQ ID NO: 449993 - DNA, 122 bp, Homo sapiens
cgcccctggccaagttctcccagcgtccactctagggcctgctagcaccctctcgggcggcgcgccctctgcgtacctaaggagttcacgcacagttcggcggcaccgcagacggggactcc

SEQ ID NO: 449994 - DNA, 122 bp, Homo sapiens
gggcggggccgcggcggcgcgcggaggccgagctcggctgggcttggcgaggctgcggcgcggccaccggcgggagtgcagcggccactgtacccagagattcaaaaccccaaacccgggac

SEQ ID NO: 449995 - DNA, 122 bp, Homo sapiens
tggcagtgaattgttctcatgagacctggtcatttaaaagtgtgtggcatcagccgggcacggtggctcacgcctgtaatcccagcactttgggaggcagaggcgggcggatcacgaggtca

SEQ ID NO: 449996 - DNA, 122 bp, Homo sapiens
agctcaatgagatcgatgcccagcccgggggctaccacgtgctgaccctgcggcagctggcgctcaaggactcgggcaccatctactttgaggcgggtgaccagcgggcctcggccgccctg

SEQ ID NO: 449997 - DNA, 122 bp, Homo sapiens
tgtgtggtttctcccctgagttggaacacagcagaggtgctgttggctggccactccatgcgtccggtcaggtggttcctctcaccatcctgggtggctccctgctgccaataggatgaagc

SEQ ID NO: 449998 - DNA, 122 bp, Homo sapiens
ggatccagcctgcaaatgcacgttgattgacatacgtgattgacatacgtgattgacatacgtgtgtgcaccggcctgacagcactgccttctcggccctgtccctccagagcttcttcaca

SEQ ID NO: 449999 - DNA, 122 bp, Homo sapiens
ttagagcccttaatagttatgttgatggtagccttattccttggtctcctgggtcctgcccggccttccctgggaagctctgagctcaaagccctggaggagggagtaaaaccagaggctgc

SEQ ID NO: 450000 - DNA, 122 bp, Homo sapiens
ggggccgagtgttccgggctctgatttttgctggctgagacacagggacccctgggtgtgcgggaccgtgccgggaagtgtggacatgggtccgggctgaggacttcgtcaggtgtcaggac

SEQ ID NO: 450001 - DNA, 122 bp, Homo sapiens
ggttcatctcaccagggagtgccagacagcgggtgcaggtcagtgggtgcgcaccccgtgcgcgagccgaagcagggcgaggcattgcctcactcaggaagcccaaggggtaagggagttcc

SEQ ID NO: 450002 - DNA, 122 bp, Homo sapiens
agaccagcctgaccaacatggagaaactctgtctctattaaatatataaaattagccaggcgtggtggcatatgcctgtaatcccagctactggggaggctgaggcaggagaatcgcttgaa

SEQ ID NO: 450003 - DNA, 122 bp, Homo sapiens
ctggcagatgaaggcccggtccttcctgggctcctaattggggacactacatccaagagccgtgacagggttcagcaacccgcgtgcagaatgccggcttccacggggcacgctttataaaa

SEQ ID NO: 450004 - DNA, 122 bp, Homo sapiens
gctcccggctcagctggagctttctgcgcccgggtcctagagtcgcccatttctctaaggcgccttggccctatttttagagagcggtatttagaaaccaagattagggtgctaacaatttt

SEQ ID NO: 450005 - DNA, 122 bp, Homo sapiens
ggcagttccagcccatgacgggcagcagccccaggcagatggaggtcccccagagcatgacgagcatgacataggtaaacgtgaccgtcctctccgaatggtacgtcagagcgtagtacagt

SEQ ID NO: 450006 - DNA, 122 bp, Homo sapiens
cgaaaaattcctcctcttccctataaaatcctaaacgtggggtcctctgcagccaactgccgcttgggccgcctccggaaaaagtaccgggcggggggaggggggacaaccacaaacactcg

SEQ ID NO: 450007 - DNA, 122 bp, Homo sapiens
cggccgttgcgcgggctgatgacgtacggaagctgccggcgttgccctctcccaagatggcggccaggtcgcctgctcgggcctcccaggcgactttgccccactgcgcccgcgctctcttc

SEQ ID NO: 450008 - DNA, 122 bp, Homo sapiens
acacccagtgtgactgaacaatgtaagccagggaagagtggaaagcaatggggtgttcttcgcatcagtggctgccagggagagatgttaattgtgtaccctggctggtggcattcggaaat

SEQ ID NO: 450009 - DNA, 122 bp, Homo sapiens
ctcaggatcagcgtctctgagagtaggagtgagaatccctggggacaaccctggctgccccgggaggggccctgcctaagtgccagtgaggaatcctttgtaggtgtccagggaaccctgct

SEQ ID NO: 450010 - DNA, 122 bp, Homo sapiens
cgcggcgaactactttcagcggcgcacggagacggcgtctacgtgaggggtgataagtgacgcaacactcgttgcataaatttgcgctccgccagcccggagcatttaggggcggttggctt

SEQ ID NO: 450011 - DNA, 122 bp, Homo sapiens
gggccgccatgctaaagggccagccaatgggaacgcgtctcggggcccatggcgccaatccgcgcgccgcaggccctcctggctcggtgcgctgtccaatcagaggggagagggggcgggac

SEQ ID NO: 450012 - DNA, 122 bp, Homo sapiens
gggggctccggctgtggccctcgagggatcacccattgggcgggctgggatgagagggtccggggcctccccggggcgggggtcgtggcgggtcccggggcctccccggggcgggggtcgtg

SEQ ID NO: 450013 - DNA, 122 bp, Homo sapiens
cagtccagcccctccccccaagaaccgctgcacttcctagtcaaaagcaaattattgattcgtgaggtcagtcgctcccaacagtgggcggattgcccactggcctcggattctccttaccc

SEQ ID NO: 450014 - DNA, 122 bp, Homo sapiens
tgcaggccacctaaacagctatcgcaatgtgggcattgatcaagccagctgccagggcagcgggcgcagggcttgggcactggagcccagccccggaccgcacctccagcagtgctgggtgc

SEQ ID NO: 450015 - DNA, 122 bp, Homo sapiens
cactgtcacagccaccaccagcaccaggaccaagggagccgccatgataactggggcgggcgcgcgggcggggagggaaggcgaggcggaggagcctcgcgcgctgtgcgccacgctctgta

SEQ ID NO: 450016 - DNA, 122 bp, Homo sapiens
ggcagtcaccgatccctttctccccctcactgggggacgtttgccctaagactggctcctcgcctgagctgagaacttggccttggggtgggagagaaggatccctacccgggccggcgccc

SEQ ID NO: 450017 - DNA, 122 bp, Homo sapiens
gccctgccctcattccaccaacagcttgtgatgccaatgcccatctcccaggggctgccccggagagcacaggtggtcactgcaaagccgatgtcaaacctcatgtgtgtgcatggatgtgg

SEQ ID NO: 450018 - DNA, 122 bp, Homo sapiens
tgcggtcgcacggtgatagaggtgacatccgtggtcactgttctcccagatgcccacggtcgcagagagctcgagcccgggcttcagcacgcagcacctcacaggcccctctgccatagcaa

SEQ ID NO: 450019 - DNA, 122 bp, Homo sapiens
ggggcctaatgggaagtgtttgaatgtttcatgaatagactaatcccctcctggggagaacggtaggagagttttcactctattagcttccatgaagctggttgttaaaaagagcctgggag

SEQ ID NO: 450020 - DNA, 122 bp, Homo sapiens
ttaaatatgtttgcaaattttattataaaaatgcaatggctttgttctctccatggcttccgggaggccccaggagtaggcttccctggctgcccaaggtctaaacatgagctgttggctga

SEQ ID NO: 450021 - DNA, 122 bp, Homo sapiens
cccagctgcattctgccctcctgtgcctgctgccgctgccaccaggggtcggctgcctcccgcctgtgcccttctggggcccaaggccccgttccctgggaatgggtgaggggccaggcctt

SEQ ID NO: 450022 - DNA, 122 bp, Homo sapiens
ggtttgggcgaggaggcagtggggactgcatgtccagccagtcgtggttgacagcggcagcgtggccttggcagacaggttggagctgtctgggctcttacctgtgggccgccccgccgggc

SEQ ID NO: 450023 - DNA, 122 bp, Homo sapiens
agtggatgaaacgataatgtggctaacaggcagcagtaaggaggctgtgtagaataaacccgtaatcccgatgttggcagtttgcttagaaagaaaaagggaggcagtcggagaggggcaca

SEQ ID NO: 450024 - DNA, 122 bp, Homo sapiens
tttgttctccaaactagccttccgggccacacaaatacccagacagtgatttcaaaataccgaaatcatagactgaagtaacagagccatctaggatttctgtaaggctgaatgcctgtttt

SEQ ID NO: 450025 - DNA, 122 bp, Homo sapiens
tgtgttctttctccggggatcagatctcaccctctttctgccgtacttcctcatctcctacgtgtggatgatgatattgtgccctgtgcatgttcttcgtcaccaaaagtgcctctctcata

SEQ ID NO: 450026 - DNA, 122 bp, Homo sapiens
aactctccatggggtaaacttccgtgagacacctctaacaaacctggagaggccagaattcggggcaaaaagcaagtgatctggatgtgcatactaggagtgactgcacccctactggccag

SEQ ID NO: 450027 - DNA, 122 bp, Homo sapiens
gagcacctgctcccggatgcctgaggtaggcgtcctccccgaagcacccctctcctcaatcgaggctgctgagcgcctgcaaggcctggctggaagccagctcgacctccagccttggaacc

SEQ ID NO: 450028 - DNA, 122 bp, Homo sapiens
tggcctcccgtgtgtggcaagcactgccgctttcccgttgatcacctgttgggccactgtcgagaatcacggctggggtgagaactgtggcttggcgtcacttctcagtgagggttactttg

SEQ ID NO: 450029 - DNA, 122 bp, Homo sapiens
tcgctctgcgttcagcaccgccgccatctccggctgctgcacctcctcagcggggacagacggcagccacgtatcgacttcctgctgacctctgacctccgcttaccgacaccggaacttcc

SEQ ID NO: 450030 - DNA, 122 bp, Homo sapiens
cacggccgcgctcagcccggctccgccgctgggaacccgagctggggatcgggagccgcccgcccgggctgggcctccaccactggcctcgcgaaaaaacagaaaagaaaaaaaaaaaaagt

SEQ ID NO: 450031 - DNA, 122 bp, Homo sapiens
gcccgcagcgcacatcccggagcacaggacaaaacctgtgcctgcaccggagcccccatccggctcccgcaacactgacccccctgggcagcctcgggcacggggcacctggaaagccagcc

SEQ ID NO: 450032 - DNA, 122 bp, Homo sapiens
tcgcgccccactgccggctgcgtcttctccctcgctgaaagtctgaagggagccggcttacgtttctgctccgcttgcctagtgagtcttgagctggcttgaggtgtgttggacctggtggt

SEQ ID NO: 450033 - DNA, 122 bp, Homo sapiens
cttccacttccctcatcttacttttttgggattgcacccccaatacaaagtcagcaaatccgctgagctccagagaactcaggataatttactgtctttctgtctacctatctatcttaata

SEQ ID NO: 450034 - DNA, 122 bp, Homo sapiens
aatataggtgaagcacttaatgtgctgccagttacatcagtacgcaagaaaagttagcaccgccattataataaccctgaatcataaagacctgaatgcccttagtcagagcaccacccaga

SEQ ID NO: 450035 - DNA, 122 bp, Homo sapiens
agaaaccacggtggacttcccggagaagggaaatgtggagcagggcgggaaggagcaaaacggggcaatttttggagacaggagagagatgtctcctcttgggagaagctcagcaaaggccg

SEQ ID NO: 450036 - DNA, 122 bp, Homo sapiens
cacagctccggctacacagggcggcccccttccctttgatggctggttttacaggaagtgcgtctcccttcccgagtgttccgtccttcaaggtgtgtcacacatagctgtgtgcagttaga

SEQ ID NO: 450037 - DNA, 122 bp, Homo sapiens
tttaaggctgtccagtgcactgtagagcctggagctctacacaagctcatgcttttaattcggcaggaatgtccttggtttcctgatcaaggaaccttagatttagagctatgggagcaggt

SEQ ID NO: 450038 - DNA, 122 bp, Homo sapiens
agatggatccagggttcaaagctggggtcagcggaggctctacactaacaagacaggtcccgggttcaaagctggggtcagcggaggttccacactaacaagacggatccagggttcaaagc

SEQ ID NO: 450039 - DNA, 122 bp, Homo sapiens
aacaggagacactacttttctgccttttgggagagaggtagaaattggaacactgacctacgcttttcattgttaactctttggatttatctggactcaggctgagctgaaggtctgaaatc

SEQ ID NO: 450040 - DNA, 122 bp, Homo sapiens
ggagagccgcgcaatggaaacctgggtgcagggactgtggggcccgaaggcggggctgggcgcgctctcgcagagccccccccgccttgcccttccttccctccttcgtcccctcctcacac

SEQ ID NO: 450041 - DNA, 122 bp, Homo sapiens
acccggggacctgcgaaacaccgatgcctgggtaccggactctatccgcgcctccccctgcgagagattctgacttaattggcctgatgcaatccgggcgtcccctggggatcacagtgtgc

SEQ ID NO: 450042 - DNA, 122 bp, Homo sapiens
ctactcagattccatagttagaatattctcacaagaaatacactctacgcaagtttgaaacgcaggatgtcttttaactggaaattggtactccatgagtagaagtagatgagtttagagag

SEQ ID NO: 450043 - DNA, 122 bp, Homo sapiens
aattaaaagagagcaaagagtaagaagtctctttccttaaagtttctttggccacttgagcggagcttcccagagcagtaaactcctttaggatagggactgttggaattaaatgagctggg

SEQ ID NO: 450044 - DNA, 122 bp, Homo sapiens
cctgggcccagagcccacacgggagccaggacccttgctccttgcccgtgcctaggctgccgtgggtggcagaggaagggctctctggtccagactacccttctgtgacttgaacaggaaaa

SEQ ID NO: 450045 - DNA, 122 bp, Homo sapiens
gactcagaatgcagccacgtagataaccgctgactcagttataaattccttagctccctccgcaggcctgggtttgagggacaggtgactcacagactgaccctctctttggtctggttttt

SEQ ID NO: 450046 - DNA, 122 bp, Homo sapiens
acagaagcaggtaatcaaagaacaaacagtcctgtggtgtttggagtctcccttggctaccgccaaagcctctgtttgatttcttgcatggcaacaaaaccaggaggggaagctgagtggct

SEQ ID NO: 450047 - DNA, 122 bp, Homo sapiens
tgctgaatttatctgccacaaaagactgctcttattcacttttacctaaccagtggctctcgggtcacagagttctctggggattgcagccagggtggatcttttctgaaaattggaataaa

SEQ ID NO: 450048 - DNA, 122 bp, Homo sapiens
gaacaaattacttcatctccaggcccttctcagggcagcttctttgcaggggccatagggcgtcggaaaggtctttggtccaggaaagccgcgagccacagatccaagaggaaaaagccgtt

SEQ ID NO: 450049 - DNA, 122 bp, Homo sapiens
tatggggagttctcactttcatcatcagtttttaagtctctgtacatgatagagtgacagcgattcatgtaatacacttgtgttgaagttttctgataaacaaaggtagcaacaaaaacttt

SEQ ID NO: 450050 - DNA, 122 bp, Homo sapiens
cctctgcgctccctcttcccactccttaaaaattcagaagatcctggcccaagagaagcccgcccagcataggcggattgggctcccggactcccagattcagcacgcaaacaccccctccc

SEQ ID NO: 450051 - DNA, 122 bp, Homo sapiens
actttcatcagaagaaagtgctcccattgcattattagctaaaccatgttgcagtggcaacgctccttcttccagcttgcctcggtgtttctgtagttagcatcaggtgtccttggttctgt

SEQ ID NO: 450052 - DNA, 122 bp, Homo sapiens
ccctcgaccagcaccatcgggccaggatcagatatatgtgctcgcccatacctggtagtacggatggtgcaaaaaggaatctgggcagccggctaaagccatgggttccttctgccttcttc

SEQ ID NO: 450053 - DNA, 122 bp, Homo sapiens
tggtcgccatggtgctgcggcggcccccgtggctcgccgacccgacagtgacgcgccgggcgacctcctgcgcccccgccggagcctgcgacggagacagttgtcacctcgaggccgccgcc

SEQ ID NO: 450054 - DNA, 122 bp, Homo sapiens
caaagggaaacttcctattcccagaccctttgcaagaaagaatggcatattacttgccaccgacaggggttattattactaaatggagtcagtataaatgctttccaataaagcatgtccag

SEQ ID NO: 450055 - DNA, 122 bp, Homo sapiens
atcttttccagggcaggcatcacagtggagccctcggatctggctgacactcctgttactcgtgcacggcttatgtcatgctggtacagaccctgggccatgtagaggactcatggtgagat

SEQ ID NO: 450056 - DNA, 122 bp, Homo sapiens
atgtggactaaagacaggccttgtccctgtacttggacaacccacaccctagtcccagcccggccagatcctgtctttatttcacatgtggacagcagacagtttgctcatcacagattttc

SEQ ID NO: 450057 - DNA, 122 bp, Homo sapiens
gaagtgtggagcgtctctgcccagctgcccactgtctgggaagtgaggagtgcctcggcccggcttctgccctgtctgggaagtgaagagcaccactgcccggctgccccacgtctgggaag

SEQ ID NO: 450058 - DNA, 122 bp, Homo sapiens
tagccttggttaagaactagcatttcttcgtcccctctccctgtcccctctcactgtccgcgaggcagcagcccccagcctactccgcgatcctcccagctcccggcaccgcgcgtcctccc

SEQ ID NO: 450059 - DNA, 122 bp, Homo sapiens
cgcccttcgcgattcttccccgcccctcggcgtccagacagatagacagacgacctgccccgccccctgcgccaccgactgactcagtgacctcggggtcgttaggcctccacgtcctcgct

SEQ ID NO: 450060 - DNA, 122 bp, Homo sapiens
tgcaggtccaactgtcaatgggtctaaccccgcccacctcaatgatctgtgagagctgagcgggggagacactgttcagaaaagactgggtccctgaaactgttgttgtcgtttaatccagc

SEQ ID NO: 450061 - DNA, 122 bp, Homo sapiens
gggcgcggacccgcagcccagaggcagggggtgtggggcggcgccacctcagtggaggggcgccgcacgtccgggaaccgaaccgcggcagttaagcgaagctcccggcgctgacccgggcc

SEQ ID NO: 450062 - DNA, 122 bp, Homo sapiens
cctagcccagggatcactatcctcacagctgtattcagaccctccaccagctgcaatgcccgccatcttctggtttcagccttgcaagagttggagaacagctgtgcctttagaggccagga

SEQ ID NO: 450063 - DNA, 122 bp, Homo sapiens
aagagatgtcaggagtcccgtggtcagaatctcacactcaggaagtctgtgtattcatagcgatggatctaccaggaagccctttcaggcagaccatgtttgaaggaaagcatcctcctcgg

SEQ ID NO: 450064 - DNA, 122 bp, Homo sapiens
ttttacacaattctagtgtaaggattgctgtgttatgactatcgtcgttgttattattatcggatggacatcagaatgtcagctccaggagagcagcaatggtgtttcattttccactggat

SEQ ID NO: 450065 - DNA, 122 bp, Homo sapiens
cattaggcaggattttgaggtccacacactggagatcatctggaaatgagactacgaacccgggagaaaaagggctgcagcccgacctcacctgcttccctggccctttctcccttggacgc

SEQ ID NO: 450066 - DNA, 122 bp, Homo sapiens
gctttctcccagagctgaccgccacgcccgtggtgcagtgcatgcttcgcttctccctctcggccagcgccaggctccggaacctggcacagatcttcctggaggacttctgctccccccgc

SEQ ID NO: 450067 - DNA, 122 bp, Homo sapiens
aagattatcaaaagtagccttaacagttcagggtggagttgggggtgcagcaccataacacgtgggactgcacatccctcacagtaactcactgagatggggttgccgtagtgcaggtggga

SEQ ID NO: 450068 - DNA, 122 bp, Homo sapiens
tcgtcggtgaaacgggtgcaggtggcggtggtggccatgctggcgggcgggcggacgcggcggtgcagcccgcgccgacgtcggtgcacagtcaccgccgcccggccgagggagcaagagga

SEQ ID NO: 450069 - DNA, 122 bp, Homo sapiens
gggagggtttttcccttaagtcatccctcccaggacttgctttttctgctctgagccggacgccggaatggagtttgaggaagaggtgaggtgtgttgcattgtatagggtagatggatgcg

SEQ ID NO: 450070 - DNA, 122 bp, Homo sapiens
tggtgtgctttcaagtgggagcttttggtgtaaactttcctgcagccgttaaagtggcaccggtgcaccctcctcctgccgtcgggggaggcatcgccatttcccttgtcacctggcttccc

SEQ ID NO: 450071 - DNA, 122 bp, Homo sapiens
cacagagggtctgacttggggtcaacttccacgaggttgccgggcgcctgtgagcacagccgtgtccccacccaggggcccacctcccagcgccaccagggtcccgacccccagaccttcgg

SEQ ID NO: 450072 - DNA, 122 bp, Homo sapiens
cacaatggccacgaactcaggattatccaactcctctgtttcttggtccccactttcctgcgagtcgctctccgaagtgtcgctgtccaccggctcctcgtccggggtgtctctcacagcca

SEQ ID NO: 450073 - DNA, 122 bp, Homo sapiens
cctaccccgccgacggcgcagatgccggccagaagcacgctggtgccccggaagacgcctcgcaagaggaggaatctgttctctggacgatattaattagcattttgaaactggtacttgaa

SEQ ID NO: 450074 - DNA, 122 bp, Homo sapiens
gaccaaataatctcaaaggcccagagaggacagtgaccatccacagacacacagcacaggcgtgacagttctgaaaagaagctgagttgtctccaggctgctgtcactgcatccaggactct

SEQ ID NO: 450075 - DNA, 122 bp, Homo sapiens
ggaggcccaacagcggattctccacagacccagcagaagctctcgggggctggaaaagggcgccacctggtggcatctgagcagaagtcagtgacacgttttcacccacatgtcagtacagc

SEQ ID NO: 450076 - DNA, 122 bp, Homo sapiens
ctcggaggggaggctagggggccgtgccaggcccgaagccgaggcggggccgggatgcggcgctgaggcccagcatggccggcccgggccccaccttcccgctgcaccggctcgtctgggcg

SEQ ID NO: 450077 - DNA, 122 bp, Homo sapiens
ctgacccccgcttcagtgggcccttccttcgggcggaccccagagtcaccgcagagtggtcgcgggaggctcagtcccagctcattagaaaggcaagctgctcctggctgaccacgcacagc

SEQ ID NO: 450078 - DNA, 122 bp, Homo sapiens
ggatatttggacctctttgaggccttcattggaaatgggattttttcatataatgctagacggaagaattctcagtgaatactttgtgttgtgtggattcaactcacagagtggaacgtccc

SEQ ID NO: 450079 - DNA, 122 bp, Homo sapiens
ccggccgctctgaaaagaattcctttcacacgtgcggtgctgcttcacgcgtgcgccccgcgccagggcccgacctccccgccctgatcgccatccctgcagccccagtgtgcgctgcgccc

SEQ ID NO: 450080 - DNA, 122 bp, Homo sapiens
agcgccatgtccaggccctccctccccaccgctgcccccaccgggagcccccaccgcccccggggcccctcagtcccacacacagacaacgggcccagtcgcgtcacccgcccgcgccggcg

SEQ ID NO: 450081 - DNA, 122 bp, Homo sapiens
agaggcaaggaatggattttcctatggcgcttccagaaagaacctgccctgttgacagctcgattttagccccttaagactaatgttgtacttctgacctccagaactataaaataataaat

SEQ ID NO: 450082 - DNA, 122 bp, Homo sapiens
ccggccagccccgtggaagtcctcagcctggtcccgtcttctgggctctgctgggctggacggtgccaccctccccaacccgcacctgcccgccggccccaggccctccctcaggacccagc

SEQ ID NO: 450083 - DNA, 122 bp, Homo sapiens
agagggtctcacctccccactcttcacagcaaacctgagcagcgcgtcctaagcacctcccgctccggtgaccccatccttgcacacctgactctgtcactcaagcctttctccaccaggcc

SEQ ID NO: 450084 - DNA, 122 bp, Homo sapiens
taaactacagttcaagaaggttataagaatcaggttggtggtatctatgttatttcaatccgattgcatgtgaaagcagcgatgaaaaagtcatgcagccagaaaggctggcccatgatgtg

SEQ ID NO: 450085 - DNA, 122 bp, Homo sapiens
ccctctgagcatattttctgactgtattgtccctagaacaatttctgaagcagatgacagcgtgtggtgttgctgactgtggacagagaacttctgccgtcaagaccgtagcaggaaatgcc

SEQ ID NO: 450086 - DNA, 122 bp, Homo sapiens
aggtgggggagatctttggcttcaccgttaccaatggtgtctgcatctcactcatatgtccgcctgtcagctcattcaccagcctgtgactgagtcctgctgagcgctcggcactgctgagt

SEQ ID NO: 450087 - DNA, 122 bp, Homo sapiens
taacgcgagtgtttccagtaagttgatttggggcaggctccgtagctgtcggtgtccatccgtcacgcctgaactccgcaggccctggcaattcttaatgttgcttggctgtgtcgtctttt

SEQ ID NO: 450088 - DNA, 122 bp, Homo sapiens
gtgtgcccagaaatgggaagcgggtgtaaggggaggccaaacttgactttcttagtgtcgcgaggtgggtcagagcgttacattgacataaaacagattaacaacagaaaaacatacatctc

SEQ ID NO: 450089 - DNA, 122 bp, Homo sapiens
aagaacccctccaataaggaaagctaacgccgaccgcgctctgcccgccccccccccacgcggcagccctgacagagaagtgtcaagagtgacagggacaggtaggtgatattagatcccct

SEQ ID NO: 450090 - DNA, 122 bp, Homo sapiens
cgcgttgctgcagctgctgcattgcgccattttccgtcccgcagaatcgggagcttggggcgagagttgtcaaggaggtgccgagcccccacaccagagtcaactcacatttttctgacaga

SEQ ID NO: 450091 - DNA, 122 bp, Homo sapiens
aaggtgtcgttgttgtggaaaccattggagcccgggcagccgggaaggtagccacagccacggaggtggcggtcatcctttggacgccctatgggggccaggggacagaggtcagatgtcag

SEQ ID NO: 450092 - DNA, 122 bp, Homo sapiens
ccttttattctacggagtcttcaaggatgtgccaccaatgccacctcccagggagaccggcggcacagggagaccccgcggcacagggagacccgcggcacagatagaccccgcggcacagg

SEQ ID NO: 450093 - DNA, 122 bp, Homo sapiens
gacctcacctgtgggctcagagcgccgagggactcggaggagcgccctgcagggatgcctcgagccgcgccctcgccccgcctccagcccctctccggcgctcgcaggagtacgcagccgac

SEQ ID NO: 450094 - DNA, 122 bp, Homo sapiens
cctagcagcttggatttcagctccgtctttgtgcctgggctgcagcccagatccagatcccgcagcttggtttccaggcctgaatgaggacgcgggtttgtgaaactgtgaggtttttgttt

SEQ ID NO: 450095 - DNA, 122 bp, Homo sapiens
tgggtaggctgcgtgctagcttcggcgcggatccctgggcgtccgtacgtcggagtccttcgtcctccagggtccctgttctttgcgccagcgggaaccactatctctgcactcctggtaag

SEQ ID NO: 450096 - DNA, 122 bp, Homo sapiens
agcgtagggaggaggctgtacaggccccccaaagggtgatagcccagccctcttcccaaacgccagatgctgggactatatccccaaggatgtgagtcttgcagaatctgggcagcccccta

SEQ ID NO: 450097 - DNA, 122 bp, Homo sapiens
gtgatttattcatggcattaattgtgagggccaacctgtggtgtccgttggcagctgcgccgttatcagggcctgggatcggcccagcgagctcaaagcacaaggactcacattcaaaaatc

SEQ ID NO: 450098 - DNA, 122 bp, Homo sapiens
taatgtcaaatacccaatgggaaatcagaatctgcatccttcatttgcatgtaatccttccgtctggtgtaaggtttatgtttgacccaatccccagtctggcttgacgagccttcgacttg

SEQ ID NO: 450099 - DNA, 122 bp, Homo sapiens
aggagcgaggtggcgggggcttctcgcgtcttttcccccagccccgctccaccagatccgcgggagccccactgctctccgggtccttggcttgtggctgtgggtcccatcgggcccgccct

SEQ ID NO: 450100 - DNA, 122 bp, Homo sapiens
gcgcaggactttaccctgggactgaggctgtgaagaccgcaagttggggcagatggcttccgactgcttgctgttgcgtccccgagtatttatatttccctcgaattttctccactgcgcca

SEQ ID NO: 450101 - DNA, 122 bp, Homo sapiens
acacccacttcctgccaggccagtaatgtacagagattgggttcctccactgccctttcccgagccactaatcctgcccatttctcaccagtctcctttctcaccctaatccctataatgtg

SEQ ID NO: 450102 - DNA, 122 bp, Homo sapiens
acatccagtacaacgtggaacagaaccgactagaacatccagtgcaacgtggatcagaaccggctagaacatccagtgcaacgtggatcagaaccggctagaacatccagtgcaacgtggaa

SEQ ID NO: 450103 - DNA, 122 bp, Homo sapiens
tgtcatctctaaacgaacacttggaaactccgccatcctggagacaaactacaccatatccgggcagcctccggcctgtgcaccggcctcgacgtcggacaaaaagggcactgggactcccc

SEQ ID NO: 450104 - DNA, 122 bp, Homo sapiens
ggcgggggcggggggttggggggggtggggggagaaatctccgccctgagaacactgcggcgccacctgcaaatgggtgttcagcatgcaggattccgctgaagtatcttcattgcaagtgt

SEQ ID NO: 450105 - DNA, 122 bp, Homo sapiens
caggtgactgcctggctgcccccgcgattggctgcctcatagggaaacagggcctggaaacgatttgaaaacgcggccggccggccgtgtcagtggcagcagttggtccggctgctgtcccc

SEQ ID NO: 450106 - DNA, 122 bp, Homo sapiens
cccctccccgcccagcccgcccgcctctttgtatccaacatccgggtttccccgctggctcggctccgtggccgccgctcaggagccattttggactcggttcagctcccctcccccccacc

SEQ ID NO: 450107 - DNA, 122 bp, Homo sapiens
ccatcaggcccattcataaaaccgaggccgagaggaagagggaggcggcctccgacccgccgccagcggcgggcagcgcccggactttgtgaatggagcgcgcggcgcctttcgccgtctac

SEQ ID NO: 450108 - DNA, 122 bp, Homo sapiens
ctcatccatctttgtatcctcaatgcacagtgacacactctacatactcagaaaagctggcggaatgcaaacattgaaccacacacttgtggctggcctgagagttttataaggagatttgt

SEQ ID NO: 450109 - DNA, 122 bp, Homo sapiens
ggaagagtgcgcgtcccaggggacggcgggcccggaaactactgcctgcacctcgggccgcgcccaggacagctccagactaccccgggcccctccggttaacctggcttgtggcggccggg

SEQ ID NO: 450110 - DNA, 122 bp, Homo sapiens
tgtgactggtagtagcctgggcactgttgctggacgttgtattctccttccttcttccgccggcgggtggtcacctatgagggtgaggaggaggcgtgagaatggactggtcagccgtccag

SEQ ID NO: 450111 - DNA, 122 bp, Homo sapiens
acggggattgtctttttcagtttgctttcattattgcttctacggggtccttgatttacacgtttatttcaatattaaatcactgatatttttaagcgaaatgtttagagttagatatggtt

SEQ ID NO: 450112 - DNA, 122 bp, Homo sapiens
ggccctgtccctgtaccgcattcggcacgcccaccaggtggagctgcggctgcccatctccgagacgctctcccagatgaaccgggaccagctgcagaagttcgtgcagtacctcatcagcg

SEQ ID NO: 450113 - DNA, 122 bp, Homo sapiens
ccgaccagggggcggccgggctaccgtccgccattcccgtgtctctgcgcccgcgggggccgcccgagccggccaccatgccgctgggcctgaagcccacctgcagcgtatgcaagaccacg

SEQ ID NO: 450114 - DNA, 122 bp, Homo sapiens
tcgccctccgcctcgggggcgggaccctggcgtctcagggcggggcttgtggtcgagcttcgcggtgccaccgccccgcccacgcctcctcgccggcctccgagtgcgtcacgtgacgggtc

SEQ ID NO: 450115 - DNA, 122 bp, Homo sapiens
cagcaggacgaacaccacatagtccatgatggagaaggtagacatgcccacgcttgtgcccgaggttggggaaagaggggctgaggtgctcacccctacactcatatcctcactgtgtctgt

SEQ ID NO: 450116 - DNA, 122 bp, Homo sapiens
cggtggggtgagggagggacccggggtgcaagccaggccaaggcctcctcagtgcgcaggcgccgttcgggcccgccgccccctcccaaggcgtggggtcccggggacagaccccgagcccc

SEQ ID NO: 450117 - DNA, 122 bp, Homo sapiens
ggaaccgtgcagggcggggctggcctgcggaagggggcgggttcggaggagtgaactgtgcggttagtgcgcctttcagcctcacctgcagctgcgcctccttgcacctgcgcctgtgcttt

SEQ ID NO: 450118 - DNA, 122 bp, Homo sapiens
ttcattcctatatcacaattgctagcacagttgatgagtgcctactgtttattcagtaaacgtaaatgaaataattcagtgaatgaattacatttttcaaaatcctatttgctcaattgatt

SEQ ID NO: 450119 - DNA, 122 bp, Homo sapiens
ctagacagaaataagtaattagtgaagggaagctttggcctgttttgttaaccgcattaccgatgggaaaatgttacaacaatcgctatcctgagcttggtcaagggggcgttgtgagggcc

SEQ ID NO: 450120 - DNA, 122 bp, Homo sapiens
atccttcctcatctcctaccacagtgttttccaaatccattctgaggggtgctacagctccggagacattccccaggagcacaaaggcagagaagctggagtcccgggtgctactgcagcat

SEQ ID NO: 450121 - DNA, 122 bp, Homo sapiens
aaacaaacaaacaaacaaaaaagcagacagaaaaatgtaaaacaagaaatccagtcaccccggttgtcaagagtccgaagaattgcaaaggaccggaacctccctctagccatgctgaagac

SEQ ID NO: 450122 - DNA, 122 bp, Homo sapiens
tggcaaccgccgatgagattgtgaaactcatgctcgaccacatgacaaacaccaccaacgcgtcccatgtgcctgtgcagcccggtgggtagcctctcgcccgcgtctcccaacccctccta

SEQ ID NO: 450123 - DNA, 122 bp, Homo sapiens
acacgttccccgtgacctgttacctgttgctgaaccttgttccagtgcacagcggcctctcgcgcatccccacccacccgtcgggttgggaactggtcaaaaccatcatccttccgttttgc

SEQ ID NO: 450124 - DNA, 122 bp, Homo sapiens
ctgtgagccacacccagtcccttcccttcagcaagcttggcttcaggtcacaggactgggcggggtcaagatggacaccaggggtgtggggagggacgtggagcatttacagccaggggcaa

SEQ ID NO: 450125 - DNA, 122 bp, Homo sapiens
cacaatatggaggcgaataagcctaagtggactacaattcccatcatgcctcactgcaggcgccgccgacgtgtcttagcggttagtcatccctcttaccgctttcctccacttcctggact

SEQ ID NO: 450126 - DNA, 122 bp, Homo sapiens
cagggcaggcccccgactctgactgtgccgtctgaggctccactgggcctctgccctctgcgtcctcgacctcacctgtccatctcgcccagacaagcaccaggcagcgagctcccacagca

SEQ ID NO: 450127 - DNA, 122 bp, Homo sapiens
cgtgcaccagcaaaatagcagaagcaggaggagagccggctggaatacacctaccctggccggaagacatgaagatgagaaagaggccatccgggtacagcgtagcagttacgccagactag

SEQ ID NO: 450128 - DNA, 122 bp, Homo sapiens
cgttcaccagtgggcataaaaccaaagctttatgtttcggaacagaactgttaatacagacgcattctagtgattgcattatcggcaccctaagtcacaaggctctggtctgggtccctgtt

SEQ ID NO: 450129 - DNA, 122 bp, Homo sapiens
atcgaccccgttctgcggccgttgagtagttttcgatttcggctgatttttgtccctctgcgcttgcccccgctcccctccctccggctacgcccccggccccggcacgcgctctactcctg

SEQ ID NO: 450130 - DNA, 122 bp, Homo sapiens
ttggagtaggcataggggcggcccctccaagcagggtggcctgggactcttaagggtcagcgagaagagaacacacactccagctcccgctttattcggtcagatactgacggttgggatgc

SEQ ID NO: 450131 - DNA, 122 bp, Homo sapiens
tgacctgtgcccaggggctgggcgggccgaacagcggagaccggaggggcggggcccggccgccctgagaagctccgcgggcccggctgggcgagtgtctggccctttaagggccgcccccg

SEQ ID NO: 450132 - DNA, 122 bp, Homo sapiens
aaaccacctttgaaaagactggcccatctgggttagtgtttcgggcggcatggccttggccgagcggggcctctctccctggaggtgtgtctggggagcatggtgagcatccccctgtggcg

SEQ ID NO: 450133 - DNA, 122 bp, Homo sapiens
aaaggatacaggcatacctcagagatattgtgggttcagttccataccacttcaataaagcgagtatcttgataaagcaagtcacattaattgttgggtttcctagtggaatcatatttttg

SEQ ID NO: 450134 - DNA, 122 bp, Homo sapiens
cctgagaagcccgccctccgcgcccgcacctcccctctgtctgccgcgccccttccccgccgagcccatctgcggctgcagccacatcctgcattccacccacttaaagcctgttgtgcaat

SEQ ID NO: 450135 - DNA, 122 bp, Homo sapiens
caaatccgcggggccggggaacgaggagactttcctttccgcgttagccggggccacccccgccagagggaaagcaccaaaggaaaaaccaggacagggactctgggggccggaggagcggc

SEQ ID NO: 450136 - DNA, 122 bp, Homo sapiens
caccccacgcgcacactcatgaaaccaccccgaacgtcacggcggcgagcactcaccccacgcgcacactcatgaaaccatcccgaccgtcacggcggcgagcactcaccctcaaaggttta

SEQ ID NO: 450137 - DNA, 122 bp, Homo sapiens
caacgccgtcggaacaagaagaagacccgcatcatcccgcgccacctgcagctggccatccgcaacgacaaggagctcgacaagctgctggcccgagtgacaatggcttagggtgacgtttt

SEQ ID NO: 450138 - DNA, 122 bp, Homo sapiens
ctacctgtttcttgcctctgtccaccctgaggaaagcccacagaggctcctgcaccgtatcgcactcttcacatccgtgcacacgcacccacataacccccgcggcattcccacagactccc

SEQ ID NO: 450139 - DNA, 122 bp, Homo sapiens
actgtgcagatgttccataggacagtaacccagtctgcctttggcagtttcacacgagaacgactaaccacatcagctctggaaagagacaccacagcatgagctcactgacttttcttttc

SEQ ID NO: 450140 - DNA, 122 bp, Homo sapiens
gcctgcagcctacctgtcctgcataggaatgaagccgggaggagttacatgatatgccctcgttgcaggccggggacacagctaccgcattcagagaccaggaaacagagcaaaagctgttc

SEQ ID NO: 450141 - DNA, 122 bp, Homo sapiens
gcagtcccctatgagagtacagatgaatggaggaggaagatttaaaagtgaattcgtgggcggcgacaaggaaacagcagccgtggccaagctgaccccagagcccttcccttcctggccct

SEQ ID NO: 450142 - DNA, 122 bp, Homo sapiens
cccacaccgtgatcgccgcctccgggacgcctcaccgagctctggagactcaggacccgtcggcccggccagtaaccgcaggcgcctctgccaccaccgcttcacctgccgcgacgcccgca

SEQ ID NO: 450143 - DNA, 122 bp, Homo sapiens
gcgtcagagaactgcctcgagcgcgttttccgcgcagatccgagaattcgcgagaatctccgcccagccagttcaggccagggcggtcagagacaaagggcctgggtttaagtgtgcatttc

SEQ ID NO: 450144 - DNA, 122 bp, Homo sapiens
ttcacgaacattccctggcttcttgtggcatcagcagctggacttctagtggccctgccccgacggccagcggccaccagggcctgatccccggggaggacgcgcctcccaccagaggctgt

SEQ ID NO: 450145 - DNA, 122 bp, Homo sapiens
ttcaacagcctttgtgctggcacctactccgcttggccacatgctaggacagcttagcagcgtgtgtccctgaggagcagcctgggctcttcatgcacacacacacacggacacgcatgcac

SEQ ID NO: 450146 - DNA, 122 bp, Homo sapiens
ggtagggggcccgatttgggtctgagccaggtctagttctgagggtcccaccaaaaaagtcggggagtgccaaggggatgaggtcagcgagtggccccacccccatccgtccccgcgggggc

SEQ ID NO: 450147 - DNA, 122 bp, Homo sapiens
atctaataacctcctcttggctgaagttgaagatgccatatcaactgatagaagcccatgcgaagctgaccagagctacaaaagttagaaaaacaaaaattgctaatttctactggtgacat

SEQ ID NO: 450148 - DNA, 122 bp, Homo sapiens
cgtcgggtcacaggccgctgggcagaggtctccgtgggcccccagccaccctaccctgtccgacctggggctacctggcagctcctgatcccacagggctgtcccttggttctcctgtgccc

SEQ ID NO: 450149 - DNA, 122 bp, Homo sapiens
gggacttcctgctggcccagcagaccccagactcagcttccttctctggctgggccagggcgggatgcactgtggttggggtctgggtcacgcccacggcaatgacaggccccctcgctcag

SEQ ID NO: 450150 - DNA, 122 bp, Homo sapiens
gaagtgagagaagagggttcttccagtctggggaggagggaaggcctgaggctggctcatcggaggcgtgagtcttcggccctgccatgcctcacatccccaggatgccgcggtgggaactg

SEQ ID NO: 450151 - DNA, 122 bp, Homo sapiens
aattgcccggttccaagatgaatgcctccttgtaccacgtgtctgacaccgctcacattccggttccacgtcagttttagctccgtccgcctccataggtcaagcttaaagggcccgtacct

SEQ ID NO: 450152 - DNA, 122 bp, Homo sapiens
gatggagagggacggggaaccagcgcctcctgtcaccctcgtctgccctggaggcatgagcgctggaggccactgctccacgccctgtggctctcggacacgacctcgcgtggcacggggct

SEQ ID NO: 450153 - DNA, 122 bp, Homo sapiens
ggcctggcgccaggcggagggggcgggtccagggcacggagataatcgaggaagtcgatccgccgagccctattcacctaaaagagcccgaacccacacgcagtttagatgcatctctccaa

SEQ ID NO: 450154 - DNA, 122 bp, Homo sapiens
attaagtttcaacacatgaatttgagggggtgtataaacgttcagactataggaaatacccgtctttaaaatgggtatatagcagccaaacccatcttctaggattgttgtgaagttaactg

SEQ ID NO: 450155 - DNA, 122 bp, Homo sapiens
gggcttggtagtggcagaatggccatgcccaggtgtgtgttgagaccattgacaactgctcgtgtacaggcaccccacagccccagagcatggggcacagcaggcatgcgagtgagaggatg

SEQ ID NO: 450156 - DNA, 122 bp, Homo sapiens
gagggcaggcactgtcttcccagttctcaggcaatgggcggtgggggcgggggtggtcaccggtgaggaggtggtagtgacaacacgagacacgagaagggatggagaggcggtgggaccct

SEQ ID NO: 450157 - DNA, 122 bp, Homo sapiens
tgggcgccaaggccctcattaggccgcacgtgacgagggcggacaggggactggctgggccggtccatccatggcgggcatggccaggcggggtggcctcgggccggggcagaggcctggct

SEQ ID NO: 450158 - DNA, 122 bp, Homo sapiens
ccactattttaagctttaaaatcaacttcaggggtaggcaccaaataaccaagtgagccacggcagccggggctgcaaactgaaatccatctcgtatggaaaatcatcatcaactcacgttt

SEQ ID NO: 450159 - DNA, 122 bp, Homo sapiens
ttggggtcagttttgtggggttttatttatttgtttttaagccctacagcagcgaaggctcgaggttcttagtccaaaactctctggaagcagtccccagcgttgtggtttttaaatgcctg

SEQ ID NO: 450160 - DNA, 122 bp, Homo sapiens
gcacccgcgcgtcgccgcttagaacccgcccctggtttgcgcgtcacaacacccgccaggcgccgactcagtctctaccctggctccgcccctgctgagccccaccccatctccatttgagt

SEQ ID NO: 450161 - DNA, 122 bp, Homo sapiens
agtggactttccggggcaaacaactgagggccttttgggcgtcacagatttggtttagttcggatcgaggtaatcatcttgaacccgcttattagagtcagtggctttttctgtctcacagc

SEQ ID NO: 450162 - DNA, 122 bp, Homo sapiens
tgagggaggccccagaggcggcgggaaggtggcccgcagaacgcgggttctgtaaagacacgtggagaagattcgattccgagaacaggaagaggcggatggaaagacagccaggcggctgc

SEQ ID NO: 450163 - DNA, 122 bp, Homo sapiens
gtgcgggctccgtggaggcgtggcccctgctccagatccatggctgccatggccttaagccgcggtgctgcggcttcctgcccttgtgggcgccctgcacactcacactcagactcacactc

SEQ ID NO: 450164 - DNA, 122 bp, Homo sapiens
tctctcccgggacagggatggacggtcagtgggtctggttactcagcccctccgaggtgccgcggaggtggtttcatttcggaaggtgccagagtaggagctggagtccggaccctccatgc

SEQ ID NO: 450165 - DNA, 122 bp, Homo sapiens
actgcccctgcctgaccttggcaggctccttgcgggccagcagcccagccggttcatgctcgctgcacgcctccttttaccttgtaacatttcaaacgcccttcccttcccggcccccaaca

SEQ ID NO: 450166 - DNA, 122 bp, Homo sapiens
acttaattcatactgcagtttgccacagcctgttactgctttatgtagttaattgtaacccgagtggatgaagcatttcaactagcctttaccagaacgctcagccctccctccctgacctg

SEQ ID NO: 450167 - DNA, 122 bp, Homo sapiens
ggttcccgtttgaggaggcggggcggctacatccctttgtgcccaatggccccgcatgaccgccagatggggagcaaggccaaccccaaagtccccgtcagcctttggctggcagctctccg

SEQ ID NO: 450168 - DNA, 122 bp, Homo sapiens
tgtgctctgtagagcgatatgaaataattgcccgttggcacaataagcccatctcctctccgggcagcacaaaagaaagctcaaaagcatctccggttttgattgccaagtgggggaggcag

SEQ ID NO: 450169 - DNA, 122 bp, Homo sapiens
gtcggtcggggctggcgcggtgcatcgtgggcactgtagtttccgccgcgtttatggccgcgttaagtctgagtgccgctttgagttgttgaatgaagtgaacttcatttgtcagcgttcgg

SEQ ID NO: 450170 - DNA, 122 bp, Homo sapiens
actccgagagcgcgaaccaatgagaggaagggagagactgaggcccgggccaaagcgcagcgccagtcgtcccctggatgctcctgggccgactttaacccctggcttcccggtttccccat

SEQ ID NO: 450171 - DNA, 122 bp, Homo sapiens
ggcggctcactccgttcgggcttggcaggagtcgtggagtgggttcggccacgtggaatccgcgtcctgggaacccgtggaatccgcgtcctgggaacccgtggaatccgcctcctgggaac

SEQ ID NO: 450172 - DNA, 122 bp, Homo sapiens
agggatcgttcttcgcttttcctccggtgcctgacgtggtgggctggggcccttcattctcggactttccctcagcccttccaggcctcgcccgaggagggcgtggggacagcgcccgggtc

SEQ ID NO: 450173 - DNA, 122 bp, Homo sapiens
aataaaatgtatagttaaagggaaattactaccatttcctgtctggttttctcccactctcgccctcaaaagttcacctgcccttgtcctcaaagccacaggacgcctaattgctatttttg

SEQ ID NO: 450174 - DNA, 122 bp, Homo sapiens
acgaacagcgtctctgtggctgtctgcagcgcgaggttcacgtctattgttttatgcctccgggagagctaccccgcgtgatagatcttttcagatccatcactggaagaaaaaccctggtg

SEQ ID NO: 450175 - DNA, 122 bp, Homo sapiens
cctcaaggccccacagttaagaagtggcagtgctggaactccagctcaggtctgagggaacgcaaaaagccccatgctcaataccaccctgagccattccccacttgcagtgggctcactga

SEQ ID NO: 450176 - DNA, 122 bp, Homo sapiens
cacactctgctgtcctttggcccaaccgcaactcgaggccacctctcattcctgcccaggcgccagcgtttggaccttaggacccagggaaagttgggtggagcaggtcaggtggcaccacc

SEQ ID NO: 450177 - DNA, 122 bp, Homo sapiens
tttcaggagaggtccggggtatgccagacaaccacagggaaagtcattccaaatcatttacgggacactgactcgatacacagtcttgtgctgggttctgtggaggaccaacataaaaactc

SEQ ID NO: 450178 - DNA, 122 bp, Homo sapiens
aacagctgactcatagctcgggtaagaggccaccacccccacaacagctgactcacagctcgggtaagaggctcccagtttgcagatgcgaaaccaaggcttgaagtcacctatcttgcccg

SEQ ID NO: 450179 - DNA, 122 bp, Homo sapiens
gaggcatcacacacaagggaagccggctgggagtgcgtattaaggctatagccacagctgcgatgaatagcctgtaaaaggggctccagcgttgggagacagtggagagtggaggacagtgg

SEQ ID NO: 450180 - DNA, 122 bp, Homo sapiens
atctatcccaagagccatcaaacagctttcctctcgagaataccatttacctccagtgctcgactgtgtaaggggttggactgtggtcctccttcctgctctcagttcctgtgttggagtcc

SEQ ID NO: 450181 - DNA, 122 bp, Homo sapiens
tgcgggtggttcttgcgtaatcgcgccaagaaagacctggttccagtttcagggacaactcgcccataaacttctactgcgcaacagcatctgctgctttgtctgacacttgttgttttcaa

SEQ ID NO: 450182 - DNA, 122 bp, Homo sapiens
agccgcagccttgacgggaaagagccggccagggagtctagaagccgaagcggtgccgagcggcttccctaggcttggtgggcccgcgtccgggacggcccgggccgtggttctcgacctgg

SEQ ID NO: 450183 - DNA, 122 bp, Homo sapiens
ggttggccgaggggccacgataactggttgcccgcagtaggagcagaattcggtatgtaccgccgccaggaagatggaggggcctttgtccgtgttcggagaccgcagcagtggggaggcga

SEQ ID NO: 450184 - DNA, 122 bp, Homo sapiens
ggctaccccaagagaaagatttaaggaagcacagaaaactgtaattcctggaacctgctgcgtaaaaccataaaggagtgtgttaccagtagtttggagggcatttttaaatttattttcaa

SEQ ID NO: 450185 - DNA, 122 bp, Homo sapiens
gaatattttcggttaccctcaggtacaccgtgggtgggagaacctgcaaggaagtggagacgtgaccgtgtttccctcgtgagaagcacaggtcagccagcaccagctgtcattgctcacgc

SEQ ID NO: 450186 - DNA, 122 bp, Homo sapiens
gccggggaagcagcgagggcaagaagtatgcggaggcgggggacctcggcgaaaagccaccgctacccggacctggcggtacctgtgttctgtcgcaggtgcacacctcccatcgtccccag

SEQ ID NO: 450187 - DNA, 122 bp, Homo sapiens
aaacgcgcgctttcttggcctcgcccctcctcgctctgcctttcctctccagctgcagcgcgtcccgcacaggaagtgacgtgaccccgcccctcgcagggccccacccccattcacgagcc

SEQ ID NO: 450188 - DNA, 122 bp, Homo sapiens
cggctctacaggcacccgcgcaacaccccagcccccgcgtgactcacgcgcgctcacggccgcccgcagctgccactggtcccctgcgcccctccgcccgtccccgccgcagcccagtgggt

SEQ ID NO: 450189 - DNA, 122 bp, Homo sapiens
ggtccttcctccttcccgcagcccctcaaagcctttgaaggggctgttctctaggagacccggtctttccgcctctccccgccttccccaggccctaccgccccaggccacggggaatggga

SEQ ID NO: 450190 - DNA, 122 bp, Homo sapiens
ctggcctggtgtcctagagctctgtacacaccaccctcccgacctcagccctccaactcccgataaccagccgacctcctccaaccgtgcggaagaaaagggttggctatttccgtggccca

SEQ ID NO: 450191 - DNA, 122 bp, Homo sapiens
agcccagggcgggcctatgggatccgctgatgcgcagagggactttggaaataatcagagcgaagccctcggccaagcgggaacgggtgcccggtggcaacgagtacgtggccccaaagcgg

SEQ ID NO: 450192 - DNA, 122 bp, Homo sapiens
tcgccgatctggaacggggaaggcggtggggctccctttgcggcaggtcgaaagcgcgtgcgccctgggcgcggggtcttagtctctccgagccttgctctcctggccaggtgtttccatag

SEQ ID NO: 450193 - DNA, 122 bp, Homo sapiens
aactgaggcttggcgccaaggactgacatcaaggaagtggattcctgcaaacctggcacccgagggtccacttcctcaatttctgtgcagctgggaggtgaggtaagaggaagtgtgggcca

SEQ ID NO: 450194 - DNA, 122 bp, Homo sapiens
tagatgagagtcgtgccgtgcagaacccagcatgtcacccgtggtgctgctgccatgcggcgcttctgaccaggggtctttgcatgaggccccttgacagggctgctctgggtggtcacttt

SEQ ID NO: 450195 - DNA, 122 bp, Homo sapiens
ggcgtgaaccagtggggagtgcgaccaatcaatgggctcctggctgggtggtgggacggccggcgtccgactcctcccatgtagtgatcggtttaggtaggtcggcctggtccccggcggag

SEQ ID NO: 450196 - DNA, 122 bp, Homo sapiens
ctgatccaggagatgagggacagcctacaacagctccagccagcctgcccttcaccagtccggagggtggtgtgtgtgtggtgccagatttgcctattagaagctcccaccatgtccctatt

SEQ ID NO: 450197 - DNA, 122 bp, Homo sapiens
gctgctggagaggcgtgcccgggtcacaagtgtagacgcacccggagacacgtgtgtagacgcctccgttcacactgggacgagtgcagactgacccaggacccccatccgccctctggcag

SEQ ID NO: 450198 - DNA, 122 bp, Homo sapiens
tttaacctgtacttggtgcaaaatagctgctgatagttgtttcaagcccgcgtgggtcagcggggaacagtacgtggaccccattgcactggacaggctggagtctgggtcggtgtcagagc

SEQ ID NO: 450199 - DNA, 122 bp, Homo sapiens
cgcgcgcgcgcgcgcgtgtgtgcaggggcctgcctgtgtgtgccctctggggtgtgagttcgaatccccactcagccacctcctggccctgtgactttaggaattaactccatttctttgtg

SEQ ID NO: 450200 - DNA, 122 bp, Homo sapiens
cacttcctctgcccaagccgccctcaactgagccgctgcgcgggggcggggaggaggtgccggtgccgaatgaagagggacagaagtccagccctccagccctgtggcctcgctcccttctt

SEQ ID NO: 450201 - DNA, 122 bp, Homo sapiens
ccggatccccctgccccggcccggcccgcggccccgagggggcgcccgccacttcgccgccgccagcccgtggccccgggcgccaaagggcctcttaattgttcccagaacgggtggcattt

SEQ ID NO: 450202 - DNA, 122 bp, Homo sapiens
ccgcctcagcagccccagcagccggcgctcgggcgccagggcgcgcgccacgctggtcagcgccgagaacgtgtcgccccgagccgcagccctttctgggtctcctgtcccgagcgccagca

SEQ ID NO: 450203 - DNA, 122 bp, Homo sapiens
aaaggagacagaaagtgatctactcatttattcattaaactaactctttttatgacagctcgctatgtatctgtcagtaacttgctgggccttaggttacaataaaaaggtccattcattgt

SEQ ID NO: 450204 - DNA, 122 bp, Homo sapiens
ccagatggagggaaccaaggctgagcagcaggtgcaggaggaccaggagcctgagtggcgcggtggtgccgtccagtcgcccagagactgtgtcctcaggccaaaagaagctaaagagcagc

SEQ ID NO: 450205 - DNA, 122 bp, Homo sapiens
tcagggcgcccggggtaggggaacgatgcgcactgctggagacgggcgaccttcgctggccggtcggtgggttcctggttttctgctgccgagtaaacaaacgttccctttcctaacttagc

SEQ ID NO: 450206 - DNA, 122 bp, Homo sapiens
gctgcgacggggcctcggaactgctcccaagcggctgggaaagaactcagtcaggcatgtcggcctgcaaagcacccaggatgggcagtggagtctgcaccgttgacaggctcctagagcgg

SEQ ID NO: 450207 - DNA, 122 bp, Homo sapiens
cgcctttttgaacctcagtttcccctttggctgcatagggaaggggtgcccacatgcccccgcccgcattcagttcgaaggaccagccagtaggccctgcgccgcccagggaccgcccggcc

SEQ ID NO: 450208 - DNA, 122 bp, Homo sapiens
gcaccagcgacccctccacacctcaccagattggttccccagccccgtgggacccaattccgggtcaattccaatttgattccagtccagaatcaaatcagaagagcaatcccgagtgccca

SEQ ID NO: 450209 - DNA, 122 bp, Homo sapiens
tgagggcacctgcccacaatcaggtgccacttctggtgcccactgcttgttgggggatcacggtgatggctgaccagggctccctgacctatacaggcctctgctatgggggtgatggccag

SEQ ID NO: 450210 - DNA, 122 bp, Homo sapiens
gtgatcatttcatttcgcagctagattgctcgtgaacagctaagcaggtcacgctgagctcgacacagtccaatcccaagtaccagtcaggctcccaccgtcccttcctatcccaaaatgtc

SEQ ID NO: 450211 - DNA, 122 bp, Homo sapiens
cctactgaagcagtgttgttgtctggggttcatcctctcatgccaagtaaatcaaggatgcggatgcacaagaagtgaatttaaggccgagcactgtggctcacccttgtaatcccagcact

SEQ ID NO: 450212 - DNA, 122 bp, Homo sapiens
gattcctgattactgctgggaaaccagaaaatctgtggatcctacattgccagcatttcccggtggcagtacgaaaagccgagcagtgatcgtgccctttggacgttgctcgagtctgcagt

SEQ ID NO: 450213 - DNA, 122 bp, Homo sapiens
gctggctccaggccacgcgagccggagctggagacatttccagagccttgaggatggcaccggccctcgcacgctcaactcctgctcctcctcttcgcaatgagtaaacgacgcagtaggtc

SEQ ID NO: 450214 - DNA, 122 bp, Homo sapiens
ccctgccagccagcaggcagcttctctgggatggatggctggatgccagcgctcttcccccgcagcgcccctccgtttcctgcccaggctcccggtggcgcacttcccggcctctccacatt

SEQ ID NO: 450215 - DNA, 122 bp, Homo sapiens
ttaatcaacttgtccaaaccataatatctgctcctctgcttgtttgcagtcaagtcaccacggaatatttttgaggcagaaagatcaaaagaaaaatgccaagagttgagtagtatttatta

SEQ ID NO: 450216 - DNA, 122 bp, Homo sapiens
tagtgcctaatgggtgttgttcctggctggacttgatgtccagggcctgaggggttttctcgccgagtctcctggggcggtccggaggctcgtgccctgttgtggggcccccatttgccgcc

SEQ ID NO: 450217 - DNA, 122 bp, Homo sapiens
gtcaagtccacgcccgcctgggacagacactggggatggctcaggggcgtgtgtttaagacgtgagccccggtggcccagggagatgcccgacccctgcggtgagggtttgttttacaattg

SEQ ID NO: 450218 - DNA, 122 bp, Homo sapiens
acgcacacgagcgcgcaaactcagcctccctctcgctcccaccccagtataaagcagaatcgggccaccaaggggacgagatccgtggactcctccacgactgtcttccccggcccaggaag

SEQ ID NO: 450219 - DNA, 122 bp, Homo sapiens
gtctgactgggagtggaggatccaattctaagacagctcattcattcacatggctgttagcgggaggcctcagctactcatcacataagcctttccacatagtttcttaggcaacatcataa

SEQ ID NO: 450220 - DNA, 122 bp, Homo sapiens
tagcggccgggcatgggaagccgagcgccgcccactaatctatattaaagcttctggcgccgcgtgagtcccccactggctgctctgaaaagccatctttgcattgttcctcatccgcctcc

SEQ ID NO: 450221 - DNA, 122 bp, Homo sapiens
ggtcagctctccctggggtccagcagctttggaggactgagctgctgtgaccggagaacacgagctgggcaggcgtgggggcagcactggcagtgggggagggaagttggttattaatagag

SEQ ID NO: 450222 - DNA, 122 bp, Homo sapiens
tcccacatgcagagtgcgaggtgggcaggctcaagtccctaaggtggctgcccccaggcccggggctggggtggggacgcaggactcacggtggatcgcatgtgccggaccacatctcgggg

SEQ ID NO: 450223 - DNA, 122 bp, Homo sapiens
cagtagtggtgggacggcactagctgctggggcctgccgccccgggagtggctgcagcagcgccaggaatcgaggatggtaaaatgacccaggggaagaagaagaaacgggccgcgaaccgc

SEQ ID NO: 450224 - DNA, 122 bp, Homo sapiens
atcctgctgtgcaatagactaccagaccttatccctcctatcttactgtagatttgtactcgttgacaaatatctctacaagtgtttttcacaaagaagcccctcagtattctgacatgagg

SEQ ID NO: 450225 - DNA, 122 bp, Homo sapiens
cataagtgcagcttaatctcagacgatctccgggtctatctagtgtacatgaggtacacccggacaccgttaagtatcagtggtgtttgcactctcgatggtttgcagactggccacacctt

SEQ ID NO: 450226 - DNA, 122 bp, Homo sapiens
agaccaggtgtgcctgcaagccccggcagggtaggtgtgtcgtgggctgtgctgtgcccccgaagtcctaagctgaggccctgacccctcgtgcctccgagcgtggctgtgtgtggagatga

SEQ ID NO: 450227 - DNA, 122 bp, Homo sapiens
ctgaggcccagcacgtgtcacacgccagctccctggtgggaattcctccctgccacaccccggcagcctgcattccgcctcctgtctctgaatgtgactcctggggaccggggatgggtaga

SEQ ID NO: 450228 - DNA, 122 bp, Homo sapiens
aaatgcgggcgcgagcttggcgagcaggagcctatgatgtcactgccggccagaggcggccgcctggccttctggcgggctgtgcgctgcgttcttgatgagtccggtcttcctcaaggaag

SEQ ID NO: 450229 - DNA, 122 bp, Homo sapiens
taaaactctggacaattgctgagacacaaaagatatgaggctgcaaagtttaaaaaggaacgatacatttaaaataatcagaatagtgtttacttcttcagtgggagagaaggagatgtgat

SEQ ID NO: 450230 - DNA, 122 bp, Homo sapiens
gagagggccaccttgccctctcggctcaggtagccaaaccattccccgtactcgggatcgcgaaactggaataacagagacagtgacagctagcgcctgcaggacccgcccagatgccactg

SEQ ID NO: 450231 - DNA, 122 bp, Homo sapiens
cagggcctgggagcctcccccacccgacgcctcccctccaggtgtgcagagagtctattccgcctcatcaacggctgggtggatccccagaaaccctggcaccgggaggctgatggagggga

SEQ ID NO: 450232 - DNA, 122 bp, Homo sapiens
cacacattacaaagaagtttctgagaatgcttctgtctagattttatatgaagattttcccgtttccaatgaaatccttaaagctatcccaatatccacctgtagattctacaaaaagagtg

SEQ ID NO: 450233 - DNA, 122 bp, Homo sapiens
ctcccctttcgagaggccattgtaaagctttagcatcctgtgcgccttccgccgacgctccgtgagcctccacatcgggcccttctggggagtcccaaggtccacaccccgggctaggccca

SEQ ID NO: 450234 - DNA, 122 bp, Homo sapiens
gtaggtcattttggtgagtaattggaaataggaagttattcgaaacttgggaatcctaatcgttgatgtttgtaatccagtttagcacaaagggcatttgaaactcttttgagaaaatgcta

SEQ ID NO: 450235 - DNA, 122 bp, Homo sapiens
gatcatggtctccatagttatttctctgctataaggtcagggatgacatagtaaatgtcacggttctggcctttggcctggaaaaaaatgttctgaatcttggggacaagattggtggatca

SEQ ID NO: 450236 - DNA, 122 bp, Homo sapiens
gcccccacccccatccccccccccgcgacgcacggcgcacacctagcacccggcgcgccccggggccccggccctccgcggctacccaacgccccgaacccagcttccttccaagagaggag

SEQ ID NO: 450237 - DNA, 122 bp, Homo sapiens
aaaggcttccccattccgaaaagacagaataaaagcgattcacccatgttctccctttcacggtttcaacttcactgtctctcccgccgccagagcccagcaaaactttctaatccgcgagg

SEQ ID NO: 450238 - DNA, 122 bp, Homo sapiens
cagtcgctcccactgtccccatggcaactacagatggtcaaaggccgtggcagtggtgggcggtgcactcggccttgatgtggaactgtaataatatggggaacctggacacattaaaaaaa

SEQ ID NO: 450239 - DNA, 122 bp, Homo sapiens
gaaaaatccagtgacttttgaagctgttttgagatataagaataatagagagtgaattagcggattaaaagatcagcgttcttataataacattaaagagagtatcagggagccaagtagtc

SEQ ID NO: 450240 - DNA, 122 bp, Homo sapiens
gagtcaacttttataaaacaaaataaaaattaagtcaaatcatgccaacctttattagatcgctagcagggttaaacttaattcaaagcccctgatgaatcgggccttcattgcacccccaa

SEQ ID NO: 450241 - DNA, 122 bp, Homo sapiens
aaaaaaaaaaaaaaactgtcataattattatttcactgggtacatgtgtatcaaaacacacgctgtacaccctaaatatataaaacaaacacatactgtattgtcaggtagtgataaatcct

SEQ ID NO: 450242 - DNA, 122 bp, Homo sapiens
cgaccatttctaggcatgtttctataaaacaaagcatagctctccctggcctttgactgccgtcgcactgggctgcagatgatggcagagttgagtttccatcaagcagggctttcctcagt

SEQ ID NO: 450243 - DNA, 122 bp, Homo sapiens
attctaccttggactaaagcactagggagtctgtaggcgccttcctgcgctcctccactgcggtggatccacaatttcttctcagctgacttactggttttcatgttaactatttcggttaa

SEQ ID NO: 450244 - DNA, 122 bp, Homo sapiens
aacacccataatgtttttgtggaaatacacattattatagggaaatgcaaaatatcaaggcgactatcaagacaatcttgaagtgggagggcttactatgaatatcaagatttgtaagctgg

SEQ ID NO: 450245 - DNA, 122 bp, Homo sapiens
agtgggacaaagaccaatgcagggtcagtccccacagccaggtgatgcaaacaggctggacgtgggccgcctcccctccagcttgacttgtgacagggaaaccaatgcagcagcagcagggc

SEQ ID NO: 450246 - DNA, 122 bp, Homo sapiens
gagtcctgtgaagcgcccctgtccgcgcctctgtggggccctcagagagggctgccaggacgcgagccactgaggagccgctcagccagcgccatagcccttaggactatcggtcacattct

SEQ ID NO: 450247 - DNA, 122 bp, Homo sapiens
cagactcatttacatacttacagctctttacagaatcttaccttcaaggaattttacttccgtttctattccccaatttgcaactaggtcacacagctttcatctactaagtatgtattcaa

SEQ ID NO: 450248 - DNA, 122 bp, Homo sapiens
gaggttccgcagaagaaatgactgggaagggggaaaagtacggggagagggagggcccggcgcctaggggtcccccgtctgggttcccaccccgcccagaactgggctaccgtcgcgcccca

SEQ ID NO: 450249 - DNA, 122 bp, Homo sapiens
actcaatggggactgaggagtctcttcaaccaatggtgctgggacaactggatacccacccgggggagaatggtggtggccctactccacccacacacagaaaacaactcaaaatggatcag

SEQ ID NO: 450250 - DNA, 122 bp, Homo sapiens
gctccggtgccgatgtggaaggagctcctgagcagaactggggcctggactgcttgtgcccgagttggtttcgaggcgtctctgcttttcgctggaggcccacgaggtgggtgggaagtggg

SEQ ID NO: 450251 - DNA, 122 bp, Homo sapiens
ctccaaatctttatagccagcagtgggttgggtgcttgggggaagctccaaacggataaacggtaaaaggcctgacacgaaaataagagcaactatcattagagaaagcaggcaattgaggg

SEQ ID NO: 450252 - DNA, 122 bp, Homo sapiens
ccctcggggtgggggtggggccgctggagggagggagggggcgggcgggggcggggggcgcgtttgtctctaataagaaaagacaaagacatcccggcggccgcggctgttcccgcagctcc

SEQ ID NO: 450253 - DNA, 122 bp, Homo sapiens
tgaggtgcaacttcctggcatgcagtgagcagaaggcaggccaggacaggagctgactcccgagcaggggacacagtgaatttgtggcatttgttaccaatctcggagttcactgtgcacag

SEQ ID NO: 450254 - DNA, 122 bp, Homo sapiens
gggcgaccgcaggagggagacagacctggagtccactcggaggcctggagccgcacaaagcgccaggtcagcggtcccggctgggtgagaccagcaggcggctctagcgcgcgggagctggg

SEQ ID NO: 450255 - DNA, 122 bp, Homo sapiens
ttcgagagcagcctggccaatatggtaaaaatacaaaatttagccgggcatggtggcacgcgcctgtaatcccagctactaaggaggctgaggcaggagaatcgcttgaacccaggaggcgg

SEQ ID NO: 450256 - DNA, 122 bp, Homo sapiens
cggcgctaacttatagcccgctttggggcgggccgggggcggggccccgcgggaaggcggcgacctgggaggccacccattgcccagtcccgggcccacgccgccagcgctggggctcaccc

SEQ ID NO: 450257 - DNA, 122 bp, Homo sapiens
ccatgtgaggatacaggaggacggtatctgcaagccaggaaggaggccctcgccaaataccggatctgcctgcactgtgatcttggacttctcaggcaccaaaattgtgacaaatgtttgtt

SEQ ID NO: 450258 - DNA, 122 bp, Homo sapiens
cctcaaccctcctctacttgagccattcctgcaccacagtccaacctaacaggaggggcgcggcttcggacttagcttctgcccagtgagagagggtctccccgtgactgtgctgccaggga

SEQ ID NO: 450259 - DNA, 122 bp, Homo sapiens
ctacctggctcaagcttgtggccagagataagaacttagagacatctctcccacccagcacgccgggctcccagcttttctgctgcttcctttggaaggaccattcaggcatttggttcatt

SEQ ID NO: 450260 - DNA, 122 bp, Homo sapiens
aggggtaattattgatggctatgtaaagtacttacagagcatgccaacatcaacagtcttcggtgttccccacagtggcacccaaggctgctgctgctgcgttctgagcctcagtgcctccc

SEQ ID NO: 450261 - DNA, 122 bp, Homo sapiens
tgccaccagagggcgcccgcgcctcgggctttggctcccacaccgcggcccgccaggcctcgattcaacccgcgcgtcgcacggtgaaactgagggcatccccagctcaaggctgcagacgc

SEQ ID NO: 450262 - DNA, 122 bp, Homo sapiens
gatgtctaaatctacatatagaccggctgattagaagatgcttagttcagcaattctggccggcaggccagggctttgattttagtcggaagaggcagacttcatcacacttgctttctagt

SEQ ID NO: 450263 - DNA, 122 bp, Homo sapiens
catttattcccctttaaagctataagcctgccttttcccattggcgatgggtccaggtatcgttccccaggctccgcctctgagctgtgaccattagctggttggtgggatctaatcgccct

SEQ ID NO: 450264 - DNA, 122 bp, Homo sapiens
catgactaggcttacagtctgaccctgtggctctgaaatgggctgaaggtctcagggggacgcgtcctctttagtgtatgattcacgttagaccctggggccagcacaccaaaggcttaaag

SEQ ID NO: 450265 - DNA, 122 bp, Homo sapiens
taaaggggagccccctcccagctccggcctttttctccagcgtgggcagccaatcagctgcgcagagctgcatagctggaccgctttccattctgagtagcaacaacgtactaatttgatgc

SEQ ID NO: 450266 - DNA, 122 bp, Homo sapiens
tgtgatgtggggtgcaggtgggggaagttcaggcaggctcagggctgtggccggtgtccccgaagggaggagtgggaccccttcccgccccgggtctcaccatgaggtcaaagggcattcct

SEQ ID NO: 450267 - DNA, 122 bp, Homo sapiens
ggccagttcttgaagtcttgttagggagtttgaactttatcttaaagagttccaggaaatcgatggagcttatgccgaggcctgacaccatcaaatgtgcattcaaattgggggtgtggtgg

SEQ ID NO: 450268 - DNA, 122 bp, Homo sapiens
tagcagccgctccactccgcacgcaggcagcatcggggcagcaggagcaggtgaagcaggcgcggctctgccccgcgcctggtgccccctgggcacaggagtgcggccgggggcggggccga

SEQ ID NO: 450269 - DNA, 122 bp, Homo sapiens
tttgggaattgagcccatgtgcagggcggtgagccgcacgtcctcatctgccttgggatgcgagttctagagcctgggatgatgcgcccttaccagaggttgggggaacagcgtcgccgcgg

SEQ ID NO: 450270 - DNA, 122 bp, Homo sapiens
gcagtgcctcagtttcctttgtgacacgtcggaggagttttgcttggttgtttcttgagccgttcctcaggttgggttggtgtgaggtttgctggtgacagaaagggatgtcagagccactc

SEQ ID NO: 450271 - DNA, 122 bp, Homo sapiens
cggcccaggggcgagaaggctgcggcgtccgcagccagggctggaaggcctgggaggccgcgctctgtgggccccggggcctccattcgggctgggtcgcgggcctggacggggactgtcca

SEQ ID NO: 450272 - DNA, 122 bp, Homo sapiens
tttccaaagtattactttccgcagtttgccaagtcacattggttttggtttatctcattccgtttttattaggttggtgcaaaagtaattgtggtttctgccattactttcaataataactt

SEQ ID NO: 450273 - DNA, 122 bp, Homo sapiens
ggaacgctaagcccacattccggccacgggtttcgaacctccagcctgcacgttcccggccggtgctgatgctgtgctgggtctcacgtactcagccgccgcctgataaccagggcggggcc

SEQ ID NO: 450274 - DNA, 122 bp, Homo sapiens
ttgatgactgaatcgccattataatagcatgaaggtgcagctcacaagcgtccacacaggcgaattcacgtggtggctccagaggaatgttggccttgcagagtcttggcatctccgtggct

SEQ ID NO: 450275 - DNA, 122 bp, Homo sapiens
atggcgccaacagcagagctttcttctcgctggctctgcggccacaatctgaagtcaggacgtgggccgagggttctggggagggccctcctgcccctcccaccccagggctgctggcagtc

SEQ ID NO: 450276 - DNA, 122 bp, Homo sapiens
tgacctgcaacgcgcgcacgctcgccgcggcggtcacttatagagcctgcctggaaggcacgcctctttattcaaaatggcccgcctcggccctgcccccgccggccctgggcgttcacagc

SEQ ID NO: 450277 - DNA, 122 bp, Homo sapiens
agggattggctggaggctgccgagctggttggtggaagatctggtgccctgcccaccctgcgtggctccaccctcctggcagcctctggatctcactgctctcacctcggtgcctgtgtccc

SEQ ID NO: 450278 - DNA, 122 bp, Homo sapiens
ggcggagctggccgtccagagcccgccttcctggaactctggttggctgatatagctgtccgtcgaagcggcattgccgcctattgggcaatggccagcttcgcacgccagacccgtgcccc

SEQ ID NO: 450279 - DNA, 122 bp, Homo sapiens
ggcttgcaagaacaaacccctacaacaacagagagtccaggtgtcccagtacccgcgctgcgcccaggagaaactgagataaaacgaagcctcgggaagggaaaccccagacgctcgacttt

SEQ ID NO: 450280 - DNA, 122 bp, Homo sapiens
ccccggccaacgcgtcccggcggagcggcgacccggagtctgcagagcgcgccgcggcggcgtccgacgtcagcacagccaatcacagtgcagcaccctcgtcatgtgattccccccccccc

SEQ ID NO: 450281 - DNA, 122 bp, Homo sapiens
gccctttcccagatttcagggccctttggccggcactggccaggagccgccgcgagacagcgccacctggtggaagcatcccaggccgccactggctttgtgcctgaatcctttctgctttc

SEQ ID NO: 450282 - DNA, 122 bp, Homo sapiens
tgaggcccctggagaccggggccggcgacggatgcagggcggccctcctcactgaggatgcgccacaggtccaggcctctcgagcccctgcgcctgcgctagcattctgccgggaaagccgc

SEQ ID NO: 450283 - DNA, 122 bp, Homo sapiens
agcaaggctttgtatctttgcagtcagcttctgctgagtagctcgttgtctccctggcaacgtattttcctactttctctaattagtctgtcttcctttacctacaactgtcttgctaaatt

SEQ ID NO: 450284 - DNA, 122 bp, Homo sapiens
aacctagaacctcatactggttttcagtcaacattggtgaaggacacagtccactgcctgcggaggccccgaggaacacgcgtgtaaaagctgcgcccagacccgcagatcccacagcagca

SEQ ID NO: 450285 - DNA, 122 bp, Homo sapiens
ctctgcaacaagaccctttataaagcacagactttctatttcactccgcggtatctgcatcgggcctcactggcttcaggagctgaataccctcccaggcacacacaggtgggacacaaata

SEQ ID NO: 450286 - DNA, 122 bp, Homo sapiens
ctgtcttgttttttcttttgcctgaaaagcctcaaattagttgcattttatttctacttacgtgcagtccagttagaagcgagctgctctcttcctcactccctcaattagtggtaccctgg

SEQ ID NO: 450287 - DNA, 122 bp, Homo sapiens
atttccgcccttagtgtggggagagcgggaactactcgacccacagagccgatcgcggagcggattctgcttttaggagtacccgccaacaagcgggaccgagcaggaatccgtatctggga

SEQ ID NO: 450288 - DNA, 122 bp, Homo sapiens
tgtctgatcctggatggtgctgggctcaggtgccccatgctgtctccacacatgatctgtcggtcactctagctcttgttctctctagctcttgttctctatgtccagtcggctggggtcaa

SEQ ID NO: 450289 - DNA, 122 bp, Homo sapiens
ttcattatttaagaactattagtagcctagataggtcaccatgttttcactattgcccatcgagggaaaacataaatgttataataaagtgatgtataaatattaatccttatatatcaata

SEQ ID NO: 450290 - DNA, 122 bp, Homo sapiens
tagacccactgcaaacctgaggcctgaagacccttgccctcttgtccttcacttctccctcgtgtcctgtctacatattctgcgaaagcccaggtggccaggccacagagggaaggggaaaa

SEQ ID NO: 450291 - DNA, 122 bp, Homo sapiens
agaaagggaaggggcgcccgggtccgcagggtaggtggagtctgcggtggaagatggagccgccaggggtgcgaccgggacctctgtggcttttcctactctaaagaaactcccggattctt

SEQ ID NO: 450292 - DNA, 122 bp, Homo sapiens
cacagaaactgtggatgctttctttaaagattcacgcttctgttgaaatcacactgttctcgcctcaaacatttaaggagaagttcatgagttcagagcatgatcttctaatgatgagcagt

SEQ ID NO: 450293 - DNA, 122 bp, Homo sapiens
ggtcttgtctctgctctcccctttcccctcaccaatatacctgtggttttttgcagcctgcgaatcgatgctgcctcctgcgccatttgctaagactctatctggacagggtatttaaaaac

SEQ ID NO: 450294 - DNA, 122 bp, Homo sapiens
cccatcctttggtggaacatttcaaatgtttaatgagtgcacagttctctctgcctgcatcgctcccacctaccctctctgcttcccccttttcagttctcaggtcagacatttcctcccct

SEQ ID NO: 450295 - DNA, 122 bp, Homo sapiens
ctggatcccggagctgcagcgcctcccccagacctaggggtcttcccctcccttcccctgcgccccactgtgagctccagggtcaaaggccctgtctgctggacccccatcacttagcccag

SEQ ID NO: 450296 - DNA, 122 bp, Homo sapiens
ctgctcaccggctggaggccttgcgatgggattcacaatttcctctcagtgtcttccaagcggcttttccgtatcatcttctcaggcttctgtgcacctgcccgtactggacatatttggcc

SEQ ID NO: 450297 - DNA, 122 bp, Homo sapiens
ggaagtgaatcatggggcgtgaactcgcaagcgcagtttcctgaagacccggaagccgatcgcgtggggagccggtcttggagcagcgggtgagtttccctttgtctagattagatccgctt

SEQ ID NO: 450298 - DNA, 122 bp, Homo sapiens
cttctcttccctgatatttgaggtcctgaatagcctcttccaagccttgtgcatcgggaccgccccacgccccacgccccacgcgcctcttcctgggtttccttcttttctctgccttggtc

SEQ ID NO: 450299 - DNA, 122 bp, Homo sapiens
gcaggttgtgcttgcattctggaagctgtttgacatacaaaggccagatatcagccttctcgctaactctggagtaggggagggtgtggtgggatgtgtgattgtgtgtgtatgtgtgtgta

SEQ ID NO: 450300 - DNA, 122 bp, Homo sapiens
attacaggcgtgagccaccgcgcccggccaaaaatgacatttctttaaagtgtatctctccggtttcacaatgaatgatggcagcaactggtaaaccaaataggaggttctaacagtccaac

SEQ ID NO: 450301 - DNA, 122 bp, Homo sapiens
cctcgcggctgggccaggacctgcccggagctccagaaacacggccgggagttacaaaaacgcggccctgagctatagaaacacggcccggagctgcagaaacacggcccggagctatagaa

SEQ ID NO: 450302 - DNA, 122 bp, Homo sapiens
ccccgactggttagaggtaaggggcaagcgtcccgggccaaagggtcaggggtggcaatccgagaggcttctgggaggcgagctgaggggcaaccggcacctggacaagagcacaaaacaca

SEQ ID NO: 450303 - DNA, 122 bp, Homo sapiens
ctgggcaacatagtgaaaccccttcacagaaaaattaaaaaattagccaggttggccgggcgcagtggctcacgcgtgtaatcccagcactttgggaagccaaggtgggcagattacgaggt

SEQ ID NO: 450304 - DNA, 122 bp, Homo sapiens
acaagaactggtcctgaccatgagaggaactgatgatccaatgggggagatagacctgcacgtgtttaataaaaggaagtggctattccggtttctttttgatgggcaagcattttgcaagg

SEQ ID NO: 450305 - DNA, 122 bp, Homo sapiens
acccctccaagggacctctttccccgccgaaggatctgagtagggccctgcccggctccacgggatgggggcgctgatgtccagccccacaaagcccagccccaactcagtgggtcctgccc

SEQ ID NO: 450306 - DNA, 122 bp, Homo sapiens
ggtccggtacactgtggcaatcacaaaggcattggagagcgtggtggccaaggtgatgagcgccaatagcataaccagcagtactttccagggtagggagatggagtcctggtaaatgtagt

SEQ ID NO: 450307 - DNA, 122 bp, Homo sapiens
gctccaccctcaactcaacccaagcaacagggacagatgaaaaacaaaatccaatcagggcgataaatggcggggggcaggacgtggtggtctccaggctggcttcgtgcgttcttgctttt

SEQ ID NO: 450308 - DNA, 122 bp, Homo sapiens
gcgtggcggtccggggtctgtgcgctgccttccgggactggtagttctctctgggctcctcgcagctcggcgcgtcgagagcgaactccatctcccaggaggcattgcagcgagttgctctg

SEQ ID NO: 450309 - DNA, 122 bp, Homo sapiens
cggcggcgtccagcgtgtggagggcaagctgcgcgccagcgtcgagaagggcgactactacgaggcgcaccagatgtaccggaccctgttcttcaggtacccgcgcccggccctcgccgcag

SEQ ID NO: 450310 - DNA, 122 bp, Homo sapiens
ttttcagcgctgcacaatgccccgcgagtaagggaaactattaaactcctggggcaggagcgttggcaaactttcgtgggcagaattttgaggctacaatgagcgcggacaacaaaaggatt

SEQ ID NO: 450311 - DNA, 122 bp, Homo sapiens
ttttacattgcagggaaattcagtttccaatactccttgccaagtggcttcagagcagatcgtatttatgggagaacctggcaaaaaattgatggacagaaggaaaataccagctagaatat

SEQ ID NO: 450312 - DNA, 122 bp, Homo sapiens
ttgtaggtaagataattcatactggagaaaactaccagtgtgaacaacgtggccaagcttcgacaatgctcacaccctattgcacaggaaagcatttatacttgagaagaaatgtacaaata

SEQ ID NO: 450313 - DNA, 122 bp, Homo sapiens
tcctccagctcagacgtgaacttgaaagtttcgtgctcacttttaacagttcgaagctttcggaagagagatgtttccaccgactctgatttcaacctccgtttgaaaggcttgtccctgtc

SEQ ID NO: 450314 - DNA, 122 bp, Homo sapiens
ctgctgtgccccgctgcttccaggcggcgcggccctccgtctgattgctggaggactcttcggtgtggacacaccgtggtttgtttacccatcctggtcaatggacaattggaactgtggtg

SEQ ID NO: 450315 - DNA, 122 bp, Homo sapiens
caggcttccgagggggaaggtagatgggtgcgtggctgagaatcttgaatcacccaatagcgaggtgtgccaaggcgctgtgcaaataacgtgccttttattgggcactggctctctttgag

SEQ ID NO: 450316 - DNA, 122 bp, Homo sapiens
ggtacacacctacagtcccagctacttgggaggctgaggtgggaggattgcttgagcccacgaggcgacgcaaggccacagtgagccataatcctgccactgcactccagcctgggtgacag

SEQ ID NO: 450317 - DNA, 122 bp, Homo sapiens
gctgcagggaccaaggcggtgggcaggtccctcacccgtgctgagaccgggacaggaatgcgcacctctccccaccctcggacgccccggcggcgccgctgcagaagtcgggaggtcggaca

SEQ ID NO: 450318 - DNA, 122 bp, Homo sapiens
ccggtcctggacttacgggatcaccaggggcggccgagtcttcttcatcaagtaaagagccggggacggcacgggggcccgcgggggcgggagggcaggaggcgggcggctggcgacacggg

SEQ ID NO: 450319 - DNA, 122 bp, Homo sapiens
gtgcccacgcagccgggagcttccacccaccaggaaagggaaattgaaagcatccccatccgacatgtgaatacggcccagagactggggattagaggccgagcccctgcagggaggctggg

SEQ ID NO: 450320 - DNA, 122 bp, Homo sapiens
ttcagacaatctccatggcctgacaatttaccttctatttgggtaatttattgtcccttacgcaaactctccaactgtcattgcacagacatatgatctgtatttagctctcactttaggtg

SEQ ID NO: 450321 - DNA, 122 bp, Homo sapiens
ctacccacctacgtgtacagcctttccagctcaccacctggtccaggacgggctgttggacgtacgtgtgggagtaggctgtctgcataggaaccgttcactgatgaattctagaagacaca

SEQ ID NO: 450322 - DNA, 122 bp, Homo sapiens
aaatctggctgtactgacttaactcccgggtcgaaaaaagctgcttgagagtcttgggcacggaaaggaatcgaagccagcagccatcatctgtagagctgtgtttgttccccacaggaacc

SEQ ID NO: 450323 - DNA, 122 bp, Homo sapiens
attagggtgtgatgacagatgaggtcttgtcttttggaaacttaacaggattgttgggggcggggaacacaaaaggtaagcaaataaactacaaattgagaaaagtaacatagaggtgtcca

SEQ ID NO: 450324 - DNA, 122 bp, Homo sapiens
agctgcctagtacaaattattggcagaaacaatgaattaaacattcaaaaagtaacccaccggccggccgcagcggcttatggctgtaatcccggcactttgggaggccgaggcgggcgcat

SEQ ID NO: 450325 - DNA, 122 bp, Homo sapiens
aacccagccatctagctgggtgtggtggtgtgcacgtgtaacaccagctacttaggaggccgaggtaggagaatgggttgaagccggaaggcggaggctacagtgagatgagatcacgccac

SEQ ID NO: 450326 - DNA, 122 bp, Homo sapiens
gagcggcggcggcccggcccctcccgcggcccccgctcccccgcccgccccgcgcccgcccggcccctccaccgacgcgctgtaatcccactcacgttccaggcctcgttagcatgggccga

SEQ ID NO: 450327 - DNA, 122 bp, Homo sapiens
acccggattgaattccgacctccccttgggagcttcccgggaccccaggtcttccttttccgaatcccagagggtccccaagtcctctgttctcaaactctgagcccaagggaaccccggcc

SEQ ID NO: 450328 - DNA, 122 bp, Homo sapiens
tgattcctcttgcgtgaggcccctagagtccccggagccacagaggcagccgtggagtggcgggagccaggcaggggcagggaggagagggtctgctgttccgtgggagtgagtgtcaggga

SEQ ID NO: 450329 - DNA, 122 bp, Homo sapiens
cagcttctgttccaattagcatatatttccataagtgttgagtggggaagggaaggaaaacgcagaatttctcaactattgaccttgagggacttgtaggaaggtgtgtctgacatgcttgt

SEQ ID NO: 450330 - DNA, 122 bp, Homo sapiens
gccagatgccttagactgccaggaccagcatgggcttgcaactgggctgggattggcgtccgtggccacccacaccatgcccaataggtcgccatgggtctcggcttgggctttgggagttg

SEQ ID NO: 450331 - DNA, 122 bp, Homo sapiens
aatatggaccctccacagaaacatttgcaaggccaggaagctctggcagattagggctggcggtgaggcacgcacacagcgaagctcagcaggtggtgtgcacacatccacccaaagatcac

SEQ ID NO: 450332 - DNA, 122 bp, Homo sapiens
gccgctttggcaagcgggagttcaaggcgggaggggaggtgccggcaggcacgcagcccccgcagcagcagtactatctcaaggtgcacctgggagagaacaaggtccacaccgccaggttt

SEQ ID NO: 450333 - DNA, 122 bp, Homo sapiens
tcaaaaaaaatgcattcattcatgaaatccacaaacactgatggaattttactgctatttcgccttcaagtcctgatgtgaggcagggaaggggttgatctgttccagacattagacagaaa

SEQ ID NO: 450334 - DNA, 122 bp, Homo sapiens
cgtgtccatcgctacctgccgtggtgcgaagcagattccaggcgtgagctccgggccccacgggacccacacatggggagactccaccccagctgcaggcatggtgcgtgaacccacacggg

SEQ ID NO: 450335 - DNA, 122 bp, Homo sapiens
gcactccacccttgttattccttcttgtgaagatatcttgggactttgcccaactgactccgtgctcacacttcattgttttgtcctctcttctttctcattcaggagctctcttgggaata

SEQ ID NO: 450336 - DNA, 122 bp, Homo sapiens
tcgctccgcgctcccgcgccctgacgtgcggccgagctggcggctacgcagtaacgtcgccgcacctcattggctccagtcccaatgcctgcgccaaggacctgcgcgcgcatgctggcgag

SEQ ID NO: 450337 - DNA, 122 bp, Homo sapiens
gaactggttcagtgagatgaaaagctgcactttttttaaagctcagctgtgaaagccgagcgccatatgcagcccttcggtctctgccgtggaagcgtgtgcaggcggccgccgtgtttgcg

SEQ ID NO: 450338 - DNA, 122 bp, Homo sapiens
gggaagggcggccactgacctgcttgaaggtgctgctgaggaagtagacgagcgacagcccgaagaccagggcgagcacccacctcttccgcagaagccggcgccacaccatggccgccagg

SEQ ID NO: 450339 - DNA, 122 bp, Homo sapiens
tggcggcccgagcggccccggagcggcggaggcctggcggagcgctggagcggagtgggacggccagcctgggcccacccccgtaccctgcaggtcccggcccacgcacgctcgcctggagt

SEQ ID NO: 450340 - DNA, 122 bp, Homo sapiens
tccaatcaccctgagcctcatcttccaccagactccagcttgggaatgcctcagggggtgcgctaatggaatcaactggagctcccggttgctaaacttggagctaggttgcttttcctgag

SEQ ID NO: 450341 - DNA, 122 bp, Homo sapiens
gcagtgggtcggccttggcccgccggtcacccatgtacatctggatcagcttgaagagctcgcaggcctccttcttcacgtgccggtcgcttgtcacgatcatgggcttcttgatggactcg

SEQ ID NO: 450342 - DNA, 122 bp, Homo sapiens
tgaattcaatgcaaagcctcatagacactgtgctctcctccctgagtcacacagattctccgcaccatgaagctgctgctgggggataagggatggttgctgttgacaattcaagacattct

SEQ ID NO: 450343 - DNA, 122 bp, Homo sapiens
gggtcataggacagtgaaacccggccggtttgcctgtgaatgcgcaagcgtgaaccccctcgcccaccccctgagatctcggggagctgctcatcgccaccttccagggtttctgtctgtct

SEQ ID NO: 450344 - DNA, 122 bp, Homo sapiens
gcggccgggagcatagtggcggcggaagggctggccaagcgagccgtgagctaccgtctgcgcacaagccggaacgccagatcctacctgaagtccgggacactgagagcagaagcgcggcg

SEQ ID NO: 450345 - DNA, 122 bp, Homo sapiens
gctaccgctctctatgtggggaatgtattcatctagcacccaaaaccacctactggcttccggcacctcttatcagctaagccatcagccctgagctgacatttcagcattcagaagctccc

SEQ ID NO: 450346 - DNA, 122 bp, Homo sapiens
cgcataaaagccaacccgggtcacttcccagggtgcgagagcagctgtccatcccaccaacgctcttcgggctctgggcgcgccactgtcatggactgtccctgccagccaaaaaaaaaaaa

SEQ ID NO: 450347 - DNA, 122 bp, Homo sapiens
agcgcccaaaggaaacgggcgcgccagggtttgctggaaccggggttgcttaggggttctcgccccgtctagtccgagactgctgagcacctcgcccccgggggaccaagctcaggcctcct

SEQ ID NO: 450348 - DNA, 122 bp, Homo sapiens
cctcacccccgcctccagggcttgtaaggcactgacaaccaaagaaccagcatgttctttcggagaaggcttcgcgggattttttttcaagcacgaagggcggggcacgaggcaagcagggc

SEQ ID NO: 450349 - DNA, 122 bp, Homo sapiens
cccttccctggcagtccctaaaatccttcgagatgacgtcacccaacgagttcaagagggcggtgcgttcctaaccacaccttctgcaacccaagtgccgcccctctgactttctccttttt

SEQ ID NO: 450350 - DNA, 122 bp, Homo sapiens
gaagggctccccacctccttcctttcctcttagaagtctccaaatccaggctccagaaggcgatctaaagccattttcaatgaggaaacctgtcagccgagcaaagccctctcactcctgga

SEQ ID NO: 450351 - DNA, 122 bp, Homo sapiens
cagtggtcccgtgatgtagccatcggattgaagcggccagctatcattgaagtcccacaacgtgagttaaggacatgtccatttaaaaatcgtgacctgccgttatcttctgggccctttat

SEQ ID NO: 450352 - DNA, 122 bp, Homo sapiens
taggaacccactcccagccttctgtgctccaggaaatatctaagtgggaagaccctccttcgcccaggtctacaagaaggctgagggtgccgctccgttcacctgggaggaacctctcccac

SEQ ID NO: 450353 - DNA, 122 bp, Homo sapiens
tccaggctcaacggagacagaggcgtaactgcagcgctgttcctccgcaggcatgggggacgcgctctgccgatgtgggtgtcctgggagccggcactgcggcctctcagcttcctttccca

SEQ ID NO: 450354 - DNA, 122 bp, Homo sapiens
ataataataaaaaataaaaaaataacagccagaaatttattctctcacagttttagaaaccggaagtctgaaattgcagtgctgtgtatgtgtaaacaaaacagacaaacaaaaacactggt

SEQ ID NO: 450355 - DNA, 122 bp, Homo sapiens
tctcctaggctcaaactagtcaaatcttgttcactcgaccaatggcaaatcggaagtgggcgggacttcacaagtccggaccaaagaaacgcgagcttagccctgggtagcgcggccaatgg

SEQ ID NO: 450356 - DNA, 122 bp, Homo sapiens
ggagtggtctttgtgtagccagaaaacgtgaagttcctggacctccttccacgccctaaccgccgcccgcaaactcaggggaggtagggcagaagcagcccccagccccccacttccagcgc

SEQ ID NO: 450357 - DNA, 122 bp, Homo sapiens
ccttcaaggtctgaggtcattggtctggtggtggggatgcctcggagtttcccaggctgacgtcagggttatacctctcggaggttctagggcagggaagtggggaggggaggttccctgag

SEQ ID NO: 450358 - DNA, 122 bp, Homo sapiens
tcggctgtcccagagcggtaggtccccaggagcggcagtggggcagtggactctcagggtcgcaggactgacgatgccttccgccccagggcttcatccaggccaagggctacccgacctac

SEQ ID NO: 450359 - DNA, 122 bp, Homo sapiens
cgggcatgggggccctgcagggggaccggagggttaatgaagttcctcatgaaatctctccgaatgccctgctccatgggctgcaccaatgaggccacgctggcaggcaggaagatggtgaa

SEQ ID NO: 450360 - DNA, 122 bp, Homo sapiens
gaagcgtacatttggccctctcatcagttacgtctgagtgaccagggcagctccaccatccgcagggacccaggttccttctgtcttgttgcttcaccaacttcgacacgcggtttccattt

SEQ ID NO: 450361 - DNA, 122 bp, Homo sapiens
ggattactgagctacagaacacccagactcatagcactgggacttccaggtcttaccttacgagtgggtcacaacactgacaaaggggacaatatccattagccattatcttgctgcgtatg

SEQ ID NO: 450362 - DNA, 122 bp, Homo sapiens
tttaggtatgactggcttggattggctcaaatatgtatataaagtgcttagcagaatgtccggaatgtagtaataactcagtgaatggtcttagctgtttttaataatgaagctctggagtg

SEQ ID NO: 450363 - DNA, 122 bp, Homo sapiens
gtgcgggatataatctcctggtgcaccgtttttttaagcccgccggaaaagcgcagtattcgggtgggagtgacccgattttccaggtgccgtctgtcacccctttctttgactaagaaagg

SEQ ID NO: 450364 - DNA, 122 bp, Homo sapiens
tgccttacccaggccaggaggttctcgttggggcccgtgtagtaaatggtcttgagtgggcgagaggcattgtgggcacgactgtgcaagtactggtagaggcccagcagccgctcctgctc

SEQ ID NO: 450365 - DNA, 122 bp, Homo sapiens
gctttccggccaacccctcctctcagtcttaggccccactgcaagcctactcccgctcaccgtacagaacctaagcacaggatcagagatggggacaggttgactcagtcccatgcccaagt

SEQ ID NO: 450366 - DNA, 122 bp, Homo sapiens
gccgggagtggagctacctccacaagcttcggtcaccggaacgaggttgcgccaccggtgcgcgggtcggttgcctgcctccccaagtggatccacccccggtccagtgtgctcctgcgtcc

SEQ ID NO: 450367 - DNA, 122 bp, Homo sapiens
gacccctcccgtggcgcgctctgggggtgcgcgaggcggggccgtggcggctggaggtagcggcggcggcgacgcgtccgggccggtgagggggcgcggggggcgccgggggggcccaagcg

SEQ ID NO: 450368 - DNA, 122 bp, Homo sapiens
agcatagagaagaacattgatgtctctggcccttctgggttcatcccacttgccttatatcgaggaagtacaaagtctgtacacttttttttttttaacaagtctctatctaagataactag

SEQ ID NO: 450369 - DNA, 122 bp, Homo sapiens
attgtgcggctggtggcttggggaagagagacgtaaaaccccaagttaggaggtctgtgccgcgccttgccttgcctcaaggtcatccccagcaggtgagcgtggcccaccctacacactca

SEQ ID NO: 450370 - DNA, 122 bp, Homo sapiens
taattttcagattagcagcccttgcacctcccactcagccttttcccttccttcaaccagcgatggaaatctcacctaggaagcctttcagcctgtcaaaaaagaaaaaatgcctcctaatt

SEQ ID NO: 450371 - DNA, 122 bp, Homo sapiens
gaacaaccccgcccccagcaacatttttcagttggtggctaatatctcgtgcagcctcttcgcacgtaatctagctgtacttttctttaaagaatattaaatgctcactttaaataatacaa

SEQ ID NO: 450372 - DNA, 122 bp, Homo sapiens
gctgtggctgtgttgggagactcctggtgctggagcacgttttagcgcttggcggcctcccggtttcaggccttgcaaggaagcccgggagccgccactgcttttccctgtggccctcccac

SEQ ID NO: 450373 - DNA, 122 bp, Homo sapiens
ggcagaaggctcggggttggtcggtgcacgcggggactccaagcgggggctccaggactgcgctgcccggcgtccctggggcggccggggcaaggtgtcgggtggggtgcaggggctgtgcg

SEQ ID NO: 450374 - DNA, 122 bp, Homo sapiens
atgcacattcctaacaaatgcacatggaacattctccgggatagtctatatactaagtcacgaaacaagcctcaccaagtttaaaaagattgacattatatgaagtctcttctctgactact

SEQ ID NO: 450375 - DNA, 122 bp, Homo sapiens
aaaaatatctttgaaaatcaaagagcatacaacagccctcgtaaacttaaaatataaattcgattctgggatcccaccaaaatccttcctattgttcgaggtcagcagaccaccaccttgga

SEQ ID NO: 450376 - DNA, 122 bp, Homo sapiens
gggcaggggcgaccgagccgggcacaggaactcgcagcagggtagggttggcggctacgccgccctcggtccgcggggaaccacgcgggcttccgggtcacgccgccgcgttccgaccgccc

SEQ ID NO: 450377 - DNA, 122 bp, Homo sapiens
cgggtccgtacgggtgaggggggcgtggcgacaggaaaggaggaaggaggggcgcggtttcgagcttgtccccggcgccagggaggagatcccctcagttctgcgctgctcccgttccccct

SEQ ID NO: 450378 - DNA, 122 bp, Homo sapiens
tcctgagctcaagccattcacctgccttggcgtcccaaagtgctgagattacaggcaccacgactggcccgttaagagtattgttaatctttaaccatttgttctgcagccaagtatcaggg

SEQ ID NO: 450379 - DNA, 122 bp, Homo sapiens
tgcagagctggtacccacacagaggactctgggagcattgaaacgccgctgtgtgatgcacgatggatgcccgtcgttacgtgtcttcacacgatcgcgtgtcattatgcatttgtcaaaac

SEQ ID NO: 450380 - DNA, 122 bp, Homo sapiens
ttttactcatctgtcaccactggttccaggtttcaggttttcagttttaatgaataaaaacgtaagggataggaataagaggaaattattagctcaagtaactgacaagtcaaggagttggt

SEQ ID NO: 450381 - DNA, 122 bp, Homo sapiens
agccattagcagcgtctggtctggcggaggcacagcatttggggcagtcctgggctccaccggtccgacgtgggctgggctgtccatcagctgccttttgacaattgcaccccaggtccctt

SEQ ID NO: 450382 - DNA, 122 bp, Homo sapiens
ctttcttccttactggactgtacatcctagagaagaagggattatgtctgtcatatctaacgtcgtatttctggggcctggaacatagcagaatataagaaatatttgttcctgtcactata

SEQ ID NO: 450383 - DNA, 122 bp, Homo sapiens
tgttctaagtgcctccaagttcaaaacttattggaatgttgagagtgtggttacgaaatacgttaggaggacaaaaggaatgtgtaagtctttaatgccgatatcttcagaaaacctaagca

SEQ ID NO: 450384 - DNA, 122 bp, Homo sapiens
ggagcagagactaacgagaaacaacaatgaggagataactattacaaaggcaaacactggcgctcgcgcgctcgcagccccagaacccgcggtaaataaacaaagtctgcaaactgtttgct

SEQ ID NO: 450385 - DNA, 122 bp, Homo sapiens
cccgggagctcaccttcaggccgcggagggcgggggccgggctggggcgcgggcagggggcgtcgggcgaccgtgcaccccggggccctgctcctcgccccttcccccaccagcccggccgg

SEQ ID NO: 450386 - DNA, 122 bp, Homo sapiens
ttgaagtgatactgagtatgaatcatcctctctgaactgcgtcacagaattacccactgtcgggaaacttaaagatagtttcagtgtttaaaaattctcaggaaattctttcaaatgttcaa

SEQ ID NO: 450387 - DNA, 122 bp, Homo sapiens
aaacgaggggcggggctgtagatgacccggtcgggagagggccacggtttgttgggggagcggctcgagattgcgttctagagaggaaccagagagagggtctttaacctaaatataaatga

SEQ ID NO: 450388 - DNA, 122 bp, Homo sapiens
gtccaggaagagcctgggtcctccccggtgttgggctcttgctccgaggatggtggatgacgctcccagcaccaccgtccgaatccaagcgaaggacccatcctcggccgcttcccgtcccc

SEQ ID NO: 450389 - DNA, 122 bp, Homo sapiens
tggctacttgtgtttggtatgtctttgttttggtttagccctggcaatctggcaggcagtcgatttccagggggagctctgtccacggtatggatgccccaggcttgaggtcctcattcatt

SEQ ID NO: 450390 - DNA, 122 bp, Homo sapiens
cccgggtcggaaatggtggtcacgagcgcttccgggtcagcccctgcgatacttccggggcgaaggtcgtctcccgtcagcccgcgggtgcccagttgtgctcctgaactcgcggtggtggt

SEQ ID NO: 450391 - DNA, 122 bp, Homo sapiens
ctccagcttgaaagggttttatttagaaagctacgaattggtttttggaagtgtgtcattcgcttcttccctggtgactagatgtatcacgtagtaagaagtaagaatgcaggaaacagaaa

SEQ ID NO: 450392 - DNA, 122 bp, Homo sapiens
cttggcccagcgggaaacatcccttgactgaaccgccactgaacacccacactgcacaatcgaggcgcagccctcccgagaggaagccccaacgacctccacctacaaggcctctaagtgta

SEQ ID NO: 450393 - DNA, 122 bp, Homo sapiens
aattgcaagtgtttgtaaactgacaattgcagatgaaatagtcattttctgtgcactttccggtatttaagtctccagatacagcatttaacctaaactcaacggaattattttaaaaaaaa

SEQ ID NO: 450394 - DNA, 122 bp, Homo sapiens
tgctggccttccacgggagatggagcgtttgctgccggcgtggcaagtgttggggcgagacgggtgtgtgtgtttatgctgagaggcattagccccttccaagagctttgtttggtgtttct

SEQ ID NO: 450395 - DNA, 122 bp, Homo sapiens
gggaaagtctcaaaactgtcaactctgatagaaagctcatgtcagagacctgaagctcagcgatgtagttctgagacatatctaagactttggttttcagcggtaggtcttttggaacatga

SEQ ID NO: 450396 - DNA, 122 bp, Homo sapiens
tgacttttctgacaagggacaacggttcctgcgcagatctgcagtttctaaagttgatcgcgcgattggatttgctccccttagaagaaattagtgtctccctcattgcagatgcaaatgcg

SEQ ID NO: 450397 - DNA, 122 bp, Homo sapiens
aagaccaccccccatctcaacccatggggtctgggtgggctgctggggtgggcatgtgaccgcattccctccgccagggtgacggggtcagcgatgagcctgggatccaaggcgagccatga

SEQ ID NO: 450398 - DNA, 122 bp, Homo sapiens
cactttgggaggctgaggcaggtggattgcttgagcccaggagtttgagaccagcctgggcgacatggtgagactcccatctctatgaagaaatccaaaacattagctaggcatggtggcgt

SEQ ID NO: 450399 - DNA, 122 bp, Homo sapiens
caatgtcatgttatttatagagtaaggagttgcctcttctaagaagggaaggcggcatcacgtggtgaccagcactacgagctttggagttagcactgggttcaaattccaactcagccact

SEQ ID NO: 450400 - DNA, 122 bp, Homo sapiens
acaatcaggcccccggggcaggtgggcacctgggtggaggccacggctttctcacctggacggggactaaggaggctcctctgcccgtcccctgtccaggcctcgctgaggctcctaggcca

SEQ ID NO: 450401 - DNA, 122 bp, Homo sapiens
gcccagggttccctattctggaacaaaactaggaccgggcagggctgctgggggcagggacggggctgggacaccggcccctgggtccagcgagtgtgtgaagggctgcctccatggtgcac

SEQ ID NO: 450402 - DNA, 122 bp, Homo sapiens
tccgggcgctggacgcgggacgccgtctcctggcaacgcagacgcggagccgagcgcgcccgcaggctctttgctcagagctcagccctacatagatcggcttctgccatggcctccaaaca

SEQ ID NO: 450403 - DNA, 122 bp, Homo sapiens
gcgccacccaggcggggcggtgcttccagggggcgagtaggccgccaccgccaccgccaccgccaccactgccagaatcgcctctcgggggtcgccgggtgtctcccactcccccggcctcg

SEQ ID NO: 450404 - DNA, 122 bp, Homo sapiens
gccactgcactccagcctgggcgacagagccagaccctatctctgaaaacaataataaaacgacaaccaatgctgactgtgtctccatcactgggtggggctgaggaagcaggcctcagaaa

SEQ ID NO: 450405 - DNA, 122 bp, Homo sapiens
cgtgatccacccacctcggcctcccaaagtgttgggattacaggtgtgagccactgcacccggccagattattttatagttctggagtcaggagaccaacatcagtctcactgctgaaaccc

SEQ ID NO: 450406 - DNA, 122 bp, Homo sapiens
aagtggtcccagtctctaacaggtcccttcccagcctccagagcaagccaatcagggacacgctctcgtggcccagttcggaaacaatgcttggtgggaacctgcaatcttggctgccggaa

SEQ ID NO: 450407 - DNA, 122 bp, Homo sapiens
tggaggaggagacagcagatgattcagtgagctgataaaccagttataacagcattcgctcggggcggggggcggggggcttggggcggtggggtggggaaaataacggcgtttaaaatggg

SEQ ID NO: 450408 - DNA, 122 bp, Homo sapiens
gagctggacctgcgggagcctgcgctgggccagggcagcttttctgtgtgtcgccgctgccgccagcgccagagcggccaggagttcgcagtcaagatcctcagtcgcaggtgggagggccc

SEQ ID NO: 450409 - DNA, 122 bp, Homo sapiens
cgccgtgcaggcaggccggcagtgctggcagacctggcactctgtccacagctgctggcccgggtgctaagctcctcagtgcccagggccagtggcaccgaccgggtgctctgagtgggggg

SEQ ID NO: 450410 - DNA, 122 bp, Homo sapiens
aaggttctccacatcctcaccagactcaggagcccagctggcttcacccagtgggttccgcgcccggtctgcaggtggagctacctgccagtcccgcgccatgtgctggcactcctcagccc

SEQ ID NO: 450411 - DNA, 122 bp, Homo sapiens
aagacaaagaagaataactcgttaaaagcaatttagttcaggatgcgaccgataatggaacgggtcattaattatggaaagttactgccgcagtcagcaggagcaaatgcccaacagaaatg

SEQ ID NO: 450412 - DNA, 122 bp, Homo sapiens
aataatagctgacgcctaccgagttctttctgtgccaaaggcgcctttaccatgaggaagcggaggcacggagatgctgagtgtcttgctcaagttcatccatctggcaggtggcgggatgt

SEQ ID NO: 450413 - DNA, 122 bp, Homo sapiens
gtgatgggtactttactgggtaagaggagacgggtgccccccacccactcctcccggccgcgcggacctctcccgctcagacctgcatctgcattcctttgagtttaccacggacttggggc

SEQ ID NO: 450414 - DNA, 122 bp, Homo sapiens
agtctgagcaacatggcaaaaccctgtgtctacaaaaaataaaaaattagctgggcatgacggccagagcccatggtcccagctactcgagaggctgaggtaagagcatcccttgagccaca

SEQ ID NO: 450415 - DNA, 122 bp, Homo sapiens
aatctttaaatgagttttttttaaaaagctaacgctttcattccctgccccgcccccacccgtacacctttgacttgtgacattttcaggatttacaaaggatctgggagctgtccagccag

SEQ ID NO: 450416 - DNA, 122 bp, Homo sapiens
attcccagcacccatcagaaagtctgactcacaggagttactcaataaatgtctgtgatacgagctccttgataagctgctgaaaggaggtagaaaacaaaaatccaaagttccccaaagtc

SEQ ID NO: 450417 - DNA, 122 bp, Homo sapiens
gttattcaacctgtttccccaggtctctgttttcacattagagagtgttctaggagatgacgcccttcctccttagttatttccccaccctcgtgctggcctttgacagacctcccagtaga

SEQ ID NO: 450418 - DNA, 122 bp, Homo sapiens
gataagcgcctaatatacatccctgcctgtcattattcacattgtggcatgcagtcaaagcgacactctgaggaaaatgtatcgccttaaatacattgattagaaaataagaaagcccgaac

SEQ ID NO: 450419 - DNA, 122 bp, Homo sapiens
ggtttcaccatgttggtcagactggtctcaaactcctgacctcaggtgatttgcccgcctcggactcccaaagtgctaggatacaggcgtgatcccactgcgcatggctgtaaagacacttt

SEQ ID NO: 450420 - DNA, 122 bp, Homo sapiens
tgcggcgcccactgggcgtggggactgggcccaaggctcccgggaccgggtcgtggttaacgccgaggccaagcccttcgaagaactctgagttctctgcctgacgttttgtccctcaggaa

SEQ ID NO: 450421 - DNA, 122 bp, Homo sapiens
tgctgggattacaggtgtgagccgctgcgcccagcctggaaacttcttaaggctttaccacgtttacattcacaggatttatttctttcaagtatctgaatgtgataaaaccaatgaatgct

SEQ ID NO: 450422 - DNA, 122 bp, Homo sapiens
actctcttttcatgataaatagttcgaaatgcaggcagagtagcttgcagaacaatggaacgaagcatctccttgtgtgcttgcaagcaactaaagaaatgagttatgtgaaactaatgtaa

SEQ ID NO: 450423 - DNA, 122 bp, Homo sapiens
tgaaggtcagctccatgctgcccacttccagtccatccccatttcccctgtcactcacagcgtttgacaccaccttggctggttgtgctgctgctactttgcttcttcagagccagcaatgc

SEQ ID NO: 450424 - DNA, 122 bp, Homo sapiens
tcagccttaatgtgagcgctgactggcagcgctcagcccgcgctcagcccgcaggaagcacgaccagtgaacccatattgctttgacagttgcactcatctagaaataatgcaaaacgctat

SEQ ID NO: 450425 - DNA, 122 bp, Homo sapiens
gcctccgctggaggggtgggaccccggaagcagggaaccgaggggctgggctggggaccgcggggtccgggcggggcagaggggccgcgaggccggccaggaacgcggggcggggccgaggc

SEQ ID NO: 450426 - DNA, 122 bp, Homo sapiens
ccggcgcacaggcgttggtagatgtggaaggtaccaagagcggcaggaggaaggggcgcgcggacacccagccccttcccgcgcacccagagcaggaagagcagcgcgcacccggtcagcga

SEQ ID NO: 450427 - DNA, 122 bp, Homo sapiens
atcctaaaagatctcatcctggatgcttccttaaccaggcctatgtacagggcacaagctcgcagccagcttactttccagtcctgatctttgcttttgctatccataccaatggtatttct

SEQ ID NO: 450428 - DNA, 122 bp, Homo sapiens
ttcggtttcccccgtgtcctgggaatggcagtctgagaaactggtttgggagtggcgagacgttccccttcattttgcagttactcccactgtcctaaataaatgatacctaacccctcctg

SEQ ID NO: 450429 - DNA, 122 bp, Homo sapiens
tttatcctagtaaaagctgagttttcatcatcataattaagcaggagagaaatgattccccgtgaactgcatgacaagctgtgtaactgtagttaattttaatgaacaagctccatttttga

SEQ ID NO: 450430 - DNA, 122 bp, Homo sapiens
actctgcaaatgttatggtttaaatatttgtctcctccaaagctcatgttgaaatttaatcgccaatgtggcagtactaagaagtgatgagaggttaatccattcatgaactcatgaattaa

SEQ ID NO: 450431 - DNA, 122 bp, Homo sapiens
gctcgagccgccgagattggagggtcttgggcagggggcggggcgtgcggggcaaggaagcggagacccagacagctgcaggcgcagagagaaatatccaaagacagagacccagacagacc

SEQ ID NO: 450432 - DNA, 122 bp, Homo sapiens
tacgtgtaaccctcccggttaaagctgcgaaggagccacgctctgtgtcgagtcgtctctcggtggacatgcaccttgtccctgaccttctgtcgctacagccacgtcgctgtgaacacgct

SEQ ID NO: 450433 - DNA, 122 bp, Homo sapiens
gcccacaaagccagctctggatggaaaagtaacgagtggagggcgttttcttcccagacccggtggtccagccgtgagtgtccagctgcaggccccacagcagccagctctgggcgaaaatc

SEQ ID NO: 450434 - DNA, 122 bp, Homo sapiens
ctgcccgatccctgccgggccccgccccctgcctcaagcacttcccgctcgacctgcgcacgtctatggatggcaaatgcaaggagatcgccgaggtatcacctggcaccacccgcaccctc

SEQ ID NO: 450435 - DNA, 122 bp, Homo sapiens
agggcatttgagcatttcaaatctgtacttgttgaagaacagacagcctctagtacttaacgtgcagctgcaatgggtgaagaaaaatgcccccattttatgggaatctcaagaatgggatg

SEQ ID NO: 450436 - DNA, 122 bp, Homo sapiens
ggctgcccaggcccaggcctgtttccggccctcctctgagcacctggagaggaggaagtgcgtcttctctccggtgcctctgagagacaagcctactccccccgggctgggtggcccagggc

SEQ ID NO: 450437 - DNA, 122 bp, Homo sapiens
ttctttttttcccctttctaccgactaggaagagatccagtccaggttttgcctttgactcggcctgtgaatttcggctgtgcaatgtgtagcacgtttctttctcccccctcctttctcct

SEQ ID NO: 450438 - DNA, 122 bp, Homo sapiens
cagagaacactgggcgttctctgaggcacagagtaggcgccggcgctctccgcctgcccccggcccgttctctcagttagcacctagcccgggcccccactccggcacactcccctcaaacc

SEQ ID NO: 450439 - DNA, 122 bp, Homo sapiens
gaacaaagaccaatttttcctttgatttgtagaaaccagtgtcattttataattatacttcgtgccttctgttgcatttgaaagaatatttcaggacatcacaattcccctgaagttgtgta

SEQ ID NO: 450440 - DNA, 122 bp, Homo sapiens
acaaggaagctgagcttagaagcagcatgagctgctccgggtgacacagctgggcagtcacgccccgaggggcccggagttctgactgcaagtgcgacttcagtagcgtctgttttctacgt

SEQ ID NO: 450441 - DNA, 122 bp, Homo sapiens
accgctcacatctgctgccgagagcttccagaattccaggccgcgtttaggaagcttcagcggaggcatgcaggctgccctacctctgcaaaaggctcccagccctgggaacaggacagtaa

SEQ ID NO: 450442 - DNA, 122 bp, Homo sapiens
tactcgggaggctggggcaggagaactgcttgaacctgggaggcagaggttgcagtgagccgagatcacacaactgcactccagactgggcaacagagggatactctgtctcaaaaacaaca

SEQ ID NO: 450443 - DNA, 122 bp, Homo sapiens
tctctgcactaaggaacgcacctccacatgtctgagtgcacgtccctctccatgtgtgcacgttccgtgttcacgccgcccatgtctgtgcaggggcgcttcacgcgcgccctctccggccc

SEQ ID NO: 450444 - DNA, 122 bp, Homo sapiens
atctgtacttgcggccggcatccagaggggtgacagtgacagagcgctcatggccctccacgggcaccacctggggcccgtctttgtccttgaactggaccacaaaagagtcgaactggccc

SEQ ID NO: 450445 - DNA, 122 bp, Homo sapiens
gtttaccttcttccgacatggcctcccccgcgggtttcaagatgtgcctccaactggggccgtccactttctgcgatattttggagggggtgactcgttagtgaggaaaccacccccatccc

SEQ ID NO: 450446 - DNA, 122 bp, Homo sapiens
ctggccgccacagaataattttaaatgccccgttttcagacagatccagaacgccgtctacgcctaccggcggcagatcttcaagcccgcggcggccccattcttattgaaatcccactaaa

SEQ ID NO: 450447 - DNA, 122 bp, Homo sapiens
acgcgcgggggaggggcgggcgggctagaagccgcgagggccaggaggggtgccgcggtccgaggccgggctggggacgcggctccacagtgctgtgagcggccgggaggatttaccgccgc

SEQ ID NO: 450448 - DNA, 122 bp, Homo sapiens
ccagcgggagggggctgttcccgcgccgcagcgtctggaagctggacgtgggtctctgcgcgcatctgggggcattctctccaggggctgagtcagtccacaccccctcctcggcgcgctcc

SEQ ID NO: 450449 - DNA, 122 bp, Homo sapiens
ggcgggcgaatctcctcagaatcgcgggcctggtccccacccccaacacgcttgtatgcccgcccctcccgacgccgccttgctgggtgccaagaaccaaccgaagcagccagaactcctca

SEQ ID NO: 450450 - DNA, 122 bp, Homo sapiens
tctgctgcgtaggactcctgcggcgagggctccctcctgccgcgtgggctcctcctgccgcgtgggctcctcctgccacatagggcacctcctgccgcgagggcacctcctgccgcataggg

SEQ ID NO: 450451 - DNA, 122 bp, Homo sapiens
tttttgcacattttaaggccttcctgagtcccagaagagcaagtggagttgtggctaaggcgagctattgtaccatggtgagttggacatcgctgttttctcgtgggagccgtttcgagaga

SEQ ID NO: 450452 - DNA, 122 bp, Homo sapiens
ccccgattccgtgtggtcatggctttatatttgtccctcttcctgttcaaataacttgtgcgcctatatagggcctggcccgcggtggaatggacgcggctgcagctggaatcgcatcactc

SEQ ID NO: 450453 - DNA, 122 bp, Homo sapiens
tgtgtcatacacacacaatctctctctgtcattaaaatgctaaaaaaagtttctatttaccgtcatagtatactccactttctcagtgcatgtcttcacttgttttgtagttttctagttca

SEQ ID NO: 450454 - DNA, 122 bp, Homo sapiens
caaggtgaacgaggcctaccggttccgcgtggcactgcctgcgtacccagcgtcgctcaccgacgtctccctggcgctgagcgagctgcgccccaacgactcaggtatctatcgctgtgagg

SEQ ID NO: 450455 - DNA, 122 bp, Homo sapiens
gcgaaggtggccccacctctgctcaagttcgagcttttggggccagccctgaaatagcagcggaaccccccacaccccgcggaaagcccctttcccagccctccgcattcgccggcggtcaa

SEQ ID NO: 450456 - DNA, 122 bp, Homo sapiens
ggtcgcgtgcgcgctcctccctcgcgctgcccggtcaattccttcttttactcccggcggcgaagccctttcatgcccccaaacagcaggagggaaaccgaaaagaactgccaactgcaaca

SEQ ID NO: 450457 - DNA, 122 bp, Homo sapiens
cagctggcagctgctaggacccagggggctggcgccaggccctgcccctcccttgccagccgtgtgtggcaacatcagagtgacagccagtaccatctccgacaggggctgagttgctggag

SEQ ID NO: 450458 - DNA, 122 bp, Homo sapiens
atgattgccaacagtggctaataaaatgacggctaccacactcatgggtcactggggctgcgcagggctctttgaggtgggtggcttcttttggaaagtactatgaacgtctcgaagcagta

SEQ ID NO: 450459 - DNA, 122 bp, Homo sapiens
acttatatgacatgctggaaaggcaaaacaacagagatagcaaactgatcagtggtgacacgggattcatggcggtggggatttgaagtactccatgtgatactttaactgtggatacctgt

SEQ ID NO: 450460 - DNA, 122 bp, Homo sapiens
ttttcttcccagcccggattaggcgaggagggaattctccggaacatgtgtgcattgtttcgtggagggcagccaggctggcctggggcttgcctcccaaagtcagcccaaggaagcttgtc

SEQ ID NO: 450461 - DNA, 122 bp, Homo sapiens
agcgtattgcactttcctctttaaattgctgtgtggtcttgaaaaagtacttcctctgaccgttacttgccacttctctgaacatgccctaatgttcccttattggcttacaggttggaagc

SEQ ID NO: 450462 - DNA, 122 bp, Homo sapiens
acgcgagagggagggcagagctgggggcccggaggactggccaaccctggcccgggccagcgggcgcgccccgaccagaaatagccagattcctccagcttcctccgccgccgccacccacg

SEQ ID NO: 450463 - DNA, 122 bp, Homo sapiens
agtcaggaggttatttttccagattgataaccatagaaagtgaataaacacttttaaggtcgcaaacatttgctaggttgtccttctcaatgcatgtgcaggctgcatcctgtccttgtttt

SEQ ID NO: 450464 - DNA, 122 bp, Homo sapiens
gcagaggctgggtgaggggctttcagggaggatctcagttcactcagggctggagatcttcgaagcacatcctaatgttgacgtctgcctgttatgaagcaggtgagaaaacagcaaagccc

SEQ ID NO: 450465 - DNA, 122 bp, Homo sapiens
atttgcatttttattgtgctttatgttgtttgctttatgttgttctcttgggcttacttccgagttggagatgggaaagtgcccaatgaaagaaatataaaagaatactaattggaagctga

SEQ ID NO: 450466 - DNA, 122 bp, Homo sapiens
tatctacctgtatctgtctctcttttagcaatgaaaacaataacttactcaaaagacccacgtatacccttgacaggcatctcattggtgagaggtacatcatgcggccacttctagttatc

SEQ ID NO: 450467 - DNA, 122 bp, Homo sapiens
cctcgtcacagcccgcgcgtgctccgctccgcttcccttcaaccgacgtattgccagtaccgtctccgtcttgtccagcccccgctgtcgggaactgagagcaccctttcccagacttccgg

SEQ ID NO: 450468 - DNA, 122 bp, Homo sapiens
cccaagaagaaaccccaatccattccctcagtgtctccctggaccccttcggctggacctcggccctgcagaaccccccacttcgcgggacgctcgctcaccatgacgcgtgcgagaacgcg

SEQ ID NO: 450469 - DNA, 122 bp, Homo sapiens
caaggaaccgagccccagcccctcgtgggccaagggcgcccacagccacgccaccctttccgaaggaaccgagccccagcccctctggggcctgccaattgccagagagccccagtgctcca

SEQ ID NO: 450470 - DNA, 122 bp, Homo sapiens
ggggtgatcttcctgtggggcaggcgtttcggggtccacgagtccgaggagccccgggagcgctagtgcccgaacgtgctggcaggctcctggcctctcccgagcgaatccatcccggtctt

SEQ ID NO: 450471 - DNA, 122 bp, Homo sapiens
ggaggtcgtcgaagaaggatgcaccttctgaggtggcgttgggggtctgcgccccgcccgcgcccggggggcggaggaagagtggcgccagtagcagcagcagcaacatctaagtgagaggc

SEQ ID NO: 450472 - DNA, 122 bp, Homo sapiens
ctggccgaagggggacctcggtttccgggctcccggccggccctcgagggcttcccttcacggccccgattcccggcccctcccacccggaaacccgcggtcggatccacgtctcccagccc

SEQ ID NO: 450473 - DNA, 122 bp, Homo sapiens
cagcttcagactcatcttccctggttctcaggaacaatgacaccacattattgctgctatcgagctacagagaactcagaccattacatctggtggcattcctggccccagtagtagcacag

SEQ ID NO: 450474 - DNA, 122 bp, Homo sapiens
agcagcagcaggaggggccggggggccatggcggggtcggggcgcaggagctgagcgctgcggccacggccccgggcccccgcaaggcccctttatggcggcgcccggaaaggggacggccc

SEQ ID NO: 450475 - DNA, 122 bp, Homo sapiens
cccatgctggggccagttacacaaaggcaacaggtcctctttgccaggcctcagtctccccgtcactggagatcaggtgccgctcgtggggatgaagcgagctctggagtgtgaccaaggtg

SEQ ID NO: 450476 - DNA, 122 bp, Homo sapiens
ccacctgccgggaatgacctctcctcctttcactcttccccctggctcctcagctgcagccgctccggcctccttgctgttcctgggatacgccacactcagtctggcctcggggcctttgc

SEQ ID NO: 450477 - DNA, 122 bp, Homo sapiens
gtcggaaccagtagagacggcggttcctcgggtccaacccccgggcaggaatctgcggtgcgcctggagagagaagcatccgcaacaacctccgcctcagccaggcccgggttccatccggg

SEQ ID NO: 450478 - DNA, 122 bp, Homo sapiens
gaaggggaagctatggctaccgatagaggtcgatttccccggaaggaatattcaagttttcgtgtgtgtgctttccaggaaaatagttcacgtgctaaaagcttgcaccttgccagcaataa

SEQ ID NO: 450479 - DNA, 122 bp, Homo sapiens
tccgaggagggctggtcactactttctgggtctggttttgcgttgagaatgcccctcacgcgcttgctggaagggaattctggctgcgccccctcccctagatgccgccgctcgcccgccct

SEQ ID NO: 450480 - DNA, 122 bp, Homo sapiens
ggactttcacacgcgcgttcacacacactccagtgcggacccacgatctgtgcacgcagccggcaggtgagccctgggcacatgcatgcaaacctgcccacctccctgcacgtgtgcatctg

SEQ ID NO: 450481 - DNA, 122 bp, Homo sapiens
attctttttctctttgccaagtctgggctccttctaagatgctgctagctattcctagcccgttccccaatacttctctgcccccaccttttggaatccttatctaggtctaaaaacggttc

SEQ ID NO: 450482 - DNA, 122 bp, Homo sapiens
gcggagctccagacccggttcctgagcgaccaggaactcccttgggcgcagtgacaggcccgaaggagtggaggacaagacccgctgtgcccttgcctggccctctccagcccctccctccc

SEQ ID NO: 450483 - DNA, 122 bp, Homo sapiens
acatttatcaaattatttctttcacaggtgacagagcagattcaattccttttgatactccgtatttctctatatgtatttttttcattctgcattcttattattccaacgttttacttatt

SEQ ID NO: 450484 - DNA, 122 bp, Homo sapiens
cctcaccttgctgctgcaccacgcggtgatgcactcccagcagaacaggtggccgcagggcgtggctgttgggtgcctgcgctcctccaggcacagggtgcacagggggtttctggaaacgg

SEQ ID NO: 450485 - DNA, 122 bp, Homo sapiens
tgtgtgattgaagaaagggagaaatccagctctgtgggctagggcaggtgcccactccagcgtgaggccaagggatccttccaaaagaagtcaggttgatactgaaacctgaagaagaagcc

SEQ ID NO: 450486 - DNA, 122 bp, Homo sapiens
gggatgggggagggggtcggagggcggcccggggggcccagccctgcccccgcccggccgcggtacccacccacagtccgggagccgatgcagcccatggctccgggggccgcagagccggg

SEQ ID NO: 450487 - DNA, 122 bp, Homo sapiens
tcactgagcgccgccatcactaccacgcgcctcagaatacacgcgcacaaacgcccccagcgcctctggccgcgggctcgcaggtgcagatgctttgaaatgaagaactcggaccaggccga

SEQ ID NO: 450488 - DNA, 122 bp, Homo sapiens
taatggttagggggggagggggcataatgaggcctgtccaacctcctgttccatcatgtccgggaactccatttttaaggtttctcgggggtcccctaggccaagaggtggtccatttggtc

SEQ ID NO: 450489 - DNA, 122 bp, Homo sapiens
attaaagaacccagcatggggccctgctaagcttgggccggagcgcccgcccaggtggcccgtccgtgacttctgccctgtgtgcttgcccggattgttaggaagagtgatcagaaacgtgt

SEQ ID NO: 450490 - DNA, 122 bp, Homo sapiens
cagggtttaatatacttcagaccattctcagtgaggacaattgagaatgccacaaggtggcgcagtgactacccagaaatggactacttttgtctttctgcactttaaggcaactgtcccat

SEQ ID NO: 450491 - DNA, 122 bp, Homo sapiens
caggagcggccataatggctgtgggaatcactcttagtcacctcagtgcctttctctcttcgttgcaagggacactcaagagtcgggtgcccagccaaggccaacacggcgcagtggcattc

SEQ ID NO: 450492 - DNA, 122 bp, Homo sapiens
gctaaggtctcagccctgggtgtgggtattcagctctcagtcccagggatactgcagcaccggaaaaacggggctcagctgcgagcaaagctcccacccccaacccaccgccaccctccgcg

SEQ ID NO: 450493 - DNA, 122 bp, Homo sapiens
gcccctgggcgccagctgcttctcccagaggcccgactttcggtctccggtcctccacgccgcccttctggtgggagggtggctccatcagtctcgggcccgaaatgaacttacctgggaaa

SEQ ID NO: 450494 - DNA, 122 bp, Homo sapiens
ggggccggttgccaggacgacgcctgcgaagatggccgctgcgtcctcatcggattccgacgcctgcggagctgagaggtgaaggcagggctcctcaaggcctcttttcccacccgtgtaaa

SEQ ID NO: 450495 - DNA, 122 bp, Homo sapiens
aaggagcctgtgagcaacgcattgctcagccacagttctttgccggtgccaaatttaggacgcgctgtacttgtaggtgagaggttttggcgggaaggaccccgggtgggcggagaacgccg

SEQ ID NO: 450496 - DNA, 122 bp, Homo sapiens
gacgcagtctgagggggccagtccggaagtgagcattcctgtacctcttccgagagaggccgcagggtgagcaggtgacagatggtgtccatgagggcatggactcaggggcggctgcgacc

SEQ ID NO: 450497 - DNA, 122 bp, Homo sapiens
ttcttcttgtctttcaccaggaggaactgcaccaactccgccaccgtccgattcagccggcggtaggccctgcgccttgccaaggctttggccgccaaggccctcgcgcctttccgggtgag

SEQ ID NO: 450498 - DNA, 122 bp, Homo sapiens
gtgtggcaaagtttttaggttcacaggacagaaaacctccaagcaagagtgagcggctgccgtgaacgtcggcaggaggtgctgcagggagctgtggcgaacgtggtgagggtttctggtgg

SEQ ID NO: 450499 - DNA, 122 bp, Homo sapiens
agcccctgcccagtttggtgcagaggcgtggggggcgggactcgtctttgccattcggatcgctgggaaagcggtgggaatccaactgaagagcagccagaggagagctgaagagaggaggg

SEQ ID NO: 450500 - DNA, 122 bp, Homo sapiens
tggtcctcttcctaaagtatcttgaattccaaacatttaaaaagtctgatcctctactgtcgctttaaaagtaagagttacaacacagtcctgactgttcccaacgttgccagcaaatcgtc

SEQ ID NO: 450501 - DNA, 122 bp, Homo sapiens
actcctctctctacgtcggcagggggcgctgcacagctgcggggcggggtagcttagacacggggcgtccggctaaggccggggacccagggtggtgggcggggtgtcccgcccgcctgtgg

SEQ ID NO: 450502 - DNA, 122 bp, Homo sapiens
ccggtgcgtatttgcctgtacctacgcgcgatgccagtacttctggtcagtttccaggagcggcaagtgaggaatatgaaataaccttatggctgaatcagggtgaaggggaagcttgtaag

SEQ ID NO: 450503 - DNA, 122 bp, Homo sapiens
ggcgcggaggagacgcgggtgctgccccgcgtgggaggaggcggcgggtcgctgtgtgcccgtccagacccccagggggctccctcgccaagccctgcggctccactgctgggcgtctgccc

SEQ ID NO: 450504 - DNA, 122 bp, Homo sapiens
agctcgggctacagtgctgaggtgtgggtttccgctccgcgtgcctatgctgggcctggccgggaagctggatgggccagcctcacctctggaggggctttcctcccgtttccagggtccag

SEQ ID NO: 450505 - DNA, 122 bp, Homo sapiens
gcctccgccaacccccatgcttccggacgctcaaagactagaaatgcccctcaggatacccggcgacccctggccactccctcggtagtttcggaggtcactgctgtccctcccctctcatg

SEQ ID NO: 450506 - DNA, 122 bp, Homo sapiens
catttggttttgctcccccagggttccatctgcgacaggggctacttgtgtccctggcctcgtcagctcgggctgaaggcggccctggtcctggccagaggggctttgtgaagcagaaatag

SEQ ID NO: 450507 - DNA, 122 bp, Homo sapiens
agacggacgcggagtaccgcaagctcttcgacctggcgctgcagggcctgcagctgttgtcgcagtggagcgcgcacgtgatggaagtggtaggccccgtccccgaccccagccccgctcca

SEQ ID NO: 450508 - DNA, 122 bp, Homo sapiens
cgctcctgttcagtttgcctccttgatttcagggtccgcgtcaggcctaagcgacgaggccgccggcaataaagtatcttaaaaatgagaagaggaacgtgggagtgtagaaaataaagcag

SEQ ID NO: 450509 - DNA, 122 bp, Homo sapiens
gcagctgtagcttctgcgggacctccactgctcgggcgtcaggctcaggtagctgctggccgcgtacttgttgttgctctgtttggagggcgtggtcatctccacgccctgggtgatggggg

SEQ ID NO: 450510 - DNA, 122 bp, Homo sapiens
agtagaaactgggtggccatgggagactggcctacagtcccatccatcacagagggttggcgtgtgctcacccattcaaggaccaataaatgagtatctctttaagagcagctcctcccatt

SEQ ID NO: 450511 - DNA, 122 bp, Homo sapiens
tctacgccgagctctcccgcgctccttggatacttttttgcaacgagatgccaatttccccggcgaccactccctcaaacaggccttcgcctccgcccgcgctgaggcccaggcccaggtcc

SEQ ID NO: 450512 - DNA, 122 bp, Homo sapiens
gcggagtcctgagtgccctgagccccgcgcgggctcctgcgggacgggcggcgtcggccccggcagggcgagccaagctcccagcagtgccaagctgcccagcgaggctaagcaatcacggg

SEQ ID NO: 450513 - DNA, 122 bp, Homo sapiens
cctcaccctgcaacctctgacctgaatgcagaaacagtttgcgtcttgtgctgagctggccgggaggcctccgctcgtgtcaaagcctctcctctgccgcctgggttgaccgccagggaagg

SEQ ID NO: 450514 - DNA, 122 bp, Homo sapiens
agactgctcagtaagttacttgaactctctaaatctcaatgtcctgatctatgcctacctcgtgatttgtaaaaaaactttgctaaattcttggcatatatgcagtgctccataaatgagaa

SEQ ID NO: 450515 - DNA, 122 bp, Homo sapiens
ataggtagatgggggtaaatacaagtgtgtatttcagaataagatttgcttgctaaaatgcgggaatcagtcatttctccagggtgcagatttatatttacatcatcaatgaaagtttcttt

SEQ ID NO: 450516 - DNA, 122 bp, Homo sapiens
aatggccgtggccatagtctgcaaagcagagcatcaggtagcatttgaggtcgccctgcacggagataaaagtgggcccacagctgctcttccagtatgaggacggcctcagaacactgctc

SEQ ID NO: 450517 - DNA, 122 bp, Homo sapiens
ctctctgcactgtggagtacgccatgactgctcacggtggtcgcaggtgcagacgccagccggaaccggaaccggaaccggagcacgggctgccgctcccgaccgaaccgcgggcggcgcgg

SEQ ID NO: 450518 - DNA, 122 bp, Homo sapiens
atggtggtaaagatgatcttggtgacgatcatagtgatggtcgtgacaatgatgaagcttcgtgtgagcaaaaacggccttgttcatggatgtaagcccagtttctaggacagaagctgatg

SEQ ID NO: 450519 - DNA, 122 bp, Homo sapiens
cactagactgtcagctccacaggagcaaagaccacttctgcctgactcactactataaaccgtggcccacagcacggagaaatcagtttcttcctgtataaaataaagatattaacagtatt

SEQ ID NO: 450520 - DNA, 122 bp, Homo sapiens
atagactcctctctgagacgcccgtgtttcagttggcagccggcctgtttcttttaagcccgccctaatttatttttggtcccatgcataggagccagtgcttattttgataaccgcgttta

SEQ ID NO: 450521 - DNA, 122 bp, Homo sapiens
agaggctctggacagcgccttgcaccacacactgaacatgggtctgctggggcctcaggacggagcagccaggctccaccttggggtgtggggaggccggtttggtgaaaagacacccagac

SEQ ID NO: 450522 - DNA, 122 bp, Homo sapiens
ggtctgggaccaggggaatctgcccagggatgcctgcatcatgcagcaacccccagcattcgagagatggacgtggaccagcctgtaatcacactgcctttattgctattcctgcctctcct

SEQ ID NO: 450523 - DNA, 122 bp, Homo sapiens
ctgacgagcatctctcgacggcgccaccgcccggacgtggccccaggagccgggagaggccggctgaggcacatgcgtactgggagacggacaaagtcccacaatacctcgcttcgtcactg

SEQ ID NO: 450524 - DNA, 122 bp, Homo sapiens
aattttcttcccccattattattgttttcttaaaaaaaaaaaaaaaaaaagatggggtttcgccatgttgcccacacgggcctcgaacttcggagctcaagcagtctgtctgccttggcctc

SEQ ID NO: 450525 - DNA, 122 bp, Homo sapiens
ggtagttacgcagtggaggctacggcggttgcgtcttacgtcatcgaactgcggccatttcgaacccgcaatggaagaaaggggaggggtttatgcggggcggggtctggagttagtgtttt

SEQ ID NO: 450526 - DNA, 122 bp, Homo sapiens
cccaaggtaagcgaagagcagcttctaacattttaggaagagtggttttgcttctctttccgctgaacccacatggctggaaggactgcctggagttgaaatttgatccacagcctcagtgc

SEQ ID NO: 450527 - DNA, 122 bp, Homo sapiens
agttgctgcgccgccaggtgggccagggtgtctgcagaggtccccggcctcctgggctgccgcctgccaccgcttgggctgcccgtcctgggtacgcaccgttggagcctcctgcctggtct

SEQ ID NO: 450528 - DNA, 122 bp, Homo sapiens
ggatatttaaatttaggggccggtctccagggcgcgtagataaataaatacactcagcgtcgttgtgctctgcctggctggctctggggcgggaagaccgcggtgtttgtggcaggtgcggc

SEQ ID NO: 450529 - DNA, 122 bp, Homo sapiens
cctctctcttcctgaagggtcctgaggatgcatcccatcacacagaactgagcgagtggacgtaggggcaccagcaggcggagcagctcgcaggccaggctgagaacaagcatctgcgcatt

SEQ ID NO: 450530 - DNA, 122 bp, Homo sapiens
tgctttctggctgctgtttggatcacgtgggtattgtgtacagttgtccagtccctatgtcgttttgttttgcttaatgaatatcacatcaatttaatgtgtccacactgggcaaaactgac

SEQ ID NO: 450531 - DNA, 122 bp, Homo sapiens
acctgcattatactggagaagcccttcctagagttccagactgattttcctggcactatccgtgtccctcttggtgagctaatcagcaaaggaaatccaagtctatgctagaaacaagctgc

SEQ ID NO: 450532 - DNA, 122 bp, Homo sapiens
ccctcctggaataacaagaaaatgagtgtcgcctctgtttttgtcggtccgccgcagacccgcggcccccacgtgcgcactccgatgacctttccgcctcgggtgatctgggggtgcacggc

SEQ ID NO: 450533 - DNA, 122 bp, Homo sapiens
ttttctgcagcagaatagtctagacttctttatctcttggctgggttccccgcctacagacgtggaagctgcaagtcttctttaggatcagacttgaaagactcagacatcatttctgcctc

SEQ ID NO: 450534 - DNA, 122 bp, Homo sapiens
ctttggtgaaggaagacagcacccggtgaagggctcagaggtattagtgtggctgagattcgacacccactctgccatcctctgctctcctctagaggaagttgcctcttggggagctgagt

SEQ ID NO: 450535 - DNA, 122 bp, Homo sapiens
ctgacccgcaagccagtccacggggtgatgacaaacgaggtgggggcgcgcccggtgtgccgcggagggggtgggggacgcggctttcccggcaagagcctgagcagcggctgaccgcccgc

SEQ ID NO: 450536 - DNA, 122 bp, Homo sapiens
ccctgctctcggtcttcggagtgcttattctcaccttgctgggctttctggtggcggcgacgttcgcctggaacctgctggtgctggcgaccatcctccgtgtacgcaccttccaccgcgtg

SEQ ID NO: 450537 - DNA, 122 bp, Homo sapiens
ccaggccccccaggtttagaatccggaggccggggtggccaggcccccaggtttagaatccggaggccggggtggccaggccccccacgtttagaatccggaggccggggtggccaggcccc

SEQ ID NO: 450538 - DNA, 122 bp, Homo sapiens
agcgcaggccctgcgccgcctttgctccctcttccccagctcagcccggccagcctgagacgcggcgtggcagcttccaaaaagtgctctctaccatcctctgactcccctcttccttcttg

SEQ ID NO: 450539 - DNA, 122 bp, Homo sapiens
gaaaggaaacttgataagttacactacttagtgctctggagaagacattcaagagaattgcgaccaataattattgtggttttattcaacagtatactcagcttaacccctatcatgaatac

SEQ ID NO: 450540 - DNA, 122 bp, Homo sapiens
cactgtggtgatgtcctccccgggcagcagagtggctccctccactgggtcagagttgggcgccaggtcccccggatggcccccggggtcggagccccccacgcccagcctacacttcaccg

SEQ ID NO: 450541 - DNA, 122 bp, Homo sapiens
ttttcctatgatgccaggttcctagttcccgcctcttctgccacttctgcaggagccacccgaggccttgaggggccctttcagaaccttgggtctgaagtcatttcttatgccctgggtta

SEQ ID NO: 450542 - DNA, 122 bp, Homo sapiens
gtaagagcctatgtactgctcactgctctgaaatactatctactggattgcagcccaaaccgcaacaccaataatcatgttgctaattttccctgctgtgaaaccaagggcaagaatccaac

SEQ ID NO: 450543 - DNA, 122 bp, Homo sapiens
cctttcctaatcaaagaaaggggtgacggacggcacctggaaaatcgggtcactcccacccgaatactgcgcttttccaacgggcttaaaaaacggcgcaccagattatatcccgcacctgg

SEQ ID NO: 450544 - DNA, 122 bp, Homo sapiens
ctgatatcttctcccggatgcccaggctgtgggcgcgggtaccggtacgggtcagcaagacgccccgggggccagctgctggccccgggaatggcgtgctctgggcaagggggaggcaggca

SEQ ID NO: 450545 - DNA, 122 bp, Homo sapiens
agtggcccgcggtgcgcattctaatccgtttcacacacggtgctgctacctcgtttgcttcgtgcgtgcgtgcgcgcgcagatgtgggccccgcgggagcagctactgggctggactgcgga

SEQ ID NO: 450546 - DNA, 122 bp, Homo sapiens
ggggaagcactctctaaacgttagcaaataccatggtaggacacaaggcccctgactctccgctttcagcttactgaagatcctcaaaaccaacagcacacagcttccagcgcatgctcctt

SEQ ID NO: 450547 - DNA, 122 bp, Homo sapiens
ttgggacagcaggactgggacttggccacggagaccattatctgatgtacctttagccagcgcgtccttatcttgacagtgggcagaacacacacgtttgtaggtgggcttgccagcaagga

SEQ ID NO: 450548 - DNA, 122 bp, Homo sapiens
gccaggagggcggggtgggagcactagcggcgtgaggggccgcaggcggggtcggggcagcgcgctgcagccgccctgctggagaagccgaactccctccggagtggggggctttgacgagg

SEQ ID NO: 450549 - DNA, 122 bp, Homo sapiens
aaccatccgcagggaaggggcatgcccatgccgggatgcatccttcagaaagccaccctgcggtacccagtcaacatcagacagtgaggaccaaagccagaaggttttaagttgaaatgatc

SEQ ID NO: 450550 - DNA, 122 bp, Homo sapiens
ttgtggggctgggccctggttcctttccctcccgtggccgttagactgggcgtctaacaacgctaatagttatttgaaaaagtatgcaaactgctcctgacagactggcctatgcgcccggc

SEQ ID NO: 450551 - DNA, 122 bp, Homo sapiens
cagccctggcacggtggcctgctccaaccgctaccttgctctttcgagatggggctgccacgccgccggttcagctccgaggccggtaagtgaccttccggactttcgctggggcgttcttc

SEQ ID NO: 450552 - DNA, 122 bp, Homo sapiens
gtcggcaccctggggcaggggcgcggccaaattgaggaaacacctgattggggcctggggcggggtcgcgggagggacatgccttggaacagggggcggggtcaggaggtgtcaggggcggg

SEQ ID NO: 450553 - DNA, 122 bp, Homo sapiens
gcaaaacagaagacaagggtgagagccgcggcgcctcactccaggggttgagccggagcccggggcctccatgggcctcagctgcccccaggcaacgtgggagaaaccagagcttccccagg

SEQ ID NO: 450554 - DNA, 122 bp, Homo sapiens
tgcggggcagcaacttggggcgacccaaatctttaaaataacaaccccccgacccccgcgcgcaaacaaaaattgtgctcaggaaaggcacgactcaatatttaaagtaaaaagcctttgtc

SEQ ID NO: 450555 - DNA, 122 bp, Homo sapiens
cacagaggggttaggaattccctgctcctactgatgactgtgcccttccttcttgcttcccggggctccccacccagccccacaatccaacacgcacacgcagggcctgtgtctgtctgatt

SEQ ID NO: 450556 - DNA, 122 bp, Homo sapiens
acctcatgatccgcccacctcggcctcccaaagtgctgggattacaggcgtgagccaccgcgcctggcaggttatgtctttgctgtaattggaggcagctggtccacttagaccctgatgct

SEQ ID NO: 450557 - DNA, 122 bp, Homo sapiens
agaggaaggagtttgaaatacctgtgaatagctgcaaaaaggtcttctgtggtcctgggtcgactgggggtcattacctcatcattcccgtcttccttgaggaagtcacaggcctctgagga

SEQ ID NO: 450558 - DNA, 122 bp, Homo sapiens
agagctactcaactgtcccaaggagagggtgatgactgctggcctcccaccggccatcagcgccccactgactgacacccctgagtcagtctccaccctggaactgtttctctcactatttg

SEQ ID NO: 450559 - DNA, 122 bp, Homo sapiens
tccgtaaactgctcctacttctggagtcctcgcacgggtttatggtccacctacggcggccgaggagaacctaaaatgtttaaaagagcaaggacaagcgcatttacggcatttcctactct

SEQ ID NO: 450560 - DNA, 122 bp, Homo sapiens
gaatgtgattatacgacctgagtcactaacaggcagctgtaacctttatttccctaattacggattagccttgaataaactcaggtgagccactgtacctggctttgagaatttcaataaaa

SEQ ID NO: 450561 - DNA, 122 bp, Homo sapiens
aggtgggttaggtaaaagaagctttttacttaacgttgtcttatttccagtctaattttacgctgtagcagaaccagatggctgagaaaattctggaactatggatcttgaccccaaggata

SEQ ID NO: 450562 - DNA, 122 bp, Homo sapiens
ccattactgggtatatacccaaaggaatataaatcatgctgctataaagacacatgcacacgtatgtttattgtggcactattgatctgtctttatgctgatgccgcactataacagctgtt

SEQ ID NO: 450563 - DNA, 122 bp, Homo sapiens
ttcattaattactcggagccagttaaatggcctggtcttaaaaatgggaagagtaattaccgagtaatgttatctgtctggggctacccgacctgacaccatgacacccaagggaaagctgg

SEQ ID NO: 450564 - DNA, 122 bp, Homo sapiens
ctgtttgtggctgaaattcgacccagccggcctgcgcctgccccgcgccccctttgtccccggccattgtttctgatttcatgctatcagaggtctgcgtgtttttctgcatgaagttgtca

SEQ ID NO: 450565 - DNA, 122 bp, Homo sapiens
gaccaggcctctgtttcacacagtcgggtcgtttttagtcagtgatccaagggggccgggcggtgaaccaagtctaacggaggcagtcacagttcagtgacagagttccttcctggttctga

SEQ ID NO: 450566 - DNA, 122 bp, Homo sapiens
aactcccccagctcctttccttccagcttctgcccatctctagccttctcagcccagctccgttcaacaaatagttattgactgtcagttacgtacagcgggtgttttgccttttctatgaa

SEQ ID NO: 450567 - DNA, 122 bp, Homo sapiens
attcttaatatagttacttaagcatttcctagatagtagtgaatctggcataatgaaatacgagggtataaaataatactttagttatttaacaatagatcccattgggctttatgcaggta

SEQ ID NO: 450568 - DNA, 122 bp, Homo sapiens
catgggggcctctgcgattgccggaaggttgcatggctggtcccagggccagcacaggcccgaggccgggctgcctggttttatttttatttaactttattttctgttttatgagtgtgtgt

SEQ ID NO: 450569 - DNA, 122 bp, Homo sapiens
ggcggggctccgcaaggacctcatgccttagagatcgcctgaagagcggaagccttctgtcgagaagcagctacccaagctccaggagcttccggtatgtgttttccctctgttctcgatta

SEQ ID NO: 450570 - DNA, 122 bp, Homo sapiens
gagccttcctccacaccccgcccctgcagggcgcgcggtggtgacgtgtagagtgcgcgacgcttttggcgacccgacctctggctaacctacccccggagccatggcctctgctggggtgg

SEQ ID NO: 450571 - DNA, 122 bp, Homo sapiens
agagttaatttgcttgctgttagagatgtagcactttatccttcctatcagtaactgctccgtgttcagactcctggtttcttccaggcttacagtggacatcatcagcttcctgctttaaa

SEQ ID NO: 450572 - DNA, 122 bp, Homo sapiens
aatcttagccacttatccccagtgactaccatgtccccttctaaattccaaagactccaacgcagcactagcaagcaggttcgggacagccctggacgatttcccgaccgctgctcaggctg

SEQ ID NO: 450573 - DNA, 122 bp, Homo sapiens
agcgctcagtgggagcggagccccgcagtcacgttgtgaccagctcttcaggtgttaggccggttgtcccttcgcgtccttcatagaatctgatccaggaccacacgttgcatttaattggc

SEQ ID NO: 450574 - DNA, 122 bp, Homo sapiens
gtgcagtgctggctcactcagcaacctcggcctctgggtaagcaattgtcctgcctcagccgcccgagtaactaggataacgggtgcccaccaccacacacagctaattttgtatttttagt

SEQ ID NO: 450575 - DNA, 122 bp, Homo sapiens
gcctggacaaggaagtgaaatgatcatctaataacgcagttgactcatctgtcaaataagcgagtgggccagggtccctgagctcactaccctcagattctaactccagcttcacatcatta

SEQ ID NO: 450576 - DNA, 122 bp, Homo sapiens
cgagggcagccggcaggggctggtaccaacttggcggttctcggaggggcggggcaggggcggggcggggggaggggagaggacgcttgcagaagcgtcctcagttgccatggaaacgggac

SEQ ID NO: 450577 - DNA, 122 bp, Homo sapiens
ccaccacacctggtccaattcatcataattctgaatataatttaataattttaaaatggtcgcaatggcattgccatttggagtatgggaaaatgcagttggttaattcattgaacagatta

SEQ ID NO: 450578 - DNA, 122 bp, Homo sapiens
aagagactgattcttgggaggaggtggggagcctctattccaaccagctctgctgatacccgaatggcctgcggatcaagtgtcagcctctccagcctgaataattcatgctaaggccagga

SEQ ID NO: 450579 - DNA, 122 bp, Homo sapiens
gaggtgctggggagaggctaagccccagcccccactctaattctctaacagcccctggtccgcatttgagtgcaggcctctgcctcagccaggaccctgaccccagggccctccacttccag

SEQ ID NO: 450580 - DNA, 122 bp, Homo sapiens
ttttttttttgagacggagtctgtctctgtcgaccaggttggagtgcagtggcgtgatctcggctcattgtgacctccgcctcccgggttcacgccattctcctgcctcagcctcccaagta

SEQ ID NO: 450581 - DNA, 122 bp, Homo sapiens
ggccctaggagcggcccctgcgtcctttccccggggacaccagccttgtctgtcggggtgcggggggcagtgagttccccaccgcctcggaatcccggctgctgcccacctggggcctggtc

SEQ ID NO: 450582 - DNA, 122 bp, Homo sapiens
cacttgcgcctagacccgccgtccagccctgggtggtcccaggggagagcgcacagggctcgggttcgggttcagctacatttcccccggccccccgcgtcaccccgcgctgttgcctccca

SEQ ID NO: 450583 - DNA, 122 bp, Homo sapiens
actggaaatgcaaagtccgagacctctccggactctgcacaccttccggcccggctccgtcggcaccggaaatgcaaagtccgagacctctccgggctctgcacaccttccagccctgcgcc

SEQ ID NO: 450584 - DNA, 122 bp, Homo sapiens
gcctcaggctgcctctctgtgtttcccttgtataatttgcagggcagttactcaactatacggccccacgatggcagggaacaggctgaattcagtccttagcagagggctgggctcacaga

SEQ ID NO: 450585 - DNA, 122 bp, Homo sapiens
cagacgccgtccctgatcgcaccgtctgcggaaagtttctcttgcctcaggctctgtgcgcggtccctggggagcctgagtgtcccgagactggcctaagcctgtgtgcagtgcgagagagt

SEQ ID NO: 450586 - DNA, 122 bp, Homo sapiens
gcctggagaccctccgcagcttgttaatcagccccaaacgaggtgccagcgcccagatcccgtgctgtcacacaggcggagtcaggttacagtggcagggcagcttgaactgggagccctgg

SEQ ID NO: 450587 - DNA, 122 bp, Homo sapiens
ggcaacaggactcggggcggggcctgtgttgcgaccctggccacaccctcaccgcctgcccgcaatgattggttttccgctgagagaaaatagccagtcaaaggaaggcgctggcagtctgc

SEQ ID NO: 450588 - DNA, 122 bp, Homo sapiens
tgcctgggcatcagacaaaccccaaaaccccagggccttccaggggcagagcaggggtcccggcgcccgccgtggagcagcacagcccctccacagagtgttccgcgcaggcattgtgttag

SEQ ID NO: 450589 - DNA, 122 bp, Homo sapiens
cacctgaaacttctccacctcctcagatgctacagtgagtgagggaggtgagcgagggagcgccctctgtgagttcaccagcgcggagactgagcacccagtgcagacatctacctccctgc

SEQ ID NO: 450590 - DNA, 122 bp, Homo sapiens
agagcttgggaggtaggagagtctgggccggtggggtcctgggcgagcgtctggggactccgagcgggagacgggctctgagaggacaccgtggctcttggaggaaggggtctctcaggagg

SEQ ID NO: 450591 - DNA, 122 bp, Homo sapiens
gctcgggtggctgaaggccttggctcttgggaatggtctcgcgtccttcaccagaactgacgggaattatatttacctgaagagtcagagacctcttcagagtcatcttttccagttaggac

SEQ ID NO: 450592 - DNA, 122 bp, Homo sapiens
cagcagctggaaggaccggaacttctatactgcggtgctgctgatggtgccgctgacccccgggaagcggggattttaagggttacacccgagcccttggcatctgtgcatcccagggtgat

SEQ ID NO: 450593 - DNA, 122 bp, Homo sapiens
gtttagatttaagtgaaatagctcatataactgaaatgtaaaccagtttttttcaggggacggagacatggcatgggggtacaccctcagtggaaatggaaaccattactatctatcacaag

SEQ ID NO: 450594 - DNA, 122 bp, Homo sapiens
cgcccgggcagctccagtcccggactccgcagctcggagcgcagccagccacggccattgcgggaccctatttatcccgacacctcccctgacgtgggctcggaacgctcccttggcagctg

SEQ ID NO: 450595 - DNA, 122 bp, Homo sapiens
acttcctctcccactggccgctcacacagaatgcccaccgtgccctgcggtgccctgccacggagccaggctggcctgctctctggccaccgaaggcacttgcttctctttcggaatctgat

SEQ ID NO: 450596 - DNA, 122 bp, Homo sapiens
tgaaaaagaaagtaactctctcgcgtattccacaactagctcttcacctatcaaattacgcgcaatggaaacatcttagtcctcagagcaatcctgggtgcaaggcagaggcggctgttatc

SEQ ID NO: 450597 - DNA, 122 bp, Homo sapiens
aatattaatttgaaagcttattttgggattagaaaaggagagtgaattagatggtatctacgtcgtaaagggtcaggcacgtgagcagtgctcagtacataggacctattattaaaatatga

SEQ ID NO: 450598 - DNA, 122 bp, Homo sapiens
ggtctcccggctccctgctgtctagtcaggagcttctgagagagaggcaaggaccacacacgaaaaacaatccacaaacccgaggcagtgtatcctccaaggcaagtgaggtgaggcccacg

SEQ ID NO: 450599 - DNA, 122 bp, Homo sapiens
ttcgctgcagtcggaagcgggtggctttcggtattgaattattaatttatttatccccctcgcccccacccccacgccgactgccaggcaagaaatcgcggcctcttcgcttcctctccgcc

SEQ ID NO: 450600 - DNA, 122 bp, Homo sapiens
ctcgcactgtgcagctgctccagtgagggcgcagactgtactggcctgtgcggagcaaggcggtgtttctggtgagtctgttgattctgggctggggtgaaagccaggttgcccagggtttg

SEQ ID NO: 450601 - DNA, 122 bp, Homo sapiens
agtattacaatctcactgcctggtttagcatagaccctggggcctggagggaagtcagaccggacatcagtgccccaactgaataatctgtgtcactagggctttgagcccaggatgtgagc

SEQ ID NO: 450602 - DNA, 122 bp, Homo sapiens
tgctgcgcagctaccccaggccggtcccagccgcccggagccccagtgcgcgatggcggccggcaaactgcgcctgcgcactgggcctcaccgcggactacgactcccacaatgccgcgagg

SEQ ID NO: 450603 - DNA, 122 bp, Homo sapiens
ttgtgcaagagcagagtgattatgcgaggcctgagggatgaagtagccatccctggaggacgggggcacccactggctgattaatgtaccatggtgggaggaaggaccatgctgacatgctg

SEQ ID NO: 450604 - DNA, 122 bp, Homo sapiens
tcgtcctcagttctgcggagacagagtccccacagcatttctgctcctccctcaagactgcggcagagcacagcaccagtagaccccacacagtgagtacctgtagggcaagtgcctctttc

SEQ ID NO: 450605 - DNA, 122 bp, Homo sapiens
catcaagctgggtctcaagagcctggtgagcaagggcaccctggtgcagaccaagggcaccggcgcgtcgggttccttcaaactcaacaagaaggcggcctctggggaagccaagcctaagg

SEQ ID NO: 450606 - DNA, 122 bp, Homo sapiens
ctcccaaggatctttagagattaattattaactgcagctaattttcatcattcttgacaccgaagggctcaggaatgtgggcccaaaagggaggggtggattaagccaagtttcttccagaa

SEQ ID NO: 450607 - DNA, 122 bp, Homo sapiens
aacagaactgacaatgaagaaagagttaaacaaataaacatataccagaggaggtgatggcgatcaagaaaatactaggtaagagagagggagggtatgctttctggcaaaacttataaaaa

SEQ ID NO: 450608 - DNA, 122 bp, Homo sapiens
cggctgagtctggctacgcgggcctccgcgggagcgcgaccgggccaatcaagagcttggcgtattttacaaactgagaaagtagctccagcagcacccgagagggtcaggagaaaagcgga

SEQ ID NO: 450609 - DNA, 122 bp, Homo sapiens
gagatccgggagccgccacctgttgcctcacgtgttctcagtccgagagggttcgagacgcggaggaggctgggagaaattcagcctgtagtttcagggaattcattttggccatccccgca

SEQ ID NO: 450610 - DNA, 122 bp, Homo sapiens
ttcatcccatttatcaaatgaaacagaatgtttgacaaaaagagttgtctggtataacaccgcggataagtatgaaaacctgagttcaggcccgtgcagtctgtttccagagctttgactct

SEQ ID NO: 450611 - DNA, 122 bp, Homo sapiens
atacctgtgaatgtgtgagggatggggaggttataggaagggaactctgaccttgggtaacgtgccattttatagcaagcagtaagcaagtcggttatttggccctgagcgagatgtcagct

SEQ ID NO: 450612 - DNA, 122 bp, Homo sapiens
ttgtcaatataggttgatcagctgataaaaaatgttctctcgtgcaggacgttgatagtacggtaggctgtgcacgtgtagggacagagaatataagcaaacactctttacttttccttcaa

SEQ ID NO: 450613 - DNA, 122 bp, Homo sapiens
cccctcctccccgccctgcccggctctgcccgatctggtccggcccggtccagcccggcccggcccagcccagcccactcaggactcacggctccgacagctccggcggctcctcccctgcc

SEQ ID NO: 450614 - DNA, 122 bp, Homo sapiens
ctcgggacctgcagcccgccatgcctgaccctccccccatccgtgggctcccatgcgccccgagcctccccgacgagcgccgacccctgctcaagggcgcccagtcccatcgaccacccaag

SEQ ID NO: 450615 - DNA, 122 bp, Homo sapiens
tgagacacaggcatcaacactctcaaatgattcacatgttcagccaaagttgagaaccatcgagcctgtggaagttctttctcatggctcagaatcttaggtaggtgcttaactcttgtggt

SEQ ID NO: 450616 - DNA, 122 bp, Homo sapiens
catcaacgaattctttctaattataactgaatgatgataaaatcacagcttacactcattcgtggcaaagattttggggcggagaacaaggagggccgggtttagaaaaggcagccaacaaa

SEQ ID NO: 450617 - DNA, 122 bp, Homo sapiens
tggtggcttgacgtggttaatttcaaacaccttagcagggcttaggctgaacgggcccctcgttgccctcctaccccctgtccctgcatacacctcatgctggaaggacctgtgttgcccag

SEQ ID NO: 450618 - DNA, 122 bp, Homo sapiens
gaatcatcgtcttgagctttctcattcgtcatttgtgtgctttgggtgcagactttcccccgctttttgaaccacactgaatagggaaagggagagaagcagccggctgtagtgggtttagc

SEQ ID NO: 450619 - DNA, 122 bp, Homo sapiens
ggcatggtgctgtggtgccctctggagggttagtggaaaagatgtctttctcagacagaacggggaacgaactggaaaagctctgcagagccaaggaggtatgcggccccagatcctgacgt

SEQ ID NO: 450620 - DNA, 122 bp, Homo sapiens
gtagtgaggcccaacctctttaaaacaaacaaacaaacaaacaaaaaaccaaaatgcaaacgtgagtagagaatgaaatacacagtttaaatgccctcactatctttgggttactaatatac

SEQ ID NO: 450621 - DNA, 122 bp, Homo sapiens
gctctccctttgggttagctgggatttcatcaggtctgcatggtgatcttgggctgtctccgcccaatcctgcttcctctcacttttgtctttcacaagtgaacctcttcccttcctaactc

SEQ ID NO: 450622 - DNA, 122 bp, Homo sapiens
cagcacagcaccactggggcctggggcagcaggacctgggacaggggtcccagcagtgagcggggccctacgggaactgctggaggcctgtcgcaatggggacgtgtcccgggtaaagaggc

SEQ ID NO: 450623 - DNA, 122 bp, Homo sapiens
ctcacatggatgtaatctgagggatgaggttgacgcaggctgctaggcgcttctccaccacggccctggagtgaagagacagtcccattcagagtaccccataaccccagtttttgtactgg

SEQ ID NO: 450624 - DNA, 122 bp, Homo sapiens
ttggcccacgcccgggggcggggatttccgcgtgtcctcattggtggaacgggttggagtcgctgtgtcccggccccgcctcggccgtgagacctccagggggcggagcttgccgctgcgct

SEQ ID NO: 450625 - DNA, 122 bp, Homo sapiens
ggagaatactatattcaatttcacacctctgcaacctgctcacattgattggcaacaatgcgggtcatctggagtttgagatgtgtctcctatttgcaaggacacacagcttctgcaaggat

SEQ ID NO: 450626 - DNA, 122 bp, Homo sapiens
accaccccatctctgaccatgaggccaccctgaggtgctgggccctgggcttctaccctgcggagatcacactgacctggcagcaggatggggagggccatacccaggacacggagctcgtg

SEQ ID NO: 450627 - DNA, 122 bp, Homo sapiens
gcagtggtgctcaccttgcatcacaggccttggttccctgacagctggcggaattattcacgtagcctgtcacatcctcccacgggacacagggcacctgccttcttcatactacaaaggac

SEQ ID NO: 450628 - DNA, 122 bp, Homo sapiens
aagcaatttctttcttgggatgcataagccagcttcatttcttccactccctgggcagcacggagtccatgttgttcgccgtgatggcatttgacctctctgtggctatctgcaagccactt

SEQ ID NO: 450629 - DNA, 122 bp, Homo sapiens
aagatactcattttacaggtgaggatatgggtcctggaaggtctgcagggaagcccctgccgctggtcccagggcggtgtccccacctggagggggagctcctccactgaggaaagccaggg

SEQ ID NO: 450630 - DNA, 122 bp, Homo sapiens
tcttctctgtggtctctgggcctgggcatcactgtgggggtctgttttccgctgggtccccgcacagcccgcgtctctgccttgtgctgggcatgtgtttgcagcttggcggctgttggaca

SEQ ID NO: 450631 - DNA, 122 bp, Homo sapiens
ggaggcggtgaccactgctttacagccgcatccgcaccggtgccacgcagaaatactgcgcgatctgggctgctggagctggcagctagcgcctctcgctactatagaaacgcgcacacacc

SEQ ID NO: 450632 - DNA, 122 bp, Homo sapiens
gcagggaactcgcgcggccgccgccgccgccgaagcgccgaattcaagcgtcctttcctacggaaccctcgtaggcaaatcagtcaaagcccgtcccggttctggtgtctccccgggttact

SEQ ID NO: 450633 - DNA, 122 bp, Homo sapiens
ttatgaaaaaggcaaggatcttggtgctgactgtaaacaaacagccttttcatacctcatcgatgtttttcctccccaactttgcagaacaaaagaagtcataaagggccttgaactaactt

SEQ ID NO: 450634 - DNA, 122 bp, Homo sapiens
gtgttgaacacgcaggtgagcgaagccaccatcccctacagacctgagctcctgcccctgcgcaagctacacagtcagcttaaccacaagcaagcacacacacagcggacgggacacacacg

SEQ ID NO: 450635 - DNA, 122 bp, Homo sapiens
ggtcggggagaaacagccgggggcttctcctttcactcaagcccttaggacctctgtggccgaggcagtcagcccagccccctggttctcagcaacccccagatgcccctcacccctctggt

SEQ ID NO: 450636 - DNA, 122 bp, Homo sapiens
ggttgtttttctcgttttgtctgaccttgaattccacaggcagggttcctctttcccggccggcattcctgcccaccagtcctggcagagtgacttattgtcagccaagtggggcagagttt

SEQ ID NO: 450637 - DNA, 122 bp, Homo sapiens
cttgagtctcggctggagaaggcagagcacgggcatgcagacctcaaagcctcaaacctgcgtgtgagaggagaagttggcgagctccagcgtatggtccacggttggtattctaggtgcga

SEQ ID NO: 450638 - DNA, 122 bp, Homo sapiens
gtttggagaagatgcctaaattgagggcggagtcgaaagatgtttaatcccacaaggccacgcggcggggcctcgtccttctcttaccgccatcttggctcctgtggaggtgagtgaagggt

SEQ ID NO: 450639 - DNA, 122 bp, Homo sapiens
ctgtccctgtccacctgtctgtggccaagagtcccagccaagatcctaggatccaaggatcgtaaatcaggtcctgatcctggccttgcccagtgaccccatcggctttgggagtcccagct

SEQ ID NO: 450640 - DNA, 122 bp, Homo sapiens
ggagagcaaaggctccagactactgcgaagttcatctcctcttactatatccataaataccgtgtagctttaaaatgcaccccagggccgggtgccgtggctcacgcctgtaatcccaacac

SEQ ID NO: 450641 - DNA, 122 bp, Homo sapiens
caacgcgtttgtggcagactccgcagtttgcatttgaggatagcgaggggggattgcttacggggaaatgcccgatgtcctaaaagatctgcccttaggatcctgagattgagatgtttgat

SEQ ID NO: 450642 - DNA, 122 bp, Homo sapiens
ggagggcccaggtggacatccttttgtcagtgaagatggcctctcctcaggttcccctcacgacaaaagcgtttgtgatcagacagcccactagggtgaatggctcgtctcttaccttccca

SEQ ID NO: 450643 - DNA, 122 bp, Homo sapiens
gggacaaaacattcagcgtggccggctctccgcatcttacagtggtagggatgaaatgcacgcgccctcatttgaaatgagaatcgcagtgcctcagttaaacagcggcctctccggatgcc

SEQ ID NO: 450644 - DNA, 122 bp, Homo sapiens
agatctacaagcccactgcccggtactgcatccgctccatgctgtccctggagagcaccacgctggcggcacagcactgctgctacggcgacaacatgcagctcatcaccaggggcaagggg

SEQ ID NO: 450645 - DNA, 122 bp, Homo sapiens
tcctcgagggttttacagcccgggaagctcaggcgccagagggttagaccagctcaaggtcgcgagcgcgagcgcggccggaggagaacccaggggtccagccgcccagcgggggcttctcg

SEQ ID NO: 450646 - DNA, 122 bp, Homo sapiens
ctacagggtgggtgaggccggacagcaacatgtcacctgctcgtctaagcttcagtctcccgcctctcaacacaacagtggtgataacacccctcaccggagccgttgggggaggcaagagt

SEQ ID NO: 450647 - DNA, 122 bp, Homo sapiens
ctcctgaccagcccaggaccagctttcttgtcaccttgaggtcccctcgccccgtcacaccgttatgcattactctgtgtctactattatgtgtgcataatttataccgtaaatgtttactc

SEQ ID NO: 450648 - DNA, 122 bp, Homo sapiens
gggccatgactcataaggccctgggaggtcactttaaggagggctgtccaactgcaaggacgctgtaagcaggaagtgaaaccacagagcttcaaaaaaagagcgggacagggacaagcgta

SEQ ID NO: 450649 - DNA, 122 bp, Homo sapiens
tgaaaaggcgagagctgagatgccgctccgttctgccttaccacgccgccccccagcgtccgccaattaggagagcccggagccggatccactctcagcctcaggaagcagcagcctccgct

SEQ ID NO: 450650 - DNA, 122 bp, Homo sapiens
tcgccgcgtccctgtgggatgctgtgtcggcccggctcggggtctctgggttctggggaccggagccccggtggttggacagggcaggtgcaggccccggggcttctcccacagacagcgtg

SEQ ID NO: 450651 - DNA, 122 bp, Homo sapiens
ttaccagatttgtatgcgtcccagttagccctaatataaaactttgacaagtctcaaaaacgtaataaggagtgggtagtggagaatcagagaagttagacgatcaggccaaacagcaggtg

SEQ ID NO: 450652 - DNA, 122 bp, Homo sapiens
tgggagctgcggggcagccgggctgagcgctggctcggggacttgaggggcaacggccggcgcgcctcagtctacacagccgatgctcagcaccgcatctcactcggagtaaacgcaagtcc

SEQ ID NO: 450653 - DNA, 122 bp, Homo sapiens
atgcaaccggatcctagacctccagcctccagaactgcgaggtgtatgttgctgtggtgacggtctccagtctctggtactttgcaaactcaccgtgtctaggcagatctcgcatgtgctag

SEQ ID NO: 450654 - DNA, 122 bp, Homo sapiens
taagcaaaataataaacatcaatcaatacatgcaagatatacattagtttgatcaggaaacgagggacaactcaaagagtagggtaaggtggggttaggttccaggtcacagaaagtttttc

SEQ ID NO: 450655 - DNA, 122 bp, Homo sapiens
gcgcaggggctgatgagaaggcactttcgtccgtgggagacccaggccccgcttctcttccgcacggtttttttttttttctgccgcaggtgcctcacctctcttccctcaaacctcacctt

SEQ ID NO: 450656 - DNA, 122 bp, Homo sapiens
cccaccccccattcagaccctcaggggtaaaaactatcacctgggaacacggaccaagctcggggccaggcagacatgcttggaggctgttgtggtaaggaagggaaggcaggaaatcggtc

SEQ ID NO: 450657 - DNA, 122 bp, Homo sapiens
gcaatgcagaagtcaggcaaaaggcaggcattgctctttttggtgccactctgcctcctgcggcctcattctctagcaagaacctgctgctgtccataggccgaggtcccccaggacaccag

SEQ ID NO: 450658 - DNA, 122 bp, Homo sapiens
gaaataccccatggttccgtctactaggcctggaagctcggcctcaccctcgtgaaatcccgggagccggtgtctcactgtcaccagaccgacccagccgcggctcacacatccgttctcag

SEQ ID NO: 450659 - DNA, 122 bp, Homo sapiens
tccgctgttgggccctcgctgaaggggccgaggctgagccccaaggtgggcctgtgggggcggggcgggggagcccctcagcagctggaccgcaggaggccgaccagggtctggaactcctc

SEQ ID NO: 450660 - DNA, 122 bp, Homo sapiens
ccactggtgtaatacagaaacatctataagggcgtatgtgtgcgtgtatcaccctagccacgtacatagtccagcagccagctctattgagagccaatcggccacttcacttctctccctag

SEQ ID NO: 450661 - DNA, 122 bp, Homo sapiens
accaagctgagtcaccaattctttgttcataaagaaaaatttgagtctctctttgcaggtcgagtgctgcaattaaaaagatgcatgtaaagccgggcactgccgagctgttcactaaacct

SEQ ID NO: 450662 - DNA, 122 bp, Homo sapiens
cggcgggccggccagggcggtgctcctgggcctgtcgctggttggcctcttactgtacctcgtgccggctgcggctgcactggcctggctgaccgtgggggctaccgcggcctggtggggac

SEQ ID NO: 450663 - DNA, 122 bp, Homo sapiens
tgagcgcccgcccgagggggccgagtgcggctgtgccggtggctggagtgccgaggggtgcggggtgccgggggcggccgcgtctacgctgtccggagggtgaacggccgcgggcttgtcgg

SEQ ID NO: 450664 - DNA, 122 bp, Homo sapiens
cgagccggcgcccgcgcgtgcgcagcgagacagtgaccggcgcttggaggccacccgccacgcccgcgcccagagcccctcatccggcaacgagtccgagcccagcccaggcaaggagaacg

SEQ ID NO: 450665 - DNA, 122 bp, Homo sapiens
gtgcttgtttcttcttttccagattgccttatccccttcctacttgccagtctccgtttccgtggtgtccctcaccatctccctgaagtcctttttccacattgctcctagattggctgttt

SEQ ID NO: 450666 - DNA, 122 bp, Homo sapiens
actcactgccttggacggctcggcctagtcttcgtctttatcctgttttctacagttctccgcatggagttgacagtaagcaagcctccaggtcgccggaatcaaagaccgaaacccttcat

SEQ ID NO: 450667 - DNA, 122 bp, Homo sapiens
ggtggaacgggcggggcggctgtccttgtgctcgggcagcgagggcgccggcgagaagcgcggctgcagctgagcgctccgcatccctcctgccgttgctcctgcttccgctaccagggaca

SEQ ID NO: 450668 - DNA, 122 bp, Homo sapiens
cgggcccgtaggtgtggagcggggcgcggagggatccgtgggagccgcagtgcggcggcgcgcgggccgggtggggcggggccgagcgaggcggggcgcgcgcggcggccgttgagggaccg

SEQ ID NO: 450669 - DNA, 122 bp, Homo sapiens
tggagaaggcggaccgctgggaggagccgagtgcgggtaagcagctgccggcaaggttctcgccttggccggctctgaggagccatgcagggctctggagcggccttggaggtccggacgga

SEQ ID NO: 450670 - DNA, 122 bp, Homo sapiens
ggctggtccatgtctgggtgggagccaggaagggcttgttttgggaaaaccgctcactcccgtaagcccccagtggagatcccgccccttgccttgaagtgaaaaagagttcaaacagcatc

SEQ ID NO: 450671 - DNA, 122 bp, Homo sapiens
gaaacaggccgggaagcagtgacacctggggcagtcagtcatccaggagccgccgccacccgccccacccccagtctccgcgggaggtgtttgtcttcgcctatgctcccggctctttctct

SEQ ID NO: 450672 - DNA, 122 bp, Homo sapiens
cctgcccctctgctccccagcagccacccgggcgttcgcgctcgggaaagcggtctctggcgcaccctctgccagttctcccacgcccctcggctgccccgcggcgctgccgccccgcccgg

SEQ ID NO: 450673 - DNA, 122 bp, Homo sapiens
tgagatgagcgttttcctccgctttgtgttgcctggaggcatcactctgctattcttgggcgcagtgccgagatcctatggtaatgtgagtgagctctcgctttgcagttgctcgtaaaaag

SEQ ID NO: 450674 - DNA, 122 bp, Homo sapiens
gcctggcggcctgctcactggtggagtcccagtccaaggccaaccaagaggagttcgaggcgggctctgagtacagcgatcggctgcccctgggcgccgaggcggtcaacatcgcccaggag

SEQ ID NO: 450675 - DNA, 122 bp, Homo sapiens
gggtctagctccgtggcacatagtggagggcagtggcatgatcacagttcactgaaacctcgaactcctgggctgaagcgatgcctcagagtagcttggactacaggtgcctgctaatacgc

SEQ ID NO: 450676 - DNA, 122 bp, Homo sapiens
tgaagtcgctcggtagccggggaagggaaggaagagaggcaggctctttcctagaggtgccgtgatcgagggtctggcactccaagccaactcctgagaacgggaaatgggcgggagtcggt

SEQ ID NO: 450677 - DNA, 122 bp, Homo sapiens
cataactggtctattctgttctctttttaaaacagagccaagattttcttcttcactcctcgcttggtggctcccagccagaggccggcagtggtgggaggctcgctctgggtgcacagacg

SEQ ID NO: 450678 - DNA, 122 bp, Homo sapiens
ggcaaaggctgccggtgctggacgcggagttcagggctgcactgacttaggaagggagcccgcagagtgcagcggccaccaggggacgctcccagcgtccagcaccccgcccccagccagcc

SEQ ID NO: 450679 - DNA, 122 bp, Homo sapiens
acacgctgtccccctcccagtgggcacactggctgagaagtgtccttccaggtggccactcgccctgagtccacacaagttcctggtgtcagggcccttctctctcaggcatgcagtggtcc

SEQ ID NO: 450680 - DNA, 122 bp, Homo sapiens
cactttctagacatctcctgccccctcaattctaaggcactcccttgcctttgggtgcaacgagcttcctggcaggagaggataattgaaggaacaccaagattaggaaatatgggttctgt

SEQ ID NO: 450681 - DNA, 122 bp, Homo sapiens
ctctgtcaaccaaaagagaaaataatgtggggttttggattcatgctgccctcaatgaggcgaattctccaaggctctatggagaaacagccctagaaatggttggcttggatttggttctc

SEQ ID NO: 450682 - DNA, 122 bp, Homo sapiens
ggagacagaaagatggcctgagtcaggagcaggggcagagctcaggttgtcgtggggtcccgctgcccacgtcagactggaggtgagggatgggcggggcctgacagcaggcctggaaggaa

SEQ ID NO: 450683 - DNA, 122 bp, Homo sapiens
acttcctgaggcctggaaggtgtttttggcttgctccataaggcaaggaggtccagcccacgcaagcccccgccctgttcgaggaaggaaaggcccagaacttgcacacagcaggcaggccc

SEQ ID NO: 450684 - DNA, 122 bp, Homo sapiens
acatccacctctgctaccaatttaggcaatcgagtctctgcactagagaaaatgacatcccggacagctgatttcagacagactttgttcctgtgtcaggtaccacacctttccagtttggg

SEQ ID NO: 450685 - DNA, 122 bp, Homo sapiens
ctagctaaaccagtacgctctggggcccctagagaaactctgtgggtctcactcatgagccgacgcacttttccctcctggacaaaatctgtcacctcttccaggaagttttgcttgattaa

SEQ ID NO: 450686 - DNA, 122 bp, Homo sapiens
cgaatcgtgggcaacggagggagacggcaagtgctgagttttccggaggcagccatgatacgcggcaagcaccatccaaccctacctcacccaggaccttcaccgccgctccgaaagaaacg

SEQ ID NO: 450687 - DNA, 122 bp, Homo sapiens
gcctttcccggggggtcgggggaagcggggtttggaggcgctgctgagctgtgacgcaggcggccttggggcaggtggaaccacccggaaccccgcagagccaggccaacccccaagcccca

SEQ ID NO: 450688 - DNA, 122 bp, Homo sapiens
ggaagaccacaaacagaaaggagacatgatgggaagttacttatggtaataccactccagcgggaaggagacttaatgtttggtcatccatggtggaagcctgcatgtctgcataatactaa

SEQ ID NO: 450689 - DNA, 122 bp, Homo sapiens
aggggaggtaggggaggaggaaaaaaggaccatgtgtgatgctgttagacaagacactgacgctgattatggagggtctcctgcaggcccttgtgggctccttggcaaggccccaggctggg

SEQ ID NO: 450690 - DNA, 122 bp, Homo sapiens
cccaagatactctcttcctgcgctgatttatcaagagtgcccctcccccacagctagagccgccccagggccatttctgcttcattacaattgggcacacgtggagaaaggatactactggg

SEQ ID NO: 450691 - DNA, 122 bp, Homo sapiens
cctgtgggagcggctgccgctgtggatgatcgagaggatctggtaccaggtaaagctggccgagcaggctgagcaatacaatgtgctctggaactgaactggcagtatcttccaagaaatgg

SEQ ID NO: 450692 - DNA, 122 bp, Homo sapiens
ccgggaagccttggggcgagtgggcggggctcgggctccagccactcagactaccaggggcgggggcaggaggccgaccccagccacccttaaagctgccgccccctctgagccccagtcct

SEQ ID NO: 450693 - DNA, 122 bp, Homo sapiens
ttgaatgtcattggaacttcacagaggagccaacggaagagcgtgggagaggggatgcaccgtgtctgggtctcagcaggctcatgtgttggccctggctccagcaccagccccttcagcag

SEQ ID NO: 450694 - DNA, 122 bp, Homo sapiens
tgaaaagatctcatgatctgattatggggcacattagctagccccttccttctgcttttacgttattttcactctacattaaaaaaaaaaaagatatataacccaaatgtttactgggtacc

SEQ ID NO: 450695 - DNA, 122 bp, Homo sapiens
ataggtcatgtgactcactgttcagcaagtcctttaaaatcaacagggcacacattaattcgtttatgctaggtgcgttagtgtggatgtgttggcagtcacccttcagtggaacgctatct

SEQ ID NO: 450696 - DNA, 122 bp, Homo sapiens
gtcccgcagctgtatgaggatgcggtgtacaggtgctgcctacgtgaccgtgccttgagtcgccccactcagcagaaacctcactcagcagaaacttgtccaccagtgattgattatctcga

SEQ ID NO: 450697 - DNA, 122 bp, Homo sapiens
atgagctgtgtttcttagggctttggccacagttaatataggcatttcggaaaggcggagcgagagcctccagggcgggcggcgccaagacgcggattccggaacaccgcgaacaccctgga

SEQ ID NO: 450698 - DNA, 122 bp, Homo sapiens
gatggtggtcacgtaagattatagaggggtctttcctttctgcgccccgggagacctcggcgttgccacgggctgcgcccccggtgttgctggaactgcaagaacgaatttgcaccccaagc

SEQ ID NO: 450699 - DNA, 122 bp, Homo sapiens
gtgagacgagtcacagatctgaggacctccagcagagcagggaggtgcccaggtggggggcgggcgggtggtctttcttttggggcagcatcccaaaagaaaggaaaaacagcagggggcgt

SEQ ID NO: 450700 - DNA, 122 bp, Homo sapiens
acgtgtaccttctgaatctaaaataaaatagaaaaagaaaaaagccaaagaaaaacatcccggtaatccagggagcagcggctactgcctccactgctcactgcagcccgcaggttccacgc

SEQ ID NO: 450701 - DNA, 122 bp, Homo sapiens
gatttgccctggtgtccggtcggtgattgccgccttcctttgaccagcacctttacgtgacggggctgcaggagagaagacagacaaaatcactaccctcgaggatctattagtaataaagc

SEQ ID NO: 450702 - DNA, 122 bp, Homo sapiens
ctgccgcccgcacccccgcccccgcggggttaagatcacacacgcgcccacgccggcccgcggggcgtgcactttcgctgggttccgtccgccgcagcccaaacagttaactgaacggggag

SEQ ID NO: 450703 - DNA, 122 bp, Homo sapiens
tggctgcctaacaaaagggcggtccttaaaaggccttatggggctgttaaaagcttccggcgatggtttaattgggggcgattaaagtgtcctccccaggaaggcctgcccttcaaaggcca

SEQ ID NO: 450704 - DNA, 122 bp, Homo sapiens
aggttccacaaagctctgattttccaagttctctccatacttttagccaaggtaaaatgtcggaagtcgagtggagcgggtacggagattcctccaggactctgcctgcgtggctccaccct

SEQ ID NO: 450705 - DNA, 122 bp, Homo sapiens
aaagatcacgaggggccaatgtttgccattggaggggctgttgcttcctctccgcctccacgcttccctgcgctgcacctctaggtgaaacttcagcgtgccgcgcggtggtgcgaaggtga

SEQ ID NO: 450706 - DNA, 122 bp, Homo sapiens
tcagctggaggaagcggagtaggaagcggccgcgatgtccttttgtgtcctacaagcagccggcggcgccgccgagtgaggggacgcggcgcggtggggcggcgcggcccgaggaggcggcg

SEQ ID NO: 450707 - DNA, 122 bp, Homo sapiens
ggaagtgagtgtcagaggggaatgacctgtctgctggtttctccctcgctgtgaaactgccggtagatctgttgaaggagaaggctgacctggtaaagggaggaactggtgtcctcagaggt

SEQ ID NO: 450708 - DNA, 122 bp, Homo sapiens
cgaaggcggagcagtgttctcctcagcacagacccgggcggacgggtgggccgggggcaccgcaagggcggagctgcgttctgctcagcacagacccgggggacacagcgaaggcagagcag

SEQ ID NO: 450709 - DNA, 122 bp, Homo sapiens
ggccgggacagcgagtggccccagagtgaggcacaatccagcctttgttccaaggcagcccggcctgcaggccaagaggaaacgagaggcgcgccaggcagcacccccgcccgccgggcagc

SEQ ID NO: 450710 - DNA, 122 bp, Homo sapiens
gaaggcaccggcggccacctcgcggatctggcagtgctgcaggtgcaatgacacgaggttcggcatggcccggaacgaattggcagccagcaccgggaagttgttgcgctgtaggttgagca

SEQ ID NO: 450711 - DNA, 122 bp, Homo sapiens
ccccaactcctgggcgcggcggacgccagccggccgctcctcgggggttggctgcggggccgctcagccgcgctctgattggcaagcgggctgcacgcccctggtaaatagaggtctggccg

SEQ ID NO: 450712 - DNA, 122 bp, Homo sapiens
tgtcagggacgcgggagacgcagattctgaaggatctcagggccctggaaaagagcatgtcgtttcagcaagtctcgacgcaccactgctgcgattgagcagtgatcagaattgcattttag

SEQ ID NO: 450713 - DNA, 122 bp, Homo sapiens
ggcaggctgtcactagcccaggcgctcagcagccccactcctggccatccgcatccccaacggtggcccccagacccaagccacagagcctcccctagagcggaagcagaaggggccccacc

SEQ ID NO: 450714 - DNA, 122 bp, Homo sapiens
cacggtgggtgcttcccaggggccatcttaagcgaggtcagccaaagtggtctgcagtcacgttccccgtggtggggacacgtcagccttttctccagatggcggcgctctccggaggagcc

SEQ ID NO: 450715 - DNA, 122 bp, Homo sapiens
gtcatcactgtctgcttcaccaccttgcgggtgatgaaggcttccagcacctgtgccacccgcatgccccgctgggcgtcctgcctacggaacacctccacctgcgcggccacgccgctgta

SEQ ID NO: 450716 - DNA, 122 bp, Homo sapiens
cagtgggaggagaccgtctgggcagagttgtgatgaactggggaccgagcagccccagctcgcctcggaggttcccgagccgggcgggagatgcggggagagggagggggcggggagggagg

SEQ ID NO: 450717 - DNA, 122 bp, Homo sapiens
aagtaggcccatccctcttctcttagtccagagctcttacttatttctacgcattatggccgtatgaaggctgtttgtaaacctgcaaaatacaataccaggtatcctgcaggttccacatg

SEQ ID NO: 450718 - DNA, 122 bp, Homo sapiens
gccgccgccaccgccttagcggcttgttttgtttcgacttctagctaaggccgagggaggcggagcgccaagctggtgacgcacttccggcgggaatgggctcggagcgacccgcagctccg

SEQ ID NO: 450719 - DNA, 122 bp, Homo sapiens
aggaatgtcgctgcccttctcgagccatatttgggtgttgggcactagagccccctccctcggccggttcgcggcctgggcccccgcccgggtcccctgcgttgaccaaagaaggagcgggt

SEQ ID NO: 450720 - DNA, 122 bp, Homo sapiens
caaagcctggtcataagtgctctgaattatttccagcaagtaatgccgaactgctccacccgccaagctgaatgctcatacacatggtgtgaatgcgttacatgaagaacagagtgagtgag

SEQ ID NO: 450721 - DNA, 122 bp, Homo sapiens
ctgggatcgctcctgaagttcctcgctgccaacgccacccaagggtggcgtggtggccagcgccgctcggaagacgggcaaggagaaacccccgaagcggaacgttgagaacggaggcccag

SEQ ID NO: 450722 - DNA, 122 bp, Homo sapiens
ggcggccgcagttcgccagaacagtgggccaggcagggaccacaggcccccaaagataagcgggcggaggtctccagaaggagctgtgagtgtgtgcaagccccgccacagtcccgggtcgc

SEQ ID NO: 450723 - DNA, 122 bp, Homo sapiens
gcctcctgacatacatcaccggccattcacagctgcgtcgggtagggtgcctctcgccagcgtcactcattaaggtatcatccaacccagtgtggagggggcttgcaagagaaagaggggtc

SEQ ID NO: 450724 - DNA, 122 bp, Homo sapiens
gcaatttttaagctccactttcaaatagagacggggattgggatgggatttcaatgcaggcgaataacacaagacagatggaggaatatgtttatgatcagcaaagagatcactcatcttga

SEQ ID NO: 450725 - DNA, 122 bp, Homo sapiens
ccaggacagcctcgggcacagtggagcggccgcgcggggtggcctcggccaggccaaatgcgccagcggccctggctcagttaccctgcactcgtgccagcggccgccagctgcggtctagg

SEQ ID NO: 450726 - DNA, 122 bp, Homo sapiens
ctgtagtggttggagttgagctcctttttactgattttggcagcggacgcccatgtggcacggttgggagacgggggcgggggaagggaaggctaagggaacaggcaggcagcttccccctc

SEQ ID NO: 450727 - DNA, 122 bp, Homo sapiens
aactggaggttcatcaccacatctacagttgcctaggaatgaagggaccggtgagacagacgggtgcgtgcgcccatcacgtgcactcagcacacgtcaagtgagcagccgtgatccgggct

SEQ ID NO: 450728 - DNA, 122 bp, Homo sapiens
acacagctgggatatgggcgcgggagtgggagcctgaggtcccagctattcaggaagcagcggcgggaggatcgccgagcctgggagttcaggccagcctgggcgacaaagtaacaccccct

SEQ ID NO: 450729 - DNA, 122 bp, Homo sapiens
tttagggatggacacgaaatggttgaaaaccattcgtgataatataaacgggcctgtaaacgttagctgtgtgggaggttacggaccccggcaggagcgcccaccgaaatcctgtccccagc

SEQ ID NO: 450730 - DNA, 122 bp, Homo sapiens
atgcagaggaaaagggctccagccccgaaggtggaggaagttcctttcccttgctcttcacgcctgtccgccgggcagcaaacccgatttctgttttttgaaccgaccgccgggcagcggcg

SEQ ID NO: 450731 - DNA, 122 bp, Homo sapiens
tgaccgaggcgcctcgctggggcggggaccttgccttgcccggggtaagtgcacacaggccggccggcgcgggacgcaggccgggtctcttcctcctccttccttctccgtggcctggcggg

SEQ ID NO: 450732 - DNA, 122 bp, Homo sapiens
ctccgcctgccttttaagttagtgtttcccaggacagaggtgactcagttgtatccagaccgctctgtgactgaacacccactttcttttccttttccaaaaaatatatgtaacatacatgt

SEQ ID NO: 450733 - DNA, 122 bp, Homo sapiens
ctcccatctccctgttttctggggatttaaatcagctttgacttgggtctgaaagtaacccgtgacagcagtaagcctctcgatctgttgtttgcagtgtttcagctaaaatattataaaca

SEQ ID NO: 450734 - DNA, 122 bp, Homo sapiens
aaacttccatgtttacttactacaacattgcagtccttcctactacagatccagctacctcgtctgttaactaccttcatgtttgaaaattggcttagatccaccctcagtatcctggttca

SEQ ID NO: 450735 - DNA, 122 bp, Homo sapiens
aggttgcagtgagccaagattgcaccgcttcacaccagcctgggtgacagagcaaggatccgcctcaaaaaaaaaaaaaaatagcaactctactaagaaaataaaatcaaagataccaatgc

SEQ ID NO: 450736 - DNA, 122 bp, Homo sapiens
gaagtggatgggggagcctggccagggctgactgagcgcccctggaatccgtgctccgggcgttggctcactcccgccccgacacctgggcccgccctcccgctgcgcagccacgcgccggg

SEQ ID NO: 450737 - DNA, 122 bp, Homo sapiens
aaaacagttgtcacaactgacgtcaccaggggcggagcctttggacggaagtgacgcttgcgcggccgcggcggagtcgtcatagaggcggggctgcggcggctgcggtgttcctccgactt

SEQ ID NO: 450738 - DNA, 122 bp, Homo sapiens
gccctgccatcccgcctcgggggtgggaaagtgggaccgcacctgggccaggtacaggcgcgggtccctagagccaggccgccctgagaaaccgatcctggaactcgtgggccttcttgggc

SEQ ID NO: 450739 - DNA, 122 bp, Homo sapiens
tgagcagaggctgcaggcccaccccgcaacccgagcagccggggcaccgcagggaaacagcggcctagcgaagccacccgagctccctccgcgcccccgggccaaaaggccgcaaaggaact

SEQ ID NO: 450740 - DNA, 122 bp, Homo sapiens
ggcatcttccctgcttccctgcaaaaggaaacaacacaaggaaagagctctccatatccacgtgtccaaacacaacagcttatttcagtgtattgtgaagtcattgtatttcactttgtgct

SEQ ID NO: 450741 - DNA, 122 bp, Homo sapiens
ggtggcggtgagagtggagctgcaggaggcactcagagcgcggaggcctcgggcgcgggccggacttgtctcccacctactcaggccttggggtgctggagctgcgaaggaaggggctcatc

SEQ ID NO: 450742 - DNA, 122 bp, Homo sapiens
gacactacatggttgcagctgccacatgaagaacccaagctcctgtcaaagttgtgaatgcgactttggatgagattaagaaggcccagtggacggttggtcttgaagagtggcagtgtgtg

SEQ ID NO: 450743 - DNA, 122 bp, Homo sapiens
gtgctcattcagtgctgatgaacttcagttcaaaagcatcaggtgcaaagagagggaagacgtgtgctcctgatttatttttaatagcccacatttgacatggaaaacaaaaagtttctctg

SEQ ID NO: 450744 - DNA, 122 bp, Homo sapiens
caaaaatacaagctttgttaacatcttgccttgaaaagttaagattagacattccgtgcacgtgtggggactatagggcactatggaaattttttcttttttttctcctcttctctaaagca

SEQ ID NO: 450745 - DNA, 122 bp, Homo sapiens
tgtgctggctgtggctgtatgtgcacacttctacatgacttgcagggtgcccaaacggcccggaggaggccgggaccccagcccccaggccagggctcccgtgagtagggagacgcatcact

SEQ ID NO: 450746 - DNA, 122 bp, Homo sapiens
gcagcgggcccggcggcagccaggtggcagaaaggagcacgcagcatccaggtggggggacgactccagcagggtttccatggagattcctctgggtctagcctaaaaacagcagatcagct

SEQ ID NO: 450747 - DNA, 122 bp, Homo sapiens
ggagaggagccccaggtgccatccgaggtccttctagctggccttaccctgggggccgggcgggggcagcaggcgtctagcagggaggcccagcggggagggagctgcaggggggccgcgag

SEQ ID NO: 450748 - DNA, 122 bp, Homo sapiens
ttgacgccagaacatcctagggatcaggggcctctcccatgccctggaaccatcctctcacggtgctgctcttcactggtgccaataacagagctcccgcaggcaggcctggatcagtgggg

SEQ ID NO: 450749 - DNA, 122 bp, Homo sapiens
aatgcagactccaggcacactgtgctagctgtcgggtctcagagccacactcgaggtccccgcacacagcgctccctctgcctaaggtctgctcataaatatttaagaaacatttatttgat

SEQ ID NO: 450750 - DNA, 122 bp, Homo sapiens
gcccacacccttactgcgcccttggccctgggtcccttgggattgcaagcgtgggagcctcggccccgcgcagctccctccggcgtcccgcgccctccttccttcctcgccaggacggacgc

SEQ ID NO: 450751 - DNA, 122 bp, Homo sapiens
aaattggcaggtagtgaacattcactagcattctctgacgggaagtggccgagagggctccgtaccctgcctcactgttcctcagctactccgcctccccaccccccgagcctgggaaacga

SEQ ID NO: 450752 - DNA, 122 bp, Homo sapiens
atgctgttccagaccctgtctcagcctgggactgcggcaactcctgctctgtagcagggacggtttctgtggcttcgcccggcattttgtgcagggaacgcggaagcaagatggcggcagaa

SEQ ID NO: 450753 - DNA, 122 bp, Homo sapiens
cccaaggccgccccttcctctctggctgcacgcctgattggacagttctcacgctagcgccgctgactggatggggctccaggccccaccccctcaggtcttgagtgacaggaggtgcgatc

SEQ ID NO: 450754 - DNA, 122 bp, Homo sapiens
ccggtccccgcccggcgtgctgacgtcacggcgctgccccagggtgtgctgggcaggtcgcggggagcgctgggaaatggagtccattagcagaagtggcccttggccacttccaggagtcg

SEQ ID NO: 450755 - DNA, 122 bp, Homo sapiens
ccgcccgcctccccattcactgggaactaacacccggcgccgctcagacatctctattcccgcctctccgacccggtctcacttcgctcctgggcagctgcgcggagaactggggtaggtgt

SEQ ID NO: 450756 - DNA, 122 bp, Homo sapiens
catacagtgcttttgcttttgaatgccagcgttggcgtttcttgggtgctattttcaaggcggatttctaggttggatgttaaagtcatcgtttctcttctccagttgacttcaatgacctg

SEQ ID NO: 450757 - DNA, 122 bp, Homo sapiens
cggcgagcggggcgcagtaggaggctcttagagacctcggaggaaaccagcccagcgctacgggactggcaagaatgcgaagaggaaccgagagtgaacggagtgcgaggcgccgggtcgga

SEQ ID NO: 450758 - DNA, 122 bp, Homo sapiens
tgggggtgaaggctagggtcgaggtctgggtcaggcgctcgtgcaccgctcgtgggaggtcgaggctgatgtccgctgctccccatcagcgttagtgcccagatcaccccgtgctccgctcc

SEQ ID NO: 450759 - DNA, 122 bp, Homo sapiens
agacggctcccggcctcctctgagtcagtcatgtccctgcaggactggaactaggacggccggtcacagagtcagtggtcctgtcgaggctcctgctgtggtgttggggtgggtctccctcc

SEQ ID NO: 450760 - DNA, 122 bp, Homo sapiens
aacttgtggacacacccattaagcggtcaggcgtcaggtttcctcccgagaggtgggaggcgccctggccttgattcatcgtgaagctaggcaggagatttcccagccacggagggtggaaa

SEQ ID NO: 450761 - DNA, 122 bp, Homo sapiens
tcccgaccccgctagctgggcaaggccgagtcccaggtgccagctgtgggcccgggaactcgacagccgacttggcggcagtctcaagggaggcggcggcaggcgcctggcggaggcggccg

SEQ ID NO: 450762 - DNA, 122 bp, Homo sapiens
cacagtgcagcggcaggctgaagggctcctcgaacgccgaggccgaggaggcgccgagagcgagggctgctagcgagttgtcacctctcacttccatgtgtgataaactgctttcctcttgc

SEQ ID NO: 450763 - DNA, 122 bp, Homo sapiens
ctcacgcacctgacttcctaaccttaagctggtgagacacacagctcctgaaagcttaaccggcgccgtcctgctcacgtaaaacagccccgacatccaattccgatggttgcagctgcgtg

SEQ ID NO: 450764 - DNA, 122 bp, Homo sapiens
accccagcaaattacacaaattacctcagacggcctcctgacaagtgtcatccccagaggcgtccacagaaatgtcatttgccgaactcatattaaacatcctccaagacagatttaaaata

SEQ ID NO: 450765 - DNA, 122 bp, Homo sapiens
ctctgaaggtgacgatgcatgtgggctagctctccagaaatcaggccgacttgctataaacgccccattccgtccagctcaatgaatggccttccttcttttctctccccattcccttcctt

SEQ ID NO: 450766 - DNA, 122 bp, Homo sapiens
tttaattcccgctggcgccgccgccgaccccgggctgcctcttcctcttcatctcgctcccggagccctgagccgcccagaccacctgacacaaactccacttccgtctccagctcgctctc

SEQ ID NO: 450767 - DNA, 122 bp, Homo sapiens
ccccagatgccctggcatgttggctgtagttatccccggataatgccagatgcgctcctgcgatcgcacagaatgttccttcacaacagcacgaatttgtttatcgcctttacccactgcct

SEQ ID NO: 450768 - DNA, 122 bp, Homo sapiens
tctgtgtgccacctttcaaggaacagtcagactattttccacaccgggttctgatttctacgcatccccacagcctgctctgggtgtgcctgcgattttgatccagccattctagcggatct

SEQ ID NO: 450769 - DNA, 122 bp, Homo sapiens
gagaggggcgtggccacagtcaaagatggagaatccatggtgccactttcccggtgatcccggtgggggaaggggttgccgcccggcagagattcagtcccgaatcccgacagcgaagagac

SEQ ID NO: 450770 - DNA, 122 bp, Homo sapiens
cacagtcaatgagaagtataaatcaaggacatagcagtaagctgtgatacccaagcttcacggataaattctcctaaagaataatgcactaaaaacaaaactacatgacaaaaaaaagcact

SEQ ID NO: 450771 - DNA, 122 bp, Homo sapiens
gcactctgtcttcaattacatgttgatttgctaggtgtctcagtgacaaggtaattaagacgaaggaaacaattctaggaggcacaacgtggggtggacagtcagctgtcggtggcttctgc

SEQ ID NO: 450772 - DNA, 122 bp, Homo sapiens
cgcagtcccagcgaaaaggctgcaggagcaatgacaacaggggcggaagccccctccccacgcagcccgaggggccgcggcggccacccgcgccgggccccaggaccccgcacctcagactg

SEQ ID NO: 450773 - DNA, 122 bp, Homo sapiens
cgcgggcggcagcccggctggggtctcgggaagggcggggtcgcgcagggacctgggagccgggcaggggccgctcgcagaccagctttcctgggagctggccccgctcccgcgttccccac

SEQ ID NO: 450774 - DNA, 122 bp, Homo sapiens
taaaatggggcctgattgaagggccaagacgagttcatcaaccgtgagaacagtgcccagcgcctcattagtttcgtgagagtagctgccattagtgaggtacagactggatattcatggtg

SEQ ID NO: 450775 - DNA, 122 bp, Homo sapiens
cataacacaccctgaatcacattagatcatgaagtggtacccactggtcaaagccactcacgcagccccacctggatgcaagggccgctgggcgggtaggtgccccatggctggtagcagct

SEQ ID NO: 450776 - DNA, 122 bp, Homo sapiens
cgagtcacttcggtaaggcgggagcccgagcaaggtcaaggagggaagtgcgcggtgccacggaccgacacagttcgctctagcatctgacgctcggactccgcgccctcagccggatccca

SEQ ID NO: 450777 - DNA, 122 bp, Homo sapiens
cagccgcctcagacgtggcgcagtcgcggggaaagagcttccggccccgcccccagctagcgatggccccgcctccgcaccgaccacgcccctagatagcccagccccttccgcttcgggct

SEQ ID NO: 450778 - DNA, 122 bp, Homo sapiens
tgctacttgtcgggggcatcggctatgaactgcagctggatggatgcctgtctgcctgctcgtctttaagtctcacgaagcaaaaccgcaggctttctcgtactcaaaaccacaccatcatt

SEQ ID NO: 450779 - DNA, 122 bp, Homo sapiens
ctgctcccaacaactctctctgcacatctcccagtcagcaccagagctttcagctgaggccgctgaactccccataagttagttgtcctggacccagccgtccttgtcgactccattcagta

SEQ ID NO: 450780 - DNA, 122 bp, Homo sapiens
agggctggggatagcctggctgttggtaaggagctcaggccacagcgccctcgctggccccgctgctccgtccatccaggggggcggcctggaggaaggggcagcgtgcgcgaaggctttca

SEQ ID NO: 450781 - DNA, 122 bp, Homo sapiens
ttaaatatagaaacctctctatataagaggaaaacctcactactcacaggaatagggacccggtgtttggaaacccctgagaatctatagtcaccttccagaagagctacagcacagctgac

SEQ ID NO: 450782 - DNA, 122 bp, Homo sapiens
cggctgcagacggagcgcggtgttgggggccgagtccccgcgtcccctcctacccaccctcgcgccagcaggaccctctgcgttccggtcttccgctgggacttatatagctgggccgctcc

SEQ ID NO: 450783 - DNA, 122 bp, Homo sapiens
ggcagccaggggcccgttccctgggagatgctggtgatctggattctgacgctggctctccggctctgcgcgtccgttactacagtgacaccaggtgagtgctcctgggctgatgctccagg

SEQ ID NO: 450784 - DNA, 122 bp, Homo sapiens
gtatccgcacctcggctcagtccctggatggtccctgtaaccatcctcaaaggggacactcgagtgcgtcctcctctgagtcaccatggaaccatctagatctatggacagaagccagaggg

SEQ ID NO: 450785 - DNA, 122 bp, Homo sapiens
gcccaagccgtgggacccccgaggagggcagctgagccagctgctccgggctggccagggcgcgcagcagcccattctcctgctccagcgcagcgttccgctccgccaattcccggatctgc

SEQ ID NO: 450786 - DNA, 122 bp, Homo sapiens
gctgaatgcagtgatttcagtcatcttggcatatcttgcctctagcatggggtttcattccgggtgtgagttgagatctgttccatcaaagtcggcctcatattttcttgtttcatctgaag

SEQ ID NO: 450787 - DNA, 122 bp, Homo sapiens
aaaaatctgtgcatagcctgagatcagaagagttaaccccaggccctagacccagcccagcggccaaactggcaccccgtgctgatcagcccccgcatccccatatctgcatccccatatct

SEQ ID NO: 450788 - DNA, 122 bp, Homo sapiens
aaccgaggctagagaactgggccagggttacagtcatttggccagaggattagaattcagcgcttctgacctgaagacggcttcctcttaacctttttggaggatctctcctgctgtgggcg

SEQ ID NO: 450789 - DNA, 122 bp, Homo sapiens
gcgaccggagaaagcccggaggcgacggcgagggcggtgctcggcgtcgcggcccgcgcacggctctctgggaccccgagtcccaccgcccactccgggcccggaagcctgctggcgttgga

SEQ ID NO: 450790 - DNA, 122 bp, Homo sapiens
gcccttctctacctgagccgcttgaaactgggtcgggccagggccccctgagcgaccactcgaggctgcagtgcccctgacctgggcatcctaagacttcatctgggccataggttccctct

SEQ ID NO: 450791 - DNA, 122 bp, Homo sapiens
tttttagtgcagtttcagatgcacggccaatgtgagagttaagtccaaagagttcctgtacgcccttctcccctcgtgcacaccctgccctctctcccccaccagagcggcgcattccctac

SEQ ID NO: 450792 - DNA, 122 bp, Homo sapiens
ctcgagccccggatgaggaagtggtgcggccaccgagacgagacggaggcccggcgagagcggcgcgggggcgcgagggcgggaaggaggcggggccccggggcggagccaccggagcggcg

SEQ ID NO: 450793 - DNA, 122 bp, Homo sapiens
cggggaggggacgattaagttccctcagagaggaagccgcgggccgactggagtcgttttcgtgctctccgcacccgcccgccgcgggtagcatcttctcagcgccccggcgcccaggaacg

SEQ ID NO: 450794 - DNA, 122 bp, Homo sapiens
cggcaggagcccgcccgccccggcccggccccaggccgtggaggaggggggagggtgcggcgcaggaagctgaagataagtctccaaatcgggctaagctgggagtggggacagcgaggggg

SEQ ID NO: 450795 - DNA, 122 bp, Homo sapiens
accacaggcacgagccaccacatctggctaatttttgtattttttgtagagacgggttttcgctgttgcccacactggtcttgagctcctgagttcaagcaatccgactgcttaggcctccc

SEQ ID NO: 450796 - DNA, 122 bp, Homo sapiens
cccagccagcaccgccccaggaccgcggccccggcggtgcgggttctgccctcggggacccgacagggacagaagagtctcctctgactggggatttgggtctcccatgtcccgaacaacag

SEQ ID NO: 450797 - DNA, 122 bp, Homo sapiens
aaaaggaggagtgaccgaagagcatttaaccatgtggcaagcacttcacaactatgatctcgtttaatccttacagcagttcttgggggtaggtactaatattgcccccattttatggatga

SEQ ID NO: 450798 - DNA, 122 bp, Homo sapiens
gatagactcataaactcatcagcatctacatccttgctctccttattgcaccagcagaatcgaggctctatcccttctctgaatggcaatccttgacctcacaatttgattccattcacctt

SEQ ID NO: 450799 - DNA, 122 bp, Homo sapiens
cgtgatctgcccgccttggcctcccaaagtgctggggttacaggcttgagccaccacgcccggctgaccagtaaccatttttaaatgggatcttttatattgttaattactgttaagaataa

SEQ ID NO: 450800 - DNA, 122 bp, Homo sapiens
gaccctggtggccttttgctgctgggagcagcacaggaatctaatgagtagagtcagactcgacacacacatcacaagtgaaaggatagcatggaagagcccagaaagctttagaaatatga

SEQ ID NO: 450801 - DNA, 122 bp, Homo sapiens
ctatagggcctcagttggggaagcatgaacaaaattactttcctgggacgtggcggctcacgtttttaatcctagcactttgagaggctgaagtgggtggcctgtttgagcgcaggagttcg

SEQ ID NO: 450802 - DNA, 122 bp, Homo sapiens
ggcacaggggagagcaggcatcttctacagaggcctgggaagctgtgtgccagacagcgccgagcccaccagacccagactcacctacagctggagatccccacttccctgtgcccacagaa

SEQ ID NO: 450803 - DNA, 122 bp, Homo sapiens
cgagccgtcacagagccgcaggacagtcactgtagcccccagtagagacgcctggggccacggtgaagggcgctggggctgcgaggaagagggccgtcagccaaggttgcggtcccactgcc

SEQ ID NO: 450804 - DNA, 122 bp, Homo sapiens
agccctgccggctcggttcggttcgtgagcggccggggtcaggctgggtccctgaagcctcgagcccctggcgggtgctccccgcctttcccaggggcgggtcgaggggcgagccggggtgg

SEQ ID NO: 450805 - DNA, 122 bp, Homo sapiens
ctggaagggccaccccagctggaatgtcattgagaagtctctgctggggcctctgccacccggggatgggcactggcctccactgcagagcctcttccttctacgtgaggctgcagcttctg

SEQ ID NO: 450806 - DNA, 122 bp, Homo sapiens
gggctggccaggagggtccggagtgcggcgcacaggagaaggcacgtccagaggggagcccgtcgaggtgcagagtagcagccggccagggacgctggggtgatgggggtgtcgccgccgcc

SEQ ID NO: 450807 - DNA, 122 bp, Homo sapiens
cttaggtaatccagccgcctcggcctcccaaagtgctaggattacaggtgtgagccaccacgcctggcctgaaatgtagttttaaaagcttataaggttgactgggtttggtggctcactcc

SEQ ID NO: 450808 - DNA, 122 bp, Homo sapiens
cgctggtggcaggaggctgcgaggagccggcgcggtcgcagtctccacggcgcaggcccacggtagcgcagccgctctgaggtgagtgccctaccgcgcaatctccagctatttcagccccg

SEQ ID NO: 450809 - DNA, 122 bp, Homo sapiens
tggtgaccgcggctgccgaaccacttgttcccagcgcggccatcgcccgtggcgggcgctcgcggcatccttcggtcccaggcccctggccctagcctcgcgccccgctccgagctccccga

SEQ ID NO: 450810 - DNA, 122 bp, Homo sapiens
tggctccgcagggcctgatacccagggcttccgctgtcacttagacgtggggggcggggccgaacattccatccaatcagaggcactggctcggggccctgcccactgtgcatccaggcacg

SEQ ID NO: 450811 - DNA, 122 bp, Homo sapiens
tactgcctcagaacatggagaccacatgccagcctcccaggagggtcgggtctgcccagccgtgctgctggactctggctccagagactcgtctccctcccaacgctcctccctctgtgctc

SEQ ID NO: 450812 - DNA, 122 bp, Homo sapiens
tgcagtgaattggcaggtggcaggcttctctctgtgacccaaggaaagccaatacccctacgaattccaaggagatgtacttttaatttcaaatacatgtatcccacaaaatttagctctgc

SEQ ID NO: 450813 - DNA, 122 bp, Homo sapiens
tgcacacacacgcacacacccccctcactaaaggatggaaacaaaatccctatgaactgccggttccaacaacttaaataagggaatctgctaaggcaaaagatctgatttttttttttttt

SEQ ID NO: 450814 - DNA, 122 bp, Homo sapiens
ggggctgtttcctgagggggctgccgagggaggtgcttgttgagcttcaaaagcccaaggcgcaggcccagggtgctgaacaagcaggacagagaggctgtgggagaggaagctgcagagag

SEQ ID NO: 450815 - DNA, 122 bp, Homo sapiens
cccccacaggaaggcagtctccagctgaccactgttccgtgaggctgtctgagcaggcttcgctatgcacgcataatagcgacagcgcaaacagcagcagcagcagcagcctcagctggctc

SEQ ID NO: 450816 - DNA, 122 bp, Homo sapiens
cattatcttgaaattaatgggaaaagtgccccagacctggggaagtcgaatgccccactacgtggcatcaaggacagtgacggcattcctcttctcctggggttttcccacccttgtcactg

SEQ ID NO: 450817 - DNA, 122 bp, Homo sapiens
cccctctggaaaatcctggctgtgaattccacttgatgtgtcatgcctgtgtctagtgcgcgtaccatcaaaaaacgtcggcacatccaactcttggcagctgaaagcttacacaatgcaag

SEQ ID NO: 450818 - DNA, 122 bp, Homo sapiens
ggtggggccaggaggctggcacgggcattctggagaccttaggagcctgctctgtccaaacgtctgtgctgggaagatcgcagactctgctctgaggagagaagacaagccctgcctccctt

SEQ ID NO: 450819 - DNA, 122 bp, Homo sapiens
tgacctcgtgatccatcctcctcagcctcccaaagtgttgggattacaggcgtgagccaccgcacccagcccatagttcttcaggcttaacaggaagcataactcggaggcctcaggaaact

SEQ ID NO: 450820 - DNA, 122 bp, Homo sapiens
tctgtggttacccagagctgaatccttgctctgtcctttgcagccgaaacctttaagtctcggcctccttatctataacataggtttactattacagaccctatagggctgtggtgaaggtt

SEQ ID NO: 450821 - DNA, 122 bp, Homo sapiens
catgtagggaagtgatgggagaggcagcctctgtgtggtccatccttggaagcactgcatcgattttgctcccctctggttttaaggagatcttttagacctgtaagaagagaaaggggata

SEQ ID NO: 450822 - DNA, 122 bp, Homo sapiens
ggtagtgggtaggggcggtgggtgggacctgatctgtcggacagtaggggcggggcttttcgcgatgccccgcccctaggagcgctggcgtcacgcccccgtccccgcctctccggaacccg

SEQ ID NO: 450823 - DNA, 122 bp, Homo sapiens
acccttatgttcccttgtgggccttcttgacgctttggggtgctgcatgtgggtgacacacgcatcccacgacccccgcggatcccacgcaggggttactgggaagaaacttttgtccattt

SEQ ID NO: 450824 - DNA, 122 bp, Homo sapiens
atctttggcaggtgcctggcccaatacactgagctgtttggggggcacgacccacttcctcgggctccttccacccttgcagggagcctgacactgagggctggcggcttttctggcgcggg

SEQ ID NO: 450825 - DNA, 122 bp, Homo sapiens
agggcccccccgcccctcactttcctggctgagccttcactgaccttcatatttgtaggacgacttattcaggggatcggccaggaagcaggagcagaacaaggacaccagcgggagctcct

SEQ ID NO: 450826 - DNA, 122 bp, Homo sapiens
gccggagtcagatcagatctggctgccggcgatattgcctctccaggagacaaagccaggcggccaccggaacccacgggtggctgcacatctggaaagcggagccccgggatgaattatgc

SEQ ID NO: 450827 - DNA, 122 bp, Homo sapiens
cgcgcctgcgcggagagctgcgtgacgcggcggcgcgcaagggacgtgcggagtgagtggcgctgcgggtggggccgtcggcggcgctggtgagctttgcggagctgggcggtgccgaggag

SEQ ID NO: 450828 - DNA, 122 bp, Homo sapiens
accggggccaagagtgatacctgatcctgggggattgtgaaatgacctcatgtggcagcccgcccgcggtgcccgcaaagccctccaccctccccttccccgctcggctccacccctacccc

SEQ ID NO: 450829 - DNA, 122 bp, Homo sapiens
ttgcggctcagtagagctcctcctccgccgccgcctcctgccttcccgctgggcctcccgcgttgcctggagaggcagaaccgaggctcggcttccacttggagtctcccaggtgagctcca

SEQ ID NO: 450830 - DNA, 122 bp, Homo sapiens
actacttagaaggctgtgcattatgcgtacggcgggagctgggccaacgacggcctaggacggggacgtttccgacggctcacgccggtgggggcgggacttccgggttgctcgctgcggac

SEQ ID NO: 450831 - DNA, 122 bp, Homo sapiens
aaggcgtctgcacacaaagaaataacaaagttaagttcccgcggctcgaccagcagagtacgaaacggggcctcccttcccagctcgggtggaaacgcctccaccctgtcaccccgcccata

SEQ ID NO: 450832 - DNA, 122 bp, Homo sapiens
tggtggtggtagtggtgtttagaacgcatccctcagtcagacagcgaggtaggacttctccgtttattaaatcctgaccttttttttccatgtaaaacctgcacgtttctgaaatgctcaga

SEQ ID NO: 450833 - DNA, 122 bp, Homo sapiens
ttgcatgcattactgctgcccgcgccgcccgtgggccgccggccggccgcagctcgctggcgacgagggcactacagttgctctgaccgcgtagattatgcatgtcccggcctcgggaattt

SEQ ID NO: 450834 - DNA, 122 bp, Homo sapiens
gaacatcccttctcatctagtagcagatttctgtggagttcccgaagaaatggagttccccgaagaaatttctgtggctttccgtgttgtgtaccgacctgctttaggtgcgtttccaaagc

SEQ ID NO: 450835 - DNA, 122 bp, Homo sapiens
gtgcgtggagaccctcacagacaatgtggcgattgtcttcagatggtcagagctgtggcccggcagctgcaggacaggacgcgcagggaggccggggccaggagggaggagccgagcaggct

SEQ ID NO: 450836 - DNA, 122 bp, Homo sapiens
gcagacgcgggggcggggcacaggatggaatggtggcagtgcgaaaggcgcggcggggggcggtgctgcggtcagcaccgggtgcggggatgcgccacgtgggcctgcagggcctcccggat

SEQ ID NO: 450837 - DNA, 122 bp, Homo sapiens
gtgcgggaggcggacggggagcagagacacaataaaaattcccggtcaaacctcttcgcgcgtgctcctctgcagcattcttcccgctgatactgactacagcagctagggagcctaagtgt

SEQ ID NO: 450838 - DNA, 122 bp, Homo sapiens
cagaggccaagactgtgggccctcttgtactcccagcaggtgcagcacttcccactcctacgtgactgagccgtgagtagcagaagagtcaggcgctactctgggttcagcctgagtcaagg

SEQ ID NO: 450839 - DNA, 122 bp, Homo sapiens
gtctttagcctcagacacctggtttggaaacataccaccacctgtgctgcattaaacctgcgaaaaacccaggaaggaaatacagtgtatgaggccagaaaagggtgggctcctggatccct

SEQ ID NO: 450840 - DNA, 122 bp, Homo sapiens
cagctggcccggaccccgagctcctcccggttagaagccgaagcggcccctctactacggcggctgcgattaacagttgccaatgcatctggttccttgggcttcggattaatgtgaatctt

SEQ ID NO: 450841 - DNA, 122 bp, Homo sapiens
gacgaggaccccttctctgtggccaccacagttgacaggacagagtaaacctacagacttcgcagtgcaatcaggatgcctgctggccatgttcagatgcccttcccttccccctgcttaca

SEQ ID NO: 450842 - DNA, 122 bp, Homo sapiens
acacagctagtgtggcagatggagcagggttggatgccagagccaggccctccagccccacgcctcgttgctgcaggagccctccaatctgcagtcactgccacaggcatcaatggcactac

SEQ ID NO: 450843 - DNA, 122 bp, Homo sapiens
ggcgccgcctctggaagaacgtgtacgacgagctggggggcagcccaggcagcaccagcgcggccacgtgcacgcgccgccactacgagaggtacggcggggcgggcccgggtgctggacgc

SEQ ID NO: 450844 - DNA, 122 bp, Homo sapiens
agcaaagcaaggggcccagctctctagcccccactgccagagcatggcctgggggccagacgagggcccagcaccgtgaagctcttcctctggccagatggcaaggccctgcctgcccgttg

SEQ ID NO: 450845 - DNA, 122 bp, Homo sapiens
ggctgcgcgccaccatctgctattctccttttaacaacgcacagcgccggcctcgtggtccggcggccgcaggatctagggaaaattatctacctcgctaggttttcttttcttttcttttc

SEQ ID NO: 450846 - DNA, 122 bp, Homo sapiens
ttcttgggggcgggggttggccctttctggggttggccctttctggggtgggcgtggggtcgcccagggggggcgtgggctttcctcgggtgggtgtgggttttccctgggtggggtgggct

SEQ ID NO: 450847 - DNA, 122 bp, Homo sapiens
ctaagttctggaaggtcacacctgaggcagtactatagatggaaaccttgaactacctcccgctaaaattgttaccagtcccaagtgcttgcctagaccctggccctgatatctctttattc

SEQ ID NO: 450848 - DNA, 122 bp, Homo sapiens
gatattgttccgaatatctggagggggagaaaatgatgttacttccaatatcgcagggggcgtacatgctcctgagatattgtttcttaggttcaggggaagaggatgatattactgccaat

SEQ ID NO: 450849 - DNA, 122 bp, Homo sapiens
tcccagccctcccagtgaccatgagcaagctggccttccagccttgcctctacatgccaccgtaggccacagttgaggccagcaactctgaagtctccccatgttcgaggtgaggaaagctg

SEQ ID NO: 450850 - DNA, 122 bp, Homo sapiens
cctggctcgcctggagctagcggaacccactcaagcagagacagaggcctgctccgctcgcgtgagaactcacggcacccaccgcaagagagaaactcaaggggggacaatgaccgcaggac

SEQ ID NO: 450851 - DNA, 122 bp, Homo sapiens
acgttttgaaatttagggcgcagtcccaagtagggacggccaggacgccagagcctttgacgggggtggggagtggcgaggttaatgtaactgctgaacaaacatatgcccggaaaccgagg

SEQ ID NO: 450852 - DNA, 122 bp, Homo sapiens
agaatggcagcaagtgccacacaccaaagcaccggggcgggatatttgccctgcagctcccgccagcgcgctgctctgacgcaaacaaaacgcggggaaagcgcgaaaccgccaggtgcctc

SEQ ID NO: 450853 - DNA, 122 bp, Homo sapiens
ccacaggaaaaaggaaaaagtctcaggtgggcatgcgtgtaactccctaaacgcactgcgcgtgctcaattccaaaggctaaggaaagcattgcgcatgcgggaaacccacgctgagggaag

SEQ ID NO: 450854 - DNA, 122 bp, Homo sapiens
aagggtggtggtggtggtggtgatttggggtagttatttgttaactatggacacagtgaacgtagtttacgatcttgaaatgaaacttagatttttctggggaaatgttcagatacagtttt

SEQ ID NO: 450855 - DNA, 122 bp, Homo sapiens
ccccaggcgcccccgggaactgccacttactcagggcccgcggtccctggcgaaaacgggcgtggcgccagtgctcagaccgtgaagtggaaaaacggatcataacctcgcgttaaggggaa

SEQ ID NO: 450856 - DNA, 122 bp, Homo sapiens
tgcattgacattcatgtgttgatcggattgtacaatgtgacgtgtgagatttctcgggaccgtcgaagctcagacaactccagggctgcaatttactcgtctggctgccctcgaaccaggct

SEQ ID NO: 450857 - DNA, 122 bp, Homo sapiens
gtcattcatccttagccacttaaccctgatgaccttcaaggagctattgatgctagctgtcggtcgcttaacatctgaaatgaacagaccactagttaccctctacttaaaaaaaaaaaaaa

SEQ ID NO: 450858 - DNA, 122 bp, Homo sapiens
acctgggtgtccacgctggtggccgacatgcttcatgaacaactagacgcggggccggggcgcccgccggctcgggcctcccctagaggccgggcctgtcaccctagctcgcgcggccccgg

SEQ ID NO: 450859 - DNA, 122 bp, Homo sapiens
ctgctgccaacggcgacccgggctcgtcgcggtccccgccgcacagtgagtaacacatcgcgcaccgagtgactgaactaagaagagcaaaacaacatgtgactcggcgttacgcaggcaca

SEQ ID NO: 450860 - DNA, 122 bp, Homo sapiens
ccgcaggccaggagcgcccgcaggccccctcagccccggagcacgctcaaggccctccctcgggttcccagtaccccgggtttccagacctacggccaccaggggaggctcggcctcgggac

SEQ ID NO: 450861 - DNA, 122 bp, Homo sapiens
atcccagaccttatacactgagctatgacgacctctccggccaggctccacggtggcatccgttatgagctacctcctgggctttgagtgtgcaatgaatattcctcatttgagtattaaat

SEQ ID NO: 450862 - DNA, 122 bp, Homo sapiens
agggcatttgatgattaggtaactgcttgaatcaacaacttctgacagcaatgtggagaacgcatggcagcagatggaggctgaggtctaaggaagctacagcaacatttccagaggcaggt

SEQ ID NO: 450863 - DNA, 122 bp, Homo sapiens
ggagtaaatcacaaaaatttactttggaaaccgtggcttctggcagaaacagatcagtgtcgggacaaagtacacgggcctggtgtgaaactaagccacaaacccatttaccctgtctgacc

SEQ ID NO: 450864 - DNA, 122 bp, Homo sapiens
cacgggctgcacgaggctccagcacgtcaggagtgggcgtctgttcattcccacgtgcatcgcggctctctcctagttgacgcatgcacaccccgtgggtgtatgcgttgttcattcccaca

SEQ ID NO: 450865 - DNA, 122 bp, Homo sapiens
cccggagtgtgggaagaggggcatcacagagagatgcatcctacagagactggaggactccgagcttggggaagagacagttaaaccttccccgtgagagcgagttatatcacgcagcgcca

SEQ ID NO: 450866 - DNA, 122 bp, Homo sapiens
gcgctgggattacaggcgggagacactgcgcccggccataagctcaattttagacacatacgatatccaatgggggatggacacacacctgacacggtcccagtggagccctgaatggacct

SEQ ID NO: 450867 - DNA, 122 bp, Homo sapiens
gaggagcacctctgcccggccgccacctcgtgtgggaggtgaggagcgcctctgcccagacgctaccccatctgggaagggaggtgcacctgtgcccggcccctccgtctgggaagtgagga

SEQ ID NO: 450868 - DNA, 122 bp, Homo sapiens
ttttcagtggtggtgattaccatcgtcattattgttttgtatttgtaatcatcactgccacgaccatcaccgacctcttttacgcctccaccgggatccccacctcccagcctggcagttcc

SEQ ID NO: 450869 - DNA, 122 bp, Homo sapiens
gataccaaccccatccaccccttcgcgcaactatacccctaactccgacccagcccaactcgcccccctcaggccagcaacgccgtaggttgtagtgggatttaactccttctgcagcgcat

SEQ ID NO: 450870 - DNA, 122 bp, Homo sapiens
gggcggggccgtatggccgccctcgggctctgcagccgtgactcagctcgggaaggttggcgctcaggcctggagcccggggctgtgcgggcaccaaacaaagcagcgctcgcacgcgccct

SEQ ID NO: 450871 - DNA, 122 bp, Homo sapiens
tggcttgggcagggtggggggcctgtgggaagggtcggtctccatctgcttgctcctttccgcagctaactagcgggccgaaccaggagcaggtgtccccacttaccctcctcaagttgggc

SEQ ID NO: 450872 - DNA, 122 bp, Homo sapiens
gcccatccagctgaccccagcccccgacggctccagccgtggttaacgggaccagctctgcggaaaccaacttggaggccttgcagaagaagctggaagagctagagcttgacgagcagcag

SEQ ID NO: 450873 - DNA, 122 bp, Homo sapiens
gtgattttcatcctttgcatttgtcattacgatgttttgtgtgcttgtgcaaatacaggacggttcctgaaatgtgtctctgagcgttcttaactgtgtgtaaggtaagcgaggaaagtgtc

SEQ ID NO: 450874 - DNA, 122 bp, Homo sapiens
ggaggaagggcgaggcagagggtccaaagcaggatgacaggcaggggcaccgcggcgccccggtggcactgcggctggaggtgggggttaaagcggagactctggtgctgtgtgactacagt

SEQ ID NO: 450875 - DNA, 122 bp, Homo sapiens
aggtcccggcagacgaagcgagccccctggtggaagccagcagaaccaggtgcgtggcggcggaggcggggcggcccgctgggaaaccgaggaggggtcggattagttgaggggtggggtgg

SEQ ID NO: 450876 - DNA, 122 bp, Homo sapiens
agcgtgggggttggcgggacgggctagctgccgtggcggggctggggctttcccgaatggcgcgcccaggacggctcttgcggctggctgtccaaactgggcccgcgtcctgaagtgacccc

SEQ ID NO: 450877 - DNA, 122 bp, Homo sapiens
aaggagttcaaggtgtggaatagcaagatcaggtgtgcattggggaaagatgcagagactcgatgcacgtactgtcagctggaattaggccaccccatgtcactatcatgtgagaggacaaa

SEQ ID NO: 450878 - DNA, 122 bp, Homo sapiens
gctctgcgtggggcgttccgagggtctcggctcccctctctgtgtctgcctctcgcccagcgccgggagaagcagcaacaagttttgcatttcagcaatcaatttcagccattacatttgca

SEQ ID NO: 450879 - DNA, 122 bp, Homo sapiens
ccgccatcgcacagagaggcctgggcggggcggaccggcgctgggcagccaggacagccgcggcagccgggtccgcagggcagcagccggcctctcccactgcagccctcccgcccgcctac

SEQ ID NO: 450880 - DNA, 122 bp, Homo sapiens
aggcactgtgccctctgatggccaggtggacagagtcacgactgctttggtgggtgtccccggggctcaccctaggtcagttgcctgctcagtctcagcatccagccaccgcctctgggctc

SEQ ID NO: 450881 - DNA, 122 bp, Homo sapiens
gccagggagggggcgggggcggagccgccggcgggttttggcgggggatgggaggataaacgcggcttcttgggtccttctagccccgctccccaagagcgcaagcagccctggcgggtgga

SEQ ID NO: 450882 - DNA, 122 bp, Homo sapiens
ccacctatccaagtccgcgtgaagatgccactgtttcctgccaattggatttcttttttacgtccttcaggagactagtgcgttttccatacatttcaattctgatgaagtttcttattatg

SEQ ID NO: 450883 - DNA, 122 bp, Homo sapiens
tttaagtcacttttctgatggacaacaggcctgcttagctgagtgccgtgggaatgcttccgggaggggggcggctgcccagcaactagagcttcgtgataagaacaacgaacaaacaaaaa

SEQ ID NO: 450884 - DNA, 122 bp, Homo sapiens
actttacaaaagttccagcaaagctcactgaccctgattatcccttggtccagtttctggcgcggtgacggcagtgtccttgtctcccaatgccgacacctcccccggaaattgtcagccgc

SEQ ID NO: 450885 - DNA, 122 bp, Homo sapiens
aggccccccaacaccggcctctcccctcgctctcagcccaagatgacagagtatgacaagcgctgctgctgcctgcgggagatccagcagacggaggagaagtacactgacacgctgggctc

SEQ ID NO: 450886 - DNA, 122 bp, Homo sapiens
atcctggtcctttgtggctcggacaacgggggcgcgggaggcgccttgcggggacttggccgtttctcattagagggagaaggcctgtgagcacccccgtcccgccagccctccccaccgtt

SEQ ID NO: 450887 - DNA, 122 bp, Homo sapiens
gctattgattcggcctgttcattcctccctcgcacacgccgccgtcttctggccttgcgtcgctgaagtgcagcgcactgatgtttctgatctcgctgtaaccgtaattacataactagcct

SEQ ID NO: 450888 - DNA, 122 bp, Homo sapiens
tgtcaagttgttacagaagctgcattccagagggtgccctggtctatttcctgagccgatcggcggctctctggcatccatggggagccctgcccaaaccatcatccaccaatggcaactct

SEQ ID NO: 450889 - DNA, 122 bp, Homo sapiens
ttactagtgagtgggagagcagcgacacacacattgccttacgctgatggtaaaagtaaacgtggaataaaatgatacttacaggaagcaatagctgtcaaggaactttggggaacttttcc

SEQ ID NO: 450890 - DNA, 122 bp, Homo sapiens
gacacatgtaatttacgagtttgaaaatgcatactgagatcatacatcttttggaccaagcgcctcattttctagcagaggaaggaggtccagagagctgaaagcatgtttccaggtcatgt

SEQ ID NO: 450891 - DNA, 122 bp, Homo sapiens
agcccagagccaaggctgggtgggcaggtgacccaaggaacctttctgggaacaccttctcgccgggctgggaacaataaatgcagccatgtctctgcagctggtgctgaccccatgccacc

SEQ ID NO: 450892 - DNA, 122 bp, Homo sapiens
gagtggcgccagtagcagcagcagcaacatctaagtgagaggcggccatgaggactggaccgagccccgccggcgcggcccgcacccggagactactcgacctcttgccggttgcctcgcag

SEQ ID NO: 450893 - DNA, 122 bp, Homo sapiens
ctcctgacccgactccccttccagccttggccttcaggcactggctttagggtggaggggcggccttgcggggtccaggaggcctcggaggtgggggacggcggctctggaccagctccggc

SEQ ID NO: 450894 - DNA, 122 bp, Homo sapiens
atcagcacaagattttaatttacggcgcattgagccccaccgtaccttccgccaacacctcgtccactgtgacctgctgtcgcccgatgccgaagactcttccgatgtagccactgcccagg

SEQ ID NO: 450895 - DNA, 122 bp, Homo sapiens
tctccatctgggctagcatttagtcttcagcagtctacaagaatgatttcagaaaggaaacgacgacatgagaagaaacagaaactgtggatcatgatggctcataaaataggaatgactcg

SEQ ID NO: 450896 - DNA, 122 bp, Homo sapiens
gaggcgcccgggaagcgccgcccacctcggccccgcaccctcgccggcctgccgggtctccgccagccctagcagacagagaggggcgccggtccctagtcccccagacctccattcaaggt

SEQ ID NO: 450897 - DNA, 122 bp, Homo sapiens
ttctcccttttgaaaagttgtcattgactaaggtcctatgtggaaaaccaggatgggattcggaggtttaacattaagtggagtctctgcccttcaactgatgtgactttagggaattcatg

SEQ ID NO: 450898 - DNA, 122 bp, Homo sapiens
taattcctgtcggggcgtgtcttctcccggaaatggtctaagccccagctcctggcggagcgagctagcctgcgaatttcagcatgagtgtactgctgaggtcaggtttggggccgttgtgt

SEQ ID NO: 450899 - DNA, 122 bp, Homo sapiens
gcgtgtgtgagtttgtgtaagtgtgtgtgtgagtgtgtgaggggtgtgagtgcgtgtgtgcgtttgtctgtgtatgtgtgcgcctgcacgcacacaccatgcttctaataaaatgcaaagat

SEQ ID NO: 450900 - DNA, 122 bp, Homo sapiens
tgcatgtgtgcatatgtgtgtgcatgtgtgcatgtgtgtgcctgtgtgtgtacgtgtgtgcgtgtgtgttagtatctacccagcaaccactaccccggcctcagagcctctttccttcgcac

SEQ ID NO: 450901 - DNA, 122 bp, Homo sapiens
cacacagaaagggacagttttaaccgttttctgttttcatgttctcatttaactgttggccggaaattgccggtaggctgccgtggcctgaccctactacgtgcacaactccgcaggcatta

SEQ ID NO: 450902 - DNA, 122 bp, Homo sapiens
caccgtgagcacttgctactgagcccaatgccatcttagcatgcaacctgtccaagtccacgcagcagtaaatgtgagagctggactcgaaacccaggcctttggctggcagcctatgcccc

SEQ ID NO: 450903 - DNA, 122 bp, Homo sapiens
tacagctttctgtttggcaatgcaaaatacccatagccctagcaggtacaggacagctaacgtgtataaagacagaagagcaactaagagaaacattttccactagataactggcttcagtt

SEQ ID NO: 450904 - DNA, 122 bp, Homo sapiens
gtctaacgggcagtagagtgtccggcttcggtgccgagtgccaccgcgagtgggccgagacgcggagggaggcgcggccggagctcgggtcgccgacgctggccaggaccgcgcttcttccc

SEQ ID NO: 450905 - DNA, 122 bp, Homo sapiens
ttacctacggctgcctggtcagcaaacaacagcagatccgacaaccgccagtcacctcgacggtccacgcccaccgctagcctccagtttcccgcagaccggaagcccttttgccccggctc

SEQ ID NO: 450906 - DNA, 122 bp, Homo sapiens
cttcaagtcaggctcgaggcaggtgaaggagcctctcctccaccccaaagggttgtgaggcgctccaggtgaggtgtgactgccctgttcaattaaatcctccgtctgcacctcggcctggg

SEQ ID NO: 450907 - DNA, 122 bp, Homo sapiens
agcacagctgcgctctcccaggacgtacctgggccccgcgctgtgaagaaagccatttcacggtgccagctattcgcactccagtgccacttggactggcagagactgagaactttgtgcaa

SEQ ID NO: 450908 - DNA, 122 bp, Homo sapiens
gtgatggatctgatcaggcagagggatgggggttctgttctgttgaagagaaatgagcatcgctactatgaacggatttagaagctattactgggtgatttgtaaattattagaaggaagag

SEQ ID NO: 450909 - DNA, 122 bp, Homo sapiens
ggtggtgggaagcttcctggggctagtggtcctctggtcttccctgaccccgcggccggacgacccaagcccgctgagcaggatgagggtgagtgacccgcccggccccctccggcggcagc

SEQ ID NO: 450910 - DNA, 122 bp, Homo sapiens
atttcggtgtgcaggatgcggtaccgtttgggaatgtgcccgtgttgccggtggacagcccggttttgttaagtgaccacctgggtcagtccgaagcaggggggctccccaggggacccgca

SEQ ID NO: 450911 - DNA, 122 bp, Homo sapiens
cagccttttccttcgcgcctcgggaccctctgactcacgccgctgggcgggccaggcatgcgcacaccagagggcccgtctcatttgccccggaagtgctttctttgcccgccgttcgccaa

SEQ ID NO: 450912 - DNA, 122 bp, Homo sapiens
ccactgcctcccttcatataggctggactctatccaaatggaattaattttgcgagaactcgcctgtattttctgtttgcgcctctatttttatttccttttgccaatagtatgctttcctc

SEQ ID NO: 450913 - DNA, 122 bp, Homo sapiens
caggagggggtgtccgaatctcttagggggagtccgatccctcaggagggattcccggcgcgcgttcctaagccctcaggagtagccgggcgcggcggcggttgggctcgggcacgcgggcg

SEQ ID NO: 450914 - DNA, 122 bp, Homo sapiens
cagggcctggcgcgggaatccttcccggggcgccccagctgtgggcgagaacgggactgacgcttgggtcccgacctgggtcccctacctgtcccggcgctcacctggcgggctgctcggag

SEQ ID NO: 450915 - DNA, 122 bp, Homo sapiens
taacaaggcgtacaaatgccgagcccagcagctttcttgcaatgcccggccttagcagggcgccggactaatgagggtcactcaaaggggctgatcaaatattcaaatttccccgcacgcca

SEQ ID NO: 450916 - DNA, 122 bp, Homo sapiens
cgagcagaccaagcgcgtgtatgaccaggttggcacccaggagtttgaggacgtgtcctacgagagcacgctcaaggcgctggccgatgtggaggtcacctacacaggtaagtcccaggcag

SEQ ID NO: 450917 - DNA, 122 bp, Homo sapiens
ctcccgcccccgccctgatgtacagcctcctgattggcgggctgcgtgtccccatgtgaccggatcttggttggccggtcccgcccctgtcacgtgacagcgtgcgcctctcttcctgcttt

SEQ ID NO: 450918 - DNA, 122 bp, Homo sapiens
aaatagtactctggaaggatgacatgggaatcactcttctttccaacaggcatacaaatccgctgttgcaaggagaaagtggaatggggaaaagcaatgcatttcgggaattcattaagtgg

SEQ ID NO: 450919 - DNA, 122 bp, Homo sapiens
cggcggcgacggtggccggaaaatggcggcgggaatgggccgggatggtacctcgctgcccgcctgcctggcggggcctgcaggccgagcgccgtgcgtgccgccgggtcctggggcctagc

SEQ ID NO: 450920 - DNA, 122 bp, Homo sapiens
agttaatggtgccattgctaggttcctagcatggaaagccatgggatctggaatagagagcggaaaagagtccaaggaaagcttgtcatagtctttctggctttgaagctgcttggtgtgga

SEQ ID NO: 450921 - DNA, 122 bp, Homo sapiens
ggcggcgggtgggaggcagggaggcgggtccaaggtgagggccctggaggttaggggtcccggggctccgagccgaagcggagggcctgaagcagcggcgggcggcgcggcgaatgaacccc

SEQ ID NO: 450922 - DNA, 122 bp, Homo sapiens
ccagattgtaaatgccaagaaggcgggggcagtgtcgggtttggcttgccataggctacccgagggtctaatatggtgtgtggctcataggaggtgctcaataaatatttgtgacaataaat

SEQ ID NO: 450923 - DNA, 122 bp, Homo sapiens
ctcgcgctcaccgtgaaatcttgggggctcacgccttaccccttcttcatgcttcggcagcggtcgccggtccccctcggctcgcgggactccgcctagagcccccaggagggtcgggctct

SEQ ID NO: 450924 - DNA, 122 bp, Homo sapiens
cagttcttcagattctgctgagagcactgttttgggatcactaaggaagcgtgtaaactgcggttgtacctctgagctacctaatgctgttataagcctgagagcagtgctctcgacactga

SEQ ID NO: 450925 - DNA, 122 bp, Homo sapiens
ggagggcgagctggttgtgcttccttgtggcggagggggccccccactccgcgggtgggtcgcgggggggacttgagcacccactcggagttgccccgggccccggcgttctggcaccgtct

SEQ ID NO: 450926 - DNA, 122 bp, Homo sapiens
ggtcctcgggattctgctatttgaggctcagcacagccagagaagcctctgagatgcagccgggaggtgaacagcagagagaagaatgtacccttcagagtggtggagccttgggaacagat

SEQ ID NO: 450927 - DNA, 122 bp, Homo sapiens
aggcgcacgggcaaagaacttagcatctcatccaagtacttcgccttccttggccgtctccgggaggttatgcttaaaaacataaaaataaaaataaaaataaaaataaagggaggcggaca

SEQ ID NO: 450928 - DNA, 122 bp, Homo sapiens
tgtcacatagcaggcctcataaatacttattgaaagaattaataatagacgtagaaccaacgggcttagtaagcccctggagaaaggaatcaaagatgtttctgaggcctctatatcaggaa

SEQ ID NO: 450929 - DNA, 122 bp, Homo sapiens
acacccttttatcaaccatcagccttgtttccaggaatgtgttccttgtgtttctttgttcgaagttgctgaccagcagcttatcacacaataataacaagcattaagcagttataatgtgt

SEQ ID NO: 450930 - DNA, 122 bp, Homo sapiens
gggcagaaggcgaatatcccagagtctcagagtccacaggagttactctgaagggcgaggcgcgggctgcatcagtggacccccacaccccacccgcaccccaagcgctccaccctgggggc

SEQ ID NO: 450931 - DNA, 122 bp, Homo sapiens
tttcatgggcttttcacccactactccctcagggctgacccacctgatggatactttgtccgtttcaattgctttgctaatacattttacacctgcaccatctccagtgagggaagtgtttt

SEQ ID NO: 450932 - DNA, 122 bp, Homo sapiens
aggccccctccgtgggcgcgccaggttctgtgccgcgtcgtccttcccctccttgggcaccggctctgaacctgcccggccagaaaccgaacccgttttcaggaggagcgcctgcgggcgtg

SEQ ID NO: 450933 - DNA, 122 bp, Homo sapiens
caatgggagcccaggaggcggggcgcctgtgggaaccgtggagggcactttcccagtccccgaggcggatccggtgttgcatccttggagagagctgagagctggaggtgagctgggctcgc

SEQ ID NO: 450934 - DNA, 122 bp, Homo sapiens
aggaagcggcagctgctccgagcggggcccgcccttcccatctcctgccgctcctccctacgcttttgccttctcatctgggtctgtaggtccagcctctgaagtcctttgttttgcggggt

SEQ ID NO: 450935 - DNA, 122 bp, Homo sapiens
ctaacaccatccattccacccacctcgcagcaggacccctcctggtggcagaagatgagccgcctgagggcacaggtagttttaggggttggggtctctgccagatgggcagaggagccttc

SEQ ID NO: 450936 - DNA, 122 bp, Homo sapiens
caccgccttatttggtatggaaatctgtttctctcaaaataagcgagaggcgcttgtaaacgggaaggtcgtcctggcctgagtttgtggagtccccttcccgtgggcttggtgtgtccggc

SEQ ID NO: 450937 - DNA, 122 bp, Homo sapiens
cctgggtcgcgactatctcccccatcccagcatgagctctacgagaaggttttctccaggcgcgcggaccggcacagcgacttctcccgcttggcgagggtgctcacggggaacaccattgc

SEQ ID NO: 450938 - DNA, 122 bp, Homo sapiens
gtgtggctggaaatgatggtgggggaggaataactgcactcagttcaaatgataatagcccgctccttctattacagcaaccgtgaggcagatcagcttccaagaaagaatgccaacctgct

SEQ ID NO: 450939 - DNA, 122 bp, Homo sapiens
ttgcgggttctgttgtgggttccgcagccctaggcctggagccacggaagggcctcccaacgcccgttctcaccttccctccagccctctcacaaaatgcttccgtttccactccggttata

SEQ ID NO: 450940 - DNA, 122 bp, Homo sapiens
caatgaattcaacataagatagataccaaaacttcattagtgtgatagcaactattgaaccgaaagctgaaaaagctttctctttgtaagccttaagaaatgctaagtaaaacaatttcatt

SEQ ID NO: 450941 - DNA, 122 bp, Homo sapiens
cgccgcgcaggcgtcggccgtatccaccagggatgcgcgtggggtgcgagctgtgtgaggcgctgactacccctacagcggctcttactcccctggggggccaggttcctccctaggtgtcc

SEQ ID NO: 450942 - DNA, 122 bp, Homo sapiens
gatgttccggctgttggtcgagggcaagcttgccaagaccaactacgtggtcatcatctgcgcctgccgcagcgcggccatcgactcctgcatcgccgtcaccggtgagctctgggccgcgc

SEQ ID NO: 450943 - DNA, 122 bp, Homo sapiens
gttggttaatccaggaacagctcctgcgcggggcgtggactgagcagtcactgagtattacgcaaattgcgcgagcgcacgggaaaagcgattggtcggtcaggagagagaggtgtgtcctg

SEQ ID NO: 450944 - DNA, 122 bp, Homo sapiens
tgaaggtccgctccgtatctgaaaagtagctttcccccacggagaatgcaagcgtgcgttcggtatggggcaagagcgtgggaagcctgctactgctttcctttcggggcatatttacagtg

SEQ ID NO: 450945 - DNA, 122 bp, Homo sapiens
tgctggggcaggggtcggctgaagcagcggggagccggaccccacccgccacccgccacccgccacccccggcgcctgccaaactggttgctgcctccccggcagccgcggcgcgtccacct

SEQ ID NO: 450946 - DNA, 122 bp, Homo sapiens
tccgaggtgaaccaacagaacagatcaccctgtgaggtatgaagtgttgtcctctgcattcgacagatgaggaggttacagctgcgagactgtaggcggttgcccgggcgctcttccaagta

SEQ ID NO: 450947 - DNA, 122 bp, Homo sapiens
cgccccgcgccgcggctggcagggtgtgcgtgagtttggtggcggccggctgtgcagagacgccatgtaccggctcatgtcagcagtgactgcccgggctgccgcccccgggggcttggcct

SEQ ID NO: 450948 - DNA, 122 bp, Homo sapiens
tttcactccttagccgagtcttttgcttgtggcctagtggttgacctagtggcagggaggcgcagccttctaactctgaccgtctggaaatggctctgtgattgcacagtcctggcagtcag

SEQ ID NO: 450949 - DNA, 122 bp, Homo sapiens
gagctgcaggagcagggggcgcgtcccggtttgcgttggggtgtgggacgaagcggcggccgcgggacatccccttcggtggcgaagcccgggtctgcccggggcctccgcggggtgcagag

SEQ ID NO: 450950 - DNA, 122 bp, Homo sapiens
gtgctcggagttcagcagctccaaagctgtctatctccgtggcccgctactacggcactgcggctctgtgccctgcccctcgcagcctggcaagtccagctgccactctcactgcggagccc

SEQ ID NO: 450951 - DNA, 122 bp, Homo sapiens
actataaagtgtcgagcttctcctcgcgagagacttagtgctcatgctcgctgcaggggtcggaggtcagggcgagcgtctcgcaggccgtaggaggaagatggcggtggagtcgcgcgtta

SEQ ID NO: 450952 - DNA, 122 bp, Homo sapiens
acctgcagggtttagtctccagggctgcttaggtgggtgccaggaactgggaatccccaacgcgggacaacctgccgggcgactcaaccagtgccacggagcccttggaaacccgcggcagc

SEQ ID NO: 450953 - DNA, 122 bp, Homo sapiens
aggtgccagcggggaaagtttccctgcttcttatcgtctgctttaacgccttaaatagcccgctgaaggctgcagcaggtgctaggtagcagcctcccggccctcgggaaaggcggggtggg

SEQ ID NO: 450954 - DNA, 122 bp, Homo sapiens
agaaacattttgtaggtgaaatggccactttttccacgctgaagagtccataaaacttcccggcgcagcagctattggggctcattgaataattcatccctcattgcaagcccataatgtct

SEQ ID NO: 450955 - DNA, 122 bp, Homo sapiens
tgccgagtggtaaaaaagatgtttgaataaacaggaagtactgtgcggctgaagcacactcgaagagaaaacacactggaacattgccctttgtaggcaacctcagggaggtttgcctccac

SEQ ID NO: 450956 - DNA, 122 bp, Homo sapiens
aggcccctgtgcaggtggagatcgccgcggccctggcgggactccttgctggctcttgggcgcgctgatgcccatcatctccctgagtttctgagccctatctctcatgtgtcagtggtcac

SEQ ID NO: 450957 - DNA, 122 bp, Homo sapiens
aggaccctgagccctagcacgagcagggcagtgagaaccgcccccccttccacctggccgcggctcaccaatgcactcgccgcgcacgtcctgggtgtagcccacgttacactcgcagcggt

SEQ ID NO: 450958 - DNA, 122 bp, Homo sapiens
tggttttctttctcacaggatacccaaagcagaggactgcggcagctcgaaatgggtttccgcccaagccggacccgcaggcccgtgaggctgagcggcagctggtgctgcggctgaaggag

SEQ ID NO: 450959 - DNA, 122 bp, Homo sapiens
gaatttttcactgctctcgggatggcgtctggggcgtgggcaggttggtcccgctttgaacgctctgctggacttacggagctgctcttagtgctgggcagtgaacgccaagctgtcgtgtc

SEQ ID NO: 450960 - DNA, 122 bp, Homo sapiens
tgcttccagcgttaagtggaattccaagcagcctccggggcacagttagtctggtcactgcggccagactgccgcctcaggacccagagaacgcagcacactttagttgggcccatctatcc

SEQ ID NO: 450961 - DNA, 122 bp, Homo sapiens
aggacctcaaccgatgattgggcgagcgcagtacgggcgttgcctggggaacgccttccgcgcctcgaagtaacgtcagcacgtcgacgcggggcttttctttagccgggtcccgctaactc

SEQ ID NO: 450962 - DNA, 122 bp, Homo sapiens
ttctctctgtacctacttatataaataaaaactgtcttctttctcagttcatctgcatctcgttattgggccatgaagaaaagcagcccgattctcctacctcagcctcccaagtagctggg

SEQ ID NO: 450963 - DNA, 122 bp, Homo sapiens
gttcttggctttgtgggcagacaatgatggtgatgatggtggtgaggatgagggtgaggacgatgacctgatggtaacgacagtgatggtggtgaagataactgatggtagtgctgttgagg

SEQ ID NO: 450964 - DNA, 122 bp, Homo sapiens
gaatgaacccccatgttataatcccgcgtccctaatcttcctccagtccctgtacgtggacgcctgggtcccaatcccttgagggatgaactgaagcccgcgaaagggaagacctgggcacc

SEQ ID NO: 450965 - DNA, 122 bp, Homo sapiens
cgtggcgctcgtgggccggcacagattccgggggggcacatgctcagtgggtcctgcactcgcactggcacggctggcaggcacctgctgggcttgattggggtatgagctccctctgggct

SEQ ID NO: 450966 - DNA, 122 bp, Homo sapiens
acttgattctggttgggggctttgcctaggggagccttccctgactcctcaggctggccgcgtgggctaacacacgtaggcacagcattgagcacactgtttactcttggtccgttcacagg

SEQ ID NO: 450967 - DNA, 122 bp, Homo sapiens
gtcgttctcagtgacccagacgctaagcccatatggaagggagagtgggacgccggagcccgcttctacatccaccttgggaaaagaccccaagttagctctcagggctcgcggaccggaag

SEQ ID NO: 450968 - DNA, 122 bp, Homo sapiens
cccctccctctccagcctagcggcctccgctcagcggaaaaaaaagcagacgctactccccgctctaggtgcgggacctaagaggtttggcccaatcaggcatcccacctaaccagacgggc

SEQ ID NO: 450969 - DNA, 122 bp, Homo sapiens
tactgaaataaataaataaataagatctggctttggaaggacggtggtggctttgggccccgggtcacagccgagtcttcagcagcagcagtcccctcacggcccagtcaagtgtcaggtgc

SEQ ID NO: 450970 - DNA, 122 bp, Homo sapiens
ccaggcttctaatgcggcgcagtctacagcgctgtggactcggcaactcccatcacctgccgctgcacaaacaccctgcttgctgcccccatagaccgacccccgcctgacgcctcccagac

SEQ ID NO: 450971 - DNA, 122 bp, Homo sapiens
gggagtggccaaggtcaccagctgggagtggccgacccagcgccaggcgccgtcccgcagcgctgtccccgtccccgcaggccagcaggctgcacgactgtctgagcctcagtgtcctcatc

SEQ ID NO: 450972 - DNA, 122 bp, Homo sapiens
tacatcccacactaggcaccgcggcgcacgccgcccggagcctgctgggacatgaagtcccgcccctagggtcgcactacccgccgggaagtggagtctgggcccacccctgccccgctgag

SEQ ID NO: 450973 - DNA, 122 bp, Homo sapiens
tcctgaaattttaagtcaactcattaactttgtgttgtttatgatagattgcaaacttcccgccatttgttctggtcctctctgcaaatgtcctaccttttgttctggtcctctctgcaaat

SEQ ID NO: 450974 - DNA, 122 bp, Homo sapiens
agcagggggctgcaggcgagggcgcgctggggcgggggcgggcgggctgcacagaggggtcggatgtggggcgagttgggcagaggaagaggaaccgcagatgccgggtggcgggagagggg

SEQ ID NO: 450975 - DNA, 122 bp, Homo sapiens
tagaagatccgccgagcttccttactgaaagtggctgctgcgggcaagttctgtttccgccgagcactctttgtgttgccaataaacagcataattctagtctgcttacaggtacaatttag

SEQ ID NO: 450976 - DNA, 122 bp, Homo sapiens
ggggtcctcccaggtcgtgggtcctgggttttttctgcggagaccctcctgcacagatgccggaagggccctgaggcaggcttggagtctctgcacctgcggcttactgggaggtggggaga

SEQ ID NO: 450977 - DNA, 122 bp, Homo sapiens
tcctagaaatgtgggtttgattaacattaattataacagcagctgagggaaaaccccacgcgagactggccagcgcgtggcattgtgggcaatgtagtctgacggccgcgactggttcgtag

SEQ ID NO: 450978 - DNA, 122 bp, Homo sapiens
gtcccttcgtgggcgggaatcacagcaagggcggtcgcggccacgtggccaggccaggcccgcacccactatcgcccaggaggcgccgctaacagcgggtctcagccacgggcctctgaagc

SEQ ID NO: 450979 - DNA, 122 bp, Homo sapiens
ggtggcaggcccagtggggacactgcagctgcgagaggcacagcaatccatggcaatgggcgtctggttagctttcagtttcttagatgaggattctgaggtacaaatgtctcctcttttgt

SEQ ID NO: 450980 - DNA, 122 bp, Homo sapiens
tgaagaccaagttccaaacactctgggctctgcacaaggctccatgtgacctgtttgtgccgcagtcagctatgaggcctgcaagggcggatccctttgtgtatccgtgttgccagtacctg

SEQ ID NO: 450981 - DNA, 122 bp, Homo sapiens
cctggactggccgctgcatcctccagcaaccaggtgtgtggctggtgacactcccgcccccggacagggatggtgagccgcaatctgcacagcccatgctgcctcccctgcctccaccacat

SEQ ID NO: 450982 - DNA, 122 bp, Homo sapiens
ctggagcaactgagcctccaacatagacgagcccagctgctagatatcaatgggaagctgcgggagatgctgaagcagtacttggatggcatctcagtgagtgacgaagtgctgagccagct

SEQ ID NO: 450983 - DNA, 122 bp, Homo sapiens
ctccttggtggataaacacttcatttcccttctcctgagcagagctcctgagccctggcccgctgggaacctgtcacttctaaaaaagttcgaggtccggactgtctctcccggagccttga

SEQ ID NO: 450984 - DNA, 122 bp, Homo sapiens
tcctgggccctgactccaattcctttagggtggaccttgcagttggaaccatccacctctcgttttttctatctctgctattaacatagcccctcctctattgcctcaccaactattttcaa

SEQ ID NO: 450985 - DNA, 122 bp, Homo sapiens
gaccatcgtggggggggcgttcggggacacgcgctggcgcactcacctgtcaccggcagccgcccagcctctccggcggggctctacccccgcccatcgccacgctgcgctggttccctttc

SEQ ID NO: 450986 - DNA, 122 bp, Homo sapiens
agaatgcgagaagagagaggaaagaaggatacagctgcatgcaaagcgcaaagcgcgtagcgtggagtcgaaacaccagtaactcattgtgtgtgtttatttgaggtttgcgttaggagagc

SEQ ID NO: 450987 - DNA, 122 bp, Homo sapiens
aaaaaaaaaaaggaaaaaaactatcatgcagaagataccccaaatttcgccaggtttgcccgtttcaggaacttgcctcatctcaaggcctgctggcattccagcttttggagcctttatcc

SEQ ID NO: 450988 - DNA, 122 bp, Homo sapiens
gcccagacccgaaaaagggccaagttagaggaacaggcacagacttgggctatgggaggccgcaagggggcgaggggagaagcccgaggtcgcggtccgggggtgggcagtggggggagggg

SEQ ID NO: 450989 - DNA, 122 bp, Homo sapiens
ctcacagctcctctgcaaggaccccgctgaacgcctggggtgtcgtgggggcagtgcccgcgaagtgaaggagcaccccctgttgaagaagctgaacttcaagcgggtgggagccggcatgc

SEQ ID NO: 450990 - DNA, 122 bp, Homo sapiens
gcgtgtctttcctgctgctgcttctgccgctcccggggatgcctgcgggctcctgggacccggccggttacctgctctactgcccctgcatgggtaaggcctcccaagccctctgctcagat

SEQ ID NO: 450991 - DNA, 122 bp, Homo sapiens
gagcgaccaagggtcagtgagattactaggccggcgctgcacccaactgaaatgaactcacgtgtcctcacaactcctagcagcagatgctgtcagcctcgcatcctacaggaaaggaacca

SEQ ID NO: 450992 - DNA, 122 bp, Homo sapiens
aaccgcgcagacactaaccgcagacacatgccacacagatgccgcagccacatggcgctgcgggaaggaaccaggcccaggagcacagccatgtgcccctccctgggaagccagacacagag

SEQ ID NO: 450993 - DNA, 122 bp, Homo sapiens
taagaaaaaaactgcaaagagcctcacttaagcagagtggtgcttcctaccctggctgcacgttagaatcccctggatagcttaaaacaaaaacctaaaaatccacacttaggccccataac

SEQ ID NO: 450994 - DNA, 122 bp, Homo sapiens
ttatctagctcttaaaaaacttgtagtgccatgattagtgctttcccataacattttcttcggtgttgtcaatattgtgggttgaagttcaaatttcagctacagtagccggaccattccac

SEQ ID NO: 450995 - DNA, 122 bp, Homo sapiens
cgctggagggcaacggtttagttttggtctttgacctcccacgcccacggctggggctgccgaaagtgaagaaactagatttgcagacgccactgctagttggttatgaagctccgggcaac

SEQ ID NO: 450996 - DNA, 122 bp, Homo sapiens
aagctgactggtgactgcagcccaccacgcctgccgggccttccgagaggccccgaaggacggagggaggggtgtagggagctgctttttaaagcatcaagttactcggtcagcccttggtt

SEQ ID NO: 450997 - DNA, 122 bp, Homo sapiens
cgctcccctccccccatagctgaccaaggccagggccactgcgggagcaccgcgcgtccacgtgcacccagcatgcccggtcaccctttattacgtaagagtcccaggatggagttgtacct

SEQ ID NO: 450998 - DNA, 122 bp, Homo sapiens
aactcctggtaaaaactgtgagtcagcatgccttttctcccattcggatattccccaaatcgtcagtcatggatgagttaatttagattgcacaaacatgcactgtagcaaaacagactcta

SEQ ID NO: 450999 - DNA, 122 bp, Homo sapiens
atcagatgactggacttgtagatactaacggttctgaagcgggtaggttagctttccaaccgcctggatgacggtctcagcctcctcccgaccccttcctgcgcgtccgctcttcccctgcg

SEQ ID NO: 451000 - DNA, 122 bp, Homo sapiens
cctggcacacagactgcacacaatatttgggaatgaattaatgttcccagatgtctgccccggaacccacgctgtggtgccccttggcttcagcccacagtcctggctctcctcagggtgga

SEQ ID NO: 451001 - DNA, 122 bp, Homo sapiens
tatgttgggaccgtacaggtgaatgtgccacctccacaaatggcttctccgagtgagtcacgtcacctggtgcgtggaggtggagcctgcggctggagtaaggcttgctgtgggacgccctc

SEQ ID NO: 451002 - DNA, 122 bp, Homo sapiens
ctattttttaattttttgagaccgggtctttctctgtcacccagtctggagtgcagtgcgcgatcttggctcactgcagccccagcttccgggttcaagcaattctcctgcttcagtttctt

SEQ ID NO: 451003 - DNA, 122 bp, Homo sapiens
ccaagaaccaagcaagccaattagcaaatttgttcttctgttaatgctttagttccaaagcggaattttaatgcatttaaagttagactttatgcctttattagatgagcttgcacatgaaa

SEQ ID NO: 451004 - DNA, 122 bp, Homo sapiens
gcatattctggtctcctgcagtggttagttctacttctttgtagcatttgaaccctgacacgttttctcttgatttctaggacataattttctcttttcagtctctctctttatggttgtat

SEQ ID NO: 451005 - DNA, 122 bp, Homo sapiens
tttttttactttttatttttttaaagccagttggatttagcagtggggactttagtgacacgaatgtggatgttaaattctgataacccagtatcataggaactagccaatacctttttctt

SEQ ID NO: 451006 - DNA, 122 bp, Homo sapiens
gtgaccccaggcaaccattttaatttttttacagccaagcgtagtggagaactggctgcgcgccggttgccagggacgcggcagccagcttggcggggctggggtgaaagaggacgctgcgt

SEQ ID NO: 451007 - DNA, 122 bp, Homo sapiens
ttccctcggggctccccgctctctcccccgccaccctccgctcccccctttaccccgaggcgtgcagccacttctgtgaagaggccagacttgaagtggggcgcagttaggacctcggggcg

SEQ ID NO: 451008 - DNA, 122 bp, Homo sapiens
agcggtcactctcctcctcactcccctctctcactctgctcacctgccactgtctcccatcggctgaacctgaaggccgagggcaggagcccactggtgtcatcagcataggccagcttccc

SEQ ID NO: 451009 - DNA, 122 bp, Homo sapiens
aggccaccgctccggttccggttccgctgcatctggggctctcggcaggctgtggtcctccggccagcctgggggcatctcagtccctcagccccacaggggcctgccccgcagcctgggcc

SEQ ID NO: 451010 - DNA, 122 bp, Homo sapiens
ctccgcccaccccattttcatttagggacctgcatgattcagcctttatctcacagcctgcgtcagtttattttaatgtgttttctcagtaccttgttactcctttagagctctgttatcaa

SEQ ID NO: 451011 - DNA, 122 bp, Homo sapiens
tttatatagtgaaactggcacacagtaggtgcacacagtagtgctttccgtacagtctttcgcatggagtagagacaggcacacagcagctcaagtgctagttgtcatccccttcccttcag

SEQ ID NO: 451012 - DNA, 122 bp, Homo sapiens
cccgctcacctctggccgactacgcttctgcagcaaatgctccaggtagaggtcggagagcgccgtgtgcatgctgcccccactctcgccctcgctcgccttgagggtcatctcgcagaagc

SEQ ID NO: 451013 - DNA, 122 bp, Homo sapiens
tgaagccgctggagaaatttctgaagaagcagacgtcgcagctggcgggccgaacggtggcgggaggtcccggcgggggtctggggagctgcggtgggcctggagggggtgggggacccggc

SEQ ID NO: 451014 - DNA, 122 bp, Homo sapiens
tttcctttttcccccctttttttctgattgcaatttcaataataaagctctattgaattccgaattacttacatgaggtccttgaaagcatgactccctctgcagataaccataggtttcca

SEQ ID NO: 451015 - DNA, 122 bp, Homo sapiens
aggctcactgcttccaagagaactgtccctaaacacgtacagagcctgatgaacatcttacgtcatgacccacaagtgaataagagaatggattgtatgaagtagttcttccttgaattttt

SEQ ID NO: 451016 - DNA, 122 bp, Homo sapiens
ctttataatctctggttgctcagatcactgtttttagcaaaataaacacattttgagtcacgagagtcttggcttcagcaacttgtgtttctgtgttgtgttgtcattgagcatactatgga

SEQ ID NO: 451017 - DNA, 122 bp, Homo sapiens
tcctagcttgtatatgaaagtgtcaacacgtgttttctggtgtgtatctgtctgggtgtgcgttcccataagacagtgagtgtactttgttctgatcatatttgcatctttgctgttccaga

SEQ ID NO: 451018 - DNA, 122 bp, Homo sapiens
tagtgttctttactgcaatgctattttaagatgcaattaaaacgtctcattgccaaagtgcgtgcttcctcctgggggcctccttcctaacacgaaggagtcagaaaccaaggccgggagga

SEQ ID NO: 451019 - DNA, 122 bp, Homo sapiens
tcgctttgtgataagccacatccctgggtgagggccacgcccccgggtgaaggccacacccgttacgacaagtctttccctaggagccccgtcctgggtaaagaacagggctccagaggagg

SEQ ID NO: 451020 - DNA, 122 bp, Homo sapiens
ccccaaaggttcctgcctctcacattcctttcctcccttgtccccaaaactgtaaggtgacgacgggttcaggggatatacactcaaggtgacgacgggttcagggggtgcacactcaaggt

SEQ ID NO: 451021 - DNA, 122 bp, Homo sapiens
aggctgaggcgggagaatcgcttgagcccaggtgatcgaggctgccgtgagctatgatggcgccactgcactgcagcctaggtgacagagcaagacatggtctcaaaaaaaagaaaagaaaa

SEQ ID NO: 451022 - DNA, 122 bp, Homo sapiens
ctctcgaagctgtggggaacgggcagtgagcgccgtgcaggggctgcagcgtggggtgtccgcccacctggccgcagcctcggagggtccgctcgcctggccgcccccccttacctgttgtc

SEQ ID NO: 451023 - DNA, 122 bp, Homo sapiens
acttccgtcttaaggactctaagaggtctgccgtatgtgcttcaccttgacacagagcaccgggcgctgcagcctccatcagtaccgaccctgcagccctggcacccggacagcaccgcata

SEQ ID NO: 451024 - DNA, 122 bp, Homo sapiens
gcgtgggggaggcggccctgcaggtgcgtacccggggtccgacacgtgcggggcttcctgcgagctgagtccccgctgcgcgtcttcaggcctttgtaagttgtcaaatttcccaccggccc

SEQ ID NO: 451025 - DNA, 122 bp, Homo sapiens
agctggctgcagacaaggacagcttctgcttagctaagacaacagacaagccgccaactacggaattggacaatctctacccaaaactatgcaatgagattaattttgatgcttcagcaccc

SEQ ID NO: 451026 - DNA, 122 bp, Homo sapiens
ggcttgcacagggtcgggggctgccacagctgctatagttcaccgtgtgcacttggcagccgcccctgagcccaccgctgaggccgcagggctggtcctgtcccagacggcctgagggtcac

SEQ ID NO: 451027 - DNA, 122 bp, Homo sapiens
tgcgaccaccatcccatttttgtgcagaattgccacggccggacgctgtttgttgaaccacggcgcattcatgacgaggagaactgggcaggcggtgggatccccacccggcaccccgtacc

SEQ ID NO: 451028 - DNA, 122 bp, Homo sapiens
aagaaaggagtgtggagttgcattcattcagtccaagggaaaataatctgagtaggaaatcgtaaggagaggtgagcagaaagagacttcaaatttcaagagtcattctccagatagatatg

SEQ ID NO: 451029 - DNA, 122 bp, Homo sapiens
tcggcctcccaaagtgctgggattataggcatgagccacttcacgctgctagaatgtgaccgttggaggggggagataaaaaaggttgtgacttcatttggagattttggtgggtttttttt

SEQ ID NO: 451030 - DNA, 122 bp, Homo sapiens
ccgccgcagacctgctggtttgagtttctgctggaggagtcactgttggagaaacatctgcgcaagccctgcccgggtgagcgcggcgcctgcacctggggagcgggacccggccaccggcg

SEQ ID NO: 451031 - DNA, 122 bp, Homo sapiens
tagccacaagcaacaagccaaagggcaccctgaggggagaacactgtggctctcagtggccgcctcgggagaaacagcagcagctacacctgcaggtggggggtggggaaagaggctgcggt

SEQ ID NO: 451032 - DNA, 122 bp, Homo sapiens
cgccggcgctggcgaggaaggcagtcgggataacgccgcccaaactttccttcgcagcagcgttggcaggaaacgtccctctctgaggctcacgaaaagccgaaaaagactcggacgcttgg

SEQ ID NO: 451033 - DNA, 122 bp, Homo sapiens
gaccaactgagagcaagtgtgcgacactgtggctgggctgcactattctgggcccggccccgggcaccctgccctgccaggatcggtttctctctgattgggtgtcaggcaatgagagggag

SEQ ID NO: 451034 - DNA, 122 bp, Homo sapiens
gtgggtggcagtcagcatgaacccagcccccagacaaggctccgggtagccaaaggggcccgtcggaaggtcagggtcctcaggctttgctcaccgggtgcggcccaggtccatcttgcagg

SEQ ID NO: 451035 - DNA, 122 bp, Homo sapiens
cgccgccgccgtctctacaaggtctagcgggcgcccagagcacggcggaggaggcggtggcgctgcagcccccgccccgtggggtttactgggtagccatttggcgcctctcggagggagag

SEQ ID NO: 451036 - DNA, 122 bp, Homo sapiens
cctcacactccattcctcctgtgaggtatttcctgaaacactgcttctcaaacaccactgcgcatacagatgacctgggacctggttaaaatacagattctgactcagtagatctggggtgg

SEQ ID NO: 451037 - DNA, 122 bp, Homo sapiens
gctgtgggcaaagccagttaatgcctttcgtttgcagtagagagagagaaatcgaggcttcgtggtgattgggccgtgcctgatgttgcccttccgactcctagttttctgattctgtaatt

SEQ ID NO: 451038 - DNA, 122 bp, Homo sapiens
cggatcttttttaaaatgggaccactgcgcaagttacgcctgcgtattgcagggaaggaccgtaaaaggctgtggtgctgatcaacgaaggatttctcggagaaaattcctcctttgcggaa

SEQ ID NO: 451039 - DNA, 122 bp, Homo sapiens
aatgtttgtcccaaattgctgctcaacttgaagaaagctatttcaagggaattaaaagaccgcagaaaataagctagagctttggaaatattgcttttgcagtcagcactgatttggaataa

SEQ ID NO: 451040 - DNA, 122 bp, Homo sapiens
aggccgccggctcaggaggttggggcaagcccaagagcctctggggactccgagaggaggcggagcaaagccaaacgtgtaaacccaggctggagcaatccgggaaaacttttttcaaatag

SEQ ID NO: 451041 - DNA, 122 bp, Homo sapiens
agtgtctttaatccatgtcagaaccatggctgacctttgatgagtgatacatttcaccaccgtgagccggtacaagaaaagaggataatgacagagaactgttctgggtattctcagaatca

SEQ ID NO: 451042 - DNA, 122 bp, Homo sapiens
tgaaatcaaagttgattcggttgcaccaaaggcctccgtcattttggcttctgcctgacgcgcactgtgggaagaacggtttcattattgtgggtcgcacctcacctcccttcgtgctgttt

SEQ ID NO: 451043 - DNA, 122 bp, Homo sapiens
acggatgaggatttccctggcactagtgtttgttttggacaagacggtatgttacacctccggggactcagtcaacacaacacaacacaacaacacaacacactgcaggctgctccaaggcc

SEQ ID NO: 451044 - DNA, 122 bp, Homo sapiens
gtcacttgctgttggcagagctaacagggaacacagcagttcccgagcccttaccttcaccgcagtctcctcttggatgagaataacacgttcctccgcactcagatgtcctcttaggaagt

SEQ ID NO: 451045 - DNA, 122 bp, Homo sapiens
ctgatcacatctcttatgtcttggaagaccccacaagaccaacttccttataccccgatccgcagtgcggtgtgtacaaatacctttaacccattctttccggaaagctcctggggaggcat

SEQ ID NO: 451046 - DNA, 122 bp, Homo sapiens
tttattagacagacaaggggagggggtcccatgatgggatcagtcagatgcctgcctggccgctccccctgaggggacttgggcttctcttagcattggcaggcaggtataaacccccggct

SEQ ID NO: 451047 - DNA, 122 bp, Homo sapiens
tctgcaaagttgggggcgggaggcgcagccgagggtctgacggctgcggcggggcctggacggaagagggggcgagccccggggcgccgcacgtggacccccggcacgggcacgctcacgtg

SEQ ID NO: 451048 - DNA, 122 bp, Homo sapiens
gaaaaattttaaaagaacatttaaaccatcttgggctaggggtggatatgcaccaccccacggaagccaaacaaaatctctctgcagataaacatttgcaaaaagaatttccaatcccaatt

SEQ ID NO: 451049 - DNA, 122 bp, Homo sapiens
gtctaggctactcaggatcctgtttaaatttcttaccacgcacacgaagccctccaggcccgcccctgctcacctttccagcttcatctccaggcacccacgcaccccgcacacgcagatgt

SEQ ID NO: 451050 - DNA, 122 bp, Homo sapiens
gcgcgatgctccttgggaggtgtagtttccacgcgtccagctcgaacgctgatgccccagcgcggtggtaaaatgagcccacgtgatcggaaaagcagcggtttccctttgagccggaacag

SEQ ID NO: 451051 - DNA, 122 bp, Homo sapiens
acctcccgggtaaaagcaattctcctgcctcagcctccctagtagctgggactataggcacgtgccaccatgcccggctgtgtttgcatttttagtagacacggagtttcgccatgttggcc

SEQ ID NO: 451052 - DNA, 122 bp, Homo sapiens
cttcctgtggtttccagctcagcccttctggtgggagggaggaggagaagagaggatgcccgtgttgggcccttcccatggggccccagtgtttcgtgaaaacagggtcatgtcaatcacag

SEQ ID NO: 451053 - DNA, 122 bp, Homo sapiens
atcctttataactgcaattgagtacagatgtaggaagattgagagggaactgggatctggcgcctggattgctcaagagaggtcagggaaacccctcagaactcctgagacccagagattga

SEQ ID NO: 451054 - DNA, 122 bp, Homo sapiens
tgcttccataatatgcgtggggtcgccatgaacttcctcccgtgttgcttctataatacgcgtggagttaccatgaacttcctcccgtattgcttctataatacgcgtggggtcaccatgaa

SEQ ID NO: 451055 - DNA, 122 bp, Homo sapiens
aacgagccagcctgctgagcttgctgccagggcccgtcgcactgcctgcactgtgtttcccgtcgcacagcctgtgatgtgtgtttcccgtcacacggcctgtgatatgtgtttcctatcat

SEQ ID NO: 451056 - DNA, 122 bp, Homo sapiens
gtatagtgtgatggtttagtcttaaggattaagacatttttggtacttgcatttgacttacgatgtatctgtgaaaatgggatgatattgacaaatggagactcctacctcaatagttaatg

SEQ ID NO: 451057 - DNA, 122 bp, Homo sapiens
gaaattaatgattgacagctggactagaagtggcttttcattggtaaaagagcttgagcacgaatggtgatatgtaatgagattatacgtgttgttcattggaatatatttagaaaaatcat

SEQ ID NO: 451058 - DNA, 122 bp, Homo sapiens
aaagcaaaggatctagggccacttgcctggggtacccagagcaagttcctgttgtgttagcgtcggcacctggccttcctcccccagcccagaaatgaaaagcagctcattccttctagatt

SEQ ID NO: 451059 - DNA, 122 bp, Homo sapiens
gcatcagcctctccccagcaccgactgtgcgctcccgctcccccctcctccccacaaccccgccccacactactggcactgctgcctgagccttcctggagttacttaatccaccccagccc

SEQ ID NO: 451060 - DNA, 122 bp, Homo sapiens
catttgttaagcacctactgtgagtagatgatctcctgtcaaagacagttaacaaatcctcggaatattgcttcatgtacagttattggagatgagtaacttacattctcttaattgtaatg

SEQ ID NO: 451061 - DNA, 122 bp, Homo sapiens
ggtgatctgttggagatcacagagcccctccctggaggtttgtgcacacacctcctcacacgtgcgtgcacacgctacttctggtacatgggcagtgctggtctggccttgctgttaaaggc

SEQ ID NO: 451062 - DNA, 122 bp, Homo sapiens
ctgcgcgcggtgcacagaggaggagggtgccagccttggatctcgggtgtcccgccccaccgctctcagggcccacagtactggagatgttcaacacgctgctgaggcagctgcggctcagc

SEQ ID NO: 451063 - DNA, 122 bp, Homo sapiens
gtggcgcttgggaggcagctagagttctgggtgggcgtcggcttggcgggccccgcactccgggcgggccccgcactctgagcggccagccagccctgctggccccaggcagtgaggggctt

SEQ ID NO: 451064 - DNA, 122 bp, Homo sapiens
tactagcatgtctgcagcggagtctggaactgtgattgacccttggctaatgcctgagaacgtggctcttagaatactctttatgttactatgttactaattaaggataccaatacacctgg

SEQ ID NO: 451065 - DNA, 122 bp, Homo sapiens
cttatgatgttgccttgtgtgttcatggaacttcccgacacagtgaacataagaacattgcgagcactgacctgagaatgggttttagaatctttgctctctatagtacctcctgcttctga

SEQ ID NO: 451066 - DNA, 122 bp, Homo sapiens
agttgctcttccttccaagaaccttcgagatctgcggtctggggtctggttgaaagatggcggccctcactaccctgtttaagtacatagatgaaaatcaggatcgctacattaaggtaagg

SEQ ID NO: 451067 - DNA, 122 bp, Homo sapiens
ctcggtcaacatcaccctccgcctaggtaagcgcgggctgggggcaccgccaccgcaccccgtgtccccactccactgggggtctgaggctgaggcctgagctgctgtgcgcccaggttggg

SEQ ID NO: 451068 - DNA, 122 bp, Homo sapiens
gcttgcgatttcctagcactcccaactccagcatacggcctcccttgataggcagaagcacgtgtcttgttgcgacctgaacgaacaataagtgctaggtacacagttggtgtctagttttt

SEQ ID NO: 451069 - DNA, 122 bp, Homo sapiens
gggtgctccggggaccgaccccgcggtgctccccggggccgccactgcctccccgggccccgttccccgagcaccttggccccgatctggttgccgcactggccggcctgcaggtgcacgat

SEQ ID NO: 451070 - DNA, 122 bp, Homo sapiens
gcagccctcaaccaatgattgaagggattggtgtacagaagccccagctccctcacctctcgggtgagataactttgaggcaagtgttttacattgatccctgtgcttccccagagggatca

SEQ ID NO: 451071 - DNA, 122 bp, Homo sapiens
ggagcgacaacggtgttatccaatgggccgacagctggagccgcccctggccaatgggcgcgctcctccgcgatgggcggaagtggtgaggcagctctgagggccgttgttcagtgcggggt

SEQ ID NO: 451072 - DNA, 122 bp, Homo sapiens
ctcccagggcagggcagcatgaccaccagccatggaaagtctgtgtgtgtcagggtgaagcgcggcgtcgggtgaggggcccggcaagggcaggcagaggagcaagcaccccttggagggca

SEQ ID NO: 451073 - DNA, 122 bp, Homo sapiens
cacgcagcaaagcctgcaaataacaggtgttcagaaataccaagcgttttgattatcatccgtctctcactgtggccccaacgctaggtacacgcagcaaagtctgcaaataacaggtgttc

SEQ ID NO: 451074 - DNA, 122 bp, Homo sapiens
tgaccaaaccatcttggggggctggtttgaatgacagcctctgctctgtctcggggaagccgggggtggcagatccagctggaagtgaactgacagccgcgccctcctgcacacatgcatgc

SEQ ID NO: 451075 - DNA, 122 bp, Homo sapiens
gccttgctctgtggtactgccgctttgcttctgctttaccctacccacctgcccacccggcgcgtctgcctcgtcctggcaggacaagccctgagcgggccctgcaccatctgcaggcctcc

SEQ ID NO: 451076 - DNA, 122 bp, Homo sapiens
ctccctccctgggaggcttgtcacagacgtgtcagcggagtcatcctggggaaggccctgcgctcctcaggccaccgaccccagtcgcggcctcctctcataccggggccacctccccccgg

SEQ ID NO: 451077 - DNA, 122 bp, Homo sapiens
ggatcgcctgaaacatgtttacagtaggaaggactttcctccagaaagcacagtctgagtcgattccaatttatttcctccctgtaactgtaagcgaaaggagaggttcggctgccgcggcg

SEQ ID NO: 451078 - DNA, 122 bp, Homo sapiens
acggttccatcattacgcacatcaaacggctgtaattggctgctacagaaatttatcctccgaaaggagagagagtgggggagagagggcaggagaggagggagcggcggaggacgggaaat

SEQ ID NO: 451079 - DNA, 122 bp, Homo sapiens
aggggagatcgggactggtggtcaggggtcgggacgggcaggggtctgcactcacccaggcgggcaggtcgcaggcgcgcacccccaggcgcacgacgcgctcctcgtcttccagcagcgcc

SEQ ID NO: 451080 - DNA, 122 bp, Homo sapiens
agttcgagacagccttaccaacatggacaaaccccatctctactaacatacaaaattagccgggtgtggttgtgcatgcctgtaatgctagctactcaggaggctgaggcaagagaatcgct

SEQ ID NO: 451081 - DNA, 122 bp, Homo sapiens
ttcgaagagatgaagtcacctgcccagcactgcaaactagtaagtgatagagcctggattcggcctgtgttctgaccactctcttgctccatctctttaaagagagtgaaaagggggtgaag

SEQ ID NO: 451082 - DNA, 122 bp, Homo sapiens
aactctcggtggcgctgctggtggtgcctgagaagtcgctgttgcagtgcttgcatcctccgcatgctaatgaagctgtgatgtcagcaagtcagtcacggcatctggacgtcccatcctgc

SEQ ID NO: 451083 - DNA, 122 bp, Homo sapiens
atagtgcggcaagagcggagcttgcagtcactttgcgaggaggagcgcgcgggctgcgggcggctggggcaccgcgggagcggcggcggcggctctagcagaggcggccggggcagcgaaag

SEQ ID NO: 451084 - DNA, 122 bp, Homo sapiens
aaacatcctccaatcagggacgctgggctgggacccgtccaatcaggcacgcagctggagcggacaggacggcttccgggatttggcggggcctttgtctctcgctgcagtcgcagctccag

SEQ ID NO: 451085 - DNA, 122 bp, Homo sapiens
cgtcccgtgcgtcgggaggcgggggcctcgggctgtgacgtcacgtggccgcgcccctgccgcccagatatctccggcgccgcccgccattttgactccagtgtctcgtttgcagtcggcgc

SEQ ID NO: 451086 - DNA, 122 bp, Homo sapiens
ctcatcgagccgtagccggctcctcagtacagtgacttgcacacaagctccaaggagccgcgcttatctcctctggccagcctggcgttgcaccgtttgtccgcctgctggggcctggtctg

SEQ ID NO: 451087 - DNA, 122 bp, Homo sapiens
tcagggaaggacctccagaatggtagtgtgaggtaaccaggaaaaccactccttgagaaacgtctatttatttggtcaaaatcagcaaacacaaacacttaaaatctctggagattgagcaa

SEQ ID NO: 451088 - DNA, 122 bp, Homo sapiens
aaagcagacttctgttgggaggagagtccttccctactctctgaaagaggggtccccaaccgccacctgttggaacagagctgcacagcaggaggtgagtggtgggcaaatgagcattactg

SEQ ID NO: 451089 - DNA, 122 bp, Homo sapiens
tgtgggcaacacgtgcatgcagggaacacaaaggcagggactggggtgatgcagctcacacgccagcaaccacaaaaagctgggacagagttctagaacattctccctcactgccctcagaa

SEQ ID NO: 451090 - DNA, 122 bp, Homo sapiens
gctatattgggagtaacgtcatactccaccgcctggatattatattcggatcaatatcaccgggtgggtgtacacctactgcgatattgaaagtaatatcgtgctgtctcccttccgtggac

SEQ ID NO: 451091 - DNA, 122 bp, Homo sapiens
gtcagagctggagggaagctcaggcgagaacctgaaatcccggggatgggaagtgacttgcgcaaggtcacccaacaaatgagcaaaagactcaggacagattcagtctcttgattcccagt

SEQ ID NO: 451092 - DNA, 122 bp, Homo sapiens
ccatgtctgctctgggagagggtctggccttcacagccatgaccttcagagtcagagcatcgcctgcttctggtcagctcctttcctgggaagatttgccaatcgggggagggaggacaaag

SEQ ID NO: 451093 - DNA, 122 bp, Homo sapiens
tttctaaggaatcaaaactctcatctctaagaggtgtggcatcaatactgcctcccttgacgcagcccaagaaagcctttctcactctgaaaccaaggctgtgacccacaggcactgtgttt

SEQ ID NO: 451094 - DNA, 122 bp, Homo sapiens
cccgagggcacccagcctggcttgcgggtgcgcatcgtggtgaagccgggtcggggtcggcgttgcaggctcccctcttcaccgcagaggaggaaatcgagctcggccgggcgcgctgcaag

SEQ ID NO: 451095 - DNA, 122 bp, Homo sapiens
gggtccgccaccagcgagcgcccgcagccccgacctcccgctcggcctagagcgccgccccgccccgcccccctaggcgcaggccccgccccgcccccaagcccaggctccgcctcggaacg

SEQ ID NO: 451096 - DNA, 122 bp, Homo sapiens
ccactgcctatccgggaatcatagcctctatcatagtctctgctgccttggtcatcatagcgatcccggccaccatatccatccatatcccggcgtgggccatcccgatacccatcccgata

SEQ ID NO: 451097 - DNA, 122 bp, Homo sapiens
tcagtggcatcccttctctgagaagcgggcgcccggtagggcctccaggcgctgttgacacgcgctgaggagaaaggcgaggggtgccagtgttttccatgaagcagagcacgcgcagctgc

SEQ ID NO: 451098 - DNA, 122 bp, Homo sapiens
gtgcgcccgagctgggggtgcggagggcctgggggcgctggagccgggggccgccgctgccgcctcatcgtgggcgctttgtgcccccaggacgaacagagcaccctgcagctgctcaagaa

SEQ ID NO: 451099 - DNA, 122 bp, Homo sapiens
aatattttagataattcttaaactatgaaccttcttaacatcactgtcttgccagattaccgacactgtcacttgaccaatactgaccctctttacctcgcccacgcggacacacgcctcct

SEQ ID NO: 451100 - DNA, 122 bp, Homo sapiens
ggcgtttgatgatgtttaaaccgtacctgaaatacagccaggcggcaataataaaacagccgcgggccctgctggcagaggaatggctgacagccgggcctctctccccaactgcgatgccg

SEQ ID NO: 451101 - DNA, 122 bp, Homo sapiens
caacctattaatgctgtgagaatgtttctagatcagtgcatggatggctccattgctctacgggccattgtgtctgagatcccagtctttgaggagaaaaaaaacaatggttaaaaaggcat

SEQ ID NO: 451102 - DNA, 122 bp, Homo sapiens
aatacttttgttgtttgagtaaaactttattcaataaaaatagaaggaagtggcatttcccgcccatggatttatgttgaggaaagttctataggtcttcacaacatgttttaggtgatata

SEQ ID NO: 451103 - DNA, 122 bp, Homo sapiens
agagggagggacgaagaggggacggctgagtcttcttctcaaagtggttgggttgggccgcgggaactgccttcccaggcctattggcttccctgaatgggttgttatggtaacaaatgacc

SEQ ID NO: 451104 - DNA, 122 bp, Homo sapiens
gattggtgggtgtgaagtgtacagacggcgtgtgcgtggagcgggtcgtgtgcagagccccgaacgagaccctggcgtgtgcgtggagcgggtcgtgtgcagagccccgaacgagaccctgg

SEQ ID NO: 451105 - DNA, 122 bp, Homo sapiens
tactgaagatctacagaggtcagactgggagcactactacaggaagtttgaatctatccacgcagctctttcctcccacattccaggctcatcactccttcctatttcaagctggtttatcc

SEQ ID NO: 451106 - DNA, 122 bp, Homo sapiens
cagaaagagagccttatcatctgcctctcgcaaagcgactctcctcctccgtctgtatcacggctgaagcgtccgtcattctgttttctgaaacccaggttacttggtgtgtttagctctcg

SEQ ID NO: 451107 - DNA, 122 bp, Homo sapiens
ggctttccagagagaaggaggtgcctttccctgccaacttcctagctttaagtcacgctccggacatccagagtgagcacctgcacctgccagaaccccttgagccgcctctaccttccagg

SEQ ID NO: 451108 - DNA, 122 bp, Homo sapiens
ggtcacagcactgattctacagggcagtcatcacacacgtctgaggcctcagaagagcgtcgaagtcacctttcagcctaccccagccaggttccactcagactcgcctcctggggccctaa

SEQ ID NO: 451109 - DNA, 122 bp, Homo sapiens
cacaactttctcctgtctgtcactcaagcggccagagagggctccaacctccagctcccgcggcaacacacagtgggaaattgcttcaagatacagtggggctctattctttctctacccct

SEQ ID NO: 451110 - DNA, 122 bp, Homo sapiens
aatgattatggtgacattcagtatacccccaatgacactatcactataacattgctaggtcgcctcccagcagtctagccatctcaaccataaaggaatggcgaagtaatgatggcaacttg

SEQ ID NO: 451111 - DNA, 122 bp, Homo sapiens
ttgggcctttcaatgattttacatcatccttgcgagagccctgcggtggtgtcacgccctcgcaccgcgggtggagaagcgtgtctttcagacagaccaagcgatttgctcaaggtcacagg

SEQ ID NO: 451112 - DNA, 122 bp, Homo sapiens
cagccaagttagccttttttaaacgtcctgtctccggaggttgccgaagttggttttcttcggcctccttctctctcccaggcccagggctgggacgaggccggttcccgcctgcaacctgc

SEQ ID NO: 451113 - DNA, 122 bp, Homo sapiens
ctcgatctcctgacctcgtgatccgcccgcctcggcctcccaaagtgctgggattacaggcgtgagccaccgcacccggccctgtgttcttattcctggcctttcattttattctgactttt

SEQ ID NO: 451114 - DNA, 122 bp, Homo sapiens
actgtgaagggcacagtcgaggtctgtgccagtgctgagatagagattatgaagaagctgcgtgaggcctttgaaaatgatacgctgactgttaatacccacttcggatacttctccagcct

SEQ ID NO: 451115 - DNA, 122 bp, Homo sapiens
acgtccctcccccgaccctgcagacaggccttgggacccggggcagggctggaggctgggcgaggctggagggggcgcagggctgagggtgcgaggccgcccacgagtgtgtgcccgcgctc

SEQ ID NO: 451116 - DNA, 122 bp, Homo sapiens
cacatctctatcttcaggatataaaccttccctctcctcccatccagcagcaggaacaggcggaagaatggttgtgactcctagcctgtgccagggactgacaggatttccaggtcacagga

SEQ ID NO: 451117 - DNA, 122 bp, Homo sapiens
gggagcgcggcagccctggcggagggatgcaggtgggccggaagatcccacgattccgatcgactgccaagcagcagccgctgccaggggctgcgtctgacatcctgacctcctggactgta

SEQ ID NO: 451118 - DNA, 122 bp, Homo sapiens
cagcggcgccggcagcagcggggctagagctgggctgcgtcaggctgagcccattcacctcgcggccacaggagctcagcgccggcgccgcgccgcccagccccgccgagaggggcgcactc

SEQ ID NO: 451119 - DNA, 122 bp, Homo sapiens
gactgggaggaatcataaggaagaagcaatttgggggataaagacggtaaatgcactttgcgtttgttgagttagggatctctgtatgatggcaggggagagccatccagacgtccctcctt

SEQ ID NO: 451120 - DNA, 122 bp, Homo sapiens
tacacagcacggggaggcagcccacagcgcgcaccgcggtcgccatgctggagtccgagccgcgcctcggcctccgcccagggcagccttgcccaccgcctaccgcgactgctcctcgtcaa

SEQ ID NO: 451121 - DNA, 122 bp, Homo sapiens
cgtcttgtaaacagccaaaagcaatgatgtctttaaccattccatagctgttcctggaggcggagcatattttaaagtaaggctgggtcattttacaactggccaatagatgtggtcaggaa

SEQ ID NO: 451122 - DNA, 122 bp, Homo sapiens
taagccccttcccccaatcacttcgttcctagggcgtcccctggggcctggggtggagtccggctgggttcagaagtctaagggggcagtattatttcaaaaattctgagatacgggtagcc

SEQ ID NO: 451123 - DNA, 122 bp, Homo sapiens
tccaagtcgaaggagacaaagcttgtaacgcaatcacgggaatcacgcagctgactgcgtcgcgcaccaacaacaaaatggagctgacagctgctgcgtcgagactcgtctcgaaaacactg

SEQ ID NO: 451124 - DNA, 122 bp, Homo sapiens
atttgaatcctgacatcacccaatgagggagctcatgtttgatgcccattttgcagatggcgtaactgaggctcagagagttgcattcatttgcctgaggtcacacagcaagttgactcctg

SEQ ID NO: 451125 - DNA, 122 bp, Homo sapiens
cttagcatcatcacagcaaactaactgtagcctttctctctttccctgtagaaacctctgcgccatgagagccaaggtgagcggttcctggtagtaagcttgggaggtaggagttggcgagt

SEQ ID NO: 451126 - DNA, 122 bp, Homo sapiens
cctgtttcaatagcccaagatgaaagaccacatcccccgagagaatcaaaatattaacaccgcctccacgcgaagccatttgcatatgaagggcgtccttgtctagcctcactttcgggagg

SEQ ID NO: 451127 - DNA, 122 bp, Homo sapiens
acaggggctacataaatgggtactgaacccgggcaagcccagaggcctgagcacagtcctcggccttagccagccttctgggcctttgccagaaagcttctagttacaactactggcaggga

SEQ ID NO: 451128 - DNA, 122 bp, Homo sapiens
ccaccagggctgcgcgagaggcgcgcacacaggccctgagccagcagggccgggagcgggcggcctgtctccatgtgaaaggctgacccatcaggtgacagaagccctgtgcttaggggctg

SEQ ID NO: 451129 - DNA, 122 bp, Homo sapiens
ccgcccaccatggtgcatggtacctgggtggcctgcatgagctgctgccagtggcgttcccgaatggcagggttctgcagctcgctcacggcacgcagggacgtgatcacgtttttcacggt

SEQ ID NO: 451130 - DNA, 122 bp, Homo sapiens
gatggtgcttgaatttgggttccagggcgctgtcgggagagccctgggtccaagtccagccgcggatccgcggaggaaaacaatgcgaccgcccggggctctgggctcggccccagtggccc

SEQ ID NO: 451131 - DNA, 122 bp, Homo sapiens
gttgttctcgatcttgcccatctctgtgactcagacatgactagggggaggcaaacacagcgccgagttaaagatcttagccgtcaaagacacaccatgacccccaccaccaacccagagcg

SEQ ID NO: 451132 - DNA, 122 bp, Homo sapiens
tgaaggtgattttacacagcaggctcagaccggactcggaatccgcaggctgggccatttcgccttcgcccgcatggggaggcgcccctccgcgagccctgccggccgtctggccctggttg

SEQ ID NO: 451133 - DNA, 122 bp, Homo sapiens
aatctctcttcaaactacccaccttccttttgcagaaaagacaagacatttctttgccaccgctggccacccctgcccaagccccgttcttttagggaagagcactgaaatgtcctgcaccc

SEQ ID NO: 451134 - DNA, 122 bp, Homo sapiens
atgagaacactgcgccgggtctatcttctcgcccttgggtccctccatagcttgctaactcgctgcacccacgggtctctgttgacccttgtactcgagccagcgaggcggctttccctcca

SEQ ID NO: 451135 - DNA, 122 bp, Homo sapiens
cccagagagccaagggaggagggcacagcccctgggcccagagagagggcccactagcaccgtgcaatgttgaggtgcctccgcagcctgactggcccccacgcaggggccctccgcagcgg

SEQ ID NO: 451136 - DNA, 122 bp, Homo sapiens
gcagcggggcgtgggcacggcctgggcagagccgggggctcttggcaacctcttgtctcccgcgcctccctccacctgccctcgtctctctccctcggcctcgacctactgtcctttgtgac

SEQ ID NO: 451137 - DNA, 122 bp, Homo sapiens
tgaaatcaggatcaggtgactggtggccacctgatgggattgggaaggaagcatataagccggtttctagcacgtgtttttttaaatctcaacacaagaatgaggaaactgagtcaagacct

SEQ ID NO: 451138 - DNA, 122 bp, Homo sapiens
ttgtccagagtcacagccatagccccggacgccgcttctcctcgggttccgagaatcacgcgaggtcccggctcagccacccgctctcggcccaggaatcccgcactctcccaatgacccgg

SEQ ID NO: 451139 - DNA, 122 bp, Homo sapiens
acaattttctccttcttcccgagtttcctcctgggcttctaatgtaaggatgtctaactccgggacagaaagcaaggaaggaagcacccgttctctccccgccctcctcacgcgccctctgc

SEQ ID NO: 451140 - DNA, 122 bp, Homo sapiens
gctcccttctttcctgcaggtctggactcagggagaccagggttcaaattcgggctccaacggtaacatatttttccctgagtttggaaacgccccaggctgcactttcctcacctgtgaga

SEQ ID NO: 451141 - DNA, 122 bp, Homo sapiens
aagggtagagtaaatgtgctcctgcttcaggtgccctttgcagaggcttcccgagtctcccgggggcaatgcatcttctcagtaagaagaaaccccagcaagaaatcacaccaggcgtcttg

SEQ ID NO: 451142 - DNA, 122 bp, Homo sapiens
ggcccttgctgagggataggggcggagtccctgatgatgagcaaaaggctgctccccaggcgtgctggcgttcctgccccggcagagggcgccctcttcctcctgagggcttcctggaggag

SEQ ID NO: 451143 - DNA, 122 bp, Homo sapiens
gtgcatgtttcacaagagggctgtggtcacagccagagccctgcaggtcaaatcatgtcccgtcagtagcactgatcatagttctgccaatatccccgccaccagtcaaaggcacgctagtc

SEQ ID NO: 451144 - DNA, 122 bp, Homo sapiens
agggccagacattttcacactggagatcccggagggtgtggaatggaagggagctggttccgagtgctcagcacgctaagctgggaacccagccagacgcaggctttgaaagccatatgacc

SEQ ID NO: 451145 - DNA, 122 bp, Homo sapiens
ccgtttcatctgctcaccttgctggtaaggccagggctttgttcccgggagtgctcgggccgcaggtgtgtgtgtccgggaggctcctgccgggcagggcagggagaggggcctggcctggg

SEQ ID NO: 451146 - DNA, 122 bp, Homo sapiens
atccaacggtgctgcatcttaatggagggacatccagctaaagggaatcttggagacctccgcgggtttctagcagctcgcggcatgttggtttcccagggcaagaggccgccactgaaggt

SEQ ID NO: 451147 - DNA, 122 bp, Homo sapiens
aatcagcataggcgaacagccctctagagcattctctgttggttgcagatgaagaatctccggtttaggtcccaaggggagcaggcttttaaactcaagccaggctattttaccaactttga

SEQ ID NO: 451148 - DNA, 122 bp, Homo sapiens
gttcagagccgctgaggggtggggtgagtccaggcaaggagtgaaggtcagggggaggtgcggaccacataaacagcgtcactgcacgcatcaccacaggcggcacgatgaacgaggaccac

SEQ ID NO: 451149 - DNA, 122 bp, Homo sapiens
cctctctcgcctctttcctctgaatgttctttcttctcctccccgccttggccctccctgcggggcacaagtttgccatctcccatcaggcagtatcccgggacccagccctcgcaggcact

SEQ ID NO: 451150 - DNA, 122 bp, Homo sapiens
gtcatctttcctctgttctcagcctccggaggagcctttggtcttgcccctgacacccaccgggcccaatggggtggcctctcacatgctctcccagattcactgatgtctttcctctaggt

SEQ ID NO: 451151 - DNA, 122 bp, Homo sapiens
tcacgtgggcagaggaggaggactcctgaatcgtggctgatgtcgggaccaagccggcggcgagctaagcactgccttttagctggggagggtgacaccggcgctgatgagaagactggatt

SEQ ID NO: 451152 - DNA, 122 bp, Homo sapiens
gagcttggtatctcttccacatgcctatcaccaggcagctgggatgcctgccagctgcaccgcccttctggggcagccagaaaaccacagggcttgtctttgatgttacgccaactattcat

SEQ ID NO: 451153 - DNA, 122 bp, Homo sapiens
ggaaccagctgtggtagatgaggccgtagagaagctgctggaacagggacctgcagcgcacggggagccgagtgcaggtggtcagcagaggacgatgccatgccctacttctcttctgagcc

SEQ ID NO: 451154 - DNA, 122 bp, Homo sapiens
aagcccccattttgcagttcccccacctcgctttcacaggttgcagcccccttagaaaaacgccgctgcagaggcgggggctgcccatcagccccggccatggctagccagccctgtgcccg

SEQ ID NO: 451155 - DNA, 122 bp, Homo sapiens
acccaagacccaaggggagactcaggaaatactccggaaatacaaatgctccaggcaaggcggctccccaggcccctcgctcctgctccaggcattgtgggaggggctagcacaggatccgg

SEQ ID NO: 451156 - DNA, 122 bp, Homo sapiens
tcgcattgctagccctggaattcgagaccccagacgaggaccaggattcatgaaatcagtcgcaggggccggggcaggggcctctggctcccgacactggccgagaggtgggttccggggcg

SEQ ID NO: 451157 - DNA, 122 bp, Homo sapiens
aagatagaagaggaagtcagctgtagcaagcaaacacatagacctgggctgtgggaccctcggaagggatatggagccaagctcttggagtgcctgaggaattagcccaaggagctttggct

SEQ ID NO: 451158 - DNA, 122 bp, Homo sapiens
agacagcttggaaaacggcgtcctctcactgtgactttgaattgtagtcagtattaggcccgttgcggctcctgtgaaacggcttcccggggaagcacgtgcgttgccacctcacaattcgt

SEQ ID NO: 451159 - DNA, 122 bp, Homo sapiens
cagctgcacggccatcacactgcggtgccgctccacggcgatggccagcagtgtggccaccgacgcagtgaggcttgtgtccagcaagccctgccgcaggaaccagccctcaagtgaaagtc

SEQ ID NO: 451160 - DNA, 122 bp, Homo sapiens
gggatgcgctcaggagttaagggcaaattttcctaggttctttcctaggcaagtagatcccgggagcggtggaggggcgggactccacgtctcctaggaaccgctgcgcgctcactgattgg

SEQ ID NO: 451161 - DNA, 122 bp, Homo sapiens
gcaatcaatccagccctgcctcagatgacagcgtggggtgacaacatccaatcccatcaccggtcctgccagctctaccccaccagaagcctgaccctcccctgaaaactcatttacggaaa

SEQ ID NO: 451162 - DNA, 122 bp, Homo sapiens
aaggtaaagtaaaaaaggagacaacctgcaataaaattaagtaggtgacatatcttcaaccgagagacaatgagggattttttcccgtaagtcttaatgaagcaatgataaagccttacttg

SEQ ID NO: 451163 - DNA, 122 bp, Homo sapiens
gggatttcattgactagggcggaggggtgggggtggctaaaatgggtaaccctcggtcgccggcagatgaagtgaacccagcacagcagtgtgttccggctcctctgcaggagtaccagatc

SEQ ID NO: 451164 - DNA, 122 bp, Homo sapiens
cttctgggcggacctacttagtattctaattaaactcgtccaaccgctgaggatctaaagcggggcaactcgccaataatccggtcccgtagtgtcactccatttgtagtcctgccctgcgc

SEQ ID NO: 451165 - DNA, 122 bp, Homo sapiens
cgcggatcggaagagagaatcccagctgtgtgtcagggctggaaagggctcgggagtgcgcggggcaagtgaccgtgtgtgtaaagagtgaggcgtatgaggctgtgtcggggcagagcccg

SEQ ID NO: 451166 - DNA, 122 bp, Homo sapiens
ccacattatcatttcctcgagctttggaattctaattataaattctaaagtctgagattacggaaaagcagatgtgagaaaggaattaaaagcacccactggaagccaggatgtctcctagg

SEQ ID NO: 451167 - DNA, 122 bp, Homo sapiens
tggacccgggtcccttcctggagaggacgtgggcagctcgtggtggacgtgcactggttccgtcagggctggcatcatttgctgcaggaacaaacagccccaaaacggagccactcgcagcc

SEQ ID NO: 451168 - DNA, 122 bp, Homo sapiens
catctttgggcctctttcttctcctttgaaaatagggatgtcaatcctctttcagagggccgttggaataattaaacgagatatgtgtatagcccttagaacaggcctggtttacagtaagc

SEQ ID NO: 451169 - DNA, 122 bp, Homo sapiens
ctcagttttgtttttaaacccataggggagacagtttccggacgcccaacaatcacagggcggcccaggaccgagagagagcaatagactcgcctcttgcttccgcatccccagttctggtc

SEQ ID NO: 451170 - DNA, 122 bp, Homo sapiens
cacacgacctttctgcagcttttgcaccatttccatcaagtcttcaattttctgtgaggacgtgtcctgccctgtggagacaaaaccaaacatttcagaatcaagcagggcgagaggccacc

SEQ ID NO: 451171 - DNA, 122 bp, Homo sapiens
agcgatcacctgggggacgtcctgtagggagagcctgactcacaaggaccagtgttgagccgtcgcacccccgcttgggaccaggatgggctgcactttccccacccgcggccctgggaccc

SEQ ID NO: 451172 - DNA, 122 bp, Homo sapiens
gcctcagactctgccgcaaagacggccgggttcacaggagcccagggcttgaccttcagacgtttgtctgaagaagacacactcgcggccagtgagcagatgaagaggtgaaagcaaaccag

SEQ ID NO: 451173 - DNA, 122 bp, Homo sapiens
gcatcttcctgtactgcccatcaagataagttttccacccagctttatcatgattagctgcgtgatttcatgtcagtttctctgtaaaattaggtttgactgttgcattatttttaagatgc

SEQ ID NO: 451174 - DNA, 122 bp, Homo sapiens
aaggccttcagggagcagtggggaaacctaagagatgccctccacctagtggtgaaggaacgcaaggctggccagaatggatgtagttaaccaatgccatttccagggaggaggcgctgcac

SEQ ID NO: 451175 - DNA, 122 bp, Homo sapiens
cagcccctggagcgcggagccggcgtggagagcgcagctcacagccgagaccagagccgccggccacacccagtcccgcacctcccagcagccaactccgcggcgcgccggagccggggcgg

SEQ ID NO: 451176 - DNA, 122 bp, Homo sapiens
tccaggcaccccaccatgggcaatgcctccaatgactcccagtctgaggactgcgagacgcgacagtggcttcccccaggcgaaagcccagccatcagctccgtcatgttctcggccggggt

SEQ ID NO: 451177 - DNA, 122 bp, Homo sapiens
acacatgtctgtcacgggacaatgtctcctgccttcttgtgatcacaggactcagacttacgcctagtggtaggagacagcttgaaagcagagaaggagctaacagcatcagtcactgaggt

SEQ ID NO: 451178 - DNA, 122 bp, Homo sapiens
tggtaactgcgtacactcgttgtccgaggcacaatgaggcccgggcaggagcctggaccacgtctccgcggctgcgcagtagcgcttggcatgcgtgcgtgactcctgggggtcaaagggcc

SEQ ID NO: 451179 - DNA, 122 bp, Homo sapiens
catctttttctgcctttgtcttatttgtttacttgttggtctgtgttctggtcgctggaacgcaagcccggcgggggcccggggaggggccgccgcgttaatcccgccgcctcccacccgca

SEQ ID NO: 451180 - DNA, 122 bp, Homo sapiens
actcacccatgtgtctgtgaggacagagggtggctgttctaagccaccgagggagtcacgcggctttaaggcagtagcccgcagatgtgcctgctcccaacctcacagagagaactaggctc

SEQ ID NO: 451181 - DNA, 122 bp, Homo sapiens
tgtttgactattttgaaatcatttctcttctccactttgttgcactttgccctctgggatcgtttccccagctcactcttcttcctttgtcctactgctccctttacccccacctctctttc

SEQ ID NO: 451182 - DNA, 122 bp, Homo sapiens
gaacgacatttacacttgatggctaataaagatggacagctaatgacagaattatttaatcgattagaaagtcagcatcatttccagatagaaaaggctctagttgagaaacttcagcagga

SEQ ID NO: 451183 - DNA, 122 bp, Homo sapiens
gatgtggtgggtggggcctggggcgggcggctgaagcccctgaaacgcagaggttggggccggatagggcttgagaggcgcagggcgggccctgagctcgacaaacccccaggcctgagccc

SEQ ID NO: 451184 - DNA, 122 bp, Homo sapiens
ctggcactccatcatactttactagcccaaccagtctaactcaaagattcccccaacttgcgtattaacatttcaatggctttgttctcaactagaatgttcttcccttaggtctatctgaa

SEQ ID NO: 451185 - DNA, 122 bp, Homo sapiens
aggggtcagggagttccctttctgagtgaaagaaaggggtgacagacgcacctggaaaatcgggtcactcccacccgaatactgtgcttttccgaacggcttaaaaaaacggcgcaccacga

SEQ ID NO: 451186 - DNA, 122 bp, Homo sapiens
atgcacaggcttgatgtcattctccctgatttcagctacaggaaaaaggagcattcactacggtccatctctggctgagtccttgcagctatcaaaagtctaggcctcccttgcagtcctga

SEQ ID NO: 451187 - DNA, 122 bp, Homo sapiens
ctagccggcaatgccggaggcctagctcggggcatactacctgctgcaggaggcaccccacgcaatttgcccgcctgagacaagtttgccttgcacattggttcctgagttcttgccccatg

SEQ ID NO: 451188 - DNA, 122 bp, Homo sapiens
aaggaaagtagggacatctggcagaagcaggcgctccgagaataaacagtcaaagcagctcgcaatagtcccaaaaagctacccctcaccgaacctggcgtgcctgtcgccgcttgccccgc

SEQ ID NO: 451189 - DNA, 122 bp, Homo sapiens
gagggtggtcataccaaaaggatgaacaaaatacttcaagcaaaactaacagcaacataacgagctaagaagtgacaggcacaaacacaagtggatcatgttgacttgaagcaagcagagtt

SEQ ID NO: 451190 - DNA, 122 bp, Homo sapiens
cgcacccacacgcgcgtggaagggcctggattcttttcccgcacagcgggagcaaggccacgacccccagaagcaaggagaaggcgccggtcctgagctcccgcctcctccggtcacgcgcc

SEQ ID NO: 451191 - DNA, 122 bp, Homo sapiens
ggcggccgtggcggagggctatgcggcgggggagacggggcaggcccctcctcctttgtccgccctgccctcccattggtcctagcggggggccgggggcggacaccggcgcggggccggag

SEQ ID NO: 451192 - DNA, 122 bp, Homo sapiens
gcaccggggctggcggaagcagtctctgccgctcttcttaatttcaggaggttgctgggacgcatgactcaccttccctgaacccgcgagctggaagccgagaccagctggtcgctgccggg

SEQ ID NO: 451193 - DNA, 122 bp, Homo sapiens
ggagagttgtctgagcagacaaggccagaagacaggccactctgggtgggatgagtcagacggggttttaacaaacacgggggctgtaggaaggccagcagggccactgtgtatagtttcac

SEQ ID NO: 451194 - DNA, 122 bp, Homo sapiens
gccatgccgtcctccctaccaagtttctgaagttgaatgaaccgcggaataaaggtacgccgttatacgccatgataactgttggcggagcgtagcttcaaaagtgttagtgggcatgcgcg

SEQ ID NO: 451195 - DNA, 122 bp, Homo sapiens
gagatggggtttcactgtgttagccaggacgggtctcgatctcctgacctcgtgatctgccggcctcagcctcacaaagtgctgggattataggcgtgagccaccacacccagccaagaaag

SEQ ID NO: 451196 - DNA, 122 bp, Homo sapiens
cggcagcgcctcagcggccggtgccacctgcacgcggtgcccggtggagcgcggccagggcgcgtgtctcctcagcctgctgagctgcgcgtgagctgctgctgtaacgctctaacgttaga

SEQ ID NO: 451197 - DNA, 122 bp, Homo sapiens
agcagggggcagcactgtgatgggaccgctgaggctgcaggcgggcttaggggcatgggacgggacacgggcggaggcctcgctcttgccaggcgggcttctctacatctgtgtgagggtgt

SEQ ID NO: 451198 - DNA, 122 bp, Homo sapiens
tctggactagaaactgcctgagctttacgcacaggaaaggacagtggctcttcactctcccggccgcatcactcggcacctaattccgccaggctcccagaggggcggttgcagctacagcc

SEQ ID NO: 451199 - DNA, 122 bp, Homo sapiens
tgaggtaaagttgtttttgaaatttctgaagtgttatataccaaaatgccaacatttccacgacagacttaactgtataatttcgttgtaaaatctgtaagttgtaaatattgtacatagtt

SEQ ID NO: 451200 - DNA, 122 bp, Homo sapiens
gaggccacggcgcagctgcgactcctgtctccgtcccaggaagagatggaggcttgcggccgtgggcaagctcagacagctggtcagagctgggagcccgtgccagtcatcttattccaaaa

SEQ ID NO: 451201 - DNA, 122 bp, Homo sapiens
aggggtgaggcggaggagcggctcggggctggctgcaagctaggagctgggagccactgacgcccagggacagaagctggtgctgcagagaggggcggcgcagggagtccctcttcttttcc

SEQ ID NO: 451202 - DNA, 122 bp, Homo sapiens
tgtggtgaggatcagcacatgtaaacacaaataggaacgttgcctcaagcgctccatcagcgcactctagagtcctacaaaggattagacaaaacaaggtcatctccccgagtcccagccca

SEQ ID NO: 451203 - DNA, 122 bp, Homo sapiens
tgtgtgaagaataaaatttgagattcttcacattgcattcattccatttattttaacctgcgtctttcaaatatcttttttccttcaccctacatccatgtcccagacagatttttttcatt

SEQ ID NO: 451204 - DNA, 122 bp, Homo sapiens
aggacccctgcggggcaaggggggctggtggaatctggcggtccccagctgcccgtgtcccgggtcggtgcgctcggcgcacccgtggtgacagtgcccggcgtctgctcccacccgcccgc

SEQ ID NO: 451205 - DNA, 122 bp, Homo sapiens
gaattctcttcctaactactctctgaggaaccagccaattctgacgggatttgctggattcgagcaaaacttggcgcacatggggtggggtgtgatggggagcaggagggaggggggcgcat

SEQ ID NO: 451206 - DNA, 122 bp, Homo sapiens
tggaccctgagcagggccctcggccgacaccagaggggctgtggcaggtggtcctgccagcgcgggcgtctgccattgtgcctggtttcactgtggtgctgtgggtttggtgtttttaaata

SEQ ID NO: 451207 - DNA, 122 bp, Homo sapiens
gctgggagttagcgggaagaagaagaggccgcgggcaccatgattcagacccggaaactacgcctccaggcatggctaggagaaatgggcttcggagaccatggccacccctctccctgcct

SEQ ID NO: 451208 - DNA, 122 bp, Homo sapiens
accacgccccggcacaggttgtggagctcccaggtcccctccagctctgctgggtgctgccgtgtgacctgcgccttgggtctcggcccccagcaccgacacctctggctgggcacagacgg

SEQ ID NO: 451209 - DNA, 122 bp, Homo sapiens
ggtgggtgggacatgcctaacacctacatctagcagcctcggggggcagtggcactgggccggacagggtcccaccggcaggacccttcaatcccgttgcatggcgggggtggggtggggtg

SEQ ID NO: 451210 - DNA, 122 bp, Homo sapiens
attacgctgctaacgctgtacctctggcttggggctcacgcccagactcgcacccaggctcgcttgcgcccagagaaagagtaaagccatgttgaaactccctgcgattcctcgagtgtttt

SEQ ID NO: 451211 - DNA, 122 bp, Homo sapiens
cagtgtaagtgagagtgtggaggaacagctgctctcatacagccatgcactgcatcgtgacgtttgatcagtgacagacagcatatatgacggtggttccataaggttatgatactgtattt

SEQ ID NO: 451212 - DNA, 122 bp, Homo sapiens
tggagccctcctctgagtggcactatgttggagcagcagcctgaactttgagtcaggagacgggctgcagatgctggcaggaacttaatgtcctatctggagaattgggacggggggcggtc

SEQ ID NO: 451213 - DNA, 122 bp, Homo sapiens
cctccagctcagcctctggaggagctggagactaaagtcagccacaccagcaatcagtcacgtatatgaggccgacccccaataaaaaccctgcccaccaaggctcaggtgagctttcctgg

SEQ ID NO: 451214 - DNA, 122 bp, Homo sapiens
cgaggcgggaggggtgagaagcgcccatggctcggccctgccctcgcgtgtgtggggtgccgctccgcgtggtacggtccgcgtgacgacttctcgcccggcgccgggctctaggtcgagag

SEQ ID NO: 451215 - DNA, 122 bp, Homo sapiens
taagactaccctttcgagatttctgccttatgaatatattcacgctgactcccggccggtcggacattcctgctttattgtgttaattgctctctgggttttggggggctgggggttgcttt

SEQ ID NO: 451216 - DNA, 122 bp, Homo sapiens
ctgggtccaatttctgagctccggtccagccctgctgtgtgagtccctcatccccacccccgcacctgtttccaccttggctggctcaaccaacaaacttcggccccggtccgcccggtgct

SEQ ID NO: 451217 - DNA, 122 bp, Homo sapiens
aagtctactgggtttggggcggtgccaggtgagtgggcggcttgtggagctagcgaggggcggggtcagctgtgacgtggcagttgcggaagtcaaccccgggcaagggcgtggccaagtgg

SEQ ID NO: 451218 - DNA, 122 bp, Homo sapiens
cattttgcaaaacgaggggttcgaggcaggtgagagcatcctgcacgtcgccggggagcccgcgggcacttggcgcgctctcctgggaccgtctgcactggaaacccgaaagttttttttta

SEQ ID NO: 451219 - DNA, 122 bp, Homo sapiens
gctggcgccaccgccacgttagttattccgggtttggggccaagtccctcttggccgcagcgtggcggattccccgagccacctccatcccgccaccgggtccctgtctcattcgttcgttg

SEQ ID NO: 451220 - DNA, 122 bp, Homo sapiens
ccaaatagcaatcgttcctcaagagcctgtgctcttcaactgcagcattgctgagaacatcgcctatggtgacaacagccgtgtggtgccattagatgagatcaaagaagccgcaaatgcag

SEQ ID NO: 451221 - DNA, 122 bp, Homo sapiens
ttcctatggagttgccagttctggctcttcctgtgaatggattcccatgctgtgtattttcgtgtctgaattctctgactttcgtctcagcccgcacccacgctgccgcagtccgcgctcgc

SEQ ID NO: 451222 - DNA, 122 bp, Homo sapiens
gtgagctgttttttttttctccaagctgaacactaggggtcctaggctttttgggtcacccggcatggcagacagtcaacctggcaggacatccgggagagacagacacaggcagagggcag

SEQ ID NO: 451223 - DNA, 122 bp, Homo sapiens
cgaggattaacaaagccgacctcgaaatgtgaacgcagctggactagacctcagaacccccggacccttactggaggttccgctgttaaatagcctagggcagggatttgatttcagttgcc

SEQ ID NO: 451224 - DNA, 122 bp, Homo sapiens
acggccctagaagatctggcctgcaccagcccaaaggacatgacaggagtgggtagcccacgggacactggcacgagcgccatgatgggcggagacgcgcggaatcggccggcccggaagtg

SEQ ID NO: 451225 - DNA, 122 bp, Homo sapiens
acggatggctcattagtgctcggggaaaggtcaccacacagtggagacgggacagcccctcgctgggtgatcacatgggcagcaccaacaaggaggccggtccagatgctacaccctgagaa

SEQ ID NO: 451226 - DNA, 122 bp, Homo sapiens
tttgagatggtattgcagcaatgaaaacaagctcaatgtccatgtcagataaacaattgtcgtcacagctctggaagtttgggaagtgactcatcttcaggaatgggcagtgagtgaagaca

SEQ ID NO: 451227 - DNA, 122 bp, Homo sapiens
agcagaggccaaagaagtcttgtgtctgctgatgagagcaccactcatctgcgaaacgcacgtaaaacaaagtgaaccgtgactgttaaactagggatgggaaattctgcatcttggggggc

SEQ ID NO: 451228 - DNA, 122 bp, Homo sapiens
gtgtcctgcggaacgaggagagattcagcctgggtggagggtacccaaggccaaagggggcgtggctggaggtgggcggcaacagggggcggggtagggccgttgatttccccacccggtct

SEQ ID NO: 451229 - DNA, 122 bp, Homo sapiens
ggttgcttcctcctgttctttttctccttccctgaaccgctcccaatagagacaggttggcgcttcagtgcatctcagatcctctggcgcccgggcgccccctcccggcgacacctcccggc

SEQ ID NO: 451230 - DNA, 122 bp, Homo sapiens
taccagatagaaggcttggcctcagttttggcctcgcctttttgctctttctaacgagcacgaaggggcgatagggacgcggaggacacctttattcttggctggttctagcatgctgcttc

SEQ ID NO: 451231 - DNA, 122 bp, Homo sapiens
cggtcgggctctgagccgggcggatccggagggcagcagccgagggagatcggagggggccgggcttctgagggaggcttggaccagaagggttatcctcctaggcaaagaggacttttgtg

SEQ ID NO: 451232 - DNA, 122 bp, Homo sapiens
atgcccctgagagagcagcgatatactgggttagatgaggatggtcacgtgctggagaggcgtgtttttgggtaccagcccttcacctgtgtcgaccttctcaactgggaaaacaatacaac

SEQ ID NO: 451233 - DNA, 122 bp, Homo sapiens
tctccccccacagagcaagaggcaaagttcattaggacccctgtcctcatcaaaacactccgtactttttttcttcttcttcttctgagacagagtcttgctctgtgcccaggctggagtgc

SEQ ID NO: 451234 - DNA, 122 bp, Homo sapiens
tactgccatggccccacagtcggggccgctccccccgcctgtttggcggggccaggaggacgatccgaccagcgaagccaacagggcagctggtagctctgctgagctcccgggccgcgaaa

SEQ ID NO: 451235 - DNA, 122 bp, Homo sapiens
tctagatggaagatcaactgttctataagtacaccaacttcttgcagcttccttttacagcgcaatatgagggtcacctgtagacagaaatgcataggctctgctcacctaaacctctgctc

SEQ ID NO: 451236 - DNA, 122 bp, Homo sapiens
aaaagagcttgacttacttctttggcccatcaagtgtgtctcttttttgcactgacaacacgtatgtggccacgatgacaccttcaaggaatggaggctccctgcctctccaatagcagccc

SEQ ID NO: 451237 - DNA, 122 bp, Homo sapiens
cagataggcgcagagaggccaagtgacttgcccaaggtcttttgttaggacggctttttccgattggcaggcactttcgttgtgtgttcctcaaacatctttattttagaagtgagaaaact

SEQ ID NO: 451238 - DNA, 122 bp, Homo sapiens
tatccatagtggttgtggtcagcctcgcccagggtcaacgtcagtgacaggctgggcttccgttccagctcctcctccttcagacagtgctgtgggggtcgggctttgaagaagtctgagat

SEQ ID NO: 451239 - DNA, 122 bp, Homo sapiens
gcgagagcgaaaccgaggcaaagtaaatgagtggggggagtcagaatacaggaggcgggacgagaagaaaatctgggctaaggagggcagagtcagaccccaaaaggctgggccatccaaga

SEQ ID NO: 451240 - DNA, 122 bp, Homo sapiens
cttttctgcatgccgaagagcggttggtggaggcgggggaaggggacgtctctgcagagccgagatttgggctctgaagcccgacggcccttcaacatgtctgcgcaggataagtgagcttt

SEQ ID NO: 451241 - DNA, 122 bp, Homo sapiens
gcccttgagaaagacactcacatgttataggagacagaggaaggatttaccattgtaagccgtttttagtaaatgctctaagaaagagtagtcgggggcctatcatcaggtgttggttacaa

SEQ ID NO: 451242 - DNA, 122 bp, Homo sapiens
actgacacagagtgcagatgcctgcttctgggactcaatgcactgcaccctggtcatctgcggactcagcctgagcttccagagggcctaggagcagtaagggagtgagtgggcaactcggc

SEQ ID NO: 451243 - DNA, 122 bp, Homo sapiens
gtcatatagagagtgactgagtcatcatatttgatattgcaaaactctggctgagattcacgactcgatctgccaagaagcaatgagataactctcactggagccttcttacattctgaagg

SEQ ID NO: 451244 - DNA, 122 bp, Homo sapiens
atgttaccacacacagcttaagacacgttgatccagttcactcctagtttctaggcaagacggtactcaaactgtcccagaaagagagtcatctactattttgttaaaaatatccaaataag

SEQ ID NO: 451245 - DNA, 122 bp, Homo sapiens
tccctccgtgtcctctcgccatccagctgcttgtgtcttctcttgctgatgtgctcctctcgccgtccagcagcttctgtccctgccttgcttgggtctcgggtttttataggcccgggatg

SEQ ID NO: 451246 - DNA, 122 bp, Homo sapiens
ccacattcccgccaagtctgccttcctcaaaggatggacttggtgttcatgtctgtgtctcgggactctgagcgatgggacagcatctggaatgtcactgagccatccgcgacttcgggagc

SEQ ID NO: 451247 - DNA, 122 bp, Homo sapiens
gccgacgagacagtagaggtaatagaggccgtcctgcgggagcgccagcccctcggcgtccgagaactgcgtcccgctcgtcagaaacgcctgttccttcgtcgtctcccagcctagcccct

SEQ ID NO: 451248 - DNA, 122 bp, Homo sapiens
acagtcgtggcaccctccgggcaggcccagcaggacagctggactcacacctgctgctggcgcaggccttgttctgcccagggcgcacgaaaacacccggccccacgcagagaggcagcagg

SEQ ID NO: 451249 - DNA, 122 bp, Homo sapiens
ccagagttttctcactcctcaaacccaaaattctgttcatttccttgcagagccaattaacggagtctgactcacacctcgccctggccacacaggccctcagttctaatttttcaggttca

SEQ ID NO: 451250 - DNA, 122 bp, Homo sapiens
ggaccagggattcacgggctgcaggaccctcacccggaagagcctggcgaaccggaagggcgtccaggtaaaaaacaggaacagcacatgcgcagaaaggcccccgggccgcctttcccggg

SEQ ID NO: 451251 - DNA, 122 bp, Homo sapiens
tgatctgaccactccagagtgccccctgggccagcagcaaatagaacaaaattttatagccggggcagatgttggctcggccatctcacccggattccccttcatctctcttccactgaaga

SEQ ID NO: 451252 - DNA, 122 bp, Homo sapiens
ggggcaggcggtgagcctgggaggccaggccgggctgacccaaggggagaggaccctctccgcccactgccgctggccctgggcaggtctagagcctgggggtctccagaggcacaatccct

SEQ ID NO: 451253 - DNA, 122 bp, Homo sapiens
gttacctcggaacggtaagtatttgacttggcaaggttttaggttactgcttgatcccatcggaaaagactgtttaagaagatggcctctaatgccttttctcagaatcttctctctagtaa

SEQ ID NO: 451254 - DNA, 122 bp, Homo sapiens
ggcagcgacccactactttgtactctcgtagtgtgcccgaggccttcatggcgtgctctccgcgttcgccgccacccgcaaaaggagacttgctgataaattttgtaacataaaaacaacag

SEQ ID NO: 451255 - DNA, 122 bp, Homo sapiens
gggagttggggtgatgaccatgggcagaggggatgggactgaagctgggcgctcaagagtcggggaagtagagggaggcagagtcaggtcacaggccccaagaaccccaggtggaaggaggg

SEQ ID NO: 451256 - DNA, 122 bp, Homo sapiens
agatctatccgtgctactggaaaacacacgctcggacagtcttagaggatctttaaccatcggtgcggcttgaccctggttaatgagaccaggttccgctctgactgaatgtgacttccaaa

SEQ ID NO: 451257 - DNA, 122 bp, Homo sapiens
gccaatttccacaatatgtttcctgttttatacatacatatatctgcatctacattcagtcgtacacccatagcaatgttttggtcagtgaaagactgcacatattgatggtggtctcaaag

SEQ ID NO: 451258 - DNA, 122 bp, Homo sapiens
tcagcagctgtggcagccggttgaggtctggcagtagcgttgggctgaagcagcggagttcgccatggtaaggcccgggtcactcccgccccgcagatgcccaggcagacgaagttggcctc

SEQ ID NO: 451259 - DNA, 122 bp, Homo sapiens
ggggctgccatatgggcaagtctttggaatttgtagcccatggttagaatagagttgttgcgaggattatttgagttaatttatttaaatctcttggaacaagacctagcacatagtatgca

SEQ ID NO: 451260 - DNA, 122 bp, Homo sapiens
gtggttttgacggttgggccgtgtgagttgctaggactcacctgggtctccagtcagtgccgggctgccgcccctgccgccgccgccgccgcccctgccgccgccgccgccgccgccgcccc

SEQ ID NO: 451261 - DNA, 122 bp, Homo sapiens
gtgaagttctgtgttctgaactggggctgagcaagatgcgatggtctcagcccgctgggccgcccgtagcgacggcaggagtaggggagagggagggacgcttggagtgtgagcgcaccagt

SEQ ID NO: 451262 - DNA, 122 bp, Homo sapiens
tagttgggactacaggcatgcaccaccacgcccctctaagttttatattttcagtagtgacggggttttgccatgcctgcctcagcatcccaaagtgctgggattacaggcgtgagccactg

SEQ ID NO: 451263 - DNA, 122 bp, Homo sapiens
agtaattgcgtatttacagagggagctcagccatatagtatacggtgatcttggatcagccgcctacctgggtctcaattgtctgagctgacagctgggggtaattcccctttctcaggctg

SEQ ID NO: 451264 - DNA, 122 bp, Homo sapiens
tgccaggggcttgaaggaaccggctcttcctttcgcagaacccaggtgtttctctgggcccgggaagtttttgctcccgagcgagtcagggacgggagcaggcacgcacagtcgcgtaagtg

SEQ ID NO: 451265 - DNA, 122 bp, Homo sapiens
cagtctgtggccttaatgtttgatcctgacaggatttgcgtcactgatccatatcactgccgtgtgatgtcaaagtgtgggtgttcagttattgaggcatagttaacctaatgtgctgcagt

SEQ ID NO: 451266 - DNA, 122 bp, Homo sapiens
gagcagcgagatttccttgcggagcaatattcctagggtacagacctcgtagcccgggcccgcgactccgccccgggagcgggcaggggcggggcgagcgctccagctggcgggaaggagga

SEQ ID NO: 451267 - DNA, 122 bp, Homo sapiens
cggggacttcgcagaccgcgtcctccttcattctcgctgactttctcaccagttgtggggcgtcgtggttgttaccgttcccattggattgaccaggagactgagactccagcgagattgat

SEQ ID NO: 451268 - DNA, 122 bp, Homo sapiens
cgtgaacatttctgtcttttaaaactgtgactccttggactctagccttctctgggaggccgggaggctgcgcgcgggacggattttgcaggcgcacgcgtcccagcaggtcgcagcccgtg

SEQ ID NO: 451269 - DNA, 122 bp, Homo sapiens
cagtgaactgagaactgccctgcagaattactcataatgcagtacattctccttctcttacggtctcacaaactgcttcctccaaaatggcttttctttataaatccctgttttgtcacact

SEQ ID NO: 451270 - DNA, 122 bp, Homo sapiens
gacgcttgagctggagaaagaattcctcttcaacatgtacctcacccgggaccggcgctacgaggtggccaggattctcaacctaacagagagacaggtcaaaatctggtttcagaaccgta

SEQ ID NO: 451271 - DNA, 122 bp, Homo sapiens
ttctgaaaccatgaacaatcaaaagagtaatataaccaatgacaattccttgaaaattaacgtctgaaaaagcttcttgggagaatttgatctgtgattgaaaggataaacagaattacaga

SEQ ID NO: 451272 - DNA, 122 bp, Homo sapiens
ccccgggctgcccagccggtacagacgccccctgccaggctccgggccagcgctccgacgcgctcacagcgcccggcttgccgaccccgaccccgaccccgagtcctacgcactcgaggtcc

SEQ ID NO: 451273 - DNA, 122 bp, Homo sapiens
gcctcttacctggcccgagatctggcagtgctcctggcagataattgaggaagccatggccgctgcgcacgtgctgggtcctggggcagcctcccagcaggaggagctccacagccgctgcg

SEQ ID NO: 451274 - DNA, 122 bp, Homo sapiens
cctgggtgtcctgcacctggtgcaacgtcggcctggcatctagtgagccatctaaaggaacgatgatgagtgaatgatttgcctaccccttccagtactaggctggaggtcgtggttagggc

SEQ ID NO: 451275 - DNA, 122 bp, Homo sapiens
cagctccgacgtcccaggacccgccggccttcctggtgtgcctgggcgcgagggtccccccgggtttcctggcctcccggtaagtcctgcctccaccgtcagtgtcgggagccctgtctgct

SEQ ID NO: 451276 - DNA, 122 bp, Homo sapiens
cattgctcctccggaccctgtgtggaccggttccctgctcgcctggagccttatattccgcggcccaagggtaggagggataggacccgaccccgcccccttcgacatccagattctgcccc

SEQ ID NO: 451277 - DNA, 122 bp, Homo sapiens
acgcacagcggggacatctttctgcttcctttccaagtggggtggcatacctgtttggggcgccgcggggcctccgggctcaggctttcttcttcatgcccactgagggtagcaaagggatc

SEQ ID NO: 451278 - DNA, 122 bp, Homo sapiens
acgagagagggggaaaaacaatcggttacaagcggctgcactagggggaaaaaacgaactcgaaaaacaatgttttgtggggaaagaaagctcagtctgtggcggacaccagaagtgtagtg

SEQ ID NO: 451279 - DNA, 122 bp, Homo sapiens
ttctcatatgaaaggttaagacaactacttcaggtctgacttataaaactatctcacatacgattagaaaacatagaacagagaagaaacaattttatttacagatttcccttccatcctct

SEQ ID NO: 451280 - DNA, 122 bp, Homo sapiens
agtcacggtccaggggacctctgcagggcgggggcctgggggctgggggggcgatggcctcgggcctgggtgaaaagggcaatgccaggcctgcccgggcagccaggagggccccaagcccc

SEQ ID NO: 451281 - DNA, 122 bp, Homo sapiens
tgggctctcatcttttcttcgcgtcaaaattagccgtttaaattagaaccacgttgggagcgtaggtgacgccaacgttgcggcaccagtccggggagcacttaaaagtagccacctgaagt

SEQ ID NO: 451282 - DNA, 122 bp, Homo sapiens
ggtgtgcatgcatggtgagctctagctggagcagacgttacctactgaggctacgctcttcgtggtttctccttaaccatcacccacttgatcttccatgaagccccccaaatcttccttac

SEQ ID NO: 451283 - DNA, 122 bp, Homo sapiens
cataacaatttgagtcgacagctgatttggaaggtgtttttgagatttgttggtccaatgcgaatatacttgtgaccatagttaactgaggctattcccatgggagtgtgcaaaaattgagg

SEQ ID NO: 451284 - DNA, 122 bp, Homo sapiens
aaccaccactcccacgaggctctgcgcaggccgctcgcgttggctcagttaccatagcaacggcagaggtccctcgctcttgccgtcatcaaggctcgcttgaatgtcggctttgctttttt

SEQ ID NO: 451285 - DNA, 122 bp, Homo sapiens
tggagaaccaatttttatacagtagaagaattaagtgaggaggcacaagaatatgtaactcggaaggtatctcagtaaaatttgggccttttctgctgcagaattgggggtactcagacaag

SEQ ID NO: 451286 - DNA, 122 bp, Homo sapiens
ccgcggtggcggccccggcacggcggctgctgctgctgctacagctccggacgcccgggccgcgcgtgcctgctccaaatccccgggaaatgcctgactcatacaggaggaagaggaggagg

SEQ ID NO: 451287 - DNA, 122 bp, Homo sapiens
gttatagaaggggaatctcgggaagctttccaagtcactgcccacgtcttcgaacttcctcggggtgacgaggacctccctattaggaggtccagagagaatttgcccaaagttaccccgag

SEQ ID NO: 451288 - DNA, 122 bp, Homo sapiens
ctgaccagaccagctatttaatagcatgtgttaaagatggattgagttctctaaatttaacgtatatgtaaatcgcatctctagtaatgtcccatcaattggggtcttttcttttttaatac

SEQ ID NO: 451289 - DNA, 122 bp, Homo sapiens
cagggtagggccaggccgcgctctcggatgcaggatgtgtggtaacgggcgcttttaccgcgacctgacggggcggtcctcgccgtcggggaagaacgttttggaaagaagcgtgtccgggc

SEQ ID NO: 451290 - DNA, 122 bp, Homo sapiens
gtggtggtggctgcagccaaggctgcctttgcttcggatcctgagctgggcctctggctgcggtctaggcatgaggagccggctgaggcggggcgggcgtgacgggttggacacatggctgg

SEQ ID NO: 451291 - DNA, 122 bp, Homo sapiens
cactacctcatccgtgttccgcagctcctcctgctctttcccctcgccaccctggacacgcgagtgctaagttcgcagctgggggagacaggcactgctgaaaatgaaagtggtcccgtcga

SEQ ID NO: 451292 - DNA, 122 bp, Homo sapiens
tgtagggcacagggagttgggaggggggcatttgcctgagagatgctggataccatttcgcgataaattagatacggacactggaacaattaatacgtgtaataacacgtatgtgaaagtat

SEQ ID NO: 451293 - DNA, 122 bp, Homo sapiens
agcctcctacagcagccaggtacacacaaggcctcagtttttccatctgtgaaatgggtacgtggacagacctgtccagtagcctcccatgtgagaatcctcggactgagagggtactagga

SEQ ID NO: 451294 - DNA, 122 bp, Homo sapiens
aacgcctcgcatcccttggcccgcttctccacctcggggccaccgccagaaaaatgcattcgagatcattcagagtgcacagaaacaaaaatagatttttaattgttaggttaggggaaact

SEQ ID NO: 451295 - DNA, 122 bp, Homo sapiens
cttcggagcctgggctgtcctttgttggagggcacgatgcaccatagatttttattttcacgaaacagactccagaggtttgtggccttccagacaacagctggcaccgggcagaggcacag

SEQ ID NO: 451296 - DNA, 122 bp, Homo sapiens
cactgcgtttatgagctgtaacactcaccgcgaaggtctgcagcttcactcctgagccagcgaaaccgggaacccaccagaagcccgaacacatccgaacatcagaaggaacaaactctgga

SEQ ID NO: 451297 - DNA, 122 bp, Homo sapiens
ccccgagagagaccagtgcctctgcgcatgcgtcagtggcgagcgcaccgcccccccccccgcccccgccaccccgcaccccgccccccggcatggctttccccgtgggcgcttttcggcgc

SEQ ID NO: 451298 - DNA, 122 bp, Homo sapiens
ctcattggaaataccgtgtgtctcttgccataagccctaaggattgctcagctagcttgacgaacataagtggctgtacaagtattcgattcagaaggcatacacacttatacatgccctct

SEQ ID NO: 451299 - DNA, 122 bp, Homo sapiens
ccacgtggaggcagcggcaggagaaaaagcagctgggcttcttctgaacccaagccctctcgactgcccctatcccctggaccccaacatacctacaatgctggggaggccctgcttccact

SEQ ID NO: 451300 - DNA, 122 bp, Homo sapiens
cttgagcctgagaagccaattcagattcaaccctgaatttggttgatttggattaagtgacgcaaaaagtcaatagaaccattgaatttcagaaatcataaagttgcactatgccaaagaaa

SEQ ID NO: 451301 - DNA, 122 bp, Homo sapiens
attatgcaaaatattctcgtggtttctcatcacatttgtcactaactccaagttcctggccgtggtggcctagaaggccctgcatgctctggcctcttccatctctctgatctcctttcctg

SEQ ID NO: 451302 - DNA, 122 bp, Homo sapiens
tccagtgaaagcattaccaatggctcatctaagccatttcgtcagtctccaggtgtgctccgtcttcctgtattttgaaattactcttcctgccacccaccctgatccctttgcttgctttc

SEQ ID NO: 451303 - DNA, 122 bp, Homo sapiens
gctggccaggacgcggccacctggttctctgccttgctgcagccacagtgatccttctgacgcgaacttcggacccagctacttacttttctgttcaagaactcacactggcgtcccaggat

SEQ ID NO: 451304 - DNA, 122 bp, Homo sapiens
gatgtgagtctaaatccaaggtgtaccaccaactaactggtgaccttgagtaagttacttcgtctctccaaacttcaaattccccatttgtaaaagagaaataaaaataaccctatccacat

SEQ ID NO: 451305 - DNA, 122 bp, Homo sapiens
accatgacaacaccctgtggtgactgcagtgtaggagaatgcccaggtgtggtgggagcacgcagaagggtccccacccaggaaaggagcaagcgacgtcaaagctgagcctttggaatggg

SEQ ID NO: 451306 - DNA, 122 bp, Homo sapiens
acctgcttgcattcatcccctcctcctcatctctcccttgctgagaggcagcgtgcctgccgaacgcttcgtgctgtttctgcaatgctcacttgcggtcacatagttagacatccggatga

SEQ ID NO: 451307 - DNA, 122 bp, Homo sapiens
ctggctccaatagcaggatctgtcattaactaaagcggcagtgcttaactactatcaatacggagattgaaaactgaaaagtgtaagatttgcctcatacaggacacctgcaggcatcctca

SEQ ID NO: 451308 - DNA, 122 bp, Homo sapiens
atgccgccgagcaaacctgggcagcccagcgctcctccagcgggcagcacagcagacgcccgtgccctcagagtctgtagcgtgagagctgggactgggtctaatttgcctgtagatccctc

SEQ ID NO: 451309 - DNA, 122 bp, Homo sapiens
gtcaggaagccccaccttggtgcccccagtccccagctgtgggtgagtccagtctctggccgtccatggttgaagattgactgttcacttattcaggaccgattcaaccagttaccttctgc

SEQ ID NO: 451310 - DNA, 122 bp, Homo sapiens
tccccggaagcagtcagggcctgcgggggtttatgtcacaccctggctgcacgtggggatcgtgtctaagctttttggaaatgtcgatgccggactccgccccagacctggagctaggaact

SEQ ID NO: 451311 - DNA, 122 bp, Homo sapiens
acttgggaagcgtcccgcccgctagcccgacccctcggcctcccgccccgcccccggcggcggaaccccgccccttgagcgcagttgtcccgtccgccgccattttgggaaggtcgacgccc

SEQ ID NO: 451312 - DNA, 122 bp, Homo sapiens
cccggccaggagaaaaagggcagcgggggatgggcgggcgcgccgggcgttgccaggctacggccccccagggagcgcgggggcgcgccgggccgccaggggccgtcaggggccgtgggccg

SEQ ID NO: 451313 - DNA, 122 bp, Homo sapiens
aaccctagtgatggaataggcccaaaacatagcaaattgacagactgggctacctgaatccgaatgcagaagctttgaaagtaaaaacaaaatcttttgcaaatcgagtttattctttcctt

SEQ ID NO: 451314 - DNA, 122 bp, Homo sapiens
gaccctgccccacactagggcaggtgggtgtgagagacagggcgccgcggctccagggaccgaggctgccccgacaaacctgttgcttgggtttgggtttgggtttgtttgcatttcaactt

SEQ ID NO: 451315 - DNA, 122 bp, Homo sapiens
caaaggatttacgttttgttctatgaagaacccagttcttccaaaaatttctacaactgacgatttggaaataaaaataacgctcatctcataaaactttgcacacagatagtatgaacctc

SEQ ID NO: 451316 - DNA, 122 bp, Homo sapiens
acacgcggttggggtgctggacatgcggtggggggctggacacgggggctggacacgtggcgggggctggacacgcaggggggctggacacagcagggggctggacacgcagcaggggggct

SEQ ID NO: 451317 - DNA, 122 bp, Homo sapiens
gggggcacccagggcaggctggtcttgagcctggagaaggctttgctcagcacgcgcatccgggcacgctcacgggcgttggccgcgttccgctgcgactgcttgcactctgcggctgagcc

SEQ ID NO: 451318 - DNA, 122 bp, Homo sapiens
atggctttagcagataagagacttgagaacttacagatctacaaagttcttcaatgtgtgcggaacaaagacaagaagcagatagagaagctgaccaagcttggataccctgaactaatcaa

SEQ ID NO: 451319 - DNA, 122 bp, Homo sapiens
cagtggcaaagtctgggcagggtggacttgactgcattggatattctctgttcctttacacgttgctcttggcatggcatgccaccagagggggctggaggaggggctggccgatgaggaga

SEQ ID NO: 451320 - DNA, 122 bp, Homo sapiens
agagggggctgcgaggggagggtgcccctaccagccggggactgggcttgtgggtggcggcgggggcccgctggggacgacccgcccctctggcagcctcttgcagccggggagccgtgccc

SEQ ID NO: 451321 - DNA, 122 bp, Homo sapiens
tcactctaaacatattttgttttccaattgttccctttccctattggcatattatataggcgaaattctcccttcctgatccccaggtgtagcaaaaagtgccttctaaatgagaagtcttg

SEQ ID NO: 451322 - DNA, 122 bp, Homo sapiens
caacacaatacacacacacactccctcctccctgcgaacatgccgtggagcccgccccctcggaagggagcgcctgggcttctcgctctcgccattacctgtcatctcggactgcgcacttc

SEQ ID NO: 451323 - DNA, 122 bp, Homo sapiens
cctggatggggccggatccgaggggagggcaggcacctaaacacttcgagtacccaatggcgtgccgcatgacacttgctatgaccttggcatcaacacgggacccggctcgtgatgggcaa

SEQ ID NO: 451324 - DNA, 122 bp, Homo sapiens
agaactcagcttcttgctccagactcttctctattcttcaatccagtgaaggctcataaacggaggttctatcttgacccctggtcatggggaaggcccaggggatagagacagaagtctct

SEQ ID NO: 451325 - DNA, 122 bp, Homo sapiens
cccgggggaatacactgctgctggaggcgaaaggaaaagcaaggggcctcgcaatcggagcgtgagagaggacaaaccagcaccggaactgactagccagctctgtgttagcatggtgctat

SEQ ID NO: 451326 - DNA, 122 bp, Homo sapiens
tgcttcctgataagtgtgtctttgtttacctgggtgttgaggtcacacctgataatctaacgatgtgatttatgttgaggcctggggaccacaggtgtcaactcaacatccagaagggcttg

SEQ ID NO: 451327 - DNA, 122 bp, Homo sapiens
gcgcaccaataggagggcagtgggtgggggcgccctcgtccgcgcccaattggaggctgccgaggcggggccgagccgcgaagcccagcccccttccagcttaccggctccccacgtccgga

SEQ ID NO: 451328 - DNA, 122 bp, Homo sapiens
caaggaaatctctctgcaaggcattctccctctccacagtctactgcctttttatatccccgatatgcctgcaaagtacaaaagatgtggaactggttctttaaattttctttttaaaattt

SEQ ID NO: 451329 - DNA, 122 bp, Homo sapiens
caatttaaatgttgaattgcgatagacaggagagactagacattctgcatttgtctgggacgattcaaacctaaaacttggaccttatcttatgatgtgaaggaaggactagaacaaaggta

SEQ ID NO: 451330 - DNA, 122 bp, Homo sapiens
tgaggtatagcggggttcagtatcccgcccatggtcatgcaggtgggaacaggagtgttccggctccgaagtcctggctcttggaagccacactaaaggctgcgtccttccagggcgcaact

SEQ ID NO: 451331 - DNA, 122 bp, Homo sapiens
gtcgccttcaccaggccatgagcacgtgaggcactttctaagcactggttgcccgggaggcgcaactgctcagacgccgaggcagctcaaagggctccgacgtgcggtggctccacggggtc

SEQ ID NO: 451332 - DNA, 122 bp, Homo sapiens
agccggagaggacagagctccctctggggccctgggctccgcgccctcttctgagtccagcggggctgtgatgagccctcccaggcctggggcccccccgctcagtccagccttcgctcgct

SEQ ID NO: 451333 - DNA, 122 bp, Homo sapiens
gagtagaaagagaggaagcaagctcttgtgcgtctcttcttataaaggtactaatcccatcgatgagggctccaccctcagaacctaattatctccccaaggacccactccaaatatcatca

SEQ ID NO: 451334 - DNA, 122 bp, Homo sapiens
tggtgctggccacagtgccccttctgggcgccgcctgctgccatctgctggctaaacacccgggcaagccctaccgtctgatcctgcggcctcaggcccctgaccctatggagaagcgcatc

SEQ ID NO: 451335 - DNA, 122 bp, Homo sapiens
gaaagggccgggggcctggaggaggacccaggtgatccccaggccaggtttcggggactgcggccccccgagggggtctcagcttctgggcgctggggttgggcagccgggaggccgcccct

SEQ ID NO: 451336 - DNA, 122 bp, Homo sapiens
cgaaagttgcaagatctggggggacagggggcgggggccgcccggaggaggggctcgaggcggggacccccactcgccagtcgccacgggacccctacccacgatccccccccgcaccccgg

SEQ ID NO: 451337 - DNA, 122 bp, Homo sapiens
ccctcgccgccgggccacacctgttacaggggcgctggctgctgagacgcaggcagtgctcgccggcggcccctcccaggtgctgggtctttctggaagggagctggggtctctggcgtggg

SEQ ID NO: 451338 - DNA, 122 bp, Homo sapiens
atccactctacccgggggccgccagccgcacgcagcctcggattcgccctgcacatctgccgcccagcaggtaccatgcgccagccactccgccgggcacaccgcagaccctgagctaaggc

SEQ ID NO: 451339 - DNA, 122 bp, Homo sapiens
ctcttgaaattgaaagttattgaggtcgctcagggttgttgctccagcagtttccttccccgcccccgagctcccccccgccccccacagccatcccccctcctctccccctccctgccctc

SEQ ID NO: 451340 - DNA, 122 bp, Homo sapiens
gcaaaagagaagacgccactccaggaaccccgggaggtataagggaaccctgtttagtaacgctgcatgtgcaacagataacaggtagttcacgtgcacagacgtgtgcgaacatctatgat

SEQ ID NO: 451341 - DNA, 122 bp, Homo sapiens
gacagggggaagggcggggcgctgagaggcgaggccggcgtcttcttgacaatgcggtagcgggtcttgatcaccttgctggtgggtgcagtccgcacggcatgcaggctggacgctgtaga

SEQ ID NO: 451342 - DNA, 122 bp, Homo sapiens
aaattacaggatgtgtgaggtgcctttttcaaacaaaatcattaagagcatcaagactgtcgtcattagaggacacaaattggatttggtcttctctgtgacacttggttttgaatcctttg

SEQ ID NO: 451343 - DNA, 122 bp, Homo sapiens
ccccatccctccctcccgcctggatcaaattcaggtgactaagcgcgtctgcgagggaggcggccggccggggaggcccgaggttcctgccgcgtgtccgggagacagggcctggcgccccg

SEQ ID NO: 451344 - DNA, 122 bp, Homo sapiens
cttttgccccacccaaccggtgacacagcccggggccccgccgccccctggcggccattacggatttccgcctccctcacagaaggcagtcactgcaacgtgcgtggcctcagttgcgtcat

SEQ ID NO: 451345 - DNA, 122 bp, Homo sapiens
aggcagtttcccattctcctttctggctgaaaaccgctgtcctgggctcagttgaagatccgccccccatctgacctcccagactggttaatcatcctccatggctgagccactcaaggatg

SEQ ID NO: 451346 - DNA, 122 bp, Homo sapiens
ggcccgaaacgccacaggggcgcccctcgcgagactcctccggagccacgcggcgggcagcgtttgctgtgtgaagtgacaggagcccacacgcctccgcgtcctcaccgcgcgagggcccc

SEQ ID NO: 451347 - DNA, 122 bp, Homo sapiens
gtaaattctttggacctagcagtgggatctctagacttcagcgcagggcacctctgctttcggtttctgtctggctctacgtgccgtgggggattgagaggcatctctggccaggccaaggg

SEQ ID NO: 451348 - DNA, 122 bp, Homo sapiens
aaaatgtttaaaagagcaaggacaagcgcatttacggcatttcctactctgtaaaatggccgcgcccatagccgtggctcctgacggcagccatgtttgaaaattggacgcacagaaggcag

SEQ ID NO: 451349 - DNA, 122 bp, Homo sapiens
gctgccgccgggaggcgacagagccagctgggcgcacctgggtgctggcggctgcggagtcgcggggcccggtcctgaggtcaccttcccaccccgacctcacgccccttcctggtctgacc

SEQ ID NO: 451350 - DNA, 122 bp, Homo sapiens
gtgtgccaggcggggcggggcgcggcggggagggcgcaggctccttcccagaagcaaaagcggaaacaaaagagtctcgccggcgtccccgcccgcacactcgcgcacactcgcgctcgggc

SEQ ID NO: 451351 - DNA, 122 bp, Homo sapiens
aatcttcctctggttccctggggaggcctgctctgggcagagagatcccaggggactgtgcgggaaggagctaaagcaatagcccaaaagcgccagggaatgcacttgaagtttcagacgtt

SEQ ID NO: 451352 - DNA, 122 bp, Homo sapiens
gggatgagcaatgatttcggtgggaaacgtaacaactgagcaggagtcagccttcgaacacgattccaagaagtctccctgcccaaaaagagcaggcgctggccgcaagtgacaagagacga

SEQ ID NO: 451353 - DNA, 122 bp, Homo sapiens
ttacacaaacatttccagggttcctactggttggaaagcactcattatccaaatgaagggcggagaaatctcagactttttctacttcagaggagccattcctttcagcttttcacattcac

SEQ ID NO: 451354 - DNA, 122 bp, Homo sapiens
gcgagcgcccccggctgctgaggcgggaccgaggacccggagatttgagccgcgggtgggcggggaggggcctttgtgacctgcccgcccctccccggcactgtgatgccggggggcagctg

SEQ ID NO: 451355 - DNA, 122 bp, Homo sapiens
agtgtggatcccatgactcctcagggaacccctggactcaggcacgcgagaagaagacagcgctttgtggagagaattgaccagggacagttatgctcgagcacacaggacttgggcctgta

SEQ ID NO: 451356 - DNA, 122 bp, Homo sapiens
tcttcgtgaaaggatctgctgtagtccctctggcgctcatatccatagtgggctgaggaccggtaggaagggttgacactatactgtccctcggtgtcattctcatagacataaccaccact

SEQ ID NO: 451357 - DNA, 122 bp, Homo sapiens
atggcttggctgtggggagggtcggcctaccaccccagagacctaggacggaaaagcgaccgagaaacttggctccctgcccactctagagcgcgtctggccccggggcaccacccaggtgg

SEQ ID NO: 451358 - DNA, 122 bp, Homo sapiens
agctcagcctccgagtcacaccagcgtagggaagcgtgatcaccaccttcatcaaggacacgcggagctcagcctccgagtcacaccagtgtagggaggcgtgataaccaccctcatcaagg

SEQ ID NO: 451359 - DNA, 122 bp, Homo sapiens
tcactgctgcatccgatattcttccggaccactggatcacaaatcaaaccatgtgactcccgcatgagcaggcagagtggagataacacggatcgctgtgtacactgtgtgctccggttgtt

SEQ ID NO: 451360 - DNA, 122 bp, Homo sapiens
gcagacaggcaattgcttcaaacaagcgccctccaagggcgtaagctagaggggcccgggcgggcgctttcccgtggaccctcccacctcgcgggtagaggaagtccttcagttcaggcaca

SEQ ID NO: 451361 - DNA, 122 bp, Homo sapiens
ggctcaactggggagctgctggagctcttctggcctctggttttccgactgcttatccgacgctcctccctctgtctctgtagctggagaaggtagtttccaggaaagttttccggtttgca

SEQ ID NO: 451362 - DNA, 122 bp, Homo sapiens
ggctcacgttcagcttttctgtcatgaaccgtgcaaactgccggatctcattgcctgagacgaggatgttggccttcgggccctggggctgcacaaagccatactggtaccaggtagtgatc

SEQ ID NO: 451363 - DNA, 122 bp, Homo sapiens
ctccgctctcgggctccccacactagacttcgggccggcaggatgggttaaggtagcactcgttggagtcaataattaagcaatggaaacaaacagcctaaataagggtgttgaggactcag

SEQ ID NO: 451364 - DNA, 122 bp, Homo sapiens
cccgggaccgggcgtcttcctgcaggcagcgggtggcacaggcctagtggaggtcgggggcgtggggacagctggtccttgagatagtctgggggatgggctaggacaagatgggaatattt

SEQ ID NO: 451365 - DNA, 122 bp, Homo sapiens
atggcggccaggggcactgcggcagaattttttcctcccttctttgctgcaatctgggtgcggctagagcaatttgtcatagaatctggggggctcatttttccggccaatcacttttagag

SEQ ID NO: 451366 - DNA, 122 bp, Homo sapiens
ggtcagtgtggtaattcttcggctgttttctctgccaacagtggatgtgcttggcaactgcggtgcagttatagggaagctagctcttgtttgactatgatggagacctctgctggctgaga

SEQ ID NO: 451367 - DNA, 122 bp, Homo sapiens
tacccctcctaccccaggctcccggctgcagcgcctggtcccagccagctatgcagatggcgtgtaccagcccttgggagaaccccacctgcccaacccccgagaccttagcaacaccatct

SEQ ID NO: 451368 - DNA, 122 bp, Homo sapiens
acctcggacggtgagagcgccagctggagacgcaggaaggaaccgtgcgctggggaaatgcgaccacatctcagacctggcatggggtgatttctcaggagaacactggaaagagtgagagg

SEQ ID NO: 451369 - DNA, 122 bp, Homo sapiens
tgttccaccccaagggaccctgcgccacacgttctcttgcccctcctccatccgtgggagcgtggcctgccttccgtttctggacgtgtcacagacactggtcccatgctgtgcgtccgtct

SEQ ID NO: 451370 - DNA, 122 bp, Homo sapiens
ggctaaggcagaagaatcacttgaacccgggaggcctcaggttgcagtgagcagagatctcgccactgcactccagcctggatgacaaagcaagactccgtctccaaaaaacaaaaaaagac

SEQ ID NO: 451371 - DNA, 122 bp, Homo sapiens
ccctcccggccccccgacctggccgcgtccctctccccgcccgcagctgcgcgaagcttccgccattgctctggggagcccagatcccagcttcccacttgaggaggggcgggggatcgagc

SEQ ID NO: 451372 - DNA, 122 bp, Homo sapiens
ctcaactccgggttaattattaatagacgccccaccgctcagagtggcgatgggtgcacccgagtcctcaccaacacccctgcctggcgggatggccagtcatctggggtcctcggccctga

SEQ ID NO: 451373 - DNA, 122 bp, Homo sapiens
tccacactcgcgacatcgccatccacgccgggtccacactcgcgacatcgccatccacgccgggtccacactcgcgtcatcgccatccacgccgggtccacactcgcgtcatcgccatccac

SEQ ID NO: 451374 - DNA, 122 bp, Homo sapiens
cggcacagattttgaagagacacagactttgaaagaaatgcaagacgcgcaggtgcggagcgtctcccagccccgcacggccatgtcctgctgaggttggatagaaacatttgagaagaagg

SEQ ID NO: 451375 - DNA, 122 bp, Homo sapiens
ccgatgacaaggacttggggcctggaagcaccactttcattaaccagcaaaaaacaaggccgaaaccacagagggccagaaatcactcaaggatacccgacctcattcaggggatagaggcc

SEQ ID NO: 451376 - DNA, 122 bp, Homo sapiens
caacagttatgtaagaaacagacttaaaagaagtctttattgttggaagtctttattattcgggaaaacctggcatttactgaaggtgttttttacatgcactgggttagccaatgctattg

SEQ ID NO: 451377 - DNA, 122 bp, Homo sapiens
ctcgcagcgcgcgttcccattggccgagcctcgtggcgcggggagcgagatcccgtcccccggtgggtcttgggcaactcacagctgggctgccaacacgcgccccctcgcgggctccctaa

SEQ ID NO: 451378 - DNA, 122 bp, Homo sapiens
aggcgcatgcgtgttccgtctgcagctgcagacgcccatcctgggagtggacaccagcttcgttccctctcagcccactcgggaagcgccacacggcttcggcttcggacgatccagggccg

SEQ ID NO: 451379 - DNA, 122 bp, Homo sapiens
cacggctccggaaacgcgccgcggggctgttagctcggctgggcacgggcggctccgtggcgcttcctgccacgccaggcctgcctgggccgcgccagcgccgctccaccgagggccgcgcg

SEQ ID NO: 451380 - DNA, 122 bp, Homo sapiens
gagggagtcgagccgggctcacttaagggctacgacttaacgggccgcgtcactcaatggcgcggacacgcctctttgcccgggcagaggcatgtacagcgcatgcccacaacggcggaggc

SEQ ID NO: 451381 - DNA, 122 bp, Homo sapiens
gcaagcgagcgagcaaggagcgagccacggagagagccggggagcgagcgagccagcctgcgagcgcgagcggccgcggaggctcgggacccggctggccgcgcggcgccgcagccgccccc

SEQ ID NO: 451382 - DNA, 122 bp, Homo sapiens
tccgccgccctaggccctccctactcctgcgcgcggccctcggctgcgcgtttaaaactccgagccctaacgtgaggtgcccccttctgattggctgcgccacaaccaccaatcagcggctg

SEQ ID NO: 451383 - DNA, 122 bp, Homo sapiens
atgtcttttcttcttcgcagtctttgcccgagcgcttccgagagccagttctggactgatcgccttggatgggataccgggggagggcagaaggacacttggcttcctctccaggaatctga

SEQ ID NO: 451384 - DNA, 122 bp, Homo sapiens
agcccctttacctactgttaatggctgctctaacactacaataaaattgggcagttgcaacggatactgtattgactcacaagtcaataaagtgtttgctatactggccctttacagaaaag

SEQ ID NO: 451385 - DNA, 122 bp, Homo sapiens
cgcctattagaatcacctgtggccaggtgctttaaaacatgccgatgcccacccccaccccgatccattgaatcagaatgtctaggggatgggattcgggcttcagaaaaaaaaaaaaaaat

SEQ ID NO: 451386 - DNA, 122 bp, Homo sapiens
tcccttctggcaggtcatgatgacaagaggcagctaatagatgcaatctatctgcattcacgaaggcagttttgagttccacatgacatgctgtcaatagagtcaaaagatatggcccttta

SEQ ID NO: 451387 - DNA, 122 bp, Homo sapiens
cgcctgtaatccctgcactttgggaggctgaggcaggtggatggcttcagctcaggagttcgagagcagcctgggcaacatgacgagacattgtatctagtaaaaatacaaaaataatcagc

SEQ ID NO: 451388 - DNA, 122 bp, Homo sapiens
gttcccagggctgaaagcccatcacagtcatctgtgaaggcgtttaaaaatacacatcaccgagcgcatctctggattgggattcagcaggtccagggcgcgtgttatgttttttgttttaa

SEQ ID NO: 451389 - DNA, 122 bp, Homo sapiens
cccagcctctgagcatccgtgcaggtggtgccctgtgcctaggccttcctcagacccccacgaagcgccacctctccaggaagtcttccccaggatgatgttgcaacctatggcttccaggg

SEQ ID NO: 451390 - DNA, 122 bp, Homo sapiens
ccttactctacgctggcctgtgcaaggcaaggcggaacaggactccaacgttcctacccgcgctgcgcaggctcgcctgcacttccacccatgccccgcgcccctttcgctccacaagctcc

SEQ ID NO: 451391 - DNA, 122 bp, Homo sapiens
attactacaaatctgaacccgaagagaacgctgttcttcttcattttgaattttcaactccgcttgggcctacaggcatcccttccctaggtatttctaagggcagaatctcataacagact

SEQ ID NO: 451392 - DNA, 122 bp, Homo sapiens
gaggagagcgccctgtgagtgcctgacaaatggaggtatttctttccaggttttacaacccgatgtattttcagggaggaccttcctaggtacctccacttctcagtctctcaactcagcag

SEQ ID NO: 451393 - DNA, 122 bp, Homo sapiens
ccgcccttcaacgtagaagcaaccatctcggtgcccaaggtcaagagagacaccgaagcccggaaatgccctaagcgggaatcttcggagcctgcccattggcttctgctgaacgggagggt

SEQ ID NO: 451394 - DNA, 122 bp, Homo sapiens
tccataagcccctactttaactggagggccacaacgacattttgggtaccctggaatcaacgtcagctcagagccagagtccagtagtccgtgaaatatctgatcatttatctttcctcaat

SEQ ID NO: 451395 - DNA, 122 bp, Homo sapiens
cactctactgacaagcggtgggcggcctcacagactctcccaggcccgcgtggggcaccacggttgggagtggagtggagactggcgagtttcgactcccccagccaccccgctgtgggtcc

SEQ ID NO: 451396 - DNA, 122 bp, Homo sapiens
aggagggaggggccaggcagctgagggccaggaaagatgtgaaaaactctagctggtgaccgagaggaggagtagagtgtgcccttagttcatatgaactagagggagttggtatttgcaca

SEQ ID NO: 451397 - DNA, 122 bp, Homo sapiens
ctggaaaggggccccagccagttggggagtggatggtgcagctgctggggctggcagaggcgggtggtgctgatagaagcaagtctctgcctaatttaagctcccccacaccatgggtgccc

SEQ ID NO: 451398 - DNA, 122 bp, Homo sapiens
ttctgcctcccaagggcacttgctggatttgctgaagactcgagggaagaacggggccatcgccttcctggagagcctgaagttccacaaccctgacgtctacaccctggtcaccgggctgc

SEQ ID NO: 451399 - DNA, 122 bp, Homo sapiens
cttcccttcccagagtgaagtccagtgtatttctccagtgttatgggccgaatgtgtccccgaccaaattcatatgtcgaagccctaactccaatgttacagtatttagagatggggcttct

SEQ ID NO: 451400 - DNA, 122 bp, Homo sapiens
gggagaggtgcgagcccgcgcgaagggaggggcccgcggcctgagggtgccgggagagagcgagactgatgaccacgaaaaaagaaacctggagactagaggcgaggaactagctttaatgg

SEQ ID NO: 451401 - DNA, 122 bp, Homo sapiens
ggggctgcagggaggtgttggggagagggcgctgaggacgctgaagccgcaggcgcatcacggtctcagcaccgggccacgttccacagtgcagaggccattctctacaatggcccacttaa

SEQ ID NO: 451402 - DNA, 122 bp, Homo sapiens
gacagtgcgattccatcctgttctcaggtgtcacctcaggttcatccttctgagttcccacgggtcaatccagagacccaaagcctccgtcctcacacagatgctggcgatcattctatttc

SEQ ID NO: 451403 - DNA, 122 bp, Homo sapiens
acccttcatgaagggttcagcaccatccccttggtgctgtcctgggacagagttctcttgcgatctggttgtttaaacgtgtgtggccccttccccctctcttttcctcctcctcctgccgt

SEQ ID NO: 451404 - DNA, 122 bp, Homo sapiens
atgcatgtgtaaactatacattagactacaaaattatcaccaagggtttttttatataagcgtttttaaatcagtgtgttgctaggaggaatacaattaaattgctcagtggaagtgacagg

SEQ ID NO: 451405 - DNA, 122 bp, Homo sapiens
ccccggcctcaggctttccgggctctgctgcctccagaaaactacaagtcccaggatgctcggcgcgggacggtcacgtgggaggggccgcgggcgcggctaaatagtctccatcggccatt

SEQ ID NO: 451406 - DNA, 122 bp, Homo sapiens
agcacgagaaagacctgccctcatgacttaattactttctgccaggtccctcccatgacacgtgagaattatgggagctacaatttgagatctggatggagacacagccaaatcatatcaag

SEQ ID NO: 451407 - DNA, 122 bp, Homo sapiens
tctaacacgaaggtggaaatcaattcgctttccccttctaacccttgaatccctggagaacgatcgtatttggatggcctacgaatgctcagctttccagtagtgccccagacgaggaatcc

SEQ ID NO: 451408 - DNA, 122 bp, Homo sapiens
ctccagcatcaggcctcagttttcccatctgtaaaagacagccatgcaaagtgggagatccgctaggcttccagatcgaagtcatcgcgctcctcattgtactctagcacgtgccgcttgat

SEQ ID NO: 451409 - DNA, 122 bp, Homo sapiens
ctgccaggacgtgaggtgtctttaagggcggtgatacgggggcccatgaaattctctacacgtcggtcccgttgggtggcctaggggaagttcacagtgaaactcgaccacagatgagcgag

SEQ ID NO: 451410 - DNA, 122 bp, Homo sapiens
tgtgataggagcggcttggcctcctgactccaggggcctgggagaggccatccttgtctccggcttggaggagagatgcaggaggatcgcccaggcagcaccggccccacccgcttccggaa

SEQ ID NO: 451411 - DNA, 122 bp, Homo sapiens
ggctccggcgtcggcgggggcagcagcagctgaggcagcagctgaggcagccgcgacggccgcgcccccccccgctgacctggattaggcccagcagctccgtggccgccgccgccccgcgg

SEQ ID NO: 451412 - DNA, 122 bp, Homo sapiens
tgcagtgtgataactctctccccccaggccccctacttcctgtgacctcacattctgagacgcccagcctctgatgaccatgtgtggagtctgctggaaacaaccctctcctcaaccctcct

SEQ ID NO: 451413 - DNA, 122 bp, Homo sapiens
tggatccaggctagaaacccagtgtcctggctgtggggccagctttttttctgctgtgcccgattttgtggtttgtctctctggtgctctggagtagcatgtgtgggaaggctgaacggaga

SEQ ID NO: 451414 - DNA, 122 bp, Homo sapiens
gaatgtgagtttacacagaagacagacaggcgcccgaggaggcttctctgggaaccagttcgcctgtaccagagggggcccgagaaagtgtggagtccaacagtccaactcgctcattttac

SEQ ID NO: 451415 - DNA, 122 bp, Homo sapiens
gtctaaggagacctgtgcctttctgttaaaatggaaaaagggcatttgagaaagaggaggcgggaaaggagaagctgcgataaggcctccagccaaggtgccttctcaggctgatcactttt

SEQ ID NO: 451416 - DNA, 122 bp, Homo sapiens
gtcccctagtactccaggtctgatcctcaactttgggattttcccagggcctcgtggccacggggagtggggtggggtggaagccggggtggccaggggaggccgaaattcaatcacagccc

SEQ ID NO: 451417 - DNA, 122 bp, Homo sapiens
tttgcaggcctttgttcccgccaggagggcccccggagctaataaaaaggtttgtggctccgatgtctaagaggcagtggaggagttctttcaagcctgacattccaggcccagccggcctc

SEQ ID NO: 451418 - DNA, 122 bp, Homo sapiens
tgatgaagggatttacctgctggcctcacaacctgtggacaagtgccagtcccaggacggcgcggaggctgccctccaggaaatcgagaagtttttggagaccggtgcggaaaataagatcc

SEQ ID NO: 451419 - DNA, 122 bp, Homo sapiens
tatcctctagtcttctctgattgtttcccactgtaatctctttgtattcaataggatcctcgggcatggacctttccaagctataaagtcactcttctccagcaggggagcagagcttccag

SEQ ID NO: 451420 - DNA, 122 bp, Homo sapiens
ggttggcgcagagcaacacagccgggtgactggctccaggttcaagtgctgagagtggctcgaaattcttctaccctgggggtggggctctaggggtacagcctttctggagtgcaagttgg

SEQ ID NO: 451421 - DNA, 122 bp, Homo sapiens
atcctgagcaaatgcggccaaggggcctgcctcggccttgtcctctgtccacactctgcccgcatcctcacctgcccgccacactgaggtcacgcctgcccgccacactgaggtcacgcctg

SEQ ID NO: 451422 - DNA, 122 bp, Homo sapiens
gctggcatttaaaccaccgcctggggctgcaggatgctgctgcggatgcagagctgtccgcgggctgggcagcgtcgccgtctcccctgagccgcctcggtccggcaggagcggagccgaag

SEQ ID NO: 451423 - DNA, 122 bp, Homo sapiens
gtgcagtgcagttgctgccatgcggtcccctcgcccttccacgggcaggggcgaggcggccgggcagatgttgcagctgtttccagttaactgcctgagctcctctgggctaggctcttctc

SEQ ID NO: 451424 - DNA, 122 bp, Homo sapiens
tcccacaggctcctggccgccgcgagcccgcgcgactcgcacgagcatgtccacccgcagcgaggggccggtcactgctacggagcccgccagaaggcaaagccccagacagcaaataggga

SEQ ID NO: 451425 - DNA, 122 bp, Homo sapiens
agactggctatctccaggccagcagggaggaccccgctgtgtggtcacggctcacactgccgggccctgtgaacacacccgttcccgacagggcctggatccagggcagagtgcaaagctgg

SEQ ID NO: 451426 - DNA, 122 bp, Homo sapiens
caagatccatcagatctgcccctacttttaaacaggtaacacaaatgcagaacttttcaacggggtaaaggagcaacaaatatgccttaaatagccaaaggtttcatccagcagaggttaac

SEQ ID NO: 451427 - DNA, 122 bp, Homo sapiens
ttcttaaagagaaaggccccgttgatgtgtattcctcccaaatggaacttaattaggccacgcatgttcatgcactttgcagacaccagaaaacccaatcctttctgtattcctagatccag

SEQ ID NO: 451428 - DNA, 122 bp, Homo sapiens
atctctctccactccagtccagcctgagacctgccaggctattcccaaaataactcttctcgtgtgtcactccctgccccaggcgcccgacaccttccccgccaagctctctgttcccctgc

SEQ ID NO: 451429 - DNA, 122 bp, Homo sapiens
gcgctgtggagaggtgaacagaacgggcagagagggctttcttacgactgttggcccatccgagaaggcaggagcggaggagccccatgtgaaatgaaaaagcaaaccccatctatctgttg

SEQ ID NO: 451430 - DNA, 122 bp, Homo sapiens
ctggcccccctcctgtgactcctaacggctcctcacggtgtccatgacccagggtgtggacgcctgcgcgggggaagcaagaccgctgcgtatcgggtccctattcactgcctgtttttctg

SEQ ID NO: 451431 - DNA, 122 bp, Homo sapiens
ctccgcctgagttcctgcacgcatttcctgaataaacacacccctgtgccagtcagaacccgcgggggttttggaagtgagagcccagcaaggcagctggccagggggcggcactgccctcc

SEQ ID NO: 451432 - DNA, 122 bp, Homo sapiens
tctccaagtctcggttctcatacagcagtgtgttggcgcagatgaacacgaacaggccgacgcccatgatcaccggcccgaggagccgcagccgctcgtgcgggccgtgagcccggcccccg

SEQ ID NO: 451433 - DNA, 122 bp, Homo sapiens
cccacatacccatcatttgtgtcactggtgaagaaaccagggcttttaaagggctcctttcgatttccagcttattcctccccagagccgtggcaggggaagggaggccagtcccacccagg

SEQ ID NO: 451434 - DNA, 122 bp, Homo sapiens
tcgcccccagggtggccgccggggcgggcgggatgggggttggcggggaaaccaggctcccggctcccccgcgaggctctcccgggggccgcctgcagggggcgcacgcgcgcccgagagaa

SEQ ID NO: 451435 - DNA, 122 bp, Homo sapiens
ctccgtcctgcggctctgggtgccatcctgttcctttgagctcagtcagcctcctgggctcgtctctctgtgaatctcctgtgggacatagggagagatattattcaggctttgccgtagta

SEQ ID NO: 451436 - DNA, 122 bp, Homo sapiens
ctcaggtgatccgcccgcctcagcctcccaaagtgttgggattacaggcgtgagccaccacgcctggctggatagtacatactcttgatacgatgtgatgagaagggagctttatctttgtg

SEQ ID NO: 451437 - DNA, 122 bp, Homo sapiens
ttgtattttctagaaaaaataatacaacaaagacgtattgataatctaccacactatctacgttgaggtatctggaaccacagtggtatgaattgcactatctccctaatctttacactaat

SEQ ID NO: 451438 - DNA, 122 bp, Homo sapiens
taaattttaaatgaccatccacgtgccatctccagttttctcatgtgctaccgtttgcttcgggtttatagatttcttggaactgacatgggagggtggctaggacacagatgggtgcagtg

SEQ ID NO: 451439 - DNA, 122 bp, Homo sapiens
ttggctgtccggacggtgcagcggcgaggccggccgcgaagatgccagtggcggtgatggcggaaagcgcctttagtttcaaaaagttgctggatcagtgcgagaaccaggagctcgaggta

SEQ ID NO: 451440 - DNA, 122 bp, Homo sapiens
tgcctggcatctgtctgctgacgcctctggcttgcgccaggacttggcgtgggcaccgggcgcccccatcccagtgtctgtgtgcgtccagctgtgttgcacaggcctgggctccccactga

SEQ ID NO: 451441 - DNA, 122 bp, Homo sapiens
cacaatttacaattatggttttttccccctgcagtgtttatcatctggcttcctcacagacgtacacaccaagaagtcaagaatcatttctgtcctcttcaccattttagatgggtgcccag

SEQ ID NO: 451442 - DNA, 122 bp, Homo sapiens
aaccttgcaactaactttgggtttatggaaacctgttgcgcgtccagcacttgggaaacccgtgaatggacacaaaccttcctttctttcgtcaaggagggcaagtccggctgagacagaat

SEQ ID NO: 451443 - DNA, 122 bp, Homo sapiens
agggagtcctgctagtcgggggtggctggagacagatgcgggggtgggctcctccccatccgggaccctccccagcctccccatagcgagcggctatgagggctcggaggctggggaaggca

SEQ ID NO: 451444 - DNA, 122 bp, Homo sapiens
cgtttcggtgcggggggaatttattactcagcccgagtccaagatggcagcgagcgctgacgtcaccagatctcgtgagagcagaagggcgcgatttggaggctcccgcgcttcggagacgc

SEQ ID NO: 451445 - DNA, 122 bp, Homo sapiens
cgctccgcccccataaacagcttccgcctctgccattggccagcacgtctccaaggagaccgcgggcacttgccactctccctggcggcaactctcttcgaactccctccttctgccgccct

SEQ ID NO: 451446 - DNA, 122 bp, Homo sapiens
gcttctttcaaccctgattagttatgggtgaccaggagcccgcctatgattggccagcttcgcgatccagctagaggctcactggccgcggtccctagtggtacagcgtttcctcccggcaa

SEQ ID NO: 451447 - DNA, 122 bp, Homo sapiens
tgtgtcgctgttgacgggcactgcgggtgaggatgagaagtcagcatcgccgaggtccaacgtcgcccttcctgctaacagcgaagatggtgggcgggccattgaaagaggtccagccgggg

SEQ ID NO: 451448 - DNA, 122 bp, Homo sapiens
ccccgcgtgggcggcgaggacctggcctccctggagtgcgagcgtgcccgggcgcactagcgggcccgcagggagctgctggagatccagagcctgctcgacgccatcaagagcgagatgga

SEQ ID NO: 451449 - DNA, 122 bp, Homo sapiens
ctgagtttccttatctgtgagacagctgcgaataccggtttccagagagtagttaagaaccgtaagttctcagtaataaggctttttcattcaacaagtatttgtcgtgtgattgatgtgtg

SEQ ID NO: 451450 - DNA, 122 bp, Homo sapiens
actcttcacataactctcttctcagccgtaagcctcactccaagtgctgagaaagtgcagcgtgccaaagcggccagcctcagcctctgtcttgtgttctctcgttctttccagagacaagg

SEQ ID NO: 451451 - DNA, 122 bp, Homo sapiens
ttggttatttttcatatttagtcaatacaatcttctctatgctttttgaaaaatctgtaccgtaaaccttagaggggaaacagtgaatccaccatgtcttgcagaggtccaaaaccaagtta

SEQ ID NO: 451452 - DNA, 122 bp, Homo sapiens
tgagccaccgcgccaggcctgagtaatcctaatcacaggattttaaaaagaaacttcctgcgccacccattaaacaatatctcctaccaatttggtagtaaatattttgctaatagtaccta

SEQ ID NO: 451453 - DNA, 122 bp, Homo sapiens
tggaagcactaataatgggcgcatatcctttgcatttatgggaggagcctgctttgaaaccgcaattagtggtaccgttgcaacaaaaaaaaaaaaaagaaaaagaaaaaaacttgtcttac

SEQ ID NO: 451454 - DNA, 122 bp, Homo sapiens
atttatattcatctactttgaatcgccttttatccacctttgctgctacagcccaccactcgccattcatcagtttatgcattgtgcgccagggcaaataatgacagaatatctagctaaag

SEQ ID NO: 451455 - DNA, 122 bp, Homo sapiens
atggggcctgggagacaggggcagaggcggtgacagcgagggcccctgctcgggtgggcccgcgggcctcagctcagtcccctcccgagggaccgcgacccccggccccgcggccgcccgcg

SEQ ID NO: 451456 - DNA, 122 bp, Homo sapiens
tggcggccggcctcgcccggcggcgctcgggcagctgacctggggggtgggggacaactccgctcccacatcatgccgaggctcccgtgaagaccgcgtcgtccttgccctgggacccgctc

SEQ ID NO: 451457 - DNA, 122 bp, Homo sapiens
aagggtttccagaaagaaggggttaccagaaagaagggtaaacctggctgttctgacatgcgtaaacagtgtgacttgaacttgttcctccaactttcaggatagaaataaacatttagtac

SEQ ID NO: 451458 - DNA, 122 bp, Homo sapiens
gcgggggcagtatctgaacagcccgtgcaccgcctcccgcggcccttttcccctccctcgcggcctgggcctgacttggcaggtggccacgagccgatgtctctctttgtgggacaggactg

SEQ ID NO: 451459 - DNA, 122 bp, Homo sapiens
agagcacgggccccagagagaccccgaggttcagagccccgacactgaaggcagggacagcgttgttgatctgagcctacaacaggccgagaaacagatctttcccacccggattctttctc

SEQ ID NO: 451460 - DNA, 122 bp, Homo sapiens
gtttacttgagataggattcttagggcttttggaggtggttgcagggatggggttagtctcgggcagggtttctcagctttggtaccaacgacaccttggcctggatagttctttgttgtgg

SEQ ID NO: 451461 - DNA, 122 bp, Homo sapiens
gagaggggatgttacagcgtgcacacagctcttttcgacccgcatctgctgccggactaacgggcatcttaacggctctaaacgggcgcattaacagaccactgcttcccgttgagtggggc

SEQ ID NO: 451462 - DNA, 122 bp, Homo sapiens
aatcggaggagccgtgatttggcgggagtcttgaccgccgccgggctcttggtacctcagcgcgagcgccaggcgtccggccgccgtggctatgttcgtgtccgatttccgcaaagagttct

SEQ ID NO: 451463 - DNA, 122 bp, Homo sapiens
gtttctaatatccagcgggaaagaggctgctatgactttcaatatcccagtgggtgtacccgccgcccgtggtattgctcctaatatccagtggggaagaggatgatattactgacaatatc

SEQ ID NO: 451464 - DNA, 122 bp, Homo sapiens
aatgctgtagctcatttagcctggagggttgaagtaggaaagaaatgtagatttttattccgttagctaggatgaatgtgggagacttggataccccttgacaatactgaagcaaaattgtt

SEQ ID NO: 451465 - DNA, 122 bp, Homo sapiens
cacgatcgagcaggtcttaccctgcagacagcctgttctcaggagggaccctcaggaaggcggtgggttggcacaagctgcgggtgggccaaaggtcaggggcttggagaaggagagaatct

SEQ ID NO: 451466 - DNA, 122 bp, Homo sapiens
ggcgatagagacagcgcgtcgcgcctttagcttctttcccagactccggcccagctcctgcgatctccacagcagcctctgaggccgcccccagagagcatcaggatggctgaggtcaggag

SEQ ID NO: 451467 - DNA, 122 bp, Homo sapiens
ttttcattcaaataaatttccacttatttttaacccctgggagccctctagtgtcctgttcgcaaacagactcagaaatgtcagtctcatgaagttcaaaagatcgagaatgtttgctatct

SEQ ID NO: 451468 - DNA, 122 bp, Homo sapiens
ggcaaccacgctgtgctctcatttgtttctccacgttcactgtttctcccagcagaactccgggctcttatcaaaagagatgccaccaaatacttttatttttccgttgaattacagatcta

SEQ ID NO: 451469 - DNA, 122 bp, Homo sapiens
gctgcggaacagcggctcggccgccgagcaggagcaggcgcgccgcgtgcaggccgttcgcggcagggggacccatctgctctgcaccctactcctgggccaagccggagccaacgcggccc

SEQ ID NO: 451470 - DNA, 122 bp, Homo sapiens
tcatcttgtcaaccagtttctgagcccctaccctggctgcagcacgtgctcgcacaggcgcgctgagctactaacatagaatcaaaagcagggagttgggtgttcttgctttcccgctgaaa

SEQ ID NO: 451471 - DNA, 122 bp, Homo sapiens
agccctttattgctctattataacgcggagccagatggtcttttgggagttgcccccccgcgccccccgccgccgccctcattcattcagactcagaccccggcactaatgccgcggggggg

SEQ ID NO: 451472 - DNA, 122 bp, Homo sapiens
ctttccgtttaaacaggctggaccggttcaagttcccagccagaccaggggtgggggtggcgagtgtgcgcgcgcggaggagggcgcggggggccgggaatgggcgcgctgtgggggcccgc

SEQ ID NO: 451473 - DNA, 122 bp, Homo sapiens
ctctcctccctgtgtctgtcctccggatcctctgccttccttccctctgtctttcctccccgtcctgtcagacggtcccggtccctcgtctgcggctttccaggtatctctgtccctctctc

SEQ ID NO: 451474 - DNA, 122 bp, Homo sapiens
tacctctaacccaggagctgcgcctttccctgaaggagcaggttagttctaacacagaatcgggagagcaagggaggagaaggctcaaaagagggcctcgtgcagccataaaaaagcacgac

SEQ ID NO: 451475 - DNA, 122 bp, Homo sapiens
gcgtattaacgccagactcctgcaaagtcttgccttcaacactcagcccctggggagagacgggtggagggatgactggaaacgtggcctcgacgtccctacagagcccctccagcgtgggg

SEQ ID NO: 451476 - DNA, 122 bp, Homo sapiens
agagaaggtgttttggatgcattctagaacacaggtaatctaaggagagttgatcaaggccgtggaagagtcctccagccactattggccatcaaaggagtcctctgtgtcccaggaatggt

SEQ ID NO: 451477 - DNA, 122 bp, Homo sapiens
ctttcttcccctggatatctgctcatgggtaccttttggtaactgcaggcagacacagtacgcacgtgcacatggtggccaaactcccctgcggtcggctgggaatgggtaggcgaaccagc

SEQ ID NO: 451478 - DNA, 122 bp, Homo sapiens
acactcctcagcccttgggccgtggatgggactgggcaccgtggagcagggggcgacgctcgtcggggatgctccggccgcactggagcccacggagggggtgggagtctcaggtatggcgg

SEQ ID NO: 451479 - DNA, 122 bp, Homo sapiens
gagcatccctttagaatgccccagagtgacgagaacagacttctcaaaaacagtgtcaggcggtcttttgtacccagcactcagtgtagtgcctgacacctcaataaatgttgaatcatgaa

SEQ ID NO: 451480 - DNA, 122 bp, Homo sapiens
ctgaggcaccagccccaaactctgtattggatgttgctgagcctgggtggagagtggggccgtgctacctacagtgcctgctacctgtccttcagaggacctgtctgcagcagggccagagc

SEQ ID NO: 451481 - DNA, 122 bp, Homo sapiens
gatcactcttttcccacatctgatgtactaccttcttgtctcattgtccattccagtcctcgcttccctcctctgaatttctcccctccccctcttctgtacaaccccctcacctgggggtc

SEQ ID NO: 451482 - DNA, 122 bp, Homo sapiens
gccagtgcatgcacatgcacctgtgctcaccctgggcactgcccacaggcacgtctgagccggcagggagtacagagaagctccccaggaccagagggccccaaatctccggcgacaccagt

SEQ ID NO: 451483 - DNA, 122 bp, Homo sapiens
ctccttcatgtttggcttcactcactccttccttctcatggtcatgggctatgatcactacgtgaccatctgccacccactgcattacaacatgctaatgagtccccgtggctgtgcccatc

SEQ ID NO: 451484 - DNA, 122 bp, Homo sapiens
taccattaaattatattaaatacaaaggcaataaatactcaacactcattgcttcctaagcgtttgactacactttactattgtccatgttcttggtgtcatttacctttcactattatcta

SEQ ID NO: 451485 - DNA, 122 bp, Homo sapiens
agtcttatcactatcatttggtaaatgttttcaactactttcccatccatatgtcattagcgtcagactcttggttctatatctgcaatcctgatacctccttccaggcctttgactgtacc

SEQ ID NO: 451486 - DNA, 122 bp, Homo sapiens
ggggagtcatggccaaacctggatgttgcttcctgaagggtggggagagcctggccaaaacgtccccaggtacccagcagtaatgaattcctctggggcccaggccatggtcagcagttccc

SEQ ID NO: 451487 - DNA, 122 bp, Homo sapiens
ccaaggtcatctacttaggcctcttgccaacacaggatgtgtcaactagtttaccagagacgaaggtaaagtcccgtctcctgcagttgttgacgttcagtaggtcgtcggttaagaaaagt

SEQ ID NO: 451488 - DNA, 122 bp, Homo sapiens
aacacacatacaagaatagggactgctgcttttttccccctttagagaactcacttctttcgccagagagcttttggaaggtgacagagaagactcaatatgtatgttgtgccttgaatcag

SEQ ID NO: 451489 - DNA, 122 bp, Homo sapiens
gacagtgcccctggccgggggctgcgctggcttcaacttcccatgggcaaaacggggtcccgggtcagtgttcacagagggtctcaaaccctgcaggaccctgaaattgtctgggatccaca

SEQ ID NO: 451490 - DNA, 122 bp, Homo sapiens
cggcccacgggccagcccagtccactcctcccggcctctccctcatctcggcctgggccccgcagaagccaccaccagggctcctggattccaccaggggcatcttagtccccagcggggca

SEQ ID NO: 451491 - DNA, 122 bp, Homo sapiens
acccatttgttgcataggttacagctggtgggaagccctggtctttggttcggggttagacgactagtggtaaaatctagtcctgtactggtactttgagattttcatcaaaatatgaggga

SEQ ID NO: 451492 - DNA, 122 bp, Homo sapiens
gcgcgccagccgcgcgcccgctgccccctcctcgcccccacagccccgcccccacagccccgcccgctccctaagccccgccccctaggaacccgcgcgccgaaggccaggcctgggcggag

SEQ ID NO: 451493 - DNA, 122 bp, Homo sapiens
cacggagggctcctgctttgccaagccccagggagtggtttctatgacaaccctgggaatcgctgtgatggggagaagcggctcgctcctcgcgcatgcgcattgacttggccaagtcttgc

SEQ ID NO: 451494 - DNA, 122 bp, Homo sapiens
ccagcaccctctgtcggggttgggccgccacggaggcttcacgtgatccggccgtctctgcgcaggagtgtggtcttgcggagatttgacctacgtacttagcgtcatgacgtagtacgtag

SEQ ID NO: 451495 - DNA, 122 bp, Homo sapiens
acgccgccggccgcagcccgggactcgggaggccgagggcggaggcgcggccgtcgcgcccgcgcagagccgcccgccgccccccagccccgcctcccgcgccccacccccaccgcccgccg

SEQ ID NO: 451496 - DNA, 122 bp, Homo sapiens
taatataactctgaactaaacagctgcacccaaagcagaaacaatctgggtcattctgaacgagatcaaactgaggccatttctttttctattataatctgtgaggtgttgagtttttaagt

SEQ ID NO: 451497 - DNA, 122 bp, Homo sapiens
tacccggtctagccgaactcctctgccttaaccttctgctgcgttcaatacattttccctcgggatacagtcagagaagagctggttagggaatcagtggcaggttaaattgagctggcttt

SEQ ID NO: 451498 - DNA, 122 bp, Homo sapiens
atcatcctctccccctcgggatactaggaacaatatcacagaagaggtgtacactccctgcgatattgggagtagtatcatacgcttcttccgtgtatattaggagcaatatcaccgggtgg

SEQ ID NO: 451499 - DNA, 122 bp, Homo sapiens
cgttaactacataatacttctcttcttgtcagttacctgtattttatctcacaggtgttccggcttataaaattgtttatttcagatcagattctcacctgtagtaactggcgttgatgtgg

SEQ ID NO: 451500 - DNA, 122 bp, Homo sapiens
ggtctgaggcatgttaggagcctagaataatttcccaaggggaagaactgaaagtccccacgagagaacagagcttgcccatctactgaagaacagtcctccagggtcctctcctgatcctg

SEQ ID NO: 451501 - DNA, 122 bp, Homo sapiens
ggcaccagagcttgagatcttttgagttcccagatctaaatccaaagttgaatgttcggccgcacatgctattgctttcctgaagtctgtttgatgctgtttgtgaagacacttgattcttg

SEQ ID NO: 451502 - DNA, 122 bp, Homo sapiens
cacctcacttttttatcttcttttttttcccagcagctttattaagttataattcacacacgatgtaattcgcccatttaaaatgtacaatgggcccggcgcggtggctcacgcctgtaatc

SEQ ID NO: 451503 - DNA, 122 bp, Homo sapiens
gtacaggggatgagacttggggtaaaccaggaagaacaagtcaggcttgtctataaagagcggggagagaagggcaccacggccctgtggagaacagcataacacagagtccacaatgaacg

SEQ ID NO: 451504 - DNA, 122 bp, Homo sapiens
ccggctttccagtactagtcctctggcgccggctcccagcccctctcgtacccttcaaatcgcgctccgccgctagactctcgtgatagctgagactttccccggaaggcccgcccccttcg

SEQ ID NO: 451505 - DNA, 122 bp, Homo sapiens
tcaggacctcaattttttcgtaaacaaactatgggtgagatgtatttctagggccaggcgcggtggctcccgcctgtaaacccagcctttggggaagccgaggcggaaggatcgcttgaggt

SEQ ID NO: 451506 - DNA, 122 bp, Homo sapiens
aaggtgggtaaggttttttcccccttttctggaaaccagctgagaaactttgccttggagcgccatctagaggaagcctcagcacacacacgctgtgctttcttagccttatgacatgaccc

SEQ ID NO: 451507 - DNA, 122 bp, Homo sapiens
gaggggtgatggggtatcttcaaacataggctgctctctgcctctcatttcctcagcgggcgcccaggcccttccgacccccacctgcaccccctccctccctaggctggtcccgctccgca

SEQ ID NO: 451508 - DNA, 122 bp, Homo sapiens
tattttaatctgtctcccaggatggggtggggcctctgaaagaaagcaggcctactgtttcggaggtcttcaaagggccctgcctgcatcaacctgctctcaaattccagctccttctactc

SEQ ID NO: 451509 - DNA, 122 bp, Homo sapiens
ggaggctgctgcccgggggcgtcactgcacaagtttgcctacaatgaccagggccaggtgcggcttcgagccgggctgcccatctacgagtgcaactcccgctgccgctgcggctatgactg

SEQ ID NO: 451510 - DNA, 122 bp, Homo sapiens
gtcccttcctgtccacctcaccaaggccgttctgctccagaggggcccgggccgggcctacgggacaaatccaggcggggcgtccctcccggagcccagatccgtctccctggggctcaccg

SEQ ID NO: 451511 - DNA, 122 bp, Homo sapiens
ttgccaggctggtctgcacgaagcccgggaagtccagccggccttgcagcaagtcggggacgatggccaccatgtggcagccaaggaagatgagatccgcgcaggccacgtccaggaggtag

SEQ ID NO: 451512 - DNA, 122 bp, Homo sapiens
ggtcaattctggggtcaccgcctgtccccagaacctgccaccgcgtcaccgcccactccccgggacgcatctagaaggtctcgccccgcccccaggattcgctctgcgtcatcgccccgccc

SEQ ID NO: 451513 - DNA, 122 bp, Homo sapiens
gcagcaaagtggcaagccatggaaatgtcctttctggagttagcaagggctcttgcggggcgtgtatttccagacctctaggttgcaccccgaaccccaacctccttccaaccccagacaaa

SEQ ID NO: 451514 - DNA, 122 bp, Homo sapiens
acttcagccgtgtgccgggcactgcaaatcaggaagtgttggcgccggctggcgacctcccgcctggggccaggggaggagggtggttggacgctgccaccgctgccggggctgtgcagggc

SEQ ID NO: 451515 - DNA, 122 bp, Homo sapiens
gtgccgagccagaactggcaggagtgggggcctgagttggaggtgccggggacaggcgctcggggcagcccgcgccttgccgaggtccctgccccgtcccggccggcctggcttgtcttgtc

SEQ ID NO: 451516 - DNA, 122 bp, Homo sapiens
ggcggccttgcgggttgcttcgatggttctcggggctgagatgcttgtgtctctctcgggcgagacgcctgctctgggcttctgttcctattttgactgctttttcctcatggatttttcag

SEQ ID NO: 451517 - DNA, 122 bp, Homo sapiens
tgctccgtgtaggtaactgcatcgcggattacattctccaaaaacactttaagaactccgcgtgtctcctcgtatataaggcctgagatgcgcttaacgcctccacgccgtgccaggcgtcg

SEQ ID NO: 451518 - DNA, 122 bp, Homo sapiens
tataaatggcagtgtatgattaagttaaaatctaacactgtggccgggcgtggtggctcacgcctgtaatcccagcactctgggaggcccaggtgggcggatatcttgaggtcaggagttca

SEQ ID NO: 451519 - DNA, 122 bp, Homo sapiens
aatcaccacgaattagtgaatgaatgaatatgtgaataagtgagtgaatgaatgaatcagcgcataagtgagtgaatacacaggtatatggatgagtgcataagtgagtgaatgggcgaatg

SEQ ID NO: 451520 - DNA, 122 bp, Homo sapiens
gagacttgcgctccccaggcccgagcccctgtcggcccatcctcgagcccgtgtggctcgcgaacctctaactccagccgctgcagccccctcccaggcccggcgtccccgagccccgcggg

SEQ ID NO: 451521 - DNA, 122 bp, Homo sapiens
gtgaagtccgcggagtgggcgctgatggtggggctatcccttcccactgtccgcgaggtgcgccgtggtaacgcgcggggacacagcgcgggtgtggaccccctgcccacagctggcgcaca

SEQ ID NO: 451522 - DNA, 122 bp, Homo sapiens
ctggattcgtgaacagtagctctcacgctctcgaaatcgtgtccaaaattttgtgcccaccgtgattttctgcaagcacaaagacagcagcggtcaggcggtttcagtgttggacggcccca

SEQ ID NO: 451523 - DNA, 122 bp, Homo sapiens
ttttgactcaaactctatagacttatttgtagcaagtgcttatgatataattcagctgaacgagagggcagctttaagacattttagaattgtttcttaccattgtcttttacttcctgggc

SEQ ID NO: 451524 - DNA, 122 bp, Homo sapiens
cctccccagactgggggcgatggggattggagagggaagcgagggggccagagccctccccgaggtgatggtggccagacctagccaccgccaagccgatatgcccccacacacctgtcccc

SEQ ID NO: 451525 - DNA, 122 bp, Homo sapiens
cctcgaagcgagtctcctgcaggtaagggtcgggtggcatgcggggcaaggtagcgcagccgggtgggggtgccccggcagcagggccgggaggggcgtggtgggggggcctcggcagcgtg

SEQ ID NO: 451526 - DNA, 122 bp, Homo sapiens
ggatgtcgcggggcgaggccagacgagaatcgaatgggacctaggctgagggcctggtcccgcctccagacccaggcgtccgcattggattgggcggtgcggcggcgcttctgtccgccttc

SEQ ID NO: 451527 - DNA, 122 bp, Homo sapiens
ccgaggcaacgcgctggtgtgggttagggctgagaaagaacgacaggaacagagacgtcgcgaggattaagtttaagacttcgcgagaacagaatttcttttggcacctcctctccgcgcgt

SEQ ID NO: 451528 - DNA, 122 bp, Homo sapiens
gagctggagtggccgcttgctgagtctttctccctggagctcgtgggcagctggttacctcgcgctggggcgaccctgacttaggacctcctgccgtttctctgggtgactgctctgtagtc

SEQ ID NO: 451529 - DNA, 122 bp, Homo sapiens
tctggaaaaaggtcccatcccggcctggtgccccgtgctgggtggagaagccccccgccccgacctggcaccgcctgcactactcacggggtggaaaagttgtccctcggctccgcgctccc

SEQ ID NO: 451530 - DNA, 122 bp, Homo sapiens
ccaggctttctctggaccccagagctgggagtcatctgcaagcccagctgctgcaccagacgggagtaatgccaataaagtggactccactgctgtcaccacagaggggacaaagaactcag

SEQ ID NO: 451531 - DNA, 122 bp, Homo sapiens
ccaccagcaggaatccatgcaacttacctgctctccaacagcccactgtcaaattccacgcgtctcctggcaccaagaggttcccgtctatcacctgacacacatgctctcaatcacctgtg

SEQ ID NO: 451532 - DNA, 122 bp, Homo sapiens
agggggtagaacctaattccgaagggcagcattttggagacgcagagaagagaacgaaaccgacgagtcaggtgaactgtaatacaacgttctacccgaatgtaagtcatctgattggcttt

SEQ ID NO: 451533 - DNA, 122 bp, Homo sapiens
cggcgggattagcaggcgagtgcgttggccctgcccgctccgcgcgccgccgcggccggccggggatcccctgcaagccactgagccgctgccgccgctgcagccagacaggctgcgggtgc

SEQ ID NO: 451534 - DNA, 122 bp, Homo sapiens
tccacactcacccagcggtccctggcagggattctctgtgggttccatggcctggactcccgccgccgcggccggcccgtgatgcacaggcgcggcctaatgaagcctcgccgggcgggcag

SEQ ID NO: 451535 - DNA, 122 bp, Homo sapiens
ctcggaagacaacggatgggagccgtgtgcacgtcgggagctgggagtgagcgtgagttccgtgcccaggcccgcgactcggtccacgaggacagcgctccgggtcgacggggtcctggagc

SEQ ID NO: 451536 - DNA, 122 bp, Homo sapiens
tcctccttttcgtaataccagtcttaaaatgctgtcaataacatgcaaatcctccctccccgccctgggctttgtagacctccagcagaaccaagataaaactttgtagcaaagcccaagtt

SEQ ID NO: 451537 - DNA, 122 bp, Homo sapiens
caacctccgtcccgcagtccaattagcagccgcgacccggcgcccgcccacgccgcgtcacgagtcagccaaagatggctgcgcccaggtaatttgagcaaaggccacagtgaactccggcg

SEQ ID NO: 451538 - DNA, 122 bp, Homo sapiens
tctggacccgcaggctgaggctggcctgtgtgaccacaggaagtcactgccgtctctgggcggcacttgctctactataaaactgtaagaaaaagacctgccaaataatggcatgaatgaat

SEQ ID NO: 451539 - DNA, 122 bp, Homo sapiens
ttttaagtcttttttacgcaggacctctgctcctggggagccctgggaagggcgattccgcgttgcctctaagaacttctttcctaccccacttcccagcccccaccactttcagattccgt

SEQ ID NO: 451540 - DNA, 122 bp, Homo sapiens
ggccgggggcggctccgaggtcgtcggggccggggtcccacctcctcttggaggaagcgccgcctccccacccgcccggggccctcgccaagtggctgctaacaaagcccagggcccggctg

SEQ ID NO: 451541 - DNA, 122 bp, Homo sapiens
tccaccgtacaggatcgttacgggttcctggtgaggagactcccttctaatggataggaccgtgcagacgataaagcccacagaaagcgtctctttctacgctcggccagcctgggttttgt

SEQ ID NO: 451542 - DNA, 122 bp, Homo sapiens
cggcggagcagaagccttcgttgggggcggcacaggggtccttaaaaagccagagggagccggcccagcagcgcccactcaggctggaggccccgaggagaagcgccccatctacggggggt

SEQ ID NO: 451543 - DNA, 122 bp, Homo sapiens
cctgggagagactgagtctcaaacgggccacagagtaagcgccatctcggacaccggccacgccccgaccccaggcacagaggtcgcagacagctcgggacagtcctgaaaagcgtcccctt

SEQ ID NO: 451544 - DNA, 122 bp, Homo sapiens
tccgtcagcagacaaatggatcgatagcgcctggtgcagtcacccccttatctgtggcttcgcgccacagtttcagtcacgcccgctcaattgaggcccaaaaatatcaaatggaaactttc

SEQ ID NO: 451545 - DNA, 122 bp, Homo sapiens
ttctacttggaagtaacacgtatggaggctcccagggcccctacagtctggaatcccgcccgtgcgagcctgagcgcctttcctccctccttcccttccgcaggcgtcctcgccctccacgt

SEQ ID NO: 451546 - DNA, 122 bp, Homo sapiens
ttaggttcgagctctctaatccaggtttctttgagtttatcttggttctaaccggcacgccgggttttccagcattccctgagctaagactccctaatctgggctccgggtgagcgcgcatt

SEQ ID NO: 451547 - DNA, 122 bp, Homo sapiens
agagctccttgagagatcaggggttgaatttgtagttcctggccttctaggccgtgcttgcgggggttgcctgcttgtctgaacctggccccaaaatccagcataaagaactctctctgggc

SEQ ID NO: 451548 - DNA, 122 bp, Homo sapiens
gctagcgaaagacctacaggagcccagactcgaggcccgccaggatgcggagactgagggcgggttcggccgccaggaagcgctcccgcccggggcagcaatcctcctccgccctcctctgc

SEQ ID NO: 451549 - DNA, 122 bp, Homo sapiens
cagagaccctgacctctcccgggagcacaacacagactcgaactggctaactcgggctgacgccggttcagctgactcccatcctggcaagaggcttccggagtgttccagcgcctcccagg

SEQ ID NO: 451550 - DNA, 122 bp, Homo sapiens
ggatgcccgggatcccaaggagggtcgtgggtctccgcgtcccaacctggagccttggcccgggatgatacccttggccaccggcagcaggtctctggtggccacctgacgcttgagcattt

SEQ ID NO: 451551 - DNA, 122 bp, Homo sapiens
tcctatcgacctcagaggcactatcagattagccctaggaggtccgtctgggggtctcggcggcctgcgccagtggaggggcggcacctccccagaagccgggcttcccgccccaccggccc

SEQ ID NO: 451552 - DNA, 122 bp, Homo sapiens
gtgcccgcatccacccttcacctctgccatgatcagcagccccaaggcctcagccttctccggctcacagtcagcctgtcctcggggtagctggtgttacacgtcaacagtccaggctctaa

SEQ ID NO: 451553 - DNA, 122 bp, Homo sapiens
gggcaaccaggtgagactgcgcggggcccggctgggcgcgggcgggcggtggctcgggcacgtcccccaagttggacccctttggccattcccttattgagcaccgaggtaaactgaggctc

SEQ ID NO: 451554 - DNA, 122 bp, Homo sapiens
atttgttttgtggcatgaagctatgtgatggaatgttaatgtcagcaacctctttatttacgcaccaaggaaaaaggagtagtaattaacactttgacactcccccattgatgtgtaattga

SEQ ID NO: 451555 - DNA, 122 bp, Homo sapiens
ccgctgcagcgagtcccgcgcgctctccgtgcgccccggccggctcggcggcggctgccgcgcacaggcttccgactccagcgcccggcccgccactgagcatgcccagcacgccggccggt

SEQ ID NO: 451556 - DNA, 122 bp, Homo sapiens
ccagttgtgcttagtgacaacggctcctgctcaggaatgacattaccctccagctgggcccgtacccggcaggcgcgattctggggctgtgtgggtcagggctacgtggtgcagggtcgcag

SEQ ID NO: 451557 - DNA, 122 bp, Homo sapiens
gcctttgagatccgtaggctgtcctccgtgttcctgcgggtgaggacgaacgtgggcgtgcgggtgctctacgaccgtgaagggctccgactgtacctgcaagtggaccagcgatgggtgga

SEQ ID NO: 451558 - DNA, 122 bp, Homo sapiens
cgccgggatattggatctcacaggcctgctctgtggtgacgtcctgaaggtgaagccctccgcggcagcctctgcttcagggtgactgctttctgctacaggagtgactcgggcatcctagt

SEQ ID NO: 451559 - DNA, 122 bp, Homo sapiens
cctgccaggcgctgcctgcagtcggccgtatctcagcccctaccctccatttacttgttgcgcagcctcggctaggggccctgactgctgcgaacattgctgccccatctgtgcgtctctca

SEQ ID NO: 451560 - DNA, 122 bp, Homo sapiens
gtgctgtagggagccggcgcgcagctctctcgtccaggacacacgagcaggagtgacctgcgtccagaaggtccatcactagccctggccatgtgctgagcacccaggcgatgccacgtgga

SEQ ID NO: 451561 - DNA, 122 bp, Homo sapiens
ttgatcgggaacgggaggcccaggacacgttttctgtggcagctcgaatgcagctgagggcgcttgcgggccagagcgaccagtcccctctagaagcagcggagtcttctggagcctgtgct

SEQ ID NO: 451562 - DNA, 122 bp, Homo sapiens
cgccccgtacgtgcagatcaagagcagcacacgcgtggacctgcaggtggcacggcaccccgtacatgcagatcaagagcagcacacgcgtgtggacctgcaggtggcacggcgccccgtac

SEQ ID NO: 451563 - DNA, 122 bp, Homo sapiens
cccgccccccgcccctgcccccacccggctcgcccggcccgcccccgcgcgccccacctgcggctgccacccgcacccgcagctggactggccccaaggcaccggcgcccggccagggccag

SEQ ID NO: 451564 - DNA, 122 bp, Homo sapiens
aggggacagaggactccaagaagcccagtgaagccccgtggggagccccatggtcaaggccgggactgagggccgggtgggccctgggccgcctccacctctgggcccgccctgcgccacac

SEQ ID NO: 451565 - DNA, 122 bp, Homo sapiens
ggtagcagaggaaaattccagtctgcttgttccaagctcagaaggtaactgcacacacctcgatgttagcagggaaggtggggcaggacagggtaagtctgatgatacggcactctagttcc

SEQ ID NO: 451566 - DNA, 122 bp, Homo sapiens
gaaagcggggcccagaaagagaaaaacaagcaggtcagcggttgctgggggactcgaagacgcaccctggtctgcttgaggacgcctcttttcacactgacaaggtccagggaggacttcag

SEQ ID NO: 451567 - DNA, 122 bp, Homo sapiens
gccaggggggaggactgggagagaccactttcgttttctgagacgccttcagttcctggccgtccgccaggctttcttcttggaggtgtcagtcttcgggagtgggggctggggaaaggggg

SEQ ID NO: 451568 - DNA, 122 bp, Homo sapiens
gacgcccgccagccgctctctccctctcaccctcacaccgggagcgacgcacaccccacccgcccctcagcttcgcaggcccggccccttaaagagacacacacgggccaccgatctgccgc

SEQ ID NO: 451569 - DNA, 122 bp, Homo sapiens
aatagactcacgtgggccccaggagtaatgcctgttagtgactgcactgtggatgttcaccggggctcacgcgggccctaatgcattttcggtgcagagacgcgccctacctggcccatcgg

SEQ ID NO: 451570 - DNA, 122 bp, Homo sapiens
tgggattacaggcgcctgccattacgcccaggtgatttttttttttttttgagacggagtcgcgctctttcgcccaggctagagtgcagtgacacgatctcgactcactgcaggctccgcct

SEQ ID NO: 451571 - DNA, 122 bp, Homo sapiens
cagggtgcaggcttggagtcaccccaagggcagccagagccaggcgcagcgtccccccagcgtcagcaagacctacacctggagtcgcctcaaagacagccagagtacagtcctgaatcccc

SEQ ID NO: 451572 - DNA, 122 bp, Homo sapiens
aagtcattttagttacaactgcctctgtcctcgtttgtcgggtgtgaaacgtggggtagccgtttctctgagagtagctccgtctggatttggagaaatcctcctgactgttgtgaaaatcg

SEQ ID NO: 451573 - DNA, 122 bp, Homo sapiens
actgggctgcaggaggtggagcgctcacggctggaggctcggcgggagctgcaggagctccggcgtcaggtactctccctgtgccaccccttagcctggggcttgctgtgtgccccgggcca

SEQ ID NO: 451574 - DNA, 122 bp, Homo sapiens
ctcggaggtttcccggaaacagagccaacgcccccccaagacctgggcagaccgcatgagcgtaggggtcaggggaccgggtcccccagaggtgtcagaaaaatgctcccaggaggaggacg

SEQ ID NO: 451575 - DNA, 122 bp, Homo sapiens
ggggccaggaaggcacaggaccgtgcgagacaggctgccgtgccttgcagaggtggactgcggccccccggaggaggtgaagcacgccacactgcgcttcaacggcacgcggctgggcgcgg

SEQ ID NO: 451576 - DNA, 122 bp, Homo sapiens
gagtcatcatcagaattagaattagcagcaattaacaggcaatacactgccacagtgaggcgggtgtcatccaggtcctggggacctgcaggctgtgtatcctagggagaggtgccattcaa

SEQ ID NO: 451577 - DNA, 122 bp, Homo sapiens
ccatagaaatgcaaggggttgctatgcctgtgtttataagtttagtcacctgagctctaacgacccagtctggaaggaatgggctctgggcctaagaacaactttgcttgactgggcgtggt

SEQ ID NO: 451578 - DNA, 122 bp, Homo sapiens
atctgaagatggtggcagtgccagagagcaggagagaggagctgcaaagaagccagacagcgttgggcatcaataactcctgggcaccaccggccactggccttcattctgacaggagagcc

SEQ ID NO: 451579 - DNA, 122 bp, Homo sapiens
aagggcttcccaacagtcacatccctcccaagaccctctagatggactccagaatccagtcgctgctggagagggaggagacaggcagtgacaagtcccgaggagggcctcggtccctcctg

SEQ ID NO: 451580 - DNA, 122 bp, Homo sapiens
ggggccggtgtgcgttttagctgaaagcccaggttttttcttgaatggaatttgaggaggcgcagagaggagaaaaacgctgttactcgaaagaggaagagtcacaggaggatgctgagtga

SEQ ID NO: 451581 - DNA, 122 bp, Homo sapiens
gatcccgcagatccggcccttgggccaccgcccccttcaccgcggacttgctaactagtgcgtatcgggtttttttccaacttgccttttaagatgacttttatgggcgctgcaactgcttc

SEQ ID NO: 451582 - DNA, 122 bp, Homo sapiens
actcagttagagaccaaggtgaggaaggggaggcttcaaagaatggcgggggcggggtcccgctctggcttgaggttagaaagggctctctgggcagggttcctggccctcccacaccttcc

SEQ ID NO: 451583 - DNA, 122 bp, Homo sapiens
gccgcttcacaaaagaggtaccaggtccgctccaaacgagcacacaagcagcaccaggagcggcagaagaaggaggcggcagcagtggacaaggggagagggtgcgcgcacgtcgtgctctc

SEQ ID NO: 451584 - DNA, 122 bp, Homo sapiens
ggtgtattgactgcattatctcattctcacaacatccagaggccgccttttgttttattacgcctattttacatatgaataaattgaggctgagagaagtgaaaaaactgggctttctgaat

SEQ ID NO: 451585 - DNA, 122 bp, Homo sapiens
catgtggcccaagaaggtatgtccagcttcctccttgcatcttgcggcacaacacctttgcggtatggtgcctgggcagtcccgggttgttaagggtgagagttctaaagccaggctgcccg

SEQ ID NO: 451586 - DNA, 122 bp, Homo sapiens
tagagagagtgcgggtagatagtgcgctggtggcctggcggcgggatgaagggtctccagcgatggttgaagaggggggcaaggctgcctctcagggcttgtctagggcagagtaaactgag

SEQ ID NO: 451587 - DNA, 122 bp, Homo sapiens
gggaggaaggccggcctggaatgggtaccctctggcctggcactcggactgggcgtggcccgagcctcggcggaccctcggaagcccaagcgggcttcggagcaacggtagggagcggggca

SEQ ID NO: 451588 - DNA, 122 bp, Homo sapiens
ggctaacactgtgaaaccccatctccactcaaaatacaaaaaagtagccaggcgtagtggcgggcgcctgtagtccaagctaccgggaggctgaggcaggagaatggcgtgaacccgggagg

SEQ ID NO: 451589 - DNA, 122 bp, Homo sapiens
ccacagcaggggcggggaggctgacgggggcgcagcttttcctcctgagtgttcgctgcccgggctggcggcgcggagccggcccgccgccgtctgcccctctgcccggcccttttttccag

SEQ ID NO: 451590 - DNA, 122 bp, Homo sapiens
tcagccttaactgaagacagcgtacattctgcagttagaataagaacttctggctgggcacggtggcttatgcctgtaaccccagcactttgggaggtcaaagcaggcggatcacgaggtca

SEQ ID NO: 451591 - DNA, 122 bp, Homo sapiens
cataggcggcacaggcaccaagatgtccaaccgagtggtctgccgagaagccagtcacgccgggagctggtacacagcctcaggaccgcagctgaatgcacagctagaaggttggctttcac

SEQ ID NO: 451592 - DNA, 122 bp, Homo sapiens
gcatagcattcaaggcttttttttttttttttttttttttttttttgagacagttttgctcgcccagtgcaatgtgcaatggcgccatcctggctcactgcaaaatctgcctcccgggttca

SEQ ID NO: 451593 - DNA, 122 bp, Homo sapiens
aaatccaccaacctaattttaaagcatcacagttttgcatcatttgttgttttattaatgcggatgagtcagggcaggctgcgaatgcctcaggaaagacccttaatggacaggagggttgt

SEQ ID NO: 451594 - DNA, 122 bp, Homo sapiens
aataacccactcagcaactttacttcaaccctaggctctggcctaccgggagggcaaacgcgggcacccgggtcacgtcatcgcttgcttgggggcgccagctctagcgtaagcctgagctg

SEQ ID NO: 451595 - DNA, 122 bp, Homo sapiens
ggtgaggacttccacttggggggtcccaagatgcgacgtcacacaccgagggacacgaggcgggtggggaatagccacaagcccctccatcctgcgttcaccccacactacgttctgctccg

SEQ ID NO: 451596 - DNA, 122 bp, Homo sapiens
ggaggctggaagcgtttgcaagcggcggcggcagcaacgtggagtaaccaagcgggtcagcgcgcgcccgccagggtgtaggccacggagcgcagctcccagagcaggatccgcgccgcctc

SEQ ID NO: 451597 - DNA, 122 bp, Homo sapiens
aagccagggcccgcccctgacaggaatccgttggctaagcagccgctccggccttggccacgatcccaggaaagaagagcaaggggctttccacctgcccctagcctaacccggggctgggg

SEQ ID NO: 451598 - DNA, 122 bp, Homo sapiens
ggacacacccccgacctccgtgacaggcacctcagaggagcaagtgagctggtggggcagcgggcagacggtcctggagcaggaagcgggcagtgggggtggcacccgccgcctcccgggca

SEQ ID NO: 451599 - DNA, 122 bp, Homo sapiens
tcactcgtgtcctgtccgctttaactctgcagactactggaagaaaatccgtcaagtggacgagtgaggcctgggagcagctgaaacgcggagatgcttcacatctgatccaagcatttgga

SEQ ID NO: 451600 - DNA, 122 bp, Homo sapiens
ggcctgtgcagctgcagcgtggcgctgagcaggaaggacgcgtggagatgccggctgtggcgaccgcgtgatttgaaggcacctgtgacttctgctcctgatggggcagaggcctcatgaac

SEQ ID NO: 451601 - DNA, 122 bp, Homo sapiens
cagttggtagcgctggttgattaagtcacatgtactccaagcaacacctgagacccccgtcgctgacaacaccttcttaagagaccctggcagctccgagccagacctcatgttactatgcg

SEQ ID NO: 451602 - DNA, 122 bp, Homo sapiens
cccggcttaggggaccgctgtgaggtctggagaggatgcgccatcgaccccggcagtaggcggccgaaccttggccccaaatcttctaccccggggtggattgcggcccctagaggaaaggc

SEQ ID NO: 451603 - DNA, 122 bp, Homo sapiens
ttggccttcggcagctggtgggcacgtccaccccagctggagacctggctgtggggagaacgagagagtcgtgtggggagaacgtgttggttgtgtggggaggggcgggtgggggctgaggg

SEQ ID NO: 451604 - DNA, 122 bp, Homo sapiens
ttcattccctggctgctgagttgcaggtgggaactgtcatcacgcagtgcttcagagcctcgggctcaggtggcacggtcccagggtccaggctgagggctgggagctcccttgcgcctcag

SEQ ID NO: 451605 - DNA, 122 bp, Homo sapiens
tccgcccgcaaggaaagcaggcataggacaccgtcgaaccaccactcccacgaggctctgcgcaggccgctcgcgttggctcagttaccatagcaacggcagaggtccctcgctcttgccgt

SEQ ID NO: 451606 - DNA, 122 bp, Homo sapiens
ggcagtaaaatagcatctacatggaattacccaccttcaaaagtcatgggcgaggctgggcgcggtggctcatgcctgtaatcccagcactttgggaggccgaggcgggcggatcacctgag

SEQ ID NO: 451607 - DNA, 122 bp, Homo sapiens
ttgctttccggtgggcaacaggggtgggtaactgtgttccggactcgcccgcgggccgggcggagccagctacctccaggcgaccctacccaccccgcgattctattcctggagactgagtc

SEQ ID NO: 451608 - DNA, 122 bp, Homo sapiens
gtgtctcctcctccccgagtgacacagcagtgagaaatgcctatcagtaacttaaacccccgaaactccaccttccgggcgcgcggcgcggagccgggcggtgggaatggagcgagcagatt

SEQ ID NO: 451609 - DNA, 122 bp, Homo sapiens
tctgctactgtattagctgaggaggcttgagccaaccacttgaccacttggagtctgaatcgccttatctataaaaacggggatccattgagaaattataatcagatattttccagaatcct

SEQ ID NO: 451610 - DNA, 122 bp, Homo sapiens
cccctttctgctgggcaggggtttatttggagaaagtcaataaggaaaaataaacattcccggccctatgtatatacagccttgggacctgcagtgctctgcagcatctcaggcctgccagc

SEQ ID NO: 451611 - DNA, 122 bp, Homo sapiens
cgtaatcccgttcacgaaaccaaaaatcaaaactaggccactgcccactggtggctgatacgcccttttctcatcaacagaaccgggaggaagggctctggtggggctggcggtcccctgtt

SEQ ID NO: 451612 - DNA, 122 bp, Homo sapiens
ttcggccattaacagcatttggaagcagttggttttcccagtaaggagatgggcatgttacggttttaaaccaatgatgcagggagaattggccagttccccacaatcagagcattctgaaa

SEQ ID NO: 451613 - DNA, 122 bp, Homo sapiens
gctgcttcagcttctcctcctgctgcactgacctgagtcactgccctgagccaatccctgcgacccacagcaatggaagttccccaaagagtcaggtctggattgccacttttctgtacccc

SEQ ID NO: 451614 - DNA, 122 bp, Homo sapiens
gttgatttgtaatccccagtgttgggggcaggactggtgaaagtgattggatcataggggcgaatttccccttgctgttttcatgatgatgagggagttctcatgagatctggttgtttaaa

SEQ ID NO: 451615 - DNA, 122 bp, Homo sapiens
caacctggccgcgccaaagccccaaagtccatcattttgctctgtatgtcttcacatcctcgtagctttgctctcacccacccatttcaacaccaacccagtgtcaatgctactgacttatc

SEQ ID NO: 451616 - DNA, 122 bp, Homo sapiens
tccgcagaacctgagcaccttttgcctgttgctgctatacctcatcggggcggtgattgccgggtgaggaacagacactcgcagacaacggggcctgtgggtcagcctttgctggggggtgg

SEQ ID NO: 451617 - DNA, 122 bp, Homo sapiens
agggtccaggcggaagtgcggtctggctcaaaacgaccttggaggcagaattatgaatggcgcatgagcggagccatggtggggagcttctgaccaaactcagccattgatcaatgtgggga

SEQ ID NO: 451618 - DNA, 122 bp, Homo sapiens
acgctgcaccatgtaacgggctacctccaggtggttgttcaccacggcctccatcagtggcgtccgctgctgtttgtccactgcatttatgttggctccagcctgtgagggggcaggagggc

SEQ ID NO: 451619 - DNA, 122 bp, Homo sapiens
aaagttgattttaaagtccagcactttttttgtttttttttccccaagacaaattattatcgtgaacatcagggtttgtctctttgtgttttccagacattctaagtgagactgtccacatc

SEQ ID NO: 451620 - DNA, 122 bp, Homo sapiens
cgggcccgcgcccaggaaggagggcttccgcccgggtgagcgcggggctgctgggtgacccggctcctgcttgccccgcagccccggccccctgcccaccatgaacgccagcggttctggct

SEQ ID NO: 451621 - DNA, 122 bp, Homo sapiens
aatagttaacatctgaggtgcattcttccaaataataacgtagacagcacttactgggaccgtctggcaccaggaaccgtcctggggaccgccaaagggcggcttaacctcgcagctgcgca

SEQ ID NO: 451622 - DNA, 122 bp, Homo sapiens
tcttgagagcttggggggtcaaggagaagtctgcccttcaattgtcttaagccagagtggcgaagaaagagatctggtgccgggccatactccccagtctctctcagcacgtcccatgactt

SEQ ID NO: 451623 - DNA, 122 bp, Homo sapiens
tggaaaactgcaatagtcactaagaccattcggggctgtttgggtctagcttggtctagacgggtctgaaactccgcaggacccacccaacaagaagtcattgttccaagccacgtgtcagt

SEQ ID NO: 451624 - DNA, 122 bp, Homo sapiens
cgtccctcaacagaccggctgagctctttggaggggtacatgatgttgggttttggtttgcgcttcaggaactgctgatactgtagcttctgagggaactgcagggatttcccgatttcctg

SEQ ID NO: 451625 - DNA, 122 bp, Homo sapiens
ctacagaatttctcctctgggtacacactgcacttatctagtagcacttatctcacaacacggtacctatttctggaagaagtctatttcccacaccctagagtatgggatccttaagagta

SEQ ID NO: 451626 - DNA, 122 bp, Homo sapiens
cgggctgctccagggtgtcgctcctctggctgctcccgaaggggcttctggccctgaggacggtggtgccaagcgaacttcatttttaaaaagaactggtggatgagaagagcgagcgaggg

SEQ ID NO: 451627 - DNA, 122 bp, Homo sapiens
tcaatcattttccattaaaaaaatggcatactttgtgacttcactgatcttttcctcttccgctctaatattttagtacatacatttccttttattttactatttataaagtcattataaat

SEQ ID NO: 451628 - DNA, 122 bp, Homo sapiens
gtgctttgtaaacatcagagtcacttgggtcctttcctccacaagcctcaaatcaaattacgcaaccaatgaccactactttcccagacgctgttcacaggctgcatattgacgaagggcag

SEQ ID NO: 451629 - DNA, 122 bp, Homo sapiens
gctggatctgagccgagtggctggggccaaataatggtaatggcagccaccacaagtgaccgtctgctgcttggcctgaggggagcagagcagggacctgcagggaatgcccctcacccgtg

SEQ ID NO: 451630 - DNA, 122 bp, Homo sapiens
caggatcattgtggggtctgggaggtcccgggcccttcgggaaggtgggggcaccgtccccgcaggaggagctgggggcaggggcggcccgggctgcgggccgagcggagggggagggggcg

SEQ ID NO: 451631 - DNA, 122 bp, Homo sapiens
cccacccgctgaggtccaccgagtccaccaacgccttccaggccttcctggcgcgcagtgcgcctttctggcataatgcgactttcgaggcctcgaggtcacccccttcctaagagccccat

SEQ ID NO: 451632 - DNA, 122 bp, Homo sapiens
cataacttggcttctgaggaccaactaccgtattgcccttcagctccagctcaacataaacgcatcgtattcctcatgtacactcccccatctctggtcttggcacctatccatgccctctc

SEQ ID NO: 451633 - DNA, 122 bp, Homo sapiens
accggccaggtagcagtcctgggggcagtggcggggactctcgggggctgggcgtgctgccgcgcgggtaaatccaatgcggggaagccccggacccgcaccccggaggtcagagcgcactt

SEQ ID NO: 451634 - DNA, 122 bp, Homo sapiens
agctgttcctcccctgtgactcacccaggcaggagtggaggctccagggtcgggcagcagcgccgtcgctgggggagctgcgaagcgtccgtttccccagacagctgacagctgagagcctc

SEQ ID NO: 451635 - DNA, 122 bp, Homo sapiens
ggggcgtgggtgggggtccgcctataattatctggggaaatgcatccgcgctctgcttttcgctgcggcagctccgagggcacctccggttctcccccatcctccgggagtgtctgggcgct

SEQ ID NO: 451636 - DNA, 122 bp, Homo sapiens
tcacattcaagatctgatcagcctttcccacgagcctccagtacaggacttcatcagtgccgttcatcggaactctgctgccagcggcctgttcatccaggcaattcagtctcgttgtgaaa

SEQ ID NO: 451637 - DNA, 122 bp, Homo sapiens
cacccggaagattggccctcccggaggaactcccacacggggcggggctgggtaggggagcgggagttacgtagagggagggagtgctggtcacgtggcaagaggctgcgcaggctccttcc

SEQ ID NO: 451638 - DNA, 122 bp, Homo sapiens
acctcttttttctttataaattacccagtctcgagtatgtctttatcagcagcatgaaaacggactaatacacatacctaaagagatctactactggattgccctagatgtgttgctggagc

SEQ ID NO: 451639 - DNA, 122 bp, Homo sapiens
cgggtatgaggcccccacaccccgcctcaggaccactgtccatggttccacccctgaccccggactccgctccccagacctcctaagtgaagccacctccacggaggggccctccccgccat

SEQ ID NO: 451640 - DNA, 122 bp, Homo sapiens
accattgttcatttgcctttctctttggacatctttccatagcagaatgtgtagctcccacgtgttctcagcagctacatcatatttattcagtattggtaatatgtaggtgaaaaagatag

SEQ ID NO: 451641 - DNA, 122 bp, Homo sapiens
gcgacaagcggagggagctggaggcaactcgagcggtgtcccgaaaaagttgcggcggagcggcggtggggtgagggtgggaggagggagcgcaagcgttttctagcgacccgggttttctt

SEQ ID NO: 451642 - DNA, 122 bp, Homo sapiens
gcgcgggcggattcagcggagcgatccacgaatttgcgccacttccctattcaccaaccccgcccccgactatcggggactgccccccccgctaagatacgccactacctcagcggcgctaa

SEQ ID NO: 451643 - DNA, 122 bp, Homo sapiens
tcccctggatggagagtaaccgcagatacacaaaggacaggttcacaggtgagtccggcccgcgcgctccccgcctggccgcggcccgggctccgtgctacccctgccccgccgggtggctc

SEQ ID NO: 451644 - DNA, 122 bp, Homo sapiens
tgctgtgggctcctgggagctgtatttgtgtatctgcatcgccaagtcatgctcggtgtccgaaagcacaaggccctcagccagtttcttgctaagcagtgagtcactgcccttcttttgcc

SEQ ID NO: 451645 - DNA, 122 bp, Homo sapiens
ggggaagctgagcgctgagaccaagggctaaagctgggaggtgagtctgtcaccttgagccgggcgagcgctgtgggccaagcaggggttgcagggtagtaggagtgcaggtgacttggggc

SEQ ID NO: 451646 - DNA, 122 bp, Homo sapiens
cacagacggcccgtcctcgcccggcgtccaactgcacggcccgaggactctgtccctgcgcgtcccacccccggcacccggaacctcacggccactcactctgcgcgcaggatccggaaggg

SEQ ID NO: 451647 - DNA, 122 bp, Homo sapiens
tggtgagaaggtaacagacatgagaaatgtttacaagatagaatcaaatgaacttattgacgtggggtgggcagtgatactataactgtaataagggaaagcaggctgagctggctttacag

SEQ ID NO: 451648 - DNA, 122 bp, Homo sapiens
gggccctgcctttcaatccatccttttcagtgccagcagttacttttctaatgtacaaaccggtgatgtctctgcactgctgaacaaggtggatgacttcccattgcttggagaatgaaatt

SEQ ID NO: 451649 - DNA, 122 bp, Homo sapiens
acctggcaaagtcgaggtttcctcacagcgttgagattgagactgggggtcggtgagtggcgtcaattcccatgcccttgcggctctcacaactggagtcgcagaagcgctcgctcccactc

SEQ ID NO: 451650 - DNA, 122 bp, Homo sapiens
agaggttggactgtgtctcgcatgctcctgacgcagaaggttttgaaccttttttcacctcgtctgaaatggctgcctcccagtgtctctgctgctcaaaatttctcttccaggtgcttaaa

SEQ ID NO: 451651 - DNA, 122 bp, Homo sapiens
caggggcactaagacctatgcaggcaaaacaacaattaaaaccttacaagaggccagatgcggtagcttacgcctgtaatcccagcattttgagagaccaaggtggatggatcacctgaggt

SEQ ID NO: 451652 - DNA, 122 bp, Homo sapiens
acctggttggggaggtgggccgggctgtgctccagagggggcgtgtcttcatcttggtagcggtatttctggggatggggacggaggtgtcactggggccagcccggtgcctcaggctccag

SEQ ID NO: 451653 - DNA, 122 bp, Homo sapiens
cctttattctgcagacagcaggaaaactattagagaattgtaaaaggggttggcagttgtcgggtctgttttaaggtgttgctggagacatagaagaggttggacagaaaagggggaaaaca

SEQ ID NO: 451654 - DNA, 122 bp, Homo sapiens
gaggaagcccaataggactaatctggctaaagattagggcccaggccaagaggcctggctcgttctagtcctaggagcatggtacttcctcctaatttaatccattgccattcaagaagacc

SEQ ID NO: 451655 - DNA, 122 bp, Homo sapiens
gttgcagatcaggtgcaaacggggcttagagagaaaggtaagggagcttcctgcgtccgccgagctccggcgtttaccttaatcccggggattgccgagaacttcctattccctgcctctcc

SEQ ID NO: 451656 - DNA, 122 bp, Homo sapiens
ctacttcctttaaagccttcaccgactctaaaacaccaaaaacaaagacccaactagctccggaagcccgagatgtaaccgtagtcatctgaccctcccgtccggactctgattgggctttg

SEQ ID NO: 451657 - DNA, 122 bp, Homo sapiens
gttgtggggggaaggggaaccggcttgggtggccatgcaggcgacgcgggttgcagggaacggaggtgcagggggcggcggcgggggcggcggcgaaaggggacgggcttgcgtggccccgc

SEQ ID NO: 451658 - DNA, 122 bp, Homo sapiens
tcctgtattcaatgtcttttgtaagtaatcacttctcccctacttaccctcctagtctaccgggctaccaggaattttttttttttttggagacagggtctcactctgtcacccaggctgga

SEQ ID NO: 451659 - DNA, 122 bp, Homo sapiens
ccccacctagggacctgggaacccggacacccagagactgggcagttggggctttcaaaacggaaaggaaaaagaaaagagaaagaaagaaagaaagaaagaaagaaagaggatggggattt

SEQ ID NO: 451660 - DNA, 122 bp, Homo sapiens
cacttagtcaagaaacggactgctactgaacccggggagcagagatgctgaacacaggggcggtgtggagggcctgggcaatttggaggagggtctccacaaggcagatgtagaacagcaga

SEQ ID NO: 451661 - DNA, 122 bp, Homo sapiens
ctatgactcataacatatatttgtgaattcagatgattgtaccatagatccccacctggccgccagagggaaataagaatctcttacaccccagttatttcttctcagggtaagccttcact

SEQ ID NO: 451662 - DNA, 122 bp, Homo sapiens
ggaccaatcatcctttgggtggatcatggcatctgctttatcctcctaacaaggagttaccgcaatccaaacagtttgacttatgcctcctgttagctcttataaaacatttaaatgtgttc

SEQ ID NO: 451663 - DNA, 122 bp, Homo sapiens
gaggaaggaattgtggctgttacataagctattcccatcctgtggggattcttcttccatcgtcagtctaggggaatctgcctttgatgtgacaaggcagctttgtgttgggaagcaaggcg

SEQ ID NO: 451664 - DNA, 122 bp, Homo sapiens
aagcaggtgtctgctcctgcctgggggaaggatcagcggcggtgctttcaaggagggagccgagctgtgacttgtctcccagctcggggatggagtggaaacttgtaggctccagggaaggc

SEQ ID NO: 451665 - DNA, 122 bp, Homo sapiens
acgcccgcctccagccggctccgcccggctccgcccggctccacccgcgccgcctagagacgtctgcgctcgtgcgcctctgctcggtggcgcagaccatgccttccctccagcagacgtca

SEQ ID NO: 451666 - DNA, 122 bp, Homo sapiens
atcctttataatgatggcatcttctggaatgccccagacttggaagaatctgcatttgtacgcagtatgttgtgtttactctgttgacataaaagtaagctactgagggttatttctcatag

SEQ ID NO: 451667 - DNA, 122 bp, Homo sapiens
cctttggaggcaagtcgctttctgtacactgctggttaactgcttcggaagaggacagcccgcagtctggagtgagcagcgaagcagagaaaaggagacgccctttcggacaagggactggt

SEQ ID NO: 451668 - DNA, 122 bp, Homo sapiens
ctccaccttgcgggagacgcgagcgggaggcggggcgggcgcgactggttctggcagctgcgcgctgcgaccccggggctcgcccgccccggggccgagaatgtgtcaccgtaggcaatgtg

SEQ ID NO: 451669 - DNA, 122 bp, Homo sapiens
ggctctccgggaaaacgcctgtcagtcaaagcggctctctcgtgagagcgtctgactgctcggttcccttccatctccgtctgctggagaattgaaggtgttagcaggttcaccgggcagca

SEQ ID NO: 451670 - DNA, 122 bp, Homo sapiens
tggttaaacaaaattacattaaaaaccatatgtgctgaagaagttttaaggagagtatcacgtttatactttaaaaagcccaactgctctgtttaaagtggatctttcataaacttgcagtc

SEQ ID NO: 451671 - DNA, 122 bp, Homo sapiens
tccacctcgggccggcacaactgtgcgcttttggtttcatctagaaaggggtgtcccacccgggtccccaggactgctatgaatcactgatgagaaatatgtagagacattctgcaaactgc

SEQ ID NO: 451672 - DNA, 122 bp, Homo sapiens
ttactgcagagccggtgcctttaaacatctctctggctgtcaccggttattctttacctccgtttccacttttactttctctaggcaaaggtcgtttggtgctttaaccgaggtgattaggg

SEQ ID NO: 451673 - DNA, 122 bp, Homo sapiens
tcctgatcgtcttccctgcggcatgccgatgccctcagcttgactctggggtggcgggtccggggcaaaggctcatatgagtgccattcacttaacagctctttcaaattccccagtcgatg

SEQ ID NO: 451674 - DNA, 122 bp, Homo sapiens
gcctctttctcacataacaatcatcttttaatgacacacactaatgcagattgggtacaccgggaagtatatttcacagcgatacgttctctgtccttcaggtagggccccctccaagtcct

SEQ ID NO: 451675 - DNA, 122 bp, Homo sapiens
cagcgtgaagctctgtggcccagaaggctgcttcttaaataagtccagaggaactgtcgccgtcgccagcagacctgaaaagataggagacaggcaaggggtgccgctgatgtttcccgggc

SEQ ID NO: 451676 - DNA, 122 bp, Homo sapiens
cggaaccgtgaggactgcggggacggcggggtggggaccgggcggcaggggcaggccgaacgtgctcgtgtcgcccacaggtggcaagaagaagccactgaaacagcccaagaagcaggcca

SEQ ID NO: 451677 - DNA, 122 bp, Homo sapiens
aaagccacctcaccctttggaagacataccagttcccactcaggaaggctgagaggtgaacgactaacgactttctaaccgcccagagtagaagggggcaggtccacactctgagagactca

SEQ ID NO: 451678 - DNA, 122 bp, Homo sapiens
actctctcttcctcttgccggctgccggggtactctatgttttgtctctgtggtttttcccgccctccacccccactccagccctgaagccggagaagcaccatcgagagctctggggtaga

SEQ ID NO: 451679 - DNA, 122 bp, Homo sapiens
tccagggcctctttctgctctataacctgggtgagtcgggatcctggcggctgggcagagcgtggggacaggagcccaccatgacagtggaggtagggaaaggaaggattagctttaacatc

SEQ ID NO: 451680 - DNA, 122 bp, Homo sapiens
tagagctctcccactgttcgttaggaaccaaagcaaaatgtataaggctgctttcctcaccgccaagagactccgcagaaaattaaattaaattaaacatgcgccgagggactagggaaaaa

SEQ ID NO: 451681 - DNA, 122 bp, Homo sapiens
tcctcagattagggaccggaggaaggaagtgcaactcccagagagggcagccagccttagcggcggtgacagcttcctcacggtggtcctgcagctggagctccagagaaagaagggaggaa

SEQ ID NO: 451682 - DNA, 122 bp, Homo sapiens
tcggattcttagtcattgccaaacatcacagaataattatctttttactgccacatttaccgccatttttgatatttgggaccgaaagtccaggatttctctgtcttgcttgtaccatctcc

SEQ ID NO: 451683 - DNA, 122 bp, Homo sapiens
gaaaccgtgtgattttttttttaacctcccaaagcaatagcggtgcacttctgcagagctcggataatcccggtcctgagccccagcggccagtctcctttacatatgaacagtcggacctg

SEQ ID NO: 451684 - DNA, 122 bp, Homo sapiens
cgaaaagagcattaaagcacgttataaatatgttaccaccttgagggagcctcaggtccccggcaattataagttaagagcttactggcaatgtaatcattaaaaaacatcagtaacaacta

SEQ ID NO: 451685 - DNA, 122 bp, Homo sapiens
tttcatggtgtcctatttcactctcttaggcacgctctatctgatactcccgttctctcacgcatcgccaaccccgtttttcatgttgaccttcgattccgggcactgtgcacccgggctca

SEQ ID NO: 451686 - DNA, 122 bp, Homo sapiens
aggcatgcttcctgccccacgtttaaaattcaggatctcttccttaaaacatcaactgcacgcaacctctcatctttccaacttgaacttccctttaatttttcttggaaagctattaaatt

SEQ ID NO: 451687 - DNA, 122 bp, Homo sapiens
cctgcgcagtaaaatatttatacaactgctggggccactaggcttcagcgggtgtggaggcggggagagaggaggagtaaaggctgtttacaaacttgacgtacacacgcagtcctatccct

SEQ ID NO: 451688 - DNA, 122 bp, Homo sapiens
cccttgcctcccccctcccatgttatgcacttgttcttggagagatggacgttaaagaagcgtcaagcagttctcactgcaaataaatggtgcagaaataagagagagaggatgaaagccta

SEQ ID NO: 451689 - DNA, 122 bp, Homo sapiens
gaggcaggctaaagcctgctccatgccaagcaatctgggcagcagaataggattggatcccggtgtggtataaagaagaagcattataagcttgccaccaatgccagtgaaatttgtgccat

SEQ ID NO: 451690 - DNA, 122 bp, Homo sapiens
ccctcggtggccgggctcccgctgcggtcgcttctcccgccgcgcctcttccccggccggcgtccccttagcctggactcacgctcggagttgcagctgggctgggaactgccacgtcaaac

SEQ ID NO: 451691 - DNA, 122 bp, Homo sapiens
agcctgctttcttgccgtgatggccgccgccgaggcagggagttgagggtttctgcctttcggagggtttggggggctgtcggtcccgttagaaggccaccaacagccccccaggttgccaa

SEQ ID NO: 451692 - DNA, 122 bp, Homo sapiens
ggagaccgccgggcctgggccgcctccgcttgccgcccgccggcgatccccgtccggctccgctgttcactagagcccccggctcgccccgccgcttctctaggcgccaggccgcgcctccg

SEQ ID NO: 451693 - DNA, 122 bp, Homo sapiens
gtaagagacagaggcggctggcagcccacctcggggaggcgggacggcacaggctccgaacgctggcacagcaatttggcaaagcgtttcagttcctgggtagttcataatttatttaattt

SEQ ID NO: 451694 - DNA, 122 bp, Homo sapiens
tgaacaataaagaccaaaaccataactaaaaaacaaacaaacaaacaaaaaaacgcagcccgagacagatcagaaactaggtgtatgtagggcgccaggttatgacactgttctctgacatc

SEQ ID NO: 451695 - DNA, 122 bp, Homo sapiens
ccaactgagcccctccttatcacctccagaagctgccatggcttccaaagggagtgagtgcggcccagaaatcagatctgggcctagttggcctggcccagtaggcaagctgctcccaggcc

SEQ ID NO: 451696 - DNA, 122 bp, Homo sapiens
aggacggtccagagcgcgggcctccgggtctcaccccgggaaaagtctgggtctgctctgcgctgttgcgtgctgcgctcctgggacctgctgactgtcctagagggaacgtcccgcggtag

SEQ ID NO: 451697 - DNA, 122 bp, Homo sapiens
aagagataattctatttctccaagagctggtagtataaaagccataaatccgtccaggtgcggtggctcacacctgtaatcccagcactttgggaggctgaggtgggtggatcacttgaggt

SEQ ID NO: 451698 - DNA, 122 bp, Homo sapiens
gaataaatagctttcagtcccaaagcaatcactctctatgtcaaacaagaattaggaatgcgttcttatttttgactgccattctcaaagccccagtagattgatgatgtaaacaacttgga

SEQ ID NO: 451699 - DNA, 122 bp, Homo sapiens
caaggcgcggccaccacatctctccgcccccgactcacctgctccctgcctcagtgatctcggcggagaaatgggggagagcccactcattccaccccgctaacccccaggtgctaccggag

SEQ ID NO: 451700 - DNA, 122 bp, Homo sapiens
cctttaaatgccctgtcgggagctgggcccctctgagtggccaacctcaccaggaaagggcgctcagcctcgcgctgcagatggacttggaagcagaccgtcagaatgcagccctccctgca

SEQ ID NO: 451701 - DNA, 122 bp, Homo sapiens
agagtggcgccagggatttgaaccgcgctgacgaagtttggtgatccatcttccgagtatcgccgggatttcgaatcgcgatgatcatcccctctctagaggagctggactccctcaagtac

SEQ ID NO: 451702 - DNA, 122 bp, Homo sapiens
gcctgcccgcccccgccgcgcactcgcgagcgcagacaccgccgcagctcccggcacgcccgccccgcccgcgcacgcccaccccgcgctccctggtgcccaccctcccccggagcccgcgg

SEQ ID NO: 451703 - DNA, 122 bp, Homo sapiens
gcgctcccgagtgcaggttgaggtggtcgtgaagggtggacttctgtgtgaagcacttgccgcagatgccgcacgagtgtgacttgacaccacgatgcacgttcatgtggcggttgaggttg

SEQ ID NO: 451704 - DNA, 122 bp, Homo sapiens
tgacagctgctctgcatgagcctggctccaggctgaagcaatagtcggtcaacacaaaatcgttctcccaagttagggaagcagaagccagacagggagactgggtaggtgcgcgctggtac

SEQ ID NO: 451705 - DNA, 122 bp, Homo sapiens
tatcagaccaaaggattacaaataaatcccctagtattgttgatgtggcatttttccttccgaagagcaatggtttttcttttcacttgcttttggtattggtttaactccacattggggtt

SEQ ID NO: 451706 - DNA, 122 bp, Homo sapiens
gcagagtctgtggtgactttgttcattcttattagctctgcacagattagctcttcacagcgcttggctggttcataccgatttctgataaatgttttgactgattttcctgacttgggaac

SEQ ID NO: 451707 - DNA, 122 bp, Homo sapiens
acacgccgaccgcttcctgcaccgcggccgccggcatctgcccaactcgctcgcgctttccgcccagggttctgaaaaatagaagaaaaaaggacaggtgcgccaggtgggttttttttctt

SEQ ID NO: 451708 - DNA, 122 bp, Homo sapiens
ctggacaagtccaacttcattcttttcagtacgactagctcctgtgcgctgcagaagactcgggctgatctgaaagcgcctctcctattcgagactctcaggttttaagtaggtcttccgca

SEQ ID NO: 451709 - DNA, 122 bp, Homo sapiens
gggcagatctcgccgcagggcagcaggcggtgctggtccagatactctggggagtctgcgcggtgtgcccggagcccctgggcgaacacggggcacgttgctgagaagcagtattttgtgtc

SEQ ID NO: 451710 - DNA, 122 bp, Homo sapiens
aagaagagaggtagaagatgagacattccaagggtggggaatgctttagtcactggagcccgcccatgagagtgagcctggagagcactgggaagcacaaggtgaagctgctgctccccctg

SEQ ID NO: 451711 - DNA, 122 bp, Homo sapiens
atgccacagcttgtccctaggattacaaaactttgggtgttctataccagcaactcaacacgtgattaggtttgtttccttaaaaagtatggcatcaaactgaatatcatttcacagccaat

SEQ ID NO: 451712 - DNA, 122 bp, Homo sapiens
cttttaaaatagctgacatcaatcaatcaaaccagtttcttaatagtttatcatggtccccgggcactccagttattttgtcatgtttccttgtggctccggttgtattaacagatgcaaac

SEQ ID NO: 451713 - DNA, 122 bp, Homo sapiens
gctaaaatatacattcttctctctgtagatataccacaagaccatgagtcaagtgttgcccgaatgtccgaggcccaggtcgccctgagaaggggtggggacttcctgggtcgctgggtccc

SEQ ID NO: 451714 - DNA, 122 bp, Homo sapiens
gaaaccgagcgtgccccgggcttctttcccgccgccagaccccgcacagccgccctgggacgtttttcgaggcttgggacctaagacgggtccccggaccctgctgggaaaccagggggcgt

SEQ ID NO: 451715 - DNA, 122 bp, Homo sapiens
ccaccacggggaagctgtaaggggaagtgagtgagaccaatcggagacgaatctctgccccgttcggcacgcctcccttaactgtcgcgaatgcaaaggcaactttacggcaggcagagggt

SEQ ID NO: 451716 - DNA, 122 bp, Homo sapiens
gcgcagggctcgcggaggcgacgtctcgcctgcggcctctccgtccccaggagcaccggccggccccacccagggccctggccctgcctctgcccacctggctccgccccattcaggcctcg

SEQ ID NO: 451717 - DNA, 122 bp, Homo sapiens
gactttccattcgcaaacagcttgtcagactggaactcttccttcgttcagctggtgtttcggtgccagacaatcaaaggaaaaggagagagaaaccagcgaagccctagagagacagggag

SEQ ID NO: 451718 - DNA, 122 bp, Homo sapiens
ccacggacagtctcggcaagtccgttacacactgaaagaagacctaccactacctcgatacgagggaacacagcccagctcggtctgtgaagctagtagaaccctgatacccaaaccagatg

SEQ ID NO: 451719 - DNA, 122 bp, Homo sapiens
ttcgtttctcttctccattggtgtcccacccacattctccctgtccggtgggctggtgggcggctttcacggattgaggtgggaccaaagaagattcgggttcccagcctgcctcaggccta

SEQ ID NO: 451720 - DNA, 122 bp, Homo sapiens
tggtgcaactactggccgggtgcggtggctcacgcctgtaatcccagcactttgggaggccgagacgggcccatcatgaggtcagttgatagaaaccatcttggctaacacggtgaaactcc

SEQ ID NO: 451721 - DNA, 122 bp, Homo sapiens
gaggcagtgaagagctttttccagcagagggaacaccatgagcataggccttggggcggacgtcttagaacattctagaaacggaaaggaggccagtgagaaaaagggagctcaggagcaga

SEQ ID NO: 451722 - DNA, 122 bp, Homo sapiens
taccaccccctcacgtgcatgtttgctgaatgactttttaaaaaatacatggaaaagtgccggcacataagccctgaatgttagctttaaaaatcgtatcacggccgggggcggtgaatcac

SEQ ID NO: 451723 - DNA, 122 bp, Homo sapiens
ccgccccctgccccgaccccggtcacgtgcgcgccagaccccgccccggcctgtccccggcgattcctgcggacccagctgcggcgacgccaggagaccccaagctgcatcgccgagtgggt

SEQ ID NO: 451724 - DNA, 122 bp, Homo sapiens
ggctccaagaaggcggtgactaaggctcagaagaaggacgggaagaagcgcaagcgcagccgcaaggagagctattcagtgtatgtgtacaaggtgctgaagcaggtccatcccgacaccgg

SEQ ID NO: 451725 - DNA, 122 bp, Homo sapiens
cgcagtactttacggtggcgcttagcgccgcctttgccaagacccttcccgcctttgccgcggccagacatgacgagcaagaggagtctcacccaacgctttgtgaggactctggcctgagg

SEQ ID NO: 451726 - DNA, 122 bp, Homo sapiens
gtagtgacagataaagctaggtgctgagatctggttttgccctctttatgattgtcccatcggtactagaaagtgaagtcattgctccaattttggaagaggagagaataactggctgaggg

SEQ ID NO: 451727 - DNA, 122 bp, Homo sapiens
ctgtgagggagatatttcgcctagataagaaaatgtgacattagtggtggtagtaaggatcgttagtattttcacatattttatgctttgtctctggaaggctaagcatgtaacttgcttag

SEQ ID NO: 451728 - DNA, 122 bp, Homo sapiens
taaagaaaagttctgcacttcttttgtcctgatcagtgcttctctggtaaatgtgctaaccgcaatgatagttgagattttaagggctgggtaaaatagcaaaaaacaatgaaaaggaaact

SEQ ID NO: 451729 - DNA, 122 bp, Homo sapiens
aagaaaggagaaatggagcctacctgtctttctagccttatctcctacccagcgcctactcgtcccttagaccacagccagactggatgactcgattccccaaacatgcctggtgtgctgtc

SEQ ID NO: 451730 - DNA, 122 bp, Homo sapiens
cctgcggcggaggcggctgcgcggtgcttggcaggaagctgcggcgcccggaagagcccgcgccaccgccgccgccaccaccaacacgttgcaaggagtcattcgacgggccgcggccccac

SEQ ID NO: 451731 - DNA, 122 bp, Homo sapiens
caggcatacgctaggggcagtcagctgtgccttctctttcggagttgttccgtgctcccacgtgcttccccttctccactggctgggatcccccgggctcggggcgcaggtacccaacgcgg

SEQ ID NO: 451732 - DNA, 122 bp, Homo sapiens
aaatgcagcgtgtacgtcggttgtctttccttaagctgtatacacactagacggagctttcggcaatgtattcactgaggttacaagagacagggacttggggcttgttttctagattgctg

SEQ ID NO: 451733 - DNA, 122 bp, Homo sapiens
gccctagctgggaggggcagggtgctggggcgcgcccgggtgtgctcgagcgtgcgctggcggcggcccgggctcccgggcgtctctcacgctgtgttttggcggcgcctggggtcttcgtt

SEQ ID NO: 451734 - DNA, 122 bp, Homo sapiens
gtcgcgtgcacggtattgaactctccccttctatccaagcatgaaagtaccaagctctttcgcctagaagaacgctttcaaagcgtatcaaattcacgggtttggagacaaagagaaagatg

SEQ ID NO: 451735 - DNA, 122 bp, Homo sapiens
tcaatagctgctgcaactctctctcgcgttatgggtcggcgctgttgagctcggttttctcgatggccccctcccctccccattttctctgtcttaaaggatggccagacacgatttaatgg

SEQ ID NO: 451736 - DNA, 122 bp, Homo sapiens
tgttaaaatgatattgtcttatcccattttgcccaacatgtagccacctagctactacatcgtaagtatttagaaagtacatacatttgttaccagtgccccatgatagcagtgcctgatga

SEQ ID NO: 451737 - DNA, 122 bp, Homo sapiens
ccggcagcctcctccgccttccttcccgctgtgccctcggggctcctacctccacctcggcgcggcgctctgcccccacccgaagtctccaaggcggcagctcccctctcctgtgtggttct

SEQ ID NO: 451738 - DNA, 122 bp, Homo sapiens
ccgccgcaccagttctttctcgaggttctgggggcccaggtccaagatcaggacatcaatcggcagggcctgtttccccggagcctctccccgtggctctcagagggccacctctgctcgtt

SEQ ID NO: 451739 - DNA, 122 bp, Homo sapiens
agcacttaatttcatccccggctcccggcccaggccacgcagctggactccgccttcatccggaaggagccctttggcctggtcctcatcattgcgccctggaactatccgctgaacctgac

SEQ ID NO: 451740 - DNA, 122 bp, Homo sapiens
taagagcaacaacaggaatgtaggaagttgcttaagcccccatcataaaattgttcagatcgaaaaatatgatctggttagaaagaaagcactggcctgccttagggcttgcagcttcaagg

SEQ ID NO: 451741 - DNA, 122 bp, Homo sapiens
aaaagttattttctatacattcatccggcccagggcggaatttgagaaggcatctgaaaacgaaaggcagagctgcctgtaatctaccacactttcatctctacagcacgttttacctgtac

SEQ ID NO: 451742 - DNA, 122 bp, Homo sapiens
aggggcgggccgcgggcacgccccaatgctgaggcctctgtgacgtgctccctggccccccgagcctggagaagcgtgagtctgctgcatactccctgacccctggctttctggggtcccag

SEQ ID NO: 451743 - DNA, 122 bp, Homo sapiens
atccctgtacccaaagggatggggcggggccctgggtccccagggatcctggctggaggtcggggcgggcagcaggcgcctaccttgccgccgggcggcgcggccacgcagcggctgagcga

SEQ ID NO: 451744 - DNA, 122 bp, Homo sapiens
tgcagccgtctgatgaggccacaacccctaggcccctcaggagctttgcagagaggaggacgtgtactccaggcgaggcctctggacctgtgttcctgtgccaaagtcctgtcaggctggtg

SEQ ID NO: 451745 - DNA, 122 bp, Homo sapiens
ccagggagtcccagggtccatttgttggcccacagcttctgctttcctgcgggcctcttccgagtcccccggtctctcaggaatgaagccccaacgctgttggcaagacccaccaggccttc

SEQ ID NO: 451746 - DNA, 122 bp, Homo sapiens
acttttgatgacggattgctcagtccttagcatctcttctttcctgtgtgtgtgtgcgcgcgcgtgtgtgtgtgtgtgtgtgtgtgttgttattttacttggctaatctgcgtagaattttt

SEQ ID NO: 451747 - DNA, 122 bp, Homo sapiens
cgaactgaccgccggctctgccgagcagcctcgaccccagggcacccccgggagagagggcgcggctcaggtccctgcccgaacccctggggtgctgagagactccccagcgccccgcgtgg

SEQ ID NO: 451748 - DNA, 122 bp, Homo sapiens
aaagattttcacttctgctgtctcttcctggatctcttgacaaaacagtcactctctttccgctttcctcttgttttcctcatttcactagtgtgtgtggtagagtgtattatcaaaactgc

SEQ ID NO: 451749 - DNA, 122 bp, Homo sapiens
ataattcataggaagtgaaatttaaaattgtccccatctttgcctttctaagctgctgctcgaaagagaatccagtaacatagagtgaggtctagggtttccaaggatctgtactttcccct

SEQ ID NO: 451750 - DNA, 122 bp, Homo sapiens
aacattcctattttgatccttttcattatttatcattcatacccctaactacctttaatgcgattagttttagatgtaaaaacaacaaatacgctacaaatcagctcttccaacattttctt

SEQ ID NO: 451751 - DNA, 122 bp, Homo sapiens
atgagtttacaaaataagagctcatttgttttttgatatgtgtgcttgatttgtggctcgcggtcgtttgtgcgtctatagcacccttgcacaatttatgatgaattatggaaatgactggg

SEQ ID NO: 451752 - DNA, 122 bp, Homo sapiens
taggcacaaaaactcagggtggcttcggggggagagggagcggggaaagtgagccccgcgcgcccccatcctggctttccgcctcggagcggatttgtgcctttttgtccccacttttatgt

SEQ ID NO: 451753 - DNA, 122 bp, Homo sapiens
agcgcctcatatttccactttccagtggtaactagcagaggtaagagaaaaacagccatgcgggtgagtcatcattcctcactccaggaaatggctcattttacaagcttttggaaggacct

SEQ ID NO: 451754 - DNA, 122 bp, Homo sapiens
gtatttcctggatgcacttctgtgagccccgcgcagccagagcagggggtccaggttcgccgcggccgcggggagcagggcgggcctggttgaggcccgcgcggaggccccgagtccgcagg

SEQ ID NO: 451755 - DNA, 122 bp, Homo sapiens
ctgcccttcagtaccagttccgtctgcgggtgtggagaccagtccccacccacagcgacccgtcctggccctgccgtgcacttcgaaggcaggcacagacaggaaggcacgtgcgtgctgac

SEQ ID NO: 451756 - DNA, 122 bp, Homo sapiens
tcactcctccctctaggaactgtatcccaaagaggtttcaaaactccatcaaccaaagagcgctggtggtggtagctggagaccctcattgggaagtactttccagtgagaaggaatgaaac

SEQ ID NO: 451757 - DNA, 122 bp, Homo sapiens
ctcggaggctgggtcggttctgggatctccgtgggggctgagtcggttctgggatctcctcgggggctgggtcggttctgggatctcctcgggggctgggtcggttctgggatctccacggg

SEQ ID NO: 451758 - DNA, 122 bp, Homo sapiens
ctgaacaatgagaacacatggtcacatggcggcgatcaacacacactggtgcctgttgagcggggtgctggggagggagagtaccaggaagaatagctaagggatactgggcttaatacctg

SEQ ID NO: 451759 - DNA, 122 bp, Homo sapiens
ccgctcactctgctctcggagaggtaacagtcacttcagtagctccgattgtcttttagtcgaccagatgctaggcgctgtgggtgtagcagcgaataaaatgctgctccttgtatcttgga

SEQ ID NO: 451760 - DNA, 122 bp, Homo sapiens
ccttatgtcttcacatagtctctcctttgtgtgttctaatctctttataaggacatcagtcgctggattatggctcctcaccctatgactttatttaaccttaattacctctttaaaaatct

SEQ ID NO: 451761 - DNA, 122 bp, Homo sapiens
tcctccgctcataccctgggtctcctcctttctttttcttttctttttgagacgaagtctcgctctgtcgcccagggtggagtgcagtggcgcgatctcggctcactacaacctctgcctcc

SEQ ID NO: 451762 - DNA, 122 bp, Homo sapiens
ccatagtcctccagccgcagatcctggatctccagcgagacgtcatgctctttgtcctgccgcaggtgcacgcggccttggtagtccccaaaggagcggtgcctcagcccgatggccaccag

SEQ ID NO: 451763 - DNA, 122 bp, Homo sapiens
caaaggctggcttttggtgcctttccaaggggaggggaagaacagccactgcagcagcttcgacgtgtgttgcagggaagttgctccacctacatttggttccttgggtttttcagatgcta

SEQ ID NO: 451764 - DNA, 122 bp, Homo sapiens
gggcggggtgcagggggggacggccaaggggagtggcatcacggatcagtacggcccctccggccaaccggatcccaagaaggcggaggaactcagacttcacgccccctccctgccgcgcc

SEQ ID NO: 451765 - DNA, 122 bp, Homo sapiens
agtcgctgcgccacgtctgggcccccaggctggccccgcccccgcccccgcccccactcccgctagaggcccagtcccgctggagaccacgcccccagcgctcggtctccgccccaggactc

SEQ ID NO: 451766 - DNA, 122 bp, Homo sapiens
gaacagagaggagggtgatgaactgggggagcgcgcgctgggtgggggggcgcggggcctcgccgcggccttctgatgcggccccgcccccacgagggacgtgaagacgcggaccccgcgca

SEQ ID NO: 451767 - DNA, 122 bp, Homo sapiens
gggtcatgtccggattcccaggccggttactgcctctctgaccccagacgtctcatctgtcgaatggttacatttgggaacagcacccactctacgaagccaccatggagacgaaagagcca

SEQ ID NO: 451768 - DNA, 122 bp, Homo sapiens
agggctgagaggaaaagagccggagcgggtcccgcctttccctgtccttctatgccatcacgtcagcgtgagtgcttgcctgatacagggaagtgacacaagtcaggaaggacttcatgggc

SEQ ID NO: 451769 - DNA, 122 bp, Homo sapiens
ttcaggggctatgaatctgagcctttgtttcttgaactgtaaagtggagatgatgtaaaccgccttgcaagattgtagagttgggtaaggtcatgaacataagggcctggcacaaagggtgc

SEQ ID NO: 451770 - DNA, 122 bp, Homo sapiens
tcccttccagcttctaggggtcactggcaagcctcagcattccttggcttgtaggtgtgtcgcttccatccctgcctctgtattcaccccctcttctcctccgtgtcttgtgtatctcaaat

SEQ ID NO: 451771 - DNA, 122 bp, Homo sapiens
caacggtgtcattctctagttccggatctaaggtgacccagttgcgaagtccagccttctcgtctgctcatggagccttcagggccatatttgtccctgcgaatttgaaaactagactagag

SEQ ID NO: 451772 - DNA, 122 bp, Homo sapiens
tagctaaagtcaccagcgtgcgcgggaagctgggccgcgtctgcttatgattggttgccgcggcagactcccacccaccgaaacgcagccctggaagctgattgggtgtggtcgccgtggcc

SEQ ID NO: 451773 - DNA, 122 bp, Homo sapiens
gagccactgtgccccactttttcccagtgtagacatccacattccagaaatttccaggtgcgtgccctgctcttccctcttcctgtactatcctttgcatcagttctaccaactgcagcccc

SEQ ID NO: 451774 - DNA, 122 bp, Homo sapiens
ggcagcctgggttccccgcctccccacctcctgctcctcctcccccgagccctaagggcccgcagggcctccagtagcaaagccactggccccgcgtccccgcgtccccctgcgccgcgccc

SEQ ID NO: 451775 - DNA, 122 bp, Homo sapiens
atacactttgagcctgagtgcccaccccacattcaaactcagtcactgttccggaaagaacgtggccaatttcatgggtcaaggggcccaggattcatcactgagggatgccaggaaggaaa

SEQ ID NO: 451776 - DNA, 122 bp, Homo sapiens
aaaatatcagtaacatgagaattgcctgcccagcaaggcaaggatctggaccggtgggcgcggcagggcgcttctgagccaccgtctggctgccgtgccaccaccgccggcgccccgctcca

SEQ ID NO: 451777 - DNA, 122 bp, Homo sapiens
accaaacagctggtgcacagtttcaccgaaggccgggaccagggcagcgcctatgccaaccgcacggccctcttcccggacctgctggcacaaggcaatgcatccctgaggctgcagcgcgt

SEQ ID NO: 451778 - DNA, 122 bp, Homo sapiens
cttggggcagaagtctctggatggctccagcctgtcccgcggagccggccccaccactcacgtcttcccaccggaggccagcacctcgaggagcagagaggagctgtccccgagtgccctga

SEQ ID NO: 451779 - DNA, 122 bp, Homo sapiens
aatgactgctcttgtaaagagcacaaaagcagccatggagcatacgtaaatgaacaagcccgtatgttccaataaacatttatttaagaacattgatttgaatttcaggtaattgtcatgtg

SEQ ID NO: 451780 - DNA, 122 bp, Homo sapiens
cccctccgaagcgccttggccccagctgcactctcctcgcccccttcctcccagtgggaacgagccagccagcgagccctctccccacgggtggcgcccgcacccctccttgcccccgggcc

SEQ ID NO: 451781 - DNA, 122 bp, Homo sapiens
ggaggagttactgggttgattttgcagtctctctcctctgcccatgctgctctcgtaacccgtgctgctctcgttacccaggctgggcgtttgcttgtgtcctgccccgtgtgatgccgtgg

SEQ ID NO: 451782 - DNA, 122 bp, Homo sapiens
cggacttccacaagtaggtcaagaataataatgtgcagacctaattcctctaatttacggcgaacatctcatggtcaatctccccgcggtcaaaggactgtgtatctcttcctctcagagcc

SEQ ID NO: 451783 - DNA, 122 bp, Homo sapiens
ctcccccacctcactcctctcccagagacgacctcaaacgtcactccgaagattgttattcgaggtcattctccatgcaccgctgggcacatgcaggaatacagacacatgccagtgctctt

SEQ ID NO: 451784 - DNA, 122 bp, Homo sapiens
gtggccccgccggcggcgagccgtggcccctctcgggatccgtccgcgccgcgcgattggcgcaaaagtgaatgaggggcggttcacgtggccgaagtttgaccaaaaaaaaaaaaagccct

SEQ ID NO: 451785 - DNA, 122 bp, Homo sapiens
gcggagcatccctgcaggggactccggccagcctgagtgacgcgatccaaagagcgctcccggttaggaaattgcccccattggaacgccttgccagagcagcacgtagcaggcccccgtgg

SEQ ID NO: 451786 - DNA, 122 bp, Homo sapiens
aaggaagcctttttaatgctgtgtccagatgcttaccggccacgtatggtaaagtcaggccgtgccaaaaaggcaatgacaaagaaaacctttctccgccgggcacccccagcgcccaccaa

SEQ ID NO: 451787 - DNA, 122 bp, Homo sapiens
ccaaaggatgcaaagagccaactgggttctggctcaaggcagggagttgggcaggggcctcggggcaggaagtgaaagaagtagtcactaagcctgaagatcctggcatcagaccacagggg

SEQ ID NO: 451788 - DNA, 122 bp, Homo sapiens
aagctttctgcaaagcctttcatctccctgcagcaagtaggcagtgagctattgtcgccccgatttttgcagggggtgaatgccagtgatcggggatctcccgtcgaggcagagaccaggcc

SEQ ID NO: 451789 - DNA, 122 bp, Homo sapiens
tgctgctggctgggacccggccgcagggtggctgggagcgctgcatgaccccgccaccgccgtccccactcctaggcgcacaggtcgaggaggaccgcgctgactacaaagagttccagggc

SEQ ID NO: 451790 - DNA, 122 bp, Homo sapiens
agccgggattacccgccccgcagccggatgaatgtgctgagcacaaagtctgctcaaagccgagcaaacggactatttgtgaaaatgccatcctggctcaagtctgattaagaccgggggtc

SEQ ID NO: 451791 - DNA, 122 bp, Homo sapiens
gggtgccggggcccaccccacgccctgcgccctcaggtgccagcccccatccccttcacacgtgctcctgcacagcgggaccccatctgcccctgcagagttggcttgcagggctttgagag

SEQ ID NO: 451792 - DNA, 122 bp, Homo sapiens
cactcccctggcaaactcagtagcctcggaccgtctgcgcctgcgcggacgactgggctgcgcatgcgccctctgccccgcaggagctgtaacagtagctgaagtttaaagagaggctgact

SEQ ID NO: 451793 - DNA, 122 bp, Homo sapiens
gggcgccgggaggctccgcgcgctgctgctggcgctggtggtcgcggggatccccgcgggcgcctacaacctcgacccgcagcgccccgtgcacttccagggccccgctgactcgttcttcg

SEQ ID NO: 451794 - DNA, 122 bp, Homo sapiens
gagcccaccgggaggaaggaacaactccagacgagctgccttaagagctgtaacactcaccgccaaggtctgcagcttcactcctggagccagccagaccacgaacccaccggaaggaagaa

SEQ ID NO: 451795 - DNA, 122 bp, Homo sapiens
tctcgttcacgagcatgtaagacgccgtctgcacgataaactcggggagccgggagctctcgccattaaacgtttcggggaagggcaccgggcagctcggcggacgtacctggcgcagcagg

SEQ ID NO: 451796 - DNA, 122 bp, Homo sapiens
accatcacagttacagaatgctcttatctgacattagtgtttcagaaaatggtttatgttcggtgggagaacaccaaacttagttgtgagtgccaggctagcttctgaataccagggaatgc

SEQ ID NO: 451797 - DNA, 122 bp, Homo sapiens
caccgtgtgcgctctcacctttgagctgaggtgttcacgtccgaggtggaggaaggagggcggcaggtgcaggccaggaccggacctcggttatctagagagtaactaacagtgctttgtca

SEQ ID NO: 451798 - DNA, 122 bp, Homo sapiens
gtaggtgctccagatgtcggacacgttgggccacttgaacagcgagatgccgcgctcgtacgcctgttaccagagggagagtcacatgtgagagtctgcagatagagaccaccaggcacccg

SEQ ID NO: 451799 - DNA, 122 bp, Homo sapiens
tctgctttcacaacgtctggggacctcatcttgggtggctcagatggctggagatgactgcgacggtccactggggctgtatgtccgggagctgggctgtgttctcatagcatctactggag

SEQ ID NO: 451800 - DNA, 122 bp, Homo sapiens
ttgttccttctgatgttaagatgttttcggagtttcttccttctggtgggttcgtggtctcgctggctcaggagtgaagctgcagaccttcgcggtgagtgttacagctcttaaggcggcgc

SEQ ID NO: 451801 - DNA, 122 bp, Homo sapiens
tttgccaaggaacatgtcccagtgactactgtccccatgggccagccaggccagtagagccgcaggcaagagagctgaaagctgtagggtgtcatatgaagccttcaaggctcattctccat

SEQ ID NO: 451802 - DNA, 122 bp, Homo sapiens
agccagcccctcttcacccctggctcttaggaccaacatcgcacctgggggaggcaaccccgcgaggcggggactgagttgcagcccctcttccccgcctggctcttaggatcaccatcgca

SEQ ID NO: 451803 - DNA, 122 bp, Homo sapiens
gacgcagcctgcctgactgccaggagccaagcgcgagtcggcccagccaaagcgcatgcgcgaggcgcgcgccgctttttgcttcacagtgcttcccacggttgtcttaggaaccagtcccc

SEQ ID NO: 451804 - DNA, 122 bp, Homo sapiens
tctttgaaaccttggcgtgcgcgagaatttcccagtgagtttgttaaaatgcagattcctcgggtctgcgtagacagactgtgccccacgcttttctaagtcagttgtttctcgggctaccc

SEQ ID NO: 451805 - DNA, 122 bp, Homo sapiens
ctttccagtttcccctgctcttcaggcagagaaaagacataaatttgtcaggttttgagacggagagattaaaacaaacaaaccaggacagggatgctagtttgatttggaaaaggctagac

SEQ ID NO: 451806 - DNA, 122 bp, Homo sapiens
catttgagacagcctcaaatattcacagctcccaaaaggctgtgccaaagaaacttcctccgtgtagctgtaggccatctctcaaagtgcccttggtgtgaggggactgaaaattattgctc

SEQ ID NO: 451807 - DNA, 122 bp, Homo sapiens
accggccctggcctgggaggggccgtctgccaggggaacaagtacagttgtgatctggggcgctcagcgcctccagtataaaggagggctgggtcttaggtgtctctgggggccttctgcga

SEQ ID NO: 451808 - DNA, 122 bp, Homo sapiens
ccgcccctgcaggctgtggaggggatgtcaggagactggctggcctcttttcttggcccccgactccttccagtctgacactgaagactttataagcttccccccgaccaccctccacgggc

SEQ ID NO: 451809 - DNA, 122 bp, Homo sapiens
cgcaggcgccgtgcgggccaaggtctcgcggctggtggcggccgtggtcctgctcttcgccgcctgctggggccccatccagctgttcctggtgctgcaggcgctgggccccgcgggctcct

SEQ ID NO: 451810 - DNA, 122 bp, Homo sapiens
aatcactttgctgcattaaatatgcatctgttatattgtgctgtgaggctgggtaaatcacgcacaggtaccacctgttttatctgcaacagtggaagccacagaaagggaagaccacaggc

SEQ ID NO: 451811 - DNA, 122 bp, Homo sapiens
ctgaatggaaaaaacattgaagacgtcattgcccagggtgagttgatgtggacgggctttcgtttgttttcatggtccatcctaatccctgccggtccatctgtggcctgccaggtttcgct

SEQ ID NO: 451812 - DNA, 122 bp, Homo sapiens
tttccaggctcatgggagctgaaccatgaattaagagtttggctcattaggaaggacagacgattgggcacgctgtggagccaacatgttttatgaggctgggagtaggttacacaaagtgg

SEQ ID NO: 451813 - DNA, 122 bp, Homo sapiens
ggcgaggggggctcccggctgcggcagcccctcagcctccgagccgacgatgcggtctctcggccactgacaacaggaagcagcgccccggcccctgacgccatcacgttggctcggcgctc

SEQ ID NO: 451814 - DNA, 122 bp, Homo sapiens
ctcggggccgatgaggcggagggtgtctgttggtcggttcttcctgcctgccttcctgtccgtcgggcagtcgggctggctgtcggtagggggaggccccgtgcgccctgacaggcgcgagc

SEQ ID NO: 451815 - DNA, 122 bp, Homo sapiens
gaacaaggcccgcagcagcagtggcccgaagcctctggttcgagccaagggagcccagggcgctgcccccgtaagcacctgaccttccctggggagcctggctcttgatgccccccgcccca

SEQ ID NO: 451816 - DNA, 122 bp, Homo sapiens
cacctctttgcctcggcagctggtacaggacgagaacgtgcgcggggtgatcaccatgaacgaggagtacgagacgaggttcctgtgcaactcttcacaggtgagggaccgggccgaggggc

SEQ ID NO: 451817 - DNA, 122 bp, Homo sapiens
tggtttgacctgacctaagacaaagaaagaggtggaagcgacagcaaaccacagtgcacgcgtcctttctaactggggcttggaggactgcagtatcgtaactgaacttttttttttttttt

SEQ ID NO: 451818 - DNA, 122 bp, Homo sapiens
cccagagtcaattcaggaggataattctgagccaggggtgggggtaccggcctggagctccggggggtacgggctgatcctacgaaaggaaagtcaagcctgtgaattgcagagcctggaca

SEQ ID NO: 451819 - DNA, 122 bp, Homo sapiens
gagccccaggagggcctgggcatgaagtcagaggcccacacgggagccatgtggaggactcggcgggtgggggaccgctcttgggagacccaggcagctgacacccttgagagggcctcttt

SEQ ID NO: 451820 - DNA, 122 bp, Homo sapiens
cctgcagctctcagactggggcggccctctcccttgccctcctctgctcggctgtgatttcgctgtgcttctgtgggagaaaatgctataagtgactctatggacatccgtaaaaataaatg

SEQ ID NO: 451821 - DNA, 122 bp, Homo sapiens
ccagtccgggaggtggggggcagcccctgcccagtcagccgccccatccggggggtggggcgcctccacctggccgctgccccgtctgggaggtgtgcccaacagctcattgagagccggcc

SEQ ID NO: 451822 - DNA, 122 bp, Homo sapiens
ggcgggtccctccggcggccgccgccgctgacagctgttgggggctgcggaggccgaacgcgcccacgacaggtgtcaggctggccggcacgcctgcctcctgccaccccaccctccccgga

SEQ ID NO: 451823 - DNA, 122 bp, Homo sapiens
catagctgatgtgaacccgaatccccacgctgtgctgtgtacgcactgtaggtgcagaaccgtccacacaaaaatacagtcttggcattgtttgttctttgtgaggctggttaatagcatcc

SEQ ID NO: 451824 - DNA, 122 bp, Homo sapiens
gccaggtaaatgttccccttctggaggggagccgcgatgggtggcaagtaggcacccacacgggaagcccgtgacccgcgccgcaggtgcacagggcgctggcgactaggggcaggggtggg

SEQ ID NO: 451825 - DNA, 122 bp, Homo sapiens
ccccattgttaccaagcagcgacaggaaacgactgcccacaacaggaagtgatgatgccgcgtcccggcaccgcagccccactcccagcctattagccaatcccagtcgattcctcgaaaag

SEQ ID NO: 451826 - DNA, 122 bp, Homo sapiens
ggcacaatggagtagccactggagtgagggggaccggagtgagggggaccagtttagagacgttccagtcccccaaacataaaggtgctaagggtgcagatagcagagggagggactgtgga

SEQ ID NO: 451827 - DNA, 122 bp, Homo sapiens
cctgcacaacccactagaaagcacccgtgaccgtcccctgcgcccgttatccctgcgccccgcacccctgtatccccggcttctctgcagctgtacaccctgcactgcggcgccccccagtc

SEQ ID NO: 451828 - DNA, 122 bp, Homo sapiens
gcatgggcaggtagcagccttagtaatataattgcataatgccggtcaatgggtctggcccgattaaaccaaatatagggtttttatttggcaacaagagttattttcaatgtcactttatc

SEQ ID NO: 451829 - DNA, 122 bp, Homo sapiens
gggacctgcttgacaaggtcacactccagtttggtttggaggagagcttgacttccaacccggctctggagcacagtccaagatgccactagcttcactttcttttttttttttaccacctt

SEQ ID NO: 451830 - DNA, 122 bp, Homo sapiens
caatagcatagatacggatggatcggcctcacataaaaacaatgcccttactgaaatgcacgctgtttggggaatggatcacatctcactcacacctaacaaggaaatgactgccctctcgc

SEQ ID NO: 451831 - DNA, 122 bp, Homo sapiens
agactcgggaggccacaggctcagcgcgacaccacgaccacaactaggaggcaccatcgtcgatctacctggggaggcacctacaaagccagcagactgacacccgtgtcctagccgtcggc

SEQ ID NO: 451832 - DNA, 122 bp, Homo sapiens
gaggaactcggctccaggtgcatcttgttaaaggctgagccccatttctcacatgcgttgcggaatcgaattctccgtgtaactcagaactcagagtgaatgagagatcgatacatgtaggg

SEQ ID NO: 451833 - DNA, 122 bp, Homo sapiens
gtatctttgaataatactagaatctttttatactttaacaatgtttgcaaagttttcactcggcctctaacttatgaatttggggaaatacaagactgagtcatcatttccttgtcaacatt

SEQ ID NO: 451834 - DNA, 122 bp, Homo sapiens
agagtaactgtgttgggggaggggagccatctccttcgtttgcagtaaacactggagtcacgtggcccacagtcttctttagtaattggtttccttggaaggcctgggaattcttgaagctc

SEQ ID NO: 451835 - DNA, 122 bp, Homo sapiens
tagtgacaggtcttcctcttgtggacctctctttgcctcccagaaaagagtctccctctgcggactcagcttgtgaacagaaagtgaaggcttccagagtccactgaagttaaaaatccttc

SEQ ID NO: 451836 - DNA, 122 bp, Homo sapiens
gcaggtcaggcaggtgagcacacagggcagccccatccccggatcccgctgctccccaggcgcagttggcctcctgaccgtcatcagcaaaggctgcagcttgaactgcgtggatgactcac

SEQ ID NO: 451837 - DNA, 122 bp, Homo sapiens
acacagaaacacgtgcctgtgaactggtgaaatctggataacatccgtggactgcacaaacgtcggcgtcctggttgacgttgcaccagctgcgcatggcagtgcctggggaagccgggaga

SEQ ID NO: 451838 - DNA, 122 bp, Homo sapiens
ggacgcccaagcgtaacctccccactctaaaccgttaggaatcagtggctggactcaccgcgtcataaaagcataaactgtgacccgatgagtccgcgcactcggaaaacaagagaacgctc

SEQ ID NO: 451839 - DNA, 122 bp, Homo sapiens
gggcgggcgcgcggtctcgggcgaggcgggggattcaagcgcgttataaggcgaggagcccggggcgtccgagacgccgcgctcggagccgcgagggaaccgccgcccgcatggccccggcc

SEQ ID NO: 451840 - DNA, 122 bp, Homo sapiens
cgaaagccttgcctcagtcctcagtgtcttcagccccaagcgcttgctatggcaaagaaccgtttctccttaagccacaccccacccccctcggcctgccctcagctgtcctgcctggcttc

SEQ ID NO: 451841 - DNA, 122 bp, Homo sapiens
ctgggcacgattgcattgtggggagggaggctggggctctgtgagacgtgctcctggcaccgccagctgctacttggccctcgccggtggcccaccaggtaggcaagagctggggcaggctt

SEQ ID NO: 451842 - DNA, 122 bp, Homo sapiens
gctcacctgggaggaggcaagaagcgggaattatgcaacgggggatttgaaaggcatgtgcgtggcttgggctttccgtgggtggttttaggcatcgttctttttggaatatactccccatc

SEQ ID NO: 451843 - DNA, 122 bp, Homo sapiens
cgctgttcggcgctctgctttaggcggtggggggcgggcgcgcgcgtaaaagcatagagacgggcattgagctcttgggctagagcgtcgccgagtcggagccggagcctgagccgcgcgct

SEQ ID NO: 451844 - DNA, 122 bp, Homo sapiens
atgtgaggtggttggtctttgttaaattcaaaaatggaattttggatattgttcttgctacgaaatttatctttgtgtgtagagtatggaattgaaacagtttggattatggattttaccta

SEQ ID NO: 451845 - DNA, 122 bp, Homo sapiens
caatattgagcttgcatgggcccccgataaagcggctgcttgctgcagttgctctgtcgccgaaattcgaggtgcagccccagaatggaggccgctgtccctggacacttgagccagggagg

SEQ ID NO: 451846 - DNA, 122 bp, Homo sapiens
ttctaggatttattagtttgggttgttaagagttatacggctggcaacgctgtgcagggccgtttacttcagctgcatacattttttcgctgcatgaggggttggggagagctactctcttc

SEQ ID NO: 451847 - DNA, 122 bp, Homo sapiens
cttctttttgagggatatgttgcttttcatttttaacatcttttgggatatcaccaacgacggactctctatgtacagtctcccctatgtgtgatattctccgcaaaataggtcttttaagt

SEQ ID NO: 451848 - DNA, 122 bp, Homo sapiens
ctcacccccggctcggggaagctcagggtcttggggtctcagggcggggaggcaggacgacgcattggcgacagcagctctccgtatcaccccatcccccaagtcagcctcgaatactcact

SEQ ID NO: 451849 - DNA, 122 bp, Homo sapiens
gagctccttggctatcaggagaatcctggacactgtactgtgcctcccagtttacaaacacgcccttcatctcaagtggccctttaaaaggcctgctgccatgtgagagctgtgaacagctc

SEQ ID NO: 451850 - DNA, 122 bp, Homo sapiens
ttgattcttctgtccatggctttggcttcctgggatgagaaaggaccagcagtgggaaggcggtaaaggtggattcagtctgggcatttgaggctcctactgttcagtgtctttttcactgc

SEQ ID NO: 451851 - DNA, 122 bp, Homo sapiens
gaccgcggacgccgcagcaagcagctccctgctcccgccacacccgccgagccagccgcgcggaacccactcccccaccgtgggcccgcctcccgccgccagcctgcccacgattggtcgac

SEQ ID NO: 451852 - DNA, 122 bp, Homo sapiens
tcggagcaggcactcagtacaactcacttagcgaagtaaagctgcctggcggggacactccgggctgcaggtgtgcgtacaaggggcctcctcatggcagttttggggtggaaacagtacca

SEQ ID NO: 451853 - DNA, 122 bp, Homo sapiens
taagcaggtcagggtgatgtggcgggctgaggccagggatgtggacagcttgacgggcggcgaggccgctggcgcttataccgacctggctcctgtaacgcgtgcgggaagtttcatcatgc

SEQ ID NO: 451854 - DNA, 122 bp, Homo sapiens
ctcctcagtgtctttagaagctcaattttccccaagttcatggcccagctgttcctaaggcgtggccccattcttcatggtccaggtcagaatccatcctctctgaagcaggatggaggatg

SEQ ID NO: 451855 - DNA, 122 bp, Homo sapiens
cctcaccaacaaaacccccggtgtacggtgggtggaactcacctcggatgcagctatagccgccatcacaacctttctctcttcccacttccggcaacaagatagagcacttccgtcaacct

SEQ ID NO: 451856 - DNA, 122 bp, Homo sapiens
aagacaacttgcctttgttcccggacacttggggtgttgtttactttctcctgcggccagcggccgaccgggcgctgctggctacccggggaggggctgagggctgcggcaccgacaccccg

SEQ ID NO: 451857 - DNA, 122 bp, Homo sapiens
cgtggccgcagggctgagggtttcgcattggaggattaatatgaccgtcagcagctcagccgctctctctttctgggtgggtttcatcttggtaaatgtggattctcagactggccctgagg

SEQ ID NO: 451858 - DNA, 122 bp, Homo sapiens
cagttttacctgattctggggttcagcattaggttctgcccactgtcctgtttccaaaaccgtgttactatgcctgcatcaagcttatccacccgcggcccacgggctgcatgcagccagga

SEQ ID NO: 451859 - DNA, 122 bp, Homo sapiens
ctgccatgcccagcacacacagccaggccggatgtgcccggcatcttggaaagcctgatccggatgcaacagcgccccctgagccagccgttggctgctccctgctgcagcagaagttggct

SEQ ID NO: 451860 - DNA, 122 bp, Homo sapiens
cccgcgcgcccgcccaggcccaagcccggcccccacgggcgcctccgccgcggcctcgcccggccccgccgccggcccctcgctctgcccggccccgctcacccagaagatgaggttgagaa

SEQ ID NO: 451861 - DNA, 122 bp, Homo sapiens
cacaacccataaggacactagcgggacaggggtgagcacctgcggtggaagcggggcgggcggccgacccacgaggacactggcgggacaggggtgagcacaacccacgaggacactggcgg

SEQ ID NO: 451862 - DNA, 122 bp, Homo sapiens
ttcgacgcagagctccggaagtgcctgaggagcagtggttcttggaaatcgcccgtcctccgcatcacagcctctcaccagcaaagcagcctctgcccaggccctggcgggagagctgcaga

SEQ ID NO: 451863 - DNA, 122 bp, Homo sapiens
ccggagtggtgtcgcagcgggcgggagtgtgaggcgaccccagaaacactaagagagcggcgcggcccactggggcctctgccgccggtcccgctcccggagccgggggcccctgcgtgcgc

SEQ ID NO: 451864 - DNA, 122 bp, Homo sapiens
tgcggagcaaaaggcaggacattgctctgggagaattacagaaaagggccaagtaaacagcgaagtgatcactttagtgctgtggtgagacatgcccaggcaaaccccagaaaacaagggga

SEQ ID NO: 451865 - DNA, 122 bp, Homo sapiens
ttcccgcgccccgaccccgaactcctctccttagttctcccgggcaccctatcctatcaacgcctactatcccagccaatcgcgcaggatccgagtcgtgcctccggtccaccctcctccca

SEQ ID NO: 451866 - DNA, 122 bp, Homo sapiens
gggggaagccaaaagttgtgagtctgtcataatgatgtcaagtgacacactttttcattgcgatctaggtgtaccataccttagcaaaaacaatctattttccatttctggatttcttaata

SEQ ID NO: 451867 - DNA, 122 bp, Homo sapiens
tctgcaaattacccaatcagctctaagtacaaagcatcgcgagtctttagtgctctttggcgctataagcccgtgggaacgagcattggagacccttttcacaagatggcgccgaaagcgaa

SEQ ID NO: 451868 - DNA, 122 bp, Homo sapiens
gcagcggctgtgcgacatgtcctcgtacaccacacatgccgccgaattcttatcccgccacgagcacagtttctttatctgaaagacagaaccgccgtctccaaccagtggccagcgtggtg

SEQ ID NO: 451869 - DNA, 122 bp, Homo sapiens
caatctaatcatacccctactagagaatcagagttatattgcaagagatctttagatttacgtagaaacagagaaatgttgatcaaaatcttttctgggtatcccaaataaaagtatgaaaa

SEQ ID NO: 451870 - DNA, 122 bp, Homo sapiens
aggatggggagacatctgtatttattcttttagagctcggggtctcactctgggctcaagcgattcgcccgcgtacctgggactacaggtgcgcactactgtgccaggatagtggttcccaa

SEQ ID NO: 451871 - DNA, 122 bp, Homo sapiens
gaatttgcaaaattgtcagcagccgctcagaagaaaaccccggcggtgtcagtgggccaccgttttgagaaatgctgaaatgtgtctagggaaaaccttaagaccccgaaaggaggcctgag

SEQ ID NO: 451872 - DNA, 122 bp, Homo sapiens
atggcctgagtgctggtatccacagctgtagggggttatgcagaaccagaaaagactgaccggagggagactctgaatgtaaatggtcagattgtgtctagaaaattctatagttaggttga

SEQ ID NO: 451873 - DNA, 122 bp, Homo sapiens
aagaatgcagggggaaaaatagccttgtggtgttttttgttctctctgctacccatcaaacgctgggcataacatgggaggagcaaaggcagtgaagggcccttcagtattccatttcctta

SEQ ID NO: 451874 - DNA, 122 bp, Homo sapiens
tgccctgtgctctgagcaaatcgaagcctcctgcatccttcaaggggtcccctctcctcccgtctcctcccagtatctcttggatgcaggcaggcctggagctgattgacagaagctgctcg

SEQ ID NO: 451875 - DNA, 122 bp, Homo sapiens
atggggaaggggggtagatattattccccgcatcactgtggatgtccaccccctgcgatgcggctcgtaatatcgggggtgggggggtgatgtttctccccgcatcgcgggggtcgcctgcc

SEQ ID NO: 451876 - DNA, 122 bp, Homo sapiens
gaaagcactaagtacttccaaagcgcttgaaatgataaatgcaactcaatagatagccttcgtcctggtatcttacaaaaagtaaataggatttagcaaggttttctccctttagttaatta

SEQ ID NO: 451877 - DNA, 122 bp, Homo sapiens
tgctgaggcgatgatagcagaggggcccaaggaagtccgaggctgtcctctggggcatgacgagggcggaggggaccaggagcccgtcccttccctgaggggccctcctgccgccatcccat

SEQ ID NO: 451878 - DNA, 122 bp, Homo sapiens
atgtgcctgttagagttggctctgtcttctcctgccaaggcattcacagcttcttttgcacgtacgggattacagtgggaaacccattccacccagtggatggcctggtcttgaggcttacc

SEQ ID NO: 451879 - DNA, 122 bp, Homo sapiens
aaggacatctgagcacagtgattccggtggtgccaggactccaaccagcaaggagcgtttcgcacagagctgcagagagtctgtgccttccaacgagagccgtgtcccgaacgccatccact

SEQ ID NO: 451880 - DNA, 122 bp, Homo sapiens
cgcgattctcgcccaccggaggccaaagcctgggaactagggcgagcggtgacctggggacgcacaggaagcgagggcactgcggccgcggcgcgcatgcgcgaacacgcacacagagaggg

SEQ ID NO: 451881 - DNA, 122 bp, Homo sapiens
ctcacgacctcttcccaaagcattctgctgctgttatttggaaaataacgaacacagaagcgatgtgtttctgcggatattttagtgctcacagacttgcggcatctgaccagcctgggcac

SEQ ID NO: 451882 - DNA, 122 bp, Homo sapiens
aggaatgtgatttatttaaagaaaattttatttcttgaattagccaaaattatgaggtatcgacatgaattccagagaaggcatgaagtttattttttggctgctacacctctccttccctt

SEQ ID NO: 451883 - DNA, 122 bp, Homo sapiens
ccgtgaagcaagagcggtcggcagagcggggaggcgaactgcagcagagttcttgctttccggcaggtgatggcgccccccgcggcctagaggtccagcgcccgccgcgagcagcggacagt

SEQ ID NO: 451884 - DNA, 122 bp, Homo sapiens
ggattccctcaactcccccagctcctagcacccacctctgtcacaccaggggccaccaggcgcaaaatcaagacctggagccagaatggggagaaaagcagaagagcttcccctgttcagct

SEQ ID NO: 451885 - DNA, 122 bp, Homo sapiens
tctctcatcactaaaaaggattccctgctgggtgcaatcaagatccataaactcgcggctcgagtcggtgtgaaagcagcgctccagcccagactccctcgctggcgctaaatgcaggctcc

SEQ ID NO: 451886 - DNA, 122 bp, Homo sapiens
cctatgggatacatgattctagtatgaatacgtaattacaggatgaataatgaagcccaccgcttatgcagtactgactgtgtgctttgcctgtgctgacacctatgttaacgcatttaatt

SEQ ID NO: 451887 - DNA, 122 bp, Homo sapiens
acaggccagttcagaagattacagcaggactgatggcgtgaagtcggggagaagctgctgcgggttttctgttcaattcccatcctgcactgccatctccaggacacaggagtcctcgccag

SEQ ID NO: 451888 - DNA, 122 bp, Homo sapiens
catgccatcagtggggaaattacaaatactcatcagtttgacagggagtctcttatgaggcggagagggactgctgtgtttagctttacagtcatagcaacagatcaggggatccctcagcc

SEQ ID NO: 451889 - DNA, 122 bp, Homo sapiens
ggaagccgaacctctggtttgaaatttaatgctgagatttgaaatatgagagttctcgagcggtatcttacccaattttagtgattattactttgaaatgttgacatcagtttctttcttta

SEQ ID NO: 451890 - DNA, 122 bp, Homo sapiens
agaaacagagccaggagacggagctcagttcctccctccaccactactggctgtgtgagccggacctcagtttcttcatctgtaaagaaggacaacgcttcctaccgctctgagttgagaga

SEQ ID NO: 451891 - DNA, 122 bp, Homo sapiens
aagagaaagaaaatatattaaagggataatccctcacctagaaggaatgatcccattcttcgagaatataggtgatatcttaattgttgtacaattaaaaacagctacaccaaactgctcat

SEQ ID NO: 451892 - DNA, 122 bp, Homo sapiens
ttggtgctccatttccctggcatggggaatgttggtggctccttcctgagctcctgttctcgccttgtgtctttcagtgagctctgccacccaggacatccccctggcattgactggcatag

SEQ ID NO: 451893 - DNA, 122 bp, Homo sapiens
ttgccctagtctcctgcactgagcttggtgagtccattcggggactgctggatgcatgggcgggtagggaggtgccctgggttgggtcgatgatgagaaccttatattgtcctgaagagagg

SEQ ID NO: 451894 - DNA, 122 bp, Homo sapiens
caagaagcccatagcaggttcttgtgctgctcctgttgcctaagagggtggtgcgcactgcgctggctgggctcacaggggcctccagggacacctctgggcactttagccccagcacctgc

SEQ ID NO: 451895 - DNA, 122 bp, Homo sapiens
agtagtcgaggcagatggcgcaggtggcctcctcctggaggttggtggacaggtcgggggcggccatggcgcggacagaggggaggaaggcggtactgtccgcggggcggcggcgggcggcc

SEQ ID NO: 451896 - DNA, 122 bp, Homo sapiens
gataggcctgattatcaggaagctcacagtttgggtgagcagagggcaaacacagaagagcgactaggggagcaaatggaagagaacgctgaaaagcacgatgtggctgaaagttttgacag

SEQ ID NO: 451897 - DNA, 122 bp, Homo sapiens
atcgttgatgggcttccgtcaccaggactgctggtctgcactggcagagtgtctgattcacgggatatatggggatttgaatgtctaccaagtggtcaggtgatactgaagctgctggttcg

SEQ ID NO: 451898 - DNA, 122 bp, Homo sapiens
ctcctgttgtaacccggggcagggtcgcctcacacatccctgcggttccgtcgggtgctccgggggagtttgtttaaaaagcatattccggggcttgtgcccagagtttctgatatcctggc

SEQ ID NO: 451899 - DNA, 122 bp, Homo sapiens
atttagaaaggactcattaaaataagacatatgagcctcattttccatttcgacaagtgacgtattaagcctttgttttatcttgttatatgtacccatttgcacttttccctttatcttga

SEQ ID NO: 451900 - DNA, 122 bp, Homo sapiens
acgggtccaaggcaggaagcttgtgtggcgctcgggcctctgcgtggggctgaggtgctccgttcggctcttgtgcaggcatggagtggagacgttggccccatgtagcccgtgtggccttt

SEQ ID NO: 451901 - DNA, 122 bp, Homo sapiens
ccccgtggcgggggcgtggccatggcgggggcgctccggcgggggcgggccctgggctcccgcccttcgggtcccacagtttccagccgccgctctcctcagtgcccggtggcccaggaggg

SEQ ID NO: 451902 - DNA, 122 bp, Homo sapiens
gggagtggggcattgagcaggtgctccagggccccacatgcaggctgtacctgagctcctcggcctcgcatggactggattggcacacctggaactccgtcaggtttggacagccagagcct

SEQ ID NO: 451903 - DNA, 122 bp, Homo sapiens
gcacaccacctggcgttgcttgactctgagggtgtctccgggcacccctacagctggcagcggctttggcgtgcttcctatcttggtaatgtcactggccctcttaaagtgacagcccgggg

SEQ ID NO: 451904 - DNA, 122 bp, Homo sapiens
ggctggcagatcacttgcagtcaggagctggagaccagcccggccaacacggcgaaaccccgtctccaccaaaaaacacgaaaaccagtcagacatggcggtgcgtgcctgcaatcccaggc

SEQ ID NO: 451905 - DNA, 122 bp, Homo sapiens
ggtaaagaggcaggcaagacaccgtctccagtggtcgaacagcatgctgtggagagggtgcgagctgcctgtggctgctgtaacaaatagccaccaatgcgcggctgaaaacagcagcaacg

SEQ ID NO: 451906 - DNA, 122 bp, Homo sapiens
tcagagccatcgactccctccacggatgtgcccacactgggggtcccgggtgatgttggccgtttggtcccttcaaacgtttgaattttcccctggagcccggctttgagtgtctgcctcat

SEQ ID NO: 451907 - DNA, 122 bp, Homo sapiens
gacataactagatagaccattagtgtatccagagttgacattacctgtgttaaggctcttcgatcaagaacataactaggaatcattcgaggtgattcaaggtgagcacaatgaataaatcc

SEQ ID NO: 451908 - DNA, 122 bp, Homo sapiens
cctggacaacaagagcaaaactccatctccaaaaaaaaaaaaaaaaaaaaaaaggatcctcgtcctgtgttacattttcactgtgaaagctaccaagaacattttgatggcaggtgacatta

SEQ ID NO: 451909 - DNA, 122 bp, Homo sapiens
acgcataacgtgttgctgagggcgtgatgtgaacccggttccaggagcggacggggcgtccggaaaagggggcggcttcgactgcggctctgattctgggtctctgatccaacgttcccgct

SEQ ID NO: 451910 - DNA, 122 bp, Homo sapiens
gtgggtttaaagagacccttagtgctgtcgcacacaagggattattccaaaatggacaggcggagtggactgtccttcctctgcgcccctcagtggtacatcccaggatagaactgttccat

SEQ ID NO: 451911 - DNA, 122 bp, Homo sapiens
gattatacaacagcatcatgtatatacattattttatagttataactagtttcatttgagcggtttgaatgttaattggtgacggattactgctgtgatttttttttcaatcttaagtgaat

SEQ ID NO: 451912 - DNA, 122 bp, Homo sapiens
ttttcttcccttggaaactgttttgagctcggaatttgttgtttagatcatgatttcatacgtcagaggattggaagtctcctttaggtacttggcagagccaggacatttttccatatata

SEQ ID NO: 451913 - DNA, 122 bp, Homo sapiens
ttaactaaagcaatcttttctttccttgttatttagaagtaaaatagcttgtaatcccatcgctttgggaggccaatgtggaaaatctcttgaagtcgggagtttgagaccagcctgggcaa

SEQ ID NO: 451914 - DNA, 122 bp, Homo sapiens
acccagcttagcgcccctcaaaagcctgacaagtaacatgatctcctggacctcagtttccgctcctgtaaaaagtatgtatgtgaagggtctggattctccctccccaaccctgcagagca

SEQ ID NO: 451915 - DNA, 122 bp, Homo sapiens
gcctcggtccaggccctggaatacagtaagcgcccaataagcgttcattcctagtgacaccgctatcatcctgtgagagaaagggaagctgaggccctagtgggcagggctttgcccagggt

SEQ ID NO: 451916 - DNA, 122 bp, Homo sapiens
tagaggtccattttgtcttacttcacacttttttttttttaaataaaacacaaaagtctacgtcttggtgtcttatccgtgagtgggaagtggtaagctggtgatggtcccatatttgctat

SEQ ID NO: 451917 - DNA, 122 bp, Homo sapiens
aggagaaaatgaatcagagcattttagagagctttaggactgtccagcgaacagcccagacgcagggcctacctggcctcgggagcctttagccatcttatcgctgtcctcggggccgatgg

SEQ ID NO: 451918 - DNA, 122 bp, Homo sapiens
agaagcaaaagtttttctctgactttctcctgccccctgtctctcagccccactctcccccgaggtgccatagaaactaggattgtcttccccaaggtgggtcatagaaaccagaacctctt

SEQ ID NO: 451919 - DNA, 122 bp, Homo sapiens
cccggcgaagcagagtcagagggactggtggctccggcgagtgtgcagccccgggggagccggcgctctaggcgaggaacccgtcagcccgcctacccgcccgtcgtctttggcgcccgcac

SEQ ID NO: 451920 - DNA, 122 bp, Homo sapiens
gaggccgccacgcccagggcagggcggtggtcgggtacctgcccgcagggagcttccactcgcccctcgcgggctctgcgttcggctcgtctactcgctctgctcttccctatgcggttctc

SEQ ID NO: 451921 - DNA, 122 bp, Homo sapiens
tctacctagtaacagctgagaaataaggctcgagacaccattggttggttcagcctcactcggccaatcctgggctctaaactgctcagtggaaatcttgggactttttggacacccagaga

SEQ ID NO: 451922 - DNA, 122 bp, Homo sapiens
aagttgtagtggagaatggcaaggaataatggaggcatgacaatgacagcactctacagacgactgtgaacttttgcagatgaggtcacaaaacagtactagatttttggttgttctttcaa

SEQ ID NO: 451923 - DNA, 122 bp, Homo sapiens
aatagacggcctcctgtgcgttttcctgttgaagtcggccagagtcctcggaactcaccacggtctgcatgatccacgctgctgttgtcactctgtgaccgcggagcatgagaaccccctgg

SEQ ID NO: 451924 - DNA, 122 bp, Homo sapiens
tcggcaccctgacgcagcgcaggacccgccccgcgcgtgacgccagcgtcaggccagccccggcatgctctgcggccgcccgcggtccagctccgacaacaggaattttctccgagagcggg

SEQ ID NO: 451925 - DNA, 122 bp, Homo sapiens
agttcatgttatacaaacacacagaaatgtcattaaggcaacaaacagctctgctggccccggcagaggccttttctgccaggctcaagttacttaaaatcaatatttgaacaaggacaaaa

SEQ ID NO: 451926 - DNA, 122 bp, Homo sapiens
cagggtgtggcaagcatggctggccctaccgggaagtgaggccaacactcaggctttgtccggtattcggttccagcactaggattacccctcttgactgggtttgaaactgctgggaattg

SEQ ID NO: 451927 - DNA, 122 bp, Homo sapiens
agttgcactagcttctctttactctgcttttgttttagaccttggcaggaaggtggtccccggcagaataatctgtgtagtcacctccggttggctggagttgggctgagtttccctttctc

SEQ ID NO: 451928 - DNA, 122 bp, Homo sapiens
aagaatgtaagtgggtgtctgaacttgaccaacattttgatgatgcgatttttccagtttcgcacactaagaggcttctgtgattttggatttgttttatatatggcagatctctagaatgg

SEQ ID NO: 451929 - DNA, 122 bp, Homo sapiens
gtgggcacgtgggtccttaacctctccattgcatcatccccatcccggtgggtacagaagcgcagcaaccccgcggtgctcccggaagacaccgcgtctccaacatttacacggagatgctg

SEQ ID NO: 451930 - DNA, 122 bp, Homo sapiens
gctccagccatattggtcaaaaattgttttagtttctggaacctatggtgatcctctcaccgaggcctgctattttctcttactggaactctgtcccctcccctgggcaccctcccgcctct

SEQ ID NO: 451931 - DNA, 122 bp, Homo sapiens
cctggctgcgctgctcgccccacacacgtgtcccttcacggagggaggaggaaggtcgtgcgatgcaggtgttgctccttgcgtcattccctgagctccctttgtgtgtcaagcaatctggg

SEQ ID NO: 451932 - DNA, 122 bp, Homo sapiens
tcggccgggaatccgacaggggaacaaaacgcgctggtaaacgcggcgacgtacagggagcgcgagcgagggagggagcgccggcgagggagggagcgcgggggccgacatcgagaggcaat

SEQ ID NO: 451933 - DNA, 122 bp, Homo sapiens
accctgggctctggacgccacttgagtagagttctgtgaacacatttttttttgcttcttcgtatatgtctcagtcagattatttgctccctgctttgcaacattaatgggaaaatcccaaa

SEQ ID NO: 451934 - DNA, 122 bp, Homo sapiens
tggagtgggggcaggaggtgctccagcagcaactcccccagaggtgggtcccaacctccacgtcggccaattccaggtggccccaccgggtttcccccacccctttgtcccgcggagcccct

SEQ ID NO: 451935 - DNA, 122 bp, Homo sapiens
aaattttaaactctgcttaaacttcagtataaaaattaaacataaagttatactgattttcgtgcagacgagtgaagatcagcatcagaattggtcagtctgcttttgcatttcttaaataa

SEQ ID NO: 451936 - DNA, 122 bp, Homo sapiens
gaccagcacaggtcttgaatggtgactcctggtctagggctggtcccttcttagaaaacccgcctttcgatgatggagggctctgcctgggtatccattggagggggcagccctgaggaagg

SEQ ID NO: 451937 - DNA, 122 bp, Homo sapiens
cggcactctcatgcctgcctcgcaggttcagatgtgacgatagacataaaacacctggcccggctccggcgcacagatgctgaagtcagttttctgaggtcgtggtgggggcgggggtgagg

SEQ ID NO: 451938 - DNA, 122 bp, Homo sapiens
caatccagattttaaggcctctaccgaaattgatcaaatcaggctaagcatggtggctcacgcctgtaaccctagcactttgggaggctgaggcaggcagatcgcttgaggtcaggacttcg

SEQ ID NO: 451939 - DNA, 122 bp, Homo sapiens
aggcagatggaatcttggagggacatgtgtggtcatatatgaacaaatgagtgagatgatcggatgggttttcagaaagatgtggtgtcagatagggagacagcatcttgaatagacagatg

SEQ ID NO: 451940 - DNA, 122 bp, Homo sapiens
tctccatgcgggtggaaagtggcctctgcgggtccaaccccacttcttcttgggcccgtgcgctccggctgcgccgcagggaccgcggacagcttcgccaaggcactgcctgcccgcccggc

SEQ ID NO: 451941 - DNA, 122 bp, Homo sapiens
cctgctgcgggagtaagattgacttttggccccagctcctgcatcctcgaagtccaccaccggttttgccttaggctacactcacgagggtagctcccagttagtgactgagcaaggctggg

SEQ ID NO: 451942 - DNA, 122 bp, Homo sapiens
tttcatccaagggaactcgggggccgggggggcagcggggagtggcggcggcggtggcggcggcagagcaggcccatcttcggctcgcttttggctcctgggtctctgaagggtggaggcgc

SEQ ID NO: 451943 - DNA, 122 bp, Homo sapiens
cacacacacacacacacacaccctcagccagatgctggggcaggggacagttcctcatttcggacactgactgccggtggggggatgtggatggggtattgctgtggtcagtctggctcagc

SEQ ID NO: 451944 - DNA, 122 bp, Homo sapiens
tgtgccactcctgtcatcaagaaatgacatttatttcctcatccgttgaatccttgaatccggcctggacttgtaacttaatttgacaaatacaatgtggcagaagtgacctttgtaggaga

SEQ ID NO: 451945 - DNA, 122 bp, Homo sapiens
caaagaccccacccagctgagctaggagtgagggatgtgagccacccccgcttggcaccccggtggatctggtaacaaagtgagttggagcccaggttcttgtccccagattttggggcttc

SEQ ID NO: 451946 - DNA, 122 bp, Homo sapiens
gttctgtgagccattctagcaaattactcaaaggtgagggggtagttgtaggaactcccccgtttgtaggcaattcagaagtgtgggactcaatacatgcaactggcatctgaagtatgagt

SEQ ID NO: 451947 - DNA, 122 bp, Homo sapiens
gaagaaagaaaccagcattcatggagggcctattgtttgccagccctgacatgagctgctcgcacacgtattagcactgagatgcagtggctcccggctttgcccctgctgagctatgtgat

SEQ ID NO: 451948 - DNA, 122 bp, Homo sapiens
gggccagcgattgacatctcaccctgaggaggcggccgagctgtctgtcacacacaaccccggccacaagcctcccacctcagggacctgccgtcactgacagcatggactcagtgtggccc

SEQ ID NO: 451949 - DNA, 122 bp, Homo sapiens
gcacaggaatcgcctgggtgtccggttaaaatgcagattccggttgggtgggagccctggcgggggaggagggggtccaaaactgcatttccaaccagcggcgaaggatgcaaaggccgctt

SEQ ID NO: 451950 - DNA, 122 bp, Homo sapiens
gttgcagtgagccgagatcgcaccattgcactccagcagcctgaggacagggcgaggctccgtctcaaaaaaaagaaaaaaaatgatggcatagctgagctataaagcaccaagcagccatt

SEQ ID NO: 451951 - DNA, 122 bp, Homo sapiens
gcactaggatcgtagaaggagtggagccgtgctctcaccctgtcttagaggacccggaagcgccaagtgactgagggccgaagacactcacctgtggagcctgtgcacgtaggtagaggcgg

SEQ ID NO: 451952 - DNA, 122 bp, Homo sapiens
tgaaattgcagcacgctaagcaataaggaaacaaaaattaaaaagcaaaacttccaggagcgccctataaagcttaagaataaaagaatgaaaaaataatgtatgttatttactggctggag

SEQ ID NO: 451953 - DNA, 122 bp, Homo sapiens
cctggatgactcgctgcttgagtttattatccacgaaccctgcaggtctgggcttcatcgcgtcggtcttccaagccacagctcggaccgccagctcctagtcaaccgggggcctcgtaggg

SEQ ID NO: 451954 - DNA, 122 bp, Homo sapiens
cccctggtttccagctgatcctgattagggggtggggtggtggaggatgatgttgccttccgttctctatgtggccctaccaagttcctgtgctcacctgtttctttgatttctccaatgta

SEQ ID NO: 451955 - DNA, 122 bp, Homo sapiens
agagagagaatatgagaatatgagaatataaaaggcaagagagaagcagatccaagggcgcgcccagagaaacatcaaatgcacaaatagacaaaagaggtagaggagaaagctgagtccca

SEQ ID NO: 451956 - DNA, 122 bp, Homo sapiens
gccgcgcgcattgttgtcctttagcgattggttgttggaccagaaacagctgtgcagagccgtgccatctaaagagctgtggacctgaatgcagcgtagcgggctggcggtgacttacaccg

SEQ ID NO: 451957 - DNA, 122 bp, Homo sapiens
accccacctcccatgtcgtcccctcgcgctactccttgagaacatcgcggagggcccctccgcctgggagccgttttcaaccagccccgttagtggttgggacgtaagcctaacccccgctc

SEQ ID NO: 451958 - DNA, 122 bp, Homo sapiens
gccagtctagattttacactagatcagtcctgcttcacatgtctcccggctggccagccccggatgtccggccactgtgagccgatagcttttctgctgtttgttttctacctgtgtgcagg

SEQ ID NO: 451959 - DNA, 122 bp, Homo sapiens
actctaaggcggtagaaaccggtttccccgggtctatttagggggcatttggggcccctgcgtgtggagtgggagagcctgggctcaccctccctagccctggcgtgggcgacaaggctcca

SEQ ID NO: 451960 - DNA, 122 bp, Homo sapiens
gcacatccctctggtgattcctgccgcgcagctgcactgtggctcagggcaggagagcagcgtgtgcaaactggggccatctctgagggctggccagcacagttctggccgtgggactctgg

SEQ ID NO: 451961 - DNA, 122 bp, Homo sapiens
tactctaacccactcgctgaattagcgaagcctacttcctctgcttctgtgttcaggcagcgctgggaggatgcaccctttccccacagacaggcttcatcatgaagactcagtatctctgt

SEQ ID NO: 451962 - DNA, 122 bp, Homo sapiens
aagtgtgagtggagggggggtgtctcacgtatgagggcgaggaaggtggtttgggctctacgtgattgccgacgtccagaaagagggattgaacttctacaggatatgccagactgcagggt

SEQ ID NO: 451963 - DNA, 122 bp, Homo sapiens
agagatgagccgggaatgggataaaaaccatcccagaacccacaggaaatgcaagtccctcgccaggtagaggctgaagtaggaatgcaatgatattagcagctcttgaaactccatagttc

SEQ ID NO: 451964 - DNA, 122 bp, Homo sapiens
acggagtgcccgtgtctggtgtttctcgttcttcacccccgcactcatcagaaggcatcgcgggaggcgtcagtgaaaagtgggtggcctcattatcccagcattcttgatcaactccgggc

SEQ ID NO: 451965 - DNA, 122 bp, Homo sapiens
gcgctgagggcagcccgggggcggggcgaacggggcgggggccggggtctggtaaggccccgccggctgagatatccagcggcgcacctgacttcccgggaggcaaggccaacgtggttgga

SEQ ID NO: 451966 - DNA, 122 bp, Homo sapiens
tagatgtttatttcttattcacatttggtcctcgggctagcacaggtgttggcaccgacacgtttctgacaagcatgtgtgtttttagtaaatgcattgatgaagcacggtcttcataattc

SEQ ID NO: 451967 - DNA, 122 bp, Homo sapiens
tcctacctcgaaaagacagtatggtgcctgggctcctgtatataagagttcttttgatgacgtcacgacgcacgctcccggcagcgtccgcttcggctcctccccctaacctccctcaatct

SEQ ID NO: 451968 - DNA, 122 bp, Homo sapiens
atttaaggctagcaactatcctctttcaatatgtattgggagaatcattatggttcttaacgctagagcaagctgcagtgagctgccaaccagcagatcgtctgccttagtaacttcctatt

SEQ ID NO: 451969 - DNA, 122 bp, Homo sapiens
tgaacaggaagaggaaggcgaagtacatgaccacgttccccaggaacacagtcacgggagcgccccagaatttccgccagcgtgtgagcaggaagacagcacgtgggcctcggtcaccctga

SEQ ID NO: 451970 - DNA, 122 bp, Homo sapiens
cataaaactcacccctccagttgccagagatgctcagctgcacaaaagacttgtgataagcgaggcttttttctgagaaagtgtgcgggccttttgcatctcacctggttacaaagcgacgt

SEQ ID NO: 451971 - DNA, 122 bp, Homo sapiens
atttgtgtcagggttgggaacggcacaaggcacacctgtttcctagtgctgcagaaccctcgtcctgggatgagcctgcccgctagtctgcatcctaatcctgctgttgattggagataact

SEQ ID NO: 451972 - DNA, 122 bp, Homo sapiens
ggcgggaccaccaggggaggggcttgtgctctgctggctcagcctggtgtggacccacctcgcgggcgctggctgcaatgactttctctttccctttgcaattgccttgggtcctgccgcac

SEQ ID NO: 451973 - DNA, 122 bp, Homo sapiens
gcctttgatacaaagttcgaaggctgagccttagccatgccacgcccagcgtgctccggacgaggatgcccgaaactgcaatgagagagggaaatttcctagtcaggtcaaggtccaacaaa

SEQ ID NO: 451974 - DNA, 122 bp, Homo sapiens
ctgcctcccaggttcaagtgattctcctgcctcagcctccctagtagctgggattacagacgcgtgccaccacgtccgactaatttttgtatttttaatatagatggggttttaacatgttg

SEQ ID NO: 451975 - DNA, 122 bp, Homo sapiens
ctcaggtgatccacctgccttggcctcctaaagttttgggattacaggcgggagccactgcgcccagctcagattatttttaaaacagtgaaaagagaattctggagctaaaggaagtgtta

SEQ ID NO: 451976 - DNA, 122 bp, Homo sapiens
ggcccttggtgcactctcggtgaggctgtcgagggcttgctcaacacccggcaccagtgccgttgtcctcttagccggccatttctacacccatttttcagacaaggaaacaggttgctaat

SEQ ID NO: 451977 - DNA, 122 bp, Homo sapiens
cggtgggcgtggcagaggctggtgggtttggtgtcccgttgataaacacaaggagacttacgtgcggctggaggacaaagagccttggcgcggctcagtcagcgtattaatctcaccgccct

SEQ ID NO: 451978 - DNA, 122 bp, Homo sapiens
tgaagatggcaaagggctttagccaggctggctggtatctcaaaagaaaaaaggaccgcccggaaatgtccttgtgtaaacccatggctctggacaagcaagtgagccccaggcggcaggac

SEQ ID NO: 451979 - DNA, 122 bp, Homo sapiens
cgcctccgagtgggcgtgggaccctccgtgggggcctcagccgggctggtggttggggggcggttacgctgaatccagctggggttggcgcgccgggagtccctgggcggagagacagggcg

SEQ ID NO: 451980 - DNA, 122 bp, Homo sapiens
taccatttctcacatggctgatgtcattctaatcctcctccaggggctgcagagaagctccggcctgctcctcactttacaagcagagccaagcatatcccctccagaaccataccgcctat

SEQ ID NO: 451981 - DNA, 122 bp, Homo sapiens
ccggcctccagcttttgaaaccgtccccggggcaacagagtcccttgctcagatgtcgttcggtatctgggactgggaggggtcctggaccacacgcattctcactctgtgattttgcttat

SEQ ID NO: 451982 - DNA, 122 bp, Homo sapiens
gccttcccgccgcccgaaccggacaccggcagccagcagacagcggcggacaagcgacctcgctctgtggccagtgagttgtttctgattcggatgatttttgtccctcggcgcgtgccctt

SEQ ID NO: 451983 - DNA, 122 bp, Homo sapiens
cactgcctggtcattctctgtagaccggccggaaccactgcttggtgaatctctgtagaccggccggaaccactgcctggtgaatctctgtagactggccggaaccactgcctggtcattct

SEQ ID NO: 451984 - DNA, 122 bp, Homo sapiens
aaagcacataatctcactctttgttatggctacgtagtattccatcataccagccgggcacggtggctcacgcctgtaatcccagcactgtgggaagccgaggcaggcagatcacaaggtca

SEQ ID NO: 451985 - DNA, 122 bp, Homo sapiens
taaaagccctgtcgcgacccgctctctgcaccccatccgctggctctcacccctcggagacgctcgcccgacagcatagtacttgccgcccagccacgcccgcgcgccagccaccgtgagtg

SEQ ID NO: 451986 - DNA, 122 bp, Homo sapiens
tcggggcgtccgcaagcagacgggggggagggtgtcgttgccgtggcaacaccccccatccgtccagacttccaaagagggaggaagaacttcaaatcccaaccgtcagcgctcaagcggct

SEQ ID NO: 451987 - DNA, 122 bp, Homo sapiens
gagagccgggagggacaatctggcccgttggccgctgtggctgtcctactaggcaggggccgcctgggcaggaggagccagccaccaaggccagggatgaccgggcactgggagaggcagtc

SEQ ID NO: 451988 - DNA, 122 bp, Homo sapiens
gctcgcccctcctcctgcaggcgaaagcaagaagatgacagggacggtttgctggctgaacgagagcaggaagaagccattgctcagttcccatatgtggaattcaccgggagagatagcat

SEQ ID NO: 451989 - DNA, 122 bp, Homo sapiens
tcttgatctgttattttgctcttagtgatctgtttaggtttttctctgtgggtaattgtgcgatgttttaaagatgcctgaaggcgtcttgaccgtgacttgatagggtctgacttcagagg

SEQ ID NO: 451990 - DNA, 122 bp, Homo sapiens
ggttggggtggaggggggtgtgtctttaattagagaagaacagtgtggcctcggacaagccgaaagcaccaagacctcagctgaactgaagttagtgtgtggcagaaaaagcccctctagcc

SEQ ID NO: 451991 - DNA, 122 bp, Homo sapiens
gtctagatatttgtcctctgggtgataaaggaggcattgtcttgggacccactcaggcctcggagccgatcgtcgctgtgcatcacagctgtgaagtgcgctttgttatgtgtctgaggatt

SEQ ID NO: 451992 - DNA, 122 bp, Homo sapiens
tcctcccaggcagcctgcagcgtgcatgcatgtgtgcaggggtgcgtggcaggggcgcagcggcactggcagagggcacccccattccagggcagggcaggcgggctccttggtggtccccc

SEQ ID NO: 451993 - DNA, 122 bp, Homo sapiens
cgaggagcccagcgctagtggcggcggccaggagagacccgggtgtcaggaaagatgggccgtctgggggacagcagggagtccgggggaaacgcaggcgtcgggcacagagtcggcaccgg

SEQ ID NO: 451994 - DNA, 122 bp, Homo sapiens
gtttgcctcagtttcctcatttgtgaagtgcggataataatagtacctacctcatgtcatcgttttaaggattaaatgaattaacacatttaaaatataagaagtttgaaaagctcttggac

SEQ ID NO: 451995 - DNA, 122 bp, Homo sapiens
attaatccacttttggatttagcatatttacactggggcggcaagcagagaacagggcggcggtgggggatttctgtaaggagttgtcgggccctcaaagcaggtgcagggccccgcccagc

SEQ ID NO: 451996 - DNA, 122 bp, Homo sapiens
acgtgtgtgtgtgtatgtgtgtatgtgtgtatgtgtgtgtgtgtgtgtatgcacacagcgcgcacatacagcagcacgtttgcctaaaagccgtgtgagtgtgtgtgtgtgtagcgcacgca

SEQ ID NO: 451997 - DNA, 122 bp, Homo sapiens
ccaggagagggctctggggctaacactccccctagtgtcaactcaggggccttggggacccgaagaggtgtggacagttggtggcagcactgatccagggtggtggctgtgggaggagcgaa

SEQ ID NO: 451998 - DNA, 122 bp, Homo sapiens
agggcgcctgatgcccatgtggcagtgtgcggagggcgcctgatgccacgtggcagtgtgcggagggcgcctgatgccacgtggcagtgtgcggagggcgcctgatgcccacgtggcagtgt

SEQ ID NO: 451999 - DNA, 122 bp, Homo sapiens
atccacgtggcaaacttggaagcaccttgaaagagagtctaagtaagttgccaagacgcccgtctgaaggccgggtgcctctatgacaaatagcctgagcagctgcacctcgccgaggtgcc

SEQ ID NO: 452000 - DNA, 122 bp, Homo sapiens
cgagggacgttcatatatggttgagctaagatgatttggggggcggggggtgaggaaatgcggcgcactgagtaacctctgagctccccagtttgcagacaattgcgacctcacatacacgg

SEQ ID NO: 452001 - DNA, 122 bp, Homo sapiens
ggtgcactcggcccactgggaactgaagacccgcccttgaagaacgggtcttagccttggcgcgagctttgccgccctgcttgccacgtcccgacatgacgtaaaaaattcaatcagtaacg

SEQ ID NO: 452002 - DNA, 122 bp, Homo sapiens
tctgagatctgggatgtgcacgaatgactgttctgtccccatattttctgttttcttggccggatggctgaggcctggtggctgcctcctagaagtggaacagactgagaagggcaaacatt

SEQ ID NO: 452003 - DNA, 122 bp, Homo sapiens
ttgttaaatataatactgccccactttaatatatgtaagcaacttcctacttatacacgacgtgttcctaaaacatgtttgaaaggtgaatttctgaaagtctacaataaatgtaggtgtta

SEQ ID NO: 452004 - DNA, 122 bp, Homo sapiens
aagtcttccctcgtccatctcagatctgactagctctttttccactggacatcccctcagcggcccctcaggatccaggccctgctccctatctgtatttggagcctcccctgccccatcct

SEQ ID NO: 452005 - DNA, 122 bp, Homo sapiens
cccgcccctctgcgatactgcagtggccccgcttacctctctttaccccctgggccgcagcgcttttcctacagattaccaggaccgacgctccgggccaggactgctcactcggggcgcga

SEQ ID NO: 452006 - DNA, 122 bp, Homo sapiens
ccctgcgcgcaggctcgtggcgcggtcacgcgatagacccgggcctccggagtctccgtgcgcatttcctcccagcggaattcggccagcccgcgggaggcccttctgtggctgctcggggc

SEQ ID NO: 452007 - DNA, 122 bp, Homo sapiens
cttgcttcccaatgctgggagacaaagaaccccatttccttggaaatacagattggattacggctggctccaaaaccaacatggctattcagtccttttggggaactgacatggacactggg

SEQ ID NO: 452008 - DNA, 122 bp, Homo sapiens
cagtcgcgctaccgactggcagtcagcggagacgcttcggagcaggtctgttagggcgcgcgcacacacatgcacgtgcacgagcgcacgtacacgcgcacaccgccagcgcggaccctgac

SEQ ID NO: 452009 - DNA, 122 bp, Homo sapiens
cacagaagcgctagttcagcggcgggttacagcccgcccggccgcctgcggccagtcatccgcacatgcgccctcctggaagccccagcagcccctccgcgagttccgattggctccgcgtg

SEQ ID NO: 452010 - DNA, 122 bp, Homo sapiens
ggctaccgaagtcatgtcattaaagaatcaatgtttgaaaatcctgtttctaaccatcttcgagcagggcaaagacaaacacaagcacatatctgatctggaaaactgcctgtcctctgtga

SEQ ID NO: 452011 - DNA, 122 bp, Homo sapiens
cgcagagaaccatgctccttggtcaatctcagattattattatcagacctaccctaatgacgttagtcttccaaataaagtgagtgactgaactgtcaaatcagcaagatcaggatattgaa

SEQ ID NO: 452012 - DNA, 122 bp, Homo sapiens
tgggctgaggtgcggctccctggagaccccgcccgctagccgggagccagcggcgcagtgcgagttcagcccgctttcttcgcgctccgcgtcaaatctctccagctctgttctcgcatccc

SEQ ID NO: 452013 - DNA, 122 bp, Homo sapiens
atcttggtggagaaggctcaggtacagtggggacttgggctttttagtccgggccgggctcgcggggagagggtgaagccagacctgagtggggggaggaatggcttccaggaccccggccc

SEQ ID NO: 452014 - DNA, 122 bp, Homo sapiens
gggctgtgtggaggcttcagactcccggcgccatttagcgcggagagtttcccgggtggacgcggctcctctctcggccactccgcacccccatcttcggtgacagaaggcgcctggtgggg

SEQ ID NO: 452015 - DNA, 122 bp, Homo sapiens
aacagtccaagtcttgaagactggatcccactggtcatccagtccttaaagcccaggctccgctttacgaacttccgcccatcagccactgtgcctgaccgtgcgcgagcgcgaagacccag

SEQ ID NO: 452016 - DNA, 122 bp, Homo sapiens
cctgctgcccgtggctgtggtgagcctggcctacgggcgcacgctgcgcttcctgtgggccgccgtgggtcccgcgggcgcggcggcggccgaggcgcggcggagggcgacgggccgcgcgg

SEQ ID NO: 452017 - DNA, 122 bp, Homo sapiens
ttttcattttgcattaagccccccaaattatgtgcctgccctgctcaccacgtcccactgcgctcccagggcagggcccgccccacccagacgcagactgtcgcggcttcatcagaccctcc

SEQ ID NO: 452018 - DNA, 122 bp, Homo sapiens
gcgcgcggcggcggtgactgacggcggcggctccgagggacgggcgcgcacccagctccccggccccgcctccccgggcttcctgcgagccaggtaaacacaggccgatcccgccgggcccg

SEQ ID NO: 452019 - DNA, 122 bp, Homo sapiens
gaacgcgtctgagggcagggaacaaatttattcatcgtaatcgagcccagcactttgtctcgcacgcagctgacagcagaattttaagataaagtattaaataaatgacagacctctcaagg

SEQ ID NO: 452020 - DNA, 122 bp, Homo sapiens
gcccctctccgccactgagccctacaccaggaaccaggcacagggaaactcttcccccggcgctcgggttccgtggtgagaaaagtgaggcccaagagtcaaccaggtttctcaccatgttg

SEQ ID NO: 452021 - DNA, 122 bp, Homo sapiens
gcagccaccttggatcccagcagaacgggccgctgtgtgtctttagttgccaaagcgactcggcaggaaaacaggccttttggtggcgacagcagtgtgtccttgggcgcctgctgtcagcc

SEQ ID NO: 452022 - DNA, 122 bp, Homo sapiens
tattttgctagactgactacaaagttaagacaggtgataaatgaaacttatttggcattacgtattgagccaaaagttcagttagtaggaaaaactgttagtatgctacagtgttcggaatg

SEQ ID NO: 452023 - DNA, 122 bp, Homo sapiens
tttaattttcccttccaggttcccaaatgatcacattcccgtccccagtagtaaaacgcccgtggaagtagaagatggatgctgtggcaactgaacctggagtcagactcagaatcccagct

SEQ ID NO: 452024 - DNA, 122 bp, Homo sapiens
gcgcgtccttttaaaaggttcattcctcatctcgctgtttgccgggtacccttcctctcccggacagccgcacctgcttccctgtgctaatgacagtttatgaagcgaggcacagtgagagg

SEQ ID NO: 452025 - DNA, 122 bp, Homo sapiens
gattctaaagcccacaccctgtgtacaatgccaaagaacccttaggatatgtgagtgggtcgacctagcttaagttgcttcattaagccaaatacatcaaaaccctccctacatcaggctga

SEQ ID NO: 452026 - DNA, 122 bp, Homo sapiens
atctttacctccagccagctccttgtaaccctggcaacacggcccgcccgcgaatcgtcacgctacgattggtccgtggtgctaaagcctgaaagcgaattcctcagacattggtccgagtc

SEQ ID NO: 452027 - DNA, 122 bp, Homo sapiens
cgatgtgagtaatggtttcagtttcggtgggcagccagaagtctctttgggaaaatatgtcgttaaatattctttggtttgttttttatgatcggctttgctttctgcccccttcctctgtc

SEQ ID NO: 452028 - DNA, 122 bp, Homo sapiens
cagggtcccgcacttagcgatttccaagcgcgacttagacgtggcctagtgggtgtttttcgctgatggaaacgctggccgggactgcccccagcctccgcggagagtgggaagctcccagc

SEQ ID NO: 452029 - DNA, 122 bp, Homo sapiens
gtctatggcagagacttgctaaggatttgtgccctgcctagccatggaagggtacagtggcgtgggtccctggatggccgtcgtgggaaggaggccgggccagcgcacagttacacttcatc

SEQ ID NO: 452030 - DNA, 122 bp, Homo sapiens
gcacaccatcacctggaagaaccgagttgccggtggactccgggggtgctggatgtccgacggcgcagatgcggcgtcccgggagtgcagggcgaggactctgacctctccggggtggacga

SEQ ID NO: 452031 - DNA, 122 bp, Homo sapiens
gaaggaaaaggggagatatctacagtgcccagagattctcaccgaggcaggtctgggatccgggaaggaaaggagaaaggcaggaatgaagcgggtggggggacagactggggagcagtttg

SEQ ID NO: 452032 - DNA, 122 bp, Homo sapiens
ccctcttctctctactaagtcccagaggagtgggcctcaccaggggctctgttcacctctcggagctcagcagtcatctccctcactctgacactccatggtgagccacactgaacttctcc

SEQ ID NO: 452033 - DNA, 122 bp, Homo sapiens
ccttgggatgctggagctggtctcttgtgggccctttttataccctggccccttctctctcgctgttgcccccacctgtttctgtgcacatttatgcatggggccactgacgggcttgtgct

SEQ ID NO: 452034 - DNA, 122 bp, Homo sapiens
gcacttgggggagagatgagaggcttcacgtggtcctgttcgggggaggcaatgaggcaccggcggctctgttgctgctcccggagattaatgaggcctaagagtgcattaggaacagtgac

SEQ ID NO: 452035 - DNA, 122 bp, Homo sapiens
taaggtctcaatacctagtagtagtgggacttgcctctggatacccagtagtgatcctgccgcctgtttctggatatcctacagtagcaatcccacctgtttctggatatcctacagtagtg

SEQ ID NO: 452036 - DNA, 122 bp, Homo sapiens
ctacattcccatcactgcagggaggccccaggccagggacggcagcctctgcttcccgaacgccttggggtgtgccctagcacctagcacgatgcctggcacatgaatgagtgaggcccact

SEQ ID NO: 452037 - DNA, 122 bp, Homo sapiens
acgatacttggagcctggtccacgtgcatcccaccttgggaagcctctccaaagagctttcggagctgacactgacagcttcagtttcccccagcacccaggagagccttgctgtgtctgtc

SEQ ID NO: 452038 - DNA, 122 bp, Homo sapiens
cagcagcagaggcattcattctccaagggtgttctatgagccttattggtcctccctgtacgatcagctgcgaaagaactgccagtgcaatcttgagactagatgaggagttacactgacag

SEQ ID NO: 452039 - DNA, 122 bp, Homo sapiens
tgccacagtgtccggaaactgtcaccagtcagccctttgttcacttgctgggcagaggggcgttacacctgagggaattttccagattatacccacggtggctgtttggagagttctcactt

SEQ ID NO: 452040 - DNA, 122 bp, Homo sapiens
gcattgatagaaacagagttcttcctagggggacataagagaaggagtatttaactcaaacgtagaagaaatctggggagactttgagcaggtgatagctggctgtattttaaattacgtgt

SEQ ID NO: 452041 - DNA, 122 bp, Homo sapiens
cgggccgtgctcatggctgggatcacagcgccaccctgtggccgacgctctccttcggctcgcaacagtctggagaaattgaattgcattcttcatggagaaacacagaccgaaaaagatct

SEQ ID NO: 452042 - DNA, 122 bp, Homo sapiens
ttaatccatgagcaatcagcgagcagcggcgaatggcacattacagatgttttactgtcgcgggcgctcgcagctttcgcgctcggcacaggcgcgccgggcgcccccgctccgcccgcccc

SEQ ID NO: 452043 - DNA, 122 bp, Homo sapiens
gtcctaacctctaccagagcggctgctatcaaccaaagtgacaggagaaccatcacgagtcgagttcactttccaactactgggcaaagcaaatgcccagagcaaacccaccccccccgccc

SEQ ID NO: 452044 - DNA, 122 bp, Homo sapiens
tagatcctagtccctatgcaacacgaacttcacctgaccccatgaagggaacaattggagcgagctcaggaaagcagatgccgagcaagctatgatgtagcaactattgcaaatggtttcat

SEQ ID NO: 452045 - DNA, 122 bp, Homo sapiens
tgaattccgcggaacgaggtggtgccaacgctgtgtttcaacccggtcactaaacatccgcgagcatcctgtcagagctctcagctcattggcgaaagtaaaacgccaaggaaaagcacctc

SEQ ID NO: 452046 - DNA, 122 bp, Homo sapiens
cgccgcccccgttgggtaatccacgtgtgctgtccgccagagccatgacagagaggtggccgggccgggacagtggcaggaagccgcgctgcactcaggagctgcaaccgccttccccggag

SEQ ID NO: 452047 - DNA, 122 bp, Homo sapiens
acatcgagctacacgctgtcatcagacagtcaggaaaaccgtgaattacgtcgagctaaacggagcatgacagtaagatttctcagagaccttcatacacccacgtgcaccatgtacctcca

SEQ ID NO: 452048 - DNA, 122 bp, Homo sapiens
gcaaaggatgtgtgaaccagggaactcatgttgcctccaaggtatgacaagacaatcaaccgcatacagatgcccctagacatcacaactgtgtacaataaagggttacagatggcgacata

SEQ ID NO: 452049 - DNA, 122 bp, Homo sapiens
ttagcagtggctaggtcaaagtatactacagaagaacgaaaaatcgactctagaaaagcacgcagaatgacagccaaccagttagggagtaaatgtttctcgttgcagatgtttgggaagcc

SEQ ID NO: 452050 - DNA, 122 bp, Homo sapiens
cacatgccgccgaattcttatcccgccacgagcacagtttctttatctgaaagacagaaccgccgtctccaaccagtggccagcgtggtgtcctggaccccaccccactccggtcagctttc

SEQ ID NO: 452051 - DNA, 122 bp, Homo sapiens
gcctgggccagggccacagtgacacattcaaatctttccctttagagtactatctgtctacgagattcctaaagggctggattgaatgagaaaacgtgaaccttcacgtcaagctatttatt

SEQ ID NO: 452052 - DNA, 122 bp, Homo sapiens
ccccgcccccggtaagaggccccgcccactgggcggagaccaggccgctctgggctagtgcgccggcgcggacgtccgccgccttccgagtggccagcgaggactcgctctgtacacagctc

SEQ ID NO: 452053 - DNA, 122 bp, Homo sapiens
cactctgttgatcttttccttttctttcctgcctaggcacagctaaagtgctctctggtacgacagttgcctctgggagctccaactcaggtaaagcaccaggctgggaggaaccactgttt

SEQ ID NO: 452054 - DNA, 122 bp, Homo sapiens
tccgtcgcagctgcgcacacccgggtctagagcaggaaaagcaaaaggctcacggagtcgcgctgatgtgaaccccagcgcaggcacttccgggcctaagcgtttctgcaggaaccccaagg

SEQ ID NO: 452055 - DNA, 122 bp, Homo sapiens
atgaatgttggctcccttggttgaaaaatgatcactctattgggttctcccagcttgaggcgaaaccttttggaagctcaggaagcttggaggatttcgtggattacagaatgttgaagttg

SEQ ID NO: 452056 - DNA, 122 bp, Homo sapiens
ctggacctcggggttcaccgctctgcttgcccactaaaagcccattcggcggaagtccagcgttgcatggttacagtactgagccccagacatcgttgccaagtataatgcaggctctgttt

SEQ ID NO: 452057 - DNA, 122 bp, Homo sapiens
gaaagttctcctttgatcccgccccccaccaccgctgcagttaactctccctgcggttcccgggctcgctgttttaaaggaaggctaggatgcaagctgtctgtaaggctgttttgttttca

SEQ ID NO: 452058 - DNA, 122 bp, Homo sapiens
tgttagccataccccaaagtctctcattaatagcactgaattcaggatctcatgatacttcgtgttctcaaatgccttttcatttccctgcacagcaacctctgaactgtgattcagtttta

SEQ ID NO: 452059 - DNA, 122 bp, Homo sapiens
gcagagagctcaggggcacctttgagctggacagacctctgtggaggagaaaactgaccccgggagggtttggtctggccagcgagggtcagcacccacctcagcctgcctgcatctgtctg

SEQ ID NO: 452060 - DNA, 122 bp, Homo sapiens
tgcatgcctggagcagccccaccagagtgccgccttctccactgctcaggcggaggtgagcggaagggaaactgtcccaggtcaggttgaagggagggtgcccgccccttgctcccgccccc

SEQ ID NO: 452061 - DNA, 122 bp, Homo sapiens
actgtgtgccatgctagagctcccctaccctgggaacaaacgccagggtgccctgcggcccggctctcctcggttcccctgatccatccagggaacaaacgccagggtgccctgcggcccgg

SEQ ID NO: 452062 - DNA, 122 bp, Homo sapiens
gcgggccttcatggacgggaccaactgcatgacgctggtggacaaggtgggccgggccaacgacctcaccattgactacgctgaccagcgcctctactggaccgacctggacaccaacatga

SEQ ID NO: 452063 - DNA, 122 bp, Homo sapiens
gactacatcctgttaatccgctgtggggggaacaggagcctgggcctctcccggggaacacgtgcagctgggcctctgatgccttcagccaggttaggcattccttaggggtgagaatgctc

SEQ ID NO: 452064 - DNA, 122 bp, Homo sapiens
aatgtaagagagggcaaacagctgcctggcttcagttctatggccactcaagaattggctcgcatctgtctgccaggacagagagcgtcctgagggggctggtgtgtgtgttgtgtgtgtgt

SEQ ID NO: 452065 - DNA, 122 bp, Homo sapiens
tgcagccgcggcgctcgagtcacaaccgccggctgggccagcccctccccccctgcccaacgtctgtcctcagggccgctcctcagacccggcctcggccgctgccgctgccgccgcagcgc

SEQ ID NO: 452066 - DNA, 122 bp, Homo sapiens
ctcactccatcacgtgtgcccgatgtttacagagccctctctgactccatcatgtgtgcccgatgtttacagagccctctctcactccttcatatgtggccaatgtttacagagccctccct

SEQ ID NO: 452067 - DNA, 122 bp, Homo sapiens
cagaacccgaaataatgtgtagacagacctgtgtctaacatcccctcggagggagctccccggggtaggagcccctggctggaccgccgcggccgcagctctgcaccccctgccctccctga

SEQ ID NO: 452068 - DNA, 122 bp, Homo sapiens
aacaaacactcacaaaaaactgagcagcaaaagtttctgtgggacaagaagcccgatctgcgtcgtgtcatcaatgccgtggtagactcaagtttgactgtgaggccattaagtacagcata

SEQ ID NO: 452069 - DNA, 122 bp, Homo sapiens
atgatgtaatagtcatttccctggatggtttcttgcctgcactgctgaaacaacagcatccgaactgcactgggaactgtggaaccacccagctccgccgccagagaagccggagccccggg

SEQ ID NO: 452070 - DNA, 122 bp, Homo sapiens
ggcacggtcattcttcaaatggtaataaaagccttcattccttgatttgatccagtgccccgatatgtacaaaccagaaacactgcacatatattttagctgtaagagttccatataccctt

SEQ ID NO: 452071 - DNA, 122 bp, Homo sapiens
cttaaacttcttataagagacaatcaggtgaatttaaatcctcagtgggaagacgtggtccgtttcttacggtgccctctgcatagtgttggagtggtttatatttagcgctcaaaataagc

SEQ ID NO: 452072 - DNA, 122 bp, Homo sapiens
ctgccaaaatcatcatcgtgccgccaattatgtttgaaagccatatgtacattttcaagacgctagcctcagccttgcacgagagaggccaccatacagtgttcctcctctctgaaggcaga

SEQ ID NO: 452073 - DNA, 122 bp, Homo sapiens
tgacacaagaggagctggggaagggcctctgcagatggcaggcccaggtgtgccccgagccgcccatgtgtcctggagtcgctctgggcgcacgtgggggaaatggggcccagagctccgcc

SEQ ID NO: 452074 - DNA, 122 bp, Homo sapiens
actttcccagacctcccccagtgcccatcaggagaggaccatgtgtggtccaggctccaacgtgctgagggtttcctctaagcaagagcattctcctgcccggtgagaataggaatgtccga

SEQ ID NO: 452075 - DNA, 122 bp, Homo sapiens
ttgtgtgtctgaagagagctcagtaaaataggtttcctccaagctggtttgaaaggcaggcgaggtggggaatggaaaagcacactgcatggagaaagaaccatttagccccaagcactgtc

SEQ ID NO: 452076 - DNA, 122 bp, Homo sapiens
gggaggagggtgacggcgctgcaagcaagccagggcccacgtggggttgcacggccccgacgctgggtggtgtctctcactgccagcttggggccaacacgcaggacctcccccagctgccc

SEQ ID NO: 452077 - DNA, 122 bp, Homo sapiens
gcgcacgcgtgcaggcagctcagtgaatgagggtctgtctttgctctgaaccccagcttccgggccgtggttgacacgtggtctgatgaagaaatgaattgctctggtgtctgcatgctggc

SEQ ID NO: 452078 - DNA, 122 bp, Homo sapiens
gttcaaaatagaagcataaaccttcaattcatgaggacacaaccgttacgaaaccaaagccgaggagctggtctgtgttgaggaattcaacactgcaacatcgttcgaatatttgacatagt

SEQ ID NO: 452079 - DNA, 122 bp, Homo sapiens
ggggagagctcaggacgccgcggatatcatggaaatggcaccgacggggagagctcaggacgccgtggatatcatggaaatggcaccgacggggagagctcaggacgccgcggatatcatgg

SEQ ID NO: 452080 - DNA, 122 bp, Homo sapiens
aagaagttcagcaaccaggagaccaggtgggggccgcgccggcggccgggctagggagagcgctgggcacgcggctgcggggccgggttgggggccggcgcctgcccgggccacctccgcgg

SEQ ID NO: 452081 - DNA, 122 bp, Homo sapiens
tacataactggatgcctggaaatgtggatctaccctacctttggcatgtctctctcttagcgggatatcttccgcaagcactggggatgtggacaaggaaagtaaattgagtctccgttggg

SEQ ID NO: 452082 - DNA, 122 bp, Homo sapiens
tcaagaaggctctgtcgaaggcaccccggaggaatgcctccagcatttcctgtttcactgcggggtaataaacccatcctggtcagagcttcggaactttgctcggttcctgaattatcagc

SEQ ID NO: 452083 - DNA, 122 bp, Homo sapiens
gctcacctggtcccccgcgggcttgggcgtacgctcatctggatcccactgggacccgggcgcagcctcacctggtcccccgagttcccgggcgcggccacactgggtccccctcctgctcg

SEQ ID NO: 452084 - DNA, 122 bp, Homo sapiens
acggtgtgaccggctcggctcacaggtctgagggtcagttggctcaggcatcgcccggtacgaccagagatagtgactgaggaagagcagcctcacatctggcagtttgcctctgggagaat

SEQ ID NO: 452085 - DNA, 122 bp, Homo sapiens
gcatctacaaggggggggtccagagtcagggcgccggcactgcagatgaggacggccgcgcgtgcccaagggaggcgacatccttcagccacctctatctatgcccatggccagccgcggcc

SEQ ID NO: 452086 - DNA, 122 bp, Homo sapiens
ggcataatgcttctaggaatgaaaggccttggttaacacaattaccagctgcactcctgccgataagggctccggttttctctaaaagttgacttcatcaatgtcagatctttacaactacg

SEQ ID NO: 452087 - DNA, 122 bp, Homo sapiens
tcagacccgacaatgtcagtgagaaacagaacttaacccaagggactgttctccaaggagcggcgggggaatccaacgcagaggagcgcagcgccctctctagcctcctgcgggtgtcgggg

SEQ ID NO: 452088 - DNA, 122 bp, Homo sapiens
ttggagactagccttgctctttgccgagaatgcccaaaaaagcgagtgacgacccatttccgaagatgtttgaacatactttctgtcaacaccctgatctgaaaacacatcaaagaaaaaca

SEQ ID NO: 452089 - DNA, 122 bp, Homo sapiens
cctgtccgctcaccttcctttcccagacttgcctgggctctcagccatcaggagttcttccgcccatcagcaatggtggctgcttccccaccttccctctggcctgctgggtagctctagga

SEQ ID NO: 452090 - DNA, 122 bp, Homo sapiens
tctcctgtttttttcaggctcctaaagtaacatcagccatttttagattggttctgttttcgtaccttcccactggcctcaagtgagccaagaaacactgcctgccctctgtctgtcttctc

SEQ ID NO: 452091 - DNA, 122 bp, Homo sapiens
gtgctgcagctccagtgccaacctgggccggctggtcctccctcggaggtttgggggtggcggcgcccagcctgcctgtcatgagtgctgcttcacagcgccgccggtgcacctgctcctag

SEQ ID NO: 452092 - DNA, 122 bp, Homo sapiens
gggagctcgggcccgctagtgtcgtggttggaggcgaggtggggcggccgtttgttttctcgtggtctcgagctcgcgcgctctcatcccctcccccgcggcgtgcggcggggcggagaaac

SEQ ID NO: 452093 - DNA, 122 bp, Homo sapiens
agaaaacagcaactgaacagagctccacacatctgtcagggtgtgagcactccaaggcctcgcgtggagcatccttagtcccacctgtagctgaatccacagacccaaagcctgcacaaccc

SEQ ID NO: 452094 - DNA, 122 bp, Homo sapiens
cgcctgttagtatcagtgcctggatagggctggggacaaatcagtttatgccgcgcacaccgaatccatgcgcctgagtgagggtgggtgtgttggggagtgcgtccaagtggacagtgccg

SEQ ID NO: 452095 - DNA, 122 bp, Homo sapiens
aagcagagaaacacccaattgattcggccactgaagtgtgaaatcatttacacagcgcgccggcagggcagccacactgtgcggaggcttcccggccgagcttgggcccagctggcccttgg

SEQ ID NO: 452096 - DNA, 122 bp, Homo sapiens
cctccgccccaggccgctcctccgggtccgggctgagcgtgaggccgtcgacggacacctcgagtcgctctgcgttcagcaccgccgccatctccggctgctgcacctcctcagcggggaca

SEQ ID NO: 452097 - DNA, 122 bp, Homo sapiens
gctgatgttaagtttttcagccaaggctcagcaaaaataaggggaagtgatttgatttgacggaataaaaaaacagagcatatggagattgaaaaaaaatctgatttgtggattagggaatc

SEQ ID NO: 452098 - DNA, 122 bp, Homo sapiens
acatggaggcctctctcagggaactggttttgcctggcagcacattacctgcctctgcagcgaggtggcagtgaagggtgcgtgcccttccacaaccttcatgagcagcgtgatccactgcg

SEQ ID NO: 452099 - DNA, 122 bp, Homo sapiens
ttaaatgctagatggcactagaattccatgtgaatgctttttatttattcattcaaagagcggaagaaccagcttgagggaagtggagagctgtgcaaatccagttctccagagatcccagg

SEQ ID NO: 452100 - DNA, 122 bp, Homo sapiens
gaggggaaaggagacaccgcgtcaagggagagaggagagggcaccgagcgcccgcccctccgacgtggtccgccccggcctcacgacgccccgcctctgccacgcctcttccccgccccatg

SEQ ID NO: 452101 - DNA, 122 bp, Homo sapiens
gggctgctcagcctcaggcacggacagggcacatgataccaactgctgcccactacggcacgccgcaccggagcacggcaccgagggagccgccacacggtcacctgcaaggacgtcacggg

SEQ ID NO: 452102 - DNA, 122 bp, Homo sapiens
cagagttgccaggcgcccggggcaaataccggcagcggtggttgtgcggtgtcctagcaacggggcggcagcagggcacacacaccgcccaagcccggacggtggccgcgaagctagggcca

SEQ ID NO: 452103 - DNA, 122 bp, Homo sapiens
tctccacgatcaataatcccgttgcctggggtccccgcctgccctcagggaatccagaagcgcggtagtgacaggttcagtactccggctgcaccatcacataaagagaacccatttcccag

SEQ ID NO: 452104 - DNA, 122 bp, Homo sapiens
aaaagccgcggcggcaaaaatgcgcggcggcgggggcaaaaagccgcggcggaagaaagccgccggggcgggggcaaaaagccgcggcgggggggacaaaaagcagtgggagctggggcaaa

SEQ ID NO: 452105 - DNA, 122 bp, Homo sapiens
gcccacagcaaagccacagtgagcagtctctgtgtggctgacttgggaccacagggtctccgtcaggttcctgtagccgccctggcacggccaccccaacgtggacactgagaagcagagtt

SEQ ID NO: 452106 - DNA, 122 bp, Homo sapiens
cggtgcggcggcgggaggcggaggcgagggtgcgatggcgcggagcccgggacgcgcgtacgccctgctgcttctcctggtaagtgccgcaagcgggacaggggagccaccgccggggaggg

SEQ ID NO: 452107 - DNA, 122 bp, Homo sapiens
ttggtttgttcatgcatattcagcaagagaactgcatattcatgagcaaccgcccttccccgggaggacccgccccgccccgccgccattaccgattcgcagagcagaccattttccagctg

SEQ ID NO: 452108 - DNA, 122 bp, Homo sapiens
cctttgccgtgaagcagcgcttgatccgccgcctgcttggaggctggtccctttccccgacgcacatcctggcttctcactctggctggggactcccacagagagggcagctctggcagggg

SEQ ID NO: 452109 - DNA, 122 bp, Homo sapiens
gcagccccgcgcctggcgctgccaagctgcccagcgggctttagcaggtgctgaaatgcccgctgccagtcgccgagtgctgggtgcagaggatctctccagacacctaggctcccttcttt

SEQ ID NO: 452110 - DNA, 122 bp, Homo sapiens
aaatcccaagaaaacagtcggcctaaggccgacaagggagaggcagaggtggacagcctacgcgttccccaaaacatgtgcttataaacaatcgcatcgtttcaggatggtggagaagcacc

SEQ ID NO: 452111 - DNA, 122 bp, Homo sapiens
taagagaataaaagcaggctgcccgagccagcattgccaacctgctgaggtcctcttacgcgccatggaagctttgttcttttgctttttgccataaatcttactactgcttagtttttgtg

SEQ ID NO: 452112 - DNA, 122 bp, Homo sapiens
cgaaacacaatcaaaatctaatttaggcctagaggagaggcattagtcatgctggtgtggcggctcacagtcgcagcagtgagcacgcaaacagtgctccaacagagccaattccccagcta

SEQ ID NO: 452113 - DNA, 122 bp, Homo sapiens
tgctgtgtggcctggagtggttgtcagagctgtggcaactgtgcacattgaggacaagcacgggcccctgcccaggtctgaggactaagttcggagatggatgaacaggcaaagtcccccgc

SEQ ID NO: 452114 - DNA, 122 bp, Homo sapiens
tttgatgaagcattccctcagttttttatagtatactggctggctccttctttaggtaagcgtatttttatttaatatgtctgaaagattagggtattttaaaatatgatatgtgtatatca

SEQ ID NO: 452115 - DNA, 122 bp, Homo sapiens
tgcttctacggatttgcctattctggacatttcctgtaagtgggctccttccatgcatggcgtttcgtgtctggtgtctctcaccgagcgtcaccgtggtagttcgtgtctgcgtttcatgc

SEQ ID NO: 452116 - DNA, 122 bp, Homo sapiens
cggcggcgggcaggggcccgggggccggggcctggaggacaggcgaggcagcggcgagtgcggggccggcggtcggggagggcggtgccatggggtcgcggagggcccccagccggggctgg

SEQ ID NO: 452117 - DNA, 122 bp, Homo sapiens
tcgaaagtgccacgcctctcgtccaccctgcgccgcgtccagtccacccccttcatcccgcgccccatgtccacccgcccgctgtccaccctgcgccccatgtccatgcgccccctgtccac

SEQ ID NO: 452118 - DNA, 122 bp, Homo sapiens
gaaggagggggtggggaggcgggtccagcctcgcgaggagccggccggggtctggggggccgtggcagaggggagtcccgctttctgtctaagcctccctgtgccaagtaggcccgaacccc

SEQ ID NO: 452119 - DNA, 122 bp, Homo sapiens
acccgcgcctgccccgcgagcgccacgcacagcccctgctccctcccgcgcctttgcctccgcacctccctgcgagcagagggacccggctccggcctcggccagccccagagaggggcccc

SEQ ID NO: 452120 - DNA, 122 bp, Homo sapiens
taactgattaggcccgggatgatggatcccctgtctcgcaaagcccgccgccccacgagccgcgccccaccctcagccgcccccaggcagcctgcacgacccagctcctggaggcgcccggg

SEQ ID NO: 452121 - DNA, 122 bp, Homo sapiens
catggaggtatggctgtaccggggcatgggggcccttacccggccgaaagaaaaggagggcgctggtgaggtagctaaccacctccttgatctgatgcttttccaaatactccgcggcttgg

SEQ ID NO: 452122 - DNA, 122 bp, Homo sapiens
aacttttagcgccagtcttgagcacatgggaggggaaaaccccaatcccatcaacccctgcgaggctcctggcacaaagctggacagtcgccatgacaagtaagggcaagtaatccgcctgc

SEQ ID NO: 452123 - DNA, 122 bp, Homo sapiens
acattttgagattgactggtcacagtgatagagccccagttgaaggaagaagatgaagagcgagtgtactaaggaccacagtgggagcttcccaggtcctgccccatgtagcaggctcatct

SEQ ID NO: 452124 - DNA, 122 bp, Homo sapiens
caggggcagagtcgcggagggccagcaccctaggtccccagtatcagacatgcgttgtttcgctaccctcaggacaacagctaactacccttcttaaaatccgtacttcagtaaaatctgaa

SEQ ID NO: 452125 - DNA, 122 bp, Homo sapiens
ggagtgccacttctacgcgggtggacaagtgtacccgggagaggcatcccgggtatcggtcgccgaccactccctgcacctaagcaaagcgaagagtaggtggtgtcccgccaaagggtggg

SEQ ID NO: 452126 - DNA, 122 bp, Homo sapiens
gcgggcctctccaatggccgggcgcggtgggcagctaggggcgaggcggcggggcggggccgctctcccgcaggaggagtcaggcccccgccctccggccccctcctccggccgcccctccc

SEQ ID NO: 452127 - DNA, 122 bp, Homo sapiens
ctatccggacaggtggctcttgccctttagactacagttcccagcatgcccaggcgattgcgtcccagaaccgacgtcccaccgccttcccacatcggatcgcagggctcccaaaatggcga

SEQ ID NO: 452128 - DNA, 122 bp, Homo sapiens
tcctgttccataatctaccatttccttcaagaattaacaatggaagtatctacttccctccggaggaacccactcctacacacagggtaatgaccttgctctgtgtctccagcaggataata

SEQ ID NO: 452129 - DNA, 122 bp, Homo sapiens
gtccccagcactggatattctttacagatgtgtagccactggcctaaaccagtcaacatccgtgggctctagtgcactcggagtccactgcaaaaattacttctttgaaatgcctaggtttc

SEQ ID NO: 452130 - DNA, 122 bp, Homo sapiens
ctcccgccggcctcccgttgtgtcctggtcttcgagcaggtgagggccgagccctgctgacggacaggaaggaaccagctggtggggccatctcagcagagggggagtcccccaaagagggg

SEQ ID NO: 452131 - DNA, 122 bp, Homo sapiens
cggcccccggggagggaaccgacgccgcccgcaacccaagacggcgggaaaagcaagcagcgaagcctgggaagccccttcgagcaactgcagctccgccagcggctgtgcccggggggggg

SEQ ID NO: 452132 - DNA, 122 bp, Homo sapiens
tccaggaacagtgtggacagagctgcagcttcctcatctgataatgggagctattgcaatcgctactgtttcccccttgccttctagaaggcctgactccattaagggttgatcatgaatag

SEQ ID NO: 452133 - DNA, 122 bp, Homo sapiens
tttgtcagttttgaattatggaagcagccaagagtatccaaaaacattttgtttctactgcgccttttttcccggtaatataaatatctgaagaggttattgcttaacctataaaatagtga

SEQ ID NO: 452134 - DNA, 122 bp, Homo sapiens
gtggttcgtgaggacgcgtcctgggctgccctgagaagcctacgtctccccttcgaggcccgggaagacctccaaccccgctgacaatgctgggccctcagccagacctgccctgcgtgcca

SEQ ID NO: 452135 - DNA, 122 bp, Homo sapiens
ccagccacctggtgacgaactgaactggcttctgtgcctcacccaggcctcagggaggctcgtgggctgtgagcacctcccacatttctgcatgagatggggcctgtatgcagatgacttac

SEQ ID NO: 452136 - DNA, 122 bp, Homo sapiens
tgcatgcatgaatgaatggtgtggatgaatcattaacctttttttcccatcctggaggcccggaagccgtcgcatccggttccttccgaccaaccagccaatttcctcccttccttcctctc

SEQ ID NO: 452137 - DNA, 122 bp, Homo sapiens
ctggaagggacacctgtatccacatcttactccctgtcttattccctccctgtgctgggccgcagagccccgcagagctggctttgcctagcaccaatcatccacactgcgctctgaagcca

SEQ ID NO: 452138 - DNA, 122 bp, Homo sapiens
ccaggggcttgtgcacctccctccctccacagccgacctcaactcgggtgtccaggcctgcgaatggcacaaatgctcactgaaatccatgtcattattaaagactcattcaggagttgcaa

SEQ ID NO: 452139 - DNA, 122 bp, Homo sapiens
gtgttaagttgcaaatcctggcagcatgcccagaatgggaccaactcagcagacaggaagcgaaggcaataaaagagcaatctacgctacaggcaggctggagcagaaactcgggaaaggag

SEQ ID NO: 452140 - DNA, 122 bp, Homo sapiens
gctccaccataggccagaaaatcccagtgtggcccaaagtagacgtgtgcccctccatgtcgcccaatccactctagcaaagcccccgccggtcctatctaggccttgcgctcacccgaaat

SEQ ID NO: 452141 - DNA, 122 bp, Homo sapiens
cagcccacgtgactacaggggcacttgatgggaatcatggcagcatccaggccattgtcccgcttctgggagtggggaaagaacatcgtctgcgtggggaggaactacgcggaccacgtcag

SEQ ID NO: 452142 - DNA, 122 bp, Homo sapiens
cctgcccaggtttgctccttccctggtttttctgtcattatcacgctcacgtgtttccctcggtcaccccctctgcaattttcacacgtcttttccctctctctttgcttcattacctttgg

SEQ ID NO: 452143 - DNA, 122 bp, Homo sapiens
gaggcagctggcacagggtagaaagttcagccaatgcatgtcctcataatgcttcaggtgcgccctctccagcagagccactctgatattcctaagataatgcatctctggcattaaagtaa

SEQ ID NO: 452144 - DNA, 122 bp, Homo sapiens
ccagaccattggacagttgctgattctgtgcgaagtggcctcctctcctgcacctggtcgcggtggcgcgcccccatctcccgctgaaacccagaactttcggttcagcagggctgggaagc

SEQ ID NO: 452145 - DNA, 122 bp, Homo sapiens
ccagcccacggactccccatgccaagggctgcagccccgcaacctcgcttctggattcttcgctgatccagtcaccggggaggggctgactggcagccacacagaggtttcagccactcgct

SEQ ID NO: 452146 - DNA, 122 bp, Homo sapiens
gcctctcggtccctggcggatcccgccaggccccgcccacccgtcctaggcccgcctccccgcctttttaagcgagcccccctagctccgattggctgctggagcccggcccccggccacgc

SEQ ID NO: 452147 - DNA, 122 bp, Homo sapiens
tgccggccgggcgcagtgggtcccacctgtaattccagaactttgggacactgaggtgggcggatcacctgaggtcaggagttcgagatcaccctggccaacatggcaaaaccccgtctcta

SEQ ID NO: 452148 - DNA, 122 bp, Homo sapiens
gcaggggcttgtggaccccgaagctcaccggtcccctcttctcctccccctccccccaaccggtgactcacctctgcagcctttaactgcgtcagccatggtggaggggcaggcagggaggg

SEQ ID NO: 452149 - DNA, 122 bp, Homo sapiens
agagaaagctggggaagttggaatctaaaaggacaggcttaaatctacctgagtgccttacggtgtctgtgggcagctctcattgcctctctgagcctctttatgtgagcgatgaagatgat

SEQ ID NO: 452150 - DNA, 122 bp, Homo sapiens
cctgtcccctttcagctgtttccagcatactgtgccccgtctgtcctcaggccagggcttcgctgcagccccggccactccctagtgcctggcccggtggtggccaggcagttggccgcgct

SEQ ID NO: 452151 - DNA, 122 bp, Homo sapiens
cacctctagtcacctgtttagagccttcactgatccatcctggggcttgcaaagcccgcacgtccagtcatgctcaggtgggccagctccctctgcctcccagcctcatctctctcctcaca

SEQ ID NO: 452152 - DNA, 122 bp, Homo sapiens
gtttgggtggacatactcattctatagcttcacactcccagccagggacttttcccttcccgctcactagaggtttccaagttctccttgatgtagtcgactcattgcatcttcctagattt

SEQ ID NO: 452153 - DNA, 122 bp, Homo sapiens
ctggcatagctgagggctgagtcaagggacagggtgtttgctttcctgagaggacttctccggagttggggcatctccagccttgcagcttctcctgtctctgccaagggaaaggtggtggg

SEQ ID NO: 452154 - DNA, 122 bp, Homo sapiens
ctcgttctcggaaaaagcggctgggagaggcggggcctgggatccagggtcacctcggggcggcccagggggtctgtgctttgcctgggggcacaggtccgcgagccaactttgcagttgat

SEQ ID NO: 452155 - DNA, 122 bp, Homo sapiens
cgtgatccacccacctcggcctcccaaagtgctgggattacaggcatgagccaccgtgcccggccaaacattgggttttctgaaggagctggagcagagaattccaccccagcggagggcag

SEQ ID NO: 452156 - DNA, 122 bp, Homo sapiens
cagatgcgtgacatacactcagaacagtcttgcagcctcttgcattgatgtgcacctttccggatgacactgtcccaggaagtggagtgggggatatgccagccatggcctgaaaccagtgt

SEQ ID NO: 452157 - DNA, 122 bp, Homo sapiens
agagggggtggggacagttagcttagaaaatggagtgtcctggccgggcgcgggggctcacgcctgtaatctcagcactttgcgaggccgaggcgggcggatcacgaggtcaggatatcgag

SEQ ID NO: 452158 - DNA, 122 bp, Homo sapiens
ggccctggagcgtgaagggctggaagctgaagctgcatcagcctcatggtgaatccgcctcggggctggaggaagggcccagaggcgatctgagcaccacccgccttcacaaaggccctgcc

SEQ ID NO: 452159 - DNA, 122 bp, Homo sapiens
ggacagagttcaaccagacaatctggaagatgggccagaaccatgcgtgcaccgcggaatcgcagatctttacagccggaagaagcctcggaggcagagcctgcacgtttcagaccaagaaa

SEQ ID NO: 452160 - DNA, 122 bp, Homo sapiens
ggacacccctgagagtgcaggcacctccccctcccgcccctccatccctctgggggctggcgcctggccccccacctggtccccctgggcaggctgaattggggctccctgcagggcggtcc

SEQ ID NO: 452161 - DNA, 122 bp, Homo sapiens
tgtttcccggcctgaggtttggttttagcacgcagcaagcacttccgttgaagcgttaatcgagttttattttgactagctcttccgtctcttccaaagatacctcctgatttctaccacca

SEQ ID NO: 452162 - DNA, 122 bp, Homo sapiens
atttgaaagaaataaagttggaggatttacactaattcgacttactatgctgtggacttacggataatgaattgattggtggaagagaaatagacccacacatatatggccaattgatttgc

SEQ ID NO: 452163 - DNA, 122 bp, Homo sapiens
tggagaaaatctcagagatttggcccaaaacatcagccctgtgaatcatgggtggagacacgggccgctctcgagatgttttccggaatatcatataaagtgttggccactcttccgcaggc

SEQ ID NO: 452164 - DNA, 122 bp, Homo sapiens
ggcttatgtatgtttttaggcgtgtgctgtaaatggcatggagatatatgcatatgtatacgcaggcacacgcaccgtctacacttccacggaacagactaattaacagcggctctggcaga

SEQ ID NO: 452165 - DNA, 122 bp, Homo sapiens
acaggcgagcgtgccgtgctgtgtgcgtgcacatgcgccacagcggcccacacagcagcacggggcaagcggcccgcctcacctttcacagccgcaggccccacgttcaggccacctgggga

SEQ ID NO: 452166 - DNA, 122 bp, Homo sapiens
tccgggcgggcagggttccgcacagctcttcgggtctggttcttctttcctcaggctccgcgtggagccctgggcctggcagacacaagtttctctccctcccatccccagaccatcgagaa

SEQ ID NO: 452167 - DNA, 122 bp, Homo sapiens
gctcatggctaatttttgttccttacaagactgactattgatttgattgattgtagtctacggagatctccaggagtgaatttttgcggtctcatgttcatcatttaagatcatataccaca

SEQ ID NO: 452168 - DNA, 122 bp, Homo sapiens
ctgggtttgggagtgactcggtgcaaggtagtgactgcactgcccagaggttagaaagagcgatgctctccaaggcttcccatgcgcgtaattgtgttggaagagctagcgtgttcatgctg

SEQ ID NO: 452169 - DNA, 122 bp, Homo sapiens
aatcactctttgatatatataatcactctttggttccccacagctgggcgcaaggtgcgccgtggatgcagccctgagccacgcgatagccccctcgagaccacctggggtaggaacacgag

SEQ ID NO: 452170 - DNA, 122 bp, Homo sapiens
gtgagtttctcctccagaacggggcgaacgtgaaccaagcggacagtgcgggccggggcccgctgcaccacgcaaccattcttggccacacggggtagggatgatggcatggggaggaaggc

SEQ ID NO: 452171 - DNA, 122 bp, Homo sapiens
gagcagttagagaggagaaccactgatggagatggtcaccagggagtgtccaggtcagaccgccacagaagagtgcagcctcctggccttcagacccaactgggacaaaccctgagaacagc

SEQ ID NO: 452172 - DNA, 122 bp, Homo sapiens
cgagaggcggttcttccaaggtcaccctcttccgggttgcaagcaaaggtcaggggatcccggaatggttagtgcaggagcttctctgtgccttccacgtcctagatcctcagagcctcaga

SEQ ID NO: 452173 - DNA, 122 bp, Homo sapiens
aaaccccactgcaagcgtcatcgccgcacgcacacaaaaccccactgcaagcgtcatcgccgcacgcacacaaaaccccactgcaagcatcatcactgccgggcaaatgagcaatgaagttg

SEQ ID NO: 452174 - DNA, 122 bp, Homo sapiens
gacgcaaggtccagtccagattgccaggcccggggcatgagagaggatccttgtaggtttcggaggtgggggggctgcactccattgttcactccgggccaatcagggttggcccacttcct

SEQ ID NO: 452175 - DNA, 122 bp, Homo sapiens
ccttcggggccagagtttgaagccgtggatgtgcctgcctggtggcttgtccgatttgcacggtgacttgattacactctctcattcatggtcacttccgaagcgctttagtgccttccgtc

SEQ ID NO: 452176 - DNA, 122 bp, Homo sapiens
tgccaccgagcccagcaggcacgctgagtgcaccgtctgtctctctcttcttggcatgggcgctgacggggcactgatggggcctttgggatgttgctcttccggctggaaacctctgtggc

SEQ ID NO: 452177 - DNA, 122 bp, Homo sapiens
ctggtgtcggtggcgctggagctgctgtgtttcctgctgcacctgttagtgcggcgcagccgcttcgtgctcttctataccacacggccgcgtgacagccaccggggcaggccaggcctggg

SEQ ID NO: 452178 - DNA, 122 bp, Homo sapiens
gttttcgggggtggggatcccacatggcacggctcctgcacgtccagggcatctgctagtcgtctttgcctgctccccagtgtcccaagcaactcagtaggaccttggggaagctgggtgct

SEQ ID NO: 452179 - DNA, 122 bp, Homo sapiens
tgaattgtgagctgcccagctactagtggagaaggcaggtcccatcacgttcagaggggccggtgcccatcaaaaagaggacccagggctttgacacagtaagtgaaagaaagtgctcgaag

SEQ ID NO: 452180 - DNA, 122 bp, Homo sapiens
ataaatttttaaaaaaaatctaccaacaaatattcagtaccagctaacagccattggatgcggaagataaaaagatcaagatgcctgctttccaggagttaatgatttactggtgaaaataa

SEQ ID NO: 452181 - DNA, 122 bp, Homo sapiens
tcggaaagatgaacgtaccatgcgaggaaactttgtaagcgggagctggagagttctcggcgggcatgtggggatccagattccccgactccgtgtccgcgtggccgtggtgtggacacctg

SEQ ID NO: 452182 - DNA, 122 bp, Homo sapiens
ccatgccagctcccagctctggcttttctcacctgatgtcagaaggaaagggaaaaaaatcggtgctttctgaagacaggtgcagccttgatcttccctggaaggggcccagtgggtgttcg

SEQ ID NO: 452183 - DNA, 122 bp, Homo sapiens
gggccgggattgctccctgctctccgcctcggccgccaccgccgccgccgctgctaaggacgcacaacaaacaatgcggggcccgggccggctccgccaaccgcctcaaccgccgccttaac

SEQ ID NO: 452184 - DNA, 122 bp, Homo sapiens
cctgcctgtgacccacacggagatctccccagaacaggtaacggggcaggctgtgctctgcgtggtgtggccctgcgaagatatagggtccccgaggctcgacctggcacagggtgctgacc

SEQ ID NO: 452185 - DNA, 122 bp, Homo sapiens
ggtgagagtccagccaatagtgcggtagggcctgaattagaacgacttccccacttccgtcgggttccacccatgcgctttccccaagccttttctttgcctacttgtcctccatcttgtgg

SEQ ID NO: 452186 - DNA, 122 bp, Homo sapiens
ggacagattttttttttttatttttattttttttgccgagggacgtttcaaaattttgcacggccagggtgacaaaaagaggatttaagagccacaagcggtccgcacatgacccagacttc

SEQ ID NO: 452187 - DNA, 122 bp, Homo sapiens
ctggccacgtgcaggccagccagagccctggagcctgcaggtgggctgggacagggcttgcgaccgcaggggtggtgtgcgtttgcgctggcgtctgcacaggtgtgtgcgtgctgtgccat

SEQ ID NO: 452188 - DNA, 122 bp, Homo sapiens
cccacagaagcgccgtcccccagcggcacagcaccccctccccggcgcggtggtagggcccgacgtgacgtcacccattgtttacaaatcaacccgagccggcaggattccggctcccgcgg

SEQ ID NO: 452189 - DNA, 122 bp, Homo sapiens
ccaaggcggtccggggagggacggggctccccggccgggtcggggccagagcgaggattccgtgcccgcctcgcaccctggccagcctgctgagtccggtggttttgccaggtgccgcccat

SEQ ID NO: 452190 - DNA, 122 bp, Homo sapiens
cacgccctccctcctggccgcggaccaggcgtcccggccccccgccccacccctggaagacgccccgccagctccgcagtgcggaccccaccgaccctgccccaggaaaaaggagcaggttg

SEQ ID NO: 452191 - DNA, 122 bp, Homo sapiens
gggcgcgtcggcgggggcagcttgcgagggtcgttggcccctggaggccgaggggcatggcgccagcacgtctgagccggtgcccgtgtctgtccgtgtctgtaggctcgggcgacatggac

SEQ ID NO: 452192 - DNA, 122 bp, Homo sapiens
gctcggccccaacgccctctccctggcgcgcaggtttagaaacagggcggcctctccggccgccgcctcggcggctcgggtccccatatatagtcatatccaccgtcaactgggaggccggc

SEQ ID NO: 452193 - DNA, 122 bp, Homo sapiens
ttttgtactacaacagcagagctgagtcacattgttgtgccagacagacaccatatggcccgcaaagccctcagatatttactatgtggccctctacagaaaaacatgccaacccctgctct

SEQ ID NO: 452194 - DNA, 122 bp, Homo sapiens
cctttttctcaagtgccttctcctgggtcgggctttatgcctgcagcagggcgtttcaaacggctgaggccatcccttgttagggagagaaacctcccgggcaggggtctccctcaatgagg

SEQ ID NO: 452195 - DNA, 122 bp, Homo sapiens
gcacacacacctcggctcaggctattcaccgggaaagccacgcggaggcagggcaggcagcgccccgccagagacccccggatggtggagatggtgcggtggagtcgggactgctgggggca

SEQ ID NO: 452196 - DNA, 122 bp, Homo sapiens
cacacgttttctccctgtctcactgcccgccggcagcactgacaggcaccttgatcacggcgtgcttgctgccagcctgacaaagcacacagcctcagtgctattcacaggcttcctaatga

SEQ ID NO: 452197 - DNA, 122 bp, Homo sapiens
acccgtgttctgtacgtggttgagaaggtcctcctctctgagtactggctggccccaaggcgcagaactgggaggtccagggaaccctgcccccgaggagccagcaggacctggaggagccg

SEQ ID NO: 452198 - DNA, 122 bp, Homo sapiens
aaggccccaggccccagacgaagagcaggcagtggtgtcctgtcccttgggccccagctccgggctgccctactccatttgtctctaaggcagatttccatgtccccctccctccctggacc

SEQ ID NO: 452199 - DNA, 122 bp, Homo sapiens
tggcggccgggaggggatcggggtggccaaaactgggctaggggattgctccgcggagtccgccggcctcaaggggctgccctgcggagtgcacccaccctccgcgcccaaaggcggaaagg

SEQ ID NO: 452200 - DNA, 122 bp, Homo sapiens
agcgcccccactgcagcccccactcctttggctaggcgagcgttggggtcttaaagggaccgcacagctcctccggtccctcctccccctctgcactggatgcacctaggagctccccacca

SEQ ID NO: 452201 - DNA, 122 bp, Homo sapiens
ggaacgggctccttgggcccaggagcgggcaagccgggagcgcgctccgaaaagtttaggcgccccggcgcatggccgccccagccctggaccagtccccaccgcccacagtccccaacggc

SEQ ID NO: 452202 - DNA, 122 bp, Homo sapiens
cctcccgggagtgggagctaggagggcctggagtccgatgtgggtcccctccctggctaccgcctgcgtgggtgctgggcgtgggggaggaggccaggtttctcgggctcacggccattctg

SEQ ID NO: 452203 - DNA, 122 bp, Homo sapiens
tcctgcctggagctgggtcattctctctgtctctccttgtacagtggtccatgctgtggacggcaccgccgagaacgggatccaccccctgagctcctccgaggtggacgaactcatccaca

SEQ ID NO: 452204 - DNA, 122 bp, Homo sapiens
gggccttggacggagccggctagtaggggcgtgctctgggcctccccgaagctgtgcagacgaggagtcccgctgcgcggtacagccaggaagccagtccctagagtcctttgcgctggggg

SEQ ID NO: 452205 - DNA, 122 bp, Homo sapiens
ctaaggtggagccagcaggtatttgcctgtggaaaactgcagtggatcctgccccgtctgcgtagactgcgcagctcggagtcaaagattcgttctggccagagaggaggtactaagagagg

SEQ ID NO: 452206 - DNA, 122 bp, Homo sapiens
tctaggaccctggtctttagttccgattcccggtgagacagtacctggcggggagcttctcgccctcttcagaagtggcctgggggccctggggctactgatccagcccaaagctgcagtca

SEQ ID NO: 452207 - DNA, 122 bp, Homo sapiens
catatagagaaattctggaattctgaatttgtcacttagcatttcatttttttaaatttccgtgctaccatacagtaattgtcatttttaggaattgcataatattccaacatgtatttatt

SEQ ID NO: 452208 - DNA, 122 bp, Homo sapiens
gggtggaaagagcggtggtctatctgtgctttttcgttctccggtcggaacccctccctgcgcaggctggaactgccccagagggcagggtgacctgcaccgactggattggacttttcttt

SEQ ID NO: 452209 - DNA, 122 bp, Homo sapiens
atcgggtcactcccacccaaatactgtgcttttccgacaggcttaaaaaatggtgcatcacgagattatatcccgcacctggctcggagggtcctgcgcccacggagtctggctgattgcta

SEQ ID NO: 452210 - DNA, 122 bp, Homo sapiens
accagttataaataagattcaataaattaaaacagcaactggaattctcttctgttaaggcggggcagggagagccctcagtctggcacaggtagggttgggtggcagaagagcaaagcaaa

SEQ ID NO: 452211 - DNA, 122 bp, Homo sapiens
aaacgtccgcagcgacattccgctgtgaatccatgagcttgttccccggtgtgttcaaaacgtccgcagctacattctgctgcaagttcaggagcttgttcctaggtgactccggcacatag

SEQ ID NO: 452212 - DNA, 122 bp, Homo sapiens
caaatggcaatcacaaccatatcatcatcgcacacgcagcacgtccgcagcggaagggcccgtcagtagtgagctggtgacacgtgggcaccattactcttacagactaaatgtctgtgacc

SEQ ID NO: 452213 - DNA, 122 bp, Homo sapiens
ggccggaaaagtggcggaggaagctagtgggtttcagggttcctgtttttcaagattttacgttgggtattaagtactctcacagcctgttaaaattgtcgctctgagtacacttgcaggat

SEQ ID NO: 452214 - DNA, 122 bp, Homo sapiens
gtgctgggatgaatgcatggcccctgcatccttaccccctcctcagagcccacaagcttccgagtgcgtcatcttcattattggccacaggaaacgacttcttggagtaagtgactggtgct

SEQ ID NO: 452215 - DNA, 122 bp, Homo sapiens
agggggctgggctgcggggaggtcgaggcggcacagcggccccaggagcagccacagggccgggctgcccacctgctgcacagacgttccacctcccggctcacgccactgatcattcccat

SEQ ID NO: 452216 - DNA, 122 bp, Homo sapiens
tcctctgcgtgcgagtggtcaagatggaaagcaatgcctactattgaaattgtcaagcaccgactggattgcctggtcaagctctccatgggagcccatggtagttctgggccaaccttggc

SEQ ID NO: 452217 - DNA, 122 bp, Homo sapiens
caggaaatggggcttgctcggggccctgctttctcggtgtgggaaggggaggatgggaaacgggatggtagggctctttgtacagtgaggattccgagtctccaagtccgtctttagccgct

SEQ ID NO: 452218 - DNA, 122 bp, Homo sapiens
gtggggagaggacttctccgggtctccctgctgggtcagcctgtactccagggagactcacggtgggacccagtacccagtgcccaggcccggccagcccagcccctctgcctgtcttcacc

SEQ ID NO: 452219 - DNA, 122 bp, Homo sapiens
atgagaaaggagaggttgcgaacctttaatgagcgagcccttggagtatccagcccttcccgacgctaactgactcctacgagggggcctggtacacagtaggtgctaaactaatcctctcc

SEQ ID NO: 452220 - DNA, 122 bp, Homo sapiens
cactgcgttgtccacaagacagaagctgaagtgcatccaaaggtgctcagagagccggcccgcctgaatcattctcgatttaactcgagaccttttcaacttggcttcctttcttggttcat

SEQ ID NO: 452221 - DNA, 122 bp, Homo sapiens
gacggggtggctgccgggcagaggggccctcacctcccagacggggtggccaggcagaggcgccccccacctccctcccggacggggtggctggccgggcgggggctgtcccccacctcctg

SEQ ID NO: 452222 - DNA, 122 bp, Homo sapiens
gtcagggaatgttctgtgtcattctatttcactcccaggactgaacagtggtgcagtcaccgtgtctggcggtttgggtttcagtgcttttcactaaaggctttcaccgaggccccgacgcc

SEQ ID NO: 452223 - DNA, 122 bp, Homo sapiens
tctggatgtcgtggtgcgtgcttgtagtctcagccacctgggagtctgaggcaggagaatcgcttgaattggagaagcggaggttgcagtgagccaagatcgcgccactgcactccaccctg

SEQ ID NO: 452224 - DNA, 122 bp, Homo sapiens
ctcgccggcctttctccaccgtgctcggccccagcgcccacggctgaagagagaagctgccgactggcccccaccgagccggggtcggcgttatgatgcggcccttcagggcacgcttgtcc

SEQ ID NO: 452225 - DNA, 122 bp, Homo sapiens
aggatggggcgggagcgcccacccacccccgcgccggccggggcatccaagaggcgcgctcgcagccacacggcgccccgcctcccgctccgaaaaagctcctgctcccctggcgcggtgtg

SEQ ID NO: 452226 - DNA, 122 bp, Homo sapiens
cacgctccctcccaggcagtcccgggaatgttctgaaaagtatccgaaagttctgagtcgcgcgcgcgccaaaagaaaaggcacaaccccccaccactccgggcgtggcgtgcccagacctc

SEQ ID NO: 452227 - DNA, 122 bp, Homo sapiens
ctttggcagcggccacctccgaaacctcagactcctcaaactcgcagaaacccctcctggcggcagtgatgctccccacgtctcccacactaagtggcgcctcccttggcctgaccctgcgg

SEQ ID NO: 452228 - DNA, 122 bp, Homo sapiens
tatccgcgccgagagccatgacatgctgatgatgatgacctactccatggtgccggtaggcggggtctctgttccccgtggcgccccggccaggtgggcggctgggggtgtggggcgaggac

SEQ ID NO: 452229 - DNA, 122 bp, Homo sapiens
ccgctgtaaggctccgtgggcgagcgcccaggtggggctgggcgaggtgggggttcccggcgccggccccgcgcgccgccctccccgcccccgctcccgccccccgacccccgcgcgcgcgg

SEQ ID NO: 452230 - DNA, 122 bp, Homo sapiens
aactgatgcgtgaggcctaaaatgtccttataagatctattaataaatcggggccaggagcggtggctcacgcctgtaatcccaacactttgggaagccaaggcaagaggatcacttgaaac

SEQ ID NO: 452231 - DNA, 122 bp, Homo sapiens
gctaatggcgcaggcgattatctgcggggcgctgagtgttgtgtgtcctgcgggcagggccggagttacaagcgccaggaatccagacggtgtttggagagggggggcggcgggggagcccg

SEQ ID NO: 452232 - DNA, 122 bp, Homo sapiens
ggggcagtggggcatcctcccggcagtcctggcctccgctcagccacggtgctgccccggcgccccagacctcccgtccgagcgtgcccagagagaataaagacacctgccctcgcggacag

SEQ ID NO: 452233 - DNA, 122 bp, Homo sapiens
cgggacaggccgggagggcttagccccccattctgcaggtggccgaggtgggggtaggtgcgccggggtccccgaggggctgggtcgggcaggcagggagcccggggtgctcttacctctcc

SEQ ID NO: 452234 - DNA, 122 bp, Homo sapiens
cgagcgccacgccgacggcttggcgctcgccctggagcctgccctggcgtcccccgcgggcgccgccaacttcttggccatggtagacaacctgcagggggactctggccgcggctactacc

SEQ ID NO: 452235 - DNA, 122 bp, Homo sapiens
cagcgcagtcagaccctggggtggggaggagcttgggcaagaaggcactggggaagcgggcgcagactgggcatggacccccacccagtgaaggtccggttttccacatgcacccaactcgg

SEQ ID NO: 452236 - DNA, 122 bp, Homo sapiens
cccagacgtgagcaaaggatggcagcaagcccggacccaagcgacgcggcgaaagcacagcgaccccaccctcgccaggtgcagagccatttccgcctccgagtcctgcgttgcctggcaac

SEQ ID NO: 452237 - DNA, 122 bp, Homo sapiens
tcagggttctaaggcctttaagaatttcaaaatgattgtctttggtgggcctgggtctcccgcagccccagggaatcctttcctcctcaccctcctctgcaagctccacttctcaaaggatt

SEQ ID NO: 452238 - DNA, 122 bp, Homo sapiens
tgtccacctcatgtgctcctctggtcctgtatgtttttgtcaccatgccaggtgggtcggcgtgatggacaggggagtatgcctggaagccctttctacactggatggctctcagtaactta

SEQ ID NO: 452239 - DNA, 122 bp, Homo sapiens
taaatgactttgagatacaaaggaagaaaaaaaatcagtcactgctgaagttcaaagaaacgatgttctactgagtgctttatggatttttttaagtacaattttccaaataatagaaaaac

SEQ ID NO: 452240 - DNA, 122 bp, Homo sapiens
gcctcctttcatcccttggacatgccaagcatattctcatccgagagccttggctggtctcgctgctggaaacactgttctctagatattaacatctctcattcagcttccactcaaatggc

SEQ ID NO: 452241 - DNA, 122 bp, Homo sapiens
ggctggatctcacttcctcaacctgggtcgccttccactttcggtacaggtagacaatgccggagatgaagccatccttggcagagatgccggataccacctccagctcggaggtagccagc

SEQ ID NO: 452242 - DNA, 122 bp, Homo sapiens
actccgtcacggcagtgtaggctcagatgtgacttgggaagatggcgccactctgcaggacgccgtgtgtggcaaccactcgctctcacccttcgggtctgcggcagctactgtcatatgag

SEQ ID NO: 452243 - DNA, 122 bp, Homo sapiens
tacagtctaatgtgtgttggaaggggtaggataccagaagtagtaaaaaacaaaggagagcgtagtcccctctacctgaggaggtcagggaagtttccttcacagaagaggtgaaaattgag

SEQ ID NO: 452244 - DNA, 122 bp, Homo sapiens
gacactcacaatggagtaacatactcctgtatcatacccctacaaacattcctttgaacacgaatccctaggtctgtacaattatttctctggtatacatacttttaaatgtaaatgctgta

SEQ ID NO: 452245 - DNA, 122 bp, Homo sapiens
tccttcccctcccgatccccgggcgggccgcagcgcgccacgtacctggccccgcccctgcgagccacgcagggaaccccggtgacgtcaccaccctccggcgctctcattcccgcgctctc

SEQ ID NO: 452246 - DNA, 122 bp, Homo sapiens
ctcttcgcggacgacccccgtggcctcccagccctccctccccgcgcgacctggcggccccgctagcggcacctccccagcgcccaagtagcccagatcctccaggagcgccccgccgcctc

SEQ ID NO: 452247 - DNA, 122 bp, Homo sapiens
tcatgccacccgtcctgtcattgttaaaaaatcattttgcctttgattctgggaagcacacgcctgggaatactccccaggcctctcacttgaccccaatagaactgtcccttttatgccac

SEQ ID NO: 452248 - DNA, 122 bp, Homo sapiens
gactcaacagagaacagtgttgttaccatgaaaatgacaacctgtctttggaggaggccccgtgccactgagcatccagaaataaaccacaacatggacaggcttagaacaacaaggaaagc

SEQ ID NO: 452249 - DNA, 122 bp, Homo sapiens
tgattcaaggtgctggtccaacagagtttttaaactactcacttctttatttcatcctttcgactgtacttgattaccagtgaagtaagatgggtcaggttacgacttacaacttttgttct

SEQ ID NO: 452250 - DNA, 122 bp, Homo sapiens
taatgttcaaaatgactcaggagaacgaaaggggctgtgttgaaccccaccagagaaagccgtgtaccaaaagagcacgacgcattgcccacagttaagcaggaaacagcagcagaaacacg

SEQ ID NO: 452251 - DNA, 122 bp, Homo sapiens
caaacccctgacctcaagcgatccgcccgcctcagcctcccaaagtgttgggattacaggcgtgagccactgcacgcccagcctgggtggtggctttttagtaaagacaagatccagggtgt

SEQ ID NO: 452252 - DNA, 122 bp, Homo sapiens
cgggggcaaaaagcagcggaggcaaaaacccgcggcggcggcagcaaaaagttgcatccgcgggagcaaaatagtggaaatggggtagaagaccagcacagcttggcattcctggagtgtga

SEQ ID NO: 452253 - DNA, 122 bp, Homo sapiens
tcacctggcagggatgggtgggtctcccgtggagcgttgtctcccgagaggtctgcaggtcggccagcccaacctcgtcgtctgtggccactccgaggtgttgccagccgccctggctgtct

SEQ ID NO: 452254 - DNA, 122 bp, Homo sapiens
catgtagaccactatttcccaacctgcaagtgcatcatggcctttggtgtgtcagggacacgccttgggtgtgtgtctcagtctaaagcttcctccttttcacaagcttcctgtttctcatc

SEQ ID NO: 452255 - DNA, 122 bp, Homo sapiens
ttccttgccctcttcaagcccctgacaacctctgatctgctttgtcattatgtattagttcgcattttctagaatttcatataaatgtaatcgtatagtatgtcattctgggaggaggggtc

SEQ ID NO: 452256 - DNA, 122 bp, Homo sapiens
tgtcctgcagcgacaggtagacccagttgagcagctgggcgggctggtacaccgaggcggcgctcgtgtcgatggccgacagcaggctcattttgtggcggcggtgccggcccctccccggc

SEQ ID NO: 452257 - DNA, 122 bp, Homo sapiens
accctctactcccaaagcaaaatcaatcaagcctccctgtctttggtgcttcttaacacccggcgagtgcgctcagcggctgaggttgtaactgctccctggggttggggttggggagggca

SEQ ID NO: 452258 - DNA, 122 bp, Homo sapiens
gtccccacacacgtccgacccctccccgcgccctgaccacgaacgcatccctgacttaaccgccacactcgggccgtgagcgcctgccagcagggccttccgccacacacacacacacacac

SEQ ID NO: 452259 - DNA, 122 bp, Homo sapiens
ctggtttcacctaagagggcagccccacccggtctctgagtcagctgtgcacaaagcagtcggaactgacaaggtaaagaacgcctgactcctctttacaaaccccaggctccatttaaact

SEQ ID NO: 452260 - DNA, 122 bp, Homo sapiens
aggagaaggcggcttgagcgcggggcctcgcggacaactcagccctcgacccggcgccgccgccgctcaggagacatcaagcaagaagacggcgcaaaagatcaccgaatacaagaacgccc

SEQ ID NO: 452261 - DNA, 122 bp, Homo sapiens
caggattatcgggagcggcctgcgaggcgcgatgggctcgggctcaggcgaggcacgcagcgcccctaagcctggctctatcctgaaagggcacctaagcgtgaacagagccggtgcctgca

SEQ ID NO: 452262 - DNA, 122 bp, Homo sapiens
aggtctcccttttcccggcccctggtgactgacggtctctgtgttgccttccaggacagccgtgaacgctcagtcgggggtgtgcaccccggcggggggcctggtgacgggtaaggcccccc

SEQ ID NO: 452263 - DNA, 122 bp, Homo sapiens
tcactccccagccacctcccgagcctcgggttgggcaagcggccgccgtcttccccgccccgacgcctctcgcggttttccattggctttggctcccctggggtactccttcacatacggcg

SEQ ID NO: 452264 - DNA, 122 bp, Homo sapiens
ctggaagaggcagagccgcgcgggtgccaggacccaggtccttgctacgtccggagcctacgtcaccacgatgcctcccctgggccggcggcagaacccgagacccccgcaggttctaagac

SEQ ID NO: 452265 - DNA, 122 bp, Homo sapiens
ctcgaaccctgtgaccctcctgccccgtccttccagggttcagtggccaagggttcctcgcgtaaatgaccatcactgttttacatggatctcatctcatgagtccatggagggagagcatg

SEQ ID NO: 452266 - DNA, 122 bp, Homo sapiens
gtgcctcgccgggaaagttctcggcaaagctggggatgagccctcagcagggcaggctcccggtgcagcgcgcccccatccattgcccgcgcgcaagaacccggaatgggccccacctgggc

SEQ ID NO: 452267 - DNA, 122 bp, Homo sapiens
atggggagcctctggcgttgtcggagaatgcaccttaaaaatgactctacccttgagcaacgcaggaagcacgacagtgatacttctgtttgtgatgatggtattggcggtatgatagtttg

SEQ ID NO: 452268 - DNA, 122 bp, Homo sapiens
ccccattggctgccgggaacaggtggtggggccggcgtagcgccccgaattaggaactgtcgggaagcgccgcggccgctggctcgagcctccgatgcttgcccttttttagccagcggggc

SEQ ID NO: 452269 - DNA, 122 bp, Homo sapiens
cccagggtcttctcgggcacattggggctgaactgcttgtaggcgagcggcacgagtttgcgtggcggtcgccggcggctgcccaccacccgacccggcccgcagccccatgccgccggcac

SEQ ID NO: 452270 - DNA, 122 bp, Homo sapiens
cccctggtccctctcaagccgggagaagccctgtctcctctttggtctggaaggctggggcgcttgcagcaggaggatcctggagagagaccccagctgaggccccctccctctgggagaag

SEQ ID NO: 452271 - DNA, 122 bp, Homo sapiens
gcttatacagaagaaaaaaacatcccaggtaaacagaaactgtccctgaggaagcccacacgctgaacttgacatagacgttaactcagctttataaatacgttcaaagaactagaaaaaat

SEQ ID NO: 452272 - DNA, 122 bp, Homo sapiens
ccagctgtgtggcacaggtatcttgggccactagggtgagcatagtatggatggctctgtcggaatccatcacacctggggaaaaacatcccaaagggcaggtcccatgatcgtggtgcgaa

SEQ ID NO: 452273 - DNA, 122 bp, Homo sapiens
gatgactgcccacacccaaccaccgaccatcaacaaccagtgcctggtaaccacctgacacgtccactcacgcccacttcctcagcgtcccctctgggtcacagctcagtgtcggcacctgg

SEQ ID NO: 452274 - DNA, 122 bp, Homo sapiens
cattgattcgcgggtttcctgcaaccccgggacccccacgggagatcccggccggagaagcgcccccattcaagcccagagaggggccacgcctgtcggaccccccgtcccacgccaacttt

SEQ ID NO: 452275 - DNA, 122 bp, Homo sapiens
aaactcgcagaaacccctcctggcggcagtgatgctccccacgtctcccacactaagtggcgcctcccttggcctgaccctgcggaaccctcggaagcaggatgcccctttgctgtcccctg

SEQ ID NO: 452276 - DNA, 122 bp, Homo sapiens
gcccaggaggggagccaccgctgtgatgaacgcttgcaggagccatgaggggcggctttccgcgcagtgtttgcagtgatttatgggagtcaggggctgccagagagggatgtggatgttag

SEQ ID NO: 452277 - DNA, 122 bp, Homo sapiens
aggcctaaagcacaagaactttcattcattcagaagtttatgcatgacctgtgttcctggcgagatgatggggaagaggtcgcctctcattgttggttatgaagacttgagagtatgtgtat

SEQ ID NO: 452278 - DNA, 122 bp, Homo sapiens
gaggccgttttctgggctaagcagcgacggcgctaggcgactccgcttgtccttcgtttccgctgtcagctcagcaggtgacttattcccagtgctgctcttctcacagacacaaaaccaac

SEQ ID NO: 452279 - DNA, 122 bp, Homo sapiens
agcttttccggctgggactaaaggccctccgtgacgcagccgcttctgagcgcccttccacgtcctcgctcgccgccaggctgtgcacacctagatcccattgtgagccccccgccaggctg

SEQ ID NO: 452280 - DNA, 122 bp, Homo sapiens
ttggtgggcgcttggaaccgcagaatttgccaagaaggggatcgctggtattggcaccatcgtaaattgccaggtagtcatgggagcaggaggtggagggaaccacatcaaaatcactgaac

SEQ ID NO: 452281 - DNA, 122 bp, Homo sapiens
gggggcgggcctagcggaaggcgggtcaggcagaatgcggccccgggcgcgtgtggatgacgtcacccggcgcgtgccggggtagcccgtagtaaccccgagtctgcggaagtggtgacccg

SEQ ID NO: 452282 - DNA, 122 bp, Homo sapiens
gcgcacgtgggaggaagtgctggtgccctctgccgctgctcccgtctctttggttacgctcgtcagccggtcggccgccgcctccagccgtgtgccgctatgggagtcccggcgttcttccg

SEQ ID NO: 452283 - DNA, 122 bp, Homo sapiens
ccacggtaaactggctactagaaatggagaggggtgggcaaggacgacaaaaatggctaacgagggttaatttcatccagggttgagctttagcatctaaaagcgacccagagaaggaaatg

SEQ ID NO: 452284 - DNA, 122 bp, Homo sapiens
gtgctgggattacaggtgtgagccaccacacctagcccaaaaaatatttttctgatcacacggtggccctcctcttttgcctctctctttttttctctctcactacttagtccctttatttt

SEQ ID NO: 452285 - DNA, 122 bp, Homo sapiens
ctcctaactcagtccttggcagtagaaagctcccttctactcggcgcactccatctcttgcgttatcagcttttcagcgttgactcgccaaactactccagccagacctctttcctgagctc

SEQ ID NO: 452286 - DNA, 122 bp, Homo sapiens
ttgggaagctgacgtggggcacgttttctttaacagcgagccagtgagtccccgtgcagccgtcaccagccccagagatgatggctgtcagcacaaaagaaggcaccaaatgcaccttataa

SEQ ID NO: 452287 - DNA, 122 bp, Homo sapiens
tctttccccaagctgttcccccttcccagtgtgacagtattaatacagtgttggcttttccgtatacgttactacttgttagccttgtgtccttggacaaattacgtaatttctctgtgtcc

SEQ ID NO: 452288 - DNA, 122 bp, Homo sapiens
agcttctaagagcaagatcccaatcctcagaaagaggaaatgaccaagagtcttcccagccggttggatctgtgattgtgagtcttttaacatttgatgttttctattaacacaatttattt

SEQ ID NO: 452289 - DNA, 122 bp, Homo sapiens
aggcactttttcctctttgctgatggggacattgaggctcgtggagatgacaagacttgccgtctcctggcacagacctctttccctctgcctcaaagcctttccatgcatccacctctctg

SEQ ID NO: 452290 - DNA, 122 bp, Homo sapiens
tgcgactggagctgacatctgccacggacgcaaagctagcagccagaaggccaccgaagtcgccgaggagggcacaaaggatgcgacccagcacgaagtagccgacgtggagctgcagctgc

SEQ ID NO: 452291 - DNA, 122 bp, Homo sapiens
ggggtctaggccatcccttgtggcttcccatcactctgcccacatctttgtgacaatgcccgtatttaaatagtgcgtggaggtcaggcgtgatggctcatgcctgtaatcccaacactttg

SEQ ID NO: 452292 - DNA, 122 bp, Homo sapiens
tgggtctggaataaatgtttgcaacacaggggacgtggcttccagtgctggaggcagccacgacggccacgacacgggggacgtgggttccagtgacggccgcgacgcaggggacgtgggtt

SEQ ID NO: 452293 - DNA, 122 bp, Homo sapiens
gcggggaggggcacgctggcgacagagccccgtctttattgggcaagatcacgccgtgagcgccaattggctgagtcgtcgccgagctgggccaatcctcttggtggaggaagctcggctga

SEQ ID NO: 452294 - DNA, 122 bp, Homo sapiens
acacggaagaaaaattccctgttcatccagcagaagcacttaggcaggaaaccacatattcgacacccggaagtgcgaaacgcgggtaacgcagtgggaggtgaaaccgacgagggtgcagg

SEQ ID NO: 452295 - DNA, 122 bp, Homo sapiens
cagctgtcccacacggactgtggccccaaggctctgttacaacccaaagggcggtggtaccgatgctgtgcctggatctgcaatccaagccctggagacgtcagcctgggttcttccccctt

SEQ ID NO: 452296 - DNA, 122 bp, Homo sapiens
aggggggtacacatttctgctcggtaacccctccaatgcctgaaggggacgatgccgtgacgttgctctgtcgggacacctcttccctcccccgcccgcggtcgccaggttcccccgcggcc

SEQ ID NO: 452297 - DNA, 122 bp, Homo sapiens
tcgagacctcagatgagactccagccctggccgatgccttgagtgcaacccgatgagatacgttggtgcggcagaggagcccgctgagtcgtgcctggattcctgatagacaaactgggtca

SEQ ID NO: 452298 - DNA, 122 bp, Homo sapiens
atctggaacaaaaattttccatgtggttgtttttagcagagctactatatgcaaactgcacgtgaaggatataagttataaaggaatagagcttctagaaggagaaatgtgagttaactttt

SEQ ID NO: 452299 - DNA, 122 bp, Homo sapiens
actgccaaatcttcaaatttagaggctctggtgaaaaattaaaccggtggcaattttcaacgtttgtagcatctgttaccctacacttcagcacccggagtctggacagctccgcaggccgc

SEQ ID NO: 452300 - DNA, 122 bp, Homo sapiens
ataaaacatgcgatatttgcagcaaaagacgtaacaggagctggtctcatgtaaatattacgttaattaaaacagatgggtctggagcataaacaaaatagctgcagggggctggtttttgt

SEQ ID NO: 452301 - DNA, 122 bp, Homo sapiens
tcttccgcagcaggaaggcgcagattttggcgtccttgaccaggtccatggaggcctcctcggagggccactggtgccgggttttcttccccttcccatcctcctcctcttcatcatacgac

SEQ ID NO: 452302 - DNA, 122 bp, Homo sapiens
ccctttctgaaagctgatggggcagatcttaaagaccaaggtcctcaaattcctgagtcccgaggggtggggctcagatcctttctgcctgtaattgtaccccccccaacagtgattgctta

SEQ ID NO: 452303 - DNA, 122 bp, Homo sapiens
agatgttatatcccaagcttcttcctcgaaaaaaattgcctaaatagagaaacatgcctacggaagtcaagagctttctgcaatttgcatttgtgctgtattaattgtggctgaggcccacc

SEQ ID NO: 452304 - DNA, 122 bp, Homo sapiens
caggggaaaaaccgcctgacttgctttctagacagatgcaaaatcttcaccttccctaaacgtcttgagtcccatcgtggggcagggagtgaaggaaggccaagccctaagagcaggaagat

SEQ ID NO: 452305 - DNA, 122 bp, Homo sapiens
gctaatgtggcagtatttgtcaaagcttaaaaatcgttcctggcctggcgtggtgactcacgcctgtaatcccagcacttcgggaggccaaggcaggtggatcacctgaggtcaagagtttg

SEQ ID NO: 452306 - DNA, 122 bp, Homo sapiens
gttctcctccatccggtgctccagctccaggaggaacctacgagaggcagcggcttgaggcggagggtgcccggggggtagggtggggaattgtctcaccaagggcagcatgcgagcctgac

SEQ ID NO: 452307 - DNA, 122 bp, Homo sapiens
ggacttggctttttaatgtatattacagtgtccacccctcccctctacccttgggaacagcgagtcctggatgctgctttctttcagatccagggcaccaactatactaatcagcaacttgt

SEQ ID NO: 452308 - DNA, 122 bp, Homo sapiens
accagggttgaaggggacaggctggaggtgtcaggctgagcattctgagtatttcctgcacgagagcagtaacaagcagtccttgaccttcacaatgccgacacattgaagggcaagtgtgc

SEQ ID NO: 452309 - DNA, 122 bp, Homo sapiens
agaaggggcaagtaaaaaatgacagccttaggacgacggcagcggcggcccagcaggctccgcgcatgggtccgcggtggcttggggtccgcccgcgggctgcggtgcgagctggcagccgg

SEQ ID NO: 452310 - DNA, 122 bp, Homo sapiens
ctgaacattgtccatgggagaaaaacgatatttaattacgtacaggagtcccacaaaatacgagactaaaagttgaagtcagatgattaaagcctacatggcatcctgagctactgaaagga

SEQ ID NO: 452311 - DNA, 122 bp, Homo sapiens
gagctgggggctgacgtccgagccaggtccgtccaccaccccacagggcctgtaggcacccggcataggaaaggccgagaaaggggtccagtcccacagccctccaccccagcaaattccca

SEQ ID NO: 452312 - DNA, 122 bp, Homo sapiens
ctttccactcctgggtttggctcgttccacaccctagttcccctcctcccatcctaggggcgcagcacactcgctctggataagaacagctgcccactgaggactctaaccctcccaccatc

SEQ ID NO: 452313 - DNA, 122 bp, Homo sapiens
gcccgcgagggccccctgagggcggtgtagggcgctgggcggcagccggggcgcagagtgcggggcccggaggagccgtgggggaggggaaagggcgcgcggcctcggatgcgcagaccctg

SEQ ID NO: 452314 - DNA, 122 bp, Homo sapiens
ggctcgggacctgcagcccgccatgcctgagcctcccaccccctccgtgggcacctgtgccgcaggagcctccccagcaagcgccgcctcctgctccacagcgcccagtcccatcgaccacc

SEQ ID NO: 452315 - DNA, 122 bp, Homo sapiens
agatatcccggtgtttaagaggaggaggcggtccagctccgtcgtgtccgccgagatgtccggctgcagcagcaagtcccatcggaggacctccctgccctgtataccgagggaacaggtaa

SEQ ID NO: 452316 - DNA, 122 bp, Homo sapiens
tccctagggctccagtttctaagagtggtccacagtggtagcttcaagctgaactctgaacgtgaaatgaaatcctatgtcatttgaattttttcttttttttttttttttgagaccgagtc

SEQ ID NO: 452317 - DNA, 122 bp, Homo sapiens
tgggggggtaccgttctgggtgaggcatccaccatggtgaggcccctgtgccgctgcccccgcgcccccccggccgccgctgcctcctgcccctcggtgctgctgttgctcccccgcctgct

SEQ ID NO: 452318 - DNA, 122 bp, Homo sapiens
cgagaccaaagtcaactcagagaagctttaatagcaagaggtgggactagcctcctggcccgggagagagcggcggcggcggcgccgttcaactgcggcagcagaataagcgcgcgtcgttc

SEQ ID NO: 452319 - DNA, 122 bp, Homo sapiens
aagctgtctctgtctttcatttctttcctcctctttttgcggtgggctgtcctgaccaaacgtcccaaccctgcctgcctcatctgttccggggctgctgcctaaaccgactcacagagtgc

SEQ ID NO: 452320 - DNA, 122 bp, Homo sapiens
tcccggtggaaccagaacgtccagctgagctgggaggtgtttgctgtgcctggactgctccggagggtcagagtggattcatcagtttctccctcttctttgggaaaggtcagcaaagaaga

SEQ ID NO: 452321 - DNA, 122 bp, Homo sapiens
cagaatgaaaaaggctggtaactccaaatgttggtaaggacgtgcagccgccagaacccacgagcggctggtgagaatgcagaaaggtgtgagctctttccacacccacttgccagtggctt

SEQ ID NO: 452322 - DNA, 122 bp, Homo sapiens
ctctagctccatttcagacctgcaaggaaagggctttgagaagggaactggggagaagcacgttccaggtgtgggttcagctcggcactcgccacaggcctccgcaggtggctctccttggc

SEQ ID NO: 452323 - DNA, 122 bp, Homo sapiens
cgccacttcctgtcttcctacccagcgccgcggctctcggaggctgccagtggctgggtgcgcctggcctgagtcctccacccgaagaaaataaggaacctggccagagagaggcaaaagga

SEQ ID NO: 452324 - DNA, 122 bp, Homo sapiens
ggtatttgaaggcacgaaatggaatgacttaatctcatctctcagtggttcagatggatgcgaaggtcatggctacagctacctggtctaggagtgtgtacatcatgtaaacatccaggtca

SEQ ID NO: 452325 - DNA, 122 bp, Homo sapiens
tttactctctgagcacgcccgcccactgcatgttaagggagcagtgagcagcatttatctcgggtggagacgtgggtggtttcacagagtgtggatctgccctcctctctctcacttgcctc

SEQ ID NO: 452326 - DNA, 122 bp, Homo sapiens
tatgacaacttgggcattgtggagactgaggcatcccggacagccatgcagaaaccaaggcgaatcatcctgtgtggggtggagataagcatgctgtgtgtgtggaagggattgcgggagga

SEQ ID NO: 452327 - DNA, 122 bp, Homo sapiens
gcacttcacggaagacatccagactcggcagtaccgggccgtcgaggtgctgatcggcgccgaatacggccccccggcagacatctggagcacagcctgcatggtacgcccgcccgggctgc

SEQ ID NO: 452328 - DNA, 122 bp, Homo sapiens
ttgtcgcgtttcctcaaggctccgccccatttcccatctttcttttcagtccttgcgcaccggggaacaaggtcgtgaaaaaaaaggtcttggtgaggtgccgccatttcatctgtcctcat

SEQ ID NO: 452329 - DNA, 122 bp, Homo sapiens
tatcctcttctccccttctggatattagcaacaatgtcgcacgggggtttacactttctccgatatctggagtaatgtcattctctcctcctttgaacgttaagaacagtatcacacggggg

SEQ ID NO: 452330 - DNA, 122 bp, Homo sapiens
acctgctagctggggtgaagcatgcgtttccccttcccaactctcccgctgagacaaccccgggtcccagggggacctcagtctgacccagacaccggacccctaccgcatacccaggctcc

SEQ ID NO: 452331 - DNA, 122 bp, Homo sapiens
ggcgtggcggtgggtcggggttcgactgcgagctttctggggctcaatggaggcggggcccggccgctgtcaccgggcaggagagaacgttgcttacgtgcgcccggagtccattggccaag

SEQ ID NO: 452332 - DNA, 122 bp, Homo sapiens
cttagggtcaactcccctacagcattgtcatcattggcatggctgaggctcggtagccaccgtatctgggttccaggagaagggcacggaagagatcttaaggcctgaccagaggtggcaca

SEQ ID NO: 452333 - DNA, 122 bp, Homo sapiens
ctttctcaaccttccctgggtgggtaaggtcaccccacacgggttcaggtggtggtccctcgactgggaatgaggggatcctgaggatcccgcaggtagacgtagagcagcggggctcagct

SEQ ID NO: 452334 - DNA, 122 bp, Homo sapiens
cgtctcggctctggactaccaagttccggagcaagcagacagaccacctctttacgttcccgtaggccacgctccgggggcggggctccagtgaggatactgcatcccatggtgccttgcgc

SEQ ID NO: 452335 - DNA, 122 bp, Homo sapiens
aatgcacaggtgtgagtggattgcttatggctatgagataggttgatctcgcccttaccccggggtctggtgtatgctgtgctttcctcagcagtatggctctgacatctcttagatgtccc

SEQ ID NO: 452336 - DNA, 122 bp, Homo sapiens
agggcacaggacgctggaggcccagaacagctcaggtgctcccgctgggccggcccgggccgggcgcttcctgggagggggaccaaactcccggccttcagctcttgccctccgggtctccg

SEQ ID NO: 452337 - DNA, 122 bp, Homo sapiens
ccctgccgtccctgcgtcctctgcacccccagcccctcacgtcacctcctgccctccccacgcaaatcctgcgctcctgtcacacggaggggaacaaaacagggtagcagcagggacgtggg

SEQ ID NO: 452338 - DNA, 122 bp, Homo sapiens
ccgggcctgcccaccccgtccctccaccccggcccccggccctccctcctccctgcctcccggctgttacctcataggtcgagggcgctcagtagccccctaaccagctggagaagtcgagt

SEQ ID NO: 452339 - DNA, 122 bp, Homo sapiens
cttcccaatagtgatgtcaaactgtattagttactaattgctgtgtaacagcaaacctagcgacctaaaacaaacaaaaaaattatttaacaaagacagagtcgggaataagaaaactggct

SEQ ID NO: 452340 - DNA, 122 bp, Homo sapiens
gggtttggtgtatggtttttgagatattaatgcccagacaaaaagctaataccagtcactcgataataaagtattcgcattatagttttttttaaactgtcttctttttacaaagaggggca

SEQ ID NO: 452341 - DNA, 122 bp, Homo sapiens
ttaaacaaagctcattgagttgtggagccattgaaatgtaaactaagcggtgcaattaaacgaactgggatcccgagtggcctgggttggatgcagcccgaattgcttgcctgtgttatttt

SEQ ID NO: 452342 - DNA, 122 bp, Homo sapiens
ggtgagtgttacagctcttaaggtggcgcgtctggagttgttccttccttccagtgggttcgtggtctcgctgacttcaggagtgaagctgcagacgttcccggtgagtgttacagctcata

SEQ ID NO: 452343 - DNA, 122 bp, Homo sapiens
gctgccgcccccggcgggacagccgcggctcctcctccagccgccgcgccacccagagcccgaggtttgcccttcagaagcggacccgcagactcctcggactcagagccatcctcctcctc

SEQ ID NO: 452344 - DNA, 122 bp, Homo sapiens
aggtctgctggtcctggcccaatccctaggacagtttgagagcctggtgcaatctgagtacgtccagcatcttgaattaaacttacagtcagtcccagcatttttgcatgggccaataatgc

SEQ ID NO: 452345 - DNA, 122 bp, Homo sapiens
tgaaagagacagaggcggacgcagagacatggcgacagagaggatccgtctcccctgctccggcgctcatgtttccagccgtgtgcactcaggtctcccggtatgcgtgtctgtaggcacct

SEQ ID NO: 452346 - DNA, 122 bp, Homo sapiens
caccctggcagggactgtaccatcaacagacaaatggcagccgaccaaggaggcgactggcgtgtggaacaggtgatccgattgtttttctaaagagcaagggctaggacgtcctacgtgtt

SEQ ID NO: 452347 - DNA, 122 bp, Homo sapiens
tccaacatgtcagaaatctcactttcagaaaagttgtcaccttttctttgcactccagcccgccagcccctttaatgtgctatccaagaaagcagtgaggaagaatcacaggataactgtgc

SEQ ID NO: 452348 - DNA, 122 bp, Homo sapiens
tttagggcaagagtttacatttttatatactttttttatgatttataacctgcctaatttcgaaaaggatttgaggcagcaagagtaaatggcactgggagttacatggatatttttaccct

SEQ ID NO: 452349 - DNA, 122 bp, Homo sapiens
tgcaaacacattcaaaaccttggctgccatcacggctatttcactggctaaaacaagtcacgtgaccaaaccaaattttaatggagaggccatgttaatactgtgaaagaaaagtatcttgg

SEQ ID NO: 452350 - DNA, 122 bp, Homo sapiens
tccctccccgaagcccagggtctgctgaagtctcatcaatccacctggcccccacctttccgggagagcggcggcctctcagacacctccatagtcctggctcagaagcagaaaggaggccg

SEQ ID NO: 452351 - DNA, 122 bp, Homo sapiens
cagtgtgacaattgcccgggttggtgtgataaatcatcgtaagtaattcctgaaagggtgcgagactgttgggggccgggcgaggactgtaaatctttccggtttattgctctatgaacata

SEQ ID NO: 452352 - DNA, 122 bp, Homo sapiens
cccgccgggcgtcaccgctgcgctttaggcgggaactgtaggaaaatcccctctgcctggcgggagggcgggggaggaggacggcccacgaccgaccccgggtgcggcaggggaagaccttg

SEQ ID NO: 452353 - DNA, 122 bp, Homo sapiens
ggcagctgtcaaggagatgccctcctaatggccaccgtggcagtgcagcctcacacaggccgtcgcctgcactgacccgtggtgtccatgaggacagttccactgccagccctggggttgtg

SEQ ID NO: 452354 - DNA, 122 bp, Homo sapiens
tatttttagtagagacggggtttcaccgtgttagccaggatggtctctatctcctgacctcgtgatccgcccgcctcggccaccgcgcccggccgaaaatctgaatattttaatggaaaact

SEQ ID NO: 452355 - DNA, 122 bp, Homo sapiens
caacttccccgaagctgttggtgccactcccagcccatgtgggcccccgcaggctgccaacgcctgtccgccagctccccgttccgctgggctttccaaaacctcgccaggggtgactttct

SEQ ID NO: 452356 - DNA, 122 bp, Homo sapiens
gaccatcacgccctctgcctcaggctgtgtcagggaaaggacattgccccgaaaccactgcgactcttgccactgctgcagagaagacgtgcacagcacgcatgcacccaccctgcaaagga

SEQ ID NO: 452357 - DNA, 122 bp, Homo sapiens
ttcagcacgctggccagctggtcgcgttcgggggccgacaggtaccgctgctgcttgaagcgccgctccagctcatagacctgcgcctgcgagaagagcacgcgcggcttcctccgccgtcg

SEQ ID NO: 452358 - DNA, 122 bp, Homo sapiens
atgccagcgggtgttaagaaggatatggtcagaagagctctttgtctccatccacggggccgtctgctcagcccgtgtgtctcggtgagtaattcgggagcaggtgcacgcctgtgcctact

SEQ ID NO: 452359 - DNA, 122 bp, Homo sapiens
agccctgggtgcatctagactttaaaaaaatatttaaagtcggccgggcgcagtgtctcacgcctgtaatcccagcactttgggaggccgaggtgggcagatcacctgagttcgggagttgg

SEQ ID NO: 452360 - DNA, 122 bp, Homo sapiens
cggccgttgtaaactggcgctgcgggccacacccgtgttccaggcccgctaacccaccggcggccccagagccccaggcggccccagagacccagcctcaatcctcagtcctcgtacagtcc

SEQ ID NO: 452361 - DNA, 122 bp, Homo sapiens
ttcttacttaaagaagttttaatatgggataaattaccaggaactaggagctgacgtgggcgggaaaaaaggaatcgtgtcgccagccagtcttcttaccgctgcctggcctggaaggatag

SEQ ID NO: 452362 - DNA, 122 bp, Homo sapiens
tacgccccgcagaagaagttcggccctgtggtggccccaaagcccaaagtgaatcccttccggcccggggacagcgagcctcccccggcacccggggcccagcgcgcacagatgggccgggt

SEQ ID NO: 452363 - DNA, 122 bp, Homo sapiens
aaaacccggtcactgaactcttccacacgctttctaaaatcgtttggcatggactttcctcggccccttaatcaccacagggtgtgtcctgcccgggctgtcaggagggtcgcaggcgcccg

SEQ ID NO: 452364 - DNA, 122 bp, Homo sapiens
gcccgctcgccgcccgccgccgccgccgcccgcgccccagccccgggagctctgctgatccggccgagctcagcaccgaggcgccccccaacctgcccagcccccagcccaccagcccagcc

SEQ ID NO: 452365 - DNA, 122 bp, Homo sapiens
aggagcgggggcgcagtcccttcagtggagaccctggtctctccgttttctttcgggtcgcgctcatcttcgccctgttaggggctgaggagggtaactggagagactccttgggcttcagc

SEQ ID NO: 452366 - DNA, 122 bp, Homo sapiens
tggagccactcatccggcagcgccgaggtgagggctgtgaaccagggctcctggggcagccgtgggggccgggcccagggagtaggggcagccgggccggcctaagggaccttagtgccagg

SEQ ID NO: 452367 - DNA, 122 bp, Homo sapiens
tctgcacactgcactgagcccatcacttaaagtcccagagagactctgccctgcatacgtcggcctccccactgtgctctctcagtcgaccacctttctcgggtacctgcccactcctttca

SEQ ID NO: 452368 - DNA, 122 bp, Homo sapiens
gctgaggggtacggtccacaagaggacccccagcctcccggtctccaggactggcctcgccgtggccacaagggtaagagcacagggccccaaaagaaactttttgtggaaagttccgaggc

SEQ ID NO: 452369 - DNA, 122 bp, Homo sapiens
atgcccgggctcgggctctgctgggtcccctggcgctgcgaaccctgtcaccttctatcgcggccaccatgctgcccgctggtcagccctggtcttcagacttcctgggacccctccggcac

SEQ ID NO: 452370 - DNA, 122 bp, Homo sapiens
cataagacagctcagtcattaagtgcagggatggcatgcaaaccaaatctgacttttaaacgttacttcatcaccacagctggaggtgagctgcatcagtacacaattcccagtgaagacag

SEQ ID NO: 452371 - DNA, 122 bp, Homo sapiens
cctgagaggcgtggctgcggcactcttgccggatagggtggcccggcggggctaggaaagcgtgaaatctcgcgcgattgcgctgcgaagtcggggacggggcggggctggcggcgggggcg

SEQ ID NO: 452372 - DNA, 122 bp, Homo sapiens
agtgctgggattacaggtgtgagccaccatgctccgcctgccctgttgtttatttacaaccgctgcctgttttctccagaactctagcccccaccccatttgctataagactctgggagaga

SEQ ID NO: 452373 - DNA, 122 bp, Homo sapiens
cgtgatccgcccatcttggcctccccaagtgctgggactacaggcgtgagccaccgcgcccggccgcatccctcaattcttaaccactttttgaggcaagggatatttggtcactcagaact

SEQ ID NO: 452374 - DNA, 122 bp, Homo sapiens
aaattaataaaatagaacatttctagcgacacacacaggcacgccaatctcagtcacactcgccccaggcacagacactgtcactatgatttgccatccccgcctccccacgctggagagca

SEQ ID NO: 452375 - DNA, 122 bp, Homo sapiens
ttgcttgtaaatatgaaactagcaacatagactgcaatgtgacaaaatatatcagagattcgtcattatctggcaatagttgttggatgtgtttgctgccatgccacgaggtttcttaggaa

SEQ ID NO: 452376 - DNA, 122 bp, Homo sapiens
cgcacttggtctctaaaatctgagtcttcagcatcttacaagccacacagagagcccctacgttccatgcccggacacaatgagccccaagaataatcccccattactctgtccactaaggg

SEQ ID NO: 452377 - DNA, 122 bp, Homo sapiens
ttaaactgtttattttgcataatggcatgaaagagaatttcaaacacaggcacgtggtggcgttcattagcagtcaggaagctcaggaagattcaagagaggaagaagaccgactggagtct

SEQ ID NO: 452378 - DNA, 122 bp, Homo sapiens
tccttcctctggctccagactgggccctgtccaggtgaccgcacacatggtctgtagtgccggacacaagggcagatggccaagaccacagaggccacaggagcccacagagccggctgccg

SEQ ID NO: 452379 - DNA, 122 bp, Homo sapiens
ctccttctccctttatccccccgcccccccccatgctctccctccgcgggaatcacgtgtcgccatcatactcattgggagtctctgcctcgcctgtcgccacgtttcaggagcaacgagga

SEQ ID NO: 452380 - DNA, 122 bp, Homo sapiens
taccttcccaatatcaaccacaaaagcaatttctagttgaagattctgctggggactcttcgacaactgttttctttgacccactcaccccaccttttgcttcttagacatccaactgttca

SEQ ID NO: 452381 - DNA, 122 bp, Homo sapiens
gagggagagatgcaaataccaggtgagacggcggcgcccctgataaaacggggcggggggcggggtggagcgcgcggggagcggggcggacgccggggagggccgggccaagacacggggcg

SEQ ID NO: 452382 - DNA, 122 bp, Homo sapiens
ctgggagtaacgctgtggtggtcacggaagcgcccactgggagtaacgctgcggcggtcacggaagcgcccacggggagtaacgctgcggcggtcacggaagcgcccacggggagtaacgct

SEQ ID NO: 452383 - DNA, 122 bp, Homo sapiens
gggacgtcgcatacgacgtccgtaaattactggctcgggttttgagctttacctggctctcgtcccctgtagtacaatcctctttattctttcaggggacaaacaacaacaaaacccgtctc

SEQ ID NO: 452384 - DNA, 122 bp, Homo sapiens
agcgccggacgctctcgcacgcccgcccgcccgcccgcgcacctccaacccacctgccgccggccagacaggaatggactgtgtgactgaatgaaatggcggggccataagccatccaagga

SEQ ID NO: 452385 - DNA, 122 bp, Homo sapiens
gctttatctgtctcttccttcctagcctgattaatgacagagctgcttcattgttcagtccgagctgattttcattccacagaagaggaaagcaaatgcccccacgcccagaaaaaataaaa

SEQ ID NO: 452386 - DNA, 122 bp, Homo sapiens
agaacgaacaggagagggagactgaactcctggcttccacatcaggcacaaaccccaggacgtgaagatccctaactgcctcccctccggcccccaaatagcagaacagagagtaatcgcac

SEQ ID NO: 452387 - DNA, 122 bp, Homo sapiens
agatggcttcccacccgtaacctgcttggagattcttgacactgcctgcccctctgacatcgctgccctgagatggctctatagagccagaggactggacaggacctgcctcccgctcgttt

SEQ ID NO: 452388 - DNA, 122 bp, Homo sapiens
ttttccagatgtggtgaggggcaaggcagccagctggtgtcatggaaaaagctctggattcgagtctcggtcagatgttggctacccactcaaactgctgccgtggcagccctgcctccttg

SEQ ID NO: 452389 - DNA, 122 bp, Homo sapiens
ggcctgttcctttcaggctgactcagaaggctgaggaggctttagattccaggggagggccgagcttgcaaatatgaggagacttattccagcctgactggagacaggcacagagctgaaag

SEQ ID NO: 452390 - DNA, 122 bp, Homo sapiens
gaaacacctcatcctccatcaggacacaaccacagagatggtccaaatgagccctgaggtcgaggcttttattgtcctgccatgggtcttcacaggcagcctttttcttgataccaggccag

SEQ ID NO: 452391 - DNA, 122 bp, Homo sapiens
cattagtgaaacccccgcccctgaagaatgggtaagacgttttcccagctgggctcttggcgggaggatgagaacaagtcaatcctgtcctccaaaccagccattggcagcaaggctgtcaa

SEQ ID NO: 452392 - DNA, 122 bp, Homo sapiens
gtgtttttgggaaccagcccttcacctgtgtcgaccttctcaactggaaaaacaatacaccgccctataccgaaaagccagaagccctaattgatttgctccaagctgttatccagacccac

SEQ ID NO: 452393 - DNA, 122 bp, Homo sapiens
tcctggaggggcacgtcagggctcagggccagtggaaatgtgccacggttagactggtcgcggctgcgcactgaatgtgccgggaggaacggaacggtagactaatggagcgctagacgtga

SEQ ID NO: 452394 - DNA, 122 bp, Homo sapiens
ggaaactactcgtcctcaggggttggctgtggaatgagctttggctggagagcctggtaccgtgtcctggctgtgtctgcgcagtgacgtgcttcagggcctggacaccaagcttcctctct

SEQ ID NO: 452395 - DNA, 122 bp, Homo sapiens
tgactttatcatacatgtcctggattcctaacaacgttggacatctcttcatctatttgtcggatgctcgtgtttcctgttttgtaatatgccttctcaggctttgcacttattattatttt

SEQ ID NO: 452396 - DNA, 122 bp, Homo sapiens
ccgtagttgacttgacgtcgctgagcaacggaagagtgggcagcatttgctctgaacgctcgtgcgcgctaccgcccagacggaagcggaagtgccggtggagcgcgagtaggaagtggtga

SEQ ID NO: 452397 - DNA, 122 bp, Homo sapiens
ttggctggttcaaaagcacactcactgcttctatttgtaaaaccatttgctttgttggtccgtgtaagtggaaaacaaagttcttagaaaagactctcggtaacctcacggaaggtgctgtg

SEQ ID NO: 452398 - DNA, 122 bp, Homo sapiens
attcaccaaaaaggcgagatttgctggagggacgccaaggtcagtggggggacacactcccggtgccatgtgcctcccgccaagatttcctgtccctttgatggcaaatctgcccccgtcgt

SEQ ID NO: 452399 - DNA, 122 bp, Homo sapiens
gaggaagcggtggagcccgtggtgtggctgctgtgcgccggctcctgagtgttctcactgcgatccacggggcgtctctggtccgagttccgggtggcagaatgcatcgctgcttctcccac

SEQ ID NO: 452400 - DNA, 122 bp, Homo sapiens
ttctaggaggtcagcaactttaggtaatgcccacacctgatgggggaaatcactgtcttccggcgggctggtcctctttggtgacagatgaagtcagatgcttccgggatgaatttggttca

SEQ ID NO: 452401 - DNA, 122 bp, Homo sapiens
gttggccaggtgaggccggatccggaagtagggggaccacttcgccccgcgtacgagccccgcccccggcccctcccaccagacccaggccgacctagatgacgtgtccgagtaggagttgg

SEQ ID NO: 452402 - DNA, 122 bp, Homo sapiens
accccactcacatgtctggtgagtgcacggtctgcacgtgcccagcctacagcagcttgtcgtccaaggggatgagcacacgcaggccgtccttcagctcgtccttgtcgatgatgcaggag

SEQ ID NO: 452403 - DNA, 122 bp, Homo sapiens
acagcagggggtggtctgtgggcctctggccctgcttaccctcttctgggcatgtccctccggcagcacatcaacaacgagcacatccacggggagaagaaggagtttgtgtgccgctggca

SEQ ID NO: 452404 - DNA, 122 bp, Homo sapiens
aaaattcactaagtggcgctgagagtcgggaattcactaagtgcgctgagagtcgggtttcgctgtcagtgaagggaaatacgaaatacggaaaggggaaaggagaggatgagggtgactct

SEQ ID NO: 452405 - DNA, 122 bp, Homo sapiens
acccttcagtaagtgcttgcagaatgagctgtcctgctttccagatggcacagtgagagacgatggccgaccctgctggagtctagacgccgccgcgcaggaagatgagcccaaggaatctg

SEQ ID NO: 452406 - DNA, 122 bp, Homo sapiens
tcaccggccccgccgcagctgccgccgcctccctgcggaaactcgcggcttcccgggagccggaggagcagtgacagcagcatcacttccgcccgcggcgcagccaatcagcgcggcgcctg

SEQ ID NO: 452407 - DNA, 122 bp, Homo sapiens
atattttctctcattcaactaataattattgccagggaacgcaatgttttgagctgcagacggtggtagccatataaaaacgtataaaacatactgccataccttgaaggcctcttatagct

SEQ ID NO: 452408 - DNA, 122 bp, Homo sapiens
tccccggttgtcatggtaaccagtggcgggaggcgggtgaggagcggggtcccgtcgggccgggtgggcgccagctccctcccaggactggttcattggtagattccacttggggggtgcat

SEQ ID NO: 452409 - DNA, 122 bp, Homo sapiens
gcaaatctcaatttctccttaaaacacagcatgcaacattgtccctgtcctacaccttatcgtggtaaaaagcaagggctgggaaaaacacaccagatcctaaaaagtagtaggactgatcc

SEQ ID NO: 452410 - DNA, 122 bp, Homo sapiens
gcgccccccgcgcccggcgcgccaccgctgcacgccaccttctcgtggcccgccaccaggcgcactaggtagcccaccgacacgaagaggtagcaggccgagaggaagataatgggccgctc

SEQ ID NO: 452411 - DNA, 122 bp, Homo sapiens
tcggtgttctcgtctgtgggttttagccaaggctgcagctacccgcgccggacgagagagcgcggcagcagcttcctccggcgcccgcacccgggcaatgcgatttccccagtcccctgggc

SEQ ID NO: 452412 - DNA, 122 bp, Homo sapiens
ggatattcttcttctcctgcccttggacatcagagctgcaggctctctggcctttggacccgaggatttataccaagcaggtttctgggttctcaggcctttggccttggactgatagttac

SEQ ID NO: 452413 - DNA, 122 bp, Homo sapiens
tattgagtgacagaacggctcttggcagtgagaggggacccgaaggtgggttgctggccacgagcctgagtctatgggtttttgtgggctagaaatgggcaagtgcatgctgattggtctgt

SEQ ID NO: 452414 - DNA, 122 bp, Homo sapiens
taaacggaagagacctctcctgttccgggagtaggccgggaccgtggatgagtgacagttcgactttccaataggcagagccctaggacctgcccacgtctggttcaggggctagaaaagag

SEQ ID NO: 452415 - DNA, 122 bp, Homo sapiens
caacccagaggatcagctttttacttgttagcttaaaggtgcaatattatctagcagcaacgctggttgctgctagttctgggagaagccctcagaactaacacttgaaaaatgaataagac

SEQ ID NO: 452416 - DNA, 122 bp, Homo sapiens
atggaagggactgctggtgtctgcgcttaaaatcccgaaatggctgtgtgctttggttctcgcacctgccttaatggttttcctgtctcctctgttactgggcaatcagctgccgctttttt

SEQ ID NO: 452417 - DNA, 122 bp, Homo sapiens
aactgtgaataacttgtgcgctgctggtgggaagggattcgggagaaacctggcggggagcgaggagcttcagcaccaaggacagcgtccgcgctacacgccccaagccctgcggtcttttt

SEQ ID NO: 452418 - DNA, 122 bp, Homo sapiens
ctcaggtgatccacctgcctcggcctcccaaagtgctgggattataggcgtgagccaccgcgcccggccagatcattgggttttaaaaatcagagtagtagttccttctgggggatgaaatt

SEQ ID NO: 452419 - DNA, 122 bp, Homo sapiens
tctgataataggaagtagcacgtaatacaacagcatgcctatttattactattttggcaccgtgtgttagcatgcttaagcaatggaattaaatatgaaattataaacagactagtgagata

SEQ ID NO: 452420 - DNA, 122 bp, Homo sapiens
gcccagtccgagcttcccgggcgggcccccagtccggcgatttgcaggaactttccccggcgctcccacgcgaagccgccgcagggcccccttgcaaagttccattagtttgaaggacgcga

SEQ ID NO: 452421 - DNA, 122 bp, Homo sapiens
aacacatggtgggaacttaaatattaacgccagtattaccactggtagggtgcatgagatcgcacgatggtgccaaaggtgtctctccaccgcccagcccagcgacactgttcccctagaag

SEQ ID NO: 452422 - DNA, 122 bp, Homo sapiens
ggctcagtgtggattcactgctgcaataacaattttttttgtatgattattcagccctctcgaattgcttaggaaggaattggcattccaccccatgtagccaggctcaattctagctcttt

SEQ ID NO: 452423 - DNA, 122 bp, Homo sapiens
cgctctggtctccactgacgcagccctgcagcagctgtatgtgtccgccttctcccctgccgagcggctcttcctggccgaggcctacaacccgcagaggacgctcttctgcaccctgctca

SEQ ID NO: 452424 - DNA, 122 bp, Homo sapiens
tgccaagagaggaaaggaaggggaggtggggtgggcaggatcaaggcttccgttcccatccggctaggccaggccctgcatcacctcctggtggaatctccaagtgtcaacaccacaactga

SEQ ID NO: 452425 - DNA, 122 bp, Homo sapiens
actcaccgctaaggtctgcagcttcactcctgaagccagccagactacgaacccttactacgaacccatcagctggaaggaacaattccagacaattccacacaggaggaagcaacaactct

SEQ ID NO: 452426 - DNA, 122 bp, Homo sapiens
taattagttaatcaatctttatttgaaggacatttaggttgttcccagtctttagtatggcgagtaatcagcagtgaacattcttgtatgtatatatttgtacacatatatatctttaagat

SEQ ID NO: 452427 - DNA, 122 bp, Homo sapiens
atcagtttccttaggaaagaaactccctagcaaagcctcccagttccccacccctcagggcgccccgggtgatatggagacacgccccagactcccacgcccttccagacttctctttccca

SEQ ID NO: 452428 - DNA, 122 bp, Homo sapiens
taagtcttggtgtgtgtgtaaagtctatatcactatcataaaactgttagttcctgattccgggatacaaagagtaaaatcaagatgaacatactttacccttcttgacaagtgtttttaaa

SEQ ID NO: 452429 - DNA, 122 bp, Homo sapiens
tgcacgacttgtcaagaaaagaggcgcttccgagtttgagaattgggagcaaatggagtccgagtggacagaaagacaagaccctgaccgtggggaatttaaaggccggccagcgtgcttcc

SEQ ID NO: 452430 - DNA, 122 bp, Homo sapiens
aaagctttcgtgcaagtggaagacgactttctccacaaagtgctgtatgttactgtgctccggaccgcgtacgaacaccatccagtcgtgggtgaagccctccacggtgggttttttcctca

SEQ ID NO: 452431 - DNA, 122 bp, Homo sapiens
accagccttgggtgtttgaatgcagaacatcctgagatgttaaccatgggctgttttccacggggctagaacccctcttcacgtcactgctcacctacagctcaatcacctgtgcatctctg

SEQ ID NO: 452432 - DNA, 122 bp, Homo sapiens
ttccggctcccagaccccaattgagctgggggcgcccacccgccgggggatcccgccctgcgtcccccattcatccgcgtctcagccgcgggagtttctcaacgggaagagggcggagctcc

SEQ ID NO: 452433 - DNA, 122 bp, Homo sapiens
aaatccctggggaatcttgagcttcagaaacaaacaaaacgcacaggaatgacctggccacgggttcttggcttttttgtggacaaaggggctggccaaggaagactgtcaggaatagcaca

SEQ ID NO: 452434 - DNA, 122 bp, Homo sapiens
tggtggggattgttgtgggtacgaaaggagagaggctctgctagagcagcaaagaaccatcgatctccaacttagctagggaaacttcccacccaatgagggtctgggtatgtctgagctct

SEQ ID NO: 452435 - DNA, 122 bp, Homo sapiens
gccgttgggagaggaataagttccgggacctgatgcacagtttggtggccccgatattcacggaccttaccacagacacaatgagagccccgtgaggccaagggggcatggatgaggtccct

SEQ ID NO: 452436 - DNA, 122 bp, Homo sapiens
taaggtgcattctctagcttcctagaaggataaagccagacctgccagcgttcttatggccggtgctcagaagtccccaaacagcacttcttcggcattcgattggtcaaaacaagttgcgt

SEQ ID NO: 452437 - DNA, 122 bp, Homo sapiens
ttactttctgtgtcatcgtcggagagctccagggaagctccttcaaggtgcagctggcgccggccagatcggctggaagagaagctgatggggccaccccgcctggagaacacaggaagcag

SEQ ID NO: 452438 - DNA, 122 bp, Homo sapiens
gatattactgccaataaagcagtgggtgtacatcacccgtgtgttattgtctctaatatccggggccgggggagcgggggagaggataacattccctcaaatttaggaggtggtttgacgcc

SEQ ID NO: 452439 - DNA, 122 bp, Homo sapiens
cggggccggccggcccctccgagtgcggggcccgccgagcccacgcccacccagaactggcgctggcccgcaagcgccaggcgcagccccggttcccacccacgcctctccctccacacctc

SEQ ID NO: 452440 - DNA, 122 bp, Homo sapiens
taaccaccacctgaatagtagacattgtacccattaagtgatttctcatctttttgggggcgggggacaaggtctccctctgtctcccaggctggagtacagtggtattatcgtagctcact

SEQ ID NO: 452441 - DNA, 122 bp, Homo sapiens
acagacattggaactcgaccgcgcgtgttcccggagtctgagtcgttttgaattatgtcacgcaggggccttcggtgggaggagggacagtcgtgacagggcactggggtggctactagaca

SEQ ID NO: 452442 - DNA, 122 bp, Homo sapiens
aacccaccagaaggaaaaaactccaaacacatctgaacctcagaagggacagactccagacgcgccaccttaagggctgtaacactcaccgccagggtccgcggcttcattcttgaagtcag

SEQ ID NO: 452443 - DNA, 122 bp, Homo sapiens
aagcaaacaaaaaaccccaaccccaaccccaagagccccactctttcaaaagggcttctccggatcactaagtcctagaggtctttggctaggcctgggtccgatctaaataggaaggtaat

SEQ ID NO: 452444 - DNA, 122 bp, Homo sapiens
gtactgttgttggctgttggtgaggaaggtgaagcactcagttgccttctcgggcctcggcgccccctatgtacgcctccctgggctcgggtccggtcgcccctttgcccgcttctgtacca

SEQ ID NO: 452445 - DNA, 122 bp, Homo sapiens
gacacagaaaggaagaggagtgtttcaacatgtggccagtaaaagacttccaagaatggccgggtgcggtggctcacgcctgtaatcccagcactttgggaggcccagatgggcacattggc

SEQ ID NO: 452446 - DNA, 122 bp, Homo sapiens
gaagaggagctggagacttgagtccaatcacctgacccatgatttcctcactcacgtctgcgcgatgaagccccacgtgaagcccacggggcgtgcggttccggagcccctcgggagtggaa

SEQ ID NO: 452447 - DNA, 122 bp, Homo sapiens
gcggggccaagtcggccggtgggtgggcgcggcctgttgagaacgcagtggggccgcgagcggcaaaaaacaggcttgggaaaggcgaagccagcaaagtcgaagacaccagagtggcaccg

SEQ ID NO: 452448 - DNA, 122 bp, Homo sapiens
tcgcttctcaagaccctctccttccccccgggcgccgagaaggcccatccaccgtgggcccgccccttcgtgacgcacgcactagtcctcgcctgcagcatccaaacctccttatacccagg

SEQ ID NO: 452449 - DNA, 122 bp, Homo sapiens
aaggtctgcacttggcctttggtcggccatgatgaggcggtctgacgtggctcttagagccgccatggtgggaaggtccaagggggattaaattttttgttttgttttgttttgttttgttt

SEQ ID NO: 452450 - DNA, 122 bp, Homo sapiens
acggcgtgcaagtggagtgagcttgggagtgggagagcgcgtgcatttccagctcacacacgccccagccaggaggtactttaggcccgagtacatctgcggcaacagcactcggcatccag

SEQ ID NO: 452451 - DNA, 122 bp, Homo sapiens
ctgtgagtctctggctccccgtctctcaatggggtgacagtcctcgtcttgtgcccctcacgcgcttgttgagatgacagatgagtcacctctgggaaactgcctgagagctggatgacacc

SEQ ID NO: 452452 - DNA, 122 bp, Homo sapiens
aagccttctgcaaagttgacgaggacaaatatgtcttgcttggagatggcctttcctcgtcgttttcacaatgccccaaggctgggtagagttcgttttttggttactcctccccccaccac

SEQ ID NO: 452453 - DNA, 122 bp, Homo sapiens
attacaaactggcagtgatgagcagcagaggcaagcagttgggagaagagaatgagagagcgcagcaacagggtgggacctgcagcttgtggaaaaatgcttttgacacagatactttctga

SEQ ID NO: 452454 - DNA, 122 bp, Homo sapiens
cgaattcctggcctcaagtgatcctcccgcctcagtctcccaaagtgctgggattataggcgtgagccaccgcgcccagcccctggtgccttctttaacactgggtgggaagagagtgtcct

SEQ ID NO: 452455 - DNA, 122 bp, Homo sapiens
aattctattattagagcctttacattatggggtctgtaagtaaatacatggaaacctcatcgaatacaagcacgcagtaaatgttatctttcccaaaagaccccaaggttccccaagaagga

SEQ ID NO: 452456 - DNA, 122 bp, Homo sapiens
catctgttgttttgctccttcaactctttttcctgattcttcctggggggaaaccgaaaacggtgagtaactggtggacacatcagaccccagactcttttcttcactgcatgcattcatat

SEQ ID NO: 452457 - DNA, 122 bp, Homo sapiens
tgaagtctaactactgcagtctctgaggctcaggtttcttgatgtggtgtctggcctccacggtcaggggctgatagccaatggaagacctcaccttccccagaggggcttaccagagccag

SEQ ID NO: 452458 - DNA, 122 bp, Homo sapiens
ggatattcactgcgggatagggccagcaagaggacccgacacgcatcgtcccgagtgacacgtgtaaatgtcaagatacagagacatctgcaaatgtcacccaagagggtgaggacggggga

SEQ ID NO: 452459 - DNA, 122 bp, Homo sapiens
gagcggacagagaggaaatgacggctgtgaaccacacgtccggctcagccattttctaggcggaaaaaaggaagcccctttggctctctcctccctttgtccgactcgcgctcccgccctcc

SEQ ID NO: 452460 - DNA, 122 bp, Homo sapiens
gcagaccctccgaggccccaggaccaggggatcctcctcagtgcatcaggccccccagctcgaagcggggtcactgcttgccttagctggtggctccctggccgccccaaccctctcccgtc

SEQ ID NO: 452461 - DNA, 122 bp, Homo sapiens
cctgtgaagcgcctcatggccagcaccggggggcagcaggccagggcggggacacatacccggttctcgtcgtagatgatctgcaccaggctgcggtgcttcgactcgatgggcggcggtga

SEQ ID NO: 452462 - DNA, 122 bp, Homo sapiens
tttcctgcgggggaggcgcttgggcctgtccccgcttgaggaggagcgttcctggcagggcggagtccccggagtgacgcagaggaggtgaaactctccagcccagatctagttcgggcttc

SEQ ID NO: 452463 - DNA, 122 bp, Homo sapiens
atgtaaacacgcgcgttctccaatcagaactgcgctctcttctcggctcctccattcgcgcgccagaatgccagagggaggcgggactagcaggagattgctgcctatgcaaagcaggtaag

SEQ ID NO: 452464 - DNA, 122 bp, Homo sapiens
tcctccttcagctagctcaggaggcccgcaacatctaccaggagttcctgtccagccaggcgctgagcccagtgaacatcgaccgtcaggcctggcttggcgaggaggtgctggccgagccc

SEQ ID NO: 452465 - DNA, 122 bp, Homo sapiens
cggggagcgcggaaggctgggcctcaggtagcttcaatcattcacctgctggttacgggtcgcggcgccggggaccctactccggacctcggccatgcaacccgcagcatacggagaacgct

SEQ ID NO: 452466 - DNA, 122 bp, Homo sapiens
gaggcggaggaggaggcggaggagggtggcaccatgggcccgggcggtgccctccatgcccgggggatgaagacactgctgccatggacagcccgtgccagccgcagcccctaagtcaggct

SEQ ID NO: 452467 - DNA, 122 bp, Homo sapiens
gggatgcgcacctgtgtcctcagcagcacgtcctgggggctgtaccagaaaaccgtcaagcgccagatccaaacaaacaaacaaaaccacgtggtaacttgaggcataatgggcaaagcttc

SEQ ID NO: 452468 - DNA, 122 bp, Homo sapiens
agaaaaaggtggaggactgcagaggggctgcaggaatcggaagggcgtcggcagagggcacggaaggaggcggcgggttagagacggagctctccagttcgagcccctccatggagcaacgt

SEQ ID NO: 452469 - DNA, 122 bp, Homo sapiens
gcagaagataggcatgtgttgccaagcgaaatcgtgggaagcggctgatgaggaagcccacggaggcacctggcagaagagaagggtctccgctgggtgcgcatctcttctgtgctctgcgg

SEQ ID NO: 452470 - DNA, 122 bp, Homo sapiens
ccgacgccagctccgcggtatattactgcaactatcctgacgtgtgacaggtccctgatccgccccagcctgcaggccagaagcagtgttacacacttcctggaggagctaaggaaatcctc

SEQ ID NO: 452471 - DNA, 122 bp, Homo sapiens
ctccgctctggacgcactgggccccaggcctcgcccagcccggggaccgctcctccctcccgtggctcactttgcaaaggcacttcgagtgcgcgggtgaactccacgcttcccggggaacc

SEQ ID NO: 452472 - DNA, 122 bp, Homo sapiens
ccagaagctgctggacggaggggcccggggtcagaacgcgtgctctgagatctacattcacggcttgggcctggccatcaaccgcgccatcaacatcgcgctgcagctgcaggcgggcagct

SEQ ID NO: 452473 - DNA, 122 bp, Homo sapiens
tgtggttcactagtaagtgcctgcttccctagtcaaagagaacacgtgagccctttggtgcgtcgagagaagggcggtcttctttagggctgaggagaaaggaccgcagttccactcctttc

SEQ ID NO: 452474 - DNA, 122 bp, Homo sapiens
accgtcggggcggctggggggcggccggggcggggcgatgcctggcggtggcagtggcggcggccccggccggggcccgtgaccatgggcatcgccgagtccacgccggatgagctgccgtc

SEQ ID NO: 452475 - DNA, 122 bp, Homo sapiens
tcgatgagggaagaagccagctcggtttctgcgtgcgtgtttatgatctacctgtgagcgcggcgctctggaaggtcacccaggctgcggacgccctgatagcggggtgacagcctgcagga

SEQ ID NO: 452476 - DNA, 122 bp, Homo sapiens
tgtctgatgggggagacccagcccatacccctgagtggcctctatctaagggggaaaccacgtctacctcagggaagctccagtctgagggggcaggtgggaaaacccacagggccctttgg

SEQ ID NO: 452477 - DNA, 122 bp, Homo sapiens
cctttctcctcagagcaccactgtggcattctgggaagcagtgagcacccagctagtagccggttgtgaggtacacgtatcataaaacaaatcattagctctgcaggattgggccacctcct

SEQ ID NO: 452478 - DNA, 122 bp, Homo sapiens
gtcagtgcccaattactgttcgaagagccctgaggacgcggtcgggattggtcatcccgtcgcccgacctggccgcaacaagttagggtgagtggcagttatatagaccggcggcggagcac

SEQ ID NO: 452479 - DNA, 122 bp, Homo sapiens
agtatcaagagtagaagccattatacgaagcccattagggcaggggtgggtggtggtgcccgtcatggttctgcacattgcagtggatacctgggattttattgcctatgtccattcccccc

SEQ ID NO: 452480 - DNA, 122 bp, Homo sapiens
ccagacttctgtcttttcagctgcagtgaaggctcggggctgcaggtgagctgtgcatcccgcaatggagaccttcctgctctgaattttcttacaaaactgcagaaatataaggggcgttg

SEQ ID NO: 452481 - DNA, 122 bp, Homo sapiens
agagcatagctcctggcccaacttgtctaatgatgctctccgtgactttgaacaagacgccgaatgcttcacattctggttccccatctagcaaaggggactaagaggatggataaacctct

SEQ ID NO: 452482 - DNA, 122 bp, Homo sapiens
gcgggttggggtaggcggcggtggggtccctggttctggggcactgggaagatcgcgagtcgtgcgtgtgggaaggtcctcccccggtcctccgggtcatctttgctcccgaggagcggcat

SEQ ID NO: 452483 - DNA, 122 bp, Homo sapiens
aagttgaccagtacatttatattcctatgtctagaaataatggagggaagactagcagggcgtgggaacctagaaacttaggatgactgagatttataggttatgttagggggactggaaag

SEQ ID NO: 452484 - DNA, 122 bp, Homo sapiens
ttgattcaccagtgccttttcttcgcccttgacaaattggatttttaggaatgggaaggtcgcctggaccattgtgtgctagccattcagcggcctcgattatgcagggggctgagggaacc

SEQ ID NO: 452485 - DNA, 122 bp, Homo sapiens
gcacatgggccagagacttatgtgtatgggaaatgtttctttgctgctttaccaggatgtcggtcattttgctcggatagggaaaactggaaaaagaaaaagaaaaagatgtgcccagatac

SEQ ID NO: 452486 - DNA, 122 bp, Homo sapiens
catcctctgcctggttcgcctgtcctggagcgtggggtctgatcgggttcttggactccacgcgctccacaagcccatacgccaccatggtcaggctcaggacccccagcagaatgtagagc

SEQ ID NO: 452487 - DNA, 122 bp, Homo sapiens
gtccgggttccggcgccgggctgggggctcaggaccagggctggcgcagccgccccgccccgccccgccccggggctatcagagcggtcaaagcctcggaaatccctccgtccacgctcccg

SEQ ID NO: 452488 - DNA, 122 bp, Homo sapiens
ccaagtgcagttgtttcctttaatgacctgcgctattacaggctttggattttgtgtgtgcgccaagaagaagggtaaacaacacacaaactcttgaagggaaggtttccttcggagagcgg

SEQ ID NO: 452489 - DNA, 122 bp, Homo sapiens
tcttccgcccctaccccgtccgcttcttaaaggggctagcctatctctgtctgggccccccgatttccacaggcaaggctaccttagcccttttaaaaggcagagctgcggagggggccgga

SEQ ID NO: 452490 - DNA, 122 bp, Homo sapiens
cggcggctatgcaggacacgcgcgccaggccgcaacctatgccccgagcagactacattacggaacatctaccttacttttgccggggccaagtaatacggggcctcagccgtggctccaag

SEQ ID NO: 452491 - DNA, 122 bp, Homo sapiens
caatgcattccttccaatttattattggcttacagagaccctacatcttctgcctggagtcgcatgtccaggtacttaacttctggaaattggctgcaatggcctccacctggaaaggccac

SEQ ID NO: 452492 - DNA, 122 bp, Homo sapiens
tgcggccgggggggcgggccggccgggcggggtccgcggggggctcctcccgggaccgagcgggaccccgaaccaagggacagtcgcagtttgggccccttgaattttactttcaagtaatg

SEQ ID NO: 452493 - DNA, 122 bp, Homo sapiens
ttacctgagtttaaaataataaaacaaccatatgcctgttctctcaattggctgaggaatcggcattcacttatatctggccttcatgtaatcatagagacacaattcttccccttttctca

SEQ ID NO: 452494 - DNA, 122 bp, Homo sapiens
attcagaaggcgggtccgcctctttcctacttgctggttggcgaagctgacctccaagggcggtgcccggccatagccggtttgcttctgggattggctagagggggtggttccgctgaggc

SEQ ID NO: 452495 - DNA, 122 bp, Homo sapiens
accaggaggcatgatgggctgggagctgggggatagtgagaaaatagagaaaggcagggccgagggagggtccattgttcaaatgacaccgaaaaaacagcagaaaattgtaagacctactc

SEQ ID NO: 452496 - DNA, 122 bp, Homo sapiens
atgtttgattccaaagcccacacgttttcctagtttagaaacactaaacatttaattcaccgcaccgggggccagacaggtaatggagaacgccttaagtatgttaggaagggaagttatct

SEQ ID NO: 452497 - DNA, 122 bp, Homo sapiens
cctattgtagcagcccagatagtgacccaagctccagtccactcccttactcccttcccccgactcactcacttggaaataccttgagagtcagagtacaatcagctggtgagctctgcctc

SEQ ID NO: 452498 - DNA, 122 bp, Homo sapiens
tctattacactagaataacagggagttcaccccacagctataattttaaatcccatggaccgacagtcctaagtatactataaaacagatgctggatttagatagcactaaactggtctatt

SEQ ID NO: 452499 - DNA, 122 bp, Homo sapiens
atttacttacagaggaaatgggcaagccaacccccactaggatgaggacagtggatgtgacggtactgtcatggtacggatagttgatgctgttgtctttacagaaaaagcctctctgaaat

SEQ ID NO: 452500 - DNA, 122 bp, Homo sapiens
caggccttcctggaaggtctgggtcatagcagcttctttgcttcttcttcttatcttctgcgtggcactagctagtatgccccagataacacagggaaggaatttgactccttgacatctta

SEQ ID NO: 452501 - DNA, 122 bp, Homo sapiens
acggcagaagccctgcacgtagcgctggatggcgggcgtgaggtaggcgtcggcacaggccgtgtgcccccgagggacgatgcgcaccatgggcatggcctccgaggacagtgacacgtgcg

SEQ ID NO: 452502 - DNA, 122 bp, Homo sapiens
aaagatgaggtttaggtcaatggttcatttatttttgtttgttgctgttctgctttgcctcgcttatggatatccagttgctccagcaccatttgatggaaaagctattcttcctccacaga

SEQ ID NO: 452503 - DNA, 122 bp, Homo sapiens
ggcgctcagtaagtgctcctgaggcaactgccgggctgtcctggacctggtgaatcctttcggggttcagcaaaggcggacgctgaccgggccaaggagtgggacctgcagtgctggaccac

SEQ ID NO: 452504 - DNA, 122 bp, Homo sapiens
cgacgcagctagctggtttttaaattgctaatctcattaacggcgcgcccgtccgagaggcgaggctggtaaatggatgacggcgagccccaccccgcccgatcgtcgcggccgggaaggca

SEQ ID NO: 452505 - DNA, 122 bp, Homo sapiens
accagtctcttaaaggggtagtgcacttccagcagcggagtctggctgctcccccctccgcggagccacacgctccggctgcaaggctctagacaacctcagggtgcctgtcctttcctttt

SEQ ID NO: 452506 - DNA, 122 bp, Homo sapiens
ctggagggagagaaggagccaagtggagtcaagtccctcccctgctgccccctccctccacggctccctcgcaacccgagccggggggcctaaaaatagcccccaggcgcaatcgccggccg

SEQ ID NO: 452507 - DNA, 122 bp, Homo sapiens
tgcaggcggctgaggcctacaagagtcagctggaggtgaggcggagacggagccgcggggcggggcgtgcgcgagggggcgggccaggaggaggggcgagattgggtcccgagggcagagag

SEQ ID NO: 452508 - DNA, 122 bp, Homo sapiens
cctgggtacaatgggagggattgaggggatagagtggctaataggacaagcatgttttcacggaatttacagtctaggagattattaatcaagtaaacgagcatttgccatactgtggtgtg

SEQ ID NO: 452509 - DNA, 122 bp, Homo sapiens
ggccgcctgcctcctgccaacagccagtcaggtgagctgcgagccacctggctgtgtccccggctgccctccggggcccactgccatggaaaccgcacacagcatcgctgcttgaggagcca

SEQ ID NO: 452510 - DNA, 122 bp, Homo sapiens
cggccgcctcctcccctttaggcggggctcgcaagggcggtgggggggcccgaggaagtccgggggccctcggtgatgcccccgcccccgccgcgtcagggttgctccctgcgcttccgagt

SEQ ID NO: 452511 - DNA, 122 bp, Homo sapiens
aaggaaagagggttagaggaaggaggagttcttctgtggcccttgggtggaggtagttgccgggagcagggtcacctctctggtaaaggaggtgaacagagtgaccacttgcttgtaatttt

SEQ ID NO: 452512 - DNA, 122 bp, Homo sapiens
ctgcaagctgccaacaggaggatcacttcataaccactcactaccagtgaggccgaaagccgctgtaacgacacagacgggcgccgaaagccgccgtaatgacacagatgggcgctgtgttc

SEQ ID NO: 452513 - DNA, 122 bp, Homo sapiens
ttacaggcgtgagccaccatgcctggccaatggctgattttggatgagcatacttatcagcgttgacagcagaggacaggctaaatgtgattccagtttcaaacatgagatgaccaaggcat

SEQ ID NO: 452514 - DNA, 122 bp, Homo sapiens
cagtttctctagttccgtactcggagctcaaggtgacagaggactgcgcttccagccctgcgctgcgcatcgcgtcggtcccgcggacctttgccccgcctccttccacacccgttcccttg

SEQ ID NO: 452515 - DNA, 122 bp, Homo sapiens
cgggcacggcgaccaccagcaccgtcacgccaatgatgaagaacttgacaaagtactgcacgtagacgggcgtgcactcaggcagccacggcttcttgttgaccacgaaggtgtccacagtg

SEQ ID NO: 452516 - DNA, 122 bp, Homo sapiens
ctctccgacgttaaagcggtggccggggcaggcccgcggagggcggcctggagagcgatacgcccggggcctccaccagaccccactcctttccgcgtctcccgatgcctgggaatccgggg

SEQ ID NO: 452517 - DNA, 122 bp, Homo sapiens
tggccggagtcggggaggagcgactccgggcctggccggagcagccaggctgctctgtctcggtgtcagtcggcggcgcctcctcggaacccgggggagtcgccagccccgcgccgctcggc

SEQ ID NO: 452518 - DNA, 122 bp, Homo sapiens
aatcaataaaccccgaacccacggccgcgcgttttaggactttgaaggctcaaccagctccgctcggttctcgagcccccagcacccgcggcgcacactaacctgatcgccgtggaggcggg

SEQ ID NO: 452519 - DNA, 122 bp, Homo sapiens
tgcccggggaaaagctagaagccccggtttgctgcacccatgaaactcgggtccccacagcgtcttggcggggtggggagggcggcaggatggacggggctggccagaggcgaggaggacgg

SEQ ID NO: 452520 - DNA, 122 bp, Homo sapiens
cccggcccgtgcgcaccttcttgatgttgtagaggcgggtgagcatgccgacgccccggtcgttgaggatggtgagcttctccgccagcttctgctgactgggctgcagcactgagcgcgac

SEQ ID NO: 452521 - DNA, 122 bp, Homo sapiens
gccgagtctcctggggcggtccggaggctcgtgccctgttgtggggcccccatttgccgccgccatgcccacggccgccgcccccatcatcagctcggtccagaagctggttctgtatgaga

SEQ ID NO: 452522 - DNA, 122 bp, Homo sapiens
tggaaaggaaaacattgcaaattcattcctgggaccccaagttgtgtcctcaaccctcaacgctccctcccattcaccccctccccccaacagctaaatctccaaactgctttcccagacga

SEQ ID NO: 452523 - DNA, 122 bp, Homo sapiens
tcacttcagagtctcctgcagagtcaccatcaagcagacctcttcctcgggaggccgtgtcgccaccccaacccttgacttctggtatcaccatctcctgtcacctgggctccagtctctgt

SEQ ID NO: 452524 - DNA, 122 bp, Homo sapiens
gctccagctccgggacccgcgcggggagtcagggcagcgggtcctgggccgtggcgcctccgtctgcagggacttcttgtaatcaccaagcagcgcggttgtattcttcacagtcccccaca

SEQ ID NO: 452525 - DNA, 122 bp, Homo sapiens
gccgcagagcggcgcgggcagtaagccgggcgctaggaccgcggggagcccgggctgcggcggcgctaccttaaacccagcccaatgccgctgcctgcgccactctgcgcgccggcgggggc

SEQ ID NO: 452526 - DNA, 122 bp, Homo sapiens
taagaatacatgctaataaatggtacctctgtaactgcaagaatgtgaaggaagaaaaaacgtacgtgaatctgaggtctcacatttttcatttgtagtaggtgctatccatggtgtggaga

SEQ ID NO: 452527 - DNA, 122 bp, Homo sapiens
gcaagaccttggagcgagaacaggattaggtacacagccctgggccggcggggtgagccgcgcgcgccactggaagagcggcgctgtatagcagcagccccaggtctcccctggacctgagt

SEQ ID NO: 452528 - DNA, 122 bp, Homo sapiens
tgagagaaacagctcatgagagcgacctctgcctctgcctggctgaacaaatgcctctgccgcactcacaataattgagtggtgagcacagcttggaaatctctgtggttgtttggaggtct

SEQ ID NO: 452529 - DNA, 122 bp, Homo sapiens
tgatgaacatttagcttgattccatatcctggatattgcaaaataatactgcaatgaacacgggagtgcagatatctcttcgacatactcatttcataccctttgggtatatatctagtagt

SEQ ID NO: 452530 - DNA, 122 bp, Homo sapiens
tctggcccagggcccagctcacgtagcgttttcgggggctgtttgggaaccgttagcaaccggaagtggctagaggtcgcgagagaactgaaaaaggggaccggcctttcccggctgcctaa

SEQ ID NO: 452531 - DNA, 122 bp, Homo sapiens
ctactggggccgcctcggcccactcaggctcttcgaacatgagggtcgggagggcagggtcgccgagtccccgctcttctccacgtgcacagcgctcctctggaagtcggagcgctcagacc

SEQ ID NO: 452532 - DNA, 122 bp, Homo sapiens
agtgatccgcttgcctcggcctcccaaagtgctgagatttttggcttaagccactgcgcccggccctattttctatgtaatttgaaaggcgctgtagaatttgatgagtcgggaagcagaag

SEQ ID NO: 452533 - DNA, 122 bp, Homo sapiens
ctggcggggggtggcccaggctctggcgtggggtggcggcgggcaggactgaggctggggcgcgggcctcgcgcaggcgggtgaagtactccactgcgaattcgacgaggtcaggcggctgc

SEQ ID NO: 452534 - DNA, 122 bp, Homo sapiens
ggaggcgaagggacgacagcgccgggctccccgcccccatcccacccggttccaatatttcgcagaaaggcacgcggctcctaatcggtcttttccaggctgagatttagccgtgcgatgcc

SEQ ID NO: 452535 - DNA, 122 bp, Homo sapiens
gccctccccttagcatacatttttcaagggcagacctgcctaggagggtcacatgtctgacgcctttgccaggcctccaaacatagaaaagctgcagggttctatgaaaaatgaagcctttg

SEQ ID NO: 452536 - DNA, 122 bp, Homo sapiens
cgagccgagaggccgagcggcccggggccggcagcgccgccaccacctcaatgcagttgccgccgcctcagcagcagcagctcctcgaacagccctcggagccacaacaacctccacttccg

SEQ ID NO: 452537 - DNA, 122 bp, Homo sapiens
cttctatgagtggtgcctccaaccctcccaagcccgagacatcctacccatgactttgaacgtaaggcaaccattggcccagagccagtcatttcataaccagtcctgtggaatggctgtag

SEQ ID NO: 452538 - DNA, 122 bp, Homo sapiens
caaatcagtcactaccacaattaaaatacagaacatcggcagggtgcagtggctcacgcccgtaatcccaacactttgggaggatgaggcagccagatcacgaggtcaggatttcgagacca

SEQ ID NO: 452539 - DNA, 122 bp, Homo sapiens
caaagctcgatggacgagctgcccatgcccagcacaaaccgctgcccgtagtcgtagaggcggccctggccgctcagggtgctgtagatgttggtgaaggacatgcctgtgggcacacgctg

SEQ ID NO: 452540 - DNA, 122 bp, Homo sapiens
aaaaaaaaaaaaagctgctgctccggctgctgagtcctcagatggctccttaaatagcagcgttttttggtgtacgtgggggtggggtggaacggggtggaatgcagagggtcagggttaga

SEQ ID NO: 452541 - DNA, 122 bp, Homo sapiens
gctttatcactgggcaaagtcagatgaccagaagcctctattttcaaggcacgctattttcgaagaattttgtccaatccagttttcctttggcattactccttagcttaccccactaaaca

SEQ ID NO: 452542 - DNA, 122 bp, Homo sapiens
tggttggtagtgtgggggcgtggccgagggtgtggcctgagggagtgagctaaccgggggcgtggcctgatatggggcggggggaagagccgggctgggggcgtggcctggtggggagcggg

SEQ ID NO: 452543 - DNA, 122 bp, Homo sapiens
ttagccctgttactaatttagggaaaaagtacatgaattcattaaaaatatattagtatgcgcttaccttagatacagaaaactatgagacaaaaagagagatccctgctaccccagctatc

SEQ ID NO: 452544 - DNA, 122 bp, Homo sapiens
ctccaaggctgccggctagggtgagcagcggagcgcttgggcttggagtagcaaagaacgcgctctccagagaaagtatagccactgcttagacagccagggaaacgtgtgcggggaagtgg

SEQ ID NO: 452545 - DNA, 122 bp, Homo sapiens
tgcaccagctgagctccgcgtttccgctcctgcagtgggacagcagcacggacagccatgcggtcaccggcctgcagtggtccccaaccaggcctgccgtgttcctggtgcaggacgacaca

SEQ ID NO: 452546 - DNA, 122 bp, Homo sapiens
ggtgaggaagcaggcgtgagagactggagtacccgaggccgggtttgctctccctagcgccgcagcttggcgttctggggcggtccgcggggccagaaggcatggcgcagcccggagttggg

SEQ ID NO: 452547 - DNA, 122 bp, Homo sapiens
ttattttgctcccctcggcgggtggcagcttgattgtagtcatccagtgaactgaaaatgcgattttaagtatatttttattgccgtgaatcaggacctaacctagtaaaacactggacact

SEQ ID NO: 452548 - DNA, 122 bp, Homo sapiens
tggttggattgtggaattacgtcttttaaaatgttatttgtccaatgaacaaaaaccactcgcaccgcaactccttttactatcaaattctgcaccgttgcaaaacttccttcactcaacgc

SEQ ID NO: 452549 - DNA, 122 bp, Homo sapiens
ctcatgtgatctgcctgccttggcctcccaaagtgatgggattacaggcgcgagagccaccgcgcacggccccttaaagaatatagacctagcaatgaacgaagtgaaagggcatgaagggt

SEQ ID NO: 452550 - DNA, 122 bp, Homo sapiens
tcccatctgggaagtgaggagcgtctctgcccggccgcccatcgtctgagatgtggggagcgcctctgaccggctgcgaccccatctgggaggtgaagagcgtctctgcccggccgccccgt

SEQ ID NO: 452551 - DNA, 122 bp, Homo sapiens
atcaggatttcctagggtggctctgaggagggagtggagaaggcctgccttggctgaactcgcatgaggccatgccatgatgatcacagggacttctgtgaaggacccctgtcttgggtctg

SEQ ID NO: 452552 - DNA, 122 bp, Homo sapiens
tggatgacagcccgtagacctgcacgccccgctgcctccgctcgtgcctcacgccaccctcgccctgcccgcgcctcggccaacacaaagcgggcgctcagcaccccgcagccgccctcgac

SEQ ID NO: 452553 - DNA, 122 bp, Homo sapiens
ctcattctgagagtgaagagacagaggctcaactaatgaaatgatttgttcaaggtcacacgggtggcacaaggcaagtggcagaggttgaatttagacccattcctgtccaaatgctgagt

SEQ ID NO: 452554 - DNA, 122 bp, Homo sapiens
aactcagcttccaggccacctctccccgaagctttctctggccacctagtccggagccctcggtgttctcagccgtagcaccctgctttgctcttgcaggctgagcctctctgttgcagccc

SEQ ID NO: 452555 - DNA, 122 bp, Homo sapiens
ggagcatctacgtaggagaaagttcccaagcaggatgccgaagtggaaggcgcagctggccgagcgcacgtaggggttcagctgtcctgccgggcctcgagggcaagtgggatacaggatcc

SEQ ID NO: 452556 - DNA, 122 bp, Homo sapiens
ggggaaccggcaggatgactttgagaaaaagcaaggcacagcatgggtttgcaggccaggcggacctgggtttgaatcctagtcctgctactcagttgctttgcagcaataggccagttact

SEQ ID NO: 452557 - DNA, 122 bp, Homo sapiens
gcacttaggaaactctatataggttgcggtccctcagaactgcagggccgtcagccttgccggagccagacgtccgctgtgccgtcctcacagcaaggcctgctccgaggccccggggtgcg

SEQ ID NO: 452558 - DNA, 122 bp, Homo sapiens
gggcggaactatgggcggggcttagcggccccgaggccgtagagaatcctgggcggagcgcggtcgctctcaggcgtcctctggggagactcgacctgccacttgagagcgcagcattatat

SEQ ID NO: 452559 - DNA, 122 bp, Homo sapiens
ggggcctgcttcaggtctggagttgcccaattttggaaggatgagccttgggcttgggggcgaaggctatgcatgattagggcccttcaaagcttagagctcctgggtatcagggtctcctc

SEQ ID NO: 452560 - DNA, 122 bp, Homo sapiens
gaaactctggaaagcaaaggaatcttctctccagtcctgcctgtcacttactccggctcacgctgaagcgttcgcgtttacggttccaaaaccaagactgaaaggcagtcttcacatattta

SEQ ID NO: 452561 - DNA, 122 bp, Homo sapiens
aattttagtaacaggtgaagacgggtacaagttgatttaatccacttcagtacaagttgtcgtggctggttcttccatgggatgagctgtatctatcaccgaggttccaacattcagtcctt

SEQ ID NO: 452562 - DNA, 122 bp, Homo sapiens
cccccacctggcggtctgggcggtccgcagtaggcctccacctgctgagggcattgtcagcgtcacctgaaagtcaccagcttgccggaacattcttatgcaaagacatgaagaatcaatta

SEQ ID NO: 452563 - DNA, 122 bp, Homo sapiens
cccgggctgtatcctgaacctgccgtttgcctgccttccatgagccagagagcaaagctccggtcacgtgaaaatcagcccactgtgttcctcccatctcccgattccaccctcaggtctgt

SEQ ID NO: 452564 - DNA, 122 bp, Homo sapiens
acaataactagcctaaagaaacccaaaaaagtatctctcccgagctgaaacttaaaaattcgtaagtgtaagaaagaatgtgagaatatattaaatgcacactgtaccattagatgaaatct

SEQ ID NO: 452565 - DNA, 122 bp, Homo sapiens
aatgagttgtttcatattttgcactgtcttttcatgatcatttgcatccattagagaccccgcatcctattggcttcttcgtactcctcccggacagaacgcagagcgagggtgagagcgag

SEQ ID NO: 452566 - DNA, 122 bp, Homo sapiens
ggaggggggccccgcctggcaggaaattaaacatcaatcaatcaatcgctgtgagcacggcgacccaacggcggcggggctgcgaaggaggcagagggacaggcgaggggcgggtgggaggc

SEQ ID NO: 452567 - DNA, 122 bp, Homo sapiens
acacctcccccagcagttcaactgagctaattattaagctaatgacttcaactgcaaatccgtccttctattcttgactttatgagtccctgagctgggacccagcaaaccacatttctgct

SEQ ID NO: 452568 - DNA, 122 bp, Homo sapiens
tgcagcccctgttgatgttgggttggtttataatcaccatatggaacagaatcggagcctcgcgtccacttcgatgctagaattctgttcgagtgctgatgaccaggggcggctaaacacca

SEQ ID NO: 452569 - DNA, 122 bp, Homo sapiens
agaagccactgggctctgccacaccttctctcttggtgagtgtatgaggcccagagagaacgggcttgctccaagtggttcagaggggtgccaccaggagctttggattggagatgggggag

SEQ ID NO: 452570 - DNA, 122 bp, Homo sapiens
cgcggctcgtccttccccggcccggctgctgaggtggcggtgactgtggggcagccgggccgtgcacgtctggagaccgcccgggcgctggccgcggctggaccccgggagccgaaccgcgg

SEQ ID NO: 452571 - DNA, 122 bp, Homo sapiens
cctcctttcacagaagccagcgcaggaggcgcacgcgtcgcttcccgccccgcacttcaccgccccagcccgtcctggctgccacccgccgtccctgagaaacgctcagacgcttctctctc

SEQ ID NO: 452572 - DNA, 122 bp, Homo sapiens
ggggggggtgtaagggcttctacttaaagttgtttcttaaaaagtctgcctcgttaggcccgtgtgtgcagctcatagtattaaaactggttaaatgggaatacacgaataatacttatttt

SEQ ID NO: 452573 - DNA, 122 bp, Homo sapiens
ttacagtcccgcaccagtaggccaggccgcttggtttcccaatccgagaccggaaggaaccgggtagacatgagcacaagactctcatcgacttttggggaaaacaaaaacaccgataaaaa

SEQ ID NO: 452574 - DNA, 122 bp, Homo sapiens
tgagagatctattcccaaagttatagcaaagttacattcctgaagccatgaaggggaggacgctttgctcccgtctgacatactgcctgttgaatgggtgctgccatgtcctgctggcgccg

SEQ ID NO: 452575 - DNA, 122 bp, Homo sapiens
accggaaggggcaggcagaggggtcacccagtgcgatgtcaagagtggggccggctggtccgggaatatgctggggagtggagcacgtttatattcgacgtaggaaaaacaatggagaggaa

SEQ ID NO: 452576 - DNA, 122 bp, Homo sapiens
caggccaggctctgggccatccatggtttagagacaagcaacatatgcccaccccacccccgggaagtgggaaaactagtggaatagtcagctggggacaggtcactacagaacaggttgac

SEQ ID NO: 452577 - DNA, 122 bp, Homo sapiens
cctcggtctgcagttcagttcatatcttgcatctgctgttggctcctctcccctctatcccggctggcacatggctctgtgtgtcagcctgctctgtgtgtcaggaagtccccagcctctct

SEQ ID NO: 452578 - DNA, 122 bp, Homo sapiens
gttagctgtactcccccagctcccgtccctactgggcgctgcaggctacccagcggcacgcgaaccgcacgcgcggacaacaaaagcctctttcatgactcactgccctcgagcaatgcccc

SEQ ID NO: 452579 - DNA, 122 bp, Homo sapiens
ctacatacttctaagagccacaaattcaaactcaacttaagccaaagaacacaaaaagggcgcatagccagacccagttttacgtgacattctctctcgctactctgtctttgcccatggtg

SEQ ID NO: 452580 - DNA, 122 bp, Homo sapiens
tgatgtcttctatagcactcctggagccaggatggagccccacctgatctacacacattgcgagtgagacacagggacaattctccaagggatattcagggtcctcctaccaggaaagggga

SEQ ID NO: 452581 - DNA, 122 bp, Homo sapiens
gatggttcatgtctgtctttagggtgacaaaggtgccccagggagagcaggcctgtatggcgagattggcgcgactggtgatttcggtgagtgttgcccgtccagtgaaaacagggagtcca

SEQ ID NO: 452582 - DNA, 122 bp, Homo sapiens
tgtccactctggagacacaaactttcctgttggtcagtggtgtagcaggaggactaaccccggtgatgacaatggttctcacttgggttaagactcaaccagccttccctatccagggaaga

SEQ ID NO: 452583 - DNA, 122 bp, Homo sapiens
gatcgaagaggatagcattcttgaatgggaaacattggtggcgccacagctggctggtggcgacttcaagacccactggaaggctgggattggcagccatgactcataagggcggaatacca

SEQ ID NO: 452584 - DNA, 122 bp, Homo sapiens
gggcggagtcatcagatgtcgtttccacgaatagataatggttgccatgatgggacccaccgtcccacagacaaagggttcttgcgaagccacgactaatttagtgcaaaccgaaataaata

SEQ ID NO: 452585 - DNA, 122 bp, Homo sapiens
cgaaaccctctggtaatgacagccctgaagtgataatgtactttcctgccttcctgttaacggtagcataatcccgccatgtgtgccagccccgtggcagaaggatgcgttcatattttctg

SEQ ID NO: 452586 - DNA, 122 bp, Homo sapiens
tgagtactaatgggagtgtgcagggcggcagcactcagctccctcccctggactcagccccgggatcagcatcctggggaaggctgaggagcccttgacactgtggctctgccctccggtcc

SEQ ID NO: 452587 - DNA, 122 bp, Homo sapiens
ggaagtcctaggaggcggcgttggagctgagacctgaatggcatggtcggcagcagggggcggtctggagaggaacattcctgcaagggcctgtgctggccacgtgtgcaggggagagaggc

SEQ ID NO: 452588 - DNA, 122 bp, Homo sapiens
ggttgtgctgggtggctgcctctgacattactttctggttttctgcccacagatcaaccccgtggcctttggggccctgctgcagtacctgtacacaggtgaccccctgggtccagggtagg

SEQ ID NO: 452589 - DNA, 122 bp, Homo sapiens
ccagtgttaaatgaacaaataaatgaataaatgacaccatgctaagaattgtggatgctacggagaatgtagagataaatcctcaagtctttggcctggaggagtatggcagtggtatccca

SEQ ID NO: 452590 - DNA, 122 bp, Homo sapiens
aagtccaggagaccagcggctttctgaacgcgcacctgccaacccactttggacaggtcacgatggacagcgtggcaggaaaagaaaaggtcactgtctacccaacacatgagaaactgttt

SEQ ID NO: 452591 - DNA, 122 bp, Homo sapiens
cctgaggatggcggcggcggcggccagcaccggccggtgggcgggagccccggcgggccgcgcctggtgatcggctccttaccagctcacctctcaccgcgcatgtttggaggtacggaccc

SEQ ID NO: 452592 - DNA, 122 bp, Homo sapiens
cctgtcacttcctgggcctgtgctgaaagacgcctccctgtgaagccgtcccagatcactcgtatgtgattgtaatccccttctcccagtgctagccgttctccttcctctgctgtattttt

SEQ ID NO: 452593 - DNA, 122 bp, Homo sapiens
cagttttggagctgaggacacgggatcgggggattgcgtacctgggaccagggcccggctcgccaacgaccagggcagagctcgcggctgcaggcccggcggctctcgggccgggcgtcatt

SEQ ID NO: 452594 - DNA, 122 bp, Homo sapiens
ttcccaagctccataaagttttttagtttatcccagtcgctaggagacagaagacggaagcggaaatgcctttcacgacaacttccggaagaggtcgccatggcttcccgggaggaggtact

SEQ ID NO: 452595 - DNA, 122 bp, Homo sapiens
ttggagcggctcttgtgtttaagccacacagtctgacgttagacgggtgaatccagccctcgcagggcctggagtgacctaagccgagaggagctgggctgaatctccaggcgttcctttct

SEQ ID NO: 452596 - DNA, 122 bp, Homo sapiens
catcgagctgtgccggcgccaccacagcacctgcgaggcccgctacgaggccgtgtcgcccgagcgcctggagctggagcgccaacacaccttcgccctgcaccagcgctgcatccaggcca

SEQ ID NO: 452597 - DNA, 122 bp, Homo sapiens
tgccaggcctccgcccgtggccggcggcatcttccccctcctctgggtcgccctccggcccggaggcacactttgtctgaccagccgccccgccaaggagtcacaagagggcagctcggggt

SEQ ID NO: 452598 - DNA, 122 bp, Homo sapiens
ccctccggtgtggacggagaacaaaggagaggtttccggttttatgaaggaaagaggaggcgatgcaagttgttttaaaaggaagctcattggcaccagcagcaacttacaggagcggactg

SEQ ID NO: 452599 - DNA, 122 bp, Homo sapiens
ctctgggaggttctgctgtacttttcggtgaggctgccggagccggctgcagccccaccccggagccctgggctaggacccctctgaagagctgagcggctcctactcactcaccaacaggg

SEQ ID NO: 452600 - DNA, 122 bp, Homo sapiens
gttttttggaaaaaactttttcctcgtccagaaaaaggtttaattcagcccctcctcctccgtctgagcacttaggtttcgcctgtggctgcatgcttaattcaactgggcatgcaggagta

SEQ ID NO: 452601 - DNA, 122 bp, Homo sapiens
tcaagaagggggtggggggcacgtgggagaaccacaactttctcctgtctgtcactcaagcggccagagagggctccaacctccagctcccgcggcaacacacagtgggaaattgcttcaag

SEQ ID NO: 452602 - DNA, 122 bp, Homo sapiens
gctgtgagtgaggacgggcctggggtgggaaagccccctacatggggaacccttgggttccgggctgctgaccatgcccatcctgctccagcccactgccccactgcccccggtgccactga

SEQ ID NO: 452603 - DNA, 122 bp, Homo sapiens
acagaactgtcccaatttgggtactgctaccattgaggtcacttacatgacagggctggacgagtctgctaatttatcaaaatcctgctcaacccaatgatcacaaacacaaaccaaacaca

SEQ ID NO: 452604 - DNA, 122 bp, Homo sapiens
gtaatagcctttggagcagaggttcgaattctttctccgcgtcctctgggaccgctgacacggacgccccaggcccgtggacttccctctcccactctctttcctcctgggaccgcacccgg

SEQ ID NO: 452605 - DNA, 122 bp, Homo sapiens
ggggtggggttggaggtgtgcgggtggaggggcgcgccctggagttgggggcgggcgaggcgtttgcgggcgcggggggcgggtttggaggtgtgcgggggaggggcgtgccctggagttgg

SEQ ID NO: 452606 - DNA, 122 bp, Homo sapiens
gatattaaaatgtattcaacgccacagtgatttaaatattctggtactgggtctctggaacggaatagaaagcccagaggtagagcctggtatgcataaatatattctacaattaatataag

SEQ ID NO: 452607 - DNA, 122 bp, Homo sapiens
cagtccccagacccgggtcagttcggcaggcggctgcaatacagccgctactacaggaatcgggaacggggatgtagaggaagggcccgagcgggcggttcccagtaataaggcgggcgctg

SEQ ID NO: 452608 - DNA, 122 bp, Homo sapiens
ggacacagggaccaaagcgcctagcagacagggcgcaggagacgcccatcaggcggctcgcgcccccaggcacctgcactcaccgagggccccgaggaacagcaggacgaggaagacaagtt

SEQ ID NO: 452609 - DNA, 122 bp, Homo sapiens
tgaaacagaggagggaaagcagcttagggatcatgatggctccttagccctcccagagtccgtcttgggttctgcagtccacagatgggagaagagctggagtcgtcgctgcctctctccca

SEQ ID NO: 452610 - DNA, 122 bp, Homo sapiens
tgactgacttacaggaaaccaccagctatagggaacccaggtaactaaaacaccaagacccggattcagctggtctcattacctgcctctacccacttccccattccgtgcttccctcagcg

SEQ ID NO: 452611 - DNA, 122 bp, Homo sapiens
tgcatccttttgcttcaaggaaaaaaaaaaaccagaaccacaaatagctgtgcaggatttcgaccttgcagtcacaataagaaagcagcaataggaaccagaatgggtgatgtctgaaccaa

SEQ ID NO: 452612 - DNA, 122 bp, Homo sapiens
tggcagctaccaaagcggacggtcgcagacaagcagattccggcaccgcagaaagggaggcgccagacagcgctgcccgcctggacctgccgttccctcagccagcgcaagttgctctcatg

SEQ ID NO: 452613 - DNA, 122 bp, Homo sapiens
atttcatgtgattagtgctgtaaggaaaacaaaacaggataatgcaatggaaagtgaccacgtgtgggctattttaaataaggggatgaaggaaggcctttctcagggggtaatagttgagc

SEQ ID NO: 452614 - DNA, 122 bp, Homo sapiens
ccggtctaagggtcagggaaagcctgcaaggtttgggcagagacctggatcagcgggagccggccatggaaagatctaggaccacgcatttcaggcaatggggccagcagggctggttttca

SEQ ID NO: 452615 - DNA, 122 bp, Homo sapiens
gaggggcgaggccgaaggaggctgagaaggggagggggcgctcacaccctgggcgggaggcgactgatccacacttagggctccgaatccggagaaagagagcgccggaccctcctccgccc

SEQ ID NO: 452616 - DNA, 122 bp, Homo sapiens
tcccgtcttcacagagttctcctgctgaggcacctggcctgtgtcctcagcacatgcccccggcatcacacctcacccgtgagcaactgatgcacggctaccctcgcgggtctgtattttgg

SEQ ID NO: 452617 - DNA, 122 bp, Homo sapiens
ggcggggcgaacggggcgggggccggggtctggtaaggccccgccggctgagatatccagcggcgcacctgacttcccgggaggcaaggccaacgtggttggaggcggggctgggttggggg

SEQ ID NO: 452618 - DNA, 122 bp, Homo sapiens
ccttactcctggtctcggaccagtccgcccggtctgactcttgtggtcccgtgtgggtttcgtcgagtgtgcgctcggggccggggcgggaggggcagctcctcattccacctccaggaaat

SEQ ID NO: 452619 - DNA, 122 bp, Homo sapiens
ccctcgcggacgcgcgcgctcacagagggtctgacttggggtcaacttccacgaggttgccgggcgcctgtgagcacagccgtgtccccacccaggggcccacctcccagcgccaccagggt

SEQ ID NO: 452620 - DNA, 122 bp, Homo sapiens
cagaattggttcccgcccgtggcttcctggtctcaccgacttcaagaatgaggccgcagacgttcccagcgagtgttacagctcttaaagattgcacgaacccaaagagtgagtgataacaa

SEQ ID NO: 452621 - DNA, 122 bp, Homo sapiens
cctcgcgtggcggggcttggtcctggcgggcagcggcagggcgcagagagcgctcctgcccgggcgggaaagatccccaaggcaggcgcctccacctgcagacccgccccgcctcaggatcc

SEQ ID NO: 452622 - DNA, 122 bp, Homo sapiens
tccaatgctgtggtttcaaatgtcagctacacctgacagcccccaaggtgacatctccagcgtaggcctgtcccctgaactccaggctcaggcatccagctgcccacttgacatagccacct

SEQ ID NO: 452623 - DNA, 122 bp, Homo sapiens
cgcttgtgtggggcgccatgttgaaacctggcaaaggggacgacattctgggttgcgttgcggggagtggggacgagagctggattggaaggatggcgccttactccctgcggcccccagag

SEQ ID NO: 452624 - DNA, 122 bp, Homo sapiens
taaactccccccaaggagaccaggcagggcagagacaatggctgcaggaaatcattcaggcgggacatgctggcctgccctccacccagtccccctgtgggccccactcccttctgattcag

SEQ ID NO: 452625 - DNA, 122 bp, Homo sapiens
aaacccaacaaaccaaaaaccttatgagtaaagtaggttaaaatgaaaggtatgaaaatgcgaggaagctcaattttaaaggcagacagaacaaaaaatataaattaggtctgaaatggttc

SEQ ID NO: 452626 - DNA, 122 bp, Homo sapiens
ctccttttaggatggcagctccccgcttccctgacacatctactgtcatctcttcacttgcgccagttcagaaagataaaagatcaatttccagctcagatcagccagcccaatgtccctcc

SEQ ID NO: 452627 - DNA, 122 bp, Homo sapiens
cagatgaagccggaagtgctctataagatgatcattggtcggcgactggaagcggacacccgaagaacagtttccaaactctttacctgaaagcacaaaagacaagaaagttagagttattc

SEQ ID NO: 452628 - DNA, 122 bp, Homo sapiens
agagggaaatacttcagctccgggaatgagcctgcagaaaacccggtgacgccgatgctgcggcatcttatgtacaaaataaagtctactggtcccatcactgtggccgagtacatgaagga

SEQ ID NO: 452629 - DNA, 122 bp, Homo sapiens
aaacaatttgtggcatcagctccttgatttcctgatcttgcaaatgaagacaatatcccccgctgatgtgacagtgattaatatactacattgttctgaaagtttcttaaactccttcagag

SEQ ID NO: 452630 - DNA, 122 bp, Homo sapiens
ctgagatgagcctggtcccattgacaacaaacaggggggcgcgcggcctggaggcggggccgcagggggcgcgggctggggcgggggaatcccgccccgccctttctgtgcggcgcccgggc

SEQ ID NO: 452631 - DNA, 122 bp, Homo sapiens
acatcagagggcgccctgttccgcagctctgaatgaatccgtctgcccatctccatctctcgcgctctctgtctgcagaggctctcgtgccagccgaattcaatcaataaacctcgaaccca

SEQ ID NO: 452632 - DNA, 122 bp, Homo sapiens
cagacatggatgctgggtcctgggatagggattttggacatgtatgctgggacctgggaccgggatgccagacacggatgctgggccccgggacggggatgccggacatggatgccgggccc

SEQ ID NO: 452633 - DNA, 122 bp, Homo sapiens
gcgcgcgggcggggccgggggcgcggcgaggctcgggttggggcggggcgggggcgggggcggggccggacccggggaagccgcccgcccgcggggacgtccgcaccgcgagggttaaggcc

SEQ ID NO: 452634 - DNA, 122 bp, Homo sapiens
ctatagtaaaacttaatccgcacactttagagctcttaatagctccccgactttctccatcgccaacccaccattccaggatgcagggagcagccttactgggaggtgctggggcagagtac

SEQ ID NO: 452635 - DNA, 122 bp, Homo sapiens
cggaggtgcaattcaggctggtggagcagcgggggaaggcagggacaggcggggctagcgcggctctgcagctgatcacacgcaccaccacacacaccacattcctgctgccccggcttgcg

SEQ ID NO: 452636 - DNA, 122 bp, Homo sapiens
caggccacgctagaagctgacactgaagacgtcagctactctttaaggacccatctgcctcgctgcccactgctcaacccgtcactgggggctccaggcctgccaccggcttgtcctctgaa

SEQ ID NO: 452637 - DNA, 122 bp, Homo sapiens
ctccctgccactgtggggaccagcggataagtctgccagggccctggtgaggcacctacccgggccctgcactggaatgagggcacgtgactgcaaggagaggacatcagacctgcccactg

SEQ ID NO: 452638 - DNA, 122 bp, Homo sapiens
tgtggccgaagggctgggactggccatgagattacatgtcctagcatgctcagccaggcgcgcgcagctctgccccttcctccagtgatgcgcacagtccctgatccctgtgcacgctggga

SEQ ID NO: 452639 - DNA, 122 bp, Homo sapiens
agagcgcaagcagccctggcgggtggagagtttgagggactcggggttggaggaggaaaacgggattcagccagagatggcaggctgacagcttcaggcagattgggcagagagtggggagc

SEQ ID NO: 452640 - DNA, 122 bp, Homo sapiens
attccaggaggcttccagcaggtggcgggattgagattccctgagatggagggctgggtccggaggagctggggtgggccgggcctggatctggtccctcttgcaccaggtcacagctcact

SEQ ID NO: 452641 - DNA, 122 bp, Homo sapiens
gggaggtgaggagcgtctctgcccagccgccccgtctgagaagggaggagaccctccgcccggcaaccgccccgtctcagaagtgaggagcccttccacccggcagtcaccccgtctgggac

SEQ ID NO: 452642 - DNA, 122 bp, Homo sapiens
ccatgcctgagcctcccaccccctccgtgggctcctgtgcggccgagcttccccggtgagcgccgccccgtgctccaccgcggccggtcccatcgaccacccaagggctggggagtgcgggc

SEQ ID NO: 452643 - DNA, 122 bp, Homo sapiens
gattctcgccgcctgagtatccagcgctgcatccagtctctggtccatgcttgccagtgtcggaatgccaattgctcactgccatcctgccagaagatgaagcgggttgtgcagcataccaa

SEQ ID NO: 452644 - DNA, 122 bp, Homo sapiens
ttctctgaaagtggaaggagtgggcggggggcgcggccgaggcggggcgcgggcgtgcagcggcgcaggctccgccccggggccgtctccagccgggggcgccgagccgctccagtccccgg

SEQ ID NO: 452645 - DNA, 122 bp, Homo sapiens
tgaccgcgctgctggtctccgactggctgctgctgctgctggtctgcgtggagttggaaacgctcctctttcgtaccatggggacgttgatgcggttgccattgagggcggagatctccacg

SEQ ID NO: 452646 - DNA, 122 bp, Homo sapiens
cacccatgcccagtgcagagcctggtacagaggaaacacttcggaggtctttgctaatgtcgtcagtgtatcctatccctggccttgccaccagccccatcccactcacagctgaagggctt

SEQ ID NO: 452647 - DNA, 122 bp, Homo sapiens
gttcaaccttcacacgtgccctggcacttgggaaacccgggctgagacaaggtccggtcacgtgaccaaagagttgccgtttctttggcctctctagccagccggtcctcccagtgtctcgt

SEQ ID NO: 452648 - DNA, 122 bp, Homo sapiens
ccgtttcattaggcaacctccaaacacaaattcatacagagaagttaccttcctctctaccgcagtagcaggtgatggtctttcctgttctatcttttggctttagctccagcccctcttta

SEQ ID NO: 452649 - DNA, 122 bp, Homo sapiens
ccgccccctttcatgcaaaacccggcagcgaggctgggctcgagtggaggagccgccgcgcgctgattggtcgctagaaacccatttattccctgacagcccccgtcacatggatggttgtc

SEQ ID NO: 452650 - DNA, 122 bp, Homo sapiens
ttttctttatccacttgttaattggtgggcatttgggctggttctatatttttgcaattgcgaatcatgctgctataagcatgcatgtgcaagtatcttttttgtacaataacttctttttc

SEQ ID NO: 452651 - DNA, 122 bp, Homo sapiens
ccgtcggacaaacacaaaccacgcagacccgtcggacaaacacaaaccatgcagagccgtcggacaaacacaaaccaggcagacccgttggacaaattcaaaatgagaaaccgtctctcttt

SEQ ID NO: 452652 - DNA, 122 bp, Homo sapiens
ttcaagaagctcatcaagagcttatttaaaaagcatacgaaagacaggcaccctctttcccgttctcccccatcctgttcttcccgtccggtcctctgccctcagtcattcgcgggagcgca

SEQ ID NO: 452653 - DNA, 122 bp, Homo sapiens
ctgaggacgtaggagggatgctgagacaggcaagtgggatttctctacatattgtcacctcgcccgcacttttggagaaggtagagccaagcagcatttggccgaaatcctgtgcccgtgga

SEQ ID NO: 452654 - DNA, 122 bp, Homo sapiens
ctgggaacctggccacaagtgaacctcctccaggcgaggggatgccctgcagcatccagccgtcaaaacctcctgtagaaacgggagcgagcatcaagcctgtgtgtgtgcatgcttgggcg

SEQ ID NO: 452655 - DNA, 122 bp, Homo sapiens
ccttggaaggaggaagggctgacctgggttctctccagcccccaggtgcgccgggtcacccgtgccccttcattatggacctgggccctaccggaacccctgccccagttaccacaactcag

SEQ ID NO: 452656 - DNA, 122 bp, Homo sapiens
agaccctgagctctgcccagggtggagctctgcccagggtgcacccctgccccagcagggcgcatggcacacagggcaaacctctgtcatccaagcttggccccaagagtccagctctgatg

SEQ ID NO: 452657 - DNA, 122 bp, Homo sapiens
agataagtccatttctgtgcagcggcagtcaccaggtgcagcgggactgccagcccagcgcgctgaactgctttgtggaagccatgtcccagtgcgtgccgccaatccccatccgaccctgc

SEQ ID NO: 452658 - DNA, 122 bp, Homo sapiens
gagatgatggtggtggctatgatatggtagtgatagtgtgtgtgtgtgtgtgtgtgtgcacgcatgaaagagagagagagaaggagacagagatacaaagagacagagataggaaggaaagc

SEQ ID NO: 452659 - DNA, 122 bp, Homo sapiens
ccacaacgcccggcaacttcacgccagccacgccccagaccacacaaggcacttggatcccgggaagtgccaagcctgcctccaggatgttaccaggacatttaatgggatctgcagtactt

SEQ ID NO: 452660 - DNA, 122 bp, Homo sapiens
cccgactcaactacacggtgctcatcggctccacaccctgtaccctcaccgtgtcggagacgcaactgctgtgcgaggcgcccaacctcactgggcagcacaaggtcacggtgcgtctgtcc

SEQ ID NO: 452661 - DNA, 122 bp, Homo sapiens
gtaacaaaactccaacaaggaaagcttatctaagggtatagaattaccacaggggccaggcgcgatggctcacacctgtaatcccagcactttgggaggctgagccaggcagatcacttgag

SEQ ID NO: 452662 - DNA, 122 bp, Homo sapiens
ggggcgctggggatttggggagacgatggagcgacgggtagagcagcttgggccgagccgcgggggtggaatccagacgccgggcgggggagggggcggcggggcggcgggacggtgggtgg

SEQ ID NO: 452663 - DNA, 122 bp, Homo sapiens
aatatgaaggcatttccacaagctattgagcaacatttttaccaataccagaggccactgcgcaaaaatgtaaaaaaaaacaaaggattgagcctcagaggtacaaactctaggaatttaac

SEQ ID NO: 452664 - DNA, 122 bp, Homo sapiens
ggaccctgcaagatccccacgggcaagagtggctgatcagagctccatgaacagccccttcgtcagaagccatcctctcacacacgtgcacacacacacacacgtgcccgcacacgcacaca

SEQ ID NO: 452665 - DNA, 122 bp, Homo sapiens
gcgcgcggccgctccgccctcacctgagcctgaggttggccatgaactcgggcatggagacggtgtccatcagcacgaagtctgccttgccgaattccaggctctcctgctccgccatggcg

SEQ ID NO: 452666 - DNA, 122 bp, Homo sapiens
ttgggtgacctcctgaccggcccacgtagtgaactctgtgtttggtttcagacaggccgacggtcgcaaggtcctacggtcaagcatccgggagtttctatgcagcgaagccatgttccacc

SEQ ID NO: 452667 - DNA, 122 bp, Homo sapiens
cgggccctgtgggtgagaggaccgcccaccgtggtctgggtggcagatacctgctatggccgggtagaagtccttgaagtccacctgctcatgggccccttcacagccggccaggcaccggg

SEQ ID NO: 452668 - DNA, 122 bp, Homo sapiens
ggccttacagtcgtagaactgattggctgatcatgaccatgcagttagccagggttttcccgagttgtttgggttgagttcaggagaagcatggccaggtcgagtccgtacctgcgccaact

SEQ ID NO: 452669 - DNA, 122 bp, Homo sapiens
attcgctcactggttgagaaagaaactgagcttgatgccaggctacagagatgaggagaacgcaggtgagctctcctctactgggggtggtaaagaggaggtaaaataattacagtgctttg

SEQ ID NO: 452670 - DNA, 122 bp, Homo sapiens
ggcgcagcgggcgtctgtcctgctagcggggatcgggcggctggacccaagagcagggcacgtgcgcagcgacgcggggcggccccgccaggagccccgacccgggcgcggcgcagggcccg

SEQ ID NO: 452671 - DNA, 122 bp, Homo sapiens
aagcactctttgctaattgtgatcggcgatatcggtacagagagtcagctgagggccgtgcgggcccaccttgaacaaggtgagccactgttctggctgtgcttcaggcatctctaccctgt

SEQ ID NO: 452672 - DNA, 122 bp, Homo sapiens
cctgctgcagactcacactggatctccgagggggtcctctcggctgggccgtgctgcccccgggagtgaatggtgtctggaaacatgtcataggtctaaggaaaaacagaaacagtgtggac

SEQ ID NO: 452673 - DNA, 122 bp, Homo sapiens
taaccacttggggggaattaaaagagagctggagcgggcggggaaggttagggggagaagcgggacagggagagtgtctctacatgtaaagagaggaactttcctggtgcggagatctgggg

SEQ ID NO: 452674 - DNA, 122 bp, Homo sapiens
ccgtggccacatcatatttcagcgtgtggatggccacgccgtggccacgtcgtattttagcgtgtggatggccataccatagccacatcatatttcagtgtgtggatggccacgccatggct

SEQ ID NO: 452675 - DNA, 122 bp, Homo sapiens
ggggtattgcctgtgggagtccagcggaacctgggcaggcttcccagaggaggcggcctccgagcccctgggcacccgtgatccgccagggcctggaagaaaacggacggagcaggagcaga

SEQ ID NO: 452676 - DNA, 122 bp, Homo sapiens
ggggatgagaggcagatgttccccgagcaggaggtatgcggagtcgaggacaggagggagcgggtgtaatgtagcctgaggctcagcagggagcattcatttacaaatgctctggaggctca

SEQ ID NO: 452677 - DNA, 122 bp, Homo sapiens
ccaacaatattctcagaaaacaaatgatcagaggtttaaggaaattgtattaggtttcagcgtgttgtttcttaagataaatttctggccacccaaaaagtcacatggtattttgatttctt

SEQ ID NO: 452678 - DNA, 122 bp, Homo sapiens
tagcaatgtcggccatgggtgagcgagttggggttgcagagccaccaagaaggccagctccgggaagactggttcccgctgtggtatgtgtaatggcgccccctgtggccatgcagtatgga

SEQ ID NO: 452679 - DNA, 122 bp, Homo sapiens
acgctgcgcccgcggcaaggtagggtcagcgggaaaaccgggcactttccacccccataccgaacacggccgacatggacccttcctaggcgggacagacacctctccccggacactgactc

SEQ ID NO: 452680 - DNA, 122 bp, Homo sapiens
ttttgtacaaaaaagaactacttgtattctagaagaaatatgaaatgcttaatttataagcgggctggagattttttccaatattgttttctttgaaaatgaaaggggatcatctattttag

SEQ ID NO: 452681 - DNA, 122 bp, Homo sapiens
gggaagaggatgatatcactcccaatatctcagaagttgtacatcccccttgatattgttcgtcatatccacagaggagcaggatgacattccattgaatttcgcgaccggcgtacacgcac

SEQ ID NO: 452682 - DNA, 122 bp, Homo sapiens
tttgtgtctgcgcgtctctctgtgagtgtttgacactgtttgtttctctcggtgtgtaggcgagagcccacgtaacctcccagaatgaagcaagagcttctctacgtaggcaggatgtagga

SEQ ID NO: 452683 - DNA, 122 bp, Homo sapiens
cagccagctatgccaggcagtttccccggcttccgtggggtcaaggctctgcttgctggccggcaggacgagcggcgttatcagacaacccagctggcgcagaggtggccccccagtgctgc

SEQ ID NO: 452684 - DNA, 122 bp, Homo sapiens
aaagggcggcggagaagtggggacgtgggcgcagggagcgccccacacgcctgaccccagcgcctcggatcccccacctgcccgcaacctccgcgccgcagccacaccgagtccccgcgccg

SEQ ID NO: 452685 - DNA, 122 bp, Homo sapiens
ctgcttccagacggccagccgggtgggtggaggagcccagctgttcttgctctgtgaagacggcaggcaatggggactccagtgtgcgaagcggagcgtcgtactggccacaagggtgcacc

SEQ ID NO: 452686 - DNA, 122 bp, Homo sapiens
gggatgggggcggggtgggcctatagtgccttggaatccaggacaaaacccccaacccaccgaataactggggagggcggagaataagaacccccactttctttgacagaattcgcaggatc

SEQ ID NO: 452687 - DNA, 122 bp, Homo sapiens
gacgcctcgcccagagcacaggaggacagtatccactgcggggcgttcaccccacgcgagcggggacaacaggtctagccctaaacaactgcttgcctggctataagaggagccttgtcttt

SEQ ID NO: 452688 - DNA, 122 bp, Homo sapiens
aatcatttttttttagcttgaaaccaaagcaaacaagcgcgcacagagaagcccattctccgcggccggcgcggcagcctggccgctgtgggtagctcagggacgcacagaggcccggctgt

SEQ ID NO: 452689 - DNA, 122 bp, Homo sapiens
tgggaaaccgggtgcggccggaaaggcggccgcccctcacccgtcatgcaacggcacgttcgtggggaacctgacattaaactgttcgtagatgacctgcttctgggtcaggatttcgcact

SEQ ID NO: 452690 - DNA, 122 bp, Homo sapiens
ggttaatgcagcaggaatgagtggtagacagtggaatagatcctctcaggaattaacacccggaagggtgactttcatgattacaaacctctttggcgggacgcaggaacccagcgcccgct

SEQ ID NO: 452691 - DNA, 122 bp, Homo sapiens
cctcccagttcagcttcctcctgcgtcccaagtgagcggggcggctgtcctcgaggactccgggctcacagccaacctgctggcacggctcgaggactccgggctcacagccaacctgctgg

SEQ ID NO: 452692 - DNA, 122 bp, Homo sapiens
cagaccagggttgggggttgctttctgccccaggtcacccggcaggttaacagagaatcgcgtcgcagatacagggctcctaccttcaagtgtctagtcctcattttgacttatttggccct

SEQ ID NO: 452693 - DNA, 122 bp, Homo sapiens
cttcactactggctcctgggaccaagacgactcagagtccaggtgaagagtcaggagaggcgccagttcacctccagacctgccttaaaagcagcttgcccgccttctctcctcccctccgg

SEQ ID NO: 452694 - DNA, 122 bp, Homo sapiens
cagctcctacgaaaaagaggcttagaacagagctctgtccatcctagattgactgtcagacgcacaggttatggccgtaaaagcacataaaagaccaagaagtgctggaagtatgtgaggta

SEQ ID NO: 452695 - DNA, 122 bp, Homo sapiens
cctaccagctatgggccctcctggtgcaccatcctaaaacagtggggacagtgccaccaccggagggtcctcttcttgcaagccatcagagatgggggcgggtggtagggaggctggctttt

SEQ ID NO: 452696 - DNA, 122 bp, Homo sapiens
tgcctgttgtctcagtgataatgtgcaagcatagagatatattaaaaacctacgtaaatacgtttaaggaaagaaaaagagtaggtcattaaatagtgaaagaacattaattttgaaatgac

SEQ ID NO: 452697 - DNA, 122 bp, Homo sapiens
gggcctggcgctgcgtctgctgtggcctggccctgccggagccgagccaggtcggggctgcgtgggggaggattagctcaaggtgattaattgaggcggcccctcccacttggtcctgggct

SEQ ID NO: 452698 - DNA, 122 bp, Homo sapiens
ccggtccgtgcctccaagatgacaaagaaaagaaggaacaatggtcgtgccaaaaagggccgcggccacgtgcaacctgttcgctgtactaactgtgcccgatgcgtgcccaaggacaaggc

SEQ ID NO: 452699 - DNA, 122 bp, Homo sapiens
gagagagaccttggaaaactcagtcccgatttaagtaactcagacactctgtgctccttccggtctccctatctaagacatgggacacttttctgtccttgagtgcttcctccccaccctca

SEQ ID NO: 452700 - DNA, 122 bp, Homo sapiens
tacttttctaaattgatgtgatggcctccctgaaattaaacatttctattagtggcttcccgttaatctcatccttcttagatcaaacctcgttatatctcctgcctatctcttttgcattc

SEQ ID NO: 452701 - DNA, 122 bp, Homo sapiens
tggcagtaccgtagttttcctctcttctgcctgcggtgaccattgggctgtagggtgccccgaggcctccctggccccctcacgccggcagaatggcctcagcccgaggggccaagcagtct

SEQ ID NO: 452702 - DNA, 122 bp, Homo sapiens
atgctggcctggctcattcatcgtttcccctaatgactgactgaccagaaaaatgcacgacgctcccatggggccactcgggaggcctcaggccttcgggcttcctgattcagtagatatgt

SEQ ID NO: 452703 - DNA, 122 bp, Homo sapiens
caaacccaagatcaaaggacagtgcaggacccatcaccctgggaagttttctccctttcccgtctttctccttctcaccttctcagaaagcgtagcgaaaggggcctgccaccctactggct

SEQ ID NO: 452704 - DNA, 122 bp, Homo sapiens
ccaccgacttcctttccatacagcaccggcaggcaccggtgtgaagggtcataaaaatggcgctggccgctcgtttgctaccccagttcctgcactctcggtcgctgccctgcggggccgtc

SEQ ID NO: 452705 - DNA, 122 bp, Homo sapiens
taggtaagaaaaaataaaaagacaaaacaagcctgccacccagagacgtacaacaaaatgcgaactgtagttatttttctagacctttggatagccattaatatggttccacgttaataaca

SEQ ID NO: 452706 - DNA, 122 bp, Homo sapiens
ggaatgctttcagggaagaggcaaaaggtttcattcgccaggcattaactgagcgcccaccgaatgccaggcctgcgctgggtgcaggtactagaatcagagatctcagtctactgggggaa

SEQ ID NO: 452707 - DNA, 122 bp, Homo sapiens
agcaggtcccagtgctgagacacgggcagcccggcaggacaactcaccgctttctgtgtgcggagagaacagagaggctggctagagcaggggccgcatccctggaggcggggaagccactg

SEQ ID NO: 452708 - DNA, 122 bp, Homo sapiens
gacgtcacccaccagcctctaacacagccgcagtgggggtggcacaggccgagccccctgcgccatggccctgaaatgtcacaggcagaaagcgacacgacccgtgctgggaagagggcaac

SEQ ID NO: 452709 - DNA, 122 bp, Homo sapiens
acacctccacttcaagtcccaggcgggtgtcggagtccgctccagccccaagcgcgcgcgcgtcttacctgaagcctggactccgcgggacgaagccacctccgccgacgcgtccaggaggc

SEQ ID NO: 452710 - DNA, 122 bp, Homo sapiens
ccctccccatgcccttcgccgcccagcgagttgtggagccgcagctccgagtgtggaatccgccagccccgagaggaaacgccacacttcaccaccacttcctcagcgcgtgtgctgtgcct

SEQ ID NO: 452711 - DNA, 122 bp, Homo sapiens
ctccagccacctgctcctcacactcacctctacacactggcaccctcccgaaccgctacgcggggccctgcgtcccccacactcccagctgaagaacaccgcagccccacacctagctcctc

SEQ ID NO: 452712 - DNA, 122 bp, Homo sapiens
cacggcctgcgagtccgcgcttctgcaccggccaaagaagagcaggtactgcggcagcagcggtggcaacccccgaccctgcctgtcaggcggtcggcccaatagctgcaggagggcgggaa

SEQ ID NO: 452713 - DNA, 122 bp, Homo sapiens
tgcaaacacatcctaaagctacacacattgaagcgtttacagcaatatgctccctgggttcgttctcccttcccccaatcctctaaactgtgcctttgggtctcagacccttgtcccggggg

SEQ ID NO: 452714 - DNA, 122 bp, Homo sapiens
ttcatggcattctcctgcctcagcctcctgagtagctgggactacagactcaagccaccacgcctggccacattccacaatttagagaaaggtcacaacctggaatcctagggagaccccag

SEQ ID NO: 452715 - DNA, 122 bp, Homo sapiens
gaaatacatttttggctcactgtaatgatgttatgttgagcatttaaacgtttttcccctcgtttcactggacatcagttaagctctgctcattggtggcagttcatttgattttctgagta

SEQ ID NO: 452716 - DNA, 122 bp, Homo sapiens
gctccgaggccgcggggggagggacctcactatgcaaatctgagctgctgatcgatgacgcgccatcaccccacgcaccgcttcgctcgcccattggctgagatgagcctggtcccattgac

SEQ ID NO: 452717 - DNA, 122 bp, Homo sapiens
aaatctggcccaggtctatctcatggggtgggctatgttcatgaacccatttgaagattacgcccccagttcctacacaaataatcaacatggacccataagcaggcagactccttcatcag

SEQ ID NO: 452718 - DNA, 122 bp, Homo sapiens
gcagtggaacggaagcggagcccagcaggcccggtgcggcgggaccaatgaatggagctgcgggaggaggaggaaagaggctggagtatggggtgatcttgggcttgtaaccgaatccacca

SEQ ID NO: 452719 - DNA, 122 bp, Homo sapiens
accaccacaacttcaggtgggtacagtcccagaggggctgttggaggtcacataccctggcggggacagagccagggaggaagctgggatcctccatctgtgcctttcagccttagtcaccc

SEQ ID NO: 452720 - DNA, 122 bp, Homo sapiens
caccctacaggaggtcgtgggcggtggcttaacagccccagtgcagagcttgaaccccaccgtccagaaggaaaggtgagtgggggacccgggcgggaggtgaggcctgccggcagcggccc

SEQ ID NO: 452721 - DNA, 122 bp, Homo sapiens
ctggggagaagagtacctgaccagaaactcctaatctatgaaaagagatttgcttaagcacgtcaaagagagaatttcagttgcagaatcagtggtacagccatgaaagaggttcaccagta

SEQ ID NO: 452722 - DNA, 122 bp, Homo sapiens
gcagggggcgggacaatagcggccgcggcgccccactcggcagaactccgccaccaggcgcgatgccggaactacatgtcccatgacgctctgggaggccgcagctttccaccggaaagagg

SEQ ID NO: 452723 - DNA, 122 bp, Homo sapiens
ccggcccacctccagggcggggctcctccggctcctcctcacctgctttggctgtatttgcgagttcggaagcaccaacggcaccatgaatagatacatccccgtcgggaaggcacagctca

SEQ ID NO: 452724 - DNA, 122 bp, Homo sapiens
cctgcagccgctggaggaggctgagtcacgcttttcccaccagaagtctacctgtgcctgcgcccgccggacctgccggcctcttccttctcatccagggggcctcttctccagcctcacgg

SEQ ID NO: 452725 - DNA, 122 bp, Homo sapiens
acagattacccccaaagtcccggaggggcagggcccaagcccaggattcctgagcaaggccgagggggccagggggcaggatcccggaggctggggggcgctgcggtccttcctgggggaaa

SEQ ID NO: 452726 - DNA, 122 bp, Homo sapiens
gtcttccagactatccatgtcttccagaaaatccttgtcttccctcaaatccatagcttccgaaaaatccaggtcttccaggaaatccgtgtcttccagcaaatccacgtcttccaacaaag

SEQ ID NO: 452727 - DNA, 122 bp, Homo sapiens
ggcaagctcccggaggggatgtgcccggttactaagagagagcatcaagaaagttcttcacgggggtgtacagcaggagaagcagggtacaagcatgccacctgatcctgcagggcctgccc

SEQ ID NO: 452728 - DNA, 122 bp, Homo sapiens
gtgtttcttaattttcccaggggtgcccttggccctgatacagatttagctaccttcccccgaaagcctcaaagttctgcaaactcacagccaagcaaaacgcagctgcagtcgagccagcc

SEQ ID NO: 452729 - DNA, 122 bp, Homo sapiens
cgtcctccggttgggccgtgggcaccaggggcctttcccgggcttccctggaagccacggcggctcctggctacaggttgccccgctgcctggtggggacagtgcccctgtgccagctgaag

SEQ ID NO: 452730 - DNA, 122 bp, Homo sapiens
ggaggatggtctgagttaagaatattttttagcctcaagggagatgcgttcttcactaagcgtttgcagaaggtgcagaaggtattgttctcagcccacggtgtgtgttttgttgaccttga

SEQ ID NO: 452731 - DNA, 122 bp, Homo sapiens
ggcgcccaagagcccagcgaaggccaaagcagttaaacccaaggcggctaaaccaaagaccgccaagcccaaggcagccaagccaaagaaggcggcagccaagaaaaagtagaaagttcctt

SEQ ID NO: 452732 - DNA, 122 bp, Homo sapiens
tttggtaaccaggcagcggggaggctggcaggggattctagaaggcgcctgagaactgcgcgccaaccgcaccgcccccttgaaggtcggggccctatctccgggaatggtgacaacgttcg

SEQ ID NO: 452733 - DNA, 122 bp, Homo sapiens
cagatagtccctcaaacagtgaattagtctagtgcagcactgtccaatagaaataaaatacgagtaatatataatttcatatatgttctattagccacattaaaaaggtaaaaataaacaag

SEQ ID NO: 452734 - DNA, 122 bp, Homo sapiens
aattttattacgcctaataaggagacgtagcagggtagtgtgaaggaggggaaatcgtggcgatgggttaggtatacacttagaatgaagtgcagactccacacggaggccctcccgaggcc

SEQ ID NO: 452735 - DNA, 122 bp, Homo sapiens
ctgacagaggccctgtctcaggccacagctccttcatgtctcactttaggctgtcgatggcgtgttcatccggagtttgaaagtcaactgcaaagtcacctctcgcttcgcccactatgttg

SEQ ID NO: 452736 - DNA, 122 bp, Homo sapiens
ttcctgactgctggtgcctatgtggtctggccttgccagcctgtctgacctcatactcaccgctgactgtctgctcaccaagctttggccacgagggccttcttaaattcctcaaatgccca

SEQ ID NO: 452737 - DNA, 122 bp, Homo sapiens
tttcccaggcacattctcaactatggcacaataaacctctaaattgattgagacttgcctcggtcattttctttggtttacatttcctagtaactcaattcactgttttcaacttaacaggc

SEQ ID NO: 452738 - DNA, 122 bp, Homo sapiens
atctgcagtagcaaaaatccatctggctagggaatgctgaaagaaaaaaaaatcaatccacgtacagggcaagcgttaaaaatgtgggcataaaaggctgacgatctacatagatgcttatt

SEQ ID NO: 452739 - DNA, 122 bp, Homo sapiens
tgtctactgagcccttggaatctctccacagggcacctgccagtcatcgccaatcaaacccgagatgacagttgagatcaaacagacttttcattcctggttggtgcctgggagagtgacga

SEQ ID NO: 452740 - DNA, 122 bp, Homo sapiens
agccccgatccacgtgaagccaatgggcccgaactgcaggcttaactcacgtttcacaaacgaggaagctgcggctcacgggtgttttaagagccgcccacttgaggaccagcagggcaagc

SEQ ID NO: 452741 - DNA, 122 bp, Homo sapiens
gttggcattggcactacagccagtcaccagcaatgactgcaagtaactctaggacactgacgcctatttgatttggaagagaataaggaacataatgatgcctgaaatgtcctgtgcgcctt

SEQ ID NO: 452742 - DNA, 122 bp, Homo sapiens
tggtgggggagcttggtctgtggctttgggtgggggtggaaaggatgtttgtttcttaggcgatttgcagtctgatcctgacccagaagtgggcagcccagggccaagagtgtggtggatac

SEQ ID NO: 452743 - DNA, 122 bp, Homo sapiens
tccctcctcacagcaaagttttacatatcaggttcaactttctgaacccagcttgtaccacggtaaagagatgggttcctctgagggttgggttctgctattttcctctctctctctctggc

SEQ ID NO: 452744 - DNA, 122 bp, Homo sapiens
tgccgccaggctggtggggtgcggggagcggctgctgcaggacctgtgcctggagggggccggccccgagaagctgcaggagcccagcccggagcccaagcgcctctgagagccgccagcag

SEQ ID NO: 452745 - DNA, 122 bp, Homo sapiens
ccgcaaacagcagaagctttgctagggagactgatcagccccagccgtgggtgaccgccccgtctgcccgtccgtgagtgaccgccccgtctgcccgtccgtgggtgaccgccccgtctgcc

SEQ ID NO: 452746 - DNA, 122 bp, Homo sapiens
gcctactatccttgcatttaaaattttggttgaggtgaccttggagcataattcaacctccgaacaacctaaattaagactgcactagcctaagtgagttaaaacacactgacccaatgatt

SEQ ID NO: 452747 - DNA, 122 bp, Homo sapiens
ccgaggtccttgccccacgcgtgccgccaccggctcctgaggggccggtggacagggacccggcggtccctttaccaacaggaggcccatggctcttggcactgccgcagaggctgtggctt

SEQ ID NO: 452748 - DNA, 122 bp, Homo sapiens
tgagttcaaaggctcctaatagctgggctccttaacctctctgtgcctcacttcctcgtccggaaattgaagctaataagagcactgacttccctgggcggcggttgaaggctacctgtgtg

SEQ ID NO: 452749 - DNA, 122 bp, Homo sapiens
gagtgcagtgacacgatgttggctcactgcatcctccaccttctgggttcaagcgattctcgagcctcagcctcctgactagctgggattgcaggtatgcactaccatgcccagttcatttt

SEQ ID NO: 452750 - DNA, 122 bp, Homo sapiens
ttcagtttgcagagaaggggcggggcgggggcgggaatgacgaataaatagttaccgtaccgtgtggtaatagctgtaataaagtctcactccgaaaagtgctgccggatctcagaccctgg

SEQ ID NO: 452751 - DNA, 122 bp, Homo sapiens
tgagccctgggttagaagttatgtctttacacctgtaggccttgcctcatggcctcacgacgtccccatttcttacatcttataaattttgactgaaccgtcagagcctaaatcttcattcc

SEQ ID NO: 452752 - DNA, 122 bp, Homo sapiens
ctctccaaacaaggatgccaagggtgcgttttcagacaaacagtgagagcagaatagccccgtggaacctaaaggtgcacacagaaggcatggctgccacgcgaccctcagccatccccaga

SEQ ID NO: 452753 - DNA, 122 bp, Homo sapiens
tcccagtcacccaagctataagcctggaaagcagcttgacttctccttccatcccttccccgctcccaccaacttcatcttttaattcaggggttcctgaggaagtgtagataaaaatcacc

SEQ ID NO: 452754 - DNA, 122 bp, Homo sapiens
ggtgctgatgagacacaactctggccccggcggctggcctctgaggggccatggtgcttgcggggcttcccctatcccccaggtctgcccaaggggactctcaataaactctagctgaaggc

SEQ ID NO: 452755 - DNA, 122 bp, Homo sapiens
ttaggaaccacaccgtagaatggtcaaaatccggacccagcccacactccagatttaactcgcttcaaatgtcttttatacctttttttccctgttgaggattcagtctaggatgacgcact

SEQ ID NO: 452756 - DNA, 122 bp, Homo sapiens
tttacaagttccaaaggtgtgggggaagtatggaggaagaatgatgtacactgacctctacgtttctgcttctgtgaatctgactttcacgagtgctctgagggctagttaggctttatggc

SEQ ID NO: 452757 - DNA, 122 bp, Homo sapiens
accgcagctggtcatgtttatgacttctaatctgaagcttggcctcctcttccaagctctcgtggctgtcagaattcagttctatgtgcttatagaactgagatggcagtttccttgctggc

SEQ ID NO: 452758 - DNA, 122 bp, Homo sapiens
ctctttaaccctgttgccatgcccttgcctaagtcctcattatatctcagctagaaatcacgacagcctcataattagtctccctacttctagttttacctccatcatctccagccttcacc

SEQ ID NO: 452759 - DNA, 122 bp, Homo sapiens
acctttagaagcggtatcccaggaacgagtctgagtctgtgcaacagggcacagatgattcgacaaacttcaatgactgcaccgcattcatgcattatatccattgaaaagtaaatccagcg

SEQ ID NO: 452760 - DNA, 122 bp, Homo sapiens
cacccagccacctggcccaactgtccttcccacagtgaggctgagggtccccccaccccacgtcatgtcccagccccacggggccattgcagcttcagctctgcatccaggcactgaatggg

SEQ ID NO: 452761 - DNA, 122 bp, Homo sapiens
gtgtgcgcgccgctgtgattgtatgtcagcgcgcttcgctgggtgtcgggggaaggtgcgcgtgtctccaggcctcctgcccgagaacagcggcgctgctctctgattggccgcggccgcgc

SEQ ID NO: 452762 - DNA, 122 bp, Homo sapiens
gtcactcctgactcactgagcctcaggccagcaccgccaggacctctccgtttttccttccgctactgggctatgatggcagctttccagccccacatgccatacatcagccgcagatcccc

SEQ ID NO: 452763 - DNA, 122 bp, Homo sapiens
taaaataatgtgtaaatatgccattgagtcatacaggttaagagacattagatttcagtgcgacacagccctaacaaccctgtatgggtgacaaatgtgccattccattcatcatctccaac

SEQ ID NO: 452764 - DNA, 122 bp, Homo sapiens
gcaacattccccctcagacggaagcttgtgtagaggccgccaagttccaacaaatgctcccgactgtagacgccaccaagtgctgggacttgctctcgtcatctgggaaaggcttggggacg

SEQ ID NO: 452765 - DNA, 122 bp, Homo sapiens
gatgatggccagatttgggggtgtactgctttaaaatagactagttccatcttagtctcacggaaatcagcttgggggccttctagccctgcagctcagaaaagtgtcagccagtggggtgg

SEQ ID NO: 452766 - DNA, 122 bp, Homo sapiens
tgacttgctgtggacatcaggcaatgaacctattgtggttacatatttctcctacatcatcgtattcctagtttcagattggaatacatatatgaggcaagtgggcaataggagtcaaatag

SEQ ID NO: 452767 - DNA, 122 bp, Homo sapiens
acacaaactccgcggcccaggcgtccgggcggcaggcggatggtcgagccgggagatcggcgcttgctgcggcgctctgaccctcgctgcttccagccgagcccagtcccgagccgccgccg

SEQ ID NO: 452768 - DNA, 122 bp, Homo sapiens
gcgggtcgctgccacctgcccccgaggcacggccccgtggtggggagatggcacctgcctcgccggcagcttcattggtggtgctgcccaccttgagtgccgtctcatacttgtgcttcaga

SEQ ID NO: 452769 - DNA, 122 bp, Homo sapiens
cacagaccctccctcaaaccacagctgcattctctctccagggtttagggccagacaggacggagcatctttcctagagcagggtcccttgggtcagccccttgcaggacagcaggcacccc

SEQ ID NO: 452770 - DNA, 122 bp, Homo sapiens
ttagtattttcatttaaaaaatctgggttggttccataaatttggaaaagtaaaattggacggttctggaaattttgcctgtttacacatctgtaaatgtagcttgcttgcattattttttt

SEQ ID NO: 452771 - DNA, 122 bp, Homo sapiens
gctctggatcaccatcaacgagcctaaccggctaagtgacatctacaaccgctctggcaacgacacctacggggcggcgcacaacctgctggtggcccacgccctggcctggcgcctctacg

SEQ ID NO: 452772 - DNA, 122 bp, Homo sapiens
cttgtgggagagaagcacccaaaagaattccgttgtcaggttaaagtctttgtctatactcgcaggatgggaaggacgatggtgcaatcaccgagattattttgttttcgtcctctaaaaaa

SEQ ID NO: 452773 - DNA, 122 bp, Homo sapiens
gttttccgcccaggactggggctttcaccacaggctccgctggttctcaggcctgcagagcggactgggcacagcacaggctcttccaggtctgctgtgcacagatgcagaccacgggatcc

SEQ ID NO: 452774 - DNA, 122 bp, Homo sapiens
gcaccagtggggagccccagggtgaagtacttctctggccctgggttaaactggatgatgcggttcctgatgtatttagccgcccactcgctcgcctgagaatagtgctccaggatgatgag

SEQ ID NO: 452775 - DNA, 122 bp, Homo sapiens
gccctcctgctgcagttttctcaaaacaccatggctagctttttcatgtgggagtcacagcgccttccacaatctcaagttgccaagacaccaggcacatcagtgtctctgttctattgtta

SEQ ID NO: 452776 - DNA, 122 bp, Homo sapiens
cgaactcctgacctcaggtgatccacccgcttcgggctcccaaagtgctgggattacaggcgtgagccaccgcgcccgtccgggatgactttttaaataggctgtcacgcagtttgagatac

SEQ ID NO: 452777 - DNA, 122 bp, Homo sapiens
acaggagctaggcctcactggcaggggggctgcccacagccttttcaggggctcgcttggcgggtgacggggccgcagccaggccttctctccctgccccttggtgaccccgtggcttcctg

SEQ ID NO: 452778 - DNA, 122 bp, Homo sapiens
cctgtgtctgcatctgcaggagcctagcagcctgggggttgctgagcaagagtctaaggacgttcttggtggagtctttgatctgctgcataagtggtgagaggctggatttctgcagctct

SEQ ID NO: 452779 - DNA, 122 bp, Homo sapiens
tgcctttgaagtcatttccattattgtcttggatattagcacttggctttcttttagttacgcaaatttctctagcaagtgattgttccacagcgtgtttgaattcctttcccaaaaagctt

SEQ ID NO: 452780 - DNA, 122 bp, Homo sapiens
ggcagtctagtgcatgggagctaaaaggcaggacttgctttgtgagcctcttcaggtcagcgtgagtctgttcaggtgagtggagaatcctcccttgacttatgctttggtttagagtagag

SEQ ID NO: 452781 - DNA, 122 bp, Homo sapiens
gaccaggactccactgacgaggaccttactgacaaggcctcactggcaaggcctcactgacgaggtccttactgacaaggcctcactgatcaggttccgccgatcatgacctcatcgtctgg

SEQ ID NO: 452782 - DNA, 122 bp, Homo sapiens
tgcttgcttgccctcagggtgagtcacagtgacctcagaggagtttccccaaaacgtccccgccctgtgatggggaaaagccggaatctctcggtcccaggtggtcatgtggcccaggccgg

SEQ ID NO: 452783 - DNA, 122 bp, Homo sapiens
cccgccaggtcttggcactgctggcgcggccgcggcggcgggggcccggctccagatcaccgacccccacgagcgccggccctgcctgcccgctattttggttccatctcttctgcatattt

SEQ ID NO: 452784 - DNA, 122 bp, Homo sapiens
ccacctgctgcccagcgctgctgtgggctcggcacaagtactgggcctgatccgtgggctcgacagctggcaggcgcaggatgccgccgtggatttgtgccttcgcagggagctggccgccg

SEQ ID NO: 452785 - DNA, 122 bp, Homo sapiens
gcccggccgcgccctccacccccggcggcggcgggcactgaggggactcgctcgccgccccgagggccccggccggagcattcccaccgccgctctccatgtgcccgcctgcgcgcccttcc

SEQ ID NO: 452786 - DNA, 122 bp, Homo sapiens
cgagagacaaaaagcgagcgagagagggagcgggcgagcgcgcggggggccgcggcgcggcgtctggcgaatcacagggaaggggcaacattttaaaaggttgcagggcatgcaaaagtgaa

SEQ ID NO: 452787 - DNA, 122 bp, Homo sapiens
tgtttgctacagctagagctgagctttggctcaccgtccaccactgctatttgccaccaccgcagaaccccgctgacttccatccctccggatccagcagggtgtccgctgttctcctgatc

SEQ ID NO: 452788 - DNA, 122 bp, Homo sapiens
ccagcaacgcgctctttaacccgcctcccagccccgccttcggccaatccgcatccgaggcgctgcgcgccccaggctgaaaagagagcccctgagcccgacagccaatggaaggaagaaga

SEQ ID NO: 452789 - DNA, 122 bp, Homo sapiens
ccacatccggttccagattcggctctcagaggcttccggcgccgagaccgagatccccgtcggctcggtgtatcctcgctggtggagtaccctctgcttgagcgcatctcatgcgccagtag

SEQ ID NO: 452790 - DNA, 122 bp, Homo sapiens
aggcacttagactagaggcccagccctgagaggcaaatcccaaatctgacctgctcagcccggctgccgcatggctctggtctcatgctctgagctcaccctccatgcctaaattagaggtc

SEQ ID NO: 452791 - DNA, 122 bp, Homo sapiens
attattaaaaggcagttctctctccacacccttgggaacccaaggctaaaccaggaagggcgggctcagggaggagccaggaagtggagctaattcaccagtctgccacctgtaggctggtt

SEQ ID NO: 452792 - DNA, 122 bp, Homo sapiens
aactattaatggtgaatagagtttttcactttaacataggcctatcccactggtgggatacgagccaattcgaaagaaaagtcagtcatgtgcttttcagaggatgaaagcttaagataaag

SEQ ID NO: 452793 - DNA, 122 bp, Homo sapiens
ttttttttttttttttttgagatggagtctcgctctgtcgcccaggctggagtgcagtggcgtgatctcggctcactgcaaccaatgcctcccaaggtcaagcagtcctccctgccgcagcc

SEQ ID NO: 452794 - DNA, 122 bp, Homo sapiens
tggcaacacattagaataaactctgaagggctaagaacacataggctctgactcagaacccgggaaaccttttctcccccagcttcacccaagtgattgtgaatggcaacccatgtgttaaa

SEQ ID NO: 452795 - DNA, 122 bp, Homo sapiens
gctgggcactggtgacaaaggcagtggcagcacttggccacactcagcctctgggggccccggacgtgcatacatcgcggtcctccccttatgagcgaggagacaccatggctgcttgcacc

SEQ ID NO: 452796 - DNA, 122 bp, Homo sapiens
ctcagcaagggacccaaagccggggacagggacacgcaggctcagcaagggacccaaagccggggctgcatggatctgagggatggatgccccgcgcagccccagtcctaggggtcacggct

SEQ ID NO: 452797 - DNA, 122 bp, Homo sapiens
agcagcaagattcattgcaaaaaccaaaagaacaaatcttccaccacgtggaaggggacccgagccggttgtcagtgctggctggggcagcctgcttttattctcttatctggccccaccca

SEQ ID NO: 452798 - DNA, 122 bp, Homo sapiens
gtaatctgacatcgtccctactctctgattaaccacttttgggtgggcctcaaagaagtgcgtgccaaatgatgccctgtggatctcaggagctgccagtttcattttcccttctacctact

SEQ ID NO: 452799 - DNA, 122 bp, Homo sapiens
agttaccctcactattctcagactctggaatctcttaggtaagtctcttagggcacctggcgcatggggtgacgctttgattagaaggaacgtgaggggaagaacgggtgcaagtctgggga

SEQ ID NO: 452800 - DNA, 122 bp, Homo sapiens
tagagtattgactttctcaaatgctggttataattatagtgaacttatcacgtggacagacgcaggacttctggttagccagggtgttgtaagcagtggtgatagctgagaatatgcagccg

SEQ ID NO: 452801 - DNA, 122 bp, Homo sapiens
gcaggagggcgggcggggggcagggctccgggggactgggcgggccatggcggaggacggcgaggaggcggagttccacttcgcggcgctctatataagtgggcagtggccgcgactgcgcg

SEQ ID NO: 452802 - DNA, 122 bp, Homo sapiens
cagtgtccatcgactgatgaacagatgaacaaaatgtgctaaattcacgcaatggaatatcgttcagccatacaaaggaacgaaatactgacacatgctaccacatggatgaacttggaaaa

SEQ ID NO: 452803 - DNA, 122 bp, Homo sapiens
gcggaggcccgggcagtagcttccagacccaattgcccgcgcaagggggcgtggcagcatcgttgggcggggccgcctgtaagagaacgcggctaaaggtggggccaagcgtgcggtttgct

SEQ ID NO: 452804 - DNA, 122 bp, Homo sapiens
gaggtgcttgaagagcttccctttcatttgggaggcttcctcagtgcccccattcccaggcgttttttcctgggagtcctgtcctattcatgaatttcctgttttttccaggggggtgggta

SEQ ID NO: 452805 - DNA, 122 bp, Homo sapiens
aaagttggcggaggcgggcgtgggggttggggcgccgggatcggggcgctgggatccaggcgcgagggtccggacgcggcggcggctgggccggcttcttcctcagtggcggcggcggcggc

SEQ ID NO: 452806 - DNA, 122 bp, Homo sapiens
atttaagttctatgagaaattccttagtcatggtgttgcgtaaatcatattttagctgcacggcattaccccacacagggtggcagaacttgaagggttactgacgtgtaaatgctggtatt

SEQ ID NO: 452807 - DNA, 122 bp, Homo sapiens
cagcggcctcctgccgtgggccacggattcccgcaccgcctcggtcacccggtcttcaggcgcggcccctgtcgagtcacccgacagactcgtaggtttgttctgtttttcagcgccctgcg

SEQ ID NO: 452808 - DNA, 122 bp, Homo sapiens
ggccggaggcatgccgggagtggtagttctcccgcggttggcggggtttcggggacagctcgcggcctttcgggggttctcctggcttgggccatccaggcttggctaggattgccggcctg

SEQ ID NO: 452809 - DNA, 122 bp, Homo sapiens
tcgtggcgccgactctagctgcggccctcggagcagccctgaaaggtttaaagggccgagcggccccgcccctggaggccccaggcctcgccgcgccgcccgccgggacgtggagtccgcgc

SEQ ID NO: 452810 - DNA, 122 bp, Homo sapiens
ggctgaagtatgtaccatcaaactgattatactagtgcaataagtgaaaacagctaacatcgatccactgcttaccaggttcccacactaagtctgacttcgtcagcctatcctagcttccc

SEQ ID NO: 452811 - DNA, 122 bp, Homo sapiens
gaattagcagcggaaactccaggttcggttcaagaaagatgacacagagcctgtcgggcccgcgcactcttggcaaagtttcagtgcgacgagaggcgccgggcgctccatggccgcgccgt

SEQ ID NO: 452812 - DNA, 122 bp, Homo sapiens
gaagagcgggccgtcctgcaagcactgcaaggacgacgtgaacagactctgccgggtctgcgcctgccacctgtgcgggggccggcaggaccccgacaagcagctcatgtgcgatgagtgcg

SEQ ID NO: 452813 - DNA, 122 bp, Homo sapiens
ggatcccaatcgccagggtctcgaacagaaggggcagcatggctgtcagctgggctggggcgcatggggatgaggggtgcacggacgggggtggaccagaggcaggaagcccagggtgagga

SEQ ID NO: 452814 - DNA, 122 bp, Homo sapiens
tataacccatatgttcaaagttaatgaccatctggcctagaaaaggccagaaggatcacgcgatgtgtggaaagcacattgcagacaatctctgactttccaaagcacttacagacccaccc

SEQ ID NO: 452815 - DNA, 122 bp, Homo sapiens
gccactcaccccattgttcttttaaatagaccagtcccccggtgcttttaaaatggcacacgtatacatatgtaactaacctgcacgttgtgcacatgtaccctaaaacttaaagtataata

SEQ ID NO: 452816 - DNA, 122 bp, Homo sapiens
gcgggatgtgtctggagggggcagagcgccctctcccggccccggagggcccacgcggaccggctgagcgtcccaccagccggttctgcatccactacccagatctgcgcgccctggtggga

SEQ ID NO: 452817 - DNA, 122 bp, Homo sapiens
ttaatttcagggatgataccggggactctccagagccatgactagatccaatggattctgcgatgctgtctggactttgctgtctctgaacagtatgtgtgtgttgctttaaatatttttct

SEQ ID NO: 452818 - DNA, 122 bp, Homo sapiens
ctgagtcggggcctggctcgttttgacatttttgcgcccacgagtcttcggagagggcgtcgccactccagaccttccagcaagcttgaagtcatctgacgctaaaggactacttacctcaa

SEQ ID NO: 452819 - DNA, 122 bp, Homo sapiens
catctagcattaggtgtatctcccagttctcaaacggaggccccaggccaggccaagcctcgtctccggaggtatctgcagcctctagcgtccatgtgatttttcagtggttaatgaaactg

SEQ ID NO: 452820 - DNA, 122 bp, Homo sapiens
tcaccaaccttcctactaaactgaacagggggggccggtcgtaaaacgggtcccggccgtcgcacagcgcgtgctccggaaagacgtcgtcctccaggtcctcctcctcctcatcctcctcc

SEQ ID NO: 452821 - DNA, 122 bp, Homo sapiens
gggcttggcctcgttgaaggtctcgggcacgccacgggccttgatggcgtacactgtgcacgtgaccatgagcaggaggctgtagcccaggcagccgatgagagacagatccgacatgtcgc

SEQ ID NO: 452822 - DNA, 122 bp, Homo sapiens
caaggtggccaagcaggctggaggcaggagggagccgagggcccggagcgcgaggatggacggacagcccagctccctgtgcagcagcgcccgacgcccccacaaagatccacgtgctcaga

SEQ ID NO: 452823 - DNA, 122 bp, Homo sapiens
gctcaaacttgtgatgcattatgtccatgttctgagaacaggcagggccaggagggctctcgtgctgactagaagccagatgctgggatggaggaagaggtgggtgtggctgctgtggggga

SEQ ID NO: 452824 - DNA, 122 bp, Homo sapiens
tagcttcctgtagaaatcaggcttcaaggagcatacagccattctcatcaacatgagacacggatttgtaggcaatttctgtacctttcataaagctggctaaaagcatcagccggtattta

SEQ ID NO: 452825 - DNA, 122 bp, Homo sapiens
acgttccttcccgtgccttctgagtctgtttctcttaatttgactgtggtctctgctcttcgctggactcagtaagtatctcacgctcagttttggtggaggtcatggatttaacccttaga

SEQ ID NO: 452826 - DNA, 122 bp, Homo sapiens
gtctcagaaagtgcgggtggctgcgtcgaacggtggtggctcagaggaagagattggggccggcagcgacctaggtacctcactctgggtgggacccagaggttgtaacgttgtctatatat

SEQ ID NO: 452827 - DNA, 122 bp, Homo sapiens
cccacagccagcaaggtaagggagccattcgagccgccttcgctgattggacacagggcgcgcgcgtctgccaacgccggttcccattgggcagtacgctgtgacgtttcacgagcctcccc

SEQ ID NO: 452828 - DNA, 122 bp, Homo sapiens
aaaacgcgcggtgttctctctccatggccgccaggtggcgatgtggaataggaaacgaatcgctgctcagtgcgtgaaaggcgaaataaagggagagcaaagcggagatttttagagaaaag

SEQ ID NO: 452829 - DNA, 122 bp, Homo sapiens
ttcctgggactctgactctcacgcagtcagaatgtcgccctcagttttgtaattagcacacgtcggttgagcatattcactaaacgttgccctccccctgcccagccgatagctgggacgcc

SEQ ID NO: 452830 - DNA, 122 bp, Homo sapiens
agtgagaagcagtggtcagggaggacccggctctggggtgagggtctggggcggcgcggccgagggacctgcgtgggtgcgggcgtgtgagtgtgtgtgtgtgagtgtgtgtcgctccgggt

SEQ ID NO: 452831 - DNA, 122 bp, Homo sapiens
agtcgtccttgctgtaaagattaaaatggcaggaaataagatctcccagcaaatctgggccgtatgttgcttcccattgtggttgtacatgcagagtcagccattgtgttggctgcctgctg

SEQ ID NO: 452832 - DNA, 122 bp, Homo sapiens
cctctcagcctcctcttccgcgacccctggattacctcacaccccaccccccgccaccgtcgccacctgcggccacttgctgcgccactctgactccgcgccccctgtcctccctttttccc

SEQ ID NO: 452833 - DNA, 122 bp, Homo sapiens
ctgccgaatgcgccaggctcttcatttgcttggaatccatcgatctgaccatctccctagcgccagtgccccaggttggcacgttaatcatcttgggtccagcattgatctctctcactcca

SEQ ID NO: 452834 - DNA, 122 bp, Homo sapiens
gacgcggggcgggaggcaggaagctgggggacggaattgggcggcttctcccctcctgctcgcgtgcagccgccgtgaccttagacctggccggcgtccacgggcataccatgcgggcacca

SEQ ID NO: 452835 - DNA, 122 bp, Homo sapiens
ccccaggagggcctgggcatgaagtcagaggcccacacgggagccatgtggaggactcggcgggtgggggaccgctcttgggagacccaggcagctgacacccttgagagggcctctttccc

SEQ ID NO: 452836 - DNA, 122 bp, Homo sapiens
ctaaagaatatttgttccctgactctcatccacactgccacaatgcaggtgtacctgtcccggccgcctgcctgcccgcagggcctatatgagctgatgcttcggtgctggagccgggagtc

SEQ ID NO: 452837 - DNA, 122 bp, Homo sapiens
ctaattaaaacaagttttcagctacatgaatgactggcaagttattcaaagttaaagatgcggaaatgtcactcattgtgtggtagtgtcctaaacagttcctgaatgttgagctatcctgg

SEQ ID NO: 452838 - DNA, 122 bp, Homo sapiens
gggaccggaatggttttgttctgggcagcctgatcaatgggagcttgtctttgagctattcgctcagcaagtgactcagcacttgtgacgcccgctgtgagacaggctattggctggggaag

SEQ ID NO: 452839 - DNA, 122 bp, Homo sapiens
cttgtctcactcgctcacacgccctcccgtctccctcctcctcctcctcctccgcgtgcgcgccccgtcgcccccgcccttcttggcagggcgcacccaccacggctgcgccccaggtcctc

SEQ ID NO: 452840 - DNA, 122 bp, Homo sapiens
cctgtggaagcggcggcgacacttgggctgggcagtgtctctgatgcctcccagcgccagcgactgctcttattcccgccgctgtgggtcgggaaagttccgccagtgcacagcaaccaatg

SEQ ID NO: 452841 - DNA, 122 bp, Homo sapiens
tggtgtgttgcagggagaagccagctctcccgatgcttgagatgttctggatgtcaggcccggcttcctccctccactgttctgagcaagaagcatctgactgttttcttactggaactggc

SEQ ID NO: 452842 - DNA, 122 bp, Homo sapiens
ccccaaggaggaggggtccggcccagagcccacagttgcaggactttcccagcatgcaggcggtcccccaggaagtccacatacagggctggaccccaccaggcacagaggctatgcccacc

SEQ ID NO: 452843 - DNA, 122 bp, Homo sapiens
gttgcagggcactatgtgtggccttcagatttgggtctcttggcacttaattcccaatgtcggctgagcctctgatcacaagacatttaaattaactgttttcagaaggctctgtaatcaac

SEQ ID NO: 452844 - DNA, 122 bp, Homo sapiens
ctatgggagacacggtgcattcgcttcctgtggaggctgtcacaaatggttgctcaaaaacgacacacattctcttacctttctgaatgtcagaaatctaagagcaaggtgctggcaggtgt

SEQ ID NO: 452845 - DNA, 122 bp, Homo sapiens
accctagttgtttaagtctcctatcaagaagctgagagacatcaggtattctgtcagaatcgtcttcatgactggcctctctgggagcctctggcctggtggcctgcacacagctggccgac

SEQ ID NO: 452846 - DNA, 122 bp, Homo sapiens
gccggcatctccctgctgtttgctctgaaggaaccgtcctggccagcacccactctcacccgctgccgggctggattgtcctccacttgtgcttatctggtcctcgatgccgcgctccgacg

SEQ ID NO: 452847 - DNA, 122 bp, Homo sapiens
ctctgagagaagcactgtaccgctgatctccgcagcagccccccggttcctttggggaaacggaggtgttttctgttaaaaacactttaggaatcctgatgactatgagcgaagagtcaaac

SEQ ID NO: 452848 - DNA, 122 bp, Homo sapiens
gggagccatagaggggatccggttgcactagcctgcatcctcaggctgctgaactgaccacggtgggctaaactggaaaagtttctttgggcaggaaagactcagatttaacaaacatttac

SEQ ID NO: 452849 - DNA, 122 bp, Homo sapiens
cctatgtgcaaatgtccccagagttacttagtcaccttggtgtgtttgttgcactgggttcgtaaagcgtccggggttcaacagcgagctggagtccgcagctgtcccccaaaatgttccca

SEQ ID NO: 452850 - DNA, 122 bp, Homo sapiens
cagtgtctcccatcgtatgtgtttgctgtctaggagctgcgggcgtctttggagacacagcgtgctcagagcagtcgactctgcgtggcactgaaacacgagcagacggccaaggacaacct

SEQ ID NO: 452851 - DNA, 122 bp, Homo sapiens
cctcggaaacctggagacttgccatgctaaaaaagtttgtgggagccagcaaaatctgctcgactacccctgaggtgaggtttttcaaagggaacgctatctaaagcaaatctttcatttct

SEQ ID NO: 452852 - DNA, 122 bp, Homo sapiens
atgatattctacttaatgtcacacctaaaatgctgaaagcaaagggatggaggaagtccacgccaggcaagtcctaggagaatggagattaaactctgtcagtgtcgagagcagagggtgag

SEQ ID NO: 452853 - DNA, 122 bp, Homo sapiens
ccatcaagttttccttgtccttccctgggtctggagtgatatagactgaaacagtggatccgtgtcaggttttactcatggctggactgccttgtcacgctccttggcaccgaaggagtgtg

SEQ ID NO: 452854 - DNA, 122 bp, Homo sapiens
aggcgtgggggcagcactggcagtgggggagggaagttggttattaatagagatgatgagcgcaagcagctcaaatggcacagggggtactgagaccctggaaccaagatccctccctcctt

SEQ ID NO: 452855 - DNA, 122 bp, Homo sapiens
tttgattaaaaaattcacaccactgtgttattcttaactttgtaacttagcgaggaatgacgttaacattgagttctgttacagtaagttttgagaacaaggaatgtgtacatgcactcaca

SEQ ID NO: 452856 - DNA, 122 bp, Homo sapiens
gatggatggggacagccgagatggcggcggcggcaaggacgccaccgggtcggaggactacgagaacctgccgactagcgcctccgtgtccacccacatgacagcaggagcgatggccggga

SEQ ID NO: 452857 - DNA, 122 bp, Homo sapiens
gagagttagcgagggtgcaaacgttgtgagaattctgctcggggccttccacacacggatcggagaacaccaggttagtccaagttctaacacccactgttggtgaatctgctacccactag

SEQ ID NO: 452858 - DNA, 122 bp, Homo sapiens
ctacccccacgcactcctccgtgttcacatggtaggaactcccacaggcaaaagcctttccgatgcgctctgcagccgcgggatcactcgggtgtttgaacgctcgcgcgctcctcccattg

SEQ ID NO: 452859 - DNA, 122 bp, Homo sapiens
tccgccccatttgtagttgcgtcggctgtccagcacccagtgcaaacgaggcgtgggtcccggaagctctgttctgcgggtggccgctcgcgcctgcgcagtggaggcggcccaggcccgcc

SEQ ID NO: 452860 - DNA, 122 bp, Homo sapiens
catcagagctgcacttcaatgtggcagttattggccatgtgtggcgcctggtctgaagtgcgatgctagaaaggtaaaatacagagttagtttcaaagatttagttccaaatatttatatac

SEQ ID NO: 452861 - DNA, 122 bp, Homo sapiens
tggagaggttgaagccacctcttccagggtcccacggttggtagtttccattttacacctcggagtggtgctgtggtttacgttcgtgaaggtgtgtgtgctcacctggttacttcctgggt

SEQ ID NO: 452862 - DNA, 122 bp, Homo sapiens
gttacttccacaccggtcgttcttggcaaccagtgggtaccgttcaaatccccgccagggcggaaacgtccgcccttatccgttctcttattggtcaggttagacgtccatttctgacgcca

SEQ ID NO: 452863 - DNA, 122 bp, Homo sapiens
attttcagtgcttcctgagaagagtttcgcgcagttggagctacgggtacagcagtggtccgaaactagtggaagaccactagaacgcggagaatcagaaaattaccgggcatggttcaata

SEQ ID NO: 452864 - DNA, 122 bp, Homo sapiens
gtctcactgctgaaacccaggtgttcatgggctgggccatgcttctttaagaggctgcagcgtgagaatccattttcttgctgtttccagcctctgcagttgcattctttagcatatggctc

SEQ ID NO: 452865 - DNA, 122 bp, Homo sapiens
atcacggcccgcaccattggctcaattcgaactctgctcgttctgattggaaagtggcctcgcaggctatttttagcagggtatataaggcgcgggcggccgcgcgccggaggagtccgcgc

SEQ ID NO: 452866 - DNA, 122 bp, Homo sapiens
aaggactcgggaatggttttccatcgctcttggttgctctgctgcccctggagccccagccgccactgcttccccaccccaggggaccactatgttcccaagaatgttggggtgtggagaaa

SEQ ID NO: 452867 - DNA, 122 bp, Homo sapiens
atatctggtatatataaagcactacaactcaactgtcaaagactttcacgcagcaaacagcgttgtgagctttaggagtcaaacctaaagcagattctgtgagaatctaggttgtaaccttc

SEQ ID NO: 452868 - DNA, 122 bp, Homo sapiens
attgccaccgacaggcggggcgtcccagggcctctccccaggagcggatgagctcagacgcggctcactcagctgtgtccaggcacagccggtttatgacctaagagaatgacaacccagga

SEQ ID NO: 452869 - DNA, 122 bp, Homo sapiens
ccacttctccaccgcgacccgccgcagcccgagggtcccggcccgccctccaccgtctcccggagttcctcatgcattccccagggccctcactcgaggccccttcagccgccggcccgggc

SEQ ID NO: 452870 - DNA, 122 bp, Homo sapiens
gcgtgagctctgtctgccgcgggggtgcaccaggggcccgacgatgccgatgacacgccacggaggatccctgatgccagcgactcaggagctgggtctcccaaccattttcattttctttc

SEQ ID NO: 452871 - DNA, 122 bp, Homo sapiens
cctcttaagtgggctggtcagcggtatcccacagctgggagccatctaccttcctcatggcgaggcggggccggtggtggcccaggcagctggagctgtggcctcgcctgtcgacccaaagg

SEQ ID NO: 452872 - DNA, 122 bp, Homo sapiens
tgaggggtgctagtgaccggctgctgaccctcccggacccgggtgaggggcgctagtgaccggctgctgaccctcctggacccccgtcccaggaacctgccagacgtggccactttcccgct

SEQ ID NO: 452873 - DNA, 122 bp, Homo sapiens
ggctgtttgaccacattgttttggcatgtccagggcttgttcactatgggaccagcagcacgtagcccagtctggagcaaagagcctccttcctgtgcatgctcctgacatcagctaaggtt

SEQ ID NO: 452874 - DNA, 122 bp, Homo sapiens
ggggccacttcctacatgactggctgctgtgctcacccccacgtgctggctccgaggagtcggagctggggatctcaactctcttctggcctcactgttgggaaaaccaccttgcaggactg

SEQ ID NO: 452875 - DNA, 122 bp, Homo sapiens
aaaccacgcgcccgccgggccgcgctcaggccttcgccctcagggacttcggaaccgccccgtcctcaagatcgaaaagcccagagccccgcggcggctccaagcacggtgttgggggtggg

SEQ ID NO: 452876 - DNA, 122 bp, Homo sapiens
ttatttcatgccatggttattttacacgttcccttatgggtagagatcctggctgacatccgttttggggcagcgcatgagaatatggaaataggtgatttcgttgttttttatcaggccat

SEQ ID NO: 452877 - DNA, 122 bp, Homo sapiens
aactcaggaggctgaggtgggaggatcgcttgagtcagggaggttgaggctgcagtgagccgtgattgcaccactgtactcctacctggagaacagagcaaagaccctgtctcaaaaaaaga

SEQ ID NO: 452878 - DNA, 122 bp, Homo sapiens
gaacaggggacgtgagttcttgagaacagtaactacggtggtgcatttttcccccctgcacgtaacgtacagcactctaccgttttgccaagcactttgtgctcctaaaatttctgttgcat

SEQ ID NO: 452879 - DNA, 122 bp, Homo sapiens
cagcggcaccgccccttccgcgtcagcgcccgccccgcgccgcgccctcactgccgctgccgcggctacctgcggttcatctccgcacattccacacgcggcccaaacggtctctctctctc

SEQ ID NO: 452880 - DNA, 122 bp, Homo sapiens
ccctcgctgattgacagttccctgtccctttccagaagtaaggctccttaaaacgaaaggcgctccggggccgcgcgtattccgcgtcccagccaacccgcctccggcccgtcagcgtttct

SEQ ID NO: 452881 - DNA, 122 bp, Homo sapiens
ggaggctcagcccacactgagccggacagtcgcaggcctcctggatgaatgaagcatgaacgaatcccgatcctgttaccacagcttctccccaagcatccccagcagaacgttgtgtaaaa

SEQ ID NO: 452882 - DNA, 122 bp, Homo sapiens
cggcttacctgcgtgctggatccccgggctgctcggaggggtgcggggcgcaggcgagtgcggcccgcagactctaactttgttgctctcgggacggcgcagtcgtcacttcctcgcggagc

SEQ ID NO: 452883 - DNA, 122 bp, Homo sapiens
cttccgacagcaccgtgcccaccccccggagatggtctcgccctggttcctcctcgtctccgccgctagtctccagctccaaaatggcggctgccactgtggggcttctgccggccggtagt

SEQ ID NO: 452884 - DNA, 122 bp, Homo sapiens
caaccccatccgcccagcttgcccggcagcaggactgaagtatggaaacttgcagtggcccggccaggagggggtggccaggggattccagccaccttcaccccgtatcccaggtcctgcac

SEQ ID NO: 452885 - DNA, 122 bp, Homo sapiens
gctatgaatggaggaccagttcattatggtcagccatgtcgcttctgatgttcttcctttcgggacttgctgtgcttcagagaatctgaaacgacaggtctctgaaatatttctcagacttg

SEQ ID NO: 452886 - DNA, 122 bp, Homo sapiens
cccgcctcccgggctccaacctctttgctcagcccgggaggctcggctggctggggcgggcgtaaccgtggggcgaggcccgccggtctttctgatttccgcgggcggcgtgggcgctgagg

SEQ ID NO: 452887 - DNA, 122 bp, Homo sapiens
tcctggccctgtgtgctctggaattccaggttctgggcgggatctaagggagttcccttccgacttgcagaaaacagcaatagtaacaggctggcttgtttatctggtccggtggctgattc

SEQ ID NO: 452888 - DNA, 122 bp, Homo sapiens
ctacgacccccgcgcgctttcaggaccactcgggcacgtggcaggtcgcttgcacgcccgcggactatccctgtgacaggaaaaggtacgggccatttggcaaactaaggcacagagcctca

SEQ ID NO: 452889 - DNA, 122 bp, Homo sapiens
gttggtgatctccttcatgtcatcactcatgttgcctgacatctcaaagtcatgcagggccgctgggaagccaggcccggccgccgaggggctgcccgctgagcctccgtccaggcgctgcc

SEQ ID NO: 452890 - DNA, 122 bp, Homo sapiens
tgttcgctgtgctggacgagctgaagaacatgaagtgcagtgtgaagaacgaccactcagcgtacaagaggtgagcacccacctcgcgcactgcgggccctcccgagagcacccagctcagt

SEQ ID NO: 452891 - DNA, 122 bp, Homo sapiens
cctgtggggccatctgatgccccccttttcttcagccttggagaggatggcttctcaggccgcctcgcagcagatttgtagtctggttgctgtcgttcctgaaatagcctctgaagctctgt

SEQ ID NO: 452892 - DNA, 122 bp, Homo sapiens
caaagggaggggtgtccagtcagagtgtgagggctgtacccgtgggcagctgagggagtgcgagccacaggccaggcactctccttctcccattagctcagccgtggcatcggacttgcagc

SEQ ID NO: 452893 - DNA, 122 bp, Homo sapiens
gaaagaaaaactttgaaaatgaaggagaaaggcaaagcaacccccacctcgccctccccccgccacaggaaagaagcaaaaggaaatacctaggtggtggtcataagtctagcttttggtct

SEQ ID NO: 452894 - DNA, 122 bp, Homo sapiens
ctgcagtgagtctattccttctcagaaagcttgtcagacccggcgcctggagctgcctggcggggagggacccctggaaaggagagttttctccttgctattttatggaattggctgctggc

SEQ ID NO: 452895 - DNA, 122 bp, Homo sapiens
gaaacccccaccctctccccagatctcccctccggccagcactggggccagggaagaacccggaccccaggtgcttggctctggcccagccccagccatgggcatctcctcgccaccttctc

SEQ ID NO: 452896 - DNA, 122 bp, Homo sapiens
acgtcctgcgtccgggggccgggctgctgccggaccgaccacctacagtacacccgccgccgcctctgctcgcgcctttcctgcagcccccgccgccgcgtccctcccgggctcgcgtggcc

SEQ ID NO: 452897 - DNA, 122 bp, Homo sapiens
agagagtccgaagagtccgggcccttatttttccaattcttggtaaacaacaaacatgctcgccctcgcctccccgtgcagacgcctcagggccaactcgggcttcgccaggcaccgagagc

SEQ ID NO: 452898 - DNA, 122 bp, Homo sapiens
gctgcagtacttcctgttgaatcgggtcttggggccagaaaccacattgttatttatacccgaagctctttattcacggtgctttacaaaacaaagaaggggcagccccctgtcttatggag

SEQ ID NO: 452899 - DNA, 122 bp, Homo sapiens
tgacccgggctgcggggcgcagcattgtgcggtcatggtgggccagatgtactgctaccccggcagccacctggcccgggcgctgacgcgggcgctggcgctggccctggtgctggccctgc

SEQ ID NO: 452900 - DNA, 122 bp, Homo sapiens
gaatcgggagtaggaaaggcaaagattgaattctctatcagagcaccatgctcaactctccggggacacggagaccagtgaaagaagcgcaaaagtacggtgaggactctcagaaatcgcat

SEQ ID NO: 452901 - DNA, 122 bp, Homo sapiens
agagggagagagagatggggcaaagcacccgagccagatggaggcggcggcggggggtggcgtggggggcgtgcgaaagaaactcggggctggcgcggaggccgagggtccttcgcgggggg

SEQ ID NO: 452902 - DNA, 122 bp, Homo sapiens
aacacaggataaggcctccaagtcagggcattctgggatgttttagtttattggatataacgatgatatttgtattaacgtaagcttaggggcattaagtttgctgactgtatcttgcttac

SEQ ID NO: 452903 - DNA, 122 bp, Homo sapiens
atgggagttaagggaaggaccatgtggtaggattttagacgtgctctgcacttttctgcccgcatgtgtactgtattcatcagttagattcaagttgttggttattgtacaatgttattccc

SEQ ID NO: 452904 - DNA, 122 bp, Homo sapiens
ggctgtcgtccccggccgacagggctggacggctctaggcagattctcgccggcggccggcgcaattctgcctctcagagagagcttagtgccgcgggtttcgcccgttcccgccgccggcg

SEQ ID NO: 452905 - DNA, 122 bp, Homo sapiens
tcagggctccgctcattgagtatattaaccgggattcccgtgagggctgtgagacaaacacgggcagtgctcaaaacgcttcacagccagttcagctccacgttgattgctgagtcgtggaa

SEQ ID NO: 452906 - DNA, 122 bp, Homo sapiens
acgtcattccaagcccgagctaacccatcaggcggccggggtgaggtggaggtgcccaggcggggataatgtcatttggcctggttggaccagccagcgagggctttttaggcccagggcct

SEQ ID NO: 452907 - DNA, 122 bp, Homo sapiens
tgactgactaatccgccgccttcaggagacagaattggccaaggtttcttggttggagggcggggggtgggaggtcaagtaggggccacctcggggaggcctgccctccaggtccttcccct

SEQ ID NO: 452908 - DNA, 122 bp, Homo sapiens
gtgtggagacagcgcgggccgagtccctgggttccggggcaagactgtgggcgtctcccgcggtgactcagagatgctgccctgcctcacaccatctcgcaccatctctgtggaggccgtga

SEQ ID NO: 452909 - DNA, 122 bp, Homo sapiens
cgtggctcctgaccaagctctaccgttcaacccatgggccgtggcgcaggtctgtgtgagcggggacaccccctgtcctggtcgtgcccgtcgcggttatgcattgctggtagacctcgtcc

SEQ ID NO: 452910 - DNA, 122 bp, Homo sapiens
agcctgcgggccagtggagtggccattggccggctgagggcggcctccagccgcatgccccgccccctgacccaggaggagggcggcaggcgcccctccttccccccatcgcgcgcctcagg

SEQ ID NO: 452911 - DNA, 122 bp, Homo sapiens
gccgattggggagggagcggcgcttacgtgtttattggcttaactctcccgtgtccgcggcgtaaagggctgctgcagagggctggaggggggagagcgcggagcgtcctcagagcctcagt

SEQ ID NO: 452912 - DNA, 122 bp, Homo sapiens
ctcggggcagggcagggccggcggcggcgagccggagcccgccccctgcccgggccccgccgagccctcggagcccacccatggggcacctgccccttgcgcctccttgcccggccgcgccc

SEQ ID NO: 452913 - DNA, 122 bp, Homo sapiens
aaactcatgacctcaggtgatctgcccgtcttgcctcccaaagtgctgggattacagccgcgagccactgtgcccggcctgacttacagaatgtaatagagacttcgagaggcagagcgtaa

SEQ ID NO: 452914 - DNA, 122 bp, Homo sapiens
ttacgatttcactaatggcagctcaaagctgctgagctctgccctgacggcatgcgcccccgcttctgtgagagcacgcttcctggcatgggggtcgaatcatgtcgataaaatgggctcgg

SEQ ID NO: 452915 - DNA, 122 bp, Homo sapiens
gagggtacacttgggcacgcacatagtcaccctggactgcccttcttgagagatgatagccgattttcagcagggctttctttaactctcagatctccttgttaagcttctgctttcattgg

SEQ ID NO: 452916 - DNA, 122 bp, Homo sapiens
gtctagagtggggactccactgggggtgattttgccagatagtcacggcagcagaggtgccggggccactgttctccctcatgtctcctttctacggctgagttcagcacacggcactgaaa

SEQ ID NO: 452917 - DNA, 122 bp, Homo sapiens
taggctcttctttctgctcctgtcgccatggccccggcctcggcgctcaagcgaccctctcgctccgcccaggtcagtgaaggatgggatgcaagtgcccgccaagccccccgtttcccacg

SEQ ID NO: 452918 - DNA, 122 bp, Homo sapiens
agagcaagaagccgagcggaaaagttagcgcaggtactgtgatctcgggtctagagcgcccgcgccttcggggccccttcgcagggagcgccctccccactccctggcttcggaacccaccc

SEQ ID NO: 452919 - DNA, 122 bp, Homo sapiens
tgcagtggagcctcctctgcctctggattgttttctcagcctaaggaaggtgggaggtgccgagagttggaggcacagagagcactccaacttgtccgtcagctttgcagctcctctgtggc

SEQ ID NO: 452920 - DNA, 122 bp, Homo sapiens
cagtgcgtctagatctgacagctgctctgcatgagcctggctccaggctgaagcaatagtcggtcaacacaaaatcgttctcccaagttagggaagcagaagccagacagggagactgggta

SEQ ID NO: 452921 - DNA, 122 bp, Homo sapiens
atctctacttactggcatagggggagttggcagctgagccgttgaggaaggtgggggagccgcccaaattggacattgcggcagagccgtatccgttcatgctcgtggtgacggagttatag

SEQ ID NO: 452922 - DNA, 122 bp, Homo sapiens
tgcaacctcctccttcaacccttcgcccccactctttctaagtatgctttagtgagtccccggcctgcagtcaccaggccactattccacaatttacggcaaagagcctgcctcactgtgtg

SEQ ID NO: 452923 - DNA, 122 bp, Homo sapiens
atctgggcgggagccagaagggtggcgtgggacatagcagaggggctcagagatgggaaacggggctgacagccacagaggtgcagcccacaccctcatgaggaggtcagaactagcatgac

SEQ ID NO: 452924 - DNA, 122 bp, Homo sapiens
gggcgggacatccggcccgggtccctcgccgcgcccgccgcccgccgcccgcttcggcgccgcagcccgggagccggccacccctacacgcgccagggctgtcccctgccctcccctcccca

SEQ ID NO: 452925 - DNA, 122 bp, Homo sapiens
ttacactaagatttactgattgagggtacggacacttctccatacacacttgcccaggaacgatctccagttacctgtcctgtctccaagatcttctctctctcatccaatcttgcctatgc

SEQ ID NO: 452926 - DNA, 122 bp, Homo sapiens
gtgtttggaggcactgtttggattctctcctgtgacctggaaaaccatttttcatgccttcgtttcctcatctgtgaaaggaaactatactacactatagtacccacatcatagggctgttt

SEQ ID NO: 452927 - DNA, 122 bp, Homo sapiens
agaaaccagccacaggatcaattctgctttatgaaaaatctattcctgaggaacaactcacgtacttctgaagatatttctgggcctatggcagattagtgggtcagtaccagcacctgagt

SEQ ID NO: 452928 - DNA, 122 bp, Homo sapiens
gttttccagcttctgccctctgcttccctctctctgccttcgtctcattctctcggaatgcggtccagctggcaggaaatatggctgccatggcctacagactcacgtcttcccatctttac

SEQ ID NO: 452929 - DNA, 122 bp, Homo sapiens
agccttcagctggcctggcccctttccttttgcacaggtagtttgagtttcatactaacccggaagtgagtgcctgccaggtaggggaaggtttttaggaagtggtttttggccctttggga

SEQ ID NO: 452930 - DNA, 122 bp, Homo sapiens
tttggtttaaagtcttcaagccgctagatttcagttcactactgtgaccactagagggagcgcagctattagcctgaagagacaagactgcttgcttattgcatcctagctactgcgtggag

SEQ ID NO: 452931 - DNA, 122 bp, Homo sapiens
gcgagagtggagacagggaacctgccaagacttagaggagactgggctaggatcttggaacgggtgatatggaggtcaggggtctcagtgactcaacagagcagggtttagaaggcaggagg

SEQ ID NO: 452932 - DNA, 122 bp, Homo sapiens
tccagctagcccggcgcgagacctggacagcagggtgccccagcccctcgagtccagcagcgtgttgttggcacgggtgcctgcaggcgagggcaccaccatgcccactaggatgcctagga

SEQ ID NO: 452933 - DNA, 122 bp, Homo sapiens
ttacgtcgtaatgaatagatggttcagaaaccctcacagccaagcatggtgtctccagggcgatggcctctctcatgcccggcgctgccctcggctcccccgtgatgttctagcgcactgtg

SEQ ID NO: 452934 - DNA, 122 bp, Homo sapiens
tcaggaccgctccgcctgccggccgcggcgcccagcacccggcattcccataaaccccttcgcccggagcttcagaaaacgaaagacaaagccacccgcccaacccggcggccggggcgcgg

SEQ ID NO: 452935 - DNA, 122 bp, Homo sapiens
gattatagtccccgttttacagatcaggaaatgcaggctccgtgccatcccagggcattccggtagccagtcacggacagagagtcaaacatgagcccgagcccgggagcccatggcagcac

SEQ ID NO: 452936 - DNA, 122 bp, Homo sapiens
cccaatggctgactgttttctcacctgtagccctcagtgtccaaagtccccagacctacccggtcttgacaagttgctcagctgctcctgggtggcctggcatgctgtccaaatggcagtgg

SEQ ID NO: 452937 - DNA, 122 bp, Homo sapiens
acagtcacagctgggtaattttcacaggaatgttgcatagaacgaccgcctcttcggctgcgtggcttcggagcagctttgactacaactcccagactgcatcgcccctgcccccccacttc

SEQ ID NO: 452938 - DNA, 122 bp, Homo sapiens
ttctgaccttgtgatcccctggtcttagcctcccaaagtgctgggattactgcacccagccgaaagcctgttatgttatttagcaacactgcttacataagaatgatccttgatgttagact

SEQ ID NO: 452939 - DNA, 122 bp, Homo sapiens
tcacctcttgccgagcccgtagaggttccgggactccccagcagacagagggggtcagctcgagtggccacgcgtgttctttggattagaatgttccggctcttaaacatgagctgctctga

SEQ ID NO: 452940 - DNA, 122 bp, Homo sapiens
ccacccgcgtcgtcctcacagccctgtggcctccgaggaaggacaccgagccgggaacttcgaaccaaacaccagtgcctgggcccttccaggccccccacgggccgtagaccctgactccc

SEQ ID NO: 452941 - DNA, 122 bp, Homo sapiens
aacctcacagggttgttgtagcaaataagacagcatgggaaggctctgagcactttttaccgtcaatgattctacttccagccaggctcagtggctcttgcctgtaatcccagcactttggg

SEQ ID NO: 452942 - DNA, 122 bp, Homo sapiens
tcgcctgctttttacattaaattccccataacttttacaactatgggaaaatttctgaaacgtgcacagattccaagtgttttctgagaactttatgcttattgtagagtggttacagacac

SEQ ID NO: 452943 - DNA, 122 bp, Homo sapiens
ccggtgaacgtgctggtgcccagccggccgccgcgcaacccctacgacctgcacccggtgcgggagggtcattgctacaagctggttagcatcatctccaagacggtggtgctggggctggc

SEQ ID NO: 452944 - DNA, 122 bp, Homo sapiens
aggttgttgaacttttgggccctacccttgtaggtcaggagcctgcttctggagcctggtcgccaccttccagaatcaggatttcctcctgaccacacacagttagctacttcctttctctc

SEQ ID NO: 452945 - DNA, 122 bp, Homo sapiens
agtagtcaccatgctaaaattaaactagcagtgtctcaatacaaagcacaacaattaatccgcaggcaaagtggatggtcacgttcaagattatagcgcgcttaagttacatcacaaggagt

SEQ ID NO: 452946 - DNA, 122 bp, Homo sapiens
gttacaggcgtgagccacggcccccaactaaaagagtaatttctaattcttctctttcctcggtccctctattcaaaactattcatgtcccagatccaaaggattctctaaagcagtgttaa

SEQ ID NO: 452947 - DNA, 122 bp, Homo sapiens
tctgatgtcagtggaggtggagcctgcggcggagggacccgggattgggaggcgaggcaccgctccaaggctggggaaggggcacgggtggaggccatctccctgcttctggtcagagatct

SEQ ID NO: 452948 - DNA, 122 bp, Homo sapiens
gaagagacagggttgtgacgctggtgatgtttctggaaagttgttcctggtcttggtgatcggttggcaagagcttggctagagagactgatgtagatggcagcttcttaggagttgtttgt

SEQ ID NO: 452949 - DNA, 122 bp, Homo sapiens
cccgggccccgcggccgggtctgtgctcattgtggccacggacgatggtcgaggggcttccggaaactatttcctgcctctgctctccccccacccccgggtaccctgcttgctcccttgcg

SEQ ID NO: 452950 - DNA, 122 bp, Homo sapiens
gaatataataccagtcagcttagattagtgtcagataataataatagttaacaatgattacgtgccaaggaatatgcgaagtgttttacaggctttatctcatttattcctccagcaaccca

SEQ ID NO: 452951 - DNA, 122 bp, Homo sapiens
gcccggcgcggtccccaaagggacccctcccccacccggagcgagtggctggggccatcccgtcctaggaggccccaggaagcccccacgcccagccttgtgaagcccccagcagcctctga

SEQ ID NO: 452952 - DNA, 122 bp, Homo sapiens
cacgccgcgtgccctcgcgaggactctggcccagtccctccttggtggagagcctgacaccgctgctctgggacttcccggctgcgccctcccccagcgccaggaaagcaagctgcgtaaag

SEQ ID NO: 452953 - DNA, 122 bp, Homo sapiens
tgggcgtaggaccctccgagccaggtgggatataatctcgtggtgcgccgtttttcaagccggtctgaaaagcgcaatattcgggtgggagtgacccgattttccaggtgcgtccatcatcc

SEQ ID NO: 452954 - DNA, 122 bp, Homo sapiens
gctccctctccccgcctggtgcaattggtccgtttgtttgaatatgaatacacttgttttcggctccgccggtgggtcccggctcctctccccggcgcagggcccccgagcccgggctctgg

SEQ ID NO: 452955 - DNA, 122 bp, Homo sapiens
ctgctcctgctccaggtgctgctggaacctgcgggacggtcaggactggctctcgggggccgggacgggcggtcccaggacccacccaccgcaggggcacgggccgaccacaggcctgactc

SEQ ID NO: 452956 - DNA, 122 bp, Homo sapiens
gagccccagcgggtgccactgcccgccggctgagcccacgtcccgataggaagcctggggcgctcgcaggaagggtcacggatgctgcccggctccccaccagcctgcccctcaggacatct

SEQ ID NO: 452957 - DNA, 122 bp, Homo sapiens
tccccagctcccgctcctgggaggtggtgaggtgcgaggcctccacgcgggaggacaactcgtgcaggctgctggagaacttctccatctggtggatgatgctattcagggacctggaagaa

SEQ ID NO: 452958 - DNA, 122 bp, Homo sapiens
tattttctccaataaaaagcctgatgaacgccgtcatcgggttgggaaaggttggcccttcggctgaggactagagggacccttgactttgctggcggagaagcgctttcctcagagacggg

SEQ ID NO: 452959 - DNA, 122 bp, Homo sapiens
cagacggtgcgcagccctgaggcttctgagggcagagggtgcgcttccttgccctcggggcggggaagccgtgaacgccgaggccattgtaaggctgggtggtgcggagcgcgggaaggggg

SEQ ID NO: 452960 - DNA, 122 bp, Homo sapiens
cttcctccactgaaccaaggccagcggcccagctcctgtcagatcgtcgccaccccccaccgcaggcggtcctgccccactccgagttctgcccagagtccctctgggtgcgggcgggagtg

SEQ ID NO: 452961 - DNA, 122 bp, Homo sapiens
gaagctaagggatctgggcgaggtctcagccgaagggcgctggcaagggaagtgcttggccggggagggtgcccggggggcggtcaaggggcaggcccggggctctgtccctcccggtcctg

SEQ ID NO: 452962 - DNA, 122 bp, Homo sapiens
gccctgccccaggactagccgacccctcgcgcagtccggggagccactccccccaactcacgccccgctactccagccgcagctcggctcctcgccgcgccgcccactcgccccgcttggtc

SEQ ID NO: 452963 - DNA, 122 bp, Homo sapiens
tctggcctcgccccgtcaggtctgttctccacggcactgcttccggtacagcatggaagccgctgttattttgaaaacgatggtggccgagagggcacccctgatagaagactgccaatcaa

SEQ ID NO: 452964 - DNA, 122 bp, Homo sapiens
ggtactcagaggacatctcctgcacagaaggtcagagcagggctgaggggcctgccctcccggcgtggccaccccagaaccggctggggatggggagcagtgggcaggaggaccctgagagg

SEQ ID NO: 452965 - DNA, 122 bp, Homo sapiens
tcaatcgcgaagtgaaagagagtgaaaggggagctgagctgtcatacaacttaatcctttcgcaagtgatagacatcagatccagttctcccgtgcggcaaggtaaagcttgcactatcctt

SEQ ID NO: 452966 - DNA, 122 bp, Homo sapiens
ccccaatacaagatggcggcgagccgggagcctaggagcagccagcaaagttacccgggccgcgcaggcgcagaataatcttgcactctcaacctccgggccgcccggctacaccttaatcc

SEQ ID NO: 452967 - DNA, 122 bp, Homo sapiens
ccacgtgtcatgaaggacctgtgatgtcacaaggaaagccgcccatgcaactgctgtccccgcccactccaggagaggggcggggctggctttcactttaaaaactttaaacctttatcacc

SEQ ID NO: 452968 - DNA, 122 bp, Homo sapiens
agccgagaatctatcaaatccgcccaattccatgccagggatagactcaggtccttgcaccgaaggcgagcccctgacactagctcgcgttcttcacacacggtcaccccgcagacccagag

SEQ ID NO: 452969 - DNA, 122 bp, Homo sapiens
ctgagggacaggaccctgcttatggcaccaagaagtcccacttcctcctgctacaccgcacgtcctaccccggcccccacagggcctcccactgaccgtggctcctcatgaaatgcttgatt

SEQ ID NO: 452970 - DNA, 122 bp, Homo sapiens
gggtccgtgcgccccccatatcgccctggcagacggcaaggggacactgccggtcagccccgctgggccagcagggctcccagggcccaccgctgtgagactcggtaccttgcagacacggg

SEQ ID NO: 452971 - DNA, 122 bp, Homo sapiens
aatcctaagatagtaaattgtgtatgtgagtgtgtgtgtgtgtgtgtgtgtgcgcgcgcgcgcgcgttcctatgtgtttaagccactaaagccatgtaatttgttatggcagcgaattaaaa

SEQ ID NO: 452972 - DNA, 122 bp, Homo sapiens
gtgtgtggggatgtggggtgggtgccaaacactggagaaccgaatcggggtgggggactgcgaccagagcaggtcaggcatccaggagcacctcttaatcttcccctctctaatggtgttcc

SEQ ID NO: 452973 - DNA, 122 bp, Homo sapiens
tatctgtatgtctcacttaaccctggggtggtcttgtgaagtagctggagttagctctgccgtaaatggtagttgaggcttactaagattgtgtagcttggctaaactcccacagccagaag

SEQ ID NO: 452974 - DNA, 122 bp, Homo sapiens
aggaaaaagctttctaggctgggagaacacccctgtggaggggtgtaacttggcgcattacgaggaactagagaaacgtgcacttttcctaagacatcaggaaaggagcgaggagagactta

SEQ ID NO: 452975 - DNA, 122 bp, Homo sapiens
ttttttttttttttgtttgagatggagtctcactctgtcgcccaggatggagtgcagtggcgcaatctctgctcactgcaagctccgcctgctgggttcacgcctttctcctgcctcagcct

SEQ ID NO: 452976 - DNA, 122 bp, Homo sapiens
gtctcctgtgcccgtatggccactgtggggggggggggggcgggcagcaggccacagggtcggcatttgcaaaatagtgaggcactccctggcctctgcccactgggccactgaggcagggc

SEQ ID NO: 452977 - DNA, 122 bp, Homo sapiens
gtgcccggaactcctcccccgtgcccgggaccccgcccgccgcgcgtcacaaagcgccgccgcctcaccctcgtaggacgagcgccactcggccttgtgcttcttgtgcttcttgcccatgg

SEQ ID NO: 452978 - DNA, 122 bp, Homo sapiens
gggcctgtctttaagatcctctacagcagcaggtctgagactcctgtccacccacgcccccggggatcttgttaaaatgcacattctgattcagtgggtcggggtgaagcaggaaagtctgt

SEQ ID NO: 452979 - DNA, 122 bp, Homo sapiens
cgtttatttttcactgcctctcagaagtggtcacaacagcgaggcctgttggtcccatcacgccatcagtttaatcattgcttcttacttgtagagtgtaaacatctatatttcacacgtac

SEQ ID NO: 452980 - DNA, 122 bp, Homo sapiens
ccccgggcctggctcggcgctgcctgcgcggggtcacggacaagagccaggcggccccggcggtcactacgccgctccaggagagccttgcccagctcccccggcgcctccgccggcgcccc

SEQ ID NO: 452981 - DNA, 122 bp, Homo sapiens
agagagtgcgccgctggttttggtggtgtccagggtaatcagctgccagggtggcattgccggggtggcagagggcctggtgtgctgttggtgagggtggctaacagtgacggtggcaagtg

SEQ ID NO: 452982 - DNA, 122 bp, Homo sapiens
caatggggtactcaggcgggctccgccccttttccatctttgcctactgttcgtatttatcgtcagtgcccaatagtttgctcctgaccacgtgatcatgtcttatactccaggtgttttgt

SEQ ID NO: 452983 - DNA, 122 bp, Homo sapiens
tggctttctttgtggaaacagtggctcagcatcagcaccggcgtgggggtggcccggctccgggcggcgggtcctggccggtctgggaggctcctgggcccgcaggcctgcctgtgtggaaa

SEQ ID NO: 452984 - DNA, 122 bp, Homo sapiens
agcctggccacagagcacgagattaggatgcagcaacacactgtgtgtgagatcacgtcccgaaccttctgactcatctgcacaggaaacccccccagtctcccctccagtcagaagggacc

SEQ ID NO: 452985 - DNA, 122 bp, Homo sapiens
agagaaagcagcctcgggtctccccgagatcggtggggttgctctggcagcgccccacctcgtcccggagcccacggaccaccccccccggacccccggaataagaaacggaggctggaagg

SEQ ID NO: 452986 - DNA, 122 bp, Homo sapiens
tccgcgccgaaaaacaggcaggaaccacataacccagaaggctgtgcgcaagcgtctgcgcgcgtattggggcaatgtgagctctgggggctggacttccggcgttgggactgtcacttggc

SEQ ID NO: 452987 - DNA, 122 bp, Homo sapiens
gtgcggccgcgggaagtggacattctttgtcaggaccctagcggaggtcgcgctgggtgtcgcctgtgagggggatcctcggtttctgcgcggtctcttgctttttttaggatcttgcgggc

SEQ ID NO: 452988 - DNA, 122 bp, Homo sapiens
gtgcaggaaacccatcacatgtttattacagctatgggggcgtttgcctgaaatggtggacgggaccattttccccgtgggcacttggctgctccagccaagagggggaggcccttgttttc

SEQ ID NO: 452989 - DNA, 122 bp, Homo sapiens
gatcgactttgcagggtatctgtggggattcttgatatacagaccatatgaaagaccttccgtaagagagggatgcttttctgcctagattttatagcctctatccttgtattaaaattgat

SEQ ID NO: 452990 - DNA, 122 bp, Homo sapiens
cccctccccgcccggcaaactgcccggagccaaggccccgcccccagagagaacctgccccgcctccctggcccgggccccgcctccttggcaagcgagtggcgctttcaccttagcaacca

SEQ ID NO: 452991 - DNA, 122 bp, Homo sapiens
agacgccgagctgctgcccccgtgtggcctggtgcgggggctcctcctgctcactgggggcgcgtcccggtaaaccagaacctcagcccatcaactcactcgtggggttactgaggaggaga

SEQ ID NO: 452992 - DNA, 122 bp, Homo sapiens
gtataccgctccacaccctttcgtgcccgcgcgctgaaggttctggggttcgtatccgcgcgcttgcgctgcaagactcggcaagtttgttccgactgtaactccggggatgaggaacgggg

SEQ ID NO: 452993 - DNA, 122 bp, Homo sapiens
cacctatagtcctagctactcaggtggctgagtggggaggatcacccaagcctgggaggtcgaggctacaataagctgtaatcacaccactgcactccatcctgggagacagagtgagaccc

SEQ ID NO: 452994 - DNA, 122 bp, Homo sapiens
aggcctctgtgggtgtgtaacagtcaaccagcagctccttgaccctggcagcccaggcatcgtcagtctccatgtccaggagctcatccacatcaatctccagttctgggatctactcttcc

SEQ ID NO: 452995 - DNA, 122 bp, Homo sapiens
aaaagcaagccatcttggggcaggaaagcagtgaagggactgggcaggcaggacagaaggcgctggaagctcagccatctcacccccgccttggcctgcactcacctgaagaagcaggacag

SEQ ID NO: 452996 - DNA, 122 bp, Homo sapiens
gtctggaaaactgtagcgtgttcttaagcgactagaatgccctctttagctgggggtgttcggcctccttttttggaggtgggttgtgatgtcaaaacactgggttgtggtataggaagtgg

SEQ ID NO: 452997 - DNA, 122 bp, Homo sapiens
tacttgacctttcagagcagccagatgaaaggctgtgcagggtgtatggctcttaaatagcgtgttctctgcttgttgggaagacatgcactcagctgctgtgtcctctcatggagctgctg

SEQ ID NO: 452998 - DNA, 122 bp, Homo sapiens
ggggaaactgacatcggtctaaaaatgtgtgtgagcaagaaagcagcccaggccatttcacgaggctgaatactcaattacaaaatgttgccagtgccaagaagggtgcatgtggagctcaa

SEQ ID NO: 452999 - DNA, 122 bp, Homo sapiens
aggggtgtcgtctctccgggaaggcgtggagggggccccaaggaccctcagggctcggctcggggctggaatctgctgttagggaagtaccccaagcacctcggagcctttgcaacgccccc

SEQ ID NO: 453000 - DNA, 122 bp, Homo sapiens
gaagctctccattcacagtacctcagtctttgctttttcttctaaacagactcaccctttcgcatagtttttgctttaacaaagcaggattgtcaccaaggtccacattgacatgagagtct

SEQ ID NO: 453001 - DNA, 122 bp, Homo sapiens
gagagggaaggacgactctcagggtagaagtccacatttcccaacaggcgctcgggggtacgagattcgttccccgtgggaagagtggtcaagggcttcccagtagtcgtcaacacttccct

SEQ ID NO: 453002 - DNA, 122 bp, Homo sapiens
cgaggggcatcctggtttttatgtacgccactgagaggccaccagacacattttctcaaccgcagatcccccttccccacaccctgctccttgcgtgtcagcctgagagcccttgctttgag

SEQ ID NO: 453003 - DNA, 122 bp, Homo sapiens
gggaagagtgacattagccttatttaatagcttcaatataaccatccccgcacaccacggcgttaacaggcacggcccccccgccgagtctcccaggccaccactcaggaagagtgctgggt

SEQ ID NO: 453004 - DNA, 122 bp, Homo sapiens
caacaacaacaacaaaaaacagtaaacactcaggttatctcaacagggacgcgggctgagcggtagcagagctctcccctccagtgctcacctccagaatatcgcagagcacacgtttccag

SEQ ID NO: 453005 - DNA, 122 bp, Homo sapiens
ttttttgcttgtttgttaggagaaggtgggaggagggctgttggtgaccttcttctcggacgatttatccatatttcaggaagaaaggcaattagaagtagaagacagagggagaagagatc

SEQ ID NO: 453006 - DNA, 122 bp, Homo sapiens
agagctcccatgagacagagtcgaagggggcctccttggacccgcagagcagtttcagcgcgcggtgatggcagggaggccaattcaccaggttggaaaacaagcgggagggagaaagtggc

SEQ ID NO: 453007 - DNA, 122 bp, Homo sapiens
cgttttgtccccacgccacgccggggacgagtctgtggcacagactcgtccccggccccgcgggcttaagttgtctgggggctgtcgctttgagtacagatcatatagttatgaatacattt

SEQ ID NO: 453008 - DNA, 122 bp, Homo sapiens
agctcccaaacaagaattttaacttgaattttcaggtttggttgtctaccctgctcatgccgagttcagactgagggtctgtgataaattaaagtcactgaaattattaaattaggaacctg

SEQ ID NO: 453009 - DNA, 122 bp, Homo sapiens
ttaaggtctaaacaagtatgtcctgtgaagaagttgggagcggggcacgcacaggggtcccgggtcgcccccttccccactgcacgcaggcccagccaccgggcgcgggtctggggcatctg

SEQ ID NO: 453010 - DNA, 122 bp, Homo sapiens
catcccgggactcccaagccacagtacaggcctgtaatggcggcaccagcgactcccagtcggcgtgctccctcgtgccgcccgtggcctcctctacttgagattttaagcagcctagcgct

SEQ ID NO: 453011 - DNA, 122 bp, Homo sapiens
ttgtgatccaccctcctcggcctcccaaagtgctgagattaccgccatgagccaccatgccgggccacaggattcttacttaactcaggccagggtggtcacacatcacctaaggagtgatg

SEQ ID NO: 453012 - DNA, 122 bp, Homo sapiens
ataattgtcaatagcagtaagaattggaatagcgccaggtatataaagttgatgctttgccgttggttggttgctaggagcacagtgaaaagtataaagctttgagaaaagaatgtctaatg

SEQ ID NO: 453013 - DNA, 122 bp, Homo sapiens
gtgggggtcaaagaagagagctaaggctatgggaggcctctccattccatggccacaaaccgtagggcaatcttctctctcacctctgccacgcggatccacttctccaggagccgggccct

SEQ ID NO: 453014 - DNA, 122 bp, Homo sapiens
cccacggagccacggtgggtgcggcctggggacttggcatggcaagctggcccatagggtcgtccctagcacctaccagagcgcgtacgagggagccgaggctgcagcgccgggtgggcagc

SEQ ID NO: 453015 - DNA, 122 bp, Homo sapiens
ccccgcaagatggcggcagccgggcctcgggctgggtgggggcggaacttggcggaagtgcgcgctactcccctcgcagatgcaagtggggaggctgtttgtcccacagcgggcagggggaa

SEQ ID NO: 453016 - DNA, 122 bp, Homo sapiens
gaagtgcaggagaaggaaagcaaaggtcggtatgagcagagttgccaccccagcggggcgcgcagcccgggaacccggcagagagggagtgccggggtgcccagcgccgagccggagcccga

SEQ ID NO: 453017 - DNA, 122 bp, Homo sapiens
tttgccgacggccctgacgaggtgcaccgggccacggtggccaagctagagctgaagcaccgcatttagagccttggggctgcagtggctcaatgtcctggctggtccagctgtgcccagat

SEQ ID NO: 453018 - DNA, 122 bp, Homo sapiens
ccgcccacgtggtgctccttgatagggctaaaggctttcaatttgtccaatcagcggccgcgccccaacgttgccccgcctttgtctccagcggactggaaagaacccaccattgtgaagca

SEQ ID NO: 453019 - DNA, 122 bp, Homo sapiens
cagtgtcccttgccctcctccaaggcttccagccccatcgcaacctgtcagttttccaggcgctcaggaaagcatgtcaagcactcaagcactctgtgacaattccacccccggcccagtct

SEQ ID NO: 453020 - DNA, 122 bp, Homo sapiens
cccttctgccagatttcacagctcttaactttattctctgtaggtggcaaatatgttcctcgtgccatcctggtggatctagaacctgggaccatggactctgttcgctcaggtccttttgg

SEQ ID NO: 453021 - DNA, 122 bp, Homo sapiens
atgatgaaccaacccccttcccatttcacagatgggaatgaggaagagcaaggtaaaaaacgaacaaacaaaaaaacagggtccaccctcatggggattacagtctactaaagaggatatag

SEQ ID NO: 453022 - DNA, 122 bp, Homo sapiens
actcgcgccttcccttcttctgggcagcgaacacgtttctatcgcgtgagctacctcttccggggttcctgggtgacaagttccggatcaagaatcacaaagcgagcagtcattcttcctct

SEQ ID NO: 453023 - DNA, 122 bp, Homo sapiens
ctctcagcttgcggcccgaaaggcgcgccagttcctttgttctcattggcccgcaccaagcgctgcctgcgcagagcctgctaggagttgtagttcccgcggcctctcccggcgcgccttgt

SEQ ID NO: 453024 - DNA, 122 bp, Homo sapiens
agagcccgacccgcggccgggcggttccgccccagtcccacactgccccgcgcggcgtcccggccctcttggcccgcctggtcccaccccggagctcagagcaacttccggtgcgcttagcg

SEQ ID NO: 453025 - DNA, 122 bp, Homo sapiens
ggtttcgagtgaccgccagaagagggagaggcgaacaaggacttgttacgcatgggcgggcgtggcagcttggttgccaggcaatgcagaggcccaacacaggggatggttgtgggtactga

SEQ ID NO: 453026 - DNA, 122 bp, Homo sapiens
gcagggagtgctttttagcaagataatcagtgtgaacgcacaacctggcaacgatcgctgcgacataaggaagttcacaaagattctattaagagaccgattgcccagccataacctgcttt

SEQ ID NO: 453027 - DNA, 122 bp, Homo sapiens
gcaggaggaaagggggcacaccaggcaacccaggacgaagaaagagacagtcagcagctgcgtcatctgggagggtcagggaggcatatgggtgatctgtcagcactgccattgcctagagg

SEQ ID NO: 453028 - DNA, 122 bp, Homo sapiens
cggcctctgccacggtggttcgggaggcggcgcgcgggccggggtggaggtgcacggagccgcgggcggggactgctggccaccaccgttctgactcccgccgtcggggcgggagctcgctc

SEQ ID NO: 453029 - DNA, 122 bp, Homo sapiens
taccagattggatgggcaagtcttccagaatggtatccccattgctgagatccaggcactcgggagggtatccgacgaggattcgctgaccgccgggggcgatcccggtgatggcggcaatt

SEQ ID NO: 453030 - DNA, 122 bp, Homo sapiens
ctgagggacctggctgctcttgcaccaaagcttattactgatctggaagagtccatattccgtgctttcattgttttcaactatggcttgtgtgtcataaccactggtgtgaaacatggtac

SEQ ID NO: 453031 - DNA, 122 bp, Homo sapiens
gccactgcactccagcctgggcaacagagcgagaccctttttcacaaaaataaaacaaaacgaaaaaagatcaggcctccgacttcctccaaattcctcattgtccagaggagaaaatagcc

SEQ ID NO: 453032 - DNA, 122 bp, Homo sapiens
ctgctgactccgtgcgtctgtcttcgtggctgtctctcggggtctctctccggcagcattcgttcttcagggctgcactccagaggctcccggaggagacccccactcacccctcccaaagt

SEQ ID NO: 453033 - DNA, 122 bp, Homo sapiens
taccattttaagatcctgtagctccacgtggatattccatgatgaaggcatcaccgaccacggcctccccttccccgactccttccccgactcctccagcctttcccgactcccccagcctt

SEQ ID NO: 453034 - DNA, 122 bp, Homo sapiens
catctgttgaagcacattcggacacaaaagatcaggagtttctaaacgtgaacatgtttgcgtttcctcaataggtctacagctttggcttctcaaagggatgtgcaatccaaaacaaaaac

SEQ ID NO: 453035 - DNA, 122 bp, Homo sapiens
tcacagcccgagcggccgggcttcacggtatgcacaggagtgcgcaggtggccccggaggcgctcgctgccaagactccccacccccacccagcccagccaggcccgcccacccgctatctg

SEQ ID NO: 453036 - DNA, 122 bp, Homo sapiens
ctcagtttttctccaggaggcctctttccacattgtatctaattttccagttcctctttacgtggcttctgtctccagcaggataacctgcttccttacaatatggcatctgggtttcaaga

SEQ ID NO: 453037 - DNA, 122 bp, Homo sapiens
aaaagtagcctgcaatccctccccactcccaaacgccccccaacttggactctctcccagcgcccctggcaaggtttgtgacctggcccctgagtcaggatttttattatacccctggttgt

SEQ ID NO: 453038 - DNA, 122 bp, Homo sapiens
agaggccgcacctccacctccagctttggcgcaacacagagcaccgctttattagaaaaacgttcacagctgttttctcggtgctttttacctggtgtgcgaggggagacggccgcttgccc

SEQ ID NO: 453039 - DNA, 122 bp, Homo sapiens
gtctttgaggaaatgaataatttctaacaatcagatagagaatgcctaataatggcatatcgtgaaactaaatgtttccaatgccttatatcttaaaaaataaatttacttttatcttttaa

SEQ ID NO: 453040 - DNA, 122 bp, Homo sapiens
ggtggtgttgcaggtcagccctgggactcatgggctttgggccagggacagcccgcatcccgctgggggtcacccaagtgttgtgaagggtggcctcctgagttgggaaggcccgctattga

SEQ ID NO: 453041 - DNA, 122 bp, Homo sapiens
aggggcgtggccctggtatgtggggcgtaacagggcacgagggggcgtagcttcgatggccggacgtgcaggctgcggatccccgtaggcgagcgagcggctaggttcgtgatctggagaga

SEQ ID NO: 453042 - DNA, 122 bp, Homo sapiens
ctttgttttgcctccttgcctggtgctttcagcgagcagcgctgacgtcatctcaggaaccgtgctgcgtctgagggaagaacctgcaataactttaaataactttaaacctgcaaatgctt

SEQ ID NO: 453043 - DNA, 122 bp, Homo sapiens
gcctccagaagggttttgaaagcaggcttcctagaactggagctagcatgcatctgtgttcgtggcagtgtggtctacagggcaaaccaaggcgtggaatcaggaagccagagctctatctt

SEQ ID NO: 453044 - DNA, 122 bp, Homo sapiens
ttgacgggccactgttgtcacagcagccgcactgccccaaaggcagcagtgatgtttgagcgccgactccccgacggcacttggtcctcacaaccaccccatggagttcatgctaagatcct

SEQ ID NO: 453045 - DNA, 122 bp, Homo sapiens
cgggcggacccaagaccgcggccacgcccagcaggacgcggactgagggagccggggctgcgccgccactctcgtgacgccaccatgccggccagtgacaaacacctccctcccgccgcccc

SEQ ID NO: 453046 - DNA, 122 bp, Homo sapiens
ggcccaggtacggccccgaccccgcccaggcggtgccggcgctcacagtgtcctcggtggcgcatgaagctgtctcgccacatgaacttcttggcgcagactccgcactcgtagggcttgag

SEQ ID NO: 453047 - DNA, 122 bp, Homo sapiens
aatcagagccccaaacacactgagtgtgaggcagagaacaaggcctgagaggaaaagtcacggttcccaaggctgctgcaggggtcaaaggggacccctgatcagtattctagggactgtct

SEQ ID NO: 453048 - DNA, 122 bp, Homo sapiens
ctacccttgtgggatgctgtctctttaactctgtgccacgttgtatcccgtgagttcttgcgtttttccgccccgctgtatcccatggttccctgtgccttccggctacgactgctcacagt

SEQ ID NO: 453049 - DNA, 122 bp, Homo sapiens
tttccgctgcacccctacctacccaatttttatctcgctacaatcaggggttttctcaaccggggaaaaggtggtagtggcggtgggagggtcaggatccctcgaagtggaggccggggccg

SEQ ID NO: 453050 - DNA, 122 bp, Homo sapiens
tagccataataatggctatctcttgcttttttgataatagccatcctaacaggtatgaggcgatattgcattatgattttggtttcctgatgattaatgatgttgaggccctagaaaaagta

SEQ ID NO: 453051 - DNA, 122 bp, Homo sapiens
agtcacaggtgtgtgcacactgggcgccagggccccttgctctgtgccgggcacagtcgtcgtacaaactgccattgagtgccagtgccaagaggttgggcccaggagcctcacggcctctg

SEQ ID NO: 453052 - DNA, 122 bp, Homo sapiens
agcgcccaccgatccggaggctgcgggcagccgttatcccgtggtttaataaagctgccgcgcgctcaccaagtcctcttccgcgtctgcttccgcgtcgggcccgggcggggcggggcggg

SEQ ID NO: 453053 - DNA, 122 bp, Homo sapiens
gagagtgaatgagccgcgcgggcccgggacccttggggctcttcactctccaggccgtcccgtgggcgcgctagccttttcaagtgatagtaatcggagacttttccgttacatgaggctca

SEQ ID NO: 453054 - DNA, 122 bp, Homo sapiens
tgaataattggacagatccctgtggtctcttcagtaataacacaagtgactgcttattgtcgccttcttcctccatgcctggcttcctgtggtcactctgcaaagggctctgtagttgcaag

SEQ ID NO: 453055 - DNA, 122 bp, Homo sapiens
gtgggggccttactaccccagggctcggtccttttgccggaagaaagggaggggtctgtccgtctgtgggcgaggcctggagccacaaacccaatcactggactgaatcaccccgcggagaa

SEQ ID NO: 453056 - DNA, 122 bp, Homo sapiens
tggagagggcgtcagcccagctgtgccctgtgtctccaagtccatgtaaaaaaataaccacggccgtttcccgctcagctccagacacggtggcagcatcgttgagcaggggcacagacatg

SEQ ID NO: 453057 - DNA, 122 bp, Homo sapiens
ggggaggcacccaattattctagaaggttctgagatctcccagggatttccgagaggctacgaggtgtaactggcaaatcaatgacttaagagtagctttctcccagcctccccgctggctc

SEQ ID NO: 453058 - DNA, 122 bp, Homo sapiens
aggtaaactaaatggacaaatttcaaaatgcccatttggagctgagtctctttctaggaccggcctctgtgtggctaatggatgattctgactgttgaagataactattaataacttcaaag

SEQ ID NO: 453059 - DNA, 122 bp, Homo sapiens
caacatggcgaaaccctgtctctactaaaagtacaaaaattagccgggcgtggtggtgtgcgcttcccagctacttgtgaggctggggcatgagaatcacttgaatgctggaggcagaggtt

SEQ ID NO: 453060 - DNA, 122 bp, Homo sapiens
ttctaaaggaggggacagcacgtgacagaacgagtcccacagtcagtgaggatgggcacacgctgcaggtggaggcccaagctcctagtccatgtagctgctgcatctctcagcaggacagg

SEQ ID NO: 453061 - DNA, 122 bp, Homo sapiens
gccgctggaagggcaacttgcggattagcagctcagtggacttctggtagcggcggatctcgcgaagcgccaccgtgccgggccggtagcggtgcggcttcttcacgccgccagtggcaggt

SEQ ID NO: 453062 - DNA, 122 bp, Homo sapiens
caaggaatgggccatagccttgtgttaagtccttgtatttacacataggccattcagaaacgggccctaagggcctacataaggaaagaacttattaacatcctaagaagcagtaacagtta

SEQ ID NO: 453063 - DNA, 122 bp, Homo sapiens
gggtgtaaggggcagctggaccactccagctgggactgctaggaaggttgcgggtccacccggccgagccgaacgagggaaatggtcctcacccggccactcgccggttgaaaaggggccgc

SEQ ID NO: 453064 - DNA, 122 bp, Homo sapiens
agcactggcccgcggtcaccctcagcctgccccgtttctcttcctctctccccagtgccccgggttgtggcagtttccccacagatgcgcctcgtggaggacaacccctcttcactttccct

SEQ ID NO: 453065 - DNA, 122 bp, Homo sapiens
cgtggggctgaggccggcctcaggcgccataatctgtcgagtcacggggtttgggtgggtcgtgactgtcgccggggcccggcactagtcccactagcagtgcttcggcttcatcctgctcc

SEQ ID NO: 453066 - DNA, 122 bp, Homo sapiens
ggcggggattggagggcgggagctgtgctgacttaggattggcaaaatcgctatcagccacgcctctaaaacccggaagtaacctccccggtagtcccacgtgtagcggagaaacagtagtt

SEQ ID NO: 453067 - DNA, 122 bp, Homo sapiens
ggggcactggagcacaagagtgacatgacctggtgtgtgtcttaaaagaaacactcagaccgggtgcggtggctcacgcctgtaatcccagcactttggtaggccgaggcaggcagatcacc

SEQ ID NO: 453068 - DNA, 122 bp, Homo sapiens
aaataaaataagctggttttctgatatggttgtatttgtgtgtttatacagtgaatttttcgcccaagatctcaaggctggcttaatttggaaggaaaacatggggctctgctgccatctag

SEQ ID NO: 453069 - DNA, 122 bp, Homo sapiens
gaatagctgaatcctggggcacgtagtgtagacccaccaacccccacaccccagacatcccggccttgggtagaatggtgggaatgggctctcccaagggtattataaaaagctaaaaccgt

SEQ ID NO: 453070 - DNA, 122 bp, Homo sapiens
tttgagtgtccatcttgctgacatactcagactcctgcaacaaaacatctcatagaaacacgtttccttttatatggaaaatagcttactcatgactattattctcggctttcatcttcagc

SEQ ID NO: 453071 - DNA, 122 bp, Homo sapiens
ggaggggccccgcttgcgcagggggttgtcagaagactcgcacgcggcaggaggcctggccgtgggtgcagagttcccagtaggacgcccacgaaaaaaacctaactcccattatgttctgt

SEQ ID NO: 453072 - DNA, 122 bp, Homo sapiens
gtcatgtctgtaactttccatcctggcttatgggttttaattgaactgccaagttcaggacggagctcatttgtaaatacagcagttaatgccattccagtctctgaaggaaatactccttg

SEQ ID NO: 453073 - DNA, 122 bp, Homo sapiens
gcagctgccggcaaggttctcgccttggccggctctgaggagccatgcagggctctggagcggccttggaggtccggacggaggcggagctctggctgcttctgatcgctgtcccggcagat

SEQ ID NO: 453074 - DNA, 122 bp, Homo sapiens
cgcagcgcgtggccgaggcgggcggcggccagctgggctccacagcccagggtgagtgcgcgcttgcaagtggcaagcttctttgtcattgttgcatttttcagtttgctcacaagtgcaca

SEQ ID NO: 453075 - DNA, 122 bp, Homo sapiens
gcccatgtcatagcccaggttttctagaatactgagcctgaagcaagacttaagtgcaaacgcttcactctgaggtgcaatcccagggcactgagagtcagggaaaagacataggaagaacc

SEQ ID NO: 453076 - DNA, 122 bp, Homo sapiens
ccctcatcttggctcccactctgtactgggaagagtctgcacgctgtgtggcattgtgtacgttgggtcaatttctggaaacggctcactctactggccaggcatcactagaatttccccca

SEQ ID NO: 453077 - DNA, 122 bp, Homo sapiens
tgtctttttggttgaggtgctgtgagaggacattcgccaagctattcagcaccccaaattcgcaaggggccatcttattctcctctggatcccagcaggtcagcagatccttgttgaaggag

SEQ ID NO: 453078 - DNA, 122 bp, Homo sapiens
acattcttgtttttcccgagtcccagtgtctagagccactggctggctccctggctcctccgaggaccccgaggtgaccagcggctctgttagttccatcgtgagcccacaagctgtgatcg

SEQ ID NO: 453079 - DNA, 122 bp, Homo sapiens
aataaaatgaaatgaaataaaataaaataaaatgttagctttttgaaggcctgtcctgctcgctgcagaacccactatagagccaagcagggtcacctaggtagcatttgctgagtgaatga

SEQ ID NO: 453080 - DNA, 122 bp, Homo sapiens
cagctttggaagaggtgtcctgctgctgttaccagccatgtgggccccataggggcactgcgcctgctgccctttcctggcagggctggtggagtcttccctcaaagcatgccttacccagc

SEQ ID NO: 453081 - DNA, 122 bp, Homo sapiens
atccacacaaaaatgtgatgcctatatagtgaccagaaacaataactatgaaagtggagtcggctctctatcttggaaacaattttaatctgaaagcatcagtcagaggacccacataaaaa

SEQ ID NO: 453082 - DNA, 122 bp, Homo sapiens
cagtgggcccagtgcaaactttgcttgtggctctgaagcaagagcagcagccaggtcaggcggtgactatggtgacctctccccaacagattcagtgagcaacaacgcagccacaggtggtg

SEQ ID NO: 453083 - DNA, 122 bp, Homo sapiens
gttaggaaaatgtaggctaccagtagaaaatgacattctctattaataagatctgaggtgcgacacacataattgtcccaatttttaagattgatggggagcatgaagcatttttttaatgt

SEQ ID NO: 453084 - DNA, 122 bp, Homo sapiens
tctgggaattggtggccaggtagacgcatttgaaggctgtggccgatggcattcgccccacgcactctctcatcggactccccaaaccggtctgggtggcacttgaggctcccaggccaaag

SEQ ID NO: 453085 - DNA, 122 bp, Homo sapiens
ccagccatacaaaacaaggcaacaggaacaatgcagtcagcagttgcctggacttgttagcggatgtgatttcagtaactaactacttgctgactcagagacagaggaaagcaaaaatctcc

SEQ ID NO: 453086 - DNA, 122 bp, Homo sapiens
aggcaatccgcccactcagcctcccacagtgctgggattacaggcatgagccactacgcccggcctaaatgcccctattttagagatggggaaattgaggtccagggagggaggctgctgtc

SEQ ID NO: 453087 - DNA, 122 bp, Homo sapiens
gacactgtcagtaaccctaacaagctttgcttctctcccagtaatacttgattccagagccgcaagactacaagatgaacccttcattctagactggctctggggtcagcccatacagctct

SEQ ID NO: 453088 - DNA, 122 bp, Homo sapiens
cagagtaggtcctccataaatatttattaaatgaataaatataatatagtaaaccacacccgatagatgcttcatggggctgttctggaaggtggttaagggaaatcctacctctacagtct

SEQ ID NO: 453089 - DNA, 122 bp, Homo sapiens
ggacatttacccttacaggctcttcacaccacggaatagagacccgcgaaaaaggggaaacgaacccatagacgactgaattcctgcacctgctggcgagcaccaggaggaaggtgcaggga

SEQ ID NO: 453090 - DNA, 122 bp, Homo sapiens
ctgggatgatcccctctgggcattcctagggaacccgcggaactgctgctggaccccatccggagacccaattctgctcttaaagagccgcctaggaacacgtgtacccatcacaaatccca

SEQ ID NO: 453091 - DNA, 122 bp, Homo sapiens
ctgaatggatgactggagaagatgtagcaaatttgtcatcacaagtgactcccttattttcgtggattgagagtatggaataaggaaaaattgcaagccattaagggttaaattgctttcta

SEQ ID NO: 453092 - DNA, 122 bp, Homo sapiens
acgataaacacctgtagatgagacagctcctgcaacgataaacacctgcagataaggtgccgtcggacaggcgtctcggtggacctgcttggtttttgttttgtttgttttttgttttttgt

SEQ ID NO: 453093 - DNA, 122 bp, Homo sapiens
gcgaggccgaaacctgatcctccagtccgggggttccgttaatgtttaatcagataggatcgtccgatggggctctggtggcgtgatctgcgcgccccaggcgtcaagcacccacaccctag

SEQ ID NO: 453094 - DNA, 122 bp, Homo sapiens
actggcccccaattcgagctgtggaccctgcgtgatggggccaggtcagtgcagattcgtcgcacagcaaggacccagcaccaaggcaaaggcgctaacaataggggtgcagagtgtgtgtg

SEQ ID NO: 453095 - DNA, 122 bp, Homo sapiens
aaataacatacttaattcttgatataatttatcagacaactgtatcaagttctcagctgacgactttagagtatgaggttctacctctgtacttagcaggggagttcagtaaattgagccct

SEQ ID NO: 453096 - DNA, 122 bp, Homo sapiens
ctaagacgatgctcagcgtttgtcttagctcctccaggagagaccccagctggagctgggcgtgccgctctccggttccctcaggctaagccggcagcagctgcgtggttgggggaggggac

SEQ ID NO: 453097 - DNA, 122 bp, Homo sapiens
atccttaccctgtcatccagcaaccccgctcctgaaacgtcccccaagagaaaacttaaacgtgcatgcacaaacctgcacacaagtgtttaggcctcattcctcattgccaataactggaa

SEQ ID NO: 453098 - DNA, 122 bp, Homo sapiens
gacccgctgggcggggctgagcgaggcttggagtgcgggcgaagggacgtggggcgaacccggggcgctgcgccacctcggctgtctccagcggagaccggcgccctcgccccccgtctccg

SEQ ID NO: 453099 - DNA, 122 bp, Homo sapiens
cccaggatgaagttgagcgggtctgctgcgcttccgggaagtggtcatgtgatacccaggcgcctgcgctctctttctagggactttcctgagtgggagggatttcgccggaacaaaaatgc

SEQ ID NO: 453100 - DNA, 122 bp, Homo sapiens
ccctcaggtcctgagtgacagaagatgtgatcagatgctctgctgaatgaagactaacaacgtaagttgcagcgttttcagacagggctccctccctgagctaagccaggcccacccaacag

SEQ ID NO: 453101 - DNA, 122 bp, Homo sapiens
gcccgcgttccgcccaccccggaccgggccttgagattgagaccccagcgcctcaccctccgttgagggccttgcccctttcgggtgtcagcgcacaaactattcaccctccttggaccccg

SEQ ID NO: 453102 - DNA, 122 bp, Homo sapiens
aggagaaagggtagaatgtaaatgctgtatgaagttataggcactccaacttgtaaatgtcgatcacagtgagaacagaacttatcttctgactagtccaggcattgcccagtacggtgtga

SEQ ID NO: 453103 - DNA, 122 bp, Homo sapiens
gcccctcattatctactgggggtgttcattagctcaggcatccccccttatctacagctgcgcttgcctgtggcagtgaggaggaggccctaggccccaaaatgcaccctctttgcccctag

SEQ ID NO: 453104 - DNA, 122 bp, Homo sapiens
ccattcttggaagatcccctcggtttagcagagcaaacctcagcttagcagagatcccctcggtttagcagctagatcaatttttaggacccaatttttatacttaggctgagatgatgtca

SEQ ID NO: 453105 - DNA, 122 bp, Homo sapiens
tttaaagcccttaaaagtggtatggacccaaacggtgagcagcagcaagatttactgtcacgagcaaaataacaaagcctccgcaatgcggaagacaaccggagcagactgcagaggcctgc

SEQ ID NO: 453106 - DNA, 122 bp, Homo sapiens
tggctgcggagtctccagagtgactcgtgggcgggtctgtttgagatcaattcaggagcacgtgtaatttaaggatgcccagaaagtttgctgggggtcctaggcgtgttattttttcactt

SEQ ID NO: 453107 - DNA, 122 bp, Homo sapiens
gtcagtttaacagattctgcctccgggaaccaactgccgggagattctgattggctcagccgcgtgcccacgtgaccgaccaaaaccggccaccagggtctcccaactgcctgtcaaacgca

SEQ ID NO: 453108 - DNA, 122 bp, Homo sapiens
agtggtggggtgggggcggggcccggagcgcggcctggagcggagcggagaatcctggaacgctggcgacttggctgtgactggctaggccgggccttagctacctttttattttctttatt

SEQ ID NO: 453109 - DNA, 122 bp, Homo sapiens
ggaggctcacctgctgcatctcaccctactgaaggttccagcaggggtgctgggccctggcgccggggccagaggggagaaagccaggtcctgcttagtctcctcctcctcaaagtccaaac

SEQ ID NO: 453110 - DNA, 122 bp, Homo sapiens
tctttacctagttatcttgactaatccttcagtattatgcatggaggtagaagcctctgccgttgtcctggctgcccagtaggaacaggggttggaatctgttttcagattggtgcccatcc

SEQ ID NO: 453111 - DNA, 122 bp, Homo sapiens
aaacacgccaatttctaaagaagtgttttctttctttcaggcacgaaaattaatgagctccgtctttggcatgggctagaaaattccactgtggcattggcagggtttatgcagaatcagaa

SEQ ID NO: 453112 - DNA, 122 bp, Homo sapiens
tggagcgcccgcgcaggcggggcctcggaggtggagggcggctttccggagctcctccgacggaggcccgtcccggaaggatccccgcgacccccgatcactccctccgtcttttcgccgct

SEQ ID NO: 453113 - DNA, 122 bp, Homo sapiens
gtcggcgcgagtgtagacttgctcccccaagttttattgtaatgcgcatcctggtggtgccggtgttcagctgcgcgccgcctccgctgtgtggctccgggaagcggagccgggacggcggc

SEQ ID NO: 453114 - DNA, 122 bp, Homo sapiens
gaggggaaaagagtaaaaagcaggagcagaaaaggggaggacagggcccagccaaagacccgtttgctcaaaagggcccctcttggtactaactcctccatgtggggcacccaggctggagg

SEQ ID NO: 453115 - DNA, 122 bp, Homo sapiens
ccttaaaaaggaatgaaattcggatacaccttacaacatggacaaatcttggggacattacgaaaagccagtcacgaaaagacaaatattgcatgattccacttggacaaggaacttacagt

SEQ ID NO: 453116 - DNA, 122 bp, Homo sapiens
cagcccgataccccccatccgagcgaccccctttggggcaggcggagaaggtggcataggcgaccaggagggttcgcccacctgggacacgcacccacagtcacctccaaaggaccccccct

SEQ ID NO: 453117 - DNA, 122 bp, Homo sapiens
cggggcatccggcagcaccgcctgcgggcgcccgggcaacgggtctgagcgacggcaacccgagccaatgagcagcgcgaccgtgggcacctccttgccacaaccgcccccgagggccaacc

SEQ ID NO: 453118 - DNA, 122 bp, Homo sapiens
ttgagctcgcgaaggatgccctcaagctgcccgatgaccatcttcatgcgctgtcgaatccgctcccgctcaccaccactgctggggtcgtcactgggctgcccgaggtccggggcgccccg

SEQ ID NO: 453119 - DNA, 122 bp, Homo sapiens
ctcacaacaaccctgccaggcagctaatccaaagtgaggagcaattactgggcttcattccgccttagaggtgagcagacagaggcttggcaggttaagggactgcaccaaagccatgcggg

SEQ ID NO: 453120 - DNA, 122 bp, Homo sapiens
gaagcagggatgacaattcctgccacctccttgcagaaacaagatcaaagctggaggtgccgcggatgcatgtgatcccacgccaggctcttacagaaagacagaggagcctgcgggcctgg

SEQ ID NO: 453121 - DNA, 122 bp, Homo sapiens
ttaaaatccataaccatgtaattcttgtaatatgttgattcagtgttttgtaaatgaagtcgtatgtattttcagagtatttttgtatgtactgtaagataccatcttttcaaagagaaacg

SEQ ID NO: 453122 - DNA, 122 bp, Homo sapiens
aggttgccctcctttgcctcagagaacggtcatgggtcgttgggtgacgcgtggtgtgtacgggtcatgttcctgcagaatcctagtcagtctaggagtagttggatgtgcttatgaaatat

SEQ ID NO: 453123 - DNA, 122 bp, Homo sapiens
agatgcaggcggaaaagaccccaggaagcgagcccactcctccccactgctcagcaacaccgcctacgacgttctcagtagccgaatccctttccaggcgcatgcgcccccgaggtgggcga

SEQ ID NO: 453124 - DNA, 122 bp, Homo sapiens
gatttttacgatctaacttcgagataaaacccctatccatttgacatctaaatgtcatagcgacttttgggatagtttgctatcgacaaagggagacaaagtcaaggggtgaagggaaagga

SEQ ID NO: 453125 - DNA, 122 bp, Homo sapiens
atccatacagtaagtgtctctatacttcacacatatagggtttccatcaaatccctttatcgagtctacaaccctctccaacttcaaattcactccaatacaaatctgattctaaccatgcc

SEQ ID NO: 453126 - DNA, 122 bp, Homo sapiens
cacagttctaacaccacatctagaaagtaagtaaatctgagaatctcaaattttagtgtgcgtaggaatcacctggacaactttctaagattcaggtggtctggagttgagaatgagattct

SEQ ID NO: 453127 - DNA, 122 bp, Homo sapiens
aaatgttcaagagcaaacactgaatgtttcccctttggacagtaatagtcacgtaaaccacgcagctgtagaatactatgtttttagacattcctggtagcagtgggggagggaagaaaaca

SEQ ID NO: 453128 - DNA, 122 bp, Homo sapiens
tcacagacgctgcaaagaccgaaggggcagcccctgccctgctaccctccagggagccaccgctctagagcccaggctcctctggacatcatgtgacttgggggacgacttgcctttcttct

SEQ ID NO: 453129 - DNA, 122 bp, Homo sapiens
tccttctttttcttctctgtgccctggcaccaggctttgttcaagcttggttcttcagaacggaggctgcttgcagagaaatgtcatcaaatatacatttgctgtctgcttagttcccttgg

SEQ ID NO: 453130 - DNA, 122 bp, Homo sapiens
gcagctgcaggggcgccggctcatgccagccgacgtggagtctgcctcaggtggaggaaccgctccgggggcagctgagcaacctgcctgcttcacagacctgtatctcttaaaaggcgcca

SEQ ID NO: 453131 - DNA, 122 bp, Homo sapiens
cagaaggggccagcccgcgcctttcgcgcttctgccctggccctctgcgggccgctccgccggtgctgtccctgggcgcctccgtgctctcagccaaccacctctgagagcgcccactcgag

SEQ ID NO: 453132 - DNA, 122 bp, Homo sapiens
actaagtgttgactttatgggatagtcactgttctaggttctgagttttgaggaatgaatcgaagacacagagtccctactctcatggagacaggctcctggtagtgaaggtcagtaagtga

SEQ ID NO: 453133 - DNA, 122 bp, Homo sapiens
gcacttccaccatggggtctgaaagccactctcaagatgtgattggtgcctcagcctcagcgccctagtacctctccttaccactaaaagctgacacaatagcttctgaagctgcagacgtt

SEQ ID NO: 453134 - DNA, 122 bp, Homo sapiens
cccgcaggacaacgccacactttggctcaccacatcgcttgagtttcatgtccaaggccacggacttttatcgactgctctttcaaacccggcactgagagaccaggggctgaggacggtag

SEQ ID NO: 453135 - DNA, 122 bp, Homo sapiens
ctccagcctacgtcagcacgcaggcaagtgccctccacttcctcctgctcaatgctatctcgcctgtacagccaccagctccagtggaaatgacccagcactaggcccaagaccacaccctt

SEQ ID NO: 453136 - DNA, 122 bp, Homo sapiens
ccagtgctgtgggcatcagatcccaggggaccatccctgctagcatccatctcaatgacccggagctccatggaagggtctgcccccactgcccccatgccaggggaatggggactcacagg

SEQ ID NO: 453137 - DNA, 122 bp, Homo sapiens
gcctccctcccgtaactacgtataaactgcctactaagaccaattcctacatttatgcaccgaatcctatcctctcacgttttctcaaagatattggccgagcagttctccccgttttttcc

SEQ ID NO: 453138 - DNA, 122 bp, Homo sapiens
gcttgcgcctggcacctgtttgtgatgggggaagctgccccggcagcgaggctgagggagcgggaagggctgggcctggcagaggaagagcagccgctcacccacatccctgcagcccggct

SEQ ID NO: 453139 - DNA, 122 bp, Homo sapiens
ggccggtacacacccacaattaatctttcttattaaagcctccattctgtacccatggggcgactcaaacctatttagatttccgtggttggctgcacaaatttaagtgggcaacgagttat

SEQ ID NO: 453140 - DNA, 122 bp, Homo sapiens
gagacaattctaggggcgaaccagacatagccaagagcagctcatcttccctggagaggacgggctgcccacttgcacagcccgggggcctcctgcccctagacctggtaccttcactcttg

SEQ ID NO: 453141 - DNA, 122 bp, Homo sapiens
tgggggcacagcttaggtcgctgtattccaaagcccgggtggctctttgaggtcaagtggcgtggtgggggtggggaggggaccgccctgaccggggcgggcggccttgaggtctttcagtg

SEQ ID NO: 453142 - DNA, 122 bp, Homo sapiens
gccgggaccatttgatcgccctgcgggtgagcgtgaccaggtagctggagaaaaacttctcgtaggcggcgtcgtcgaagtcctcaggccgctcgaatccgtacgggtcgatcctgcaaaac

SEQ ID NO: 453143 - DNA, 122 bp, Homo sapiens
aatcgctggaacccgggtggcggaggttgtagtgagcagagatggccactgcactccagccgggttgacagagggagactccatcccaaaaaaaacaaaacaaaacaaaaagaaagataatt

SEQ ID NO: 453144 - DNA, 122 bp, Homo sapiens
tctagtgttggattctaagtagagtacttcaacacttcttacagcagctaaagaaaacaacgtactaatatttgaatcacatttgtggatttaaaaaaaaatacaccaggtttcacttgctg

SEQ ID NO: 453145 - DNA, 122 bp, Homo sapiens
gaatttctgggaacgttccctcctctgttcattgatattcttgtccctgaccccagcccccgcaaggccccttctgtgtacacttgactgaattttatgggcctcgtggatatgcatgggct

SEQ ID NO: 453146 - DNA, 122 bp, Homo sapiens
ctgaaggtgccttgcaggtggctgtgctcagttttcatgctttgtgttttgcttaggacacgctgcatacttaaatcttcttcatccttgctctgtttgaccctgccatattcccaggcttt

SEQ ID NO: 453147 - DNA, 122 bp, Homo sapiens
cacctctctgcggtggttcgcagtcagagggctctaaggccctggcaggctgtatgtaagcgtggaggctcgaacccactgccccctcctacccgtcggacccgcgctgttcccacggcctc

SEQ ID NO: 453148 - DNA, 122 bp, Homo sapiens
tgaaggggtcagcatctagagctctctagaagatctggctagaagcagggacacaaccaacgggtgattttcctgtctttgaattgctctctaaagggcaattctttgggggatcatcttgt

SEQ ID NO: 453149 - DNA, 122 bp, Homo sapiens
gccgggcctgatggccctgaggcagttcggatgtgtcccaggaagtgcccatgtgtggtccgccgtccattccacacctctgagcgcctttgtcctctgaacttctcaccagttctagcgag

SEQ ID NO: 453150 - DNA, 122 bp, Homo sapiens
cttctgagaaatggaagatggtatttgtaggaatgcgtttgtgtgaccggctctaatcctcgcaaacattcctcacagggactgttcagcttcccgcacagaatctgcggggtcggaggaag

SEQ ID NO: 453151 - DNA, 122 bp, Homo sapiens
cttccggcccagcagtacctgtttaccacgatggccgccaggcggcccaggagatggcctcgaccatcaagcaccaggacctgcacctctgccgtcttcgccagccgcttgggaaaggcttt

SEQ ID NO: 453152 - DNA, 122 bp, Homo sapiens
ctttggtcatcctgtcgaattctttaacagctagttcacacccatctccctctgaaaggccgcctgaactcctgacttcgtgcaggaaagaagacagagctttaggaggacttagggaccac

SEQ ID NO: 453153 - DNA, 122 bp, Homo sapiens
tatagctgacatccttatgaacctggaggtattgtgcttcccacatcacagcagcagacacgtgtgcatgccctaacatcctgtatgaaaagcatttgagtttctaacatcacaacactatg

SEQ ID NO: 453154 - DNA, 122 bp, Homo sapiens
tcccggtaatctactctcaaaaaccttcccacagctcgcgtccctgcgccggcagatcgccgctgagtctgaacgtattttccgaggtgatcgatttaggtgtgctgagaattacatctctg

SEQ ID NO: 453155 - DNA, 122 bp, Homo sapiens
aatctacatgtctaataacagcaaatctgctaagaagcattagaaagaggagcagcgccccggaatctctgcaggaaatgttctttatattagacatatacaagcaggtcctgtcagatgca

SEQ ID NO: 453156 - DNA, 122 bp, Homo sapiens
cactagacttgttccttgtttccattttaatttcgtacatatttagatttaccaggaattcggagagggtttatgtttagctaatgcatcattatgtttgcggggcttgcacacacgtagaa

SEQ ID NO: 453157 - DNA, 122 bp, Homo sapiens
ctccatgaccagttgtgtttcagagaaggcagatctagtccattcaaggccaggatcccccggaggtcagtacattatttgcccagtgaactgtgggcatatctatactttttgcacttttc

SEQ ID NO: 453158 - DNA, 122 bp, Homo sapiens
tcggacttgtaagtccacttcagtctcaattcctggggagcaggtagccgtgtgcagctccggggaagggatgcgggctgaaggcgcaagcttccctcccactccccccgcaagtcggcgcg

SEQ ID NO: 453159 - DNA, 122 bp, Homo sapiens
ccctgataacacagatttctgggccccactctcagggtttctgattcggtaggtttggggcggggcctggaaatttgcatttcgaataagctcctggatgaggctgatgctgctggtccggg

SEQ ID NO: 453160 - DNA, 122 bp, Homo sapiens
aagagcttgctcatggcagggcctcgagagcgccacgactacgtgtcccagaaagccgtgcgcccgggttgtccttccggctagcttctcttgacttcctggcagcccaaggctgcccagac

SEQ ID NO: 453161 - DNA, 122 bp, Homo sapiens
gactgcacgacttgctggactcccaagtccgaagttcctgcggcagcgcttgctttgtggcgccacctggtgggcagtgtgcgaggttgcggggggcggggtagacggtctaatcacgccca

SEQ ID NO: 453162 - DNA, 122 bp, Homo sapiens
ctccttgagcagctacacgtcggaccgggagaggcagctcttcagcatagatgccagtaccggggaagtgcgagtaattggggggctggattatgaggaagcctcctcctaccagatctatg

SEQ ID NO: 453163 - DNA, 122 bp, Homo sapiens
gcccagttgggtcaaactaaggacccagtgcagaccccgaggcccagagacacaggtgtgcgcacaaacacgcactctgcggaaggccggggcgggcctggccgctgcgggactcctggccc

SEQ ID NO: 453164 - DNA, 122 bp, Homo sapiens
ctgtactctacccagagtcgtggtacccctccattttaaagcaaaatccaaaagcaagcacggcggaatcttctggaagggggctaagatggaactcaggaggcgggggtcggtatggaaag

SEQ ID NO: 453165 - DNA, 122 bp, Homo sapiens
tccctttccgagtcaaagaaaggggtgatggacggcacctggaaaattgggtcactcccacgcgaatactgcgcttttccgacaggcttaaaacaaggcgcatcacgagattataccccgca

SEQ ID NO: 453166 - DNA, 122 bp, Homo sapiens
tttccaggcgccatcatcactccgactatagaatcaacaggatttgacaggtgcagctttcgactgctctgttgagagggtggagacagaagcaaaagctgcccacagaaaggcgacaggga

SEQ ID NO: 453167 - DNA, 122 bp, Homo sapiens
ttgtttaatttatataagaagcttgtaaaataagaaattgcaggctgagggtcagcaggacgtctctgaactctaggaggtggggataagtgggaaagcaaggcaggctttagaagaaactg

SEQ ID NO: 453168 - DNA, 122 bp, Homo sapiens
gccaacctgcagagactcgcttaagccgggagaggctgcctgagccggcgcaagagagcccgggttctgccagccatagtgagctagaggattcttcccgcgtttttgtttatttcatttca

SEQ ID NO: 453169 - DNA, 122 bp, Homo sapiens
ggaggcgccgcctgggttggggtctggcactgtgccaggtcgcagtactcccagctcagccggtcgcggttcagcacgaagcaccacgggcggatgtcgttgtccgggttcctgtagccaca

SEQ ID NO: 453170 - DNA, 122 bp, Homo sapiens
atggcagagaaggtggctggatgggtggggctcccaagaacttgtttctctggcttcctccggagggcaagacaaggctccaagcaagtgacaactgcttaaaacaggctggtgaccaggcc

SEQ ID NO: 453171 - DNA, 122 bp, Homo sapiens
aattttccagctgtgcaaccctgggcagtggcttagcatctctgagcttgcctccagatccggatctgtatgatggggttattaatgcttcataaagtaggtgtgaggagggattgaggtac

SEQ ID NO: 453172 - DNA, 122 bp, Homo sapiens
tttccctcttagcccacctcccctaaactaatgcagcagctttgtttgtttgttctgggacggagtctcgctctgtcacccaggctggagtgcagtggcacgatcttggctcactgcaacct

SEQ ID NO: 453173 - DNA, 122 bp, Homo sapiens
ccatctcaaaaaaaaaaagaaaaaaaagtctcagaacttctgttgtactttattcaagaccgtagtttcttgatggctaagatgtttggagggtggctcatgtatcttccaaaagattgcca

SEQ ID NO: 453174 - DNA, 122 bp, Homo sapiens
gtcaaagaggaagtgaaggaacctccagggaccaatactgtgatcttggaatatgcacaccgcctgtctcaggatatcttgtgtgatgccttgcagcaatgggcatgcaataacatcaagta

SEQ ID NO: 453175 - DNA, 122 bp, Homo sapiens
ccttagcacctgtcacagccaagcacccttttactccggccctgcggtcccacccctcgccgcaagccccgcctcacccggtctgccgctgcgcctgcgcgactcccagaagcctttggggg

SEQ ID NO: 453176 - DNA, 122 bp, Homo sapiens
gggggagcgggtgggtgttgggtggcgttgggggagctgcgcctcgcccagagcctcgcccggagcctcgcccggagccttccggggtgggggatagttgaggacctcatcgagggaggggt

SEQ ID NO: 453177 - DNA, 122 bp, Homo sapiens
cccactccaccgggagaccagacgctagtcaatacacgcaatcccactccaccgggagaccgggcgctcgccaatacatgcaatcccactccaccgggagaccaggcgctagtcaatacacg

SEQ ID NO: 453178 - DNA, 122 bp, Homo sapiens
gcaggctggcaaacgcttccagggagttttcattatcatatagtcttcagtccctaaccacgccccttaggtagaaacactgtggatacactgtgggcggagctgtctgtgcactgtgggcg

SEQ ID NO: 453179 - DNA, 122 bp, Homo sapiens
agtaagcttctctcggcccttggcagctctgagttgggctttcttctgaatgaactcggccgcccgaagcctcttcctgctgctccattcagccctgcatccccagctgcttatctgggcct

SEQ ID NO: 453180 - DNA, 122 bp, Homo sapiens
ttatcaaaggacaaaacttgctggaggcccacctttaactttcatccaccaatgggaagccgggacagagacagtagctccgcccacttctcaaagccaatcagcaaattgaaaagaatgag

SEQ ID NO: 453181 - DNA, 122 bp, Homo sapiens
tgcccagttgctggaacattacttctgggtgtagcttaacaagaccatggcctctggacccgcgatcagctcgctgtgtggtcctgagcagccacccaacatctctgggccttggattccta

SEQ ID NO: 453182 - DNA, 122 bp, Homo sapiens
ccggggcaggcggaccccccgggctctcagcgcccacccgctcctccgcacacagcagctcgcacaggcctcccacctctgcctgttgattgatgcagggagaagcccgtccccccctctcc

SEQ ID NO: 453183 - DNA, 122 bp, Homo sapiens
ttttggaaacactctgtttgtaaattctgcaagtggatatttggacctctttgaggccttcgttcgaaacgggatttcttcatatactgctaaacaaaacaattctaagtcacttctttgtg

SEQ ID NO: 453184 - DNA, 122 bp, Homo sapiens
ataaatgagttgttatttcagtggcaagccctgaaagggggtctacaaaggcccagtgggcgaggctgaggaaatgcctggacacgacccttctcatggcattcccggggcgcccgcatcag

SEQ ID NO: 453185 - DNA, 122 bp, Homo sapiens
tgtgaggcctgagtgctggacttgggactcctgctccagagtcaggggctagggctgggccgggcccacccaggaggatgctggcagaggccctgggaggagggggagtgggcgccagctcc

SEQ ID NO: 453186 - DNA, 122 bp, Homo sapiens
cggggatggtgccagaggagccggagtcccagcaggaccgattggtagttaaatgccaggcgctgatatccgaaggcttgagttcttcaccaccttctagctgagtaacctggggcaaattc

SEQ ID NO: 453187 - DNA, 122 bp, Homo sapiens
cccataccccttcatttccaagaatgctaatgaactcgaactcggcaggctgggtttctgcgcgggcgtggagctggagcgcatgcgctcgtccgttaccataacgaccagaagacgctgca

SEQ ID NO: 453188 - DNA, 122 bp, Homo sapiens
tccattcactagttgatggacacttgggctgtttccaggttggggctattatgaataaagcggctatgaacattcacgtgcgatgtttacatgaacatatatttttatttctttgggacaga

SEQ ID NO: 453189 - DNA, 122 bp, Homo sapiens
gcccgccgcgcccgcgcccgccgccgcgccgcccgcgcccccagcgccccccgcgcccggcgcgccaccgctgcacgccaccttctcgtggcccgccaccaggcgcactaggtagcccaccg

SEQ ID NO: 453190 - DNA, 122 bp, Homo sapiens
actgaaaggagactccttgtctccttctctggggacccttttgttcagaaataaaactttcgtgctgcaggtgccttgaggagacgacatgtgggtgatcttttctagaaggcagtggagtg

SEQ ID NO: 453191 - DNA, 122 bp, Homo sapiens
gccctcgcaccgacccgcagggacatagaaccaagccccaggctggcccagctacaagaccgcctctgggtgccgcacttccggaggaaaatggcggagtgggcggggcggcgcatgcgcag

SEQ ID NO: 453192 - DNA, 122 bp, Homo sapiens
ggtgacctttttgagtttcaggcggcgtcgtggcgttagccatcgccagcttcgtggctgcggtgaaatttcacgacctgacggaacgaatcgccaactttcaggagaagctcttccagttt

SEQ ID NO: 453193 - DNA, 122 bp, Homo sapiens
ccgggccggctccaggccccagcgggcgtgggcgttggcagtgagcgaggggtggtcccgcgccgcgccggcggggggcgcccgaatgagagcgcggggcggtgccgttgggaccacggcgg

SEQ ID NO: 453194 - DNA, 122 bp, Homo sapiens
aatctctagaagtgatactgcagcaacaatatctcatggggttgacagatggatcaaatccggcaacacccatggcaaagcactttataaaccactaaatccaaaacaaatgttagtggtag

SEQ ID NO: 453195 - DNA, 122 bp, Homo sapiens
aggaggaactccgctgtctgagtcagcacaggtccaccgaagaccaggagctcagccctccgcgcggtgctctgaatccagggaacacgctcgccgggaactgcggaatccctcccgttggc

SEQ ID NO: 453196 - DNA, 122 bp, Homo sapiens
cttcggcctccaagcagttgaggggccgtgccagcgcctcggtcgccacggtcttagcttcggtgtccatgccaggttcctccatgccatccggggccccggccgctgccatgatgattgtg

SEQ ID NO: 453197 - DNA, 122 bp, Homo sapiens
ggtctggagctgctacagcatggccaggcctggtttgaagaccatctgagggaggcacagcgacagcagctgcatctaggggcccttggtgaggtatgggggctgcccctctgtgtgaatgg

SEQ ID NO: 453198 - DNA, 122 bp, Homo sapiens
agcaggcccaacactgaaactcttttcagacaagttgaggctggtttcctgaacataacccgaaagcaaatgtggcttgccttggaggtacagataagcatatgcataacagattttattac

SEQ ID NO: 453199 - DNA, 122 bp, Homo sapiens
tcccttcgggctgttttccaaaagcattggttctcaagattaaatacacatatacctccccgccaccccactctacaaccatactgcttttctgttttaactacttctattacaaccgtatt

SEQ ID NO: 453200 - DNA, 122 bp, Homo sapiens
atgacctttctgaattaaaaccttcagtgacctccactatttcacctggccacgtccctgcgaggccctgagtggcgtggtccaggctgccccagcagccccagctctgctgccccatcaag

SEQ ID NO: 453201 - DNA, 122 bp, Homo sapiens
gcctgggggaggggtgccacatgcagagggaacagcaggtatagaactgtgagacaggaacgcacgttcagaaatgagaccgggggctgaaaggagaaaagcggaggtggactcctttgctg

SEQ ID NO: 453202 - DNA, 122 bp, Homo sapiens
aatgggaggagcatgggggcgggaccggaggcgggggccgacggagcagcgttgggggcgcggcaggaggcggggccgagaaggaccctggagggcaagggggagctagaggcggggaccgg

SEQ ID NO: 453203 - DNA, 122 bp, Homo sapiens
ccggcgagctggcccaacagtggggccaggggtcccgggcgcgggggggatcggagggagcgaggccgctgccggacggggcggggcgccgggaggggcggggccgcggccggacggggcgg

SEQ ID NO: 453204 - DNA, 122 bp, Homo sapiens
gcggcggcggtggggctgctcagggctctctggggtccgctctccgctcccgctaccgatcgaactgaatgcttaaagtttttatgtcctaccggttatgacaacttcaggtacaacgtgca

SEQ ID NO: 453205 - DNA, 122 bp, Homo sapiens
tctttgagacgctccctcgactgcagtcctccagggcccggccgaggtggggagccaaatcgggagaccgacctgggctcttggccggaagcccctcactgcagccctgccccgggaccccg

SEQ ID NO: 453206 - DNA, 122 bp, Homo sapiens
gatatttcattcccacctcgctcgcaactaagcccaaccttctggcagtccaaagccctacgcgctgacagaaataacctccttagcagaaatgcactggtctcgttccctgcagggcatca

SEQ ID NO: 453207 - DNA, 122 bp, Homo sapiens
tgtgtgtgtgtgtgtgtgtgtttaatagcttcccttctcttcttcccctccctgcctgctcgcctgcctgcctccgtcccccaccctcgctctcttacacacagaaagagagggcgagcgag

SEQ ID NO: 453208 - DNA, 122 bp, Homo sapiens
gggcggtgatgtcagggctggtgctgatgctggcggcgcggtgcattgtgggcagctccccgctctgccgctgccgccgccgtcgcccaaggaggatcggggccgggccgggccgggatgat

SEQ ID NO: 453209 - DNA, 122 bp, Homo sapiens
gttcctcccccagaagggaagaacagaagcagaatcggtttaacaacacgctgcccaaatcgcctacaagagtaaaatggggacagaaagtaagcgacaaggttggaaatttagattgggac

SEQ ID NO: 453210 - DNA, 122 bp, Homo sapiens
ggccaaacttaggtttcattcacttggggacccggaataggttgaggccagtaaagttctcgcctggaaaacaaaatttacagggacgccaaaaaaaactcagacatcaacatttagaaatg

SEQ ID NO: 453211 - DNA, 122 bp, Homo sapiens
atacagggcttggcctcccggggtcttcagatatcagaggcttccaggagcacttggtcacggtctctgaatctctggaacagagaggttatttcagaaggttccagaagaccctgtccaca

SEQ ID NO: 453212 - DNA, 122 bp, Homo sapiens
gtcctggagtcagtctgagcggatcgcaggggttccaggcgccccaggccccccacaccgcgagtcacaggaacaaggaggaaaaacagcctctttatgacttgggggaggcaattcaatat

SEQ ID NO: 453213 - DNA, 122 bp, Homo sapiens
cctcacaatggcagatgcacaccaggtcccacaaccagagaaaaagagagggaggttactcgtggagatgtcagaaaaagtactccccttgtgcctgacttctttgattaaacccttgtttg

SEQ ID NO: 453214 - DNA, 122 bp, Homo sapiens
aaatgcagatctgccaagactccaacccagttcttaaggtatctgggtctggactccttccgctccaccaagccaccttccaaaggtctacctgaaaataactaatgagcagaaactatagg

SEQ ID NO: 453215 - DNA, 122 bp, Homo sapiens
ccccatcaccaccacagcctgtgaccctgggggctgtgccagctccacaggctccacccccgccccccaaggccctgtacccaggtgctctgggccggcccccacccatgcccccaatgaac

SEQ ID NO: 453216 - DNA, 122 bp, Homo sapiens
cttcgaagctacgtctcagtttccctcttatttccccctcttcccaccgggccacgcaggcggggccccagagaccgtgaagcagagcttgcaaagtgaccccgtccaccgaattccccaag

SEQ ID NO: 453217 - DNA, 122 bp, Homo sapiens
tattctaggctttccagtaacatgtcactatagcatggttttgttcagatgattcagatccgttagctgcggcttcaaagcctcagaaatgtcaggagcattaagcttgctggggcatttta

SEQ ID NO: 453218 - DNA, 122 bp, Homo sapiens
ccgcccccgccaggcgcttcagcagcaggctcttcagtcgccgagccaagaggcctgcggcgcccaatggcatggccagctctgtctccaccgagacctctgaagtggagtttctgacgggg

SEQ ID NO: 453219 - DNA, 122 bp, Homo sapiens
cagagttgccaagtgctaaaagttggtttcccaactcagaatgaaggaaccaggcttgtgcgtccgatgggcattgacattctggaaaacaagaataagaagctgtagcggcgcctgtaagt

SEQ ID NO: 453220 - DNA, 122 bp, Homo sapiens
catccttttagtcaccctcaggagacaccagcgttccgcttgccctctcacttaagcgcccgctgtgcttggggctgcgtggcagagggaacttgcccacatggcatcccagtcagccagtg

SEQ ID NO: 453221 - DNA, 122 bp, Homo sapiens
tccttctgacaggccagctcagattcctatcgtgctaggttggatcaaggagcatcattacgacggctttatcagaactgtctgcttcagaaaataaacaacttatcaaaggtagccaggtc

SEQ ID NO: 453222 - DNA, 122 bp, Homo sapiens
cagttaacaggaacacctggccgtggcgattccgcagacaggcctgaggcactggggttccgccgcgacactccacattctgctacagcctgtgtctcctctgcatcactgtgggccacaaa

SEQ ID NO: 453223 - DNA, 122 bp, Homo sapiens
caggagtggggccccactgtgtggtactcctcacatgtgttgtcctggccataccacctgcggggatgggagggcgacaggacgcatgagggttccttgtggcccccagacctcaccatggc

SEQ ID NO: 453224 - DNA, 122 bp, Homo sapiens
acccacccctggggctgccagcagggtgacgggccaacctgccaactcaaccttatctgccgtgagcaccactgctaggggacagacgccatttccagacgccccggaggccaccacacaca

SEQ ID NO: 453225 - DNA, 122 bp, Homo sapiens
gtaaggcttaaatctgagtgcagcaaagaatgaggaaaccaaccccggacattttaaagtcgaatgacaatggagccagtgccaatgttgagaagcactaccaccgtcccttagagttctat

SEQ ID NO: 453226 - DNA, 122 bp, Homo sapiens
tgtcacctcctccacctccagaaaatgacaccatctactgggtggacatgggcctgagcacgatcagccgggccaagcgggaccagacgtggcgtgaagacgtggtgaccaatggcattggc

SEQ ID NO: 453227 - DNA, 122 bp, Homo sapiens
tgttccctgttctggtgtgcttttgagctccttgcgcagttccaccaggtacaacaaatgcgcccataaaatctgtctttgagccctgatgaaatttcatcctctgcagaacgcctccgctc

SEQ ID NO: 453228 - DNA, 122 bp, Homo sapiens
acagcctcccacattaccaagggcatgctcccggggccctaacctaagaccccagaagaacgggtcgctgccaccaagaagtataaatatgtgtgtggaagactacgagccttattcgaatg

SEQ ID NO: 453229 - DNA, 122 bp, Homo sapiens
atgtcattcgagtccaatctcaggatcctggatgcacgcctgttctccaggtctgcttcccgtgaaattcgtggagattattgtacattcgggagtgggagtgcgattggatgtgtgtctgc

SEQ ID NO: 453230 - DNA, 122 bp, Homo sapiens
catttcaactactatttttgatataatcattcttggcaaaatcattcttaaaggtggaaacgagcaggctgatagtacagcaagtaagagaaagtcaatactgatggcctccacttgctgat

SEQ ID NO: 453231 - DNA, 122 bp, Homo sapiens
gcctagaaatgaacttcacaaatagaggagctcctaaatgtgcccaacagcaaggaaaatcgaattgagtgcgggctcattcggcagcggccggcagagaagcgctgaatgtggaggtgccc

SEQ ID NO: 453232 - DNA, 122 bp, Homo sapiens
gtcaggcgccgcccgggcggcagtatgcctgagggggtcctccgtgttcgcgcctcccgccgcctgcactgaaaggtctgtacctgagcctggatacttgaacagaggcagacactgcggct

SEQ ID NO: 453233 - DNA, 122 bp, Homo sapiens
attggagtaaaacagagactcccgtgtgggtcccgggctgttggctagggtggcaggccgcgtgcatttcctctctctgcgcctctctctgctatgagcacgaactattttcataattagat

SEQ ID NO: 453234 - DNA, 122 bp, Homo sapiens
agaaccgcatcaccattgccaacgtggacttggtcctgagcaagggcaatgtggacgtggcgctgaacatgctaaggaacatcttgcccaagcagtcctgctatatggaagccagagagaag

SEQ ID NO: 453235 - DNA, 122 bp, Homo sapiens
acaatctgtttcgtgttttcctaagaaaaattggaaccttcgtaatagcatctaatttgacgggggttgtcgatgtgagagctaaatatgcccgcatttactaggtgcgattgtgagagaga

SEQ ID NO: 453236 - DNA, 122 bp, Homo sapiens
gagtgcaatgaagtcgtggggcaaggcttgggctcataacactgaacccaaggtagcatacgcatggtgttaaaaccgagctataatgagtagggctgatcagtgatgccaatgaatttgtg

SEQ ID NO: 453237 - DNA, 122 bp, Homo sapiens
gcagcccgttccgagtgcaagctcactcactgcctggctatgacagctatgaacacgatccgatccccaatccacacacaatgacacccaggctcacagagactcgctgcttagctgcaaaa

SEQ ID NO: 453238 - DNA, 122 bp, Homo sapiens
cagggcattattctaaacatggatgcttattgcttttttcaggagagaggtggttttctacgtacgctgcaactaggagaggcaaaaaggaaatgtggggcccacacagcaaaagcagcagg

SEQ ID NO: 453239 - DNA, 122 bp, Homo sapiens
ccgtttctttcttcctgcagaaaatatagcagaaagcggaatacctcttgcgaatccttccgcactaggaagccataaaaattgggccttgagagacagtttgaggtaaggcgttgtatata

SEQ ID NO: 453240 - DNA, 122 bp, Homo sapiens
acacacctcctttcctacctgaacgccgtgagagccaatccgcgggcagctctaatgtcgcgtgactaggaaacaggccccgcccccccagacccgtcaaaacaattgcctcgagcggcagc

SEQ ID NO: 453241 - DNA, 122 bp, Homo sapiens
tgaatatcctgaatgggcactccctctcttcctcttgtttttatttatgtatctcatcaccgtattggggaacttagagatgattattctgatcctcatggatcaccagctccacgctccaa

SEQ ID NO: 453242 - DNA, 122 bp, Homo sapiens
agcaatccccttgggctggagccaaatccctgctgtgattttaaggaagaccggcaggtccgggcccccaagggtcaaccccacacacatccccgcactttcctgtatgcaggcctgcgagc

SEQ ID NO: 453243 - DNA, 122 bp, Homo sapiens
ggggggaggtatagagagagacagttggactgggactagagaagataaaaaattattcctcgaagagaagaaaaggccaacggacacgggagcagatacagcctctccctgtaaaccaaaga

SEQ ID NO: 453244 - DNA, 122 bp, Homo sapiens
ttctaggatatgttgttcttttatgaaatctccctaggtcactctctttcctttctctgacgttttacgttgctcagtattatgagtttagtgctaccaaactgtattttactgtatctata

SEQ ID NO: 453245 - DNA, 122 bp, Homo sapiens
ggatggcacccaccgcttcttcgtggccgagcaggtggggctggtgtgggcctacctgcccgaccgctcgaggctggggaagcctttcctgaacatcagccgggtggtgctcacctcgccct

SEQ ID NO: 453246 - DNA, 122 bp, Homo sapiens
gtctattcattgggggagcccaattcccgggaggatttagggatcacgggagggccggggcgttctcctggtggggattttaaggccgctcagagccacgactgggagctacccttagccag

SEQ ID NO: 453247 - DNA, 122 bp, Homo sapiens
gcgtcgcatcaaccggcagctggaggccctggagaatgacaacttccaggatgacccccacgcgggactccctcagctcggcaagagactgcctcagtttgatgacgatgcggacactggtg

SEQ ID NO: 453248 - DNA, 122 bp, Homo sapiens
ctcagcttgaatatcacccctgggggatgacctccattctctcctccttcctttattcagcgaggttatgaagcacctgccctgggccaggggcttttctgggcatggagtaggagtggaca

SEQ ID NO: 453249 - DNA, 122 bp, Homo sapiens
atctggctttggggtggccctgggtgggactgcctgtttggattaccgcgcagaccttggcgccgcccccacacctgctgccagaagttgggtcgaacagattgaccgagatgaagcttatt

SEQ ID NO: 453250 - DNA, 122 bp, Homo sapiens
gcagttatggggtgcccttgggagggctgctttaggggggctttctgagaagaggcaggtcgggctgtacctgagaccaatccccttgataaaatgcagccaggcctgaagcacgttcagaa

SEQ ID NO: 453251 - DNA, 122 bp, Homo sapiens
tcaacaaatatttattgagcactattaagtgccaggtagtttacattgaagacatgattgcgaagaatatgtacctactcttgaggagtttaaagtctagtgagagtcaggaaaacatacaa

SEQ ID NO: 453252 - DNA, 122 bp, Homo sapiens
atagaatatggtaaagctctgactatttcagagaaactgtgcagaacagcatgcaatagacgatactctcagtggaaaaccattcatctctaatgaagaaggggtgatcagaccagtgtagc

SEQ ID NO: 453253 - DNA, 122 bp, Homo sapiens
agacagggtagaggtggggaagcacatctgtaaagaagagctgtgctgcctcaggcaggccgcttcacctctctgaaccaggaactgtttcacctgcatcccaaagagttggaagtttcatt

SEQ ID NO: 453254 - DNA, 122 bp, Homo sapiens
ctctttaacgaacagactggaaattcatttatcacagtccgaagtcctcccattaacttccgatcctttttcagactgccaactttcagccactgaaaacttaaatatgcttgccctcctaa

SEQ ID NO: 453255 - DNA, 122 bp, Homo sapiens
cctggcctcgctgcgagagtcggtggatgccttcaccttccggcacttcctgcagatcgccgaggaggaggatttcctgcgcctgccactggagcgcctggtcttcttcctgcagagcaacc

SEQ ID NO: 453256 - DNA, 122 bp, Homo sapiens
cgggacctggattcccagcctcccaccagcttcctagccaggctccccctgacgccctcccggtggagtgcattctccacgccggaccagaccatttctcatgctgtccatggcgtccccac

SEQ ID NO: 453257 - DNA, 122 bp, Homo sapiens
gccctcccttgccagctcctcgtttcccagactcgcggggaccccacgccagagaggacacgttgacatgtgatgtcctggatgcgcttcagccttggggatgctcccactctctagtgcgt

SEQ ID NO: 453258 - DNA, 122 bp, Homo sapiens
cccccggggcccgcccccagccctgagctgcgcctcttagctctggggccacagcgccagcgccactctgccaggctcccggccatcgcccgcctggtgcgccgcccgccagctctttgccc

SEQ ID NO: 453259 - DNA, 122 bp, Homo sapiens
tgagcttctctatgttatgtctacatggctatgattgtataagacacgagactgcacttgcgccccaatactgctgagtcatttaggctgtttaccttgacctatgcctgctgctctatgcc

SEQ ID NO: 453260 - DNA, 122 bp, Homo sapiens
ttggggtttgggggtggtggtaggagggcagcccgaggcccataggtggggaggtgaggtcgaggacaccctctgtcttgcctcaccattgtgtttgggactcatgggacgtctctcacctt

SEQ ID NO: 453261 - DNA, 122 bp, Homo sapiens
ccctggctccccgttgctgcattaagcctgcttggccactccacctaaccacacccccgccgtcctctcactgagcttcaatggctttgtgacatgtctcacccctggacaccacgagacac

SEQ ID NO: 453262 - DNA, 122 bp, Homo sapiens
ttcccgcagggccttcgaggcacttcacttcgaagtgaaggggtaagactccggaacgttcggtctccgggtcccattcagccttcgttgaatcgcgcccttagactcacaacagttgcaga

SEQ ID NO: 453263 - DNA, 122 bp, Homo sapiens
gccgaagaagggcacgggggcccccaaggagtgcggggaggaggagccccggacctgctgcggctgccggttcccgctgctgctcgccctgctgcagctggccctgggcatcgccgtgaccg

SEQ ID NO: 453264 - DNA, 122 bp, Homo sapiens
acagattttgttagttttattaatgtattaattaggcaattatcatttggttcttgcccacgtgaaagagtatccacagaaaaataaaatatgtaattactttccatcttagttcattgtga

SEQ ID NO: 453265 - DNA, 122 bp, Homo sapiens
cctctaaacatctcagtccttgttgaaaaaggacgtgacgctcatgacctcctctggcgtcgaagaaatcctttgggaaatccagaatagcatcccggcagatgctccccccaccccactct

SEQ ID NO: 453266 - DNA, 122 bp, Homo sapiens
ggaggacgctctgggaccctctgggggtggggcgggcggggtgaacttgaccccaggccgcgtgccgggcgtgccatctgccgctccgctgcaaggtctcgcccgggaccggggctggcgga

SEQ ID NO: 453267 - DNA, 122 bp, Homo sapiens
cgacatccccgagggcaggagatggccaggcagctccgcagccgggcgtcgagcgggaggcgggggcccgggcggcgcgggccaatgggggttcacggcgggacagtcgggtggccggctcc

SEQ ID NO: 453268 - DNA, 122 bp, Homo sapiens
ctttctaaatattagcataataaatataaatggacccagaacgcgagggggcaggggccacgtgatcgctccacgaaagccacttgtagggacctttagagagttagcaataaggctggaga

SEQ ID NO: 453269 - DNA, 122 bp, Homo sapiens
ttaaaatacctgtttcacttgaagttaaagagatataataaaaacaggtgggcctactaacgtattcaggccagattctgagtgtgagcgcccgggcaaggtaaggtgactgcgcacacaat

SEQ ID NO: 453270 - DNA, 122 bp, Homo sapiens
aggtcccagaagcaggaggatgagaccatgggggcaggcaggttggagtatcctgtgccccggcccctcgcatccctatgtcccaccctggcctcagcctcggaacctctcggggccgctct

SEQ ID NO: 453271 - DNA, 122 bp, Homo sapiens
cccgccgccgccgcccgagcctcatggccgcccgcccgcccggccgaccgcggagcccggcgctcaccgtccgccggctgctggaagttcacatacgcgtagcccaaggagcggcgggtgat

SEQ ID NO: 453272 - DNA, 122 bp, Homo sapiens
cactcatcttttcatgttgctggaagtcagctcctcttagcggtgtgcagcttgggcttccggagttggctgggtctttgtgcttatcagcgataccctcctgtctcccatccctccctctc

SEQ ID NO: 453273 - DNA, 122 bp, Homo sapiens
agttcaccccgttccggtgaagggcagagcaccccccgcccttcccagccaccctgtacacgcccctactcgctctcggatgcctgcagttcccaggcttcccagcagagggagacaccatt

SEQ ID NO: 453274 - DNA, 122 bp, Homo sapiens
gttggaggagggttgagggggctggagagaaaatggagcaggaagaaggtttctggtgcccggggctgtatttccaggctccatgaacccactttgttcaacaatcgagggggataaggtga

SEQ ID NO: 453275 - DNA, 122 bp, Homo sapiens
aggaactgagaactcaagatttcgaggaagccgcacaggaagttgggggtgggttctgaacggtgacctcacaggaggaacttcacacacagacactgtcagggccgggtcacccctggaag

SEQ ID NO: 453276 - DNA, 122 bp, Homo sapiens
tccgtttttcccgcggattctggtgcctgtggggccggtgacccaacaccatgaaggaaacgccactctcaaactgcgaacgccgcttcctactccgtgccatcgaagagaagaaggtatgg

SEQ ID NO: 453277 - DNA, 122 bp, Homo sapiens
gtcttcgccgttgctgacagaagcctgggacacggggtctccaggggcctgggctggggccggctgcaggctgcaggctgcctcgcgcggtgccggagtcctcggccaccgtccctgccccc

SEQ ID NO: 453278 - DNA, 122 bp, Homo sapiens
acaatgttcattgttagtattttgtttcttatcatttcttctgtagcgagtttgtaattgcgcaggttagctgaaatgaacaatatgtccatcttaaagtgtgctttttcgactaattaaat

SEQ ID NO: 453279 - DNA, 122 bp, Homo sapiens
tttctttagttttataattcaaaagcttttctctgctgatgaaagctccagtgggcacagcgttgtgtttatctttaatcccaacctgaaatagtgatagatgagctgttcagaggcatgct

SEQ ID NO: 453280 - DNA, 122 bp, Homo sapiens
cggggcctctgcggcggtttccccacccgtccccgcactgccgctccgcgaggcggacgccgctagcagcctcccgcgggccccaggccccgcgcccctctcacgggacaggagcttgggga

SEQ ID NO: 453281 - DNA, 122 bp, Homo sapiens
agtcccagtgtaataaggtcccggagaagtgtcactggccctgagtgggacccggtagcccgttcgctccgcgccggcggcctgtccccgcggcttggcgggctagggcaggggaaatgttg

SEQ ID NO: 453282 - DNA, 122 bp, Homo sapiens
caggacatggctctgccggcagccctgccctgccccgcatgacaggagaggtccattcgccggatggtgtctctgggcatcagcaccctcgccaccctctctgggaggctgagacaggaggt

SEQ ID NO: 453283 - DNA, 122 bp, Homo sapiens
ctaacaggtcgtaagctttactaaggagcgcgcgccagaacttcacggtgagtttgtctgcgttcctttccatggactgtgcaactgcactgatatagccgagaacggtctccagcaacctg

SEQ ID NO: 453284 - DNA, 122 bp, Homo sapiens
gaagatctgttaaaagcacacgagtcgtctcagtccctcagtgggagctgtttcacctggcgtcatctagtcagccatcttcaataataactgttaaatggacatttatatccactgaaacc

SEQ ID NO: 453285 - DNA, 122 bp, Homo sapiens
taaagtaactctgtaaatctaaaactgttctaaaataaaaaagtttatttaaaaagataccgaggaataaaagactaagttgcatgaagtatgagtttctatacaagactgtatataattag

SEQ ID NO: 453286 - DNA, 122 bp, Homo sapiens
agagaagagggcgggtccggcaggctccctcgggcccctgatgcaggaggctccaacgagcggtggcgtaaagccctgggtttggtgcagtctctgtctggagggacctcagcacccgagat

SEQ ID NO: 453287 - DNA, 122 bp, Homo sapiens
tgaggcctggattggagggcctaggtgcctggcccaaggctgcagaacaggctttctacccgacaccagagcctgaagggggcaaagcaaaacccacatagcagccatcagagaagctgccg

SEQ ID NO: 453288 - DNA, 122 bp, Homo sapiens
agtggagaccaggggagctgtgccctagccctgactgtctctgaggtgacgacaagctctcgaaggggaggaacacgcctgtgtgccttgccctatgcttggcagcgggtgggcatggagag

SEQ ID NO: 453289 - DNA, 122 bp, Homo sapiens
agccctgtttcttcaatctctcccacactcaaactggcggaaagagttgattacaaagcccgtctccactttgacgtcttccatggactctgtgaccccgtccagcttttctctccacccct

SEQ ID NO: 453290 - DNA, 122 bp, Homo sapiens
ggggttggcagagactgggacggaagtccctcagtcccccaggagcctccttcatggacccggggatcccaagaggggctgcctcaacttaggatgggcaactgtgtcaagtatccactgag

SEQ ID NO: 453291 - DNA, 122 bp, Homo sapiens
agctccagcgctcacgcgctttccgcattgagtgcagcgccatcttgagaagggcggagccgtcttgtttggaatgacgtctgttcagagagccaatcccagtctcgcgactcctgcttgct

SEQ ID NO: 453292 - DNA, 122 bp, Homo sapiens
acagagagatcggacctctgcgtaagtaacctcgctacgaaatattatgtgggaaggtcacggataaataatgctcgggagttgaatgagaaagcgtctgagcagatctaggtggatggata

SEQ ID NO: 453293 - DNA, 122 bp, Homo sapiens
cccaggcgcccagtgcctgcacctgctcccggtcaacccccgtccggattgggccacccgcgggttcctgcgtcggggtcccggggccttctcaccctcgcctgcaccctgctccttccgct

SEQ ID NO: 453294 - DNA, 122 bp, Homo sapiens
gccggctgaggagagaccctcggagccttcaacgcagccaggcggcaagtgggggcagggcgtgggcgcggacacaccccccgcagtgcccccggcgcccggcagggggcgccgccccgccg

SEQ ID NO: 453295 - DNA, 122 bp, Homo sapiens
tgtaaccagcagcacctctctgtaggaagaaccctgattttttttctcaaagagtaaaaacgaccatttaggtgttgaggctccaggtatacagatgtgatcattaaaagtgatcatcagaa

SEQ ID NO: 453296 - DNA, 122 bp, Homo sapiens
gagtcccctcccctacgctgaaccctaccctaccaagtctccgtccccttctgcagccctcgccccacacaggggctgcattttccccacagagccctgcaatcctcacaaagcccccattg

SEQ ID NO: 453297 - DNA, 122 bp, Homo sapiens
ctgcgaagaagttgcgagggtcctgcgcccccctcggcgctcacacgcgctcagccttcccggctgttgatagttgtaagcggagctgcgcactcataggtccaacttgccagaagaggtgg

SEQ ID NO: 453298 - DNA, 122 bp, Homo sapiens
tggaaatgggccctgggccgccttcccatctgggcgggagcctgtgggagaaggaccagccggccaccaccgcagaagacaccaggccaacgcctacaataccagtctaacgtctcgttcac

SEQ ID NO: 453299 - DNA, 122 bp, Homo sapiens
gtcagccaacttttatctcaagggcatgtgctaaacccagttactaggagcattggttttcgtgaccttgtaagaaagacacaaaacccattacctgcattatacacacacacacacacaca

SEQ ID NO: 453300 - DNA, 122 bp, Homo sapiens
ttcccatgaagccatgggtggattcttgttcctagctggacccgggctgaacccttgtgacgccagggcgaccctgccggatctcagggacctggcctggacagaaaacagaggatgtgggt

SEQ ID NO: 453301 - DNA, 122 bp, Homo sapiens
ttaccgtgccaggggaataacgcacctcacacgcggtgcgggtttgcggcctagcagcagcggaccgcatcagctgcctagttgtgtagtggctgtgccatctgagtttgtgtaagttacct

SEQ ID NO: 453302 - DNA, 122 bp, Homo sapiens
tgccgcggcccgggcgccgatgcggctgggcgggtgccgggccttagcagcagtagcagccgcagctgcggctaccgcagctcctacaggagtgggaggtttcgcggcggcgcctggggccg

SEQ ID NO: 453303 - DNA, 122 bp, Homo sapiens
ctgctcccgcaccaggcccagctggcgccgctgggtccgccggcagcgctccagggccgccgcctgctgccccagtgcctcgtccttgcgccgcaaccgctcctgcaaccgccgcagccgcc

SEQ ID NO: 453304 - DNA, 122 bp, Homo sapiens
cctgccttcttcctttctttccttcagtaaacgttttttgaaacgatgatgagcaaaaaacgcctgatccagtctatggcgcgtttcggtgggaagatgaacacgccttcccagcagagtaa

SEQ ID NO: 453305 - DNA, 122 bp, Homo sapiens
cattacacttgacatgcctgtgaaatatcctagtggagctgtcaatgtggtgaatacacacgtctagagctcaggaggagagtgccagcaagatatgggagtttttaccatgtaaatggtat

SEQ ID NO: 453306 - DNA, 122 bp, Homo sapiens
cctttctgggcgtgcggaatgaaactctgttgaagcctgaagcttcgcgtgtaaccgcgccgccagagttccgaacacttcaagtctcccgtgttctcagagcatcgtctctaacttcctct

SEQ ID NO: 453307 - DNA, 122 bp, Homo sapiens
tttttacatttatttaaacagaaaacgtgcacatgagctgcctactcattttcttcactgcgcagcctggcattggggttggtgactctgatggccagttgggcagctctttccacgatggc

SEQ ID NO: 453308 - DNA, 122 bp, Homo sapiens
tggtaagtattcacttacagcctatgctccccaacggactacaaaatccagcaggtgccacggaactcacggtcactgctccattcccagccccagcacgggtggaagatgccccctacaca

SEQ ID NO: 453309 - DNA, 122 bp, Homo sapiens
gtgtaagagaagtatgcatgtagacgtgggtcgctggcccctgctccagcccctaccccacggttagactgtctttgtcagctggagtcgtcccacatcctgccacctggcctctcagaaaa

SEQ ID NO: 453310 - DNA, 122 bp, Homo sapiens
gagcagtgggatggaatagaaagtacagaaaaaaaattccatacccaaagggcagggggccgggaccacagccacagcgattcagtgaggaaaaagagaaaggaaagtcttttttttttttg

SEQ ID NO: 453311 - DNA, 122 bp, Homo sapiens
agaggctgcatgtcccgtctgcccttctcgccctctccagccgtccggttgggcttgtcacggcaccgcctaccaagacgggcggttaagacactaggataggctcctctccaccggaaaag

SEQ ID NO: 453312 - DNA, 122 bp, Homo sapiens
aggccaagaagaccaacgccggcatccggcgcccggagaagccgccctattcctacatcgcgctcatcgtcatggccatccagagttcacccaccaagcgcctgacgctgagcgagatctac

SEQ ID NO: 453313 - DNA, 122 bp, Homo sapiens
cgcagtcactagggctgcagcggcgactcgctcgttcccggcaatgacgtccactccaaccggcctgcatcagctgagcttccaacacaaacactggcgcagcagctaggtcgccacccact

SEQ ID NO: 453314 - DNA, 122 bp, Homo sapiens
ccgggcactggcccgctccggcctgacgcacaggcggaagctgcgggccgcctgggtggccggcggggccctcctcacgctgctgctctgcgtaggaccctacaacgcctccaacgtggcca

SEQ ID NO: 453315 - DNA, 122 bp, Homo sapiens
ttagatggagtaagcgctgtcgacgggattgtgccgcatgcggcaaagactgaggcctcccgctacaggcccggagtcgcgacagccggtctgccaggcgcccacctccacttcctactgct

SEQ ID NO: 453316 - DNA, 122 bp, Homo sapiens
accttccaaagattaaaccagccgtgtacaaactgctggattgaaaattgagagatgggccgttggcctcctcctaggagtacttgtgtgttgaaatcggaaggacgttctggagtttgagc

SEQ ID NO: 453317 - DNA, 122 bp, Homo sapiens
ttaggtgtttagtactagtactaagttaggaaattattactgaggtgctttgattgaagacgcctttactgagtccttgggaagtaaaatagtgacggttaggcctggagcagtggctcacg

SEQ ID NO: 453318 - DNA, 122 bp, Homo sapiens
gcctgggcaactgggtgaaactccgtctaaaaaaaaaaaaaaaaaaggtctgaagagaaccgaagagaattgagatttagtggggaaaagcgggagaaattaccctggagagactgaaaaat

SEQ ID NO: 453319 - DNA, 122 bp, Homo sapiens
caggagtgctgagggccagtgttgacccacactaccctcccttgaccagctgtctgggaccggaaaccagctttgtctccaggtagagacaacatcctgtgactgccaggcagaaaggacag

SEQ ID NO: 453320 - DNA, 122 bp, Homo sapiens
ctgcccaggtggaccctccacccacccccagcactggctgtgagagtagccagaaaatggcgagattctctccctgggtaggaaggaaagatatgagcagaagcgtgcctagcaaggctgca

SEQ ID NO: 453321 - DNA, 122 bp, Homo sapiens
ctgcagtatctatggcaaggaccattgatagaatatgttgccagaattactctaagtgtgcggcatgaaacttgagcatttggtctcctcaccttggaggagtctacatatttcttaagata

SEQ ID NO: 453322 - DNA, 122 bp, Homo sapiens
tggaaataagagccttcaatatgagatgtccaggtagacaccttgtcgctgcaagaaagccgagtgacaagtttcccaaccaacgctgcctgcgaggggctctcgggcctgcatatgaaccc

SEQ ID NO: 453323 - DNA, 122 bp, Homo sapiens
agctgtgattgcgccactgcattccagtgacagagagactctgagaccctcactctgtctcgaaaagagagaaagacagagacagaagagagagagggggtgagaaagaaggaagaaaggga

SEQ ID NO: 453324 - DNA, 122 bp, Homo sapiens
cgtctccgcttctaattggtcaagagctgcgactgcagttctgaagcctaactggttgcccgtgccgcctcggaggtgaagtgtactgcgctgattggcttccaggcgccggccgcgtgtga

SEQ ID NO: 453325 - DNA, 122 bp, Homo sapiens
caatcagaaattatctcacatgtcctatgtcctatgaaacttcggtatttatgaccccagcgtgggtccgcggcgccccggaactacacttcccacaaagcattgaggcgaaccccggcggc

SEQ ID NO: 453326 - DNA, 122 bp, Homo sapiens
ggcctacgccgggggagggggtggtggcggggggcgtttctgtgggggcgaggaagggagcgggtctccgcaggcggaagtttgctttggaagattttattccagacgctgtcctggtccct

SEQ ID NO: 453327 - DNA, 122 bp, Homo sapiens
cctggggtcagagcccaggaaattaaaagtgagagccagcagctgcggagaatcctccaccgccactggtgtctcgtcttatttaactggagaaatccccagagcagggtccttaacttctc

SEQ ID NO: 453328 - DNA, 122 bp, Homo sapiens
tcgcgatcccctagcacttgatccataacactatgatgcaatataatgttatattgtcatcgtgcaccaacttatccttcttcaacagagatgatggggactttcttaagtttctcagtata

SEQ ID NO: 453329 - DNA, 122 bp, Homo sapiens
tcccaatctctatccactgcccacaactcaaaagccaagcaacctcagagaatgaactgccgaaggaagaagctagggcacggaatttcacctgatgcaagctccatcatcatcacctgcaa

SEQ ID NO: 453330 - DNA, 122 bp, Homo sapiens
ccttgcttgactttggcagttggaccacccttcttacgcaggtacagagacttcagatcacggcagtcgctggggtcagcatccagagtaacctgccccaagaactgatcacagaattttcg

SEQ ID NO: 453331 - DNA, 122 bp, Homo sapiens
caggcatgcgggcagacagacgcccaacacagagacctcccacacgctcgtctgtgtcaccgccgccccttcctggttggccctgcagacgaggaagccctccaacctgcagccaaattcac

SEQ ID NO: 453332 - DNA, 122 bp, Homo sapiens
cagggaggtttgggaaacgctgctcatgtgatccatttagacggtttctttctgttcgaacgcttcttcccgcgcacacctgggttcccccgggctgcggcccagcgattgattccagctgg

SEQ ID NO: 453333 - DNA, 122 bp, Homo sapiens
aattagaatccaggcgtgagccccggctggctgcgtccactggagccgcctgacctcacccgagggtgggaggccgtgtggtttcttggttctcagccatgcaaactttcttggccgcaggc

SEQ ID NO: 453334 - DNA, 122 bp, Homo sapiens
gcaccatgaaccctacctcagcgcgaaacctgtcttttgcccctcccgaagccaagccttcggatataatagaccgtagtgctttatttattgacttagtcaaccagtctagttgagcaact

SEQ ID NO: 453335 - DNA, 122 bp, Homo sapiens
cagagaccatgggggctgcattcaatgctcaaaggtcacctggggcagcatgcaccttcccgtgcctggctacagtgatgattagtggtctcctcaagcacttggccattagctttatgatg

SEQ ID NO: 453336 - DNA, 122 bp, Homo sapiens
tacctaaagatagtgtcagattccaaaaggtgagggctcagtccccaagactgcctccctcgacttcagatgccagttaaaagctccaagctgtctgacttgtgcctataactgactggctc

SEQ ID NO: 453337 - DNA, 122 bp, Homo sapiens
ctggtgttgccagggatctgactaaaccgtcttgcaaaagtttgcagcattcacccgaggcggactacaactcccagaattccgggcgctccccggtgctgattggcggagcccgtgactcc

SEQ ID NO: 453338 - DNA, 122 bp, Homo sapiens
ggcagcagaaagaactccggaagggagctccggggctgtccgcggctcctcagggcagcacggtgccgggcaggcatgctctccagccagggcgcttgcagcaacgccctctctcttcaggc

SEQ ID NO: 453339 - DNA, 122 bp, Homo sapiens
tctgtggtcactaccttcctgtgctttggaaggtactttgaggggaaccatgtgaaaacacgatgttcagaaacggtcacaatagaagccatgcagagaaagtgagtgtaactgagagggct

SEQ ID NO: 453340 - DNA, 122 bp, Homo sapiens
gtctgcctgtcctgcgccatggcctccctgtgcgtctgtgaagtcagtgtgagctgctcccggggcggcaccggcgtggtgacctcctccctggaattctctctgttttttttttttttttg

SEQ ID NO: 453341 - DNA, 122 bp, Homo sapiens
ccagtgtggtgtgtgggtgaaaggagccggggacgtggggggatcacagaccccctgcggcgtgccgcccttgggctgggggcggttggagcagagccgggggcagagacgggcactgtgcc

SEQ ID NO: 453342 - DNA, 122 bp, Homo sapiens
ggcaggcccgggctgggccctcagagccccggctgccaaccttggcgccgatctggttcccgcactgcccggtctgcgtgagcacaagctccctcgtggccaaggcaggattagggcggcag

SEQ ID NO: 453343 - DNA, 122 bp, Homo sapiens
tccgaagtcggcgtagctgaagccgggcgggtagttgtcgcgcatgaagcgctggtactgcggccgcccctcgccctgccagtgccaccagaaccactcgctgccccaggcgggcaccgaga

SEQ ID NO: 453344 - DNA, 122 bp, Homo sapiens
tttttaaacactggaatgttttggaaatacagtctcctttattaatgtaagaggcctgcccgtaaacttgagctaattctgttgagtcagggcttactgatagattcctgaatttacccaga

SEQ ID NO: 453345 - DNA, 122 bp, Homo sapiens
tccccgtctccgatcgctccgcaaactccagagcgaggcacgcgcctttaaaggcaggtccgcggctctcccacgtcctggcgcccggttttccgcacccagtgtccccacagctgtgcccg

SEQ ID NO: 453346 - DNA, 122 bp, Homo sapiens
tcatcatgaagagcttcagtccacgcggcgttctcctcccattttcctgggttccctgaacgatgagccaagtaagctgtcttagctggagagatgacaatggacttggacaaagtctggag

SEQ ID NO: 453347 - DNA, 122 bp, Homo sapiens
gctgagctttctgggagatgtagtctcatggcaactcccagccttttggccacaaggctacgggacctacaatcccagcctgtaccaggatcgggagcagttcgcagcactagaggaagggg

SEQ ID NO: 453348 - DNA, 122 bp, Homo sapiens
caggcctggttatgtaattctaatgcagaatctcccccttcgtgtttgcatgcgtgtagccgggttcacagaactttagccacaaacaggagtgtttccctttttccagggctcccgtgtta

SEQ ID NO: 453349 - DNA, 122 bp, Homo sapiens
acactctgtaagctttggtgctttgcttattgtgcctaattaatagttgcctctggaaaacgcagaggaggtttcagactgcctcaaagaacttcccagagagtggagaagctgcagcacaa

SEQ ID NO: 453350 - DNA, 122 bp, Homo sapiens
tcttctgttttctgaatttgaatcacttggaaaatccactgggctttggatctgagaagccgacactgggctctgggcaaagctgtgggctttgcagcctgccagcagggggcctcttcagc

SEQ ID NO: 453351 - DNA, 122 bp, Homo sapiens
gatttctacttacagagactatctactgttacttagactatccaaaataattctgttgaccgcgttgttattttctgctggttagaagtggtgtcaggttaccttctttgaagagaaaaaga

SEQ ID NO: 453352 - DNA, 122 bp, Homo sapiens
tgaattttgtggcatgcacaggacacttaactggcttttaaacgtttttccagcgtgattcgccctgtcctgctctgttcctttcagcttaggtccatcgtaggctctgcctggctgtttgc

SEQ ID NO: 453353 - DNA, 122 bp, Homo sapiens
gtactcctgtctggctcctacctcctgggtcccggccctccctccctcagcgttttctagcgtttgcgggtttgccagcagagcgtcaggtggtctctgcgtctaatttccatctctctgag

SEQ ID NO: 453354 - DNA, 122 bp, Homo sapiens
gcactaggagccatagagtgtggtgctgggagcggcacagatatatgggcaggtgggaagcgctggggtagtcccactaaaaagggaccgttgaacgggggtgtctgtatatctacctgaga

SEQ ID NO: 453355 - DNA, 122 bp, Homo sapiens
attccacagacccagaaacaggcccagagagggaaagtgacctccccaaggtcacacagccggaaagtactgaagtcaggttttgaattcaggtctaactataaattggtgtcccagggagt

SEQ ID NO: 453356 - DNA, 122 bp, Homo sapiens
tggcaacacgtttctcagctctcgggtgatctttaaggcagaagctggctctccgcctgtcggcgcgcgtccccggtgtttacggccggtggggccgtaccacggggacgccccagccccgc

SEQ ID NO: 453357 - DNA, 122 bp, Homo sapiens
ctcaccctcagccccagccgataagggcgaggtctgctccccaccccgacccaggctggacgatccagggccgcaggccagaacagaacccctgagatcggtgggatccccctgtttcttca

SEQ ID NO: 453358 - DNA, 122 bp, Homo sapiens
cactgtagagaatttggaaacatgcaagcagatgccagtttccttgcgccttaaacagagcgtcctggtgtgagccctctcccccaacagccccctgctgcgatgttgcctggctgccgggc

SEQ ID NO: 453359 - DNA, 122 bp, Homo sapiens
ggaggcggaagcgctccgccttcatcgcctggaactctgggaggtgcttatttctgggcacgccccctttcccctctgagccaatcggagcagggccgagagcgcaccgggcactggcttcc

SEQ ID NO: 453360 - DNA, 122 bp, Homo sapiens
gggggctcggcgctcggaatgcccatcgagggccgggactgtaactcccggacgtgggagcgcatgaaaaagagacagaaccacgtatcctggtgcgaagcactgggcatcgggctgggctg

SEQ ID NO: 453361 - DNA, 122 bp, Homo sapiens
ggcctgttgcacattgtcacttctacaagtgactaacaccgtcaggataatctaaaactacgaatactacctgactccacaagggtacggtgtattctccagttttagcatctgccttaaaa

SEQ ID NO: 453362 - DNA, 122 bp, Homo sapiens
tggcatagttggcagaataggtccctccctccaccactgcccagtgtttctctctgaaagcggcacttggtaccaacatgaactcctatctctgactttcctaaggtcaggggatcaggatt

SEQ ID NO: 453363 - DNA, 122 bp, Homo sapiens
accgccccctaagaagaggaagaaatggctgaaggaggcaggcggcaacgctacagcaggcgggggcccaccaggcagctcctcggactcggagtcctcccctggagcccccagcgaggacg

SEQ ID NO: 453364 - DNA, 122 bp, Homo sapiens
tgagagctaagcgactgccctcgcgcccgcagaacagcagggcctgcatcgactctaaggcgagaccagaaacttgctagtggagcaattctggtgcccctgcccgggctgtgaaccctctg

SEQ ID NO: 453365 - DNA, 122 bp, Homo sapiens
atacatttacttaattgttccatttagcatacatgtatggtggttttagaattgctcccccgatcccctgtgggaaacaacttatcagctagagtacagtgtgtacgtgcagttccttttgc

SEQ ID NO: 453366 - DNA, 122 bp, Homo sapiens
gctcatctacctgttgctttgtatttattcttcaaaactctgccgtcttccctgaccttccggagccggtgtttgtggcgcctcctgctggtcactgggttcaggcagtttggagctgggtg

SEQ ID NO: 453367 - DNA, 122 bp, Homo sapiens
tggcgagctccggcgctgacggcgagcagaaagtggcaggcagggtagactttccccgtgcgggaagcggttatctgcaatcccctcagcggctactgcccgccattaacaggacagcgcaa

SEQ ID NO: 453368 - DNA, 122 bp, Homo sapiens
tgtctgggggccgctgggtccctcctcacaggagcgaggcaggcagctctggtgcagggccggccaacaggcctcagatctggagtcacagacccaaggacgaggacaagggccccacacac

SEQ ID NO: 453369 - DNA, 122 bp, Homo sapiens
gagggaggtggccggcgtaatgcggaccagatgcggcctggggagttgcggagccctgggcgggggctggggagggggcgcggccggcagcccagttcccagcctgcggagcgcagaggccg

SEQ ID NO: 453370 - DNA, 122 bp, Homo sapiens
cgggggctgagcagggttctacccggctgggtccaggcagaagtttttcctccccacctccgggtttgtcctcatcatcggtcactcccattcacagctttaagattctggaggccaagaat

SEQ ID NO: 453371 - DNA, 122 bp, Homo sapiens
gcgctgcaccctgaggaggtcgccgcgcgactgcagcggatgcagcgggagctgagcaaccgcaggaaaatcctggtgaaaaacctgccccaggacagcaactgccaggtactgggacggtg

SEQ ID NO: 453372 - DNA, 122 bp, Homo sapiens
ctcacaaagactcatttcatcctgtggtctagggagtgaaggttccaattcacactcactcgctatgaagcatatactctgtggcttttttttttttttttttttttttttctgttgccggg

SEQ ID NO: 453373 - DNA, 122 bp, Homo sapiens
accatgacctggctgcgtactggcccaccaagcattcgactggcgtgcccagccactctccgtcatcgcagagaagtgctctatgtgagatttggttaaaggagtccctgaaggcctgtggg

SEQ ID NO: 453374 - DNA, 122 bp, Homo sapiens
gccaggaggcctttcaccagcgccagctgccgttcctcccagcccagcgcgtccagggagcgcacgaccccggggaagcacctcagcgccacgccattctcccgctgcttcacctgtggaga

SEQ ID NO: 453375 - DNA, 122 bp, Homo sapiens
gagcaggaatagggtcctgaactgacaccaccggcgggcaccctcgtccacagctccccacggaaactggagtgagcaagcatccagcatggggacctggtattccagacggaagctccagg

SEQ ID NO: 453376 - DNA, 122 bp, Homo sapiens
tccacaaccatttatagatgaaaacattgggctttaagagggaaataggattgacatgaacgagtcacgtaggggttagtaatcatcatcactgtcatcatactagacatttattaagtgct

SEQ ID NO: 453377 - DNA, 122 bp, Homo sapiens
aaaaaaaattttatagtggaaatacagtaacgagttggcctagcctcgcctccgttacaacggcctacggtgctggaggatccttctgcgcacgcgcacagcctccggccggctatttccgc

SEQ ID NO: 453378 - DNA, 122 bp, Homo sapiens
gtgactgcactgaaggtgacaacagtccagaaatgtcgccgctgcggtgaatccatccatcgcccctcgaagccttgccctatcttggctgtcataccgtctacggccagcagggggtagca

SEQ ID NO: 453379 - DNA, 122 bp, Homo sapiens
tgttgctgtttgtatcgcagtggggctggctgtcctgtgtttacggctgactcaccattgcggcttgaagactttgcaggtcttccatctacatccaggagggatgccgctaactcacctgt

SEQ ID NO: 453380 - DNA, 122 bp, Homo sapiens
tccttgcatgtaacccccactgtggccctctaggtgttactgttagagtcccactgtgtacggactgggaaactgaatcttggagaggttaagtgacttgctgaaagtcaagtagctggtaa

SEQ ID NO: 453381 - DNA, 122 bp, Homo sapiens
aatgctcacgagattaggacacgcgccaaggcgggggcagggagctgcgagcgctggggacgcagccgggcggccgcagaagcgcccaggcccgcgcgccacccctctggcgccaccgtggt

SEQ ID NO: 453382 - DNA, 122 bp, Homo sapiens
aaaatgttaaagtgccagcaagaaattgagggtagtatcttggagtgttgtgagaagagccgtcctgagttctgacggtcaccatacaggcagagtgacacctgtgccttcagctgccccga

SEQ ID NO: 453383 - DNA, 122 bp, Homo sapiens
gaatgggctggagaccccaaaggctggccgtgcctccccaacttggtgagcttagccttccgtttttggaaagcagcctggagctggcctttaggaattcgtgtttacatgtaaacacacgt

SEQ ID NO: 453384 - DNA, 122 bp, Homo sapiens
tgggacgcctggccaaatgcggggcggtctctcgcgggccattggcttgggccaccgttccgagtcagctcctaggatttccccaggctttgcggcccctttgtgggtctaggccagcgcct

SEQ ID NO: 453385 - DNA, 122 bp, Homo sapiens
tggaagtgaacttgattgcagcctattttcgtctggaggcggtggattcccggtaggaggcgccttcagtcctcggctcgatcctgtgacgccagccagctgcctatcggcttctcagtgtt

SEQ ID NO: 453386 - DNA, 122 bp, Homo sapiens
cttcacgccgttctggttcccactcccgccattctggttcctactcccaaaggctggggacgtgtctttgagtcctggcccgcggaaaacgggtccggcgttgggcctgaccggggagggag

SEQ ID NO: 453387 - DNA, 122 bp, Homo sapiens
tcgtaaacattttgtgggcttggcggagactattacgacccaaataaatgcactgtgtagcgtgttcacagggctccggggcctttcgaaaggttctctgtttgcttttgcgttttgcctct

SEQ ID NO: 453388 - DNA, 122 bp, Homo sapiens
ctcgaggccccgcgtccggtctcccgcgccagcagggccggctctgcagtgaggcccctgcgcacctaggtggagcccgacccgcagttttcggctgggccggccccacctgacccgccggc

SEQ ID NO: 453389 - DNA, 122 bp, Homo sapiens
gcgccctagcgagcaacccacatgctctggaagtgtggttcaactttcaccaggctactgcgggcggccggccagctgtcagcgggcactccgcccccaggagctgtccgcaagcgcggggc

SEQ ID NO: 453390 - DNA, 122 bp, Homo sapiens
caagaaggaaggcgcacaggacgctggtctggagccatccggttcccggtctgctcaccacgctcaaggagcccctcaacaggaccaggaggagaacaggcacccagcctggggttcccccc

SEQ ID NO: 453391 - DNA, 122 bp, Homo sapiens
caactgttctcgccaactgcccaggggccgccacgtggggcaggccagctggtgggtgcccgggctactgggcacatggcaaaatccatagcctgcaagctggcagcggccaaagctgtcct

SEQ ID NO: 453392 - DNA, 122 bp, Homo sapiens
ggctctcagcagaaactggctgattcacttgggagatgaaggggcagagcacacaatgttcgttaaggaagaatgtcaacagctgggacatcttagcactcagtccctcctgcagtctatca

SEQ ID NO: 453393 - DNA, 122 bp, Homo sapiens
tcccgggtctgggagctgtgattttttactgtcaggcaggaagagcggtaactgccatcgcggcgggcatccctggcgccagggtgttggtctgggtaccggcttccctctcggccgacttg

SEQ ID NO: 453394 - DNA, 122 bp, Homo sapiens
agcgcgtccccgccgcgagccgctaatcgtccgccgctcccgttaccggggcaaccgcggcgcctcctccgtgtcggccccgatcgtccctccgcgccattttcaaactgctctagcgccgg

SEQ ID NO: 453395 - DNA, 122 bp, Homo sapiens
aaaaaaagcttcttcggcaattccaaggtgcagccgggggagagcgctgaatacaacgggcgtcgctatcagtagctccctgggggaaaaagggggtccgcgctcacgtgctgcctggaaag

SEQ ID NO: 453396 - DNA, 122 bp, Homo sapiens
tgttttagggtggggtctggagcttatgaacaagttgtgatcaaacgctagaagtcaagtcggtgaaaacatttccttgtggatttaagatgtgagtagttgatgtatcaaggcattttatt

SEQ ID NO: 453397 - DNA, 122 bp, Homo sapiens
gcccagagcggcccccttggtacccgcagtgatgacacaggcactggcccccggagggagcgacccagccggcggctgaccacaggcaccccggcctctccgagacggcctcctgcctgcgc

SEQ ID NO: 453398 - DNA, 122 bp, Homo sapiens
gctgcaggccggggaaacactgcgctcttagagaggggccctgtcctccacagatagccccgcagaccctcggaacgcgggtggacggggagggcgtgcgcgagcctcggggcttgggtggt

SEQ ID NO: 453399 - DNA, 122 bp, Homo sapiens
ctcccccacggccgaaagggaagggggctggcgaaggggaagacaggcttccgggcgccgcggcgccgagccctcggctgccccaactcctcaggctgcccggcaagttgcgccgggtcccc

SEQ ID NO: 453400 - DNA, 122 bp, Homo sapiens
ctggagtagaatgaagtaagatgggagtggagacaaggaggctaagtcagggaaataagacgggggaacaagtggtttagagaagtgagtcttctagtgtgagccccagatctgcagcctca

SEQ ID NO: 453401 - DNA, 122 bp, Homo sapiens
cgtgggagggagagcaggagcgagcgcgcgagagagcggggcatttctgcgcagctctagcgcgcctcggagcccgccggggcagccgccggacaccaggaccgcgagccagacagctcccg

SEQ ID NO: 453402 - DNA, 122 bp, Homo sapiens
agccttggtgggcccacaggtctgttgttccccctgagagaggatcagagtcaggagaggcgagacaccaagttgacacgaacagatccctgctgccggttgttctggcggtgctgtgagca

SEQ ID NO: 453403 - DNA, 122 bp, Homo sapiens
tgccattggcagaacaaagcagtctcggcctggcttggcagcatccaaaaggaccgcagccgccctgccgctgcacacggtgcatctgattggcggaacccaaacccttccgcagccctccc

SEQ ID NO: 453404 - DNA, 122 bp, Homo sapiens
gcatgttgtgcgcgtgctcgaaggtggtgatggtgcccgtcttcaccaggaactggtccacgcccacgaggcccacaatgttcccacaaggcacatcctcgatgggctccacgtagcggccc

SEQ ID NO: 453405 - DNA, 122 bp, Homo sapiens
ccatccagcccgtctcggtttccgcatccgtctgattccttatgatgttgagggtgctggcgtctgggtcctttatgatgcagagggtgcccccgtctcaccctgggcgcctccgcgctccc

SEQ ID NO: 453406 - DNA, 122 bp, Homo sapiens
gcgccggggcacgctgctaagtagcgcccgtctaagtggcgtggccagtttcctttccggcgctgacaggcgccagtttgcttgttagcaggatcgaagggcagagctagaagaccccaaag

SEQ ID NO: 453407 - DNA, 122 bp, Homo sapiens
gcagggatccctactgaggaggcagaggcaccattcccctctctttgacctggggaatatcggctttgcttatcacccctcctcccaccatacagagacagtttctggtgctaagagacacc

SEQ ID NO: 453408 - DNA, 122 bp, Homo sapiens
gttggtgaggccatcagctgccgaagggaagctggggaatctggacggaggagaaagaaacgtgagctgcactcccggcgacacattggactaagaacggcgcctgccttcttgagaggctt

SEQ ID NO: 453409 - DNA, 122 bp, Homo sapiens
agggtgagtccctgcgtgacctgattctctgtgggcaggccgggcagggtggctgcagggcggcggagcctgtgctgctggcctgcatttctctggctggacagatactgcgcccatatccc

SEQ ID NO: 453410 - DNA, 122 bp, Homo sapiens
gcgcggggttggggcggggcccaagcccctgagttctgcggcgcccgcggctacgcgtaccgtaaatgtcagaatagcagggaaaagagaattagaggcccgtccccactttccccagtgac

SEQ ID NO: 453411 - DNA, 122 bp, Homo sapiens
tgcgccgcgcccgctgattggcagccgcggatatttgaaaggagggtctggcgcggaaaacgaaggttacattttggatcctcgcggagtactggtcaggcggttaagtcctgtacctagga

SEQ ID NO: 453412 - DNA, 122 bp, Homo sapiens
tattgggactggtcccctgaagaaccctgcaacacgttaaacattaccgtaaaattaaaacgcacaaatttgcagatctgtatgactcccagtgtaattgggccaataggcacaggaccaga

SEQ ID NO: 453413 - DNA, 122 bp, Homo sapiens
atagctccccagcagaaacccggaagtggaaatctcagccattcagtgtttgggtgaagacggaggcgggttctggacagacctacgctgtcggggagtgtttacttcgcctccacttctgt

SEQ ID NO: 453414 - DNA, 122 bp, Homo sapiens
tgaaactgaacaaaccgttctttagagggagcaggcggggcagactgccaaggtgcgctgcggagggccttggcactggctgctacatcagaagctggcatcacccaccctggggacaggtc

SEQ ID NO: 453415 - DNA, 122 bp, Homo sapiens
gcccttgaaacaaaggaccacatgggacactgtgtgcagggcactggggcagtattagggcgcagactttagacttgggccttttctggagatttaatggtcggtctagttggaaaaaacaa

SEQ ID NO: 453416 - DNA, 122 bp, Homo sapiens
ctcgtccatttccgcttccggaacgtagcgcccgccgccgcagtggtggggcaggaacggcggggcggggttgtagttcgcttgctcctgtcacatcatttctctcacctgtccgctttggg

SEQ ID NO: 453417 - DNA, 122 bp, Homo sapiens
agtgtgcaaaaagccacactgccaaagcaggctactagtgaggatcatcctgggtgacttcgaatgcacttgaggggaaaggctcaagtaccctgtagttgtagcaggaaaaagacataacc

SEQ ID NO: 453418 - DNA, 122 bp, Homo sapiens
ttcagggacgcttcaacaagccccaacccacccaactgcgtggcgctccccgcctttgggcgccctgttagggttgggggtgacccctgcagcccctcatgtgcgaatccaggttctcctcc

SEQ ID NO: 453419 - DNA, 122 bp, Homo sapiens
aagaagacacaggcgcccgggatactatataatctggttctgagctagagggagcgcatgcgccggcgacacttctggcggcaggagaaaggcgcgcatgcgcagagccgagacgaaaaatg

SEQ ID NO: 453420 - DNA, 122 bp, Homo sapiens
actcattcctcaggtggtctagagagacaattcctgtcagaggcaacacgggcagggactcgataatgttaccagcctccaagtggcaggaaaacactcctttctctctagggttcccattc

SEQ ID NO: 453421 - DNA, 122 bp, Homo sapiens
cccacttcatggtagttattcttttctatgcacctgttcttttcacctatatccatcctgcgttagagagcttcatggaccaggaccggattgttgccatcatgtacactgtggtcactcct

SEQ ID NO: 453422 - DNA, 122 bp, Homo sapiens
cttctccttcactttctggtcaaaagacttggagacgaacgccgtaagttcttccatcgccgccgcacgtcagcccggcgctcaacctctgccagcagagccccgctctttttttccttctt

SEQ ID NO: 453423 - DNA, 122 bp, Homo sapiens
atattaaatatatataacacatatattatttagcatactgaaacacacacacgtaccacacgtatggtaattccatgccaatttgccacaaaaaatactttcatctagttcttttttagtgc

SEQ ID NO: 453424 - DNA, 122 bp, Homo sapiens
gcctcacagaacggacgtggcccagacctcacttgacctctgagaggccctgaaggcagtcgcccaagggcaggggcaggggacagggcggagggggaggacactgagcggagcggggaagg

SEQ ID NO: 453425 - DNA, 122 bp, Homo sapiens
ggggcggacaggaggtgcttcgactgggaggagggcgaagagtgtaagggggcggaggggcgatggcagccacgtgatctgttgctatcacacgtgaccgcttgacattgctctgaggagca

SEQ ID NO: 453426 - DNA, 122 bp, Homo sapiens
gatcaggcatcgagagaactgtggtctctgctgaggatacttacatttcccatacctaggcgtgagagaaacctgtcatccatccatccatccatccatctatccatccttccatccattca

SEQ ID NO: 453427 - DNA, 122 bp, Homo sapiens
aggggccgtgacgtgcccagggccacagcaggagaggtgcctgtctggggcagcaaggcgcgcgttccgggctggggcgccaagctgataggccggccccgtttccctgccgtgtccatcag

SEQ ID NO: 453428 - DNA, 122 bp, Homo sapiens
tcccattaaggtcaccagagagcagttgaacactgggaaatagtaacttcagcaaaatgtcggggaagatttagtgaaaatgaactccacatcgtgcccctccgtaaggagcagagctggcc

SEQ ID NO: 453429 - DNA, 122 bp, Homo sapiens
aaccaggaagccctaatattctggggagaggacagttaagggaagtggagggacaaaggccgctttgatggaaggatatgaggtcaagaattggatttgatcctttgagttgcggatctgaa

SEQ ID NO: 453430 - DNA, 122 bp, Homo sapiens
ggtgaggcctcccccttcgccctcccccacgcatctactgctcctgtcgggaaggaaggtcgcccaggccggttcagcctctgggcagggtccctgcaccgccctggcccgccacaccccct

SEQ ID NO: 453431 - DNA, 122 bp, Homo sapiens
tttcccgtgtcctggggttggttcgatgccctagattttaacaccagtttctccctagctcgtcacaatatgaactttcactttattctcttccatatgtgatgcttctgccagttcctgta

SEQ ID NO: 453432 - DNA, 122 bp, Homo sapiens
aaatacaaaaatttgctgggcgtggtggtaggcatctgtaatctcaggtactccggaggccgaggcaggagaatcgcttgaacctgggaggcagaggttgcagtgagctgagatcgcaccat

SEQ ID NO: 453433 - DNA, 122 bp, Homo sapiens
cctgctggagactccttagttcagcttagcacagaacctcggaagacagcagttctattccgggtacttccttcagagctgagttacagtgcagggaagggagcagaggagccatgaggtcg

SEQ ID NO: 453434 - DNA, 122 bp, Homo sapiens
gtattcgcgtcttgggagcccgggctgcggcctggcattcgcagtgcaggtgtcaagcgccgcagacttgctgctcgcgcggtggggcggaggctccctgtggcacctgccccgctgtccgc

SEQ ID NO: 453435 - DNA, 122 bp, Homo sapiens
ccaaaaccctttatccacagcaattctgagaatgatgagaatccccctcacccctcacaccgcaaacagttgcaatgcttagtgggattcacccttgtcgtcaccaaccctgctactccagc

SEQ ID NO: 453436 - DNA, 122 bp, Homo sapiens
gcataagtggctgggagggtgggcaggacaggctaaagttcatggaagcgaggtgcccctcgtgcacgcctaggcaacccggtcgacgccacaggcaggtactggcttaggtcggagaggtc

SEQ ID NO: 453437 - DNA, 122 bp, Homo sapiens
ggtgcattcgctcatgtctccgtggcagggccgggactcctggtcccccgcgattctgagcggtgcctcacagcctaggtcctccaacctcacagggcggcccgcagcaaatgcgccactgt

SEQ ID NO: 453438 - DNA, 122 bp, Homo sapiens
gggagagcaggatttccaggattcctggaagagtaacgtgaatgctcctgggtgggcagacgcaggggtgggtatggatcactgtctgtcactgcccccatcgggcagtgcagagctgattc

SEQ ID NO: 453439 - DNA, 122 bp, Homo sapiens
gtctgtgcgtgagactccttcgattgtagctctgtgctgtcggattggaacagtagttcccgccaagtcctcccaccaccgcggcctcggaggcctgggccgtggccagataggagtttgca

SEQ ID NO: 453440 - DNA, 122 bp, Homo sapiens
tgagccgctgtgggtgcctggagttgcctctgcagcccggagcggatgagcggaggctcccgtgactcacccaactgcaggaactgtcaactggcttctgcccagccaagaacttttatcaa

SEQ ID NO: 453441 - DNA, 122 bp, Homo sapiens
ggaggtctccacatctggagagaatgagggggctgggtggagagttaggggagaagataacgtagcccaagaacagtttcttagtctgggagccagagggggctcccggggatggggctgtt

SEQ ID NO: 453442 - DNA, 122 bp, Homo sapiens
gtatccaacatttcccgtgttggtttcaaagcagacagcatggttcagagcagcgggcaccggtgcagatcgcccatctccacggcagaggtgatcgtttccagcgcagcggtgcaaagcca

SEQ ID NO: 453443 - DNA, 122 bp, Homo sapiens
ggtgaggccaccaccccttccccgccgtgtctctaggaccctggccggctcctctcatgacgcacccctggttggggggtggtcccagtatcccatacacagacctcaccccttcctgtccc

SEQ ID NO: 453444 - DNA, 122 bp, Homo sapiens
acatcctccacccttcttccaaactcactggggagtcaccactgtcagttctgtgccaggcgtcagagcaagtctcatacacatgtatttctgcatcatatgagactttagaaaaaattatt

SEQ ID NO: 453445 - DNA, 122 bp, Homo sapiens
agaaattaaaacaaaaattaaagatgccctatcactgggcactgttcatttgcctcaccacggtagaaatgttttacctttagagccattttaatgctcttgagaaatggtcaagttgaaca

SEQ ID NO: 453446 - DNA, 122 bp, Homo sapiens
tcaaacagctgctgtactgtttaagctcagatcctaaaatggcactttgaacatgaaagtcgtggctgccactctctgggtgactatctggcgatgacacttctacctttgtttttggcttg

SEQ ID NO: 453447 - DNA, 122 bp, Homo sapiens
tacccacacagaagtcctacagttccagcgagacattgaaagcttttgatcatgattcctcgcggctgctttacggcaacagagtgaaggatttggttcacagagaagcagacgagttcact

SEQ ID NO: 453448 - DNA, 122 bp, Homo sapiens
tgggaagacacagaagatggccaagaagagacccctcagaagaaatcaatcttggtggggcgtggtggcttcacgcctgtaataccagcactgtgggaggttgaggtgggcagatcgcctga

SEQ ID NO: 453449 - DNA, 122 bp, Homo sapiens
aaaaaaaattcccaagatccactgggccaaggtgggccaggggtggtgttgggacagctccgtttaaaaaggcatctccaagagcttccatcaaaggctgcctcttggtgcagcacaggtag

SEQ ID NO: 453450 - DNA, 122 bp, Homo sapiens
ttcaaatcaaattccaattcaacacgtatttaccaagtccctcttacaagcgaggttctgcgttaagctgggggtgggggatggtgaaacaaggaggatgagagcagagcctgttctctgtt

SEQ ID NO: 453451 - DNA, 122 bp, Homo sapiens
tgcccagcgtcgatgggcgctggtggcagagccaggctgacccccagcctgaggcccacccgatcccgatgctgcactcctagctccttggcgtaggtccctggggctgtcgggtgccctgg

SEQ ID NO: 453452 - DNA, 122 bp, Homo sapiens
agcgacggcgcccgtccggatccgtagcgtttcgcggacgccgggacaggcggccccccgcggcgcaccccgccctacacgtccaggacgtggttgagataggagatgtagcagatggccag

SEQ ID NO: 453453 - DNA, 122 bp, Homo sapiens
ctgcctttcccgcctctcaaataaatggtgtgtcaccctagaaagaaagataacacactccgcatacacaaacacgcacaccgcaaggaaccaaaggccaagagtatcaatgtaccagggcg

SEQ ID NO: 453454 - DNA, 122 bp, Homo sapiens
ggaagcgaggctggtggtggggtggaaacatcacgcactgcagtaccccccaccccggggcgcttcctggcggggttgggggatccccggagatggatctggggtaggtggtacggggtgga

SEQ ID NO: 453455 - DNA, 122 bp, Homo sapiens
gttcatcttctgtttcatcatcactgtagggaaccacttcgtcattaggctgagaatcctcgtcaaatgtcgtttctgagtctctttctgtactcattctgctggcaaattggaactacctg

SEQ ID NO: 453456 - DNA, 122 bp, Homo sapiens
cagccctcacttcctggaaaaggctccatttcctggccttcaggctcaggtggttccttccgcctggcaggtcctccccaaatccaatcccagctcgggctggattcccaaggcccctattc

SEQ ID NO: 453457 - DNA, 122 bp, Homo sapiens
acctgtgcatgctcacacagccggcctcacctctcgcaggacaggtaatcctgagacctacgcagctccctggagctctgcacgtcgaagcccagcagggcctcctgcaggtccctggggca

SEQ ID NO: 453458 - DNA, 122 bp, Homo sapiens
cctcccatcacgcctgtccctccacacgattctttttgttagcaagcacgtgtggtgtggcggggctgacaatccacccacgcgaaggtggctgtgctgggttccgtggtgctctcaggagg

SEQ ID NO: 453459 - DNA, 122 bp, Homo sapiens
acctgagggtttggaagccctgccggacccccaagatcatggcccaacatctccctagcccgggacctgtcccctgggagccacgggtacgtcatcacagactgtcttcccaaaggctccat

SEQ ID NO: 453460 - DNA, 122 bp, Homo sapiens
ggcgggaacctgcctccgcgcgttagcgcgcacgcgcgcctcatgtgtcgtccccatcagcgccggcttccgtctataggccagatgcactgtcactctggcgaagtcgcagacccgattgg

SEQ ID NO: 453461 - DNA, 122 bp, Homo sapiens
gggcctcaggtacagatggagagccctcctactatgctaccagacttcctaaaagacacacgcacacacacacactcacacagaagaagtccacggtataggtgttctccctatagcccagc

SEQ ID NO: 453462 - DNA, 122 bp, Homo sapiens
ctctctctctctctctgtgcctgtctttgtgtctctgtttctttggctttctcttacaaacgcacgggggagttggtccttttccacaatgccaaaatgtcacccaaaaagctagtgcaaca

SEQ ID NO: 453463 - DNA, 122 bp, Homo sapiens
ggtggttcataggcttctgatgccaggccccgggttggtggtcctggaggctgggttcaccgggaagcatgggcctgcttgttggagcgggtagatgcacagcctggcgttattctggcctc

SEQ ID NO: 453464 - DNA, 122 bp, Homo sapiens
ctctgacttcggggcggggggcttcacactttaagccactttagaaatatcgaggagaggcgatcccgccctggaaacgcccgggcgccgcacacacattgctgcagtactgaacacttgtg

SEQ ID NO: 453465 - DNA, 122 bp, Homo sapiens
cggcagtgattcggcccgcgccctccccggccggtccccggtggccctgagtggctgcggcgcctgagccaggcccggcctggccgctcccagcgccctgcaccgcaggcccagcgctcgcc

SEQ ID NO: 453466 - DNA, 122 bp, Homo sapiens
ggacactctatcacactcgttcagggaatcgggaacctgttatctatctagtggttccaccgttgtctaagaacttccagaagaccaggaaagacagagaagggaagattcaaggaaggtgt

SEQ ID NO: 453467 - DNA, 122 bp, Homo sapiens
ccaggctttctctctgctagcagctcttcactccgttgttgttgctgctgctgctgctgccgctcctgccggatgaatcggttctggtgcactggcccgatggcctccagaaggaccgcaga

SEQ ID NO: 453468 - DNA, 122 bp, Homo sapiens
gggctgtagagaaatccagagcacaggccactgggtctacaagcagctgggggtgcagggcgcagatgcatgccagagagtaagtgctgcaggggccagagagcctagtgaatgtgattcac

SEQ ID NO: 453469 - DNA, 122 bp, Homo sapiens
cgtccatgagacacaggcaactagctgcgaacctaaggaagagcagcatccaatgaggtgcgtgccagtgtttgttttttagcaccaacctcatatgttgacagagctcaggagtgtgaggg

SEQ ID NO: 453470 - DNA, 122 bp, Homo sapiens
attcagcactgggttgctggtgcatgactgcacattccatcacttaggagaaaacattttcgcatcaaattgcctttctatatgaagggtaggaaggctattagcttgtttgttgttgttgt

SEQ ID NO: 453471 - DNA, 122 bp, Homo sapiens
gctttttcgagaagaaagcacatcgggggctcttagaggccagcgtggacgccgcaatcgcggggtgagccgcgcgacgaccctatggctctcggaaggtgctgacttggggcgggtgcgcg

SEQ ID NO: 453472 - DNA, 122 bp, Homo sapiens
gctagctcccggacaccaccactatggaagcagtatggccactttccttgtaaaacatctcgcaggctgaattcttgggtaaacatggtactcttttgtggtgtttgggataattttttttt

SEQ ID NO: 453473 - DNA, 122 bp, Homo sapiens
ttccaatatcccctgcgcagccatgcagacaggcttccttctttccccttcttgcgcgagcgacacggctctacacgtcctcttatacctcgctacttacgcacggcggcctctttctcctg

SEQ ID NO: 453474 - DNA, 122 bp, Homo sapiens
gaccctctccctacagctccccttcccctaactcactgggcctcgctgctcggcctatgtcgcaacagagctgctccttaggatcctccgcgtgcggccggctcaccagccaatcacggcct

SEQ ID NO: 453475 - DNA, 122 bp, Homo sapiens
gattcttcagtgacactttccatgcagatacttcaaacaaaataatggagccccacagaccgaatgtgaagacagcagtgccattgtctttggaaagctatcacatatctgaagagtatggc

SEQ ID NO: 453476 - DNA, 122 bp, Homo sapiens
ccaaagatgttactaagagctttttactactgtgagagaaccagcgtgatgtgaagacaacgaacattttaagaagtttgactagtagacatttcgtttaagtcttttggagggtcttggtt

SEQ ID NO: 453477 - DNA, 122 bp, Homo sapiens
tgcttggtgattggtaaggagctggagtgcatttccaatgagctcgcaggcgcagacttacgaatccccgcggttggggctgcaggtttttggagaagcggctgggattttatgtgtggatg

SEQ ID NO: 453478 - DNA, 122 bp, Homo sapiens
gaccatcagcagggcccctccaagaggagctctgtatgccgggggagtgggctcggcccgcgggacaaggctgaaagagctccccagacccctctctgaagacagcctctgcaatctccggc

SEQ ID NO: 453479 - DNA, 122 bp, Homo sapiens
tccctgagcgccgccggatgccggcctgggtcccgcccagggctgagggccctcctgggccgggaaaactacagttcccgacatgccctgccacgggtgcgcctgcgtaccggagctactgc

SEQ ID NO: 453480 - DNA, 122 bp, Homo sapiens
aggtgttgcatgaggtgtgtgtgtgtcggcttaactgtgtcacttaatatctaacattgacgttctgtgtcatcaaatcctgccccagccactgctgagaccctggtcagtgctggtcagtg

SEQ ID NO: 453481 - DNA, 122 bp, Homo sapiens
ggaagggatttccaacggaggcggctcctctctcagcgtcctcgctgctgatccccttaccgacggctgaagaagcagattcatcccttcaacaaatctctgttgataggcaggaggagtaa

SEQ ID NO: 453482 - DNA, 122 bp, Homo sapiens
cactcatgcggaaatgctgtatttcagggggccgcttctcagggaccgggggctgtgggccgagagggagcacactgagggtcagagagcacctacagttttgcctgggttagcctggagcc

SEQ ID NO: 453483 - DNA, 122 bp, Homo sapiens
cgcccaggatgccttgcacaccccgagacccggctgcttctatcttcctggctgtgtcatcgcacagctgaaaggagtctggaccagacagctctgtccgcagtcagaactgagggtaagcg

SEQ ID NO: 453484 - DNA, 122 bp, Homo sapiens
aagtgcggggattacaagcgtcagccactaaccccagccaactctcttgattttaaatgtcgctctagatagagacatttctagttccaggtctctttgtttctcatttttatacctcagag

SEQ ID NO: 453485 - DNA, 122 bp, Homo sapiens
ccacaccctaccaccactccctgttccggaaaaggaagtggagcacagtccccgtaggaccgtctaactctgagccagactaacagaaagaaagtgagaaggaaggagggacgagccagata

SEQ ID NO: 453486 - DNA, 122 bp, Homo sapiens
ttggggtgtgggcgggaggaaaccagagcacctgggaaacccatgcagacctggggagaacgtgcaaactccacacagacggggtccccaccctggctgggaagccacgtttttgcccatca

SEQ ID NO: 453487 - DNA, 122 bp, Homo sapiens
tcccctccatggtaaccgctggttctccagatgcggtggctactggagcactcaggccctcggcgtcactttgctacctgctgccgcagccaacaaactgaagtttctggccgcggccggac

SEQ ID NO: 453488 - DNA, 122 bp, Homo sapiens
acaccccacagacataggctcctaccaccaggctccagcagagcctgggattcatggccacggtatagagcagtgggttgcgaatggcagcatagcgatcataggccatcactgccagcaga

SEQ ID NO: 453489 - DNA, 122 bp, Homo sapiens
aagaaagtgcctcccctgatgtgttcatcgcggagaggtcgcacgtgtctggctctgtggcgcaatggatagcgcattggacttctagatagttagagaaattcaaaggttgtgggttcgag

SEQ ID NO: 453490 - DNA, 122 bp, Homo sapiens
aagcaaatagtgtttcatggggttaataattaataaactgaactgtcatcagaaaacccgcggatccagttcattataatgtcatgatgacaacattttgtgagagaagtctgtataaaaag

SEQ ID NO: 453491 - DNA, 122 bp, Homo sapiens
accgtcctagccctttccgggggatgactcatcatgctaccattccagcaccagctggtacggggctccaggctagcggcttatcatgccggcccggatacacccgtcctcaaacttgggtg

SEQ ID NO: 453492 - DNA, 122 bp, Homo sapiens
gtggacctcgcggacctcggactcaccaagtgccgagtggcagatgtgctgctgagggtgcgccggggcgcagctgcatgcctcacccagccccgggggccgcagcaacgccagcagccgca

SEQ ID NO: 453493 - DNA, 122 bp, Homo sapiens
gaagtgccgctctagggtctgtcctcagcggtgacccggccgggtcgaagggcagagttccgctgtcactagccctccacccgtcctgtgtgctgggatgccctcgcggcgccgtccacgcc

SEQ ID NO: 453494 - DNA, 122 bp, Homo sapiens
ggccagcgtgagggaggacttctctcagcgttagagaggccagtgtgaggcagggcctcacgctgacctccctcagcgttagagaggccagtgtgaggcagggcctcacgctgacctccctc

SEQ ID NO: 453495 - DNA, 122 bp, Homo sapiens
gatcgcccagttggtagtggtcaacggtgggctcctccatctctccctcgctgcctgagtcggactggtcgcccggccggagctgggccgggagctgcaccggcggaaggaactgatcgacg

SEQ ID NO: 453496 - DNA, 122 bp, Homo sapiens
aagggcagaggcagaaaccaaagctctgagaaatgtgaccagctaaagtgacctgagatgcgagccagtggctgagcccaagctaaagctttggcctcaaccccccacccagagcactgcac

SEQ ID NO: 453497 - DNA, 122 bp, Homo sapiens
cacatagggaacccctcctttgtgccaacacctgttggctgtctccagtgtgctgggcaccggggatgcaaaggcacacaagacatggcccctgcctgcagggagcacacagtctactgccc

SEQ ID NO: 453498 - DNA, 122 bp, Homo sapiens
ctctggcccatcgcgaccggagcgccgccgccgccacccggccaccccggaatcggaaaccgatctcaccgccctcgaggacccgacttccggaacaaccggaaggaaaacagtgcggcggg

SEQ ID NO: 453499 - DNA, 122 bp, Homo sapiens
caggagagccgccaccgcggccgggtggtctccgcgtcgcatggcccctgccggcccccccgcccatggcagctacataattaattcgcccataaataactgattggggtcgcgcacgcgcc

SEQ ID NO: 453500 - DNA, 122 bp, Homo sapiens
cgccgcttctccctgtcacccagtctgggcccgcaggcaagccgcttcttgccctctgcccggagctctcccgcatcctccccagagctgccctggcgacctcgaggtctccgcaaccttcc

SEQ ID NO: 453501 - DNA, 122 bp, Homo sapiens
ggccgggtccgctaggacagcggggccgctgggaagttgtgagagcggcgctcgggggcgcgcttgcgtgcacgagggcccgggccgcgagcagccgcggccgtcccggtcgccacccttag

SEQ ID NO: 453502 - DNA, 122 bp, Homo sapiens
gagtggcgcgtttcagggtggggctatgacaatgcactgcatgtgcagccgccatcaccgcgccccctccaccggctccgcagtctcctgcccggctttcccttctccacctccatctctgc

SEQ ID NO: 453503 - DNA, 122 bp, Homo sapiens
gggcgccgccgccgggggcacgagtagggcctgggctgactgggacacggactcgagcgacgaggacgacgcctactacgcggcgccgcgcgttgggggcatcgtgtggcggcccgggccgc

SEQ ID NO: 453504 - DNA, 122 bp, Homo sapiens
agagatagcacaagtcagagtgtttccctaattacacttccagcccaatactgaggatatcgttaggcgtccatgggcctgtgacttcctctgactctaaggtgctgctgcttcagttcttc

SEQ ID NO: 453505 - DNA, 122 bp, Homo sapiens
ccctaatctttgatattatttttataactcgagtgccgtgacaccatccctggggcaacacggtagtggggaaatggagatatgcgctatgcgtcagacatgaagggtaagggaagaatgcc

SEQ ID NO: 453506 - DNA, 122 bp, Homo sapiens
cgttgcgctctctaaggtccttttcattttaaccaaatcagggggaacttgtcctcacagcggcgaggcagatggaacaataaatcacaggcgccgttgactgcctgcagtgcgctctccac

SEQ ID NO: 453507 - DNA, 122 bp, Homo sapiens
aatagaatcttaactcctagagcaactctgtggggtggggaggagcagatccaagttttgcggggtctaaagctgtgtgtgttgagggggatactctgtttatgaaaaagaataaaaaacac

SEQ ID NO: 453508 - DNA, 122 bp, Homo sapiens
cgcctgggccaccggcgctggttccaggttttgccagctactagggacgcgtaaagccttcgcgctcctcccaccacaccccgagggaagaagtggcaggccttacccggagactacaagga

SEQ ID NO: 453509 - DNA, 122 bp, Homo sapiens
aaatggtgttccagagtgtgcagtgcccttcagaggccctgcgtctccatcttttctccacggcatcctgcgaccgtgctcctcaggtgtgccccacgggcccgggaatgtccttcttggat

SEQ ID NO: 453510 - DNA, 122 bp, Homo sapiens
gttaatctgcctgtctcggcctcccaaagtgctgggaatacaggcatgagccaccgcactcggccccaaaactcttcttaaaggtggtcttgcaggtatgttatagttaaaatgaagtaggt

SEQ ID NO: 453511 - DNA, 122 bp, Homo sapiens
gctccccaagtcggctccgcactccgcacacaggcggcggcgctggggccgctccaagtgcgttgagaagtgtaatccctccgctaagtacttggctctcagtctccaatcactagtgggag

SEQ ID NO: 453512 - DNA, 122 bp, Homo sapiens
ctggaatacgtgggcggcccgtgggaggggctgaggcgcagtttcctactcacccggatccgaatcctccgcggtgctgtttcaagagagccggattccagatcacgctccagcccggactc

SEQ ID NO: 453513 - DNA, 122 bp, Homo sapiens
cccgccatggtgtggctgctccccaatttgttgtccacatcccgtgatttgacgtgtggacggttcccggtctggactgctttgcacgttcctgaacgagtttttccagggaggtatatgtt

SEQ ID NO: 453514 - DNA, 122 bp, Homo sapiens
gccagcggtgcccatgttctactggccagaattgcgcacctcccaggagggggaggagggcggctgttgccctcactcatgtccccccgctcagaacccatgggcaaactcagaattgtgta

SEQ ID NO: 453515 - DNA, 122 bp, Homo sapiens
atctccagtgtggaggggagaaaactcatttatgattgctcaatattcttgagcaaaatacgactgtcatctgaatccagagtagaagagaggatttttgtttctttgtttctacgtttatt

SEQ ID NO: 453516 - DNA, 122 bp, Homo sapiens
ggagggtttccgccggttgtgcggggaccgcggctcagtagtgtgggtggacgaggacagcgggtggaactggtccttctgtgactttgcagccccggcttggtgataatttttgtgcaggc

SEQ ID NO: 453517 - DNA, 122 bp, Homo sapiens
tttcggctttccgtctactaacctcagtttcctcacaccagaagtggccataattagtcacgcctggtttgtgtgagtgccgaaagtgagaggaaggtgaattgcatcatctcgtattagcg

SEQ ID NO: 453518 - DNA, 122 bp, Homo sapiens
agcccgacacagccctgctcatctcatcgggaggcccatgaccaggcacacggctgaccccgaccgtgacacagcccaatacagccctgctcatcttatcggggggcccacgaccaggcaca

SEQ ID NO: 453519 - DNA, 122 bp, Homo sapiens
ttgcaattcttttgtgtgcaagtgtctcattgtgagattacagtatgcttaagttggggacgcagtgttatatgtgttttacatcacttacagggcagtgaatagaaagaacaggaaacacc

SEQ ID NO: 453520 - DNA, 122 bp, Homo sapiens
tgtagcgaaggccaaagcttacctaaacagggagagcgcgtatggcggcagcaacagcgacgaaggagggaaatctgccttcacttccggttgcaggcttccctctactccagcctcccgcc

SEQ ID NO: 453521 - DNA, 122 bp, Homo sapiens
gggaggcagcggctgggccagctccggggacgcccgcgcgctcgcttgctcgcgacgcggcggagccagccacagccacccggcttcgcgctcctccgatgtcctcatttactgcaattgtc

SEQ ID NO: 453522 - DNA, 122 bp, Homo sapiens
tcccggggaagtggggggtcgctgtctaagccccttcccccaatcacttcgttcctagggcgtcccctggggcctggggtggagtccggctgggttcagaagtctaagggggcagtattatt

SEQ ID NO: 453523 - DNA, 122 bp, Homo sapiens
tcaaaggttccgctctcatgtcggcaagtgtgatttgaattttaaaacactgagctttgccggtggaagagttcccaagtttattccgacctacggaagcccaggaggaccaggattaccgc

SEQ ID NO: 453524 - DNA, 122 bp, Homo sapiens
tcaaacagagcgtggacttaaaacaacggggctttcagggagactgaacgcagtgagggccgtgctgggaacactggctgctggggaaacattataattttttttctgccaggcaagtgttc

SEQ ID NO: 453525 - DNA, 122 bp, Homo sapiens
ttacttttctggcaccctgagtctggaatacaagccaagtctgatcctaaaatgttaagtcgaaagacaaacagaaaaataagtctattggtcttagtttattttctctagcacatttcagg

SEQ ID NO: 453526 - DNA, 122 bp, Homo sapiens
tgagagaactacacagacgagcgcaccaaaaggctgtcaggtctcagtaaatattaattgcgcattttttttttttttttttttttaggcagaagggagtaatttcattacattagggcatc

SEQ ID NO: 453527 - DNA, 122 bp, Homo sapiens
gcggagggctccgcccggccaatggggaggcgtccgcccggccaatggggaggcgtccgccgcgccctggccaatggcgacgctcccaccgcctccgtcccccaggttgaaagcggcccggg

SEQ ID NO: 453528 - DNA, 122 bp, Homo sapiens
catgctggttttcttcctgtttcttaagtataataaattctttccccatttcagggtcttcgccctgtcctattcttctcaggccgagtccttggccattctttctggagaggtcataccca

SEQ ID NO: 453529 - DNA, 122 bp, Homo sapiens
gcgtgccccggtttcaaaagctcgggggcgggcttctgagttcgcgcatgcgcctctgtgcgtttgtcccatgctggttccgtgagtctggccttaggtgtctcgtgtctggggttgatccg

SEQ ID NO: 453530 - DNA, 122 bp, Homo sapiens
gtgggcgatggaagtgaggttcactggccagcggagccggacacagaacgcgcaaaacgccgtgtaggcctggaggagccgaagagcaggcggaccccctccgcgggggaacagtttccgcc

SEQ ID NO: 453531 - DNA, 122 bp, Homo sapiens
tgtgtccttgtcactgctgtgtgtccctggctgtacactccaattgtctggaggcggtggcgtgttggacagtcctggttgctgagtcatgctaaaacactgttgttttgactcactttgtg

SEQ ID NO: 453532 - DNA, 122 bp, Homo sapiens
tcaggtgctgggctacaaggacctggctgccatccccaaggacaaggccatcctggacatcgagcggcccgacctcatgatctacgagcctcacttcacttattccctcctggaacacgtgg

SEQ ID NO: 453533 - DNA, 122 bp, Homo sapiens
tcttaagggaaacgggagggaggagattctttgcttggcagacttcttttcagatggcagcgagattgttagtcgccaaagactcgtgaaaggaactaggctagcctcaggtgatatgaaat

SEQ ID NO: 453534 - DNA, 122 bp, Homo sapiens
gggcagacaacgaaggtgtggctgggagctgggttgggacttcccctaggcctgtggccccgcccacccgctgggcgttacctacgtgggtccgaagctgtcgccgacctgcgcggggcgga

SEQ ID NO: 453535 - DNA, 122 bp, Homo sapiens
aggatgtatgagatgtgtccgagggacggatggggggtgggaagagtattccaaggtggccgcacagcctcagcaaaggcccggaggtgggaatgtgcccacttcaatggtaagagagcaaa

SEQ ID NO: 453536 - DNA, 122 bp, Homo sapiens
gtcgtgcccacaggcgcacatctactctctgggggccacgctgaaggccgccctcgagtacgtggcagagcccacactggaacccaggctgagccaagacctcgaggcgctgctgagccgga

SEQ ID NO: 453537 - DNA, 122 bp, Homo sapiens
tggctcagctctgtcgcctgtagcccggaggaaatcgggaggggcggagtcccctagtgacggagcccaggagtcctccaactaccttcccacccgacgatgttctgtgcgtcgattggtcg

SEQ ID NO: 453538 - DNA, 122 bp, Homo sapiens
tatgttaagtggctttatttctaagaacccagccctcggtcctgggggtgcttcccagcccgctgctggaattcctgatcgtggcagtctgctgaaacatgagctcagttaccaaatatagc

SEQ ID NO: 453539 - DNA, 122 bp, Homo sapiens
tgcttgatgaaggtgctcttcccgctctcgcccgtgaggagcagcagcagcttgagctggcgccgggcgtcgcgcttgtcccccgcagctgcttctggatctcggcgttgatccgcttggac

SEQ ID NO: 453540 - DNA, 122 bp, Homo sapiens
ttgtattctgggacttgtagtgtccgcctggtagaagtggatgtaacggtctgttaaccgcgactgactcactcagtatccgtgataagttaaagatgaatcctgaaggggtaggggaaagg

SEQ ID NO: 453541 - DNA, 122 bp, Homo sapiens
ctcaggtgatccaactgcctcggcctcccaaagtgctgggattacaggcgtgagtcaccacgcccacccaagaattttaatttatgtggactacgcttacaccttgctgccctttgattttc

SEQ ID NO: 453542 - DNA, 122 bp, Homo sapiens
tgtaacatcgcgcaccagctggaaggcgtctgtggagggacacttgctattataacattgcgcacgagctggaagacatccgtggagggacactttctgctgtaacatcgcgcaccagctgg

SEQ ID NO: 453543 - DNA, 122 bp, Homo sapiens
gcggagtccagctcccaggccccacctgctggccgcccctggctcccgcccccagggacgcgcccgggcctccacccgcgcctgcacaggctgccccagacctgaagctcccggagagggcg

SEQ ID NO: 453544 - DNA, 122 bp, Homo sapiens
gcagagggcactccaggccagaacaggttaagttgtggtcactttatctcttgttgttgacgcaaagtcccgaggccatggcccagggttttcctgcagaaatgtgtttacaagcaggtcaa

SEQ ID NO: 453545 - DNA, 122 bp, Homo sapiens
tttctcctaagacaactgccagaacttccatctaaaaacctgtttttcaacatgaacaatcgccagcacgtggatcagcgtcgccagggtctggaagatttcctcagaaagtgagtgtccag

SEQ ID NO: 453546 - DNA, 122 bp, Homo sapiens
aatgacatttcgtgatgatggaaatgttccgtagctgcactgtcttatgtatgtggctatcgagcatttgaaatgtgactgctgtgactgtgaagtttcaattgtcattgagtttgaatttc

SEQ ID NO: 453547 - DNA, 122 bp, Homo sapiens
ctcagtgccttccctgcagatgggcattgggctggttcccatcttgtttctgctgtaaaccgcgtgagtgtttcagctgcccacctttctctccagcactgggtgttgtcacaggttttttt

SEQ ID NO: 453548 - DNA, 122 bp, Homo sapiens
cttcgtcctggagaaacacttttttggggggagcgctggcttttgcgtcatctcctcccgcgccgagctcgctccatcctggcgcagtggcgccggctcggcccgggaggagggagaaggcg

SEQ ID NO: 453549 - DNA, 122 bp, Homo sapiens
gcgtgtcagtcgctcgtctctctcctccgagctgtagatctcctgccgcagcttttccgccgcccggatgtagtccccccgcgccgagtacacccactgcagggtcagcccgcgggcctggg

SEQ ID NO: 453550 - DNA, 122 bp, Homo sapiens
cccacgatacgcaggagaagcccatgatacacaggagaagcccacgatacgcagcagcaacgtgagcaggtgagaagccaccatgagcaagagacagaaagcacagccaacggcaaggccag

SEQ ID NO: 453551 - DNA, 122 bp, Homo sapiens
gatcggatggcacgtggggcacagaggctggccccggctgggccccgtggccacggggcgcgaggaggctgtggggctcacaataagtgcgccagtactgcagtcctgcctccaggcctggc

SEQ ID NO: 453552 - DNA, 122 bp, Homo sapiens
ccagggccctggtcatgacaggttcaggtgccaaaaaggagacgggaagaaaacgtgaggcgccagaacaacaggttctacaaggtgcacacgagggtccctgccattgaatgaagaatttt

SEQ ID NO: 453553 - DNA, 122 bp, Homo sapiens
ggttgctcaatgaatgtcaggggctgcttggtagaattcaataagctcggtgagaggagtcgtgcaactaacaagaatttcacagtgatgttttgccaggccctgcccttcgaactatggag

SEQ ID NO: 453554 - DNA, 122 bp, Homo sapiens
ctccctagctgtccgcggagaagccggcctcgtctgccccaggcacccgagtccctggctcggagctcagtcaggttcaggtgtttatccaggcgccgcccaagtccaagggcgggactgcc

SEQ ID NO: 453555 - DNA, 122 bp, Homo sapiens
ccccactaggcattgctgctttcagagagctaggctccctacccaacgatcctagagcaccggctgcctgccactccccaccccttccatggggatgaggtaataaacaggtcagattgtta

SEQ ID NO: 453556 - DNA, 122 bp, Homo sapiens
gcaatgggagctcagggtctcctgagagcatcttgtgtgcaggctcgaggcacctccactcgcttccacaggggaacacggaggacacaagaaacccttcacacacacgattctctgatcgc

SEQ ID NO: 453557 - DNA, 122 bp, Homo sapiens
tgagccactgtaaccctggccagaagaactcttccaaagtaggcaggcacagggggttaacgccacctctcaaccaactgcctgcacgtcttgtcctaaaaaatgttaacggtggccttccg

SEQ ID NO: 453558 - DNA, 122 bp, Homo sapiens
aacaatcacaaagtcacctaaactggatgcctgtggtcacataacccagacactgccttccgtgtctgatttgtctgatctagtgactaagccccttcagcgtctacagtccatgtgctcct

SEQ ID NO: 453559 - DNA, 122 bp, Homo sapiens
cgccttctcgtagtcgaaagccttgatggagaaaccggggaacaccttgtgtaccaacagcgtcctggagtccgggttgtccagtgtggcggacttgatgaagatggggtaactgctgcggt

SEQ ID NO: 453560 - DNA, 122 bp, Homo sapiens
acaggaagcggggtgggggcgcccggctctgtcacccgtggaatgcatcaaaatagcctgcgcggccgggggcggttccgggaaagggggcggccgcgaggggcggggctgcaacggagggc

SEQ ID NO: 453561 - DNA, 122 bp, Homo sapiens
gcgcggctcgttaagcggctggctgcacccctggcccaatgagtcttctaaggacactgccgcgagcggggcgggggcagtggagtggggggtggggagaggtgggtggacgttcaagtgtg

SEQ ID NO: 453562 - DNA, 122 bp, Homo sapiens
tgccgctgccggttcaggtgtttaacttgcaggtaacgagccgaggccgccccgggcctccgcgcccccgcgccccccgccactggggccgggctgaggtcgagcaggggcgcggggcctgc

SEQ ID NO: 453563 - DNA, 122 bp, Homo sapiens
cagtccctggcccctgactccagaaggtggccctcctggaaacccaggtcgtgcagtcaacgatgtactcgccgggacagcgatgtctgctgcactccatccctcccctgttcatttgtcct

SEQ ID NO: 453564 - DNA, 122 bp, Homo sapiens
ggcaagtgagcgcccagcggagcgcaagggcggggcccgcgcgggccggagacgcccgttcgctgtcggccaaccagcgcctgtctctgaacagccaatgaacacgcgtcttacagccaagg

SEQ ID NO: 453565 - DNA, 122 bp, Homo sapiens
gcagagagcagggcggggcccagcctccagagccagggtccgagcagggtccgtcctccccgtcattcatccctggggccaggagctgctttcagggacacctgcctctgggccacagagat

SEQ ID NO: 453566 - DNA, 122 bp, Homo sapiens
tccgcgccgcccgcctctcggctgcccagcagctcccgcagcttgtccgcagccggggcgcgtatccccactgctggccccgctgcccttcaggcgctgccgagcccctcgactagccatgg

SEQ ID NO: 453567 - DNA, 122 bp, Homo sapiens
gcaagctgcagccgggctcatgcaccaagactggtcaccgtttaagcagccagcatttagcgaggacctcaggcattacctgcttagtttgctctctctgaaatacctctagctgctccacc

SEQ ID NO: 453568 - DNA, 122 bp, Homo sapiens
ccaatgtgcagcgtctgaatgagtattgctccaaactcatcctcttccccagaaagccctcggcccccaagaagggagacagttctgctgaagaacagaaattggccacccagctgacagga

SEQ ID NO: 453569 - DNA, 122 bp, Homo sapiens
agccgcgcgagcgggcgctcgggtcgtggagggggcggtgccgcgggatctctatggtcccgcccgcccgcgggctagagcggccggggcggtgcgcgggcggcgcgcagggaccgctggga

SEQ ID NO: 453570 - DNA, 122 bp, Homo sapiens
tcaccatgttggtcaggctggtctcgaactcctgacctcgtgatccgcccgcctcagcctcgcaaagtgctggaattacaggcgtgaaccaccgcgtctggccgtattgtctcatttaatcc

SEQ ID NO: 453571 - DNA, 122 bp, Homo sapiens
ggaaactccctaacactagaaaccaggctgacatctctgtttaccagatcagggagtggtcggcctcatgcctttcacttcagagaagattctggagccagaaaacctcaaatctaagggtc

SEQ ID NO: 453572 - DNA, 122 bp, Homo sapiens
aggccaagcctcgccccccaggaaggccctgattggtggacgggctgctttgggcagggccgccctcaggctatataagcgcactcgcggcggcgttggtgttatgctctgggccattcctg

SEQ ID NO: 453573 - DNA, 122 bp, Homo sapiens
gccgacccgcagcgcgagaagctcaagcaggagcttttcgccttcaacaaggtgcggcggcggcccgggcccgggctcgggcgggagggggcgggacgggggcctgggctgggggcccgggg

SEQ ID NO: 453574 - DNA, 122 bp, Homo sapiens
cccccgagagggctgcgacagctgctggaatgtgcctgcagcgtccgcctcttggggacccgcggagcgcgccctgacggttccacgcctggcccgggggtctgcacctctcctccagtgcg

SEQ ID NO: 453575 - DNA, 122 bp, Homo sapiens
ctaatccaaccagtggcccctccactgcgccttcccctcctaccaggcgccacccaagtccgaaaaactcccgatctggagaaaaataagaaaacaacagtgacaatccggccggggccggg

SEQ ID NO: 453576 - DNA, 122 bp, Homo sapiens
caggctaccagtttattatttggagctgttcaaccactatcccgtccaacgttttttgagcgctatgtgccagggcactttgctagttgtggaggtgttttaaagatatgcacaagaggccg

SEQ ID NO: 453577 - DNA, 122 bp, Homo sapiens
ttgctgggttttttatttaccatgagacacaacaaggcagaaatctctttaacatgcaggcgtgatccccatcctgtcttcagagttggctgagggatcccaggctgatctgatttctttca

SEQ ID NO: 453578 - DNA, 122 bp, Homo sapiens
atttattttttttaatgagtgaatgaattcaacttctactagattatcctctgtaagttgcgtctattagtttacacatcagtctttcacgggtgattaacctcactaaaaacttcatgttc

SEQ ID NO: 453579 - DNA, 122 bp, Homo sapiens
gcccccagctccttctcccagtgacccagagccaatgtaagtatgaggccagaggtcagacgtgaagctcctccaagaaccggcgcggggagagctcagttaatgggacccacgtgggcgat

SEQ ID NO: 453580 - DNA, 122 bp, Homo sapiens
tcccactgggccagcaggaggcccgcggcgcggcagaggcgccgcacgttgcgctccagccgctgcacctgctcccgcaggacgcgctcctgctcccgcaccaggcccagctggcgccgctg

SEQ ID NO: 453581 - DNA, 122 bp, Homo sapiens
gtcccaaggctcaaggcccactccaagctggaaacgtggtgtcccagctccaagttggggcgcgcgggctgccagcgactcttcctgccccaggccccagggacgcggctggaacttgggac

SEQ ID NO: 453582 - DNA, 122 bp, Homo sapiens
ggtcctctgaagcagggaatgaaatagacgttgaaaactattcccgttacgccatctctgcgcgcctcacgtcagggccaagagcctagcgcgtagctttatggctgactcggctctggcgc

SEQ ID NO: 453583 - DNA, 122 bp, Homo sapiens
caaataagatactgttgagataaatttaagctacacagccaaatcaaacatattcctttgcgactaaaaaaggattagaacaacaataaaaaccaaaatttatttttaaattgtttccttac

SEQ ID NO: 453584 - DNA, 122 bp, Homo sapiens
ccaggaaccggatctgggtggccccaaccatgtccactgcagcaaggagctacagagcagcgtggtcccgggatccagcgggacacatgcaggggctgcgtccggaggcacggaggcctggc

SEQ ID NO: 453585 - DNA, 122 bp, Homo sapiens
gactcagagctgtgcttcagaaacggctttgcagaagcccgaacggcacgtggcagatgccgtctgccataccaactcaccttcacgtggctgtagtcgcctgctttgttgctctcgggtgg

SEQ ID NO: 453586 - DNA, 122 bp, Homo sapiens
gggcgaaggcgcggagaagcccggccgcccggtgggcggcagaaggctcagccgaggcggcggcgccgactccgttccactctcggcccggatccaggcctccgggttcccaggcgctcacc

SEQ ID NO: 453587 - DNA, 122 bp, Homo sapiens
cagagcctggagccgccgtggccgccagcaaggggctgccgcagcagctgccagcacctccggacgaggatgactcagctgccccatccacgttgtccctgctgggccccactttccccggc

SEQ ID NO: 453588 - DNA, 122 bp, Homo sapiens
accgagtggagaaagtccggctccatttctcacctttttcccaagaggacacacataccccgctcaacttgacgcctaaagcagccgcttccaggcctggggtttcggataggccaagccgg

SEQ ID NO: 453589 - DNA, 122 bp, Homo sapiens
ggcactcacctctctggaactatcacagaggaagatgtggtccttgatttttttaccatacgcctttcagaaagaaaatctgtcaagaacagaaaggaatgagttgacaattgtacactcat

SEQ ID NO: 453590 - DNA, 122 bp, Homo sapiens
gttctggaacattctagaacctccaggcaagggctggagccagggctgcagagcattcctcggctcagctggggcagcgccgccccatcccccagtggtcctcatgtggaggctggcactag

SEQ ID NO: 453591 - DNA, 122 bp, Homo sapiens
aggagatgctagaggttatcgccgaagattccataaatctcctgaacttggtttcctctccgccattgctcaaatctggcttaaatgggagagtgtatggcagaaattaggtcatgtttgaa

SEQ ID NO: 453592 - DNA, 122 bp, Homo sapiens
tctcaactttttcctgttttcctctagtgctcaaacctgtaagaggatgtggctctctttcggaacgaaaaacagaacaacacaggagagtcacgtgggcagtctgtacccaattgagttct

SEQ ID NO: 453593 - DNA, 122 bp, Homo sapiens
caccgtggcacactaggggtcagcagtgtgccccgggtaggccgccacggccacagagtacgctccttaatttgggagctagtcacacgggtttgctcgtcatatgaaaattcatcaacagc

SEQ ID NO: 453594 - DNA, 122 bp, Homo sapiens
agcggggccacaaggctcggggtcccagtgggaggtgggcagggtccagcctctaaggcccgatctgggtgccaggctcgaaggccccaaccccggtggggctctcagccggctctcgggga

SEQ ID NO: 453595 - DNA, 122 bp, Homo sapiens
agacctttgtctgagccgggcagaggcacaagtgccacctgacgcttggggcagattcctcgtcctgttcttgcaaagatgccaaatcaggagagtgtcaagatttcaaccgcagacctaaa

SEQ ID NO: 453596 - DNA, 122 bp, Homo sapiens
gcagggaggggcagagcgagctggggaaaggccaggctgaggacaaggtcgtgggcaggccgggatatcctaggctcttagcttcagagcactgttgagggagtcccaggctctcttgtctg

SEQ ID NO: 453597 - DNA, 122 bp, Homo sapiens
caaacatcttaggaccatgggttgtgactggtaggactatgtatcttgctgctttcaagacggagtatattttcacgtggtttcactctggctgtcctgtttccctaatactgtcacttcac

SEQ ID NO: 453598 - DNA, 122 bp, Homo sapiens
ggagtgcctgctcatttcaaacaggagccaatggtgcatccagctctcaaagacctaatacggatagaggtggaggtcaggttcgatggccaccaccaagcccctacactgcctggctttgc

SEQ ID NO: 453599 - DNA, 122 bp, Homo sapiens
gtcccccgcgagaagactggagcgtgtatcctgggccgtctagtacaatgggcacagtgccggtgaacgacgtgacctctagccccgccgctttctgctcgaccgactacagcaacttgggc

SEQ ID NO: 453600 - DNA, 122 bp, Homo sapiens
ggtccggattcaccaagtggcgcagagctggaatcgagtgggtgcacagtttccaggctccgactattactggcctcgaaggtacaggctcaggcggctcagggccccggcgcagatctgtc

SEQ ID NO: 453601 - DNA, 122 bp, Homo sapiens
gaccacctggatcagttggtctgcgctctcattcttctgcttgagctcagcctcctgaatcgccaacttggctttcaaatcatccacctggggaaggagaaaccgagaaacagcaagtgtgg

SEQ ID NO: 453602 - DNA, 122 bp, Homo sapiens
ctccttgacaggctggggtccagccccgagacattcctaggctccgcccccgagcagacgcgcgcgctcagccccagcgcagagaaccaatcaccatccgtttccacgctcagtcccttttg

SEQ ID NO: 453603 - DNA, 122 bp, Homo sapiens
ctctccttcccgtctgtgaagcgctcgttcagagccgcaggactccgcaaacaataaaaccggctgcgtggctattgcctggattacagagcaagcactcctgcgaaagacgataggctttc

SEQ ID NO: 453604 - DNA, 122 bp, Homo sapiens
agattgtgcccacggtttatgaggacaagagtggcaagcagcggtactcctaccagtacacggtggccaacaaggtgcgcgggcggtggctgggccgagctgtgtgcggcggcgccctctgc

SEQ ID NO: 453605 - DNA, 122 bp, Homo sapiens
tagttgggctgaggggcacgaaggagctacccacccaactgcctctcccgtcacccgggacgggtcagctcagtcaccatgttccctggagaacaaggaccatatgaagggacaagaggctc

SEQ ID NO: 453606 - DNA, 122 bp, Homo sapiens
atctagagtagcgaaaaaacaagcttgagggttacacgacccttgttatctgtgtcgtctcgttcaggcccaacacttcctgctattcttttccactatggtcttgtgtcatcatctgcaaa

SEQ ID NO: 453607 - DNA, 122 bp, Homo sapiens
aaggaatactagtatgagagagaagtgagacggagaaggtaaaccagccaataaagggtgcgtcatgataccctcccaatcatagtggaaggctagaatttaatcctacaggagaattcgag

SEQ ID NO: 453608 - DNA, 122 bp, Homo sapiens
tcatgacgctcatcctggccccaccccaggccccgccctcctataagctcatcttggccccgccctagagtccgcccccaggacgctcctcctgaccctgcccccaggccccgccccctctc

SEQ ID NO: 453609 - DNA, 122 bp, Homo sapiens
ggctcgcaaaaagctgtccccggcccgccgccgctctatcagcccacggagggagggcggcgggggagggagggaaaaagtatttgcttcagcccttaatcacggaatttgaaatcccagcg

SEQ ID NO: 453610 - DNA, 122 bp, Homo sapiens
cactcgctcggaaagcggcagcggatcatagaaaagcgccgcggtggcgtagacaggccccgcgaagccgccggacgtgtccttggcgcaagggaggctgggatcgcggaggaccgagcgcg

SEQ ID NO: 453611 - DNA, 122 bp, Homo sapiens
agactgagtcctggaacccacggagccctccgaatcccggagtagctttactgctttttgcggggttgggggtggggggaggaaacagatttcagcagcaaactcacccaatcaacctcaca

SEQ ID NO: 453612 - DNA, 122 bp, Homo sapiens
ggagtgcaagggtaaaaataagaccacatagggactggggaacctgtcccaccattgtggcgtgggctggattagggtaggttcggctgagacataaggggggtggggatatgaaggaagtt

SEQ ID NO: 453613 - DNA, 122 bp, Homo sapiens
gcagaaatattcactgaagtgaaaaggattagtaaagggtggaaaaaaagaccagccccccgcctagtttgggtgagcagatttgggattaattatcaggcagcaatccacatgcacttaac

SEQ ID NO: 453614 - DNA, 122 bp, Homo sapiens
gtggcctctatcagcatatcctgctatccctgcagaagatcctggcagatcctgtgcggccgctctgctgccactatggagccgtggtggggctgcatgctcttggctggaaggtgagcacc

SEQ ID NO: 453615 - DNA, 122 bp, Homo sapiens
tctcaaaacattaactgattccacctaccaaaggagaatcaaaggaaggaactaggacttcgattcagagcagggaaaagtgggatgcagctcctgagcactgccaatagggcatgctaggt

SEQ ID NO: 453616 - DNA, 122 bp, Homo sapiens
tgtaccatggtctcggaggtttctgtcccgcggcccgttaggtcctggtcgggttttcagcgaagcaggccgctcccctgcgtttcccagcgggcgtgctgtgccgcccaacaggctctgcc

SEQ ID NO: 453617 - DNA, 122 bp, Homo sapiens
acccggcccgcgcgaaccctggtctgcacagctccgcgtccgcctaggtgctggcccgggcggtcagcatccagccccgcaggctatgcgatgctcgtccactgcaggccaaaccctaggaa

SEQ ID NO: 453618 - DNA, 122 bp, Homo sapiens
agcaagctgagtgcagacgactgcaccgcccgccccccagcaaccgccatgcaggaaatacgagctcacaaggcccacggcaacaagaagcccacccacctgaggctacgcgaatcgcccgc

SEQ ID NO: 453619 - DNA, 122 bp, Homo sapiens
caaaaaaaaatatctcctaaggacctctgagaacacagcggtgttcaaaggccacgtcctcgcacacaacacccagacctgccacgcagccggtactgtttcctgagctcatccgagcaagc

SEQ ID NO: 453620 - DNA, 122 bp, Homo sapiens
ctgggactccccagtcaggacagtacaaaatctcttcattgctcattttctgtaaaaaatcgtggctctcggcggaccctggggataggaggtgcaaagcgcgctcacacgcggcccgggtc

SEQ ID NO: 453621 - DNA, 122 bp, Homo sapiens
ctgaccatatctgggcctcagttctcacatctgtgaaaaagagaagtaatgtctccctcgcgaacctgctgagggtcttgagaaagtgtgcatgagaatgctttgtaaataatgcttgtgtg

SEQ ID NO: 453622 - DNA, 122 bp, Homo sapiens
accaggaggccgcaatctcttcacataaaaggtctacgggtttccgctcggccctcacagcggcagcggatcgaaccaggaaagcaattcccgctcggctcccctcgggtcccaggcccagg

SEQ ID NO: 453623 - DNA, 122 bp, Homo sapiens
cagcctgtgaaactgaataacgaagatcactcaacaatgcctgctcctctctgactgcaccgccccgccgccgacgcccagtagagcccccggggcggtccccaccgacggcgcagcccgcc

SEQ ID NO: 453624 - DNA, 122 bp, Homo sapiens
agacaggcgaaggcgaggttttttacgggacgccctggtaggtgctgaaccgcgcgctcacgagtcccgctcagctcttggcatcacctgctctcggaccccggccccgctctccgcccgag

SEQ ID NO: 453625 - DNA, 122 bp, Homo sapiens
caggctgcgggtgaggggcgcccaacagttgcctgccggcccccggggctctggggagggcgggctgggccttacctcggtgcatgatctggtgcttctctcggaggtacgccaagccccgg

SEQ ID NO: 453626 - DNA, 122 bp, Homo sapiens
tggacacttcttggcgggaatggtccgtggccagcacgtagataatggggtcagccacgccgttcaccgtggacaggcacagaaacaccacagaggctgtgtacagcctttcctccaagccg

SEQ ID NO: 453627 - DNA, 122 bp, Homo sapiens
gtacagtggtacaatcttggcccactgtggccttaaacttttgggctcaagccatcttcccggcttagcctccctgcaagtagcaggaactacaggcatgtgccaccacgcctggctaattt

SEQ ID NO: 453628 - DNA, 122 bp, Homo sapiens
cctccctccctcccgccagctccacgatttttcggtgtttctctgtacatagttttctggcgggataggggaggtaggatggatggggtttggggtgggtaggccatgggaggggagaagcc

SEQ ID NO: 453629 - DNA, 122 bp, Homo sapiens
caaatacctagtaagtcaagcattcccaggtgggtaatttacaagacaatttacctgccacgggtgctttaatgagtattattattgtagtttcatcttaattaatagtgatattctttttc

SEQ ID NO: 453630 - DNA, 122 bp, Homo sapiens
acctccgggaggcctcggcctcgcgtgggggcagggcggccgctggggccgcaaggcgtgcggggaagggccagagccgggtgtccaccccagcttcccaaagactccctcttctgtgcttc

SEQ ID NO: 453631 - DNA, 122 bp, Homo sapiens
gatttagcaaagttatgatcagacgtttccagctctagtggcctctagcttctgctgggccggccttaatatgaatgagggccatataaccagcctcttaaatttaagtgtcagctgcatca

SEQ ID NO: 453632 - DNA, 122 bp, Homo sapiens
ggcccctcccttggagcagtctgtctccatggagaccgacgcgacggagaaaactcacaccgggccaggtggagaccacagcagcgggggagataccgagagtcaacagatggggaaaaaca

SEQ ID NO: 453633 - DNA, 122 bp, Homo sapiens
tacccgggactggactcagtattttatgtgagttcccgagctctgctccatacctgggaccggactcggtattttctgtaggttcccgagccctgctccatacccgggactggactcagcat

SEQ ID NO: 453634 - DNA, 122 bp, Homo sapiens
aaacctacttgtcggccttcctggttcttgttttaccactttcttttgctctctaagaaacgtgcatatatttttataaaatagcctatactgtaatttacgaccatttctctgcttcatcc

SEQ ID NO: 453635 - DNA, 122 bp, Homo sapiens
cacgggtggtgccccggcctcatatgcttcgtggttctctgtctcactcctgctcacgggcgatgccctggcctcacgtgcctcgtggttctctgtctcactcctgctcacgggcggtgccc

SEQ ID NO: 453636 - DNA, 122 bp, Homo sapiens
ctgccttgcccagctcgaaggcatcagtcatgcccaggttgcgcaggacactctccatgtcgtagctttcctctagtttaaaccgcgggagggacacttccacctcctcttcatccatcatg

SEQ ID NO: 453637 - DNA, 122 bp, Homo sapiens
ggggcgagagcggcccaagtggttatgctggctctaacaaccctgggccggccaccttcccggagatgacgtcacccccaagagctgcagcaccgcgctgacatcatggcccggccgcccca

SEQ ID NO: 453638 - DNA, 122 bp, Homo sapiens
gcacttttacctccattgaacatatatcactaggcaccaggcagagtatacaatggaccacgaaatctcattgccttagatgtatctgtatgcaagaaatcaagtcattctggaggtttcat

SEQ ID NO: 453639 - DNA, 122 bp, Homo sapiens
gtgctatcagggtgtgtccctgagaaagggccgcagacccctgcccagcctcactctctccggcaccttcagaacccagaagctactgccaggacaggagaggaggcaacatcagctgctgg

SEQ ID NO: 453640 - DNA, 122 bp, Homo sapiens
agaaagctgcaccctgaccccagcaggctggctatttacaagcatgaatcagtagcatctcgaagcaagtgaactgtcagttgcactgagactgatcccttgttcttgatttcacaactcat

SEQ ID NO: 453641 - DNA, 122 bp, Homo sapiens
cggacaggtgggcgtggattggctagggcagccggtccgtgcaaggcgggggcggggcctcggcggctggttgcgcgtgtccgacgctggctccgctctatccggctttgctaggggaggtg

SEQ ID NO: 453642 - DNA, 122 bp, Homo sapiens
tccctcaaggctggaacagcgcgcagtggccaccgccgccgggtctccagcccccaggagcgcggcctcctcccggactctctccgatgcggtcctgccctggggacacggcaggaagaagg

SEQ ID NO: 453643 - DNA, 122 bp, Homo sapiens
cggcgtccgaccctagggttcaccgcagctggtggcacggacaggttctagggttggcaccgctgctgccaccttcaaatgccagctgcagctgagcccacggtggtggctgcagggctgga

SEQ ID NO: 453644 - DNA, 122 bp, Homo sapiens
aaaatatgtattttaaaaatttcaatacctagttctaaactactctccagaaatgattagcgggccagtatgtaacacctctgaaagtgagacagctcattgaatgttgtctttttaaaatc

SEQ ID NO: 453645 - DNA, 122 bp, Homo sapiens
ggctctcaggctggtcagctctccgtgcaccaccatatcctgttttcaggtctcttatcccgtgtctttgccttcctttctgagaactcttactcttttctgtgcttcattaactctggtgc

SEQ ID NO: 453646 - DNA, 122 bp, Homo sapiens
ttcggacacggttcgcgcgcgcgccgccctccgggtttggcagggccgggcgccccctcgcggcagctctggagaatctctgaaaatcagcgtctggatttttccaggccgagattttggaa

SEQ ID NO: 453647 - DNA, 122 bp, Homo sapiens
ctggaactcccaacagaggacaaattccagactcctcaagggacatcaaggctggaatgtcgtggacggtaaggaaggggcctagaaagtgggaacactccggactggtgaccgccacccca

SEQ ID NO: 453648 - DNA, 122 bp, Homo sapiens
aagaggcgccatggcacccacggcatacttgccagtggaatcgcgcctggcaccagagggcgggctgctgtttgaagaaagctaagggtgagatagcttctcccatgcagcgagtccctggc

SEQ ID NO: 453649 - DNA, 122 bp, Homo sapiens
ctgcacactgtgcaaaaaacaagcaccaggccacctgcagggggaggagacggcagccggcgaggggcctctggaccaaggaacaaggcagccgtgagtgccctgggttttccttctgcctc

SEQ ID NO: 453650 - DNA, 122 bp, Homo sapiens
gtcacatgctacactcagtcgtcacgtcatagccatctccgtcagtctgcaactgtctctcggtctttcttggtgtttgtgaccttggcactttcgaagactacattcggcccagttgatct

SEQ ID NO: 453651 - DNA, 122 bp, Homo sapiens
tttcacgcgtaaatctggcaccggaagctggagactgagattagaatgaggaaacgcagacggcctttctctgcaactagtgcatttcatgtggtcttctgaaaattacttatcctttctca

SEQ ID NO: 453652 - DNA, 122 bp, Homo sapiens
ctggtgaccccatctgagcagctctctcctgacgtttaacgcaccccaaagcaagcggggcgcacagcactggtgattggcaaggttcgaggcccctcagcccctgaaagcccgtggcgtaa

SEQ ID NO: 453653 - DNA, 122 bp, Homo sapiens
ccttccaactgctcatgaaacctgttccacaggtgagaaaactaaagctcaagaaggccacggcacacacaggcagcgagggcagcaggaagattggaaatcagctctgctcccaatgcctg

SEQ ID NO: 453654 - DNA, 122 bp, Homo sapiens
ctgcacatgcccgcctaagttcctgcctcggggaggtaacagcataactgtccgactcgtcgctcccaaagagatggctggaacaattagttccgctttcccagctagtcgaatcactggtg

SEQ ID NO: 453655 - DNA, 122 bp, Homo sapiens
ctccataagcactgttacagatttttctggaggcttcctgctgctcttctcacaaaagtccggtctccctaccatggcctgcaaagatcagcacagtctaattcctgctcacctctccaggg

SEQ ID NO: 453656 - DNA, 122 bp, Homo sapiens
gcccgccggtgcggggcgccccagcccgccggggccgcgcttacctgggctggccgcctccgggtcccggtacatggtcccctcgtcgccggttccctccgggctcctcagagccgcccgcg

SEQ ID NO: 453657 - DNA, 122 bp, Homo sapiens
cttccaaaattgacaggctagttctgaaaactggccaaccaacttctgcttaaggggaagcgagacttccgatttgtaggggaacgcagcggcgattggttagagtcccgcccacttgttaa

SEQ ID NO: 453658 - DNA, 122 bp, Homo sapiens
ccagggacatcatgaggccggtggccatggggccccccgtgtccagggccttcatggggacgatgtccaccacttccacccatgcttccgccagggccttcgtgggggcgatgtccaccacc

SEQ ID NO: 453659 - DNA, 122 bp, Homo sapiens
agcgccacggctagagccacttccggcgcgacctcctcacccgagacgacctcagcccagcgagtactgcaacctcctgcaaacacccgcagcgcccaccacaggctaaaccccgccccgtg

SEQ ID NO: 453660 - DNA, 122 bp, Homo sapiens
ttcatttcccagaggctttagctaacgtgtactttcgccctgcgatgggccgcacattttcgccgccagtcttttgctcctgtttcaggtatgcgtgtgcattgtaaacttgtctgactgaa

SEQ ID NO: 453661 - DNA, 122 bp, Homo sapiens
aacaaaatctgtctaaccagtcgggttccttgtttatactgaaactacggcagccgccgccgcgcacgccccccttggctcaggcgcctgcctcccgctgccagccccgccccgccccggca

SEQ ID NO: 453662 - DNA, 122 bp, Homo sapiens
ttaactttggattgcagtttgcacctctctggttgctcaacagttcactgaagcctgagtcggtggatgggtatccgacctgaacttgggtgggtaattccagaaagttttcacaggagtga

SEQ ID NO: 453663 - DNA, 122 bp, Homo sapiens
gcgctcccagtcgctgagtgcctgagccgggaagcagttgctgtggtacctgctgctgcccgagcggacgtagagcatcggacgcgggcgccgtggcgctgggcaggagggcgaagccatga

SEQ ID NO: 453664 - DNA, 122 bp, Homo sapiens
gcctgggtttctcctcattctcacttgagaccaatgctgtcctcgcctagtgggggccggcgtcggtggggagctgactgagtccgaggccgtcgagtgaaaccagggggcagccagagagc

SEQ ID NO: 453665 - DNA, 122 bp, Homo sapiens
tccccagccttgcgtgtcctggtggtagcgctgcatggagcgcatgttggctgcgcagcgcgtgaagtccgtgcagggtggtgcaggcacgtaggtgtgatgcacgtacaagaatcccagcg

SEQ ID NO: 453666 - DNA, 122 bp, Homo sapiens
gatcagggccaggtaggtgaacacctgttctggtgcagcatgctcagcactggctgtgggcgtggccctagtttggagctggccacttgcctgttctgcaacagagagtggggacagaagtt

SEQ ID NO: 453667 - DNA, 122 bp, Homo sapiens
cgcccggtttcgaaccggggacctttcgcgtgttaggcgaacgtgatgaccactacactacggaaacccacacctacctctgtcgccataatattgtctgctagcagctactctccgggtac

SEQ ID NO: 453668 - DNA, 122 bp, Homo sapiens
tctttaaagcaaatatccagcacatggagccaacacagcattttggaaaggatactggtccgaatgcctgggtgggaattcagctctgcctattcctagctgggtagcttgaggcatgctgc

SEQ ID NO: 453669 - DNA, 122 bp, Homo sapiens
tgcacctggaggggaaacaaaagacacccagtcaacaccacaggagcccctctgcactggcggaggcggagggaaagaagcgagcgacgtccgaaccccgaagaaagagccgcaaccaggcg

SEQ ID NO: 453670 - DNA, 122 bp, Homo sapiens
cctggctcatcagtcgcactcagacgcgacaccggtgcaggaggctgaaaaacccacttccgagttgtctaggtctgggcaggatggctctctgcatctcagctactaacgcacctcgaggt

SEQ ID NO: 453671 - DNA, 122 bp, Homo sapiens
cccccagggccggggtcggggttcccttcgcgcgactccgctgcagcctccgggcctgggcgtttatccctggaacagaagcaacacaaggtgaacagttagaagtctcatagcaccaggac

SEQ ID NO: 453672 - DNA, 122 bp, Homo sapiens
gaactggatgaccctgcgcagcttagctggtcccgctccttattacccagcatgggaagccggccaccatgtctttgccctggaacttggtattctccagttgttggcaggaccagatatca

SEQ ID NO: 453673 - DNA, 122 bp, Homo sapiens
gtcggcagcggctcaggttcaccaagaggtcggcggagggctctgcgggagggcgggcgtcggcggcgcaggggcgggggcgggggagggcggggccggaggctcaggggcggtgccggacg

SEQ ID NO: 453674 - DNA, 122 bp, Homo sapiens
cagactcttctcccggctccagagaggcccgagtccccccccctcggccttggcccccaccgccctcatcccggtacctgtgtggctggcacgggaccctctccgtcccgtccccgcctgct

SEQ ID NO: 453675 - DNA, 122 bp, Homo sapiens
tggaaggttgaccagatataacagtgtcaaatctgcagttcccaagtcctggagcttctacgagtacagagaagatgagaggatgacctctggttaacacgctggtactgagagctatagat

SEQ ID NO: 453676 - DNA, 122 bp, Homo sapiens
tcctggttagaaagtttcagggcccaaactccagcctcggtctcggtatctcaaagtctccgcctgtgaccagcactctgcctgctttccagggtgccatgggcacccagaggacggaccct

SEQ ID NO: 453677 - DNA, 122 bp, Homo sapiens
caatgttccaggcttaagcactcctccttagcttcctgagtagcagggaccacaggcatgcgctaccatactcaactaatttaaaacatttttttttgtagagatggaatctcacaatgcct

SEQ ID NO: 453678 - DNA, 122 bp, Homo sapiens
gtcctcgggcatcgatgccctcagccaccacagccccagtggctcgtccgacgccagcggcggctttggcctggccctgggcacccacgccaacggtctggactcgccacccatgtttgcag

SEQ ID NO: 453679 - DNA, 122 bp, Homo sapiens
tgagcgtcagggagcagggggcagtgcccgtcggggaggctcgggctgccaggagcccaccgcagggggctcagacatggtgggctgcaagccccaccccaccgggaggcagctgaggccag

SEQ ID NO: 453680 - DNA, 122 bp, Homo sapiens
tccacagaggcatcatggagggtccccggggatggctggtgctctgtgtgctggccatatcgctggcctctatggtgaccgaggacttgtgccgagcaccagacgggaagaaaggggaggca

SEQ ID NO: 453681 - DNA, 122 bp, Homo sapiens
cgcgggccgccgttataaagcagccgccggcgccgggtgcctcacagcacgctgccacgccgacgcagacccctctctgcacgccagcccgcccgcacccaccatggccacagttcagcagc

SEQ ID NO: 453682 - DNA, 122 bp, Homo sapiens
ccctcgcccaccgggctctgggtagcccctcaccaggctcttggcggccacctagcccggcgcccggccccctgcggccggcccatttagtgtgaatcctggatccggcagcggcggcggct

SEQ ID NO: 453683 - DNA, 122 bp, Homo sapiens
agaaaatacctgcataagcagaggatgatttcgaacaaaccagctcacaaaagacacctgcgagacaatgatgggaaatgtaatgcaggcagggtagtgcatgacattaaagaattcttgtt

SEQ ID NO: 453684 - DNA, 122 bp, Homo sapiens
gttgctaggcgaccagggctgctgttcctgcagggattgagttttgaatcccctaaatcccgcagactcaggatttcgtcttcatgacattcccctactagagaagcatgggtccacacaaa

SEQ ID NO: 453685 - DNA, 122 bp, Homo sapiens
gtgtttaagtttattgctcgaatgatgtttctaattagtaccacggccataaattaaagtcgcctttgtttaactgatttattatttactagagcatctacctaagacagggtaaattggta

SEQ ID NO: 453686 - DNA, 122 bp, Homo sapiens
ccgcctaccccgcccccagccttgctgccctttggcttctcctgtcccgcatcattaccccggcccacagccccatttgcctgcagtcgctgcctttgctcctgagaaggtctgtagcctcg

SEQ ID NO: 453687 - DNA, 122 bp, Homo sapiens
caggcgcagcgcccagggaaggggtgggcagccgtggggcgaatgcgcaggcagagctgccgagcacagctccgaacagtcgcagatgcctgtgggactaacacgtatggagaattaagacg

SEQ ID NO: 453688 - DNA, 122 bp, Homo sapiens
tcgccagcagctgagggcacgcgctgcactccgtaactcaacatggcatgcctttctctccgtaaactatttagtgagatttttagggactatttttcagtatctctgtacctgttaaaggg

SEQ ID NO: 453689 - DNA, 122 bp, Homo sapiens
agccaacaatctcacaaggggccggcctctctctcagggcaagcctcatcccctagaagccgactccgcctggcccaccatgcctgcagcagaaaggcctgaggctgggcctagaacactga

SEQ ID NO: 453690 - DNA, 122 bp, Homo sapiens
ggttttagattcttaccactggaagtctgatttcagaatttgcaagttccttaacaaaaccgttgtagctttgacagaactgtagtcattctgggagccaaaacagcagagacaacaataca

SEQ ID NO: 453691 - DNA, 122 bp, Homo sapiens
gagttaagagccggttcccgagacggcttcggcggctccgggtccccagaccccgctcgccgctcctgattggctgagcgcctgtcagtagtaaagggtatcagatggcaaagttgggacct

SEQ ID NO: 453692 - DNA, 122 bp, Homo sapiens
ttttgctttctccttagctgttttagtctcctctgcgcgccaggggctgggagggcggagcgctccccggccggccccggcaggtgcctccaagacacccgcgctggtcaaggagcttcttg

SEQ ID NO: 453693 - DNA, 122 bp, Homo sapiens
taccaggaatcaggtcttcaaccataagggcgggccagaggtcaatgtcacctggagagccgtacaacctggaacagagacaggcagacagcgcacacctgagactgaaagtggaattgaaa

SEQ ID NO: 453694 - DNA, 122 bp, Homo sapiens
tggaaagaatgttacaaccttttaaaatcatttgctctgctctgtgatcctcagaatgaacgcacttgagttgattcaagcacgcttccatggtcatgagctctgtggttgcatctgtgtgt

SEQ ID NO: 453695 - DNA, 122 bp, Homo sapiens
tgtatacactagttctgtaaagccagcacttggaaagccagtcaaggtccagttaggtcacgggtgaatgacatcattggccttgtggttgagaggaacttggagaatatgtaaaagttatc

SEQ ID NO: 453696 - DNA, 122 bp, Homo sapiens
tcctgaccaggtactgatccagcccctgatgttcctacttagtgcccaagcagccacactcgacttgcaaaggctcaaagattctggccaggcacagtggctcacgcctgtaatccgagcac

SEQ ID NO: 453697 - DNA, 122 bp, Homo sapiens
aaaccctaccctaattcggagagttttttcatatcgtagtgagatgctattttatcccaacgcaaaaatcggacagaagtccctatctcctcactggacccctgcaaacacagtctaccatt

SEQ ID NO: 453698 - DNA, 122 bp, Homo sapiens
ctagcagatttccccaggcagaaaggcccagtgcagcttactctaagtagactggagatacgcagttgatgggtaaatacctgtgtcttagagcagctcaggaagaggtgttgtcctgcaga

SEQ ID NO: 453699 - DNA, 122 bp, Homo sapiens
cgagccaaacgccccccgcgctgcggtcctctcctcctgacacggcgcccgcccgctccacgcttcccaagccctgagctggcagcctggcagcagagcaggccccagcggggcggtccgcg

SEQ ID NO: 453700 - DNA, 122 bp, Homo sapiens
agatacagccagatttactgacttgccatgtgtaggtcatagagccaggaatgaaatatgcgcagcataaaataataatcaataatcccatatcattatggtacttgttatttatattttcc

SEQ ID NO: 453701 - DNA, 122 bp, Homo sapiens
attaatcaccatctgcctccaggcctttcatctcatgacaaacaaatataataatgatatcgtgtcactctgttaaatgttcatactgtttcaagcccatatgattagatttatgtttttaa

SEQ ID NO: 453702 - DNA, 122 bp, Homo sapiens
aggcggggtggccgagcgagacccgggccgggcgcggctcgggccgcacagccgcggcggcggctgcagacctgtaaaccttaatgacagcaatcttgcccgtctgcgcctctgactcacgt

SEQ ID NO: 453703 - DNA, 122 bp, Homo sapiens
taacacagttcaataaaagcaattccacagagcctaaaatgatgcagtccacacatgcaacgttctagcagtattgcttcatccaagggtaagtcctgtaggacctacaggaataactaaac

SEQ ID NO: 453704 - DNA, 122 bp, Homo sapiens
gtcaccagcactgaggtggtagacaggacgtgctcaccacgggaacacgtgctgctgggccgggctagggggccagacggaccctggggagtaggcaccccccggatggagcgcaagcgaag

SEQ ID NO: 453705 - DNA, 122 bp, Homo sapiens
ggctggctggctggctgcttgacccagtgtgactctccttcactgagtgataccctgctccgggcccatgccccaaggagcccttcagagcccacactgccagtcgaggcctggctggaggc

SEQ ID NO: 453706 - DNA, 122 bp, Homo sapiens
taaggtgagtacctcagttcgatagtgacagccaagaaacggggagttttgtacctaaggcgagaaagaaattctccgccgaaatctcccggaagaaggactgaattaaatgcagattagag

SEQ ID NO: 453707 - DNA, 122 bp, Homo sapiens
aagatcgaggacatggctgtgtccctcattctggaggaatggggatgtcagaatctggctcggaggaatctcagtagggacaacaggcaggagaattatgggagcgcatttccccagggtaa

SEQ ID NO: 453708 - DNA, 122 bp, Homo sapiens
tacaccttgcggtcggcagtgatgttgcagtcagccgtgccaggcaccatctctgagcagcggggcagagctatgggtttgttaaaaggccacgtccacagcaggatcagggggatggagtg

SEQ ID NO: 453709 - DNA, 122 bp, Homo sapiens
tctttttttagtctctttctccctctttttctgccctgtgtcctttttattttttctctacgactgtttttgcaagtttgtttcaaaagttcacagcatgctttcttttcttttagaccggg

SEQ ID NO: 453710 - DNA, 122 bp, Homo sapiens
tttatgagaaaccatttgtggccaaaaatctacatgggcttcagatgacctgaatgaactcgtctctgtagagtgagagtcctgggcaggaggaaaggtttccatagccaaggaccacatgc

SEQ ID NO: 453711 - DNA, 122 bp, Homo sapiens
gccgtgaatcggtggcagctgctcccagcacctgttccccgttcccatcattgaagttctcgtggcattttggaaagaactgagcagttttcctagagaaatactctgggttctcgattaca

SEQ ID NO: 453712 - DNA, 122 bp, Homo sapiens
aagaaattccgggaattgtccagaagatccacagggtcagagacacacgcgccaaaaaggcgcctttcatgcacggtcctccggggaaaacagagaaatatatataggagctctctgccttt

SEQ ID NO: 453713 - DNA, 122 bp, Homo sapiens
aattcccttaatctgataaaacatatctgtaagaggtgtacacctaacatctcatctaatcgtgaaatattgaaaactgccaatttcttattgaaatgaaaaaaaactgccaataactggac

SEQ ID NO: 453714 - DNA, 122 bp, Homo sapiens
atatagagattttatttaaactgtattgaatttttacagcacattgcatgtttgtcacaacgcaactgcacagtttggatttttggccacatcatgtcacttacacccacaacagctctgaa

SEQ ID NO: 453715 - DNA, 122 bp, Homo sapiens
aggaggaggggtgggccatctgcccatcccagaaattcctgcctttggggtggggacaggcggagtgaggctgctcgggtcacactctccgctcctctagcttgcagccctgctctctcctt

SEQ ID NO: 453716 - DNA, 122 bp, Homo sapiens
tgctctgctctcctttcattatgagggtgtatcctccccgtccctgctcagcagacacagcggttgaactactcagagacatgagcatacattatggcccagagatttaggagccctggtcc

SEQ ID NO: 453717 - DNA, 122 bp, Homo sapiens
agctcacttttttctctaactcggccaggaccttatttttgttctggagtccaggcagcacgtagacggcatctgcccgcttcagacggcacctttgcctctgtgcgtgggacccgatatcc

SEQ ID NO: 453718 - DNA, 122 bp, Homo sapiens
gctttccttctttgtcttcctattgcacaagtgaagaaactgaggcttggagaggctacccgccccccacaatcattttcacttggagaataggtggcatatggggaactagaatcaaaatg

SEQ ID NO: 453719 - DNA, 122 bp, Homo sapiens
cctgggcaaagtgagccttagggcctctgatgggaagctctgagaacccagcagctctcccggtattcctgccccaaaggcacaacctaaatagatctgatcataaggaaacaggataaaac

SEQ ID NO: 453720 - DNA, 122 bp, Homo sapiens
tgtccggcggggaggcggcggcttccggtctgggacggagctgtagcggcactgtaactgcgagggcagcgccgcgtgtgtaacggcgggggcgtgtcggcgggaaggacaatcgggccggg

SEQ ID NO: 453721 - DNA, 122 bp, Homo sapiens
caatccaaaaacctgcaggccagcaccctggaaaccaaacctcacattttccaggaaggccgtgaagatgcctgtgggccttctgctgttacatttatcaaaaactgtaaaattaagaacat

SEQ ID NO: 453722 - DNA, 122 bp, Homo sapiens
gcaggaccccgagctctgcgggcaacaagcacccccgtgattccaatgcaggcaggaccccgagatctgcgggcaacaagcacccccgtgattccaatctgcaggcaggatcccggcatctg

SEQ ID NO: 453723 - DNA, 122 bp, Homo sapiens
aaggagggggggcagccccttcgggaagagccaatcaggggcgagcgtctctggcgtcagcgccaggcccggcgcggattggcggcgcgcgtctcccacttcccctcggaggaaaggctcag

SEQ ID NO: 453724 - DNA, 122 bp, Homo sapiens
ctgtttgccccgctgggactcagcggcaccagcatcatcgaccatactgggaccagcagccgcggagcgcgctcgaggcggctttcgcaagacctcttccagacccaggcgcgaagctcggg

SEQ ID NO: 453725 - DNA, 122 bp, Homo sapiens
cttaaatgactgataagaaccgtgagaaacatgttgcttccaggcttgatttcgatttttcgctttttttttttttgagacagaatctcactttgtcaccaggctggagtgcagtggtgcaa

SEQ ID NO: 453726 - DNA, 122 bp, Homo sapiens
tgagtttacaaaagggcttggtccttgacctatttcctcacttcttctggacttcttgagcgctaaagtaaagaatgaaactcttggacaaagccattcattcaacaacaaatatttattga

SEQ ID NO: 453727 - DNA, 122 bp, Homo sapiens
ctgcgcgcccgccgtgcgccctcagctccttttcctgagcccgccgcgatgggagctgcgcggggatccccggccagaccccgccggttgcctctgctcagcgtcctgctgctgccgctgct

SEQ ID NO: 453728 - DNA, 122 bp, Homo sapiens
acaaaagggtgacatttagcctgtgacaggccattagcggtccccaccgacagctctctccgtgggcaaggatgaagccttgtttgcacaagaagtgcaaagctggcagtgggtgctcagca

SEQ ID NO: 453729 - DNA, 122 bp, Homo sapiens
cgtgtgccagtcttctgcgtgtgtctttctggatgggcagggcctgtcttaagcatgtaccgccagctaccaggatttatggtgggggtgtgcacgcactcagcgttactgctgggcagttt

SEQ ID NO: 453730 - DNA, 122 bp, Homo sapiens
gaggtgacagaatgacaagccatagtgatggcaacacgggcccttcacagtgcggaggcgcgggtggtggtggcaggagcggctgggggagcagcaatggctcggtgggtctcccgtgcccc

SEQ ID NO: 453731 - DNA, 122 bp, Homo sapiens
agccgctgtctcctgaaacaggatttcggccgctctggccctggagaggcccaggaggctcgagagtcatcacaccaggacctgcaatgaaaggaagcttattttccctgaggttaccccat

SEQ ID NO: 453732 - DNA, 122 bp, Homo sapiens
ctaaatctcaagtcttcgcagggaacctctgcttccgccatctgtccagcctcattcctacgcctctgcaaagtctcttggatgctaactactgattgatagaggtctaaaaaccagtgtcc

SEQ ID NO: 453733 - DNA, 122 bp, Homo sapiens
catgggggtgggtctttctctgctgttctcctaatagtgaataagtctcatgagatctgacggttttataaataggagttcccctgcacaagctctttctccttctttgtctgctgccatcc

SEQ ID NO: 453734 - DNA, 122 bp, Homo sapiens
cctcgggagggtgcatcggtgcctgaatgtctgattccgaggggtgcattgaatcctttacgcttgggactctgagggaaaagtccattaggggtctctggaccgcgacgcatgccaggttc

SEQ ID NO: 453735 - DNA, 122 bp, Homo sapiens
ccggccacgtcgcagattataagggcggagctgacgtcgcagccagggcagggcgatactcgagctagctctcgagatcagcgagaggttacttccggggcggcaccgagaagctgaaacgg

SEQ ID NO: 453736 - DNA, 122 bp, Homo sapiens
atgtaaagaggaaagaacaggtgcaggagtcgttcctcgatcaattccaggtcaaggcaccggtttcggtccccagtgcggctcctgtctcctgacccagccccccggcccagcccccagaa

SEQ ID NO: 453737 - DNA, 122 bp, Homo sapiens
cagggcaggatgggcaggagagcagagccgcggagtctgcggcgcgggtgaagagcggcgcgtaattcccgcagcaagattgttccgcgcccgcagcccctggactagcaggatccgaaccc

SEQ ID NO: 453738 - DNA, 122 bp, Homo sapiens
cttgttcccaaatcttgacgtcatattataattaaatactgaaagtattaagaaatgacgcgggcatcacagagactgttttgttgttcaattgcagtcagattatgaattttgcttattag

SEQ ID NO: 453739 - DNA, 122 bp, Homo sapiens
gtccgaagctgcgggcggaggtgggcgcgcggggctcgggtctggttgcactttggggaccggccccggtagcgggaactttaattagactttctctccttggatctcactcgctgccgcgc

SEQ ID NO: 453740 - DNA, 122 bp, Homo sapiens
aaggcgccgccgaaactgtgccaactgccgcaccgggctcccgcgcctgcctgggagcggcgcgaccccgaactccgcgcttcagcagccctgccccatgcagcacttccacgggcgcggct

SEQ ID NO: 453741 - DNA, 122 bp, Homo sapiens
gactattttatatcacaattaatcacgccatcaagaaggcgcgggtcccgcgtgcgagtgcggccagcggagcccctcacataaaattagacaataattgaagccataaaaaagcagccaaa

SEQ ID NO: 453742 - DNA, 122 bp, Homo sapiens
gactgtgtcaagcagcgggacgctggcaggagcaccgggaaggccagcacgtggctgcaacgtctcccgccttcaggacgcgggccgaggccaaggcacctggaagcagagtgtccactgac

SEQ ID NO: 453743 - DNA, 122 bp, Homo sapiens
actcccacatttgtcacagagcggcatcctctgtgccccgcctgaaccgccatggactttcgtcaccggagctctcacactccgcgttccagccggacggtcatctgaaaaacaaagcgttt

SEQ ID NO: 453744 - DNA, 122 bp, Homo sapiens
gaagaaagcacagaggacatgagagaaggggagtcctggagcaggccaggccagctgcgacgaccatcccaggctaggagaaatggggtgatcccccgaatgctcgggcctagctctagagc

SEQ ID NO: 453745 - DNA, 122 bp, Homo sapiens
gggggcggggcccggagggggcggggctcacaagccaactccgcgctgctgcccgacccacgcagtccggcctcgccccgccccacccgcaccctccaaccaatggcgtggctcgatcggct

SEQ ID NO: 453746 - DNA, 122 bp, Homo sapiens
tggaaaggggcatggagcttctctgtcctctctgggtgtaccactctccagatatctccacgtattcagctctctgaaccctgtccttttggccttttgtggaggttttattacataggtat

SEQ ID NO: 453747 - DNA, 122 bp, Homo sapiens
gctggaaaccgttgaatagtccccactgtcttctggaagggtctgggcagctcggcgtggcgtccacggccccaccaggcctctgcctcctgcaggtcccgctacttcgtcaccaaagcgcc

SEQ ID NO: 453748 - DNA, 122 bp, Homo sapiens
aggtgcagccttccctggctccacttggggcctgtttctcaatgtgtgaaacggggggcacgcctccatccacagatccagcagctccagtctttgggatggagatggggatggggagggag

SEQ ID NO: 453749 - DNA, 122 bp, Homo sapiens
tagtgtagacttaaaaaaacataaaattaactgtgctgtaaattatgctttatgacagcccgcttcttgctggatagcatggtgggatctaaaaatggtctctaagttgaacccaaattgca

SEQ ID NO: 453750 - DNA, 122 bp, Homo sapiens
gtcctgcccaggacagataaagacagagcagcctgtctttattggaggttcctctgccagcgggaagggtccggggaaaaccagagccagagccagagccagagaaacatgaagcaccccgg

SEQ ID NO: 453751 - DNA, 122 bp, Homo sapiens
ctaaatgtaagacttgatacttcaactttttggtttaggcccagcagtttgggtattccacgtggttaatcattttaaagcttgtttcaatatagtcttccaaccagactttccaatttgtg

SEQ ID NO: 453752 - DNA, 122 bp, Homo sapiens
acaatggcctttgtgcctggcgccgtcggggggagctgggcgcctagcgggtggggcaggcggaagttggacacatttccacgcaggtgaggccatccatggggtgatgcgggtgttggggc

SEQ ID NO: 453753 - DNA, 122 bp, Homo sapiens
gcaaagacggcagccagctcctcacagaaggccgcccggctcagaacaggtcccttcagccggctcagcagccagtgagaagcaacagcaaacgtaattaactccatgcgttcccgttagcg

SEQ ID NO: 453754 - DNA, 122 bp, Homo sapiens
gaggtcacctaggacttcaaagagtcccgccccagaatccccactcctcagccttctgcacggtattttcccatcagcctccctagtgcactatcaggcttggcggctgggaggacggcaaa

SEQ ID NO: 453755 - DNA, 122 bp, Homo sapiens
gggaggagacactgaccaccccagaggccgccccattagctcgcttgctttgggcggcgtcgctcccacggcgcccagggtacccccgccgctgtctgcctgtcttcctccattaccgcgca

SEQ ID NO: 453756 - DNA, 122 bp, Homo sapiens
ggtgcgcgcaggcaccgggacacggggcaggagcgggcgggggcggcgtggcctcgtggccgctctcaactcctccaattgcgggttccaggccatccgcggaactcgaggagtcgccaccc

SEQ ID NO: 453757 - DNA, 122 bp, Homo sapiens
cgggcgcgtagcctggagagcgaagtgccggctacagcaggtgtcggattgcagtgcgctcgctgaggctccggaccttggagcgtctagagtctggctactgttcctccgcctccctctcg

SEQ ID NO: 453758 - DNA, 122 bp, Homo sapiens
ttgaagttgatctccgcgatcctgtcaaatggggcgctgcaagagcaagggggatggcctcggcgctccccgcccggcccactgctcatctgggggcctcggtgctcctcccccactgctca

SEQ ID NO: 453759 - DNA, 122 bp, Homo sapiens
gctgctgggtaaacagcatctccccaattccccgtgcagtgctctctgttgtttgggctccgtcccctctggtgccctcttcaggagaacaatactttcagctgaaggttataaattggcaa

SEQ ID NO: 453760 - DNA, 122 bp, Homo sapiens
ctacaggtgacaccctgggttctgggtactttccaagcaaggaaaatcctctgaagcaggcggaaaattgccgtcttttaaaagttccagctctgtcttcagaccacttgtgtcttttcttt

SEQ ID NO: 453761 - DNA, 122 bp, Homo sapiens
aagaaaataatctctccacattcagagttaatcttccgaactcagcaactgccagtagaacgcaccccggtcagggcgggctcgcgggcgcggtcccacccccaggcccctccgccgcggag

SEQ ID NO: 453762 - DNA, 122 bp, Homo sapiens
ctctggcatcggccgtcacctggtggagaggctgccggagctggccaagcagagggaggccgatggtgccacttggtgtctcctctggcatctgggcaggagacttctccccagaggccccg

SEQ ID NO: 453763 - DNA, 122 bp, Homo sapiens
cgagcgcggaggccgcagctacaacttggctgagggctaaagtcggctctgcagccgaagcgacagccggggctgaggatggggaaaggtctctctcgaggctgtctgttggaaaagcagag

SEQ ID NO: 453764 - DNA, 122 bp, Homo sapiens
agtgcaggagccacgggaacacgccggctttgcagcggacagggaggggcgtggcctgaacgcctggactgcaatctctgcggggaaagcttatgactcccggcagccgcgagttctgatta

SEQ ID NO: 453765 - DNA, 122 bp, Homo sapiens
gtccctgagatcgtgagctgtggcttaaaatccccttcttccctctgtcttggatgtgctcggtgtgtgtctctttcccgcgtgtgcgtgaggctgcttggggctgtgctggcatgaacttg

SEQ ID NO: 453766 - DNA, 122 bp, Homo sapiens
gatttttttttctgagtgcttttttcatttccctattttacctgctttgcacatgcctcccgccctcacccgggaggcggcgaagacgcccactgggaccgcgcctggccgttttctgggcg

SEQ ID NO: 453767 - DNA, 122 bp, Homo sapiens
atgatttgctgcagatgacatcagccccgggccaacggctggaagagcggaggcagccaccgcgtgaggatgtgccgggtggtcctttcctcctcctcttcctcctcctcccggctccctgc

SEQ ID NO: 453768 - DNA, 122 bp, Homo sapiens
gcagagccagatggggcagggctcctgagcagattgacgtgcaaatggggcggggcctagcgtgtgcatccagtaggggcgggagcggcgcgggggccgactccgcctctcgtccgcctcct

SEQ ID NO: 453769 - DNA, 122 bp, Homo sapiens
atgaatcattaatcattagtttgtagtaattattctttattccaatattataataatcctcgctctacaatcataacctaggaaacaccaggccatacagagataggagctgaggggacaat

SEQ ID NO: 453770 - DNA, 122 bp, Homo sapiens
acagtgaggctgtggttgccatgttggtgactggcagagcggccatgttgcttatagacgcgcatgcggccatgttgaatattcggagaggagtcctgagagttgacttgtgttaaagtagc

SEQ ID NO: 453771 - DNA, 122 bp, Homo sapiens
cgaacttccgacctcaggttatccgcccgcctcagcctcccaaagtgctgggattacaggcgtgagccactgcgcttcggcctttacttgttttcatgtgttctcgacttcccatgaatgaa

SEQ ID NO: 453772 - DNA, 122 bp, Homo sapiens
ttcagcatccctgcctgtccctggcgttcagtgtgcccagcagcagatgttggaggtgaccgcactgtgcgtctgtgggtttcagacatgagagtttatcccgtgtgacttgaaccctgaaa

SEQ ID NO: 453773 - DNA, 122 bp, Homo sapiens
cccgggtgttgcccgagcagacctagaactataaagcttgccgctgcaccacgccaagggcgggggttcagacagttctcattttaggaagcgcctgttggagttttctgagctgtgcaccc

SEQ ID NO: 453774 - DNA, 122 bp, Homo sapiens
tctccaatcaaacttacccagtcaagctgattcctcagaagcagccccagacgtttaactcgacggaaatgagaaacgacccatgaacccgtggccctttggtcgtcgtagtttccaaggct

SEQ ID NO: 453775 - DNA, 122 bp, Homo sapiens
ttgatgtgttaaaaataccttatcctgtgggaatttcccattcgtttgcttgtggggagccggaggaatcataagaactcacgagcaagagagaatcgagcctaagtgctttctggaagagt

SEQ ID NO: 453776 - DNA, 122 bp, Homo sapiens
atgtctgacgatcgcccccgcctgccgcccttataaaggggacttttcccaatactcgatcgattcccacctcgccctgcgccgcgcgccctccgccggcgccaacacctgtcaactctgcg

SEQ ID NO: 453777 - DNA, 122 bp, Homo sapiens
tgtaacgacaactgggaggctgacaaaattaagatctgtcaaagtaacgcccattagaaccgtcttcaaagttgtcatgtgcacgtgtgtgtacgcacacacacacccccatgatgcatgaa

SEQ ID NO: 453778 - DNA, 122 bp, Homo sapiens
ttttaggcctttctctttcaacgtcagcctaccctctgctctcctctgtcaacttttccacgcccttgctatattgctgtttatgatctgctatggaggggagaccacacgcatactaccaa

SEQ ID NO: 453779 - DNA, 122 bp, Homo sapiens
gcaggggtggctgggccgggtcggggctctgggaggcgggagcaggtgagcggccccgagcggctttacgattgtctgccaggcgggctcctgaagtgtgggcatttaacactcgtcacgtg

SEQ ID NO: 453780 - DNA, 122 bp, Homo sapiens
agcagcagggctggtgtcgggtgtgggccgggcttcatttctgggcaggcatgaggtcgtcgatggcctggccctgctccagccgctgctccatctcgatgagcagcttcactccgtccacc

SEQ ID NO: 453781 - DNA, 122 bp, Homo sapiens
cgccggcaggtgtctggcctggccggctcgcgtcccagcgcctggttagagcagcgggagcgagggcccgccactttcggtcgaaagtcacttaggttcgcatcggatgcatcattggatcc

SEQ ID NO: 453782 - DNA, 122 bp, Homo sapiens
aggagggcagggtgaagtttcttctccctgactgggattgcacctgaagacttgggctagcgagccgctgtatatcctggatccgggaaggtgtgaagggatcaaccaccacttctagaaat

SEQ ID NO: 453783 - DNA, 122 bp, Homo sapiens
ctggaggcaaaaagatacgcatggtggagaattcggtacgcctataaagtcaagttccagcgtaaaacagatttccgtggacacaggaagtaacacgtaaattccaactcctagaaagtgcc

SEQ ID NO: 453784 - DNA, 122 bp, Homo sapiens
tccacagtatcagccatgggcagtgtgggctgctggccactgaaacgtgcggtgatgtctcgcagggacacagcagggcggcccttccggcaggcctgggctggcctgtggggtggcctggg

SEQ ID NO: 453785 - DNA, 122 bp, Homo sapiens
agaaaagtcccccataaaagtctttggatccctcatattcggtttcacgagccagtcatccgggaaatggctaagagcagaccagcatcaaagcagcggcctctgctcccccagtcccagcc

SEQ ID NO: 453786 - DNA, 122 bp, Homo sapiens
cgcatcggattcggctgctcgcgagctgctttctctcctcttccctttccgggtgcacggcgaggagaaagtctctatgcaactaagccccggcgcgcacttggccaggtatgtaccgcggg

SEQ ID NO: 453787 - DNA, 122 bp, Homo sapiens
tttggcaaggtcacaagatgtggtagagatttttattccacacttattccatgcttattccgagcatgtttggctatgatgtccataactttcctctggtccacacagcagtggttatagtg

SEQ ID NO: 453788 - DNA, 122 bp, Homo sapiens
agatatatgatgatagctaataaaaatgaccatttacctctgaccccaaactgagagaaacgatctcatcctcaaaagcggaatgtgtatcaatatgagcgggaattcctgagatggaaaac

SEQ ID NO: 453789 - DNA, 122 bp, Homo sapiens
accggcagctgggtcggagcttgcgagggctttgcagtctctgcctgttccttgttctgtcgctcttaagtttctctgtgtttgcataatagccgtgcatgcaaacctcgcaatgctccagg

SEQ ID NO: 453790 - DNA, 122 bp, Homo sapiens
ggtgggatggggcctctggcatgaacgagagtgactccgagtgggtaaagatgccctcctcgcagaggacacgaagcaacaaggaaaacagccaccacgtaataagcgacatgccagaatag

SEQ ID NO: 453791 - DNA, 122 bp, Homo sapiens
atttgcatggatgatggatttcccaacaggtcaattttcacatctggaatctactttaaacgtgctctaccacatcaaagtctaaggaagtcaatctcacttggaggcacactgcagagaca

SEQ ID NO: 453792 - DNA, 122 bp, Homo sapiens
gccgcaggagtggccggcacccccatagactggggaaggaaatggaccagagggcaccgccggctcccacccagacccggcctccaggcccgcaccaccccagtccacccggagctggacag

SEQ ID NO: 453793 - DNA, 122 bp, Homo sapiens
acagcctgggctcaacctctcccagacttcctggactccagtggagccttgggccgggggcggggcgtccctggcccctccccgtcgtcccgcctgcccggaaaggagtgagcggcgcctag

SEQ ID NO: 453794 - DNA, 122 bp, Homo sapiens
cggcggcggcccgggccctgcggggctgggggggccggggggcggcgggagagcggagggcgggccctgggctcacgtgctcgctgctcagctcttaacccggccccgccgccccgccggga

SEQ ID NO: 453795 - DNA, 122 bp, Homo sapiens
cgcagcccgcgcccccgcgcaccacacgcaaccgcccggcgtcgcacgactgggcaatggcgtgccagctcattggctgagccggaccaaacccgagcaaggacgcttgtttcctggcaacg

SEQ ID NO: 453796 - DNA, 122 bp, Homo sapiens
ccatttatctcccctcaaaatctcttgcaatgcctgtcttcagagattcttccagaaaagcgtaaaagtaaaacttgaaagaaataataaaatactccttaattcctagtgataataccagt

SEQ ID NO: 453797 - DNA, 122 bp, Homo sapiens
gcaatcttatgagagttttggttattgtgcatgagcttgaaatatctgaatgcttggaaacgtagcataaatgatctatcatattattcaaggtggtgatgtgtgatttgttgaaataaaat

SEQ ID NO: 453798 - DNA, 122 bp, Homo sapiens
acaggttagccatgggctgcagttttccttcctagggtggtgatgggggtcctcccaggccgtttgaagcaggccccggagatccagcccgagggtgacaggggtgtgggggtgagggtggg

SEQ ID NO: 453799 - DNA, 122 bp, Homo sapiens
aatattttctgcttggagagaacattatttacaagaacagagcaggaacagggtcctgcccgggtagactggtgggctctggcttatgtttcgtggctgtgacagctcataccaatctgtgt

SEQ ID NO: 453800 - DNA, 122 bp, Homo sapiens
ccctgagacatgggccaaggtcagagagccgagaaggctgctgctgaggactctggttggcgcccagcccagcggcccttcaggcgggccctgtgcaggggctgatgaagtcagctgggaaa

SEQ ID NO: 453801 - DNA, 122 bp, Homo sapiens
gggtcttcaggcctttgtgttctggaaggttcatttatagccatttcccaaatgacaatgcgattgatgagtctagagtctagctcaaatagcaatggactggaagactagtttaggtttta

SEQ ID NO: 453802 - DNA, 122 bp, Homo sapiens
tgaaactcatttaactgggttaatttcatttcttagactgaatatattattgttaagatacgtgtgcgtgttaggtaattctcagcatctcctccaagtaggccgaccttctcggaaaattc

SEQ ID NO: 453803 - DNA, 122 bp, Homo sapiens
gaagggagtcgcttaaggatctggaaggcggaccgggtggtggctgcccaccctggttcccgaggtggaggttggggagacccagccggccccgcccataccttccctcctggtcccgccca

SEQ ID NO: 453804 - DNA, 122 bp, Homo sapiens
gtcgctgtccccaggccttcaccaacacctatctcttctacggtgcgtaccgagtggggccggagagcagctccgtgtacagcatccgcctggcctacctcctcagcccgctggcctgcctg

SEQ ID NO: 453805 - DNA, 122 bp, Homo sapiens
cagagcaaaggagccagcagaaaaagacgagacggctgtagccccacaggaagcagaaaccgataggctaagtaggatacacacaaagaaaagtagatcccgagaggcatttccccgagggc

SEQ ID NO: 453806 - DNA, 122 bp, Homo sapiens
cgccgctgccgccgccgctgccggggcgcgttctcctcctaccggtcgggtgccccggggcgttccctctgccgctgcttctcggcgcggttcctacccggccgctccccgaggcgcgggct

SEQ ID NO: 453807 - DNA, 122 bp, Homo sapiens
cagtgcacacgccgcgtgctgccaccacccagctcgatgattctctccttccacaccttccggtccccaaaagtgactgaaagcaggattctgctgcggaaaaactggacttggaggaaggg

SEQ ID NO: 453808 - DNA, 122 bp, Homo sapiens
ttgttgagaggcggacactgactcgggaggtctggggtagggcctgaacgtttgcctttgcggttctaacaagctctcaggtgatggcgatgctactgttccctggccccgaggtagaggaa

SEQ ID NO: 453809 - DNA, 122 bp, Homo sapiens
aacagtggcagcacatgcaatgcgcttaataattattagctattggcattttattacatacgcgtgcacacacacacacacacacacacacaagctcagaggagagggccagacagacacac

SEQ ID NO: 453810 - DNA, 122 bp, Homo sapiens
attgacgggccgtctcgagagccggcatctcctaggagctagtcctggtcctcggctaggcggcttggggtcgcggcgtaactggggagccagcctgacgccggcggaccccgcctgtgatc

SEQ ID NO: 453811 - DNA, 122 bp, Homo sapiens
agcactgacaaggtttcgcggcaaaggagctttattgctgcggcggcagaacgagctctgcgaagggcgagggggcggcgaatggcgcgcggtcggagagtacgagcgcctcctgcagggcg

SEQ ID NO: 453812 - DNA, 122 bp, Homo sapiens
gccagctgatgtgggttcctgcgtggcccgtgctggctgctcacaggcgggcactgctgccgctgctgcacctgcacttcctttcttgctcatctttgtcaaggaggatgcctggggctgcg

SEQ ID NO: 453813 - DNA, 122 bp, Homo sapiens
cctcacagctgaaagtgccctggccacaccacactgtccttgctgcattcccttcttcagcgattccaagtccaagggtgcagatttttccagaggttttaaggactatgttccactagtcc

SEQ ID NO: 453814 - DNA, 122 bp, Homo sapiens
ccaggcctctccccaaaggcagcttaggatccacgggcgcccggcggggaggagccaggacgcgggctccggggcaggatagacacccctgcgcttgggatagcgggtgggggcggttggtt

SEQ ID NO: 453815 - DNA, 122 bp, Homo sapiens
gggaaaggggcctccgaaaagtaacttgcccggcgatgctgcgcgaccgccttccagcaccgggaagattctgggcactcagggacgttgagcttcccacctgagcctccggggggacccct

SEQ ID NO: 453816 - DNA, 122 bp, Homo sapiens
tgagggcctggcggcaactgggtcaggacagcttggacagaacgccgagaacaaatgtcccggcatgaagttccaaagaacggaagctggcaaaaagtgtgtccggcacggggaaaatagct

SEQ ID NO: 453817 - DNA, 122 bp, Homo sapiens
tgcatttctgcacgattttgtcagcaacaaaccacagcctcgccctgccccacctccgtccgcatagtgcccatggccaggctgtctgggcgcagcattcctgggcctgctctctggctccc

SEQ ID NO: 453818 - DNA, 122 bp, Homo sapiens
ctgctgctgcctctggctgtggacctgcacctcttccccatccccgccaggcccggggagcggggtgagcctggatgagagcccccccaacctggggctctcccaggccatggcccgtgtgc

SEQ ID NO: 453819 - DNA, 122 bp, Homo sapiens
ccaggctgccccaagggcctgggaggctgcggtaccgcctgtcggtcccggtcccgagcgcgcttgcttaagagttctcaaagacggggttggaagcagtacagacgtccccggttatcgct

SEQ ID NO: 453820 - DNA, 122 bp, Homo sapiens
caaaatgcctcctcgaagcaactgcaaaccacaccctgggacaaagtatcccgaaagccacggggcctcctcccctctgacaccacttctccatccctgcccatgctgctcagaaggccgac

SEQ ID NO: 453821 - DNA, 122 bp, Homo sapiens
atcaagcccgtgagccaggcccaggtagagggtaaggaggaaagcaaggaggagacggtccgtgcccagggtaggcaccacccacagcactgtcagcagctccacacacactgggtggcgca

SEQ ID NO: 453822 - DNA, 122 bp, Homo sapiens
cgccgctgcgggtcctgcgaccgctcctggctggtgggtggtctcgcgtggggcggttaccgccggcttcagtgggaggtgcttctcggcttcctccccctcatggcgtacacacccccggc

SEQ ID NO: 453823 - DNA, 122 bp, Homo sapiens
taaaaaaaatactgcttttatgtgccaagtctcttatggaactagtatgggattaaaggacgttaattggaaaggagggtcagtatataaggaccacagtggcctgttaaggatgacagatg

SEQ ID NO: 453824 - DNA, 122 bp, Homo sapiens
gggaacgagatgcatgctcacatcgagatgagctcggcatgggctgggccctgctgcctccgcctcctgacacacccgtccatcgggggtccccatggctgcccccgcctttcactgacctc

SEQ ID NO: 453825 - DNA, 122 bp, Homo sapiens
acagaagcggccggactctgaggccagtaagtctcatggggcaaaaaggggcctgtatctcggccgtgtggcgacgttatttgcctcaaaaaacgcctaggccggaacccctgcatttcagg

SEQ ID NO: 453826 - DNA, 122 bp, Homo sapiens
ggctttctcaggagccagcaggggttacaatttggtcgggtccagtgtgtccctctcaggcggaaacccagccccaggcccataagagaggggtccaagctccaaagagaagcctccagcac

SEQ ID NO: 453827 - DNA, 122 bp, Homo sapiens
ggccacagtgccctgctctgtgcctcatccccacccgaccctccctttccagaacaaatgcgtcccatactggcccgaggtgggcatgcagcgtgcttatgggccctactctgtgaccaact

SEQ ID NO: 453828 - DNA, 122 bp, Homo sapiens
ctggaccgtgtcgtagaggccgatcctgagagaggcggagctgatttgccgctgaagccccgcaggcagcccgctgtagagtttcatccgcccttctgtttttaccacagcggtgattgttc

SEQ ID NO: 453829 - DNA, 122 bp, Homo sapiens
aaatcagcctgggagctggggactgggccacctgggctgagggcaaaggtcagcctgcaccgtgagcgcaggacaaaggccgaggggtgcggtggtggcctcggtggcgggcgtctctggcc

SEQ ID NO: 453830 - DNA, 122 bp, Homo sapiens
gccccttggggctggagggccgctgggcccgcggaggcggaagcgcgcgagtaggaggtgcggaggtcgggctcgcggggctccgggctgcccctctgagtgagccgcgctgctgaagccgg

SEQ ID NO: 453831 - DNA, 122 bp, Homo sapiens
ctcttctggagcgtgtcgcttttgtaattatgatgtaaactccgggcacgcggggaccctcgcgcttcgctcactaatttgtccccagaccctactacctggcacagtaggcgctcaatact

SEQ ID NO: 453832 - DNA, 122 bp, Homo sapiens
agctctccaccgaccgaaggaggagaatgctatttatttcagcaccaaatatccggacagcgcctctcgggaggtccgagaagagaaccgcgatctgtttcagcaccggggctcaggacagt

SEQ ID NO: 453833 - DNA, 122 bp, Homo sapiens
atctggcagaagtgggagctcaaagaccagggggctgggcaggctcctgggagcctgatccgagaccgtgtcggctgcaaggggacacacaaccagggtactgttgactagctttttgcata

SEQ ID NO: 453834 - DNA, 122 bp, Homo sapiens
tacttcactccccactgtaaggaagatttaacttgaagcggagataatgatttgaatttacggcttttataatgtcataaatgggcgtcattttaataactactctcagaatatctttttct

SEQ ID NO: 453835 - DNA, 122 bp, Homo sapiens
ggcgccgggccgctctagccggtgaggccggcgggctctctgtggctgcggctgggaaaccgcgcggaggaggtgcccggccggggaccaggtggccgcggtttgcggggacgcggccctgg

SEQ ID NO: 453836 - DNA, 122 bp, Homo sapiens
agatcttcttatcgccttgacaaaacccaggaagcggtccatctcttactcaccgtgcagcgcggcacagctagcacaagagcacagcaacagcccagctgctctgcgagccggtggagcat

SEQ ID NO: 453837 - DNA, 122 bp, Homo sapiens
ttttttcttttttgctcccacacaaggttagtggtgtatgcatctggtggtgttttgctccggctgcacacagaatgtacagtccaccttgcagtcccagcctaggaagcctggtgaccacc

SEQ ID NO: 453838 - DNA, 122 bp, Homo sapiens
gtgcacaggcagtcctggcagcactgcaactggagagttcccaggctggccacatgggggcggggggagccaggcctgacatcctggccatctgggcgactccagttctgggaagagcactg

SEQ ID NO: 453839 - DNA, 122 bp, Homo sapiens
gctgtgcgactgcaatttgtactcccatgaagctggccctagtcaagtacgcagtgaggtcgatgaggaggaggctgtcctgtggtaagtcccttctaggattggaagagatgagtaaggct

SEQ ID NO: 453840 - DNA, 122 bp, Homo sapiens
cagctgcgagctccgtggcagccgctgcactccttccggccctgccgcggcgtcacctcgcgcctgcgcacagcgccccctcccgactaaggacaggaagaaccatagaggcactccgggta

SEQ ID NO: 453841 - DNA, 122 bp, Homo sapiens
cttgatgggctgagtggagaatcacaaataccttgataggtggtccttgagatggaaaatcgtctctaatcctgactagcccgaagaccatggaagtgtcttggcctctctgttgtcctgaa

SEQ ID NO: 453842 - DNA, 122 bp, Homo sapiens
ctggggctgctcagctggttggggctgggcaggcttgagtccacagacatagtctctgtgcgccgggggagacgtgagcatgagaaggggcctcccgcggccagcggccactgcccgccccc

SEQ ID NO: 453843 - DNA, 122 bp, Homo sapiens
ggaggcaccccgtgttgggtcccacagctcaccagctcagccagtgttccctgagcctggcgctggcgggccctgggcaccgcgatgggtgggggccgggcctgtcctctcgggctgtttgg

SEQ ID NO: 453844 - DNA, 122 bp, Homo sapiens
gtcacagctgagctgcagtgtccccgcacacccctgtccccagccaagccacaggaagaacgggtctgtgcattcgcctggatcacagggaatcgctgccactgtcccctccaccccagtgc

SEQ ID NO: 453845 - DNA, 122 bp, Homo sapiens
acacaaaaccagatcctagcggtgagctggctgcggaggaaccaaagaaaaatgaatcctcgaggaaccctctcccatgctaggaagatgtagttctacagctgcagcaccaaattcgaggc

SEQ ID NO: 453846 - DNA, 122 bp, Homo sapiens
ggacccttgaatctttccttgcgtaggcgcgcggcagagcagcgatttggcgaaaagggccgagactcaggatgcctgcaatgcgagcgaggggcggacagggcgcacggggcgcggcaagg

SEQ ID NO: 453847 - DNA, 122 bp, Homo sapiens
cggtcccttttctcagaatctaacaggtaagaatggcctcttgtggcttcccaaacacggcggtaaggaccagtctgccagtccctaataagaaattgctaattttaaaaaccattccgaac

SEQ ID NO: 453848 - DNA, 122 bp, Homo sapiens
gtctcggcttcgcttcccaccctctacacctcaaataatcctaaaaggaaagaaaaaggtcgattcctccaaagttcagtccctgtggctgcacaactagttggtggagtcaagcccacgag

SEQ ID NO: 453849 - DNA, 122 bp, Homo sapiens
ccggctgcgcgagacgcttcccgctcggggacccgccttccgaggccaggtgaacgttaccggccccctgacctccagcagatccacacgtgagtcccggtttccgcgatcggggagcgacc

SEQ ID NO: 453850 - DNA, 122 bp, Homo sapiens
tgctagagaggacaccaaagtaccatagaagcttgggcggggtgcagagcgtctgcagcccgatcagaattcaagtcctttgggatgtcaccgagcggcttcagtttattggttctgtagga

SEQ ID NO: 453851 - DNA, 122 bp, Homo sapiens
tgggagggtaagggctcctcagctccctccctggactcccagttcagtcaccccttcccccggaagaattcaaagaggaagggcagggtctatgtcatggacactgctacttgttcgatgaa

SEQ ID NO: 453852 - DNA, 122 bp, Homo sapiens
cactttattttccagcacgtgacagtcacatgatttctgcagtgagccccaaagcttccacgagctttcctggaacctacggccagaagagtcctgagatttcgaatattaaagctttctcc

SEQ ID NO: 453853 - DNA, 122 bp, Homo sapiens
ggaatgtttccacagctgcaggagtgcctggaattgtagagggtctttaaaagaaggaaacgccgctcgtcgctgaccgttctcattgagtcaggcgctgtctgaacctcccaaaacatgct

SEQ ID NO: 453854 - DNA, 122 bp, Homo sapiens
ctgcagctggggaggaacacaggacacagacagcgagctgccaggaagccaaggaagccacgtgcccaggctggaaccccagcacactgaggcgtggacagagagcccctcgctgccccttg

SEQ ID NO: 453855 - DNA, 122 bp, Homo sapiens
gggccagttgccatggtgatgctgactcagcggcagaggcaggtagcagcatctggtacccggccggcacgcctctgcttggcctacgctcatagcaccctgtccagccccaactttccagc

SEQ ID NO: 453856 - DNA, 122 bp, Homo sapiens
gtcacagggtcccgcaggtaatcaagacagatggagcaggtcacctcctcttccaggctccgtagtggggctgacgtggccatggtatccttagttcagagaggtctccgttcactggtgag

SEQ ID NO: 453857 - DNA, 122 bp, Homo sapiens
cttatacaaaacctctgcaaggatgtctgcccagaaactgcctgtccaacctttaactgacgtcacccttgttattgacctttgtagctaagataattagttcaaaacaatgtgtaaccatc

SEQ ID NO: 453858 - DNA, 122 bp, Homo sapiens
gttggccctgggaggtgagtgcgatcgggggcgccgcacaggtgctgggattccccaggtcgcccatttcccctatggccaaactgaggctgcgagaaccctgggagagttgcagggtgacc

SEQ ID NO: 453859 - DNA, 122 bp, Homo sapiens
tggggtgtctgcagggacggtgtcccctgagcgcacgggacgtggggaatctggggtgtccggcagacagaagcacgggttcccagaagagccttctctgtcattatttgaaatgtttgaag

SEQ ID NO: 453860 - DNA, 122 bp, Homo sapiens
gaacgggagaggagggttatcttagtaaggcttgtttgcagatcctcagtgcaggctttccgtctctgacgattccggttgttctttgcctggtgagggaggtgaggggcaccttcgcaagg

SEQ ID NO: 453861 - DNA, 122 bp, Homo sapiens
tggaaagcatggtaggccaaaaataaaatttaaaaaattggaaccaggtgtggtacctcacgcctgtaatcccaactgtttgggaggcagagacagtgaatcacctgaggtcaggagtttga

SEQ ID NO: 453862 - DNA, 122 bp, Homo sapiens
cttttactttttgaaccataagattgtttatccattaaaatggtattaaaatgcccactacgtagggttgttgtattgagtagcaactaaaaattgcttgctcctttctgaagtatagagaa

SEQ ID NO: 453863 - DNA, 122 bp, Homo sapiens
tagagaggcgccgataaacctcctccagccggcggcccagcgaggccttgaaatgctccccgctcctggcaacgcacagccaacctgcaggctcccgcttggcccaagggagggagggggcg

SEQ ID NO: 453864 - DNA, 122 bp, Homo sapiens
tgaacagtacctggccgagggttaatcgatgcacagtgggtttatattgtgtcaacttcgcgaagctgaaaagacttttccttgcaccgctccgggttagtgttccccacaagaggcaattg

SEQ ID NO: 453865 - DNA, 122 bp, Homo sapiens
tgggaaatggagccaggcgctcctgctggccgcgcaccgggcgcctcacaccagccacaacggccttgaccctgggccccggcactctgtctggcagatgaggccaacatctggtcacatcc

SEQ ID NO: 453866 - DNA, 122 bp, Homo sapiens
tacccgcccggcctagccccgctacctcccaagagaccaacacgacaagcgcgcgcccaccgcattgccatggcaattcaaccgccgctgacaccggaaccggaaacttcatcaggaggtga

SEQ ID NO: 453867 - DNA, 122 bp, Homo sapiens
acccagtctccggcagtggcggctgcaactttccagagtatgagcttcccgagctaaatacgcgcgctttccatgtgggcgcctttggggagctgtggcggggccgtctgcgcggggccggg

SEQ ID NO: 453868 - DNA, 122 bp, Homo sapiens
gaatggggcccacagctcccctctcccccacatgccagccgagaaggccagtttgagcaccgcgtgggaggcccgagcttcccgccaacatggcaactgaatttggaaaacagctcatcacc

SEQ ID NO: 453869 - DNA, 122 bp, Homo sapiens
tagccccagcagccactactaggattttcccatggtgcaatgcaacttccccaacttttccgggcccagtttccaaagaaacccaggcaggcgttgtgcacaatcagccaccagtctgggag

SEQ ID NO: 453870 - DNA, 122 bp, Homo sapiens
tttgcttacagattgggggtttttcctctctctttactccaaccggattggtttgctccacgagaaagaggcgttttcctaatctcccttccccacgcctcctaccccctcccccgccccac

SEQ ID NO: 453871 - DNA, 122 bp, Homo sapiens
gcctcgggctcctgtgattctcctgcctccacccgtggagtgcctgggattgcaggcacgcgccgccccgcctgactggtttttgtatttttggtggagatggggttctgccgtgttgacca

SEQ ID NO: 453872 - DNA, 122 bp, Homo sapiens
gcgcccaccaccacatagctgtactcgtcccggctctcagagcctgcgctggccagggcccgggcacccagggattgctgctgccccagggctccccgtgccagggctccaggccggcccag

SEQ ID NO: 453873 - DNA, 122 bp, Homo sapiens
gagagcacgtacttcaggtagtcactgcaccaccctatcagaaaaagctcagcaaccacgcgtgagtcatttttgctccacttcatttattaacgctaagcttaagggtgtcacatccacaa

SEQ ID NO: 453874 - DNA, 122 bp, Homo sapiens
gcgtcatagcggagagattgacagggaatctggccaatgagaagggctcacttgttttctcgtgcggaaagcttggaagagatgggctttggaagcgggaaggggtggcctgaggcaaaagt

SEQ ID NO: 453875 - DNA, 122 bp, Homo sapiens
acaccaactgcgggcatgggacgcttaccttggagtcagggaggctgaacacgctggggtcgtccgtactccccaccatgatcttgtgctccttccccggggcatggccgcctgcgccctcg

SEQ ID NO: 453876 - DNA, 122 bp, Homo sapiens
atgcgcacctggccgtacgtagcttcatcaggcagggtgtacctgtcaagttcttaggtccgagtgttcgcggctttacctgtcctggtaccgccgtccgcacctcggtcagtgcgtccccg

SEQ ID NO: 453877 - DNA, 122 bp, Homo sapiens
tttctttgactaggaaagggaattcccgaccccttgtacttcccaggtgaggggatgcctcgtgctgcttcagctcacgctcggtgcgctgcacccactatcctgcacccactgtccggcac

SEQ ID NO: 453878 - DNA, 122 bp, Homo sapiens
ttatttataaacctggcactgtattcaataaacatttctgcagcctttcatctctaactgcgaactgtgtaggtttctagcttgcatagctttcaattccttttgctctcaacaagatagac

SEQ ID NO: 453879 - DNA, 122 bp, Homo sapiens
gccccgctcaccctggtgagctgccatcatcaccttcttccccaaggctctgtcttgggacgtagcaggacctcgggctggactatggagggagctgcgggtcctggtggatgaggagcatg

SEQ ID NO: 453880 - DNA, 122 bp, Homo sapiens
gggggctcgggtttcggccgagaggggcggggcgagcgcctgggggccccggggaggctgcggcccaatcactgcccggcccggacgctgcccccgaccccggcctccaatcactgcctggc

SEQ ID NO: 453881 - DNA, 122 bp, Homo sapiens
ggaaaagaagtaggaagcgggacacggtgtcctggggcaagggacttattacctaaaattcgcggccccttctgtccctaaaggttcttctccctgcccactttttggtctctttttagacc

SEQ ID NO: 453882 - DNA, 122 bp, Homo sapiens
agcagagactggcttgctccccaatgtcaggctcccgctgagacacctgcccccgccccccgcccggcaccaccgcagccgaggaaactcgtggccctccccggcccctccctcaccagggg

SEQ ID NO: 453883 - DNA, 122 bp, Homo sapiens
agccgtcgcgtcctgcggcacgccacggcgttctaaggcctcccagcacccgcgcgtcgccgcttagaacccgcccctggtttgcgcgtcacaacacccgccaggcgccgactcagtctcta

SEQ ID NO: 453884 - DNA, 122 bp, Homo sapiens
gctcaggcctcgccggccgcctcagggtgcttctgccgcaggtgtttgtccagggtggctcgcaggccgaagggcacatggcagtgggggcactcgaagcgggtgctgccaggcgtcatgcc

SEQ ID NO: 453885 - DNA, 122 bp, Homo sapiens
aggggtggggagcgcccggcactggtaggcgggactggacggttggcaaacagagcggcacggagcccaggccaggaagaagttttcctccctctccgcccaggctccgggaaagaggagag

SEQ ID NO: 453886 - DNA, 122 bp, Homo sapiens
tatttaaagggcattacatgttacaaaatagtttcacatgaattatttcatttatgaagtcgctgcaatcagtgaaatagacataagtgattattaagtccattttactgatgaataagtaa

SEQ ID NO: 453887 - DNA, 122 bp, Homo sapiens
tttattagatgtgtaagtttataaaaactgatggggaaaaaaagtgctccaggtgaggatcgaactcacaacctcggcattgctccgctcgcactgtcatataagtaccgcgcgctaaccga

SEQ ID NO: 453888 - DNA, 122 bp, Homo sapiens
ctgtccccttctggttcagcagactggggccctcggtgttttcaacaggtaccatggtcacgtagaagttacagccgcttccccgccaccaaaccgccccgaccacccccgctcccaggagt

SEQ ID NO: 453889 - DNA, 122 bp, Homo sapiens
tgactagcggccacgctgccgaaggacaagagcaacacagttgccaagacagtcgcagcccggctgaggctgtcggtgacggccatgtttaccggcttcagacttcccgcacctgaaggggc

SEQ ID NO: 453890 - DNA, 122 bp, Homo sapiens
cctctctctaagtcatctctgctcatccctcagaggaagtctttggaattgttgcttccccggctccagctctctgagtcagctccctgatggatggtgtcccggcatgatatttaggggtc

SEQ ID NO: 453891 - DNA, 122 bp, Homo sapiens
caaaagtccatccacagcttcatgacccaccctgaattcgccatagaggaggagttgccacgaacaccactcctggatgaggaagaggaggaaaatcctgacaaggcttctaagtttgggac

SEQ ID NO: 453892 - DNA, 122 bp, Homo sapiens
atatggagcctgcaattgtggggctgccctccacaccagagtgaagagccagaggggcctcgtggaaatgtgcagggcatgtcacacccacacctgagaaaagggcccagtcctgacagcac

SEQ ID NO: 453893 - DNA, 122 bp, Homo sapiens
tagaaattggctttggggacaactcagacctaggtttccgcctcctacatctgtgtgatccggggccaggacccttccaggtttttccccccgtgcattcttttatttaattgagacaacac

SEQ ID NO: 453894 - DNA, 122 bp, Homo sapiens
gttggtgtccccacccctccctcatcctccaggctgtacctctattcagaaggaggctgccggtaccttagtgccctctggaacgctgagcggcttggccccggatcttgctcctgctccag

SEQ ID NO: 453895 - DNA, 122 bp, Homo sapiens
gggtccgggttagccccaccggtgtcccctcctggggcgagctgaggggagggaggctcccggcccagtgtccttaataggctttggtctccatgggaacccgagggcaggggggatcgggc

SEQ ID NO: 453896 - DNA, 122 bp, Homo sapiens
cagaaccagtaagaggtaggagcggaccgactcacaaccccctcacccatgggccggacgcggccagcgagcccagagagacaaggcagaggaaataggaagagaaagagtatctgtgacaa

SEQ ID NO: 453897 - DNA, 122 bp, Homo sapiens
aagcaattctcacacctcgacctcctgaatatctgagactacaggtgcatacccacatcccgctagtttttatactgtttgtagaggctggtctggaactcctgggctcaagtgatctgcca

SEQ ID NO: 453898 - DNA, 122 bp, Homo sapiens
acctcgtgatccgcccacttcagcctcccaaagtgctggaattacaggcgtgagccaccgcgcccggcgtctttggcacatttgacgtatcatgtgactatgctacctattaaaaatccaca

SEQ ID NO: 453899 - DNA, 122 bp, Homo sapiens
ctcgcatgaacctgggtgccagggggattatcagcgtctgcgcaaggccgatggtggcagcgcggcgttaggaatcaggccccctatccctgagcccaacagcctaccgctacagcacccaa

SEQ ID NO: 453900 - DNA, 122 bp, Homo sapiens
ggcccaagctggaggaggccaggagagggcacgctggcttagccttctacgcggcaatcccgcccaaccccgggtccggaaagagcactgtctctggagtccacggacagaaagcgcaagct

SEQ ID NO: 453901 - DNA, 122 bp, Homo sapiens
gaaatccattcctagttccaccgtttagagcctctcctggggctgccgcgaaaattgggccggttggggtaacatctaacctggggtcccgcgaaagagcccatcagttccgcttgggggcc

SEQ ID NO: 453902 - DNA, 122 bp, Homo sapiens
ctctctgtattagacttaaagtcacatgaagatggcaactgtcttactcagatttgcctccgtatctggcatagtaggcagttggtaagtgcttgctaaataagcaagtgaatgccttttct

SEQ ID NO: 453903 - DNA, 122 bp, Homo sapiens
cacaacacaccgactcacctccgcgcactctgaccccgaccgacgcggcggacgggcgggcgctgtggccaaccgctgagcccgctgccgacccctttgaccaatgggctgcagtcaggcgg

SEQ ID NO: 453904 - DNA, 122 bp, Homo sapiens
tttcctctgccatctacgggttgcagcctaacctggtcccggaattcaggtagggagggccggggggcaggggggaaggcaaaagcgaagctttccttccggtcttgtgggtgggtgcacgt

SEQ ID NO: 453905 - DNA, 122 bp, Homo sapiens
ccgccaggggaaggggaggtttggcgctggagctggcccctggcggaccgagctctggcccggccgactggacgcccggggctgggggcgctgtcaggcctcgctggggcgcccctccccct

SEQ ID NO: 453906 - DNA, 122 bp, Homo sapiens
gtgataactttgtctcccttgtggagtggccagccttgtgtcaattaaacactttctttacggtaatgccatagtctcagtgagttgaatttgtttgtgcagcgggcaggaagttacaccat

SEQ ID NO: 453907 - DNA, 122 bp, Homo sapiens
gtgccagcgacagcgggcgctaccagtgctcgggcaccatgcgcatcccggtggagagcgcgcccatgttctccgctaaggtggctgtgacagtgcaaggtgggagagaccaggggccccgg

SEQ ID NO: 453908 - DNA, 122 bp, Homo sapiens
ttacctcaccccagtccaagccctgtgattggtcaggccatcaaagcctcgccccctacacgacccggaattcgacgccaacactggtttctggggcaacttctgcgtagctatgtgactag

SEQ ID NO: 453909 - DNA, 122 bp, Homo sapiens
ttccgaaatactctccctaaaatgacagagaacctggccaggcggacagaacggcccctgcgcatttgcaggggtcctggtgggcttgccgggcagagggcgtgcgggtctcagcaagctgc

SEQ ID NO: 453910 - DNA, 122 bp, Homo sapiens
acagccccatcttcatatacaatgcagatcttctgtccgtcagcattccagctcatactgcgaacaactgatttatttcgattgttgatcatctcctcaatccaagagcctgttttcacaaa

SEQ ID NO: 453911 - DNA, 122 bp, Homo sapiens
gcgccaacgtcggcacgtcgactcgtcgactccgggccctctgccccgcccgcgtgcgcgcgccgctccgcctcccgcctccagcctctagtccgctgggttcggaggagcagaggcggaag

SEQ ID NO: 453912 - DNA, 122 bp, Homo sapiens
ccccctcacagacatctaggagtagcagtatgacaagccatgatcagccacagataactgcgtgcattagctatctagccagaacctggaggaagacgacataggaaagataagctttggct

SEQ ID NO: 453913 - DNA, 122 bp, Homo sapiens
cagaaagcgagacccaaactcagggccccctctcccagcacccctccacgcaactccccacgtgatcccccacctgctctgacattccccaggccctgtctctggatgccttcacctctcct

SEQ ID NO: 453914 - DNA, 122 bp, Homo sapiens
gtgcggagcgggcgacagtggcgtgggatctgcctctctgcgagcagctgggagcggcggcggcggcgccatgagcgggggcaccccttacatcggcagcaagatcagcctcatctccaagg

SEQ ID NO: 453915 - DNA, 122 bp, Homo sapiens
gcttttcctgcgtacctccttgaatgtgggaaggattcacagaggaagatcttcaaaatacggaggtggcaagcattgttgtgtagccctaagtcaaatagttctccactgtaagaaaaact

SEQ ID NO: 453916 - DNA, 122 bp, Homo sapiens
gtttcttttggctaaagttaaaacataagaatcccatgctcttggagcttaaactctttacgtatgcaaaaagtaggacatgcaaatgctgcacttttagaccgagaaataagtaggccttc

SEQ ID NO: 453917 - DNA, 122 bp, Homo sapiens
tgggttttacagtagacgtaccaccgaccccgcctcttcaccaggtaacagtccttgcagcgcttcttaaggacagtcttgtttttgaaccccagcgcaggcagcagatggggcaggaggcc

SEQ ID NO: 453918 - DNA, 122 bp, Homo sapiens
ggggacacagcagtgaggaagacagatgagatctctgccctctcagaacttgtgtcatgtcggccaggcgtgatggctcatgcctgtaatcccaacactttgggaggctgaggagagtagat

SEQ ID NO: 453919 - DNA, 122 bp, Homo sapiens
ccgccgtggtgcggcgagcgggggcggaggcggctggcttggcctgtcggttaccggcggcgcagctgggggtcggcacctgtgggaaggtccccagcaccaccgccccctgtgggagcgag

SEQ ID NO: 453920 - DNA, 122 bp, Homo sapiens
ggtggggtcccggagcacttgcttgggaagtcagggtactggctgaggtggggtgtgctccgtccataccggcatgagatggggcagctgctgggtgaccaggtcccgtagctcagaagggg

SEQ ID NO: 453921 - DNA, 122 bp, Homo sapiens
gaccaactgttgcctgagtgtggggcgcggacaggggtggaggcgggaacccacaactcgcggccccctgaaaatctcctttcccacacgcccccaacagtgagcctgagctcccctcgcag

SEQ ID NO: 453922 - DNA, 122 bp, Homo sapiens
ctatgtcccttttttgtgcagccaggcaggccctgtactttttctctgcgcgaccctcctcgggcagcaccgggtctcgaactctcacgccttactcccaagcaggttctgtagtccagccc

SEQ ID NO: 453923 - DNA, 122 bp, Homo sapiens
agcaccaagattaacctaaatgagaatactattctaatgacattagccagagaataatatcgttcctgttccagtactgccaattaccattacaagtcccaatatcttcatttacaatgtgg

SEQ ID NO: 453924 - DNA, 122 bp, Homo sapiens
ctcctcaccctctgcagtgcctggactcaaagccggccctgactcgggggccgccatgttcgccgaggactcaggcagcggaggagtgtctctacggaatccctcacaggacaagcttctct

SEQ ID NO: 453925 - DNA, 122 bp, Homo sapiens
ccagtttcaagttattccagttattcggaaaagtgaattgttccaagtggcgtcagtgcacgttagaacgtgggcccgcgtcatggtgttcgtgaagactggaaacaagtgggacccccgcc

SEQ ID NO: 453926 - DNA, 122 bp, Homo sapiens
atgtttcctatgtgaaacaagcatttataaatatgtcttcacaccagatagtatgcctaccgtttttgtccataatatgaataagcataatacatctcttatcacactctgtaaataaaaac

SEQ ID NO: 453927 - DNA, 122 bp, Homo sapiens
ccgggctgaggggaggtgagtgggagccacggcgcgggaggctgacgagctctggtggagcggggcaggaaatagtgaagtctccggcgtgagatctaaggacagcgccgcagtagtgagcg

SEQ ID NO: 453928 - DNA, 122 bp, Homo sapiens
gcagtttggtttatgtgcgcagcactcattttctttgacagatcaataacacccaatggacgccctccattaaacttctttcaacactttttaagggctctgctaaattacactatatatgt

SEQ ID NO: 453929 - DNA, 122 bp, Homo sapiens
ggcggcgggcaaaatgaagctgtttccctgctcctctgctcctctgcccctggtacagatcgcaactcctcgccgcgcaccgcgcagcgccgggtccgaaggcagggaagcggctgctggag

SEQ ID NO: 453930 - DNA, 122 bp, Homo sapiens
ccaaccctttctgagattcagagaggtccagctagaaaaagtggcagttttaaccaccaacgtagaagcttttttttccccacaagaccattgtactgcaatacttgagtatttgtgtagca

SEQ ID NO: 453931 - DNA, 122 bp, Homo sapiens
ggcaatgagacggagggcggggccgggacctaatatggcgggtcaggagggtctggaagacgaagaagagggacaggcaatgccaggtctaggactaggagggaggcgcgggcggtattagc

SEQ ID NO: 453932 - DNA, 122 bp, Homo sapiens
tcaggatggggacctctgagtttgtgactgtgacatagtctgttccaaaggtattgacctcggggtcctgggaggtttgtgctgttcttggacaccctttgaattacagaggggtcagcatt

SEQ ID NO: 453933 - DNA, 122 bp, Homo sapiens
ttaactgccacattacctgactcatctattaaagaatctacagaaagataaacatgacagcgctgcgttttaaagtacgcttatacctactaggttaagtaaattacacactggaagtacaa

SEQ ID NO: 453934 - DNA, 122 bp, Homo sapiens
aagcagatgcagggagcacgatctgcgagtgaggggggattggcagctgaaatgcaacctcgtcatcaagagaatgtggtgcacaccgatcgaaactcggctgattctgccagctccaatgt

SEQ ID NO: 453935 - DNA, 122 bp, Homo sapiens
cccagctccaggtcactcagccagtgcacagcccggattgtttccttcactgactcctaacgcagtgctccgtgtatttcatcaccacccttcaggccgtggggaccaagggccgaaggggt

SEQ ID NO: 453936 - DNA, 122 bp, Homo sapiens
atttagagggctatgatttctacaaagtggcccgactggcccgcgaacacgcagcagagacgcggcctccacaaggtcagaactaagatgtcctcagagatccccagttacgaagcaaagcg

SEQ ID NO: 453937 - DNA, 122 bp, Homo sapiens
ccagcgctggctgttcgcgggcagggtgggctggggctcctgaatatgcggggggcggggcgggggccggcgtgagctgtcacctgagaggaccggcggggttgccgggagggaggccggcg

SEQ ID NO: 453938 - DNA, 122 bp, Homo sapiens
gacggagaaaaacaagaaggagtacatcgagcgcatggtgaagtggcgggtggagcgcggcgtggtacagcagaccgaggcgctggtgcgcggcttctacgaggtgaggcccggtggcctgg

SEQ ID NO: 453939 - DNA, 122 bp, Homo sapiens
ggccgcaggctggcgcgcggtgacgtgggtccgcgttgggggcggggcagtcggacgaggcgacccagtcaaatcctgagccttaggagtcagggtattcacgcactgataacctgtagcgg

SEQ ID NO: 453940 - DNA, 122 bp, Homo sapiens
tccctggagccatcctgacccctatcatcctgcctccacccatgctgtcccccgactcaccgtggtgagctccccaaggtggttgagggctcccagagcatacagctgctccaaagccagca

SEQ ID NO: 453941 - DNA, 122 bp, Homo sapiens
gtgatccctttaagaaaccgcaggcggaggaatttctctgagagaaaataatcctactcacggggccccttggaggccattaaccccccgagtcccggcccccaccccgtccccgggcaggc

SEQ ID NO: 453942 - DNA, 122 bp, Homo sapiens
ggagcctctttcggccgcgcccgcccagcgtcagtcggccaggggtgcgtaagggcgcggcgcctggggcctggcagcctccgtgaccttggaggagtgacttcgttttctcgcctgtgaaa

SEQ ID NO: 453943 - DNA, 122 bp, Homo sapiens
tctcctctcctgggtccggcggcgccaggagaaggcgacggcgtccagaccccgccaagacggagaggggaccgcgccctcccccgggacaccccaggatccctggaaaatcccccgatccc

SEQ ID NO: 453944 - DNA, 122 bp, Homo sapiens
gactgggaatatgaacacagagaatttacccttcaatttaaaaaagatttgagccgggcgcggtggctcacacctgtaatcccagcactttgggaggccgaggcgggtggatcacctgaggt

SEQ ID NO: 453945 - DNA, 122 bp, Homo sapiens
aactcaagacaatggtgataatggtttctttcaggagacccaggagggactacctttctgcgtattcctttctgttctttaaaaatgttaaaccatggggtgctcgcttcggcagcacatat

SEQ ID NO: 453946 - DNA, 122 bp, Homo sapiens
gttcgtctccctgctggtcccaagcctgaatcccagggcgggggaatgtctaggtccttccgggccggcaaggtgtggtcgctcagggacccctgtccgaagacgctagggaaaagaggcac

SEQ ID NO: 453947 - DNA, 122 bp, Homo sapiens
tagaagtttttagtttgctgcagttacacttctttgtttttgctttcattgcctgtgcttcgggtgtcgtaccccaaaaatcatgaccaagactgatggcaaggagccttttctttatattt

SEQ ID NO: 453948 - DNA, 122 bp, Homo sapiens
aggttctgatgaattggtctgggcgagggccgcctgggccaaccggctttttcagggtcccgggtgatgctaatgtgcccgccgttgctgaaaaccactgtctctaggagttttgaaaaatc

SEQ ID NO: 453949 - DNA, 122 bp, Homo sapiens
gtttattgtctgggtggattggtggctcaggcacgtgggcatcttccgtgctacactgggcgcctggtggcctttcaggaacggttccacggggggggggccccagtgtggctccctcagcc

SEQ ID NO: 453950 - DNA, 122 bp, Homo sapiens
tcatctgtgtccgcctttcactccactaatgctgtctcagtgttttctctctctctctttcgagcttgcactccggtacccgacccggcgccctggcccatcccatgccggggggccagtgg

SEQ ID NO: 453951 - DNA, 122 bp, Homo sapiens
tggtccaaggacgtcccccgcagagtggaccaggaagaacgtgtcagaggatctctgcgccgcagcatctgggttgcatcctgtgagagacgccgcgggagcccagcagcacggcgttttct

SEQ ID NO: 453952 - DNA, 122 bp, Homo sapiens
tgccgggcgccccgcgagtggggtccacaccacgctcctccgaagccacggtttcccaagcgcggtctccaggtccgtccgtccgcagccgacctcgcactcccctgcgttcgaggctgcgg

SEQ ID NO: 453953 - DNA, 122 bp, Homo sapiens
cctctctttcccaaaatcctctcccatcaagaaaaccatgcatgtgcgtgggtccgcgcgcgcgcacttggagaggtagaattttgagttgaaaatctgaatctaccatgaaaaattgtgtg

SEQ ID NO: 453954 - DNA, 122 bp, Homo sapiens
gagggtgggggagcaggagcacctcaggccgggacgtagagggcaccttctcaggatgtgcggcacacggagaccctgggcctgaccaggggacactcaggccctgttacgtggaggaagac

SEQ ID NO: 453955 - DNA, 122 bp, Homo sapiens
ggagaaggggacttacccagctggtggcgactgtggtgcgggcggcgactgtggtgctggcggctgtgctctggccaaggtgccctctccagccgcactgctcctgcgcaggttgggtgaac

SEQ ID NO: 453956 - DNA, 122 bp, Homo sapiens
cttctgccttgacaacagtcaccaggtagcctatgccagagttgcggggtatgtagacctcggcagtgccgttaatcagaggtggggctgtgatgaccggggtgttgtcgttgacgtcgagg

SEQ ID NO: 453957 - DNA, 122 bp, Homo sapiens
tgttagtactttctctagtctggcttttctcaccatctatgaagtttctggaagtactaacgctagcctggtttctctcccacaccaaattacattctaacatgtcctcctaacaggtggct

SEQ ID NO: 453958 - DNA, 122 bp, Homo sapiens
acttcgcaggcgcgcgggcgggcctggcagttggcgcccatggagccagagctgctggttcggaaggtgtctgcattgcaggtgcgggggcgggcgcggggttcacaggatttttcctttag

SEQ ID NO: 453959 - DNA, 122 bp, Homo sapiens
tgtgtgtgtgtgtgtgtgtgtgtgtgtgtgtgtgtgtgtgtgtgtatgtgtgtgcgcgctcgcgcccatgcttaactttttaaaaagaaagggagaagtagcctttgataaacccatatgca

SEQ ID NO: 453960 - DNA, 122 bp, Homo sapiens
cgctgagcggggcgccgtctgcgggagagcagtgtggtgagagtggccatggctgagggccggccaggcccctgcccctgctctgggctccacagccccacctggacttgctgcattccagg

SEQ ID NO: 453961 - DNA, 122 bp, Homo sapiens
ctccggcggcgggactcgggtgccggcgctctaggctaccgggccgtccccgccgagctgcggctgtcctcactcatcctcagcgagaagcaggtcctgccgactgagaagatgaaggacga

SEQ ID NO: 453962 - DNA, 122 bp, Homo sapiens
tctgggagaacatgaagaagttctcagcttttagaatgtaccttaggccaattacgtgcacgttgacaaagatggatgtgtcttcattatgtagtttattatggatagatcagggctgggac

SEQ ID NO: 453963 - DNA, 122 bp, Homo sapiens
aggtggcagcagggctggccctgaggggcgggaaaggtcctcagatgacccttgcgggcgcgcacctccaacgtcaaatcccagtggcttcagcctcgcgccctgagtggggtctgcggctg

SEQ ID NO: 453964 - DNA, 122 bp, Homo sapiens
ccaaagtataaaagaaaatctagctccttcttcgaggccgagatactttcatgcggtagccgtctctcggtcgccggctaataaaggactcctgaactcgtctccaagtgtggcgtttctaa

SEQ ID NO: 453965 - DNA, 122 bp, Homo sapiens
tgccacctggttgtgtgctaccatcctacagaaggggccagccggaggggtgggccatagcgtccgggggtgcgctgcgggagagacaaagaggtgagctggggcgctgcggggccgggcag

SEQ ID NO: 453966 - DNA, 122 bp, Homo sapiens
tgcacactcacatgcacgcacacacaccggacaggttaatccccgtatcattggctgccacgggttgcctaagaagcttaacagggcatgttctgacttcaacaatgacctgctaatggttt

SEQ ID NO: 453967 - DNA, 122 bp, Homo sapiens
gtgagcctcgtctcggcctccttgcctccccagccctctgattccacccctccggttcctcggtcccatttcacccctgtgcgccttgggcgctcgcctgaccctcgtcccagccccgtcag

SEQ ID NO: 453968 - DNA, 122 bp, Homo sapiens
cacttctgggtggggacagttaagaaaagagacaccaaccgtctcgaagctgctccatgtcgtcatcgaacacagcctctttcagggcggtcttgtcgtaggtgttgatggcatctgagtag

SEQ ID NO: 453969 - DNA, 122 bp, Homo sapiens
cagatggggcagccgggcagagatgcctgtcacctcccagatggggtggctgggcagaggcgcccacttcccagacggggcggccgggcagaggtgctccccacctcccagacgaagggcag

SEQ ID NO: 453970 - DNA, 122 bp, Homo sapiens
cacgcgccgcctctccccgcctccccggtgcgcgtcccgcccccttgagctgcgatacgccgagcgctcaacatccgaggactttggcccagagtaaccccgctctcgtgacctttcccctc

SEQ ID NO: 453971 - DNA, 122 bp, Homo sapiens
aggatgcctggtgtaactgggaagttctgtgttgtcccgctttatgtacggctgagggcgcgagacctcacaattgggcacgcaagcggcggtgccacgccacaatgagatgatgtaaaaac

SEQ ID NO: 453972 - DNA, 122 bp, Homo sapiens
gcacagccctcttagtccacatgtgtctgccttccaggtgcaagtgctgggcagtcaggacggtgcctaagtggacctcagacatggctcagccataggacctgccacacaagcagccgtgg

SEQ ID NO: 453973 - DNA, 122 bp, Homo sapiens
ggtccacaccccagaaagattcttctctggctgagattgcggtgggtgtgaggcatggaccgagcctgttagacctggggtcaggccgggccactgtcattaatatacttaagacacaaaac

SEQ ID NO: 453974 - DNA, 122 bp, Homo sapiens
aaaagaaaagggcagcgcgacggatttggggagagaatttgaagaagagagagcgtgcatcgctgctgctgggaagcggaattcggcagcatttttggaaggttatctaagaatgtcagttc

SEQ ID NO: 453975 - DNA, 122 bp, Homo sapiens
agctctcagaaaattctctctcagggctgtcccgttacctgacgaattttgtcggaaactcgaaccttaactcctctagggcaggacgcgggcacctctaacaaggtgaacgctctatacat

SEQ ID NO: 453976 - DNA, 122 bp, Homo sapiens
aatgttagctcctattatccagctgaaaggtaaagaggagtcaggctgtcctccagctcacgtaatgttacatgtaccacggagtcaaccttcatggctgcaaatgccttctaaggtgccct

SEQ ID NO: 453977 - DNA, 122 bp, Homo sapiens
aggctgaggcaggagaatcactagaacccaggaggtggagaggtggaggttgcaatgagccgagatcacgccactgcactccagcgtggtgacacagcgagactgcgtctcaaagaacaaaa

SEQ ID NO: 453978 - DNA, 122 bp, Homo sapiens
gcagcggcctggatggtactgggatggggctgatgggcagcttctccacaggacaggcatcgcagctccccaggacctggacgagcaggcactacacaagtgcaagcgtccatgaggaacca

SEQ ID NO: 453979 - DNA, 122 bp, Homo sapiens
tttgaacacacccgtcccttctgcagatccagcacgctgcctgcatgtgtctgtagttggcgtgtgtttgctgtgatctgtgcacctgggagctgattgggtcctggtgggtgaagattatg

SEQ ID NO: 453980 - DNA, 122 bp, Homo sapiens
ggcacatgcctgtaatcccaccttctcgggaggctgaggcaggagaatttaggcctggcacggtatttcatacctaacactttgggaggccaggaagaaggatcgcttgaagccagaaattc

SEQ ID NO: 453981 - DNA, 122 bp, Homo sapiens
cgccggggagccccgggaagcacccgcgggcccggggccggcccaccgtggggagacagccgggaccagaccttcaccctccaggcgccccaagtccagccctgccgctctcgggctcccgg

SEQ ID NO: 453982 - DNA, 122 bp, Homo sapiens
tcactgtgttagccaggatggtctcaatctcctgattgagatcaggagattgcagagagccgagattgcgccacagcactccagcctgggcaacagagcgagactccgtcttaaaaaaaaaa

SEQ ID NO: 453983 - DNA, 122 bp, Homo sapiens
ctcactgtggccaggcccaagcgcatgtggaacacacgccaacacaggacaggctcagcacgccggccgcttccctcggggaaaggcccgccaacgagtccatcgcgtgggagaacagtggg

SEQ ID NO: 453984 - DNA, 122 bp, Homo sapiens
cggggttggggaacagcgcagggaggtgggtagccgggctcccaggcacgtgggtctctgcggctgcggcgggacccgggcactggcacccgggagcggcggcgacggcaccctgagaggag

SEQ ID NO: 453985 - DNA, 122 bp, Homo sapiens
atagggcttggatgttagctaacttgcccaaatcttacagctaacagaaagtggtactcccgagattcctacccaggtttgtctgacctcaggcctgtgctctttatatgagttcatgctaa

SEQ ID NO: 453986 - DNA, 122 bp, Homo sapiens
ctgctcgctgggcgctgaggagggtgggcgcggtggcgggctgagggcggcggcggcgagcgcagaaggctgaggcgctcgtccatgcggcggggaagaggcggcagcggtgaggccaggtc

SEQ ID NO: 453987 - DNA, 122 bp, Homo sapiens
caattcagattagccaaacacttgacaggcgacagggcagggcaggatggtccgcagccccgccagggccctgccaaccccaccaacaggctcctcctgcgaggccccaggagctcggctca

SEQ ID NO: 453988 - DNA, 122 bp, Homo sapiens
aacgccccacactgtccccctctgcctctgagcacacctgcctcggggtgtggaccttgccggttctttggcctggaatgcactgcccccaggttttttatggctgaattcttcttgtcatt

SEQ ID NO: 453989 - DNA, 122 bp, Homo sapiens
aggccatttggcgatccctgaggagggagccaggcaggaaaagcgcacgctctctcggtacgcccaagactgagactcttccggctacaagggaccatggggacactccaactccagaccag

SEQ ID NO: 453990 - DNA, 122 bp, Homo sapiens
attttcttgcatcaaaaggatagcacagtggaaagctgttttcaatagttaagaacattacgagtcccttgggatcattttctgactcttataaaatgttaacagagagagggttttgagat

SEQ ID NO: 453991 - DNA, 122 bp, Homo sapiens
atattcccaggccccttggaagggtaaggcaggggggctttgcctcccagctttgtcttccggtagttaaggcgcttgaaagcttccaggtcccggtgggtgcccatgatcagccggctgtg

SEQ ID NO: 453992 - DNA, 122 bp, Homo sapiens
gcatcaattttttgttgtatggaagtctgtgttttgatccatggaagtcactgggagctgcgaggggcctgttgggctcaggaggtctgccttttctagtgctgtccctgggcagaaaaggc

SEQ ID NO: 453993 - DNA, 122 bp, Homo sapiens
tgaagtatgagtaccttagatttcccttctgatacagcgcctctttcgaaggggtgtgtgcgagtgtgatagtgaagatggggtggggagttcttgcctgctaaaaagtctcaccctggccc

SEQ ID NO: 453994 - DNA, 122 bp, Homo sapiens
tcgccggctccctcgctcccgttcgctcttcaccgccttcattctgtgattttggctgggcgaaagaaaacagatcagttgagctcctctagctggaggaaatgacgagtttaactcctgga

SEQ ID NO: 453995 - DNA, 122 bp, Homo sapiens
tttgtttgttgtttcccccaccccccaccgctaatgaatcaggaccgcgaaccgaaagaacgcacaaaattctgtcctgaaaacacgaaaacctgagccagccgtggcgcactgaacttgct

SEQ ID NO: 453996 - DNA, 122 bp, Homo sapiens
ggccccgagccctgcccctctgggaggcggctgaaacccggtgagaattcgagcgtggcgcgggtgggccagcagtgtttggggacccggagcactctccacagctgctggtccaggtgcta

SEQ ID NO: 453997 - DNA, 122 bp, Homo sapiens
atccttggatagttccagttgtaaagtttaaaatatgcgaaggcaacttggaaaagcaagcggctgcatacaaagcaaacgtttacagagctctggacaaaattgagcgcctatgtgtacat

SEQ ID NO: 453998 - DNA, 122 bp, Homo sapiens
aacttctcttttcactcgaagaaaaacaaggacagtgattgcaatgacactggatgtttgcgctgtttgataagtgatgactaacacgtctactacttttaacaatttttgctttcctctcc

SEQ ID NO: 453999 - DNA, 122 bp, Homo sapiens
gcagacccagaggaatcgcttttctcactgggtaatggctcacgagggcaggacagcccccggtctcagggttaccaacaaagcaaaggccagagaaaactgacagttctgtattatcatcc

SEQ ID NO: 454000 - DNA, 122 bp, Homo sapiens
cagagggccgctttgcggtggtggttgatctttcccgacagcactcccctgggcagcggccgagattctaactaagctttgtgtctttgcagcctggtgcctctgcaaaggaaaggggagcg

SEQ ID NO: 454001 - DNA, 122 bp, Homo sapiens
tgcagtcgtttccttaatccagacttttgtgatcagcagtttctccaaggcgtggttgaacggcctcataagtaaagttggcttggagagaccagaagacgtggctttcacccagaccgatg

SEQ ID NO: 454002 - DNA, 122 bp, Homo sapiens
cctcaacgagcacgcctacaccacccagatcgactacaaccccaaggagcgggtgctgtacgcctgggacaatggccaccagctcacctacaccctccacttcgtggtctgagtggagacct

SEQ ID NO: 454003 - DNA, 122 bp, Homo sapiens
ccccccggggcagagcattgccgggtgagccgcatccctgcctggaacatatgagaggtgcggggtgtaggggaagtgggagcacgcggggggtctggggaggggacagaccgaaggcagag

SEQ ID NO: 454004 - DNA, 122 bp, Homo sapiens
gctcggtctctcagagccgcacactccgcggagctcctgccacagccgtcgccttcgcggcggctctccagccccgcgcctcagcctcggcgccgcatcaccgcgtcccaggcctccttccc

SEQ ID NO: 454005 - DNA, 122 bp, Homo sapiens
gtccgcctgagccaggggaggccaggcggcccgggtgtctggagccgggggtctgctgtccgagaatgagaattttcttcccccagaacgtggagactgttcgatcaccaggagcacaaagt

SEQ ID NO: 454006 - DNA, 122 bp, Homo sapiens
ccatagttttatccagatagtgcaagcttctgctggtcaatttcagcttgaatgtaagttcgttgctctaagctgataatttgcctgggaacaccaactattttccaaagtggaagatagta

SEQ ID NO: 454007 - DNA, 122 bp, Homo sapiens
ctggccaggtatatggtcaggcggggtgggcggctctgtggagcgggtggctcggcggggcgggcggctcggtggggtacgtaaccctctgtgctgttgtccagcagggtagaaaagcggaa

SEQ ID NO: 454008 - DNA, 122 bp, Homo sapiens
ggccctactgcagtggggaccccttggggcgtaggatgcacagtgcaggcgcccaagcctcgcgcccaccggagagcagccacggtgcaggagcttggccctgagtgtgggcggggtgaggg

SEQ ID NO: 454009 - DNA, 122 bp, Homo sapiens
cgtctgaagtctctaatcgctcagcgaaaagttggtttcgggaagggcagcgccggggtgcgggagggcaaaggaggaagaggaatgcatatgactgtgagaaggaaaagtaatcgtggcaa

SEQ ID NO: 454010 - DNA, 122 bp, Homo sapiens
cgatggcttggcttgggcacagaggcctgacagtaacaatgtatgtggtattagcaattacgccaataacacatcccacagggttggtatgaggattaagggctagactatatccactcaat

SEQ ID NO: 454011 - DNA, 122 bp, Homo sapiens
ggcaggcgagtctacccagtctgttcagcacacgggatgtgggtgaggacggccacatgccgttccaggcagcagagatggcagcacggaacaccgcagccagcctgggctcgctgggcctc

SEQ ID NO: 454012 - DNA, 122 bp, Homo sapiens
cgcacctacgacgctatctggtactttccttttccccttagctgttgctgtccagcccagcgccagtccagagacgggcttaccggccgctcccttccacaagaaactcgtgtccggcgtga

SEQ ID NO: 454013 - DNA, 122 bp, Homo sapiens
gggcaacagggctcgggcggcccccggtggtcagggcctgcatgttggtgaccaggtgaccggctgtgtccccacagtacttccagagagtgatcccccaccagttcgacagctgcccggac

SEQ ID NO: 454014 - DNA, 122 bp, Homo sapiens
tggagaagcaaggcatgcatacagtgggggagggagccaaagtcacaagacaaagcaaagcgacaggtgtcccagcttcctcaagggaggaagccaaggcaatgctgcacttgttgggttca

SEQ ID NO: 454015 - DNA, 122 bp, Homo sapiens
aaaataagggagaggaggtttgtgtcagccgtggagagattccgcctgtggtgaaagagacggtgctgaaaaggaaaaactttgaacctcttcatttattgcagtgaaatttgtcactttta

SEQ ID NO: 454016 - DNA, 122 bp, Homo sapiens
tctcagtctcgtcaaatctctccaccacatcaggctttatagggagggaggaggctcccacgggaggtaaacaccaggccttgcgtaacgcctcatctggttctcctgcttcccgggtaagg

SEQ ID NO: 454017 - DNA, 122 bp, Homo sapiens
aagacgggccgggaggggggctgcgggcggcccgggccggcggcctggcaggttcatttacgcttgttagggcgtcccagggggctgtctttctcctagaatggagtgtttattttttaatt

SEQ ID NO: 454018 - DNA, 122 bp, Homo sapiens
cctgcagcgtccgctccacgagcgcgccgcgggcaggcgctgtagatgttgttttgggagcgcggtcgcggcgacccgcggggcctctgggagctctccagggcgcgcatcctcacggccag

SEQ ID NO: 454019 - DNA, 122 bp, Homo sapiens
ggcaagaggggcatccacccaggccttctgaatgttcctctagaacaaagagtaagagagcgttctcaagttccaaggacaaaacctttcactgaaagtaacgagggcagtttctaggcccc

SEQ ID NO: 454020 - DNA, 122 bp, Homo sapiens
ctgggtggaggtggaaatacctccctccaggagcacttagagctgagaaaggtggtgcgacgtagtggaaaccacgagggcttcagattcagacgtgggtttgagtcctggctctgcaggga

SEQ ID NO: 454021 - DNA, 122 bp, Homo sapiens
aaaaaaaaaaaaaaaatgggggggtggagatacagaaagaccccggacagtgggggaggccgtgcagggctgctctgcagcaggaagcctggccatggtcacagagccactccgcagagaga

SEQ ID NO: 454022 - DNA, 122 bp, Homo sapiens
attattagtgataaaatggttcagagtaaaaccattgatggaatcctactgctgatcgagcgcgagaggagcggcgaggccgtggaccggagcctgttgcggagcctcctgggcatgctgtc

SEQ ID NO: 454023 - DNA, 122 bp, Homo sapiens
gattctgtcttagcttgagctgccataacaaaatactgtggacttcgtgacttaaacagacgtttgttttctcacagtcctgaaggctggcagtctgagattcggacgccagcatggttggt

SEQ ID NO: 454024 - DNA, 122 bp, Homo sapiens
ccaagttcctgttctatttggcctctgactctattgggctccccgctccctagctgaagccgtttttttttttttttctttttctttttttgtcaggagggtgttgaatcagaaaaaggagg

SEQ ID NO: 454025 - DNA, 122 bp, Homo sapiens
cacagcccggtagagcccggtggcatcggagggcccccgggcccactcgcccagcctctgcgccatgcccccgcgcctcctactgcagagccagcactgctggccccgcgagcgcacagcag

SEQ ID NO: 454026 - DNA, 122 bp, Homo sapiens
ggaggccatgccgacttgagagccaggcctgagtggtagccagggtgcagtgcaggtcaccgggtggttggctgcagacccagtcctttatttattacattggccatttggtccaccagcca

SEQ ID NO: 454027 - DNA, 122 bp, Homo sapiens
ttctgcaggccttcctttcagtagtcagggctggcctgagctgtgaggtggctgtagatgcggtagatgagacagtgcctggcacttgggatacctgatattcagcctgtctcccactggtt

SEQ ID NO: 454028 - DNA, 122 bp, Homo sapiens
cagtttttaaaaagccctctttcttagcaaaaccgtgacttctatgttacgtccagacaacgagcagaaactgagcactgaacaacacagtaccacaggcaatggggtcaagtgcctgtgaa

SEQ ID NO: 454029 - DNA, 122 bp, Homo sapiens
taccctggactgagacaagcagtagtgcctgaaactaactccaaatacaaagagtctggccgtttggagaagctttttcctcctcctcaactcagttttctccacagtgaccttggttctga

SEQ ID NO: 454030 - DNA, 122 bp, Homo sapiens
accgggttcacacgtgagctgcagtacagcagttctccgtggcctcggctggttcagaaacgagggtgctgggaactctgggccggggcaggacctgcagtcctccggcttcgcgctgtttc

SEQ ID NO: 454031 - DNA, 122 bp, Homo sapiens
gacagctgttttagtaataacagtaagacgctgtctgggataggaagttactgttgcactcgttgaaaccttaggaaacatttaaagcagtgtagtcaccgggattgtaatttccactggac

SEQ ID NO: 454032 - DNA, 122 bp, Homo sapiens
gctgggaccacaggtgtacaccaccatgcccagcttttttttttttttttttttttggagcgaaataaaaagagtctgaccttgttgcccacactggtctcgaactcttgagctcaagccat

SEQ ID NO: 454033 - DNA, 122 bp, Homo sapiens
ctgccgcgcggcttccggctggggtggacctcaggtctagccggcaagccggagggcgggcgagacaacaacgtggcctggaggcaatggccctggcctctcgtgtccccttctctcacccg

SEQ ID NO: 454034 - DNA, 122 bp, Homo sapiens
ggtgggcggggcgtcaggtacttaattcgcgcctggagggaccgaaggtgccgagggctccgcatcgcaaccatggcgctgcgctggggcatcgtgtctgtcggcctcatctccagcgactt

SEQ ID NO: 454035 - DNA, 122 bp, Homo sapiens
tgaccacgctgctgggaaccgccagccccctggtgttctaggtgtcacctccagccacaccggacgggcctgtgccgtggggaagcagacacaacccaaacatttgctactaacataggaaa

SEQ ID NO: 454036 - DNA, 122 bp, Homo sapiens
taggggcggccaggcagaggcgcccctcacctcccggatggggtggctgccgggcggagacgctcctcacatcccagacggggtggcggggcagaggcgcccccacatctcagacaatgggt

SEQ ID NO: 454037 - DNA, 122 bp, Homo sapiens
aagaccatggaatttagtgaaggctctctgctctgaatagaaaggggtgttgatgttcctcgctctcatacaatgagatgactttaactttaccctgtgatcctagaagtggagccataggt

SEQ ID NO: 454038 - DNA, 122 bp, Homo sapiens
ttctgaagaactcttctgttttaaaacaagtagagcatgcacaaaacatattttttgtcacgtttcacaatagaagaataaaaattctccaagcactcctaaccccttctaaaaagtaccta

SEQ ID NO: 454039 - DNA, 122 bp, Homo sapiens
agaatctctatgaatgaaaccaggcctttcccagatctaggagagattaactgagtctgacgccttttaaagcctgaaaagaaaccttttccatttattctctctgaaggctgctacctgga

SEQ ID NO: 454040 - DNA, 122 bp, Homo sapiens
gcgaggactgagatcacccgttaccccgccctggtctacaagtgtttgctgatatagaaacggaataacggcgctgtgggctggggaggacggagttgccttcaggcttctggtctccagcc

SEQ ID NO: 454041 - DNA, 122 bp, Homo sapiens
catgactccgctcctggctgcagtgttcagcctcatgcaggccgaacagagcaaccagggcgagcaaccagggccaccaaccggaaaccaagcgacatctcctctgatccccaccgtgcctg

SEQ ID NO: 454042 - DNA, 122 bp, Homo sapiens
ctccctttcctggagtcatttgtgggagttagggtcttatcctgatctttcctcgtcccccgctcccccgtcctccgaggtggcagctgcgtaggtgaacgttccccctgtccccttccttc

SEQ ID NO: 454043 - DNA, 122 bp, Homo sapiens
tggcaacagctgagcccagaaacgagacttgctctgattggtcaagctactgcgtttccgcgcggcgattggctggcagaaaggcagaggcggggccaggagagaaagctttgtggtttggt

SEQ ID NO: 454044 - DNA, 122 bp, Homo sapiens
ggtgggagacgtgacttatccagcccacagggactgctacctgggagacctgtgcaacagcgccgtggcaagccatgtggcccctgcaggcattttggctgcagcagctaccgccctgacct

SEQ ID NO: 454045 - DNA, 122 bp, Homo sapiens
gcggtccggtctccgccctcacccgggtaggcccgcgtgggcggcgcgggagggccggcccggcaggcataggatcgaaaccctggagccttcccatgttctcctggccgcacgagaggagc

SEQ ID NO: 454046 - DNA, 122 bp, Homo sapiens
actcctgcatcctcccctcaaccccgggagaccgccgcggcccacagcctcccgcccggccgccgccaacaggtcaacgaccgctgcgccgcctgcttttcatttatcagactattttcctt

SEQ ID NO: 454047 - DNA, 122 bp, Homo sapiens
ccccaaggcaggggccaagatgcttcctttcttctggatctcccaggcagcgccaggtcccgaggcagtattgactgaggttaggagttcaggaaaacggccaggaggacagagggcgctgt

SEQ ID NO: 454048 - DNA, 122 bp, Homo sapiens
cgactgacctcagcctccgtatccagctcgtcctggtcgctattgttgcggatcaggatgcggccagagaacagggaggccatggtaacctgggttgggtgctggggacagcgcggcgtgtg

SEQ ID NO: 454049 - DNA, 122 bp, Homo sapiens
cattcatttagaagctggtaataggagacccacaagaaataggtaacatcaaaacgtttacgacaaaggtacaccacaaatgtgtaagtttaggaagcaggggtctccctattaacttcagg

SEQ ID NO: 454050 - DNA, 122 bp, Homo sapiens
ccccaaggggaggtagcacccacacaaggcacagcagcacccgcgccaggacggggcggccgaggtctccgcgtggatccggaggtggcacagacaatgattaacttcttctttatttattc

SEQ ID NO: 454051 - DNA, 122 bp, Homo sapiens
gtgtcgtcccggcgcccagagcgcgcgctcctttggccctgccccctgcccgggggacttcggcagcggccactcctgccactgcgctctctccagagcccagccccgggaggccgccagtc

SEQ ID NO: 454052 - DNA, 122 bp, Homo sapiens
atcttgaacctcctggcccctggactcacccagtgaggccattcgtgaagatcaaagaaacgaaatcaccaggcagtgataccagggctggatagtcaccttctggcaccttttagacatct

SEQ ID NO: 454053 - DNA, 122 bp, Homo sapiens
tgaatgctcaaatggagacaggcaccccagtacccactagcaacctgccgggctgatgagcgtgcatcccagtgtgctgccactgctgctggcacatggaaacaagggcggatcctatgcca

SEQ ID NO: 454054 - DNA, 122 bp, Homo sapiens
gtttacgatattgggagtaatatcatctccccctctggaaattatgaactatttcacagacgagtgtacaccctccgtgtacagagggtgtacacccgtctgtattgggagtaatatcatcc

SEQ ID NO: 454055 - DNA, 122 bp, Homo sapiens
catgctgcgcacggccagcagccccgacagcctgcgctcgcgcacgcccatgatcacgcccgacctggagagcggcaccaagctgtggcacctggtgaagaaccacgaccacctggaccagc

SEQ ID NO: 454056 - DNA, 122 bp, Homo sapiens
acgcccgggacttccgtgacgtttccctcacggaatctcacacgcccgggacctctgtgacgtttgcctcacagaatctcacacgcccgggacttccgtgacgtttccctcacggaatctca

SEQ ID NO: 454057 - DNA, 122 bp, Homo sapiens
agccttactgcttatacaacgccaaagagattcacatacaagacatagccattttaccatcgctatttatggcaactctcataaaagtgccatctctctaggaagggactcccacatactcc

SEQ ID NO: 454058 - DNA, 122 bp, Homo sapiens
gcctcgggctaggggatattccactgtcgcctctgactacgggtggtcctgtggctgaggcgcagcgggccctgggagttgtagttcatcaagcggaccgaggaggcgaggctgcgctgagc

SEQ ID NO: 454059 - DNA, 122 bp, Homo sapiens
gtgcgcggatgccgtggcggtcgggccgaggtgggccatcccccaaggtctcccccgatccgaggggccccagtttgttcataaagcactcatggcaggttctgacatctctgccgcgtgca

SEQ ID NO: 454060 - DNA, 122 bp, Homo sapiens
gcagaggtggggtcgcggtgcctgccacctgaggcggcacgtcccttgcacatatgctcacgtgcttatgttataataagtgtccagatgtcatttgggtgcttgggaatgacaaggcagag

SEQ ID NO: 454061 - DNA, 122 bp, Homo sapiens
tgactgaagagaggtcactgtttgatacagcaaaatacaaagctgacttcctgtggtcatcgtagtgtttgttaattctctgatccagcatgaagttcacatcaaatccagcctggatgagg

SEQ ID NO: 454062 - DNA, 122 bp, Homo sapiens
tatctggcaagggccttcttgctgtgtcctcccataatagaagacaggagggcaagacagcgcaagcgtgagagagggaagggaaccaaactcgtctttttatcaggaacccactcctgtga

SEQ ID NO: 454063 - DNA, 122 bp, Homo sapiens
ctgtagaatatttccagcctcaagcctgaacccgactggtattttactgtcagaccctgtcgtcaattctagttaaattttctagaaaagaccctcatttagtcatggtgattcaaggacag

SEQ ID NO: 454064 - DNA, 122 bp, Homo sapiens
tgtacacgcagctgttttcttctgacagatcccatcaagaactttcagtcctctaggcctcgcacgtgctgtcccatcaatacctgaaatgtcaccttcctttcaactcctttcccctcgtt

SEQ ID NO: 454065 - DNA, 122 bp, Homo sapiens
ccggtcggaactgctccggagggcacggtgagaggtggtggggctgagccgaggtggggccgtggccagggggagggggtgctaggccggaaggggctgcagccgagggtggccctgatttt

SEQ ID NO: 454066 - DNA, 122 bp, Homo sapiens
ggtaccacgcacaggagccgtcacttctcttgatgcaggcgaagaacttggcctggtgcccgttgatgttcttctctgtgacccagtccatccagaggcactcgtccggggaggagatgtag

SEQ ID NO: 454067 - DNA, 122 bp, Homo sapiens
tcaaagtaaatctctgtctctctatatatacatccaactacttctgtttccctggagaaccgtaatacagataccaactttcccaatgaaagaaaaacacttgaaatgtcacacaccatggc

SEQ ID NO: 454068 - DNA, 122 bp, Homo sapiens
cttttgccaccctgggcacgtcatcgtgcgccgacgccaaacgagggcggggcctagggacgccacaccttccgcgccgccgctcgttacgtcatcggacctcgccgcttggcggaggcggg

SEQ ID NO: 454069 - DNA, 122 bp, Homo sapiens
atatagttatagacctaaataagcttttaaaactccttcttgtttttcattccaaccaatcgaagtacaaaagtacccaaaggctttcagaagcagaaaatgttggggtgggtgctgaagga

SEQ ID NO: 454070 - DNA, 122 bp, Homo sapiens
ccgtttctctgatgctgcagagagcccgccctgagagccgggagtcgcctgatgaggggtcggcaggggtcttaacggagtcatgtctccgaaggctcgtcctggctccctgaagaccagga

SEQ ID NO: 454071 - DNA, 122 bp, Homo sapiens
agtattgttgaaaccacaggagtcagccacaggtgggtatccattcatcacagcagtagccgcctccaggaattttctccagtatcacttaaacaggataattccggaaaccccactgtgaa

SEQ ID NO: 454072 - DNA, 122 bp, Homo sapiens
gccagacaccagccagggcggggttgggtgacccgtggggtttattctgtgatgtcacaacggcagtcaggggtctccctgttgctccctcagcctcctcccataaggattggggggggtca

SEQ ID NO: 454073 - DNA, 122 bp, Homo sapiens
ctgctggctgcgttcgcctaccttcagtgcgccgtgggctgcgcggtcttcgctcggaatcgtcagacgaactcagtgtacagccgccacgcgccacccagccgcaggctccgagtgccggc

SEQ ID NO: 454074 - DNA, 122 bp, Homo sapiens
ggccagctagagttccaggtgggcgtgggcttggcgggtcccacattcggagcagctggccggccctgccggccccaggcagtgaggggcttagcacccggaccagcagctgtggagggtgc

SEQ ID NO: 454075 - DNA, 122 bp, Homo sapiens
cgctcgctcgctccagtatgtaaatgtgtaatagaagccaaatatggagcagttggctgccgccgccgcagctcaaggatccgacttcatgggggtggggggcaccctctggcgggcggccc

SEQ ID NO: 454076 - DNA, 122 bp, Homo sapiens
tgcaggaggcggtgagagcccgcagcaaaaccaggcagctgtaggaaagccctggcaggccggcccaccgagaaccccttttccactcccatagctcttcccgcttctactcctagacagcg

SEQ ID NO: 454077 - DNA, 122 bp, Homo sapiens
agtcagagggaaaagcagtgtcaggagcagagagaaaggaaccgggagacacaggtgaggcggtgatgaagggcagatgaaaacagttgaaggggcaaaaagacagaggcctgccactggga

SEQ ID NO: 454078 - DNA, 122 bp, Homo sapiens
ccgaacggagtgatgctcctggcttaaggtaagaagatgtggggacagcagtctgggtggcgggggccttctgggacatctgggatgttccctagtaggtcacttggctgtcccggcccctt

SEQ ID NO: 454079 - DNA, 122 bp, Homo sapiens
cgggggccagctcttggagggcctggagaccccacgtggtcccgaccgaaggacctggtgcgtccaggttaacggagctggggcgctccaagtccgggggacgagggagcggcatggagggg

SEQ ID NO: 454080 - DNA, 122 bp, Homo sapiens
tggaccgcgcagcttcggccactgggccttcccgagcctcctgcacccgaaccccgccgccgactgccccccgcagtacgtcgctgacgccactcgcggtgcccacctgtgggacactgcta

SEQ ID NO: 454081 - DNA, 122 bp, Homo sapiens
ggcggggccgcgcgggcccggcgctggattcgaaacgcttcctggtgctcctgggcctggcggttgagcccggggagctagtctttgcttgggtaaagaaagaggactttcctttttttttt

SEQ ID NO: 454082 - DNA, 122 bp, Homo sapiens
caggagactgtttcatggataaaaagtctcgcttattcttctgtccacttttatcttggtcgcttttctctcctctacgtgtcccccggggaggcactacggatgattttctccaagctcaa

SEQ ID NO: 454083 - DNA, 122 bp, Homo sapiens
gttctcgtcatattcatccacgtccaccttccggaagcgggccgacgacactgtgttcttcgacatcccaatcccgaccagcggcaaaggcctcttcttggcgctgcctctacctcagcaag

SEQ ID NO: 454084 - DNA, 122 bp, Homo sapiens
gtctctgactgccagacctcagacggggcctgcggggaggcgggcgctcagagggggccgcgcccggcccaggcggaagcccgtccgcccggcccgctcgccgccccggtcacgtgtcccag

SEQ ID NO: 454085 - DNA, 122 bp, Homo sapiens
tccgagagctcacggatgcgccggcagcctcctcgcagtcccgcgcgccgcccctggccccgagcccctcggctccgttgtgctcctgggagtgagacgccacgtcccattatcccgcatat

SEQ ID NO: 454086 - DNA, 122 bp, Homo sapiens
ttgtaatcatcactgtttttaggtgcacagggctgctcaggtaaaattcaacattgtcaccgtgcttaacactttatctgatattttattcttcataatgaccctgaaatgtaatgactttt

SEQ ID NO: 454087 - DNA, 122 bp, Homo sapiens
gacaaccccgagacaggaacaattgcaattgtacactcttcctagaacctctgaaccaggcgcacccaatgcaaaaatttgctgtgtttcatgaagcattttttgagcatcacctcgcctct

SEQ ID NO: 454088 - DNA, 122 bp, Homo sapiens
cgcccagccctccccctgggcggggacccgcccgccgtcagcctaggttgaggcgccctgcgtgtgtctataactttgtgctgctgccgcggccgccctgctcgtggaagggaggaggagga

SEQ ID NO: 454089 - DNA, 122 bp, Homo sapiens
tcgcaacagtcgatctgataaccgagagggctactaagtgactcacgggcagggaacctccgcagcatggagacgctggacagagggataattcacatcctgggggacagagcaggatggtg

SEQ ID NO: 454090 - DNA, 122 bp, Homo sapiens
agaattcaggacaggttgtgccacagtctagaagtaaaatttccggtgagctgcccgcagcgccgtcccattctccccgctgcccattgtgaaaagctgggccagcgcttccttgtcgtaat

SEQ ID NO: 454091 - DNA, 122 bp, Homo sapiens
atctaatctccgcctcctcacggggcccaggaggcccagggcgagagctgatggggcccacgcatccgaaatccccgtcttggccagaaccccaggtttgccttcgcccgcagggctgagcc

SEQ ID NO: 454092 - DNA, 122 bp, Homo sapiens
ttttgcttgattgcaagactaggctgtgcagtgccaacattcagactgatcaggagttcccgaatagttctcagggctgttttattgctcacaggtctcactcatattgggggagtcagaaa

SEQ ID NO: 454093 - DNA, 122 bp, Homo sapiens
gccgaatttttcattgtaattatctcattcaggcccacctgacaagcacaagggtagcaccgctacctcagggtcttccagctacaatccctggcattctggcccagaactggaaggatgtt

SEQ ID NO: 454094 - DNA, 122 bp, Homo sapiens
cgccttcctccccctccgccgtggtccctcgcttgtagtggcttcctctcctcgcccacccggcatcatcacctcctggagcccttgtactcaccatggtggaaaggacccagcactgcctc

SEQ ID NO: 454095 - DNA, 122 bp, Homo sapiens
agccgagcgggaacgctcccagctaattaattcagctgcgctgggcccggtgacgggggccgcctcctaatgaggcagcccaggcacaaagacccctgtgtgtgccccgccccgcccctgcc

SEQ ID NO: 454096 - DNA, 122 bp, Homo sapiens
ccatcccgggcagggtgacctggcttagtacatcgggttcagagatctttccagtttactcgttgaataaaaagtgagggctgatcgagaaagtaatggcagtcagggaaggcgaaggaggt

SEQ ID NO: 454097 - DNA, 122 bp, Homo sapiens
aagcccccgagcctcggcggtgctgattggccggcctggcgggggggacgggcggagggacggccgcccgcgcgtccgcttcgtctccgcgggggcgcgcccgcggcacgcggccgggcggg

SEQ ID NO: 454098 - DNA, 122 bp, Homo sapiens
tactaacaaatactgtggatcacttaaaaagggtgatgcatggccaggcgcggtggctcacgcctgtaatcccagcactttgggaggccgaggtgggcaaatcacgaggtcaagaggccgag

SEQ ID NO: 454099 - DNA, 122 bp, Homo sapiens
tctggaactcctgggctcaagtgatctgcccgccctgcactcccgaagtgggattacaggcgtgagccatcatgcaccatgcctggccttattgtatttttttttcttcttcaacaatgtat

SEQ ID NO: 454100 - DNA, 122 bp, Homo sapiens
gaatctgcatccttgctccagtcagtgggcagcaggctgcggggctgtgagcctggtggccgtgtgcctgggtctgggctgctctctgcaacccccacctccaccaggcaaatggctgctct

SEQ ID NO: 454101 - DNA, 122 bp, Homo sapiens
tgaagccttctcagaatcaccctctatcctggccagaagagttctctccctctcttatctcgaatcacttcctacctgcaggaggcagagagaactccaggaaaagggaaacagcaagtaca

SEQ ID NO: 454102 - DNA, 122 bp, Homo sapiens
ctgatggaagtgaggattattactgaaaccactgctgcactgtttctttaaagcctactccgctgcacaacagactcttaaagactgaagtttgtaactgaagtgctaacctatttatcaca

SEQ ID NO: 454103 - DNA, 122 bp, Homo sapiens
agagagaagttaaaagtcatgagttacatccagcagtgtaaaaacgaaatacccgccgggcgcggtgtctcacgcctgtaatcccagcactttgggaggccgaggcaggcggatcacaaggt

SEQ ID NO: 454104 - DNA, 122 bp, Homo sapiens
aatctgtctcctacatactcacctgctcctgccacttcacctgaagtccttatcctgtgacgtcacagtcagttgccatagtgaccaattgtccgtcacaagcagaggattaggacttcgga

SEQ ID NO: 454105 - DNA, 122 bp, Homo sapiens
tctcgcagactcagttgcagctgagcttgcaggggggtcacgacatcaagactccggccgcggggctctctcccctgttccacagctctgccccggctcaggactcagggcccggcccgccc

SEQ ID NO: 454106 - DNA, 122 bp, Homo sapiens
ttacgcctcaaggctttctgggaaataaagtccatactctggggccaacgcgcaaatcctcgtccgcgagaactgcaaggcccgcaatgccctgcgcctgcgtggaccggtgcgggggcggg

SEQ ID NO: 454107 - DNA, 122 bp, Homo sapiens
ctacctggagagcgctccggacaaacccggctgcgtccagccgctcgcggccacccggggcggtcctgagtcgcagctcccggccccgcgctctcccgggacagccacagcgtctccgagcc

SEQ ID NO: 454108 - DNA, 122 bp, Homo sapiens
gtgtgaccagagcagcctctgttattaaatcttgtatcgactggcacctcccttctggtgcgtgggggtgtaagttggcaccaaaagtggctggagaattaacccagttgttgggggaaggg

SEQ ID NO: 454109 - DNA, 122 bp, Homo sapiens
ggagctgaacggcagcgaggccgccaccccgcgggactcaccccgccccgggaagccagacgagagggacatctggccccctgcccaggcccccaccagcagccaagagctggcaggcgctc

SEQ ID NO: 454110 - DNA, 122 bp, Homo sapiens
cggttgctgcttttttagtgttctgcactcttctaccaggaccccgtggcaggccaggaccgtttctccggtgctatcccagagcatggcgcatccactcattcactcaaggtatcaagctc

SEQ ID NO: 454111 - DNA, 122 bp, Homo sapiens
taaacttctcaattgaattttaatacatgtattgtgtgaatgagaggcatcaccgtgttccgtactgtgaccctccaattctagaaacaaagagattttaaggaaatggtctccttggtaac

SEQ ID NO: 454112 - DNA, 122 bp, Homo sapiens
gcccgggcccttctgaccttggctgcccgcgagggtgggctagcgaccgggcgccggccccgcggctccgcaacctcccccggacaagtttcaggcgatgctgtgaagttcacgactggcat

SEQ ID NO: 454113 - DNA, 122 bp, Homo sapiens
ttgttctggagctgtagaagtcctgagtgttccacttcatctgcttcctctttctaggttcgaagcatactgtgggcataggtccatcatctacatgacatgccttactcaacctaaggagc

SEQ ID NO: 454114 - DNA, 122 bp, Homo sapiens
agtgccaggcacttttttcactggggctgctgaaaacgaatccgaaactgatttgaggagcgtctcctcccctgctggggctcctgtgcctaaggtttcaggtggttgggcatgccttctct

SEQ ID NO: 454115 - DNA, 122 bp, Homo sapiens
ggcaaaggtgactcctgccgagaatgcacacggggaggctcagggctgggcggggcttggcgtcgggacccagagctgccattggaaaggtctgagcccgtggcccggcgacagttcaactc

SEQ ID NO: 454116 - DNA, 122 bp, Homo sapiens
aggagcctcccccagggccggcgggggcgggcaggtgagccgggcaggtgcgcaggcgagcgcggcgggctgggcgggccgaggccacaccctgaaactacctgcgtgggccgggccggagt

SEQ ID NO: 454117 - DNA, 122 bp, Homo sapiens
tcggcttcaacgggagcggggctccacttttccttaattgacgaagtcacggattcctcccgggcggatttatggggctgcgcgttgtgccggcgcccgctgcttcgcatctgcgcgcccgc

SEQ ID NO: 454118 - DNA, 122 bp, Homo sapiens
acccttggctcaccagctgccattgtttagtaacaacaccagcctgggctaggtgtctgccgtctgttctaccctgcttctagaaacctgaggtcagagaaaaacaaaacatatcagcaaga

SEQ ID NO: 454119 - DNA, 122 bp, Homo sapiens
gcgtggttcccatcccagaaaacactgcggtgcgaactgccttctgggaaatgtagtgtccgtgaaaaagttgagactgttgcatgctgggctatgtagttctcctggtacttaacgcgcgc

SEQ ID NO: 454120 - DNA, 122 bp, Homo sapiens
cctggggggagtggccggtttcagtgcttccccaggtgaaatcgccaaggttgaccagtgcgcccaaaaaagcagccggctggatttttcttcaaattagggaactcttataaagagtttta

SEQ ID NO: 454121 - DNA, 122 bp, Homo sapiens
agctccccaaggtcagggtctctgctgggttttgtgaaccctgtacattcagcatcttaccggctcctgtgcacatgctgggcactcagaagccactgtcagagggtgggccgggcgtggtg

SEQ ID NO: 454122 - DNA, 122 bp, Homo sapiens
catggcagctgtaggtcccgctgtcctgcacagccacgttctggatgaagagacggtacacgccgggggaaggactctccaaatgcagccgccccttcagattgttcttggctgcctgctct

SEQ ID NO: 454123 - DNA, 122 bp, Homo sapiens
atcaatatgacctcccagcaatgcaccaatgcaatgcaggtcattaacaattatcaacggcgatgcaaaaaccaaaatactttccttcttacaacttttgctaacgtagttaatgtttgtgg

SEQ ID NO: 454124 - DNA, 122 bp, Homo sapiens
tgggcagctcgggccttcagaaaaaggatcatgtcagcgtgcatgccacgctgcacgtcccgggagttaaatctaggaatagttctgacacctgacttaggagtgtgtttcactgcaagtat

SEQ ID NO: 454125 - DNA, 122 bp, Homo sapiens
tcctagggaacaggtggatttggggtggggcgtgccttaggccccatactcataaaatcccggggctctgtcttctcacctctaaaacagagaagacagcagccggtgggtgcaggtgggaa

SEQ ID NO: 454126 - DNA, 122 bp, Homo sapiens
ttctaagtcctgaggcttaatcaagtgtcaggcagtccaatttctccctgaaaagggcagcgaaggacaccgggtaaaagacacattcctagatccttaaaagcaaaacaaaacaaagcccc

SEQ ID NO: 454127 - DNA, 122 bp, Homo sapiens
gtatgtgagtcactgtgcaggcactagaaatataaagcaaaaaaaacagattctacccaccgggagctcctagtccagtggtgaagaggtgtattaaccctcaaggccctaagaaaatcccc

SEQ ID NO: 454128 - DNA, 122 bp, Homo sapiens
aatgtttacctctcggatctgacaaaccagatgcagagcgacgaatggagaccaccttcccgggaggcggaacccagctgggttccagcctgctctgggagaggagcacgcctcccttgagc

SEQ ID NO: 454129 - DNA, 122 bp, Homo sapiens
ctctggagcccggggggaaacaggttggcatcacatccgcgccaccaagtcgcaggcccgcggcagagcgttgcgctcacccttgaaggtggcactacagagccacccaggaaacacggact

SEQ ID NO: 454130 - DNA, 122 bp, Homo sapiens
ccaagctggggctggggcagcctctctggggtaccacgacagaggggcgaacgtgggcgccgcagccacgcccctgcccccgggccccagacaggcagtcgccgggtcgaccccgggggtac

SEQ ID NO: 454131 - DNA, 122 bp, Homo sapiens
gcactctccacattggacatgtagccccgaagatttctcctggtccttaaaatgccagtacggcataaaggcagacaatgggactttagtcacccaaagtagcgtctcctttaagaccatga

SEQ ID NO: 454132 - DNA, 122 bp, Homo sapiens
gccgtagtcgaggaagtagcagatgtggcgcatgcggggcgacatggagctgaaggtgtgcgcgcagcacgacgcgaaggggtagaggcaggcgggcagcaggaagaccagcagcggccagt

SEQ ID NO: 454133 - DNA, 122 bp, Homo sapiens
caagcgcaccccgtcctccagcacccaggccaccctggagatagactccctgttcgagggcgtggacttctacaagtccatcactcgtgcccgctttgaggaactgtgctcagacctcttcc

SEQ ID NO: 454134 - DNA, 122 bp, Homo sapiens
acagtaccaggcctgtaacgatgaggtttcttcacccctccagtagagggcgcacttttgcgagcggctttcgtagccagttgcttcctgggttctttactgctttgtacgagtcatggtac

SEQ ID NO: 454135 - DNA, 122 bp, Homo sapiens
aggaggatctctgtaaattgttttcttagggagaaggatagggtgaaggagtagaatcgacgactgtagatttgtgagtagaatcccatttgtagttaaacttgggtaaatgggagaaaggg

SEQ ID NO: 454136 - DNA, 122 bp, Homo sapiens
cgtgtgcttgggcctgagctgagcaagctcatggagtaagctctcttgaactcttaagatcgtgaaaatacagttccaagccacagaagccctttggagtgattctgaatggtgggagggca

SEQ ID NO: 454137 - DNA, 122 bp, Homo sapiens
cgaggacaaggcgggtgtcgtggtcacctccaagggacaggggtgctcagcctgctctgccgtccttcagcgtggaggccttgtaaactgtgaaactgccccccggcccgtgccccaggtct

SEQ ID NO: 454138 - DNA, 122 bp, Homo sapiens
gggggtccccaccagaaaggacccctgcgtgtctgtagcctcgggttttctcgaccaggccgaccagagtcccaaggcctgccgggtgggtccaggcccggaaggccaggcggggccctgtc

SEQ ID NO: 454139 - DNA, 122 bp, Homo sapiens
gctgtcgtctcttccgccgggaggcccgcccgccaacggcctgcgcgtctgcgccggaagcggaaatggttggagcccttggccccgccctcgcgccatcttgggggccctggaggcggcgc

SEQ ID NO: 454140 - DNA, 122 bp, Homo sapiens
ttcttattcttatttttatttatcattattagtattatttttttaacagtcttgccctgtcgcccaggctggagtgcaatggcaaaatcttggctcactgcaacctcagcctcctgggttca

SEQ ID NO: 454141 - DNA, 122 bp, Homo sapiens
cctaggcctttggtgtgcacttcactctgacagacagtgggaagccacaaggcttgagcacggaggagagagaatgaggttggctttagcagaagtcatctggcaataggatatgaaatgaa

SEQ ID NO: 454142 - DNA, 122 bp, Homo sapiens
ccctcggggttctcgcggccataggcgccgcagtccactgccctccggctaaagaggtcccgggccatcacctgcccgcctaccgaccacgcccgaccctccactgaactgagtctccgtcc

SEQ ID NO: 454143 - DNA, 122 bp, Homo sapiens
aaccccgaaaaacagtggggctgtttctaagacgctgggaatcagtaaagaatagtgatccgggagatacaggaagcaaatgatctgcgctcaaaaagcgagctgctttcaaagatattagt

SEQ ID NO: 454144 - DNA, 122 bp, Homo sapiens
tagagttagcctttgattggtcagcttgactggcgacctttcccctctgcgacagtttcccgaggtacctagtgtctgagcggcacagacgagatctcgatcgaaggcgagatggcggacgt

SEQ ID NO: 454145 - DNA, 122 bp, Homo sapiens
actcttggggggttgggtgtggcctcgccaggcgggctggtgtcagtgcagcgcattgatcgcccgccgggcgggccgggctgcaagccgggcagcgcgtgcttaatgtgattgaaaggcag

SEQ ID NO: 454146 - DNA, 122 bp, Homo sapiens
ctcccttgaatgttgctcagattacctaaaattattttttcagcccttgtgttctaaagtcgcagggtaaaggttatcttaagacttaacatcagcgctgctcatttgtacgttggtggaga

SEQ ID NO: 454147 - DNA, 122 bp, Homo sapiens
gtctactctccagaacggccatgatttcccaattcttcattctgtcctccaagggggacccgctcatctacaaagactgtatcctagacccttggggctgggaaggggcggaggggccgggc

SEQ ID NO: 454148 - DNA, 122 bp, Homo sapiens
gcgttcactctgagatccagggggcctctgtgagaacccacctcctgtatgacttaggcacgtgccatcatctctaggtcatggtttccgcctctgtaacgtaggggagtggggctgcgtgg

SEQ ID NO: 454149 - DNA, 122 bp, Homo sapiens
cagtgcaggggcagacaccccagggcccctcacccccacactgtgtacacaaggctcactcggatagggagggattcgcagagccccacaaactgcttatctttgcatgttaccgaacacaa

SEQ ID NO: 454150 - DNA, 122 bp, Homo sapiens
agctcccttcctccccggctggttgccaggtcaacaccgggtgggactagcctctggtgtcggcagtagccccatgctcccggcctttgggttcttgcatgcgccgtccccatcacctggct

SEQ ID NO: 454151 - DNA, 122 bp, Homo sapiens
cacgggatttctggctttcttaccttctaacttcttacggagaagcagacagcactgtgtcgtgaaaatcttactgctggttcaagtcccagcaggctctggtcattttctgagcagacgct

SEQ ID NO: 454152 - DNA, 122 bp, Homo sapiens
ccgcggccgccgcgggccggggcagtgagtccacccgcccgccgaggtccgcccgcccgccgagacccgcccgccgccgctgccatggccgaagtgcgcaaattcaccaaacggctcagcaa

SEQ ID NO: 454153 - DNA, 122 bp, Homo sapiens
caggtgggtggaacaggcatgtgacagagtggggagcctgggctcagctcctccccctgccgttggttaataaacaccctttttccccacagctatgactagtctgcttcatctagatgcgc

SEQ ID NO: 454154 - DNA, 122 bp, Homo sapiens
ctgtcctggcctcttctgagaaccacagcactgcaaatccagtggttaagaaagcaacgtcgcctcttctgtctgagcttcagttttcatatcagtacactgggccttcagccttgcatggc

SEQ ID NO: 454155 - DNA, 122 bp, Homo sapiens
aatgtaatgtttacagtgatccagacctggggatgcttgcttcccgacgtgtcctgggatcgcgcttctgaaaaagctcacctcacaacgcctcctccggacctaaatcgcgcaccagtgag

SEQ ID NO: 454156 - DNA, 122 bp, Homo sapiens
cgacttcttgaaatcttccttttgcctcctgttgcaccttaatggccattaggaaatggccgtcattgtatcaggggaggtgccaagaccagtcctttgctagtttctggaggatattgcat

SEQ ID NO: 454157 - DNA, 122 bp, Homo sapiens
tgccagcaccaaagggagatctagagcaaaagctgcttgttggaagagtatgacaatgggcggaaatgcccagacactagtactcccactgtacttattcgccagggctgtcgagaaagctc

SEQ ID NO: 454158 - DNA, 122 bp, Homo sapiens
atgagggcgataatggaagcattccttggcagtgcctagtatctctgtagttattttccacggctccgaaagactcaagtaaatcacaaatatagctgagaggcaagtggagtctccccgct

SEQ ID NO: 454159 - DNA, 122 bp, Homo sapiens
catctggatgatagtccatgactgctgaacaccggctgaggtccacaaaactgcgctcaccgcttggggactttccagccggcctttactctccatggaaagcggtctttccacaaacctcc

SEQ ID NO: 454160 - DNA, 122 bp, Homo sapiens
aacgaggtaaggattatgagaggtctattatctacatgtgttgtatatacttggagaacacgtttgaatgggggaggtgcggcattatttcacagcaggagaaataatcattctcatcattt

SEQ ID NO: 454161 - DNA, 122 bp, Homo sapiens
ccctcttggacgtgggggacacccaggcttagccccccagcaggactctgtccccacaaccggactccaacccccagcaggactccgccccccagcaggactccgccccccccaagcaggac

SEQ ID NO: 454162 - DNA, 122 bp, Homo sapiens
ggggtcagggagttccctttcctagtcaaagaaagaggtgacagaccgcacctggaaaatcggttcactccaacccgaatactgcgcttttccgacaggcttcaaaaacggcgcaccgcgag

SEQ ID NO: 454163 - DNA, 122 bp, Homo sapiens
tcccgggatgcccaatacatttgcagaattaacagtaatcaagcccacagtccaggtcctcgcatagtttgggcctttaaagtcggccatcccagattgagggggcctgacccctgggcgag

SEQ ID NO: 454164 - DNA, 122 bp, Homo sapiens
tgcagcgctacttttggtccggggtcggcagggaggccgcggctaccgcatcacagctgacgtgaggactacgtggggccgctgccggctccgggttgctgggcggcggcgccgctgctgag

SEQ ID NO: 454165 - DNA, 122 bp, Homo sapiens
gatagtgcctcaccacggtgcatgttcacagcccaggggaccctaggcacccctgatgcacgcccacagagtgcctcgacccaccgtggccaacccaaggcggcaggaaggcttgaaagggg

SEQ ID NO: 454166 - DNA, 122 bp, Homo sapiens
tggggtgacagcagtgtatgcccccgggagcctgggaagaaagctcctgctgccaggcctcggccactgtggcaagtggacgccggtgctgccctgcttccaactaggaattccccgaaaac

SEQ ID NO: 454167 - DNA, 122 bp, Homo sapiens
gccggggcccctaggtagcctttacctgggtgtttcgttttgcttttctggatgtagcggcgtatcataaacttgtggatgtcaggacccagcgaagcattttaggtggagctagcaaggtg

SEQ ID NO: 454168 - DNA, 122 bp, Homo sapiens
ctactgtgtgtcctggatgagttagtcacctgtgctacagtgcacagactggacagtaagcgaggttaacagttgtgattctgacctgaatggagcccttagcctcagatctttcagagtaa

SEQ ID NO: 454169 - DNA, 122 bp, Homo sapiens
agtcatcacgagcttccctggaatgcttggaaacagggtgggagctgggatttctagactcgcaaacttttctcccaccatctcctagtcttggccccaccaccgtgtcctggactgattac

SEQ ID NO: 454170 - DNA, 122 bp, Homo sapiens
ggcccggagaggacgccgggaggctgccaagtgggtctgagaggccgacttgaggaggcccggcctctgcctcccgcatggcccagctgttcctcctggctgcatctcccgcctcccagcaa

SEQ ID NO: 454171 - DNA, 122 bp, Homo sapiens
gtgcaaaaaccacaacagtatgcatgtgggtacccagggttctctccacatgagaacccacgagagcccacgtcagctcatgagccacatacacaaggaaacagaccttcttcctctctgtc

SEQ ID NO: 454172 - DNA, 122 bp, Homo sapiens
aagaacggggggtgccgaggtccccatgacctcctaaagtggtgcggtccctgctgagtgcgctgcccgggccgtgacccgcgcccctgtgcgtccccgcgcgcctccgagcgcccctgtgc

SEQ ID NO: 454173 - DNA, 122 bp, Homo sapiens
gaaataggaagaaagttctttgtaagctttaaagcgcagcacattagtcaggggacaatgcgccgctcacagttccactcgggcccacggcgcccgggctgaggattcccgtcccactgagc

SEQ ID NO: 454174 - DNA, 122 bp, Homo sapiens
cccccaaaaagcgcgtacagggacgactctttcgaggtcgcggtgctgggggaggttcctcggccgccagcgccttccattcgccgggcccactcctgcccggccgcccccggggcggcggg

SEQ ID NO: 454175 - DNA, 122 bp, Homo sapiens
ccaggctctctgtctgagcacctgggctagaggcagccatagtgaaaatagatggagctgcgatcattcatttgtcagctaaggagcaaggcagcggttagcaattcccttctgcagaggtc

SEQ ID NO: 454176 - DNA, 122 bp, Homo sapiens
gaccccgaaggctgtggtgttcacctggacagcagtagcttcccagtaaggcacacgccacgacgcgcaatattatgcggccctttaggaggacgttgccgaatggtgtgtatcgacaccga

SEQ ID NO: 454177 - DNA, 122 bp, Homo sapiens
ctcagacaggtgtacgcaagataatggtgcccttgtcttgtcactcactgtgctagagaccgtatggggagtgtgcagacatggagatgtgctgctcagacctcccttgaagaagagacttg

SEQ ID NO: 454178 - DNA, 122 bp, Homo sapiens
atattggagtaggggtggatttcagattcaaactccaggtgactagaccaccccagctatcgtacttgcactctctatgcagttctttctctgaggtgaagatccagtgttaaaatataggt

SEQ ID NO: 454179 - DNA, 122 bp, Homo sapiens
acctgcgtaggggcacaccgtcagggcccaccaggaacttctcaaagttctaggcaacatcgttgcgacacaccggagaccaggtgatgagcttggggtcggtcataagcgcagtggcgtcg

SEQ ID NO: 454180 - DNA, 122 bp, Homo sapiens
cccgcgtttgtcgttgcaacttgtttcctttcttccccttccctgaaaaggacacaggggcgatttctctcctgtgagtctcctttgctccaagaaggccttgccagtcactagaggtgcta

SEQ ID NO: 454181 - DNA, 122 bp, Homo sapiens
cttcagtttcttccttttaggttgaccaggctaagttctgaaatgtcttctcctgttcaccgaattaggtcatgcatcctagtagcggcctcctgtttttgatagctccctgtctttccaga

SEQ ID NO: 454182 - DNA, 122 bp, Homo sapiens
gctaaacagatcacagtcacgtgaattctgcaacctgccaaattctgtggtctctgctggcgcctgtcctccactatagccatctgccctttgcctccctgtttacttctctggatgccctt

SEQ ID NO: 454183 - DNA, 122 bp, Homo sapiens
gaagcgagggcgcgtcagtacagaccgtgggctgcgtgtcacgtcactgctgagcgaccgcgcggttccctgctatttgtaccgcccaaggcagtcctagctccgcccctttacgctcgcac

SEQ ID NO: 454184 - DNA, 122 bp, Homo sapiens
accagcctgggcaacacagtgagaccccgtttccatgaaaaataatttaaaaacattagccgggtgtggtcgtgcgcctgtggtcccagctactcaggaggctgaggcaggaggattgcttg

SEQ ID NO: 454185 - DNA, 122 bp, Homo sapiens
gcatcttaaacttgtcccttcatccctctgggcctcagtttctttatctataaaatgggacggtcggattgagggctttgctagctctaatgtccatgactaagcacttgtatactgaggca

SEQ ID NO: 454186 - DNA, 122 bp, Homo sapiens
cactggtcatcgttgcttatagaggatgccaagccccacccccattcccccaattggcctcgtctcttgtcttacttagatcagtttgttgtaactgttcatgtgtgtactgtttttcagga

SEQ ID NO: 454187 - DNA, 122 bp, Homo sapiens
atttgtcatgcttagctcttatgagatgacccggtcctttaaaaaaaaaaaaagtatctccgtttattctgtttatttggaggtttgaagtgaattcggcagcattcattaaactccttcca

SEQ ID NO: 454188 - DNA, 122 bp, Homo sapiens
aagtgagaggcatgtgagaaaggaaagaaaaaaagttcttagacacagggaaacatttgacggagatcagagtaccaatgtgaacaaggtcgtttttaaggaaggatccccctgcctttccc

SEQ ID NO: 454189 - DNA, 122 bp, Homo sapiens
ggagagaagcggaaccggagttcccgtgcccattcctgttggaatctcctgtctgtgtgccgttctttaagatgggctggagagagtcggggcagctcttctcccgggttttcaggcctggg

SEQ ID NO: 454190 - DNA, 122 bp, Homo sapiens
ctgctgctggcgcctggccctccatcaggccagcctgtggcaggagagtgagctttgccgcggcagacgcctgaggatgatgccccagctgcagttcaaagatgccttttgggtgagtgagg

SEQ ID NO: 454191 - DNA, 122 bp, Homo sapiens
tttcgtatatgcatattaaagtttgagcagtattgatgtagagttccatattcaagagcacgtctactgagcctgctagcatagtaaacagttttgaatgagggatattattgaaacagatt

SEQ ID NO: 454192 - DNA, 122 bp, Homo sapiens
ccgaggagcgaggctgcgtgggattactgctggtgctagggcaggcacctgccatctggacgggagtggaaggaagtcgcggggcagtaatagggggcagcaggcgctttgaggcgccttgg

SEQ ID NO: 454193 - DNA, 122 bp, Homo sapiens
gccccaggcgccctgcatgcccactgcaggcctctgtctacccttgatccctcaccctggcgccccgacaactgggcctgaccagtgaatgctggctgagccagctgtcactgtgacatcca

SEQ ID NO: 454194 - DNA, 122 bp, Homo sapiens
cctctggcccgggtgtcccatccaagcaatggacaggttggaacaggcgttcgtagggaacgggctgaacgcccgcggctcccgcgatgtctcgcgatactacctccctcgcccccgctcac

SEQ ID NO: 454195 - DNA, 122 bp, Homo sapiens
ggagtgggtgctgactgtcagtgactcgaaccctgactgccccagcatccaacactcacacgcatgcacatgtgcctactcagccggacacaacacacaactatgcatgctgacacgcactt

SEQ ID NO: 454196 - DNA, 122 bp, Homo sapiens
ctctgcgagcaacccagcagctcctccacagtgtgcggggccaggcgagggctggtgggacgggtccccagggcacatcagcgggggcctcctcgcctccatagcccagcccagcccagcgc

SEQ ID NO: 454197 - DNA, 122 bp, Homo sapiens
catgcagtctaaggttcttgcagccatgatctctgtttcttccttgttctgctgttacaacgattcttccatatcatggatattttgtgagttatgacagtagtttggggaccacaggtagg

SEQ ID NO: 454198 - DNA, 122 bp, Homo sapiens
agcaagttttataaacaggtcaaccctacgctgccagcccagggagttggagcctgtctccggcttctagtgccgacacccctctttcccattcaccccttgcaagccaaacgcgcagagtt

SEQ ID NO: 454199 - DNA, 122 bp, Homo sapiens
catcagcagagggagaaggaagtggttttgtctagaggtcacacttagtggttatactgacgcctgctgccattgcttgcttttcttggttgacagaacagagcagcttttatgtacatcat

SEQ ID NO: 454200 - DNA, 122 bp, Homo sapiens
gtagtttttaaaaaccatattccttttttttttccttataagtatacatgtcaggcagggcgcagtgactcacgcctgtaatcccaacacttgggaggctgagacaggtggatcactgaagg

SEQ ID NO: 454201 - DNA, 122 bp, Homo sapiens
agtcagatccatttgtgtcaaacccagcaacaccaattattagttgtgaagctttgagcacgttacttatctcagttgggtctcttgaccctggcactaatcatttgcttaatgaaagaata

SEQ ID NO: 454202 - DNA, 122 bp, Homo sapiens
gaaacaattcaagcttcactctctgaggtcatatcctctatgaaaactggtatgtgcccacgtgactgccttagcatggatttggtgtccctttccaaaaacaaggaactgtgcctgtgtgg

SEQ ID NO: 454203 - DNA, 122 bp, Homo sapiens
gcagggagcccctgcccttgccctacttgaagcaggaggagctgcccaacatccctggcacggagctgccctgccccatgttctagtacgtgctctgtgcagccacctcgccagccgtgaag

SEQ ID NO: 454204 - DNA, 122 bp, Homo sapiens
ccagagtgccaagggccggctccatgtctcttctccccggcgcctgcaagtcctgcgccccgtccccgctctcatgaagccgtgacagagccggccgtctccaccccgctgtagccgcacag

SEQ ID NO: 454205 - DNA, 122 bp, Homo sapiens
atgagggaccaagcacctccgtgctgcctacacctggtgagggaccaggcacctccgtgccgctcgccgccactgagggcctgagcacctccgtgcaggccactcctgatgagggaccgagc

SEQ ID NO: 454206 - DNA, 122 bp, Homo sapiens
agaggcggtggggcatctggacaaatgcctggtgcaggtgagaaggggtgggactacctccggcatccctgggctgagcccacctggtctccccggttgctcctgcacacggcagtgcccac

SEQ ID NO: 454207 - DNA, 122 bp, Homo sapiens
gagcttcccccctgtcgctagtgctgaggctttcgcctttcctacccagcttcttgctcacggcccgggctgggctgggcagggcaacgcgcccccggggaggggcggagctgtaggtgagg

SEQ ID NO: 454208 - DNA, 122 bp, Homo sapiens
gccatttctctatagagaagtaattagcaacccagtgcgtgggccccctgcttagtagtgcgtctcaatcacctctgtagatttctgaacctcccccactctagatggggctgtgtggctgc

SEQ ID NO: 454209 - DNA, 122 bp, Homo sapiens
caccttccggcgaacagccagaagctccaagagagctccagggcctctgagctcagcccacgtggctctccggcttagcagcttcagcaaactgtccctggggagtgagccagggccagaga

SEQ ID NO: 454210 - DNA, 122 bp, Homo sapiens
cccggcgggaccggtgggcgcaccctccctgcgcggagctcgccggctctcgaccgggtccgctcagccttcgactaatttccggtggtcggagctgcaaaattaaaggccgcgcgggggca

SEQ ID NO: 454211 - DNA, 122 bp, Homo sapiens
tgaggagaccactcgtgttcctcatggaaagcgcctgcccccaactttccaattttccatcgaattcaccgaatgaccctgagcctagcagtgtgtcttgtgcaccgacggtcccagagccg

SEQ ID NO: 454212 - DNA, 122 bp, Homo sapiens
acgggagaaagagggactgagggggcggtggccgccctgcgggaggtggagaaaggagtacgtattcgctcattggctagagggagtgtgcgtactaagctattgatgtgagtaaagcccgc

SEQ ID NO: 454213 - DNA, 122 bp, Homo sapiens
tgcgctcgaaaatgtcgttcacaaacgaattcatgatgcccatggccttggacgaaatgccggtgtcagggtggacctgcttcagaaccttgtacacatagatggaatagctctccttgcgg

SEQ ID NO: 454214 - DNA, 122 bp, Homo sapiens
tccgagtgcgaacggtggagctcctctggggttgacgggtcggtttggggtaggggtgtgcgttcaagaggaggcgggcccgggcgggtggggaaagcccagagggaaggggcgggctcttg

SEQ ID NO: 454215 - DNA, 122 bp, Homo sapiens
tccaggcccttccaccgcagccatccgcacgggaggcctcgcgattgctcggaaccatcccgcaggagttcagctgatattttctagtgtggggcgagagattttgtggagcgcatttaagg

SEQ ID NO: 454216 - DNA, 122 bp, Homo sapiens
ggccaggccaaggtggcaagagagcagcctgtcgaagggcagcccttatgaatgggctctcgtctgactgtaattggaatttgtatgaagtctctacttccaagaacttccccagcagacga

SEQ ID NO: 454217 - DNA, 122 bp, Homo sapiens
tggggtgggaggcgcgggccggcagccctggtttctcctcgcctcttgtctcctgcccagcgtggcccagcacgtggtgtttggcctgcagatggactgacctggccagaggggggaaagtt

SEQ ID NO: 454218 - DNA, 122 bp, Homo sapiens
tatagagtccaagcaaacgacaaggaagtcattagggtgcaccctaacccaataggatgtcgaaaaggagaaatttggacacagagacatgcacacagggagaatgtcaggtgaagacagag

SEQ ID NO: 454219 - DNA, 122 bp, Homo sapiens
cacacttgtatacctgcctgactctgcaggtgctctacatgtcccacacttgtgtacctgcgtgactctgcaggtgctctgcctgtcccacacttgtgtacctgcctgactctgcaggtgct

SEQ ID NO: 454220 - DNA, 122 bp, Homo sapiens
ggcctagtttcaggggcttggcctctccaaaacacctccttggccactacctaatttggtcggggtcccctgcagttttagggagtgactaaatacagaaggaagggatgactcctgttatt

SEQ ID NO: 454221 - DNA, 122 bp, Homo sapiens
cgctctttaggtactcccctttagctagttatgggccacctacttcagtatggttctgatcgtgtatacttaatgcagctgctttattttttcctgtatgagtgactgaggttctaagaaat

SEQ ID NO: 454222 - DNA, 122 bp, Homo sapiens
gcaaatgtgctttgttgcacccacggcaggaaactgaccagcttctcatcaagttaaatacgcatctaccctatggcctagcatttccactcttgcttacacatccaggagaaatgagtcct

SEQ ID NO: 454223 - DNA, 122 bp, Homo sapiens
gtaactgccttagtgccctcggacacagcatgcttagccagctccccaggcagcagcaggcgcacagccgtctgaatctccctggaggtgatggtcgagcgcttattgtagtgagccaggcg

SEQ ID NO: 454224 - DNA, 122 bp, Homo sapiens
tggccgccccgccctctcatcccctgcgacccagcacccttcttccttgccttgaggctgcgccttagacagcccggtgggtatctgtttaccccttagcactaagggataagtgcacagta

SEQ ID NO: 454225 - DNA, 122 bp, Homo sapiens
ccaagtttccttccagctttacatcttttttggaacggggtctctctacatagcccaggtcgatcttgaactcctggcttcaagtgatcctcacaccttagcctcctgagtagctgggattc

SEQ ID NO: 454226 - DNA, 122 bp, Homo sapiens
gtgcttatgaagttggagctgtactctcagctactcgaagctggtccctgctttaggctgcgctcccgcgtgctccccattttctgggccccaggtcccgccttctaaatctccccaggtct

SEQ ID NO: 454227 - DNA, 122 bp, Homo sapiens
gcctgtacgaagaggtgggggctgtctctgaaaccttgaggtagtacacaccaggtgagccgacgtgaaatgtgggtgtcaggattttcccacataaaggcaaagaggttttgggaattcga

SEQ ID NO: 454228 - DNA, 122 bp, Homo sapiens
gtctccccctgtgatgagcacctagtgttcctgaggacactccttcaaatgctaaaaccacgccctgccaagagccagtacgtgacaactgggcagtctccacctcatccctgggtgtgatt

SEQ ID NO: 454229 - DNA, 122 bp, Homo sapiens
cccattgctgtatggcatccagatcttcttcagggggttctgtgtcaattcccgtggggacgccatcccggggccgggatgagtcggactgcgccgcttccaacccagcagccgggccacct

SEQ ID NO: 454230 - DNA, 122 bp, Homo sapiens
gccgcccggcggtatggggtctcccacccggacgcaggggcagcgtggaggctactgctccggagtgtgtacaactgctccggggaggcctgcaggggccacaatcgtagcccgctggtcag

SEQ ID NO: 454231 - DNA, 122 bp, Homo sapiens
cgtcttaacttgggccttgctgggcctcttgcctgtgactaagccctctgctgcatcacacgcccgagagagtgcctgggctgggggatcaggagtggaactgacgcgggcatcgttggttg

SEQ ID NO: 454232 - DNA, 122 bp, Homo sapiens
attctgaccctgagtcttctggccggcatctgttctgattaggatactcaccctcctacacgatatcactggtgtggtgtttctccctcttctcctaacctcaaaaggcctgagcccctgac

SEQ ID NO: 454233 - DNA, 122 bp, Homo sapiens
cggggacacggcagggatgcctggccctggtcacctgcggccgggcatgtccgggcaggacgaactcgccgtcggagtcaggggaagaactgggtccccgggctgggcaggagggacccggc

SEQ ID NO: 454234 - DNA, 122 bp, Homo sapiens
agtgactgctctccatgtgagaagtttgcagagtccagagcacacatctgatgggaggggcgaggctttctacagctgcttgacctttgcttggcttcactaattgggagtttcacgcagag

SEQ ID NO: 454235 - DNA, 122 bp, Homo sapiens
tgagccccatggaccacggctgtgtccccgacgcctcccctgaaacaccagcggctctctcgcctggcctcggctgccctgagtcccgaagtgtttccctggaggccagccctgcatgcagc

SEQ ID NO: 454236 - DNA, 122 bp, Homo sapiens
cggctttggctctcctaattttagagggtaggtacgggtctccagatatactgcctaccacgctttgctcacccctccaaccggcctcggtgttccaggagccagcacagcaggtggtccag

SEQ ID NO: 454237 - DNA, 122 bp, Homo sapiens
ggacctaagggaagcatctgggtgggaggggctggaccaggagcccccagggaggtcacccgcaggatttggcgcggcgggcgctgtccacggtgctgaaccggtcgcgcgcggggcgctgt

SEQ ID NO: 454238 - DNA, 122 bp, Homo sapiens
tagcaagcagcagaggccaccctgctcagggctgggtgccaggccacagggcatgcccgacgaacagggagtcggaaccccctcaggccaccctcgggagtcctggggtccagaggggtgtc

SEQ ID NO: 454239 - DNA, 122 bp, Homo sapiens
gcgggcgctgcggttcttcccttctgctttcgggaagcggtcggggctgcacactcggatcggcggggccggctcccgggcccggccggctggaggagggagggaaggaggcgggagggagc

SEQ ID NO: 454240 - DNA, 122 bp, Homo sapiens
actcccccacccccacgataaacctaagtggtggacaattaagatatcttcttcaaaaggcgccccctcggagccgcgcaaagcaggggccttcagtgggtgccgttcaccttccagcctaa

SEQ ID NO: 454241 - DNA, 122 bp, Homo sapiens
cggggggcggtaccctagtctcccgggggaggttttggggcggaggaccgcggaggactgcgcccaggagggtggccggccgcgggaggaggacttggggtcgggctgctgcagctgggtgg

SEQ ID NO: 454242 - DNA, 122 bp, Homo sapiens
tcaactcggaccccgaaaacgctctaaacgctggcggaagtcacgcagagatgggctagacgctcaaccccggtctcttccccgaaaccgcggtgctcccacttcctgcagtccgaggttcc

SEQ ID NO: 454243 - DNA, 122 bp, Homo sapiens
aaagagctaaggagggtaaggttggttagagcgcaggggccaaggccgcggcagcgaggccgtccagcgcgggctaggatcccgccagcccagccctggagcccggccgcctggccccagcc

SEQ ID NO: 454244 - DNA, 122 bp, Homo sapiens
tgcggcgagaggggacggggtcgggcaggggcccctcggcctcgcggggtggtcacggggcgagagagagaggggcacccctggcatcccccgagcccagccccactcacccgccatcttgg

SEQ ID NO: 454245 - DNA, 122 bp, Homo sapiens
agagggacagaccaggcaggctgacgagcagggcgggcctggctcacgtgggcctgtaggcgggcccacgccaagtttcacttcccgccactgctgccagcgagagccgcgggagagtgtgc

SEQ ID NO: 454246 - DNA, 122 bp, Homo sapiens
ttgactcgaaatggagttttcttggaacttggtttgcatgaaagggaatacatattgtcacggctgtgtgtcttgagatatggtgtttaactgccaggacgtgcttttatgtagcagaataa

SEQ ID NO: 454247 - DNA, 122 bp, Homo sapiens
cctcaaccacagtttagctttcccctgcgctcacaagaggtttgcagggtgcacttatttcggcatgaggttgattggatggcttttgtggtgcaaaatatgactgtgactctgtcctgaaa

SEQ ID NO: 454248 - DNA, 122 bp, Homo sapiens
actgcaaattcttccaaagcaatgaaagaaggcctggctctgcagagggtaatagatcctcgcagggcttccctgggccttctgcttttggatgaggagagcaacagtgcccaaagctgccc

SEQ ID NO: 454249 - DNA, 122 bp, Homo sapiens
atttggcgccaccgccgcagctccgccccttcccgggcgcgcccctcccagctccggcctcggccctggcccgcgtggcgctaaaccctgttaagatccctgcttggtctccgctgcctgcg

SEQ ID NO: 454250 - DNA, 122 bp, Homo sapiens
ttggctcacactggctggtaacgaggaccctttccccttcacgtgtgggtgggaggaaaccgcaggtcttcgtacgctgctcattgtaagggcctggaatttcagggatgacgataccacct

SEQ ID NO: 454251 - DNA, 122 bp, Homo sapiens
gcacctacccccgaggtcctcgatgatgtccagggtggagctccacgagaaacgctccaccgtccccagctccagctcggccaggtcgccgggcagggcctccagctcgtaggtgccccgct

SEQ ID NO: 454252 - DNA, 122 bp, Homo sapiens
gtcagcgggctcaccaaccgggacaccctggctgtcatccgccacttccgcgagcccatccgtctcaagactgtgaaaccaggtacgccggccctgcgtatctgtctcggggtgttggggag

SEQ ID NO: 454253 - DNA, 122 bp, Homo sapiens
taacatcatttgcctgagataacaacaaaaaccaaacgtagacctattttttctctgcttcgctgggagggagcaagagtgaagctattaaaacgtaagggaacaagcccggctagttcccc

SEQ ID NO: 454254 - DNA, 122 bp, Homo sapiens
aagataataaggtcttatttataaatatttttaagaggcaaaggtagcttttattattctcgccattgctttaaacaggagacaacattcaatatgcaacactcgatagttgcctcatagag

SEQ ID NO: 454255 - DNA, 122 bp, Homo sapiens
caggagcagagcccccacctctcctgctgccacatgctgggcccactccccgcgaccgcccggcacactcacatgctcgtgtacacgcgctggccgttctgctggttctgcagcctggtctt

SEQ ID NO: 454256 - DNA, 122 bp, Homo sapiens
ctttaacccacccacttaacaaaaacggaggtaataggtaaacaaaacgccaggaaagatcgcacttaaaggaacaaaagcacccaaggaggaaaaagaggcctgagatttccacgaattac

SEQ ID NO: 454257 - DNA, 122 bp, Homo sapiens
gaaaagcccgaagggagtcggaaatacccgaggttggtcgacgagagagaaaaccgttgccggaaattgtcgaagattaccggaagctaccgagtctgacccaaagcgtaggtttctcttct

SEQ ID NO: 454258 - DNA, 122 bp, Homo sapiens
gaacgagcgaggccagaggagacaacaactcccagcaggcgtcgcggcagcgggaagtcacgcacgcgcaacccaggccacaggagtaaaatctctctgcccgtcttctgggaagggagaat

SEQ ID NO: 454259 - DNA, 122 bp, Homo sapiens
tcctttagaaacttcaaaactgatcttagttcaagaaagaagttactattcagtgatcaccgaggctctaacaagtggagcctagattcgaaaccaaaccctgtgacttcaacacccaaaca

SEQ ID NO: 454260 - DNA, 122 bp, Homo sapiens
tgtagatccggctccgggctcccgggcgggagcgcagcccgtggcatttaaagagacaggcgctcactccccgagctcgggtctttttcacattgcgccgagcggccgggagccccgccccc

SEQ ID NO: 454261 - DNA, 122 bp, Homo sapiens
gagggtgatgtcacctgcgagttagtaacctacgagcggctgtgaaggaaactgtttaaccggatcccattgtacccagagtgcagagccgcctttccagcatgcaggggctgctcaggtaa

SEQ ID NO: 454262 - DNA, 122 bp, Homo sapiens
gaacaaccagatctcttgagaactctattatgagaacagcaaggggcaagtcctcccccacgattcaatcacctcccactaggtccctgacccgatactagggattacaattcgacatgaga

SEQ ID NO: 454263 - DNA, 122 bp, Homo sapiens
agaggccacggacacccgcgcaggagcatcccctggcaccccgccccacgcccgtccttccggagtctacacatcggcgacctcccgtgtctaggcgcacacatttcccgccccgcggagac

SEQ ID NO: 454264 - DNA, 122 bp, Homo sapiens
ttattttatgatgtgactcactagaaatgaataaaacccaagaaatttgagctctctctccgagtttaacaaagtgagaaaacattttattactttctttattccatgctcttttgctctgt

SEQ ID NO: 454265 - DNA, 122 bp, Homo sapiens
tggttagggccgttaggctctgttgcggttagagctgttatgctctgttgaagctatggacggggttgacatttgctttgtttcttgagaacacagtcatcaaggttgtaaaatggcatcac

SEQ ID NO: 454266 - DNA, 122 bp, Homo sapiens
cgggcctgggagtggggtggggcgggagcccagtggtggcggctgcggccgggcctgcaccgtccccggccgcattctggtagggcccacagtccggctggaagggaagctgccgaagcgct

SEQ ID NO: 454267 - DNA, 122 bp, Homo sapiens
gcacatcttcagagctgggggccctgaggagggttcctgcctcagcccggtaggcccccacgtgtcctggcaggaaatgcgaagggcggtctcttctcagctgccccggtggctggcctgtg

SEQ ID NO: 454268 - DNA, 122 bp, Homo sapiens
aataaaatattaagttcttttttgggttctgacctaccacagcgttcagagaactacatccgggtttagaggccgtacgtttgcgatatagcccaatagcagtcgttatggtgggggaggcg

SEQ ID NO: 454269 - DNA, 122 bp, Homo sapiens
tgtagccggccgccatgaagtgctccgtatactgctgcatcttgatggactccagccactcggacaccgtgcggaagggcaccccctccgagccgctcgtgctggggagccggatagacacg

SEQ ID NO: 454270 - DNA, 122 bp, Homo sapiens
tatggtagttgtgtagtgcacccctgtaccaaaaagcttctttggaggcagtggcagggacgggcaggggcagtggtaatgaggataagcaagcaccaatagttagacttccttgttctcat

SEQ ID NO: 454271 - DNA, 122 bp, Homo sapiens
catccctgctccagcgtcatggacttttccggccttgggtcgaggcctcagcgattcaggcggggccgttttggtaacacccgtgtgtgtgtgtgtgtgtgtgtgtgtgtgtgtgtgtgtgt

SEQ ID NO: 454272 - DNA, 122 bp, Homo sapiens
ggaaagtcctcaggcagaggacaaacattagacaagaaaatgcccatatatgaaaccctgcgaagcatcagtatttgaggagcagactaaaaaggaaccgtctgtggaggctaagagaagca

SEQ ID NO: 454273 - DNA, 122 bp, Homo sapiens
gcattgattatgcctgtgtctttcagcacaggtagaaatgtatttcagataagacaattccgcgtttgaaaagtgatccacagtctttcaggtgaaagacatctctgcagaaacactcttta

SEQ ID NO: 454274 - DNA, 122 bp, Homo sapiens
ctttcaccatgataccacctttccaagcatggaaaagataatgctgggaaatagttggcccgcaggcctgaaggggacacagcaggtaaggcaggacaggtgaccaaaggtggggcctcatc

SEQ ID NO: 454275 - DNA, 122 bp, Homo sapiens
caagcggaggcccccggatggggggcagtggaggcgcctagcccctactccgcgtcctcccgggcaccttttttggtgggacatcccaagtctccgctggagaggctgtggatggatgtaca

SEQ ID NO: 454276 - DNA, 122 bp, Homo sapiens
agccccgagcaggctcgggttcccgcaggatacactgcccgcccagtggcctggagggcgcgtcccgggctcccctacgccttttggaatcagcgacagacgcaggtataaaagagagcctc

SEQ ID NO: 454277 - DNA, 122 bp, Homo sapiens
atcatccgtggggctcaggcctcaggtggggattggccgcctggccagagggtagctgagcgtggttccagatggctgcctgatgcccagcgttgggggcaggagggtggctgagcgtggtt

SEQ ID NO: 454278 - DNA, 122 bp, Homo sapiens
cggccgtgggccgaggagagctctaggtggccagccaaagacctggggcgtcgtgggcttcggcgagcatgcagggatgagcgggtccctcggccgagcggcgggctcgggtgcgggcggtg

SEQ ID NO: 454279 - DNA, 122 bp, Homo sapiens
ggaagggccgaacaactcataaagttgtattgcaaagttgtaaattttcataaacaacaacggatttatgaccctttccccatcactgagaggaggcagctcttacaccggcgccatcttac

SEQ ID NO: 454280 - DNA, 122 bp, Homo sapiens
tgctggagagggaggagacaggcagtgacaagtcccgaggagggcctcggtccctcctgtcgtgcagggagttctgctcctggaaatattcctcctcttcatcgaagaagccgttctccaga

SEQ ID NO: 454281 - DNA, 122 bp, Homo sapiens
ggtcaggtggtggccccgggcccggtgcggctcggcagccccaagtgtgaggggctggtgcggggccacctcccacacagagtttctgtagtagcggctggtcctccacgttttggggccac

SEQ ID NO: 454282 - DNA, 122 bp, Homo sapiens
ctcaatcaacttgattaatttttaatgtgcatagaagactacaacaaactttatttccatcgagcaaaaatacttttcagaagcctaaacagcctgccgctacctttgcaattcaccaccat

SEQ ID NO: 454283 - DNA, 122 bp, Homo sapiens
ttacttgtaatatggagatttatggcataatagtatctcaagattgctatggaagttaaacgtttaagttaatgtaaagtgcttagaaagaggctggcatatagtagtaattatgcaaatgt

SEQ ID NO: 454284 - DNA, 122 bp, Homo sapiens
tgctgccttgggcctgggtcatttcagacaaacctcaggtaagatgggactgggcttccccgccactgcgcagcagctcccgccctcctgggtgctgtcccaggggtgaaaggaagaggtgg

SEQ ID NO: 454285 - DNA, 122 bp, Homo sapiens
accactgagccctgccacctcttgcatgcacctttacaatctgcagcctggcatcgcattcgacttttagcacttgcgatgtccttcctcagtgcacagtgttcttgagacaaaagtagcgg

SEQ ID NO: 454286 - DNA, 122 bp, Homo sapiens
actcggacgttctccacatggatagcattctctgtccaatcattacagggacgttctccacgtggatagcgctttctgtccaatcatcactcggacattctccacatggatagtgttctgtg

SEQ ID NO: 454287 - DNA, 122 bp, Homo sapiens
tgctgttgccgctcccgagggaggccgccttgcgcagctgttggttgggaaagacttttccgagcagctggaccccggggctgtatgtggggcagggctgcgggtctgcaatgagtcgtgac

SEQ ID NO: 454288 - DNA, 122 bp, Homo sapiens
acaaataaaaagatagaatgactgaggggcacataacttttcagaagccctctctgaagacgtgagatgtgagctaagaacttacaaaaaagatgaagcaacacatgtggatatttggaggg

SEQ ID NO: 454289 - DNA, 122 bp, Homo sapiens
agtataacacctacccataaaattgtagagaggtttagatacaccgttatgtgtagggcccgaacagagtagctattaatagtggtaacagactctcaattaggggctcaacatcatggtcg

SEQ ID NO: 454290 - DNA, 122 bp, Homo sapiens
tgctttagggccagaggaaagatcttccctgaaggcaaacgcccgcggagcccacaagtccgggccgcactgaacaagtcaggatgttgccatcggcaattctgcagaaggcagtaacccat

SEQ ID NO: 454291 - DNA, 122 bp, Homo sapiens
gccgccagccctacagccgggagggaatgtaatgtaaggtttggcgcctcggggcggatccggcttgcacagtcagttaaggaaccagagtatcgcgagatccggggtaaaggggcgggagg

SEQ ID NO: 454292 - DNA, 122 bp, Homo sapiens
aagtggggaggaaaacccaaaccaaaaatcaaatctgggacccctctttaaggagacaggcgcggggtgctgggtcggggctgcaggatggcagggtgcgggtcggggctgctggaacccta

SEQ ID NO: 454293 - DNA, 122 bp, Homo sapiens
gcgttcatatgggtccactgctgacatggtttggatctgtgtccccaagaaacctcatgtcgaattgtagtccccagtgttggaggtggggcctggtgggaggttattggatcatgggagtg

SEQ ID NO: 454294 - DNA, 122 bp, Homo sapiens
cctcctgcttctactctgacctgagcctaactagctgctaggtttggtaataagattgaacgaagactcaggaggccctgtgggctccattattctgcatgccctgcgagaacggcccaccc

SEQ ID NO: 454295 - DNA, 122 bp, Homo sapiens
cactggggagccgggcgcaagggcaggccaggccgggagggcggatggcggtggggacggcggtggcctcgggccgggcgggcgcccagatatagcggctcagggccaatcggcggcggggc

SEQ ID NO: 454296 - DNA, 122 bp, Homo sapiens
tggcttccggttacccaacctcatctcgcccgagcctcatctgtagctcaccgtcctgtgcgccctgtgctgttggcagggcgtgtgggatttagagggttttctatactgagtcttcctcg

SEQ ID NO: 454297 - DNA, 122 bp, Homo sapiens
aaacttctaataaatactatttccttctgtaatttcacgtattttagagtctggaacactcgtgggaaggcgctttcgggggtgaggcagcaagtatccgcagagattgtgatggtggctac

SEQ ID NO: 454298 - DNA, 122 bp, Homo sapiens
cctcccagccctggatgcagacaccaagagcagagagacctggcagtagtcatgcagcagcgcaccaccccacatcctcagcacaatccaaagcagcccctcatccccaccgtgaccaccac

SEQ ID NO: 454299 - DNA, 122 bp, Homo sapiens
cttttctagcctctgggccaatgtgtgtcgactctccctcctcccaccacttcacagacccgggagctgcccaaccagggccaccctgcaggatggcaagcaggtttcctagctcttgtgaa

SEQ ID NO: 454300 - DNA, 122 bp, Homo sapiens
gggaacgcgcgtggcgctccagccgccaccccaaccctgccacttccgcagctgcccgggcgccgctgcacccggaccactctgcggtctacccgctgcggccagaagaagagagactccgg

SEQ ID NO: 454301 - DNA, 122 bp, Homo sapiens
agggctgagacagtgaggctggtgtggcaacggtgctgccctgagcccctgatctggctccgacactcactagccgtgggaccccaggcaagtcactgagcctgggctggattttctcatct

SEQ ID NO: 454302 - DNA, 122 bp, Homo sapiens
cagcacaagaccccggcggccctgctcctgcgccctggcgagttagtgagccctcatccccgcccctgtcacggcacaccattagtgcaggcacggagccgcctcctgccatcaggggctat

SEQ ID NO: 454303 - DNA, 122 bp, Homo sapiens
cagcattcacagatttttagttatttatttactttaagggagaggcatatgtcctaaacacgcaaagaattatcgaaggagccttccttctgggctctgagccaaaaccaggataacagaca

SEQ ID NO: 454304 - DNA, 122 bp, Homo sapiens
gagagagagcggggaggggggagatcaaagcagatgtatgaggatatgaacagtacatggcgtataatgaaagagtttcaggagaaacctgtctggttctgttggaaaaactccgtctcctg

SEQ ID NO: 454305 - DNA, 122 bp, Homo sapiens
gaagtgtccagtgttcctctttaaaagaattaaaccttcctgggccacgcagggactgaccgtgggaccctggactctcctccaccttccaccgtggagcaggctctggagccgagcagcct

SEQ ID NO: 454306 - DNA, 122 bp, Homo sapiens
gctattggaggggcggtacatgggaggccactggccaatgggaagcacggaagggggcaacgagggtaaagctgcatggtcaccttggataccaaggacgcgacttcttgtttggagagggt

SEQ ID NO: 454307 - DNA, 122 bp, Homo sapiens
cagtcctgtgggaagaaggcagagcaatctcagtaggaccagtggcaactgtttccgatccggctgaactctcctgaccatggtggccacgccgaggtgcgggtccgcggggtgctctggag

SEQ ID NO: 454308 - DNA, 122 bp, Homo sapiens
cctggtttccacagggacggtgttgcctgcacagacgacagcacccccggcgggggagagcggccccagcggagactcggcagggctcaggtttcctggaccggatgactgacctgagcccg

SEQ ID NO: 454309 - DNA, 122 bp, Homo sapiens
gccacaggacaaaatttacttacaatcgcaggcttaaagaagctatgatagtttaaattacgtggcttagtttgttcttattgtggaaggtgcacaaggaattaatttgtgtagacagaaca

SEQ ID NO: 454310 - DNA, 122 bp, Homo sapiens
agcactctttttgaaagctgaactggcgctcagaatataaacgcttctggatgcactgcccgcctgcccgcggtggctctgaattcctccactttcaagcttcaggagacgtttgagttcag

SEQ ID NO: 454311 - DNA, 122 bp, Homo sapiens
tttctaagaagctcccggctcgtgccgacggggctgctccgcggaccacttagagaatcccgttcagggtggctcatttcgctaccagaacaccaccatagcgcgggaagcgcgcagcctct

SEQ ID NO: 454312 - DNA, 122 bp, Homo sapiens
gagagagacagagagagagagaaagtacttctgttgccattaatttgttttagagatgaacggggcttaagaaatttaacacaaataaagtaagcagttaagttacaatgaaggatacaaaa

SEQ ID NO: 454313 - DNA, 122 bp, Homo sapiens
tttaccctcctcttcttttttaaaaaattactgttttgggtcaccatccaatttttatagcggccaaacctcccacaggcagcagcaacaggcgcttaaaacttgtgaacattttaggtgtt

SEQ ID NO: 454314 - DNA, 122 bp, Homo sapiens
ttcccttccagaggcgccgtggcggccatgtttgagaagggcaagttgcccacaacagggcggagctcctgctctaattctctaacgtcccagggctatggacgggctcccttggcggccag

SEQ ID NO: 454315 - DNA, 122 bp, Homo sapiens
gagaagacaggcggtggtggagatcttcagagagaggacgcctgagaagacaggcagtggcggagatcttcagaaagaaagcccagagttccatagtgggcgggtgggcagtatttcggctt

SEQ ID NO: 454316 - DNA, 122 bp, Homo sapiens
attgattaaggaaaccaaagttgtacacgggcagaaaagagaagtccttttatttgtgcacggagctccatacactcagtggatttgaatgcctacatggtaggctccaagctgatgtaaaa

SEQ ID NO: 454317 - DNA, 122 bp, Homo sapiens
tctgctggtactcgcccaccacgcccaccagagccaccgcacttccggttgctgtccaggcggcttctgctggtactcgcccaccacgcccaccacgtggagtctagcagctctccctggtt

SEQ ID NO: 454318 - DNA, 122 bp, Homo sapiens
gggattaatgctcccataaaagactctggagagctctcttgtcctcctactgtaaagatgcgacaagaaggtgacatctttgaagcagaaagcagtccttcatcagacaccaaatctaccgg

SEQ ID NO: 454319 - DNA, 122 bp, Homo sapiens
catcccaataagtggcaggcacaatagccccaaagagagttacaacaagcagttaaatgacggaattccacgtttaccttctccacataccccgtgctaacaaacaagctgatcatcataat

SEQ ID NO: 454320 - DNA, 122 bp, Homo sapiens
ttttctacagtatctgttacctcagtcagattgaggatgcacatatactgggaaaataatcgacttccagcgtccctcatgtagtctctacctgattcaggaatctctaacccagtatcgga

SEQ ID NO: 454321 - DNA, 122 bp, Homo sapiens
ctccctccttcccttagccccgcatccaggtgccccgtgtgcccggcctgggcggctggccgtggatctgaccgctcctgcatggtggaggaccagcgttcccactgtctgcagctgtgcca

SEQ ID NO: 454322 - DNA, 122 bp, Homo sapiens
atccttgttaattctctgagtcacatcttaagaagtacagtgtatcctgccttctagtgacgggtgtgctttgttgtaggagaaagtatgggcacaacagactgtagagggcagacgtctca

SEQ ID NO: 454323 - DNA, 122 bp, Homo sapiens
gatgctttccattgggttcttaaaaaggatctatgactttaaaatggttaataacgagtgcgttgggcattattttgtctgactatctctcttgacagataaggaaatggagttctttgaac

SEQ ID NO: 454324 - DNA, 122 bp, Homo sapiens
aggcgcagggaggaactggcgaggtggcccgggctcggccctccgagggtgtggagcgcccgggaaacgggaccccaagaatccaactgctcccaccctgcgcggccaggagcggggctggc

SEQ ID NO: 454325 - DNA, 122 bp, Homo sapiens
cctccctgttgcccatactcagcatctcggatgaaagggctcccttgtcctcaggctccacgggagcggggctgctggagagagcggggaactcccaccacagtggggcatccggcactgaa

SEQ ID NO: 454326 - DNA, 122 bp, Homo sapiens
gtattcaaatctttagaaagcacgtgccccaaatgaatcggactgaacagacgctggaaccgaacatggtaaagtaaaatacttatccatgaggcactttgtaatccccgcactcctgctct

SEQ ID NO: 454327 - DNA, 122 bp, Homo sapiens
gggctcgcgccgccatccgtatcctcgcccagagcgctggggatgggtcttcagggacgacgtgaccagttactgcactctccgtgcccaagcactcggaggggctaattagtgcttttaat

SEQ ID NO: 454328 - DNA, 122 bp, Homo sapiens
gggccctgctacccccgacccgtcccctcccgccggccgcccccatggcccggctgggcgcgctgctcctggccgccgccctgggtgcactgctcagcttcgcgctcctggccgccgcggtc

SEQ ID NO: 454329 - DNA, 122 bp, Homo sapiens
tgccccgactcgggaagtgggagtccctttcacaccccagcaattgatcccctctctcctcgccggcccgcccgccgctgctcttcttccaggcacaatcgaagaggaggcagtgagcgagt

SEQ ID NO: 454330 - DNA, 122 bp, Homo sapiens
ccctccctcagctggggcctcccttaagctcctggcagaggctgatccatgctggggtcccggggcgccacagacggtggcgcaggggacacacccacaggggttcctgttccttggtgtgt

SEQ ID NO: 454331 - DNA, 122 bp, Homo sapiens
ggtaggacatgccctggcacccagatgggggcaatgagatctcccaacactctggtataccggtggagacttcagaacattcatataggtaaaatacaacctcttgacattcagctggaaga

SEQ ID NO: 454332 - DNA, 122 bp, Homo sapiens
taggccagggcaggccttcccaactgaccttgtgaccagaagttcaagtccttacctgtgcgacaacatagctcaaaagctaaattgtcttgagtccatatgaacccttgggttcaagcaac

SEQ ID NO: 454333 - DNA, 122 bp, Homo sapiens
cataaagactgttgagctctctgcactgctgatgatgaagcattgcatgaacccagaaaacggggatgccaaagcacagggcttaggtgctgttccttgcgtcatcagcagaggtctgtcca

SEQ ID NO: 454334 - DNA, 122 bp, Homo sapiens
agggaaggcgcgcgccggctgcgtcaaggctttcccgccagctcaggggtctcaggtggtcgaaggtagcaggccctggctcctaaaatgaaagccaaaaatcccctcactaccccgccacc

SEQ ID NO: 454335 - DNA, 122 bp, Homo sapiens
ccccctaaacctgctctgtcttgcagggacctacccctttgtgacttcatccaactgcaccgtgggcggtgtgtgcacgggcctgggcatccccccgcagaacataggtgacgtgtatggcg

SEQ ID NO: 454336 - DNA, 122 bp, Homo sapiens
gggcgggggccgggctcccggagagcccagcaggccaaaggctttgtgtcttccacagagcgtttccgtgggacttgtggccctcctggcgtccaggaaccttcttcgccctccactggtga

SEQ ID NO: 454337 - DNA, 122 bp, Homo sapiens
ccctcagctggtcagtccagctacctgtgaccagcaagtcacttacaagtcaaaccaggtcgaggaacttggaacatgggggtcagcaagcacttcccccaagagatgactcatttttctcc

SEQ ID NO: 454338 - DNA, 122 bp, Homo sapiens
tgcactcgggtgtctcgctgtaaaagctgcactcgggtgtctcactgtagaaactgcactcgggtgtctcactgtaaaagctgcactcgggtgtctcactgtaaaagctgcactcgggtgtc

SEQ ID NO: 454339 - DNA, 122 bp, Homo sapiens
ggacccctgctcagctccgcagccaaagtctattctgacctgttctgcactggctgttaacgatttaaaaaaaaaaatcgccaggtgcaatcgctcacacctgtaatcccagcactttgaga

SEQ ID NO: 454340 - DNA, 122 bp, Homo sapiens
tgccgttttagctgtccactaaagtgagtcagggaaagctcgccatgcaattagagggctcggattaaaaggtgctttggggcccagagttagaaatgtgattctggaaggtcgaggaggcc

SEQ ID NO: 454341 - DNA, 122 bp, Homo sapiens
atcatcataaaatacctggcgttaatttgccctctggacctttcagcagctcatgaacctcgctgacctcgggctgcagcggcgagaccctcgagcaaggaacgcgactatgagtgagaggc

SEQ ID NO: 454342 - DNA, 122 bp, Homo sapiens
cgtgcaaccgcacgcggacagcggggctccagcggaggcggggtggatgcggagacaaggcgcctaggagactgggctaaggctttgagtgtccgaacgaagattctttcgaacctattgat

SEQ ID NO: 454343 - DNA, 122 bp, Homo sapiens
aacgattcaggtcctggtgagaaccattcacgactcctccgggacctgttccaccctccccgtcatgcacagatgatcttagtaaccagagtaagagtctgcctgagacacgagtctttttt

SEQ ID NO: 454344 - DNA, 122 bp, Homo sapiens
ctccgccggctctgcgaacccgggacttttcatgcaccacactctccgcctgcttccctccgtgtcctgaaaagtgcgaccgttctcccaaggaatttccacggcaagtatggagatcagaa

SEQ ID NO: 454345 - DNA, 122 bp, Homo sapiens
agcccgccgggccggcccggtcccaggtgggcagctcggcttgcagctggttggaggtggcggccgctgcagccctggcagcgggcacacccctaagcatacgcacccaacgcctcctccct

SEQ ID NO: 454346 - DNA, 122 bp, Homo sapiens
aggtcacagagggagtgtgcagggccagatttcatcctggggccacgctgaaatctgtgccgtccacaaccagcccggggatgctgcgcccgcccgatcgatgcatcactgggtccatgtaa

SEQ ID NO: 454347 - DNA, 122 bp, Homo sapiens
agtttcttctctgaactccgttttaactgtgagatggagatattaatagtaacctgagcacgattgtgaggattacatgagatgcaggcagggtgccacatgcctggtaggtggtaccactg

SEQ ID NO: 454348 - DNA, 122 bp, Homo sapiens
atgaccccttccaggtctgcggtcccgggccggctctgacggtagaagcggaaaagtttccgaaaggcgtcctccccgggctcagtcgccagagtcgccacagagcccacggccgctgccat

SEQ ID NO: 454349 - DNA, 122 bp, Homo sapiens
ccaactctacctgtcaaactcttattcatctttcaaagctgacctcaaatgccacatcttcgtgaagccttctctgctcctcccaccccaaattaatctttcttctattcttcctcagcctt

SEQ ID NO: 454350 - DNA, 122 bp, Homo sapiens
tcccaggttgaggaggagagaggggaaatagcaccattggttcctttccgtgagtatgtgcggggagaagtttcaagaaggttcttatggaaaaaaggctgtgagcatagaaagcagtcata

SEQ ID NO: 454351 - DNA, 122 bp, Homo sapiens
agccctctcccgccagcgccctccccgccccgcttccagcacggtccctaaaggcgcggacgactcaagccggcagagccgagcgtagagatccccacctcgccccaccgccccagtttaca

SEQ ID NO: 454352 - DNA, 122 bp, Homo sapiens
cgggatacgtgagtgactgcctcagaagggctccttcaaggacactaaggaggtgacagccgccgtggcccactctcccggcccgtccggagggccccccgccacccgatgcagaccccctg

SEQ ID NO: 454353 - DNA, 122 bp, Homo sapiens
caatataaagaacatctaatcatagacatttcctttaagaaattgtttctactcagtacccgtgtcttgaagaggataggttttttatccttgagatatacatttcttgacccaatacttta

SEQ ID NO: 454354 - DNA, 122 bp, Homo sapiens
tggccacaagaagtcatgtggattccatccatgaacgtgaactttttattgtggtttgtccgttccgagcgctccgcagaacagtcctccctgtaagagcctaaccattgccagggaaacct

SEQ ID NO: 454355 - DNA, 122 bp, Homo sapiens
caggaaagaagacagacactgtttagagtgagtgacatgtcttctacccggactgttcatcgaaaggtttcttgtcagtgtgatcaatgagaaacttctgttcatcacagaaggtattttta

SEQ ID NO: 454356 - DNA, 122 bp, Homo sapiens
gcagcggcgccaggggatgctcttgctgggcctggcctctcccttctcaacttagggcggcggcgggcccgcgcccctggctcccgggccatggcgctgagggagctcaaagtgtgtctgct

SEQ ID NO: 454357 - DNA, 122 bp, Homo sapiens
gtttctttcctgctggggtgggaaaagggaaatcataagtgctggaggatgctggagactcgagaactgtgatgcagagactctagggagaagaacatgatccccagccagcaaaggacaat

SEQ ID NO: 454358 - DNA, 122 bp, Homo sapiens
ggatttgggtgccaggtcctgaggatgcagcaggcacaagactgacacgatccttgccctcgtggtgtggctctacaaattactgtggaaacgcgactgtctcgagctgaggagagggcaga

SEQ ID NO: 454359 - DNA, 122 bp, Homo sapiens
taggagccaggcgccaggacagaggaaaagaacttcattttattaaaatggtggcaaattcgattagcgatttcagtggcacattaagcaggttattattagacagaactgacatttcacat

SEQ ID NO: 454360 - DNA, 122 bp, Homo sapiens
ggtgtgtttatgaatgcatgtgttcctatcccgggccaagaaaatacacttgacataggacgtccaaaattttttggcttatgaagctccagtatcttttactttcactacttatttaattt

SEQ ID NO: 454361 - DNA, 122 bp, Homo sapiens
gaccccctccctgcctccagcctgttctggagacctccaagcaggagctggaggaggatccgcccagcaccgcagcccgcgccgcctcctcctgggagccccaaagacactctctgctcctc

SEQ ID NO: 454362 - DNA, 122 bp, Homo sapiens
gaacccggcgagctaagccaaacggagggcgggagagaggaagcggcagctggcgcctctcggcaactctaaccctctgatagagatcgccaaggtaaccgagatctaaggtcctcccctca

SEQ ID NO: 454363 - DNA, 122 bp, Homo sapiens
caaactgtctccgaccagttacggaagaggcggccttgagagggtagtgtgccattggctcgatgtcctgcccctccgaaacctaagtcttcagcttccaatcaggactcagctttgggaag

SEQ ID NO: 454364 - DNA, 122 bp, Homo sapiens
tatatgccctattagttctgttcctctagagaaccctaatacagtgaccgtatttggaatcggtccttctgttaatttcacttggcaagtactaaaagatgatgatctcagatatacctatg

SEQ ID NO: 454365 - DNA, 122 bp, Homo sapiens
cagccacccctgccttagcatacatacgggtcccacaggggtccttcgacaccagctcatcgtctgggttccaccatccacccacgcactcatttggcagctatcaacggagtattcacagt

SEQ ID NO: 454366 - DNA, 122 bp, Homo sapiens
attatcctcatctgacacagagaaacagactcaaggggtcacagcccttgctgaagcttacgtggccgtgttcgcgttatctgccgctgcataacaaagcaccccaagcttagcagcagtca

SEQ ID NO: 454367 - DNA, 122 bp, Homo sapiens
ctcaagcaatcttcccaccctggccttccaaagtgttagggttacaggcgtgagccagggcgcccgacctgttattgttactattattgctgctgctgttgtgattcccgtgttaagaagag

SEQ ID NO: 454368 - DNA, 122 bp, Homo sapiens
cggctgcggaacgtaacaggacagggtctcctccatccccgattacccggagcggcggcgcggtggcccaggttgtcctctcggagagcccttcacgcccaagggggatttcaggcggctct

SEQ ID NO: 454369 - DNA, 122 bp, Homo sapiens
tccggtccgccggattatgaatgacggccggcgcgagtattttccacataaggtggctgtcgtttttctcctggcgtctgtggaggcgagtggtctgcgggcagcagctcccagaggcagcc

SEQ ID NO: 454370 - DNA, 122 bp, Homo sapiens
tccccggagtcggggagtcggcaggtccggggcgagggctcagtgaggccggcggagggccgagtcccagcccgggagcgggagccggggacccggcgcgcagggcggaagctcccgcacaa

SEQ ID NO: 454371 - DNA, 122 bp, Homo sapiens
accaacatcagctcatttactactcacaaccagcctaggaggtgcacgtaaccacactcccgacaggtgagctggctcagcagggtaaggcaactcctctacatttagtaagtattcatgtg

SEQ ID NO: 454372 - DNA, 122 bp, Homo sapiens
gataatataaccggttaggtcaggaggggtcgatctttaattaccaggcctggaatgcatcgccgggctgtctgactactgatttcacttctgtctttcttttaactcctacattttctttg

SEQ ID NO: 454373 - DNA, 122 bp, Homo sapiens
caactacagaaaagattacatttaagtgacattcaagagtttgacttatccacaaaagctcgtgaactagtaaagtctagaaaataccacgtagagcacgttccatgccattataacttccc

SEQ ID NO: 454374 - DNA, 122 bp, Homo sapiens
aatacttataaaacatggaggacaggctcctagttctcacagaaaaagggtttggcacttcggctgatgatctggccgcctaataaaagctcatccccgattggctgccccggcaaatcgga

SEQ ID NO: 454375 - DNA, 122 bp, Homo sapiens
ggccccgacagtgcttgggcacacaaaggctcctggggcgcagctggccctgagatttcccgcgtagaggccactccaggtggcgccgcccgctggtgggcgcggggccgcccaggctgcga

SEQ ID NO: 454376 - DNA, 122 bp, Homo sapiens
tcggtgccttttgtccttgcttcccgccgctccttgaggatgtttaccggctgctggggccgtgccttccaggtgaggcctcggtcattccaggtgcagcctcggatcagggatgacggccc

SEQ ID NO: 454377 - DNA, 122 bp, Homo sapiens
acgcccctcccgcgctcgcgaaatccgagacccgccctttccggaagttttgacactgtgcgccccgagtaatgtgatggagagggtaatcatccggtccgttatctaaacccgtcactcca

SEQ ID NO: 454378 - DNA, 122 bp, Homo sapiens
gtttcggtaggagggtctcggggctgctgcctaatctgaataactgaatcaaggttctcccgaaggttcttttcccactcttgttgcggctgagaggtgtccttttctccaattgtattgac

SEQ ID NO: 454379 - DNA, 122 bp, Homo sapiens
ctggtacatcaatggcgcggcagtgcagccggatgacagcgactggactgtcaccgccgacggcagtcaccacgccctactgctgcgcagcgcccagccccaccacgccggggaggtcacct

SEQ ID NO: 454380 - DNA, 122 bp, Homo sapiens
ttctatagtaatgacgaatttttgatcagacattaggtggcactaaagaagtcaggacaacgactacgtagtgttctataacaatcatgagaaattttagttctagatagcagagtggcgca

SEQ ID NO: 454381 - DNA, 122 bp, Homo sapiens
cagaagagaaacaaggcaaggtacaggcctggtccccagctctggctttctgcctctccacgtgctcatggcctctcccaggctaactctaagcagtgtcatgagtctgagccaggtgggag

SEQ ID NO: 454382 - DNA, 122 bp, Homo sapiens
cgggccgccctactcggccatggctcactttcccgagagtgaatgcttccaggatttttccgaactggagtaatccccaaagtgagcaataaagaaacgagagtcaggaaatgctgtgggaa

SEQ ID NO: 454383 - DNA, 122 bp, Homo sapiens
cctaaaactcgggggctggatccacttttcatagctgtttaataagaactccgggcagttcgtattacttctttctcagagtgcttggtggtttaagttaaagcattttcctctctcgcctt

SEQ ID NO: 454384 - DNA, 122 bp, Homo sapiens
cagccctggatatgcctccactgtggagggaagcattggaactggagttgtgcacagcaccgcagctagtgggcctggctgggggtgcagaagggcagggtagttctttccatttccccttg

SEQ ID NO: 454385 - DNA, 122 bp, Homo sapiens
tgtgtgggggatcccaccccacatttcccttctgcattgcccttctgccttagcagaggtcgtgcatgagggccctgcccctgcagcacacctctgcctgaacatccgggtgtttccataca

SEQ ID NO: 454386 - DNA, 122 bp, Homo sapiens
ttgtaccagtagcaagaatatgctcatgatgtttataattgttctcgctggagttaatcccggaagcatttctttttagttcacagaggccttatataaattactttttactttggcacagc

SEQ ID NO: 454387 - DNA, 122 bp, Homo sapiens
caggtgcatgcacacgtccacttccccacctggcaggtgccggcatgcaggatgtctgtgcgtgtgccccttgcactgactcccttgaggctggctgtgcagctttggggcatgtgtccaag

SEQ ID NO: 454388 - DNA, 122 bp, Homo sapiens
cggcaccctatacctcagggacttgctttggagtcatggattaaagacctctctgggcagcgttgagaaccagcgaccctaaacttggctgcgtttccatggtgtcgatcgcggagccgtgg

SEQ ID NO: 454389 - DNA, 122 bp, Homo sapiens
ttgcttcctctctaatcccaacaggttctggggctgagcgcagcttaagaacagcaaggtcggggggttggcattgcctgactgtccagcttaagcctcgtgcatgcagagctccacgtacc

SEQ ID NO: 454390 - DNA, 122 bp, Homo sapiens
ccctcacccgggtaggcccgcgtgggcggcgcgggagggccggcccggcaggcataggatcgaaaccctggagccttcccatgttctcctggccgcacgagaggagctcaccctggccccat

SEQ ID NO: 454391 - DNA, 122 bp, Homo sapiens
cctgaagatggatcctcacgcggtggagatcagccgggagagccttctgctgcaggacagcgactgcaaggcgtctccggagggccgcgaggcccacaaacacggcctggccgccctcagaa

SEQ ID NO: 454392 - DNA, 122 bp, Homo sapiens
tttctgatgaagggtcagctttatacacacatgggtgagcagctttgccactgtatgattcgaaaggcaatagagaagagtcagttgtccagaaatatcacaagtgccacagagtctgaact

SEQ ID NO: 454393 - DNA, 122 bp, Homo sapiens
cgcagtttgccctcgctccgaaggctttgcgcacaccgggctctgtgaagccgctgctcccggggacagagcctcgaattttattttattctgaagcttagctttgtaaacccaagtgcaaa

SEQ ID NO: 454394 - DNA, 122 bp, Homo sapiens
tatccccgggtcttcgcgaagggactgatggcaagtcacttttttccgcggggtgacccacgcctacctcctgttccacgccgtttttttttttttccttccacaggtgcctcttcctcctc

SEQ ID NO: 454395 - DNA, 122 bp, Homo sapiens
gtggagcccttgggttcccgcagaaccgactgggtctccagtagtctctgaggagccgctcgaccttctcccgaccctggatctgaggcaggagatgcctcccccgcgggtgttcaagagct

SEQ ID NO: 454396 - DNA, 122 bp, Homo sapiens
ggaggagtaccaagagatgaaaaacaggcagcccacgccggccatgccggtgactgctctcgcggagacagagaagaaaccgcaggtctggccggcagccagggtgagaatccccagcgcca

SEQ ID NO: 454397 - DNA, 122 bp, Homo sapiens
acgccccagctaggaacacagcacccaacacggcgcaggtcctcagtaacattggctgaacgcctgaaccagcgccagcctgctctctctcactgagctcctttctgtgcctccagcaggtc

SEQ ID NO: 454398 - DNA, 122 bp, Homo sapiens
ccgcacctgtcggacgaggcgctgatggggctgtcggtgcgcgagctgaaccggcatctgcgcgggctctccgccgaggaggtgacacggctcaagcagcggcgccgcacactcaaaaaccg

SEQ ID NO: 454399 - DNA, 122 bp, Homo sapiens
aatggtacttggaagagagcaaaccctcaataaatgttagctagaatttgcagatgcatacgctttgatttttttccccaaagttcccaacagatacatagttagcaagaacaaattttatg

SEQ ID NO: 454400 - DNA, 122 bp, Homo sapiens
cccacccttactctggggttctctagggctttctgcctagcaagaggaggaaacaaggtgcgaatttcagtcctctggtggtgttcactcacttggaggcctggaggtggactgccctacat

SEQ ID NO: 454401 - DNA, 122 bp, Homo sapiens
aagcaccaaactaggcagctggataatgggagagtcggctggttgtgagcatgctcgcgccgggaacagatccaccctctgttattcctctgaataaatataaatcacgatcagaaacccaa

SEQ ID NO: 454402 - DNA, 122 bp, Homo sapiens
gccatcttaaaacatttctgaacttttcatttacttctcttctttgataaaaatggtattcgagtttggcccgtgtccacaaatgatcacttagagtagtaattatagaatcttacggcatg

SEQ ID NO: 454403 - DNA, 122 bp, Homo sapiens
tggtggaaacatcagaagtctgattcaaacatggtgagcttcagatgcccactgaatgtccgagagcagcagatgtcaaggagaagctcaggtgcaccagtctggaattcaaggggaaggcc

SEQ ID NO: 454404 - DNA, 122 bp, Homo sapiens
ccgcgcccagcaagcaccacaccctcgctggcaggaggcccgtggcattcccctcctacccggtcctagcacacccagggctgcccgcacagcacggctgagcagtgagtccagaacgaaca

SEQ ID NO: 454405 - DNA, 122 bp, Homo sapiens
ctcaggctggctggcttctgggggacaatgtccttccagttggcccctgccaacttctgacgcaggcagggaaggttcaagccccagcatgcccagaagctttgacctgctcacctgggagc

SEQ ID NO: 454406 - DNA, 122 bp, Homo sapiens
tctcttcccccatcccaccgccccccgcgcgaggctccacaggctggcacacaggtcccacgtgggatggtggaaacaggaagcagccaccgtagttgtgaccaacaaagttttaaatgggg

SEQ ID NO: 454407 - DNA, 122 bp, Homo sapiens
ctagcggtggtatcaaatggctatcaggggcggggcctcaggggcctgcccctgcctccccgccctgcgtttggattccctccagcattccgggccagggcgcgggaggcggaggccgagga

SEQ ID NO: 454408 - DNA, 122 bp, Homo sapiens
ccggtgatttcagatggggctccccggggtttcgatgcagtgtttaagcactcgagagctcggctgcttaatgaaggagttaatctgtgggacgtgcggtggctcagccagaactgccaccc

SEQ ID NO: 454409 - DNA, 122 bp, Homo sapiens
tgagtagagcgcggagacctggctggggcgtcgggccctgcccctttctttgtctgaggccgacttccccgagcgttctccgggggcgagggctgctccttaggtccctgtttggcccctca

SEQ ID NO: 454410 - DNA, 122 bp, Homo sapiens
ggatttgtggtttttacgtggcaacattacaccacggtggctacggcaatgcaggccacgcgtctgatcccaaacgacacctccctgttataaattcttatgttggttccgcaagctaactc

SEQ ID NO: 454411 - DNA, 122 bp, Homo sapiens
ggagggcgcggaggctctaggcggcggaaaggtggggtgcggaggacggggctcacagaccggaagtcgctcagtgataacttgcggagtgggcaccccagcccccaacggggtcagtgcac

SEQ ID NO: 454412 - DNA, 122 bp, Homo sapiens
cgccgacttctgggtggcggaccctgggggcggcggctccgctgactggaggccgcgacccgcgactccgacaacgcagcttggaatgtccagtgggacatgcagttccccaaagtcatctc

SEQ ID NO: 454413 - DNA, 122 bp, Homo sapiens
atcgccatcgccatttctctccgggtctcacgcactcactgtcactatcggcgccgcagccgccgcggctgtctagacccacccaaggccaaccgagctcctgggctgaggaagcaggaatg

SEQ ID NO: 454414 - DNA, 122 bp, Homo sapiens
aattgagggatactgaaattatatgctgtatatgatggtggtgtccgatcttttggcctccgtaggctacgttggaagaagaaatgtcttgggccacactactactggtagcgcaaaaaatc

SEQ ID NO: 454415 - DNA, 122 bp, Homo sapiens
ttatgcctcgaattgggatctgcccgggagctgtggatggacccgcttcctctcagtggccgggctgcactgatttcctttaccaaatcgggattctgttaggaaggaggaaggggaaaacg

SEQ ID NO: 454416 - DNA, 122 bp, Homo sapiens
ggggcgcgcggctgtcacccagggcggggcggcgcgggcgttgccacgacgcgggccgcgcgcgtccctggcagccaacccgtccacgtcaaggtttgtttaataatcgccagggtatctat

SEQ ID NO: 454417 - DNA, 122 bp, Homo sapiens
gtgcaggggatatagaccaaccgcttgtgaaggctgctggttctgttagaagcccgctttcgattgtcagtggctttgaggcaaaggattttggaagggaaagcaaagtgattgtctacgaa

SEQ ID NO: 454418 - DNA, 122 bp, Homo sapiens
tctgacaagatcaggatctgggtctgtgagaggccctgtgtcccctacattctctacgcacgaccgagggccattcttccctcactgccggcctctcccagtccccaggagaaagggctgat

SEQ ID NO: 454419 - DNA, 122 bp, Homo sapiens
caaatcccccagaggtctgaaaaggttgaaaagatatcattatcccttctccctcccccgcgtctttcacccagagctttatgtttaacggggaaaatccagcgcctggtgttggccaaacc

SEQ ID NO: 454420 - DNA, 122 bp, Homo sapiens
gggggtgagaaagtagcaaactagtctgcggccaaactttctctgtggagcctcctacaccgaaaagggtttgattggaactctggaagcccggacgcagaaggtgctagggctcccgtcgc

SEQ ID NO: 454421 - DNA, 122 bp, Homo sapiens
gtagtaaatttgcgacgttgggatgggagggcaccaagggttggtagtaaattggagacgcgggcactctcgggcagggtttcccgaagacactggcgtctaaaccccgccttcctttctca

SEQ ID NO: 454422 - DNA, 122 bp, Homo sapiens
cacagctgcccccaaaaatgagtctgcacagcctggtgcaatgcagctgcagcctgtcatcgagtcaattgcattgtcgtccgccgctctcctgatgtagttctgtgtttgtccattttgca

SEQ ID NO: 454423 - DNA, 122 bp, Homo sapiens
tccttaatgaacttattctccctcctttttcccctgcatcattttatcttctttcttatccgctcctcaaatagacatcaattggtgttaaagtgttggacaagtgagccctacaagaagcc

SEQ ID NO: 454424 - DNA, 122 bp, Homo sapiens
caagaaaggggcggggtagcggaagcagagggagcgagacaggcaggggtcagatgggagcgttataacacccaggagaggacttcaagttctccttggctgattggaggattctgagcaga

SEQ ID NO: 454425 - DNA, 122 bp, Homo sapiens
agccgcctgctgctcgcgcgctgcagagattgatgcccacccaccccttttccgggcaggcgaggattagacagggtccaaccccaggggacgctggccttcaagcccaccaacaactggtc

SEQ ID NO: 454426 - DNA, 122 bp, Homo sapiens
aagcgctcatttggatcacgacccggggttcgccccacccaacaccctgcgactaagaagcgcttaaacaggaaacgggagcccttccaaaacagcttgaggctggttggaagccaggaaga

SEQ ID NO: 454427 - DNA, 122 bp, Homo sapiens
aaggacaactgcgtgtccacgtgggaaatgaaggtcacccgactcacaccacaccccagccggctcagacactgaggacccacaagtgaacgggaaaaccttaaaacctctagaagaaaaca

SEQ ID NO: 454428 - DNA, 122 bp, Homo sapiens
ggtgtgtgaactggcatgacagcctaagtaagacgcggaatgtgggtgccctggaggtcccgcaaggctcttcagctctcagtttcgggagctcaagccgcaccgctgctttcacagctcat

SEQ ID NO: 454429 - DNA, 122 bp, Homo sapiens
tgaggccgcgcggagctgggcgactggggcgaggactcgcgcacaggtgagtactggccccggttgcggcatgccaggcaggccagggtcgctcgggggcgggcaggttgggtttttgctca

SEQ ID NO: 454430 - DNA, 122 bp, Homo sapiens
gctcgactcctgttgcgcatgctcagcgcgctgcccggctggggacccgcgcacctgcagcgcccgctgctcggccctgcatcctgcctgggcatcctgcgcccggccatgacggcgcactc

SEQ ID NO: 454431 - DNA, 122 bp, Homo sapiens
aggggccgtgacctgtgggccgcgatcctggtctcagtcccagctcctccctgcactccccggagcttgccaggactgcagccggccctcgtgcccccggagtttatttgcacctcactcct

SEQ ID NO: 454432 - DNA, 122 bp, Homo sapiens
gggcagcccccccgccgtccgcacccgggggccgggtcggtttgggggctggccgccccccgcccggcggccgctttcctacccggtctggttccacttgacaccaaacgccattactgagg

SEQ ID NO: 454433 - DNA, 122 bp, Homo sapiens
aggtttcttactgagtaattcgtagtcatttataaataaacaaaaaagtataccaaatagcggatggcttaggctttctggtagggagttaggtgcctttctaactccttgtccctgcaact

SEQ ID NO: 454434 - DNA, 122 bp, Homo sapiens
gaagtgcagaccgccagtcccaagaaaacactacacttcagctgctgcagccccagcaaacgccgaactcccgggaaagcaaccggtctgacctcacttcctgtcgccgagcggaagtgacg

SEQ ID NO: 454435 - DNA, 122 bp, Homo sapiens
aaacaaaggaaaactaaacgggaggtgtcccaagggtataaactacatagcccactcctgcgtgcttgccgctgccattgcaggaggggcaacttctacaccccatgtgacattcactaagt

SEQ ID NO: 454436 - DNA, 122 bp, Homo sapiens
tcttcactgatgtgtttggtttattgttccaagaatcggagacagagaggttaaaatctccgactatgattgtgggttgtctattgatgtttttggtctattctaagaatcggagagagaga

SEQ ID NO: 454437 - DNA, 122 bp, Homo sapiens
ttattcattactactcctgccacttcttctgtctgcagctcatgctgtcctgtgtcagtccgtacttaggggcagagaggcaggaaggtggggctgtcatttaaactctgtgttttctacac

SEQ ID NO: 454438 - DNA, 122 bp, Homo sapiens
ccatccagcaccctcgcatccaacgtcgcatcagtggacccacgaaacccgggactgcaccgcaggatggcctgaggggggaagccatccagcaccctcgcctccaatgtcgcatcagtggt

SEQ ID NO: 454439 - DNA, 122 bp, Homo sapiens
gagtgggggaggtggagtgtggggcggggcctcggggcctcccgcgggcggggcttagggcggcgtggcccgggttttgagatgtgggcgtggacccggaaggcggaggaaaggggccgggg

SEQ ID NO: 454440 - DNA, 122 bp, Homo sapiens
gtaggctgtgtggctgaaacactgcggatgtacccaaagctctttataaagtcaagtcaacgatgtggggctgagagagagaaaaatgccaagagtgattctccagactccagcctggaata

SEQ ID NO: 454441 - DNA, 122 bp, Homo sapiens
ggcagaggacgcgctccttcctgcgggctgcctgggcggtgactgccatggctgcaggtccgcgcgcggggcggagtcccgaagatgcaacggcagaagcagctcagggataagtgctgacg

SEQ ID NO: 454442 - DNA, 122 bp, Homo sapiens
gcgggcactcgcggtcaaaggcaggatttccgtcggggcggcagcaattcccggatccagcggggagcgcgggccgagaccgccgcgggcgcggagggggcgcccggagaggcctgtccctg

SEQ ID NO: 454443 - DNA, 122 bp, Homo sapiens
ctgcggtctccatgacggtggccgtgttcttcagctgcgccttcactgccttctggcctgcgctcgccctctaagtcttcaccatcaccaccgagccgttgcacgctggtcatcatcttgct

SEQ ID NO: 454444 - DNA, 122 bp, Homo sapiens
ttttacaggttattattatgaaaactttctgactcctcacaatttaagtagcctgagcctcgggttcttcatttgtaaattttttttttttgagacggagtcttgctctgttgcccaggctg

SEQ ID NO: 454445 - DNA, 122 bp, Homo sapiens
cagcagaatatcacggacacgcgttagaaacttggggacccaccctcgaccaagtgaattcgcatctgtgttgtaggaaggtcctcaggtgattcacaaacgcattcgagtttgactgcggc

SEQ ID NO: 454446 - DNA, 122 bp, Homo sapiens
gacctcaggtgatccgccgcctgggcctccctaagtgctgggattacaggcatgagccaccgtgcccagccgaaaaaatacatttttataaagtaggcattcacctcagaaatcctttgata

SEQ ID NO: 454447 - DNA, 122 bp, Homo sapiens
gtggcccttcagcttcttttgggatagcacagcctgtcccctcgttgcctcccccaactccgtgaaggccacagtcatatttcaccccagccctggcttggggctcaggcaacacctcattt

SEQ ID NO: 454448 - DNA, 122 bp, Homo sapiens
aacctccgtgtgtcgttggcaaagaggagcgtgtcctggtccatgatgcagatgcagacacgggtagaagaggcagcaggtttgatgccgtcagcttttccgctaaagtggttaacccgggc

SEQ ID NO: 454449 - DNA, 122 bp, Homo sapiens
tggtgtcttttcctcccgggaatgagagctcccttccattctcagagtcccctgggtctgcgcgcagggagggcaccggggaatcggggaagggaggggagagggagaccagcagaacaccc

SEQ ID NO: 454450 - DNA, 122 bp, Homo sapiens
agatccagagaactgctcccggcccacggggctgccccaacacgtccctcgcactcggcccgcctgaaaataaagtctctgaaatggaacctggggctgaggatgaagccccccgcaggtgg

SEQ ID NO: 454451 - DNA, 122 bp, Homo sapiens
ctcctccacacacacgcgccgctggcacctgtttgggcctggccaggcaccccctgggtccgcggtgtcaccaccctgccttggcaaacgagggcagtaataggaatccgaggagcaccgtc

SEQ ID NO: 454452 - DNA, 122 bp, Homo sapiens
tcactgcagcctccgcctcctgggctccagcgaccctttcaccccagcctccccggcagtcgggaccgcaggcaccgctcccacgcccggccaatttttgtatgttttgtagagacgaggtc

SEQ ID NO: 454453 - DNA, 122 bp, Homo sapiens
gccggcctgctcgcccatcctccggaagcggtctcgctcgccaaccccgcagaaccaggacggagacaccatggtggagaagggctcagatcactcctcggacaagtccccgtccacaccgg

SEQ ID NO: 454454 - DNA, 122 bp, Homo sapiens
aggccagcttgggcaatatagcaagaccccatcactataaagattgtttttggttggccacggtggctcacgcctgtaatcccagcactttgggaggccgaggcaggcagatcacttgaggt

SEQ ID NO: 454455 - DNA, 122 bp, Homo sapiens
cctcctctgcactcctctgcctaagtcacggcccaagccctggacacgtaggagtgtaggcgggcaggggcaaggccaaggaaggggtggagttgtccaatgcagatgttaaggtccaaccc

SEQ ID NO: 454456 - DNA, 122 bp, Homo sapiens
cccgactctctgctgccccttcctggcctctggtaaccacaattcttctacatcatgagacgcacttttgcagctcctacatatgaatgagagcaggcactacttgtcttcagagagcattt

SEQ ID NO: 454457 - DNA, 122 bp, Homo sapiens
gcctggtctgaatcactcactcttcttttttcttctagtcgcaattgaagtaccacctcccgagggtgattgcttccccatgcggggtagaacctttgctgtcctgttcaccactctacctc

SEQ ID NO: 454458 - DNA, 122 bp, Homo sapiens
caggtcccgagccctgccccgcgggaaggcagctaaggctcggtgagaaatcgagctcagcgccgatgggctggcactgctgggggacccagtacaccctccgcagccgctggcccgggtgc

SEQ ID NO: 454459 - DNA, 122 bp, Homo sapiens
gatggccaggcaggtccgcggccgccccagccctgccccggaggcgccccgaggagggctcgggccccccggtgtcattgtttgctaatttcctgagctgccctccgacttgtttacgttaa

SEQ ID NO: 454460 - DNA, 122 bp, Homo sapiens
gggcctccagccagcgctggctggctttggaagcagcggcaacacattcacctttaaaagcgtttctgctggaagaactgcaaatatcagtaagggaaaagattgaagttaaacttacaact

SEQ ID NO: 454461 - DNA, 122 bp, Homo sapiens
ttcccaaacatgaagacctctctgttgctttatgttgtacatgccccatagccatcccaacgtcctccccagtcctctcctggcaccagcaccttagaagttgttggcagaaggcacttaaa

SEQ ID NO: 454462 - DNA, 122 bp, Homo sapiens
ctgccgccgctgccacgtggctgatgaacagacaacaacaggcccagggcagggcagggccggttccgaggagggtggtcctgggctgggctgaggcttttgggagcaccgtgggtactggg

SEQ ID NO: 454463 - DNA, 122 bp, Homo sapiens
ctgagcagttcgactgtgccatcaacagccgcattgacgtgatggtccacttcgacctgccgcagcaggaggagcgggagcgcctggtgagactgcattttgacaactgtgttcttaagccg

SEQ ID NO: 454464 - DNA, 122 bp, Homo sapiens
gctctgctggtgctggaaggaggaccccgggtagtggccgatgacctcgctgtaggtgggcggcggcccctccatgcgcccgccgctgccgtagcacgtggcgctgatgcccgagttactgc

SEQ ID NO: 454465 - DNA, 122 bp, Homo sapiens
tcccagggggaggaggggctgcttcacttgggaagcgtggggatggaattctcagccccccgatgactccgaggccggccacctgcctggtttctggccggacaccggacttcccctggaag

SEQ ID NO: 454466 - DNA, 122 bp, Homo sapiens
tggtaaccctgagctctgtggttggcagtggcttcatctttccagcccacacagagacagcgaagcctaaaagctcctctaccttggaggaggcaagggttggggtcactgcggttccctac

SEQ ID NO: 454467 - DNA, 122 bp, Homo sapiens
ccgcggcggcgcgcccaggtgtccgcccagcagtggccgagccgggtagcgatccccacgcgcgtccccagccccctgacctcgcgccctcccggcgcgcccgctcattcgctgccgggccg

SEQ ID NO: 454468 - DNA, 122 bp, Homo sapiens
ccagcagtggagcggtccgggcaccaccaagcgctttcccgagaccgtcctggcgcgatgcgtcaagtacactgaaattcatcctgagatgaggtgggttggcgactaaggcgcaccggtgg

SEQ ID NO: 454469 - DNA, 122 bp, Homo sapiens
ttctccctctaccataattacgtatgctcttctctggtacatccttagcccttgtgtgtgcgatttttatgatgattgttctcaaatctctattttcatcaccaatctttttcccaagtctc

SEQ ID NO: 454470 - DNA, 122 bp, Homo sapiens
aactcctgcctccctctccccccggccgaggtctgggagatgagaagggagcgcgttccccgggaagggagccccccgcgagccccagccggctacagatctgggagggagccgctcccgtc

SEQ ID NO: 454471 - DNA, 122 bp, Homo sapiens
cagaaagttagaagccagattttctaaaggtataacaagcatctctctttgggtatccctcgccttagccagcccctgtgggtccacaggaattcagaatcggcttccggtggtgctggctc

SEQ ID NO: 454472 - DNA, 122 bp, Homo sapiens
caacctggaacaagaccagctaccagcctagcttcatccgctacttgcaccaaccagtcccgggttagatcccaaatgctagaagccagggatgcccaactctgggtggccccagtcagaac

SEQ ID NO: 454473 - DNA, 122 bp, Homo sapiens
tagggttaaactgttcccagatgcgctcaaattcttccagaaaaagccgcacgtactcgtcgtcctccgtgatgagaacattctccctgttgttctggatggcttgcgtggtccagttgagc

SEQ ID NO: 454474 - DNA, 122 bp, Homo sapiens
aggcccagctcttccatgaacttgcagatgacctacaaaaatcattttatatgtgcttgccgttctctgtgttaatcagattatgcttactgaacgagcgaggttttcctccaataaaaatg

SEQ ID NO: 454475 - DNA, 122 bp, Homo sapiens
gtcttgctaccgcacactcattgggtctgtgcgtttctctaatcaagctgtaacactcgccgctgcggtccacagcttcattccttgaagcccgtgagaccacgaacgcttcaatcgagaaa

SEQ ID NO: 454476 - DNA, 122 bp, Homo sapiens
atgtcttggtttgatctctttatgtgggtattcaccctcaggtctcacttccccattcatcgttccactcctctgcattcttaaaacatctctgctcacctcttgttctacataattgagac

SEQ ID NO: 454477 - DNA, 122 bp, Homo sapiens
cgactcacaggcggcctgactcactcctttgtttctggaaaagatctatctgtactagcccgaggcggaattcaccccgcccgcactcatcagaaatcgtttgcttattctctgcgcccctc

SEQ ID NO: 454478 - DNA, 122 bp, Homo sapiens
gctgaggtgggtgtatatcttgagtccagtttgagaccagcctgggcaacatggagaaaccgcattcctacgaaagtacagaagttaggccaggcacggtggctcacgcctgtaatcccagc

SEQ ID NO: 454479 - DNA, 122 bp, Homo sapiens
cctgcgggtgccggatgtcctctctcccttcctcttgccctcggccgccaggggccgctgcgtctcggctgtgcccatccgttcagccgagcgcctggcactgtcccgaaggaggcggcggc

SEQ ID NO: 454480 - DNA, 122 bp, Homo sapiens
caacatggtgaaaccccatctttactataaatacaaaaattagttgggcatggtggtgtgcgcctgtggtcccagctacctgggaggctgaggcagaagaatcacttgaacccaggagacag

SEQ ID NO: 454481 - DNA, 122 bp, Homo sapiens
cactcggtgagaaccagccctagacccccgcagccctgtccaaacccctcggctccgaggcgtccctgtttccaggctccagcctccggagccccacgcagtgccactcccctcccccgggt

SEQ ID NO: 454482 - DNA, 122 bp, Homo sapiens
ggaaaaaaggacaatccaggtaacgggaagagcataaacaaagggcaaggaggcaggcgacgcagcctgaagttgtgatagaggagtagatcctaatgtgccttttaagccaactgattttt

SEQ ID NO: 454483 - DNA, 122 bp, Homo sapiens
agttttcaaactccaggaaagcatactggacctagtgtcatggaaagtggatcatttttgcggaggctctctgaacctcgcagtatccaaggtttccaggctagctggactgtgtcttgcca

SEQ ID NO: 454484 - DNA, 122 bp, Homo sapiens
atggcaactagccacccctagcacccggctgccacccaggcgtcccgaattaaaattgagcgcctcactggaggccccatagtgttattcaaaggccacagtttattcccacttctgcagct

SEQ ID NO: 454485 - DNA, 122 bp, Homo sapiens
ctgcatgggaaagcccaagccagcacctgccccggcacctctgcatccacatggcagctccgtctacagcccgagggccccataaccagccagagtggccacgcttgaagcctcacggggct

SEQ ID NO: 454486 - DNA, 122 bp, Homo sapiens
gagacctcctcgctggagaaggtgtgggaggcccctgagggtgaagttccccgggttgctcgagccagagtctgcacagtcatagggcaagcagaaaattctttcgagagggtgggcgctca

SEQ ID NO: 454487 - DNA, 122 bp, Homo sapiens
ggggtcccgggggtcggcgcgtgagtccctctgaggtctgggtgtctttctgggactgtgcgtctgtgagatctcggggtgccagccccacaggctgcgagtgtgcgtctgtgttgacctcc

SEQ ID NO: 454488 - DNA, 122 bp, Homo sapiens
ggaaagggttttgaagggggttctaagggggagtgggcgcctaggactccctatgggagtcggtgggttataccttgactgccgttgatttttatttaactgtttagcttagtgactcaagt

SEQ ID NO: 454489 - DNA, 122 bp, Homo sapiens
ttggctggggctggaagaagtggcagcagtgctggtggccccggctgaggctgttatttccgcaggtagcgctgcgccaggatggccgtgtccaaggaggtcatgggctgtgcgtcgtggcc

SEQ ID NO: 454490 - DNA, 122 bp, Homo sapiens
tctcgaccgccgggacccagggctggcgctgggttcttgggagagtacaatacaggggatcgcgaggaaggcgcccccagctggggcccgcgggcggcgggagttgggggtggggggtgcca

SEQ ID NO: 454491 - DNA, 122 bp, Homo sapiens
caggatgacatggggggaggcacctacctggccgccgcagggtgatggcaaggactattgcggcaatgaccaccacagacacacaggtaatgccggcaaacacccacttgacctgattcttt

SEQ ID NO: 454492 - DNA, 122 bp, Homo sapiens
tccaggcgacgacgtctggagggtgatctctccatcttctttctctcggttcacacgccacgtgtgcaacatcggagatgctcataaaataacccctggcccgaaagggcagtagaaaacgg

SEQ ID NO: 454493 - DNA, 122 bp, Homo sapiens
gggcttcctaactttcaggtgtcagaatgtgtggcccagcccacaggggcacggggaacacgctccgtacgggcaccgcaggctcggctcagaaatcccccgccacgagtgtccccagacgg

SEQ ID NO: 454494 - DNA, 122 bp, Homo sapiens
ctctccctgggggctggggtcttccactggttaccacccgcagcggtcctggaggcaccacgcatctctagacaaaaggggaaacaggtttgggggtgagggaggttgcttcagccccagtc

SEQ ID NO: 454495 - DNA, 122 bp, Homo sapiens
tgccagtggcgtgaggccactgttgctccagagctccgtatttacagcaagctcctcacgcgagtccccggcagccacggcccctccaaactcggggctggggaggggctcaccctggcgag

SEQ ID NO: 454496 - DNA, 122 bp, Homo sapiens
tttcaggtcatatgttagagtctaaactgaggaaacctttgtgctaatgttggtaaaagccgtccttgctcagcaggttctcagtggttatcaggtctagaatgatgaccatatgcattatg

SEQ ID NO: 454497 - DNA, 122 bp, Homo sapiens
aggtcttaggtgtatgctgtgtgtgtgtgtgcaaaggcttggggagaaggattggtgtcacgtgcggggcagtgtaaaaaacttaactgcttcccacctgggcacaaaatgaaaagaaagac

SEQ ID NO: 454498 - DNA, 122 bp, Homo sapiens
cagctcccttctagcgtgagggagccgggaggcctccttctggcccggcagtgagagcgtcgccgcccgaccctcccgttgcagcaccggtacagacacgctgaccccgcggccttgtcgct

SEQ ID NO: 454499 - DNA, 122 bp, Homo sapiens
aaggtgatgcagcttcagccttatttactgcaatgctggttttctggagccctgagctgccgatttgtaacttaaagtcctattaccctcaaggcaccatactgtgaggaagcccatgccac

SEQ ID NO: 454500 - DNA, 122 bp, Homo sapiens
tgtgacaggcgccattctgacacacgtgctctctcactcccaaacaccacgggccgcaagcgctcacacccacactcacctgcagggaccacgtgggagaatttgaagggctgatcctgtcc

SEQ ID NO: 454501 - DNA, 122 bp, Homo sapiens
actgcatttaaagaattaacccattttgcccctcactggtctaaaccacagggtgccaaccggacgttaattgctttcatctggtggggttccagacagctcctcagaaggaaggagcgcac

SEQ ID NO: 454502 - DNA, 122 bp, Homo sapiens
tttggggtgaaacctggggtgtgtcaccttctgaattgactcctcagaggccgttggcctcggtaaagggaggcagataggggtatagggaggagggatttctgtctcctcttgtggtttct

SEQ ID NO: 454503 - DNA, 122 bp, Homo sapiens
accgcggcgcgaaccgcagcctaacggcgggggtgggagcccgaaggatgagaggcggggcgggtcttacatacacctgtgggctgaaggctccctgcaggagtcagattcccagttattca

SEQ ID NO: 454504 - DNA, 122 bp, Homo sapiens
accaggccctcatttccgctccgggctgcggcaggcgcctctgcttctcacacggggcgccgggtgggctggtctcaagtttgagacaggctttttaaattctatattgttatttgtattat

SEQ ID NO: 454505 - DNA, 122 bp, Homo sapiens
aacttgtaagatgtgagagtccaaaagcttcctctaaattggactcaaggtcgcgttcatcggcagctgtgatgtaggaggcaccctaggtgtttgccaatggcatttgtctctattggccg

SEQ ID NO: 454506 - DNA, 122 bp, Homo sapiens
tgattggatcatgggggtggtttcttctgaatggtttaacactagcctccttggtattgtcgttgccatagtgagtgagttctcacgagatctgatggcttagaagtgtgtggcacctttcc

SEQ ID NO: 454507 - DNA, 122 bp, Homo sapiens
ggcaggctccaacccggcgcggcccggaggcttcccgggggccaacagcccaggacctgtcgccgatctctacggccctgccagccaggactccggagtggggaattacataagtgcggcca

SEQ ID NO: 454508 - DNA, 122 bp, Homo sapiens
gcggcggcagcaggagcccggcgggcggagagtcggcgacggtggcggccaaggggcatccgtgcctccgctgccctcagccgccgcaggagcagcagcagctcaacggattgattagcccc

SEQ ID NO: 454509 - DNA, 122 bp, Homo sapiens
ccagtcgctcagggctgccagggtaagcggtgaggcgctagcgcgggtgcagcttctctccgacgccatccagctcttctcgcggtctttaccctgcatgggggtgcaggggagtcgcactt

SEQ ID NO: 454510 - DNA, 122 bp, Homo sapiens
tgttcctgcgcagcctacaagctggcttcatcccttcccaggtcgggacctctccctccccggattctggagcagagatgatgctgccaaattggttccatgcttttgtttcggccggagat

SEQ ID NO: 454511 - DNA, 122 bp, Homo sapiens
gctcgcggcttcccgctgggaagcgtagttgttgagatgcgaaaccagtcgaactcgaagcgggtcagaggcatctagtccttcaatgatgctcagataacgcgcaacttctgccaggcatt

SEQ ID NO: 454512 - DNA, 122 bp, Homo sapiens
tgacaattagcaggggcatttatcagagactgaatgtgctccttttttctagccaggacacgtttttcttggagctcagtcctcaaccttggctccgattcccaacctgaacaccaggcaag

SEQ ID NO: 454513 - DNA, 122 bp, Homo sapiens
gtttctttgttctggtgggttcgcggtctcgctggcttcaggagcgaagctacagactttcgcggtgagtgttacagttcttaaaggcggcgccacgtctggagaagtttgttcctcctggc

SEQ ID NO: 454514 - DNA, 122 bp, Homo sapiens
gtccaggctaagtttagaaggctgccaggttaaggccagtggaaagaattcggtgggcagcgaggagtccacagtaggattgattcagaagtctcactggtcagcaggagacaaggtggacc

SEQ ID NO: 454515 - DNA, 122 bp, Homo sapiens
acttgttcggcgtttatttttgtctcttgaaaagatcaccatccatggccctataaatgtcgaagggcatggaatgatgaagtgcaatgtcattattgttatgtatctctcatcgttttact

SEQ ID NO: 454516 - DNA, 122 bp, Homo sapiens
aaggtcccgcttccgggtggctcgcttcgccacctgcggtcccctgcctcggcttgggaacgccaaggacatcccccacggaagcctgggcccacatccccatgcccttgccgcacgtcacc

SEQ ID NO: 454517 - DNA, 122 bp, Homo sapiens
attggatgaattatcaagcaggataagccaagtagcaaagtcttattttctgaaagtacccggttacctgattaaccaaactctggctacagagacaacaactctgaacgagactaaaacac

SEQ ID NO: 454518 - DNA, 122 bp, Homo sapiens
gtgtcagaggagcgtctcaggaggtggcttggaaggtggcagaatgaccaggtgagtgcacggtcagtcatccagcaataggaaagcaaggggctgcctgaggggctggcgagaagggctgg

SEQ ID NO: 454519 - DNA, 122 bp, Homo sapiens
taccgcacgctcagtcgctggctccagaggtgctgctgggggccagggttcactgccgcgcgccaggtgcctgcccgtgaggcggcgcggggctcccgggtggctgcgcgcccagacgcctg

SEQ ID NO: 454520 - DNA, 122 bp, Homo sapiens
gaccgctcattccgagcccgggcgctggacggggcctgcgggcgcaccggccgcctggcgcgaaggatcagctcagcctcctcgctctccagggacgacagttccgtgttccgttgccgggc

SEQ ID NO: 454521 - DNA, 122 bp, Homo sapiens
cccacagggacacacgcagcacacctggggtacttaagcactttaagccatgaataaaaacgactcacccgcacgatgatgcccatacgtttgctttcataggtgaaagggaagatctgtag

SEQ ID NO: 454522 - DNA, 122 bp, Homo sapiens
cttacagtgtgaccaggtcagagattagcctgtgaccagaataagggttcagcctgtggccggaatcagggctcagagtggccaaggtcagggctcaacgtgtgatcaggggcagggctcag

SEQ ID NO: 454523 - DNA, 122 bp, Homo sapiens
gtgagagttgttgcattgaaatgaccataaagcttttcttctccctcgtgctgtcccccacgaacccaggtatgaagtatacagaaggtggggaattaggattctggggctttcccatgcca

SEQ ID NO: 454524 - DNA, 122 bp, Homo sapiens
atttttcctaaattctgttctaattctacagatcaagccctgaaagagttcacctgtccccgtgacactgattaccatctgaacttcctgggtaaacctatcatcattagtactgcattagc

SEQ ID NO: 454525 - DNA, 122 bp, Homo sapiens
tcgtgcgctgagtagttgactcgcccactgcagacctcagaagcctcacgacccggaccccgggagccccagccccgcgccctcagccccgcgtccaggacctgatcctggattgccagggg

SEQ ID NO: 454526 - DNA, 122 bp, Homo sapiens
ctctgatgtgtgctggggtgcccagggcactgggttgacctctgtccccacaaacagcttcgaggttgggctcatgacacaaaacgcacagattcacggctttccttcctgacactgcaggc

SEQ ID NO: 454527 - DNA, 122 bp, Homo sapiens
gagacttcctcacctctgcgttcccagggatccacaatcttctatttgtaaaatgattcccggttgtcatggagaccagggcaccgcagtggagctggaatgttaggtggggtccaaggttc

SEQ ID NO: 454528 - DNA, 122 bp, Homo sapiens
tcccgagagctcccaggccaggcctcacagggctccttccctgtgggagcggaggtttgccgcgagccatcgcccggcacgggacacgtctcagggggaaggaacacgttttctctcagact

SEQ ID NO: 454529 - DNA, 122 bp, Homo sapiens
taaattagcggcgagcctcgccagacgctttcctccttgccttctttcgccgaaagggggcgcgctcctcccaggctgcgctggtacctatcctgccttcaaaaatttctgggttcctgcag

SEQ ID NO: 454530 - DNA, 122 bp, Homo sapiens
taaggcgcggacaaccaacgaggtgtcaggctcggcaggggattgcttctgtctggggcccggccgaggttgcgttcgtgcctcgcgcgcacacgctccgcgttcactcagccaatccggtg

SEQ ID NO: 454531 - DNA, 122 bp, Homo sapiens
gataagaagtggcttggaactcccattgaggagatgagaagaatgcctcagtgtgggatccggctgcctctcttgagaccatctgccaatcacacagtaactatttgggtaggtagcacctc

SEQ ID NO: 454532 - DNA, 122 bp, Homo sapiens
cggcacagcctcacagcaggcatgttggaggagctaaatatagctcctcagactccagggcggatggtcacccgcccgggctgtgcctccttccacatcacacacgcgcacgcacaaaacac

SEQ ID NO: 454533 - DNA, 122 bp, Homo sapiens
cactgctttgaatggagggtagcaaatggaagaagcagaccattctgagttgctccttgccggcaatgtcaggaggctaccagggcaaaggcagaggtaggaacaatgcttttcctccttga

SEQ ID NO: 454534 - DNA, 122 bp, Homo sapiens
accggggatgactgtacttctcctcatgctcgcagtagaagaagtttgaagcccctagcacggaatctgctctggccatttaacagaaaccaagagaccaaacatttcatggatccgtagct

SEQ ID NO: 454535 - DNA, 122 bp, Homo sapiens
ccggcccaatgtagtatttttaaattatcagttgactaagaacatgtggttattttacaccgagaaaacatgcaatatggggaaattgtttaaggccctggcagagatagattagagtcttg

SEQ ID NO: 454536 - DNA, 122 bp, Homo sapiens
gatgagcaggagatccctaagagaagcgaggcagggaacagaatcttggacagagagaaccgcatgtgccaatgcccagaggggagagagggcatggccgtgccaaacaagccacaggagtc

SEQ ID NO: 454537 - DNA, 122 bp, Homo sapiens
ctcagtggtgtcttttttacagcccagagccgcacatgtcctgtccgtgttccggtcctgcggtgactcacagtcacatcacagtgcaggcagacgctcccctgacagcccattggctcttc

SEQ ID NO: 454538 - DNA, 122 bp, Homo sapiens
ttgcagtcagccctaagccccgaccagaggcagttccagccgccagggtccctcacacaacgctgaaagcaaaatacacgtatttgacgtgcctcagagctgacgaagcacccaaaagcagc

SEQ ID NO: 454539 - DNA, 122 bp, Homo sapiens
gaggcagtttcatgtgatggttgagtccaggctctgcctgtattcgaacccacttattggcggtgtgctcttgggtaggttacttaacttctctatgcctcagtttgtttatctgtaaaatg

SEQ ID NO: 454540 - DNA, 122 bp, Homo sapiens
ctcggcgcgcgccttctgcttgaggtgcaccttgctgtgccgtttcttctcatcgctgcgcgcgaagcggcggccgcacacgtcgcaagcaaaaggcttctcgccggtgtgggtgcgcacgt

SEQ ID NO: 454541 - DNA, 122 bp, Homo sapiens
cccatcccggtggcttcacgttgcacgaagtcagttcaatctggagactgaaaaagcctccgggacgtggggcgggagggtgcggggggagtttgtgtgcgtattttgtggggaggggaaaa

SEQ ID NO: 454542 - DNA, 122 bp, Homo sapiens
gtaaagtgaggaccctttgcctgtaaggctgtgtctccatctcagaaacctatttaaagccgaactttataatggaaacacagccacaacctgctatcagcaaccacgatattaaacaggca

SEQ ID NO: 454543 - DNA, 122 bp, Homo sapiens
gagactgaggggcggcggctgacgagcgaccactccgagcacgcccgccctcgcgctcggcgacgtctggagggctcctcgcagctcccggccccgctcctccggtccctcagaccgcgggt

SEQ ID NO: 454544 - DNA, 122 bp, Homo sapiens
cgtctggttagggagagctccgggggagaggtccgaaagcagcagctggacacaagggtccgccaggagccaccagggggcccggtgagtggggctgggtggtgaggccaggggctgaagca

SEQ ID NO: 454545 - DNA, 122 bp, Homo sapiens
ctcccacccaggtgccaggtcagattcatgggaatgagggcagtgtccaggggataggtgcggttctggcacagccttggtgacctgggggccctctattggcctcaacttaaggaactgca

SEQ ID NO: 454546 - DNA, 122 bp, Homo sapiens
ttccggaaggatttgtttccagctgccagatgaggaaactggggctcgcagagccggcgccgcaggggaggggctgtgcacgaatccagtgggaaacctctctccggagctaagcccctggt

SEQ ID NO: 454547 - DNA, 122 bp, Homo sapiens
gaagcgctcggacatgttgggtggcagctgttcagccagggcacgggctaggggcagggacgggaggctgggcagggcgggacgccaggactggaccggatgagacgcgcaatagatggggt

SEQ ID NO: 454548 - DNA, 122 bp, Homo sapiens
tcctgatgtggggcaggtgaatctctcgttggcttccctgggaggacacctcccctgtggcggatccttctgctgggtccgaagatccctgatgccagatgcttgatctctgatggcggcag

SEQ ID NO: 454549 - DNA, 122 bp, Homo sapiens
tccgtgaagttatcgccataggccggccagggggcgcgagaggcaccggggtgatttccgcgggaatcgataaccaatcggattcccaggccgaacggagcacacccgcccgccctcgctct

SEQ ID NO: 454550 - DNA, 122 bp, Homo sapiens
agagacagaccgagagaggaatggagagacagagggggcgcgcgcacaggagcctgactccgctgggagagtgcaggagcacgtgctgttttttatttggacttaacttcagagaaaccgct

SEQ ID NO: 454551 - DNA, 122 bp, Homo sapiens
tgacatgtctgaatgggcagctcttggtcttagcttgtaggttcagtaaggacacttgctcggggcaccagctttttgctgacatgcagagatggtccccaactatggtgccctgagaggtc

SEQ ID NO: 454552 - DNA, 122 bp, Homo sapiens
accacgttgttaagagcagcagcaatgaggcctggaggctgtgtcaccctcccctggaggcgagtcattaggacatcctggggcccacaaaccacagttccccctgcttccctcttggttgg

SEQ ID NO: 454553 - DNA, 122 bp, Homo sapiens
ttataggcatgagccaccatgcctggccagtcccctcatctttaaagtccccttatctttcgaaggggttaatacttactctgcaatgttaatgtgtgtattatagataatgagtgtaaact

SEQ ID NO: 454554 - DNA, 122 bp, Homo sapiens
ccccaatatcattctctccctcctcctccaactcctccgagcccaggtccgacatggtctcgccccagcctggatcacagccgcagcgcctctagcaggtgggtagcaaccgcctccaccgc

SEQ ID NO: 454555 - DNA, 122 bp, Homo sapiens
tgaccgccgtctacaccatcatggactactggatctttggagagaccctctgcaagatgtcggccttcatccagtgcatgtcggtgacggtctccatcctctcgctcgtcctcgtggccctg

SEQ ID NO: 454556 - DNA, 122 bp, Homo sapiens
gaatttcaccccctaaactctcttaggcataaaagcacagggaggaagcacatcttcctccgttatatgtcatcaaggctgaaggttgacagacagtagggtggaggagtgaatgccacatg

SEQ ID NO: 454557 - DNA, 122 bp, Homo sapiens
ccatctgcagtatcccccacctccagcccgtcctgccctcctgttctccgtctcgcttcccgtcggtgcctccgggatctcacagccctcgcacctcttttgtgacccaggctgtttttctg

SEQ ID NO: 454558 - DNA, 122 bp, Homo sapiens
aaagtaacttctgtaataaattatatcgcatattttttcagataggacagctcaaccttacgatgcctacctgatgccaggtgatgcttattttcttcctaaagtaggttactggtcatatc

SEQ ID NO: 454559 - DNA, 122 bp, Homo sapiens
ctcaagaaggtataaacattgatgggatgtaaatctttgaatatccatggtatcagctcacggttcacacatctacagacccgggtccaggctctggcactgacacataaaggctgtgcgac

SEQ ID NO: 454560 - DNA, 122 bp, Homo sapiens
ttgtcacatgtgtccatgttgtagcgtgtgtccatgttgcagcgtgtgtccatgttgtagcgtgtgtccatgttgcagcgtgtgtccatgttgcagcgtgtgtccatgttgtagcgtgtgtc

SEQ ID NO: 454561 - DNA, 122 bp, Homo sapiens
gaaagaccaacactgctggccaagcaggtgtccagcagggaccactccaaagctcaacagcgggtccggtaacctatagggattagcgattgtcaaggaggttcaaaaattgaagctgctgt

SEQ ID NO: 454562 - DNA, 122 bp, Homo sapiens
cagggggtacctaccactggaacctcctcttttaacaaatgaggaaactgaggcacacagcggttaagggacttacgctaggtcacacagcagtagagctgggctggggcagggggcagctc

SEQ ID NO: 454563 - DNA, 122 bp, Homo sapiens
cctggccttaggcccctgggatgccagtcggctgtggtcaggtggtgcaggcagcagctccggcccgtccgctcccgtggactatgagtctgtctaataccagacccggcacgcagttcagg

SEQ ID NO: 454564 - DNA, 122 bp, Homo sapiens
cactcaacaaatcctatttctattactctgcaaatgcagagaaggaactcagctcagactcgggaggcatgggttcccgtcccccactgtgctattaattctttgtgtgatgctagacaagt

SEQ ID NO: 454565 - DNA, 122 bp, Homo sapiens
ctttccttttgctcctttttttttttttttaaataccaagaaattacagccctgcctacgcggaggcccagcccctacacgccccctttgcatggtatcctgggagatggagttctgtcctg

SEQ ID NO: 454566 - DNA, 122 bp, Homo sapiens
ccctcaccgctccctgctagcctctcctcctcagtggccgccatgctgctccggaagcgacgtcggcctcgacctagatgatgttattaagagatggagtgagtttagatagagaaaaaatg

SEQ ID NO: 454567 - DNA, 122 bp, Homo sapiens
tttgaaggtctacagcttcacttcctaaggctaacaagactacgaatccaccggaaggaacgaacaactccagacacagcatctttaagaactgtaacactcagcgcgagggtctgcagctt

SEQ ID NO: 454568 - DNA, 122 bp, Homo sapiens
cagtaatgaaaaggagctgagttcagaataggaaagtcatcttacatggctaatgaaaaacgctgtagcccttacctacgtatgtagtcctggtatgagagagtacaaagatgagaagacag

SEQ ID NO: 454569 - DNA, 122 bp, Homo sapiens
gccctgggtgcaaccatcaagtacagaaagcttgtgtccaatgaccttcttgtatgcctccgtgaattcctctcacatctttggccatctcttcactcctgtcgaccactacattcaaacct

SEQ ID NO: 454570 - DNA, 122 bp, Homo sapiens
ccattgttattacataaaataaagacacactcagttaacatattgctatgttaaatctgccgacactagcttcaaatgcctgcttgctacagttcttggaatgctggtctgaggaccccaat

SEQ ID NO: 454571 - DNA, 122 bp, Homo sapiens
ttaaattaagtacatatcacatttcacatacaacacatgccagaatttccttgtggcaagcgaattcactgaagacctgcagtgcatcacatcacaatgtggaaaacacagatgtgactttc

SEQ ID NO: 454572 - DNA, 122 bp, Homo sapiens
gcgattcctagactgggtagtgtaacaaccttcaaaggccccttctagccctgaagagtacgatgctgcagtacaatctggctggagacctagcctccagcaaagacccggccggcacttcc

SEQ ID NO: 454573 - DNA, 122 bp, Homo sapiens
gcaagtggcattcagtcagtgattgatatgtatttggttagcccagaagctagtacaccgcgatgctgagacccagaacacactgattggatatttgacagcactaggaaattttatgggga

SEQ ID NO: 454574 - DNA, 122 bp, Homo sapiens
gagaaagcaggtcgctctcggaacggacgtttgtgtgtggtttctgtggaagatccgctccgcggcggcgtgggaggagcagggcctggaggggttgcggccaaacgcgggcttcggtgttg

SEQ ID NO: 454575 - DNA, 122 bp, Homo sapiens
ggggcagtcggaggttgggactgtgtgaactgaagcttgcaaaagaagtaggcgagtaggcgggaacaggtggggaaatgcagatccgttcctagggagtgccctcccttgttggttaataa

SEQ ID NO: 454576 - DNA, 122 bp, Homo sapiens
tgtatgttctgagatactagactgcgttcatattgtagcaccatcatcgtataaaacgggcgcctttgaaaggtttcagtaaacaccttcctcaggaacatccgccagcacttaaattgtac

SEQ ID NO: 454577 - DNA, 122 bp, Homo sapiens
aaatagcatatgaggagggattccagttagaaatgcccagtttcctgggtgtgtgtgtgacgggggcggggaaccacaacgttaattttatccccgacatagggagcgcctgagtggtggct

SEQ ID NO: 454578 - DNA, 122 bp, Homo sapiens
tgttgggagaatctgattgaaaattagaattactttgttttaacttgcagacatgttcatcgtgagtgaatgctggattaaatagaattttctgtgtctgcaacttgtttcatgacaccttg

SEQ ID NO: 454579 - DNA, 122 bp, Homo sapiens
ctgggcaggccaggtgggccagctgggggcacagggcagctggaacaccccccaggtgcccgtgctgccagtcttcttgcagccacctgtggtcagcatgcctggcccccggctgcggatca

SEQ ID NO: 454580 - DNA, 122 bp, Homo sapiens
ccgcccactgaccttgtcctcgggggcgagggtggaggggtgggcccgctctgctaggggcggggagggctggtgaccgctcagtgctacccaccactgtccttggccccggtgctatcatc

SEQ ID NO: 454581 - DNA, 122 bp, Homo sapiens
ccccatcggcggggtccgggccgccaagcacgtcgtcccgggccctcccccggagggggacgcgaaaccccccagggcgggccccgtccccggccccactgcaggggccccctctcccgagc

SEQ ID NO: 454582 - DNA, 122 bp, Homo sapiens
acttctaagatgcccttaattgatctcctccttcttaactacagcgagggaataacaactcggggctggggactgggtatctaagactcgctctccgcagggtccgccggcagggcggccac

SEQ ID NO: 454583 - DNA, 122 bp, Homo sapiens
tatgagtaaatcattggcagtgagtgtgattttttttttttttatgacaggataaatacacgccctctattggggtcaggttttgtgcctgtagttcttccgcctactgtatcatagcagct

SEQ ID NO: 454584 - DNA, 122 bp, Homo sapiens
ggagaatggaattgcttttctctgcaggaaaataaagtgccagctgtcctgcataaaggccgctgaagggatggtccctatagaagtcaaggcttagaacagccaagctcctggaataagga

SEQ ID NO: 454585 - DNA, 122 bp, Homo sapiens
agggcaggggtcaagagcagctggcaagggcggcgcagcctgtggggcccttgggcgcggcgggccgcagctccgggaagccacgtcagcccaccggcgctgcagctgcagccgccaccagc

SEQ ID NO: 454586 - DNA, 122 bp, Homo sapiens
tccagtcttccctccgagctgctagtaaacagtaataatgactctcgtccccttcctgcacggtccttgggtggcatctgcagaaagtgctggttacacgcagagaaaacagggcgggccaa

SEQ ID NO: 454587 - DNA, 122 bp, Homo sapiens
ggttggacgacacttgccaagacgagctggctagaggatggttctccggacctggtcccacgtggttcccaggtaagcccccgcccaggatgcagccccgttgtccatcagttttcttggag

SEQ ID NO: 454588 - DNA, 122 bp, Homo sapiens
agccaacattagagaagtatagaaatctctgctgagactaagccttagtgcctgaactcccgcattcctgcatactcacagctagattttttggtggtcttattattcttattccattgtag

SEQ ID NO: 454589 - DNA, 122 bp, Homo sapiens
aggcgcgctgcgaggaggatgggcctggccggggacccgtggaggatccgcctccagtcccgaggaggtccccgttttgtggctgtagtgatgtggcgtaaaagtcaagtcgtggacttttc

SEQ ID NO: 454590 - DNA, 122 bp, Homo sapiens
ccatcgcacggtaaccggatgagacaggcaatttatgacaccagctgtctctgtcaaaaccggatctcccacacacaccaggggaagccaattaccttgagcccagccctgccagaaaccgg

SEQ ID NO: 454591 - DNA, 122 bp, Homo sapiens
agcctccacaggggccgctgcgggaaattcccgggccccaggctttttgcgcagggacctcgtcttgtccttggtattccagaggccatgaccagactctagtctcataagaagtacagaaa

SEQ ID NO: 454592 - DNA, 122 bp, Homo sapiens
gaaatgtgtagggacaaggacccattccagggaagccaagtgtcggccgcattcaccacccgtcccctgcagtctcacacctgcccgaggaggcagcccagcagtcgggggccccgagctgg

SEQ ID NO: 454593 - DNA, 122 bp, Homo sapiens
gggcgaacggatgacgtaagtgggtttcatttccagcgagccgttaaaaggccggtggagcggcccctgaggggcgctactttgcggcgcggaggagcatcgtggcggcgatgcgtcccccg

SEQ ID NO: 454594 - DNA, 122 bp, Homo sapiens
ttcgggggcgccttttccgccatcctccccatgggggccattgacgtaaggtgagaaggccggggcgcccaggggcggctgactgggtgggttgtgggaagagaccggggtcaaccagggtc

SEQ ID NO: 454595 - DNA, 122 bp, Homo sapiens
ttggggggacaagcatacttaattagctaagacttcttattctaggcttgaccctgtgttcgacatcttttgaatttgtagttgcatgggttgctctttgacgctggttagtgatctggaaa

SEQ ID NO: 454596 - DNA, 122 bp, Homo sapiens
tgcttcttaggcaaaaccaatgtgtgcgaactgtcacacctgtgccactcgcccacaagccgcgcccacaattggccagctgggccgtgcacgtcagactgcctgcctcggctctccccgtg

SEQ ID NO: 454597 - DNA, 122 bp, Homo sapiens
gtggggccttagctttgaactccggcccggacaaacttaaactgcttcgccaccccaacgcgccacagccctggacctaagacccagttagcattgggaatttggggagcagggcccacgac

SEQ ID NO: 454598 - DNA, 122 bp, Homo sapiens
ctcttttgtaaaataaacactttgtactttactgaaagaacactagtgttctttcctttccgttgtgaaaaaagttgtttctgaggaattgaaaccccagaagataactacaacaaaaacat

SEQ ID NO: 454599 - DNA, 122 bp, Homo sapiens
tcgcagagcggcaggagctggggccttggctgaatgcgggccgggctggccaggtggcggcgcggggctggcgtccggcgcggcccgcggaccaggcgaggagtgaacgcggagggccgggc

SEQ ID NO: 454600 - DNA, 122 bp, Homo sapiens
gtctcaaactcctgggctcaagcaatcctcctgccttggcctccccgagtgttggaattacgggcatgagccaccatgcctggactcatcaatgttatcatgaaacgatcttgcacaaaatg

SEQ ID NO: 454601 - DNA, 122 bp, Homo sapiens
gtgttacttctcataactgtgttcatttgttgagatctgtttaactccaaactgtgtgggcgtctaactgttggcactaaggtttcttttctcttgaaattgccagcaaaatattttaccca

SEQ ID NO: 454602 - DNA, 122 bp, Homo sapiens
gagctagcacaggccatggacccagaccggcggagtctccctggggagatggcgaggctgcggtgctggccacagatgtttggcgctgaggtaataatgagcctctcctgaaaaccattgac

SEQ ID NO: 454603 - DNA, 122 bp, Homo sapiens
aggagccatagcttatgagggttttacaaccagaggtaaatggctggaaccctggatctccgcagtgagggctggcctggtaccacaaaaagccagatgaaacccgcttccccttagtgagg

SEQ ID NO: 454604 - DNA, 122 bp, Homo sapiens
aaaggagaggctgcccaatggcatagcaagaattaggagagaaattaatcctttgtaccacgtgactgtaagcatgactggcctgcccactgctgacccattcttgcaggagctcccccacc

SEQ ID NO: 454605 - DNA, 122 bp, Homo sapiens
cttctttgttctcccctttcttaagcacaagctttttccattctacttcatttccacacacgtcagtcaaattcaggcactcatgacattacctctggattatactcttggtattctagttg

SEQ ID NO: 454606 - DNA, 122 bp, Homo sapiens
gtcccagggatgggtgttactccccagccctggcctggccttgggggctcaggtgggcaccggccccgcctgggctgtggagaacctcccgtgccgtctcacaggtgcacgtggctgtgggc

SEQ ID NO: 454607 - DNA, 122 bp, Homo sapiens
tgatgctgaagcttctggccggaaagacatcctttgagaacatatttcctccccagccctcggcccttaagccccagaacgctgccccgccctgggtggaacgaagctgagctccaccctag

SEQ ID NO: 454608 - DNA, 122 bp, Homo sapiens
ctctggtcgagggttggggggagtgtcccctcctccctcggccggagtcacagttccacacgcaggggtccttcctgcccctctcacctggggtcacaacccccctccctcggaggagggag

SEQ ID NO: 454609 - DNA, 122 bp, Homo sapiens
tttgtgcgtgcatatgtgccgggtacccggtggggcgggtgcccagtaagtgctcggactcgcaggggaagcgcccacggggacggattggttgttttttcctgtatgaagcggttggcacc

SEQ ID NO: 454610 - DNA, 122 bp, Homo sapiens
gcggggcccggcggggcgtggcggcggcgatggggaaactgcagtcgaagcacggtgagccgcgggccggtagggcgggagggcgggcgggcgggcgtggggccgcctctcactgtcgtttt

SEQ ID NO: 454611 - DNA, 122 bp, Homo sapiens
cctagttttcaaatctctttagtccacagtgacaaagatctactagtgatccagaagctacgctgaagcccaggttttcctcctcctcctcatcaaaatgttctaaccagagttgtgaatga

SEQ ID NO: 454612 - DNA, 122 bp, Homo sapiens
ggcataggatgacaaagggaagtccacgagtcacatgaagaaagactgtagccatgggtacgcgatcaggaagtcctctgcttgcctccacccccaccctcctttccatcaccctgtcctat

SEQ ID NO: 454613 - DNA, 122 bp, Homo sapiens
attcccacggaaagatcactttggaataggagagaagaaggtgttgacacttttgcccctcgtccagatccttctagactagagtttctaattgaggtttccgagatctgcctaaatcaaac

SEQ ID NO: 454614 - DNA, 122 bp, Homo sapiens
agctccatgtcctccccctacacgaggctcctccctggagtccacgttcacgacctctgccgtgttcagccacacttcttgtcacaggagtttcaggtgtcaggaaagccatcccagggccc

SEQ ID NO: 454615 - DNA, 122 bp, Homo sapiens
tgtatattgaaaatactttttgtttactaaatgctttttacattaattcagtgtgcacttcgtaaggataatgatgatttgagttagtttagtattcaacagcttcctctattcctttatat

SEQ ID NO: 454616 - DNA, 122 bp, Homo sapiens
cgaatcaccatctttgaagagagacagaaaaatccatttaaaccacccgaactaatcattcgaactgcttccaagtcctttaaaggagaatcctagcgagggtccgtaacacttccccttac

SEQ ID NO: 454617 - DNA, 122 bp, Homo sapiens
ggcttcacgtatttagtttcataactcatgatttttcaaaaacttctggtttgaagacaccgattgccgaaagtccattgtgctgcataattacacttggtccacgtgacagcactaacatg

SEQ ID NO: 454618 - DNA, 122 bp, Homo sapiens
ttccaagagcgatgcgagtgtcagtggttcccgaatcactttggaaattggcctttcactcgctgacttcttggaagctacgacaaagcacaggcaccctggtgaatgtggcttttcagaag

SEQ ID NO: 454619 - DNA, 122 bp, Homo sapiens
accgacaagtcctagagtggcctccgctggacttgcatgttttggaggaggaggcagtggcgaggaagcttcaggtgtgagacacagggagctttctggttggacattctggtctcctaaag

SEQ ID NO: 454620 - DNA, 122 bp, Homo sapiens
tgcggacatgtccaggaccgagaaactcacttcagtccttacctacaacccctacgggcccgcaggaaacctccaccaccagagcagaatgccactgccatcctctgcctccaagcccgatg

SEQ ID NO: 454621 - DNA, 122 bp, Homo sapiens
aaacaatattttcctttaccaaatacaatgtaccctaatgttatctttcctagtatatttcgttaaaagaaataaacgctggttgtaacccactgaactgatacttcccactaatattgcca

SEQ ID NO: 454622 - DNA, 122 bp, Homo sapiens
gcagccccctctattgcgcttgcgcagtgctgcctccctgagcaccccgccccttcccgccgctgaggatttactcgtctcttggcaaccattcacccgaagagccaatcagagggcagccc

SEQ ID NO: 454623 - DNA, 122 bp, Homo sapiens
gcgtatcagaggagcagtggcctcacacctggggcccctttccaccctatgcctcaggcacggggtatgtgctgtcagcgtctgctgtgcagctcattctcaaggtggccagccgggcaccc

SEQ ID NO: 454624 - DNA, 122 bp, Homo sapiens
gaacgtcaggatcaccttccagcgggggcggaagcgggggtccgcggccttggtcatggacgccagcacaggaaggccccccacactgatccggagggagtgcatagactcattccattccg

SEQ ID NO: 454625 - DNA, 122 bp, Homo sapiens
gcccagcccgggtccccgaaccccttacctccagggtctgtatctcctgctgggtgaggtcgttggacacagcgcacttggtgcacagcccgcacaggctgccaatgaagatgacgatgagc

SEQ ID NO: 454626 - DNA, 122 bp, Homo sapiens
gctactgggaaacaatcactaggcctctggcatgtcttggctgatacgagtgtttttgttcgtctgggggctttggccactggactatctaaaaatgtgatttacaatgggaagtacccaga

SEQ ID NO: 454627 - DNA, 122 bp, Homo sapiens
ccttaaaaaccaagcttcgtgctgggagggttgggagggcaccacttaccgtcctcaagtcggtcatttccctgaacagagtgcccttctcacacggaagcacacgttcacgcctggtgtgt

SEQ ID NO: 454628 - DNA, 122 bp, Homo sapiens
ggccgggcgccccctccctccccacgaggcggcccagacaggccggctacgccgcccgcgcgctcgctggctctccccggactgagcctaattgatccagacttcctcggaaaatgcccgag

SEQ ID NO: 454629 - DNA, 122 bp, Homo sapiens
gggcccccgcctccctaggctggcagaggaagcaggtaccggagcatagagaggctaaatcgggaccattcccggaaccttgtgatcccttctgggcaatggaaggccgtgacaccccctgg

SEQ ID NO: 454630 - DNA, 122 bp, Homo sapiens
cttcatattctggtcctgatttatctctgagtccagactcagctccaggtgctttacccacggcatccactgtgaactgtttctcattgagaacatgccatagcctctcacagttatttgtc

SEQ ID NO: 454631 - DNA, 122 bp, Homo sapiens
ctgcttcccttacctgctggtcaacaagaacctcaactcaaacctgggccacgtggtagccgatgccaagggctgcctgcagctgtgcctggaggaggtggccaacgggctgcgcaaccccg

SEQ ID NO: 454632 - DNA, 122 bp, Homo sapiens
gcaacaggtggagaagcaaggaagcagagcccctgcaggcttgtagggaccgtggagaaacgctcacggcacatgggccgaagacaagaaagcaggtggcatggccgcagccgcacctccgg

SEQ ID NO: 454633 - DNA, 122 bp, Homo sapiens
attccattgggaggtgcctgtgggccatccacgggatgaggcctggtacagatggaaacacgagtcaggagctcagcagagtctaggccacagatacacaggcttgggaaatgaatcagtca

SEQ ID NO: 454634 - DNA, 122 bp, Homo sapiens
cgcctccgccgcccagggattcgtaggtggggaatttgtttgcgctgcggaaaaccagcccgaactgtggggatacgcggaacagcgcgtctggggcagggtcgggcctccctcacttatgc

SEQ ID NO: 454635 - DNA, 122 bp, Homo sapiens
cttcaccatggcaactcgggcgtcgggagcgtgggctgcgagccgagtgggtgggggagccgccgggctctatccgccagcccacgagaagtgacgcaggtgacgggaggccgcagggacct

SEQ ID NO: 454636 - DNA, 122 bp, Homo sapiens
acctcaactcctccagtcccaaatactctgcctgtttgtcccctttgtcctgagccaccccgtaggacctgcaggtcaggcactgacttcatgtcaggtccccgaagcagttttgttctctc

SEQ ID NO: 454637 - DNA, 122 bp, Homo sapiens
tttcaccacagtcattctcctgaaatgcacagctgagggaaagaagaatgtcagatgccccgcgaacgtgcagaagctcccagttgcatcaccctggcgtgccaggtattgcagcaaatagg

SEQ ID NO: 454638 - DNA, 122 bp, Homo sapiens
gctcagccggcaactcagcagcggggtctcggagatccggcacactgcggaccgctggcgcgtgtccctggatgtcaaccacttcgccccggacgagctgacggtcaagaccaaggatggcg

SEQ ID NO: 454639 - DNA, 122 bp, Homo sapiens
tgatgcgggcgccacccccgccccgccgcccgcgtgctgctgtgctctcctccggggggccggcctttcctcaagtgccttgttaatgctcctgcagctgccgtctctttagtgccctcaca

SEQ ID NO: 454640 - DNA, 122 bp, Homo sapiens
ggtggaggtgctcacagttgatgaagcagacggaggccatggtgatggagaagaagggtccggggctcatgtccaccttgaccagcgctgctgtcagggcaaagagcagcagtatggccagc

SEQ ID NO: 454641 - DNA, 122 bp, Homo sapiens
tcggcctccgcgtccccagccatggaggaggttgggccaaaagtaccgcaaggggccaagcgcagtagctcaggcctgtaattctagcactatgggaggcagaggcgggcggaacacttggg

SEQ ID NO: 454642 - DNA, 122 bp, Homo sapiens
acgtggctggaggccgttggagcgcctgcgcagcttttccgcacgcgcctcgccggcgcgcggctctctcagcgtcccaagagccactttctcgccagtacgatgctgcagcggttttccgg

SEQ ID NO: 454643 - DNA, 122 bp, Homo sapiens
gtggacgaggactggccctgtcctgaggaggctgccggtcctttgcacgcgcagtgaacccgctcacctcgtgcagcctgtcctgacgactgctttccacaacagcatagcgtgtggcctgc

SEQ ID NO: 454644 - DNA, 122 bp, Homo sapiens
gcgggggccgccgagggaaagacgggcgcgcgcgcgccgctccgtgcccagcgcagacagcgagatgcctgcacaaaaggatggggcttggaatgtttggattttgaagattagtttctatt

SEQ ID NO: 454645 - DNA, 122 bp, Homo sapiens
agtcctcaagcaaaataacactgacaatcatcaggcctctgcaagtgtgggaatgaggcccggccggggggaggagcgcacgctctcagccacgccccgcccggtgcccgccttcgccccgc

SEQ ID NO: 454646 - DNA, 122 bp, Homo sapiens
gccctgttacagtgacacatgtttatgtttatagtcctggtttgtagtagtgtcaagaaccgcagcaagaggaaggggaggagagaggagagggaggagtaaattcaaccacccccacttgt

SEQ ID NO: 454647 - DNA, 122 bp, Homo sapiens
atggaaccccatgaacagtaacaccccccacccaccggagtattcaggagtgactgaggtcgggtctggggttgcttcgaaagactccgggtgctcagtgttgggaggggggtgagtaccgt

SEQ ID NO: 454648 - DNA, 122 bp, Homo sapiens
ccaccgctccccgtgttctctgagctggcttagcttgaaggaacctcacaaaaccaagcccggatcgctgtcagccactcactcagtgccgcatggagctcctcggacagcgcaacgtcaaa

SEQ ID NO: 454649 - DNA, 122 bp, Homo sapiens
gtgcggctcagcaggaaggtagcgcggggggctcgagcggggggcgcgggggacgggcagcggcctgcgggacctgccgctcgagggaagggccgcgcgggccgggccgcggggccgcccgt

SEQ ID NO: 454650 - DNA, 122 bp, Homo sapiens
ggggagtgcgcggaggatcatcggctgcgcctgcgcagttgctgcgtgaggcgggatctgcgccgagtgggcggggggtttcctttccccgcagggctgggggtccgctgtttccccgcgct

SEQ ID NO: 454651 - DNA, 122 bp, Homo sapiens
gcacggacgctcggggtggaggtagtcaatgggcagcaggggacccccagcccccacaagcgcggctccgaggacctggaagcgggtgcctgtcgctctccgcaggctccgctctgcctcca

SEQ ID NO: 454652 - DNA, 122 bp, Homo sapiens
agatgctggtttttggcacactgccctgggcatgcgtctttgggccttttagaagctggacggtcccccaagggggagactggctcagtgcctacggggtgggcccagccaccttataaatg

SEQ ID NO: 454653 - DNA, 122 bp, Homo sapiens
ctggacccgcttctcaatgctctcctttcagccaggctgacctctaaaatatgactgtctcgaaacatgtgtggatcaccacatcagacttttaaaagtctgtgataacagtggtagcaaaa

SEQ ID NO: 454654 - DNA, 122 bp, Homo sapiens
gaccgcatctccgcgcaccatggcagcaaacgccagcggtttgtgggcggatggtgtccccgtggccatccccgctcctgagtgcggaaggacagacaggagcggggacttctgggtgttcc

SEQ ID NO: 454655 - DNA, 122 bp, Homo sapiens
aacacacccgctgcagcggctctgggaacgcggctttgtctcccaaaacctctccgagagcgcaaggagcgggaagggctttctcgcattctatctcccagaaagaagtgcctgtacctgcg

SEQ ID NO: 454656 - DNA, 122 bp, Homo sapiens
caagtgcgcaccacaggcagccacatctggtccgtgccgtccaggatggcccagagggtgcggatggcccgcttcagcactgacgtgtagcagatgtcaaactccatcttggcatccttgat

SEQ ID NO: 454657 - DNA, 122 bp, Homo sapiens
acaaacaggaaagccttacatcacggagtggcgtggggaggagtctgctcctcgcttgctcgctcgctcgccgcgctccctttgtggcccgagtcgcgcgcaccggcggcggcgggggcagc

SEQ ID NO: 454658 - DNA, 122 bp, Homo sapiens
aggtcaaaaagaaagtggcccttcattcctcccactcttaccttcagttgatacaacacccgcagactcctggattcagtagacaaatgcctgccccacccccacatcaacttcacagacag

SEQ ID NO: 454659 - DNA, 122 bp, Homo sapiens
agctccggggaagggatgcgggctgaaggcgcaagcttccctcccactccccccgcaagtcggcgcggggaccacccaccccctggaaggattcctagcctagccccagcaccctcccctca

SEQ ID NO: 454660 - DNA, 122 bp, Homo sapiens
aacattccagaattttaagagttcaactacatacactattagatttacagataaacagaacgtggctgaatcactatgtttttaaaagatttgaaatctttaactcctctctgcgtatttaa

SEQ ID NO: 454661 - DNA, 122 bp, Homo sapiens
aaaatagccccatcccaccccctccacacacacactcaggtagcaggcacatgtccatcccgccccaggcttgctgcacatccatatgccacacacacactgtcacctgcatgaagggccac

SEQ ID NO: 454662 - DNA, 122 bp, Homo sapiens
atttttcgggacagccaatcatatgagtcaattcaccttaggcaactcacggctcctgcgcgagcctccaatcgatctcgaagggcactcgtagagaaaactacacctcccaggaagccgtg

SEQ ID NO: 454663 - DNA, 122 bp, Homo sapiens
caatgaggaagcgacacagccaggacgcctctccccaactctaacttccacagttcttcacgcctgttcctctggaaagccctccctgattgcgcctgtcttatcccctggcatcgatgctg

SEQ ID NO: 454664 - DNA, 122 bp, Homo sapiens
atttggtaaacctgttgccagctttagaagacagatcacacgccaatcaaaattgtggcacgaagggaaatggctggaaatatctataaacttggtatttgctggctttttcttgacacttt

SEQ ID NO: 454665 - DNA, 122 bp, Homo sapiens
ggcggtggtcaggactcgccacgcggcggcgccgggcgctggaaacgaccgcccgagggccgcgcggtttactcagtgtttaggcataatagccacctagggagtggctcgccgcgggaggt

SEQ ID NO: 454666 - DNA, 122 bp, Homo sapiens
gggctggctctgtcacccagactggattgtagtggcgccatcttggcttactgtgatctccgcctcccaggctcaagcaattctcctgcctcagccacccaagtggctggaaccacgggtgc

SEQ ID NO: 454667 - DNA, 122 bp, Homo sapiens
ctgtcctgcaatcaaggtgcacaaaaagcacatgtatttgtgaatgtcggaattgtcatacggtgtcacttgaagaagactcactctggaattaagactgcagtgatttcactgtgaattct

SEQ ID NO: 454668 - DNA, 122 bp, Homo sapiens
ggagctccggaagctgcgagaagaaaccaacgcggagatgctgcggcaggagctggaccgcgagcggcagcggcggatggagctggagcagaaggtgcaggaggtgctgaaggccaggtacc

SEQ ID NO: 454669 - DNA, 122 bp, Homo sapiens
acaaaacggaggcagggaaacccgtagcaacgaggccccacccttgttgggctgatcctgcgcatgcgccgaccttcctcggctggatttaaggttgccgctagccgcctgggaatttaagg

SEQ ID NO: 454670 - DNA, 122 bp, Homo sapiens
cgccgcgcagaatcctaaccccagcagcgctcttccagcaaaaggcgtcaatctagaatacgcctaaccccggaggttcttccctttccattcccggatattagtaacacttctcgcgggaa

SEQ ID NO: 454671 - DNA, 122 bp, Homo sapiens
agtgaggctcgcaccgggacctgccccagactcgcctcccagccgcgagcatctaggctacgagaggggagaggggccgcatctccgcaacactgagtccccagagaacacgacaggggtag

SEQ ID NO: 454672 - DNA, 122 bp, Homo sapiens
gagggaagtgggggaccaggggagaaaaggatccctctctggaacagactgtgcagatcacggtatggtcagcgccaggtcctcagggacaggactgcaggcaagtccttacccttaggagc

SEQ ID NO: 454673 - DNA, 122 bp, Homo sapiens
tcacatgttctgccgtgtcttgcagagctgcagaaactggagggcagcagtggacctgtgcggacgtctcctcacagcccacggccagggctacggcaagagcgggctgctcaccagccaca

SEQ ID NO: 454674 - DNA, 122 bp, Homo sapiens
agcagcacacgatgttggacagcaaagctgttacttggcaaggtggaactcggccgagagcggctccaaagtcgcgtggccagtgccaggaattcagattttggcaaccgcaccttgtgcgt

SEQ ID NO: 454675 - DNA, 122 bp, Homo sapiens
accagtgtggccgcggcccctgaccctgtaatcccacatcgggcacccagcctaagaaaacgacacgtttgcttcaagggctcagagcaccaggatttaaaacagcaactaggaacaaccta

SEQ ID NO: 454676 - DNA, 122 bp, Homo sapiens
gggggctgctggagggagagccagggatgcagagagaagcgggggctttcttttcggcctcgcatgggcagaagcagcagccgcctcctggttcccgcagagcctctgcgagaagcccacag

SEQ ID NO: 454677 - DNA, 122 bp, Homo sapiens
gctgagccagctccagctcagggcattgttcatggtagtttaatgaagtaaagatatacacgcacccaggacctacatgaccagtgaaccagtttctctttgtgaggatttcttcatcttcc

SEQ ID NO: 454678 - DNA, 122 bp, Homo sapiens
tttgtcctcccaacaaaaacgtcagtaagtttccaaatgtgtaggtcctaacaacctaggcgagcagcagcagaagcagggaggaggcagccaggaagggtaggagtataatcttggctctg

SEQ ID NO: 454679 - DNA, 122 bp, Homo sapiens
gaaactcagttccgagctgtgacctctacaacggaagaataataggttggttacccgaggcggaatctggaactgaaattctcactcatttgacttcccgctgtttatcaccgcagattacg

SEQ ID NO: 454680 - DNA, 122 bp, Homo sapiens
tgaagccgccatttccccggcccagccaccacgtgacccttctgcgcaggcgtcgcctcacgtgattcttacaggtccgctcctctagccccgcctcccgtctgagaggttcttaaagggct

SEQ ID NO: 454681 - DNA, 122 bp, Homo sapiens
ctcaggtgatccgcctgcctcggcctcccaaagtgctgggattacagatgtgagccaccacgcttggccaaaagtcattgtttgttttagtgatgaactaactggctttgggtttgttctgt

SEQ ID NO: 454682 - DNA, 122 bp, Homo sapiens
tggggactgccagtgggtagatcacattcatggtgcagccagcagtgctggtctctaagacggttgcccagcaaggatacgctgaaccccggcgtcacgtgacgatcgcggggctgcgtact

SEQ ID NO: 454683 - DNA, 122 bp, Homo sapiens
ggtgttaggttagcgcgaggcgtgacctagttgacaggctctgaggtgctgctgtggcggcgtccgcggggctgaggcgggtgggagccggagccgagcgcgggctgagggaggagggcggc

SEQ ID NO: 454684 - DNA, 122 bp, Homo sapiens
ggtaacaggcaagcgcatggagccttcgaagttctctttaaagttcctttcaggcaagaccgcacccaggaagctgggaccgaccagcccccgcgggagatgcccacctgtccccctcccaa

SEQ ID NO: 454685 - DNA, 122 bp, Homo sapiens
gccgcaagaacccgcaagggaccccgcgcccgcaccggtcccggcctcctggctccctgccgctccacacagcagcgagagcagcagcagcaagaggacgagacccagctcagggcaacgtc

SEQ ID NO: 454686 - DNA, 122 bp, Homo sapiens
cgggcactgacagtcgctgcagaccgggcaagtcaccctcgggcagcgcttcagagctgacgtggcacccgcacccacagggctgccctcatccgcatggcggcccaagaggaggccccagt

SEQ ID NO: 454687 - DNA, 122 bp, Homo sapiens
ccccaggacccttggcaaatgtatcccaagcctgggccccggcacagggcctgtcagccacgtggctgccctggaccccccctcccctgtgctggttccccatgcagggcaggcgtcgggtg

SEQ ID NO: 454688 - DNA, 122 bp, Homo sapiens
cctgaggctctcaggtgagtccagcaatgggattgcgagcgtcagtgttctctgctgcgtcgccgacctgggcgcgctcgaaggcaagtcttggcacttcggggaagaagggctcgccctct

SEQ ID NO: 454689 - DNA, 122 bp, Homo sapiens
ctggttcaatatgatctcatcttaatgtgactgcgtctgaaaaaacactatttccaaatacggccacatttacaggttcagggtggacaggaatttggcgggggccactatatgactcagta

SEQ ID NO: 454690 - DNA, 122 bp, Homo sapiens
gccctgggtacgctgtagaccagaccgcgacaggccagaacacgggcggcggcttcgggccgggagacccgcgcagccctcggggcatctcagtgcctcactccccaccccctcccccgggt

SEQ ID NO: 454691 - DNA, 122 bp, Homo sapiens
atttgtagaggcatttgtctcccaggatagattccaaagtgagatcgagtctccctagcacgttttctacttgctgcccttagggatgtgtactataactttttatttataaaaatgtactc

SEQ ID NO: 454692 - DNA, 122 bp, Homo sapiens
gctaaccgcggttcattggctctccccgcgaggcaggtctggaagatcaagaatgaagctcggagctctctcgcggagcaaggacaccttcgggcttcaggaccacccagggcgtccaaaac

SEQ ID NO: 454693 - DNA, 122 bp, Homo sapiens
accagatcccatgagtattcattattgcaagaacagcatcaaaccatgaggctccacccccgtggcccaaacacctcccaccaggccccacctccgcattaaggattacatttcaatataag

SEQ ID NO: 454694 - DNA, 122 bp, Homo sapiens
ccgcaccaggctcgagtaggaagcccgcatctccacggcgcttccggcctgatgctgtggcgcttgcgctctgctgctggcccacttcgaagtcggagcaagagccttctctgtgtttgcgc

SEQ ID NO: 454695 - DNA, 122 bp, Homo sapiens
ctggttgagacattcactggagggtctgggtgcagcccgctgcctggccggtaggcggcgcgcacaggccgtggggcccgggtctgggcgtgcgcgcggctggtagcagcggggccgcgcac

SEQ ID NO: 454696 - DNA, 122 bp, Homo sapiens
gcccggctccaggctcacagctgtcctcagctttaagttcaaagccccatgatgagctgacgcatgggagatgtgattgtgatcatttccactttgtctttaggtgggcgtgggctcctccc

SEQ ID NO: 454697 - DNA, 122 bp, Homo sapiens
tgccagactcttctctggggatgaggctccggggaggagactccggggatgcgcctctggcgggatctcccctggaagaatctgagtccagtggggagaggaacacgtcccgcagctgcccc

SEQ ID NO: 454698 - DNA, 122 bp, Homo sapiens
cagcctgcctacgtgctgcagatcttcccgccctgtgagttctctgagagtcacctgtcccgcctggcccctgacctccttgccagcatctccaacatctctccccacctcatgattgtcat

SEQ ID NO: 454699 - DNA, 122 bp, Homo sapiens
acggcacggagagattttaaggctgcctaagactaaagccaaatacgaagtccacatctgcggtccgcaccttatctctccgcgcggcaggcgcgacgagggcgagaaactccctctccagt

SEQ ID NO: 454700 - DNA, 122 bp, Homo sapiens
taccacaagcttaagtctacaaactactgcctcatgcccattccctcaagtagacatttgcgggagggacaaaccccagtgtaattgcacaaactgttaagagtgctatgattcttccaagg

SEQ ID NO: 454701 - DNA, 122 bp, Homo sapiens
gggaaatacctgggggcggcggggcagccaggctcaggaaccaggcaggcagacacaccccggccccagccccgcatcgctgcgcggccttccccctgagcttcctggggctcctgcgagga

SEQ ID NO: 454702 - DNA, 122 bp, Homo sapiens
ttttaatttcttccggtctgtgctgtgcacagtctacatggcaatgcggttccaccacatcggtttcgtggcttcgtttaaaactcagatggctagattagttaggttttcaaatcactagg

SEQ ID NO: 454703 - DNA, 122 bp, Homo sapiens
atgtgcactaggaacatctcagggactgcagagctccccaagaccatagcagaagacaggcgtggggaaatggtttgctactgttttgcaaatcaaacatttacagtgcatcaggagagccc

SEQ ID NO: 454704 - DNA, 122 bp, Homo sapiens
agtgcgcaggcgctggagtgcgacgtatcactccccgactgcgcgcactctgcgggccaccgggatcgtcgtgctgtttggagcgctctcgggaaaaaaaatgcaaaaaccaggaacgaaaa

SEQ ID NO: 454705 - DNA, 122 bp, Homo sapiens
cggggaagcggcgggaagcctgtgaggggcggcctgggagcagacggaccaccaggtcaccggcgcgcgctgccaggcgccgacccactcgcgaggaccagcggttcccggaggcgtcggcc

SEQ ID NO: 454706 - DNA, 122 bp, Homo sapiens
acaggacacagtgaaatggcaccagtgagtcagaggccaaaggaggatttctggccccagcgcgcaggatgtgctttgttatagtggggttgggatagcggagcggaggcaaggacactctg

SEQ ID NO: 454707 - DNA, 122 bp, Homo sapiens
caccagcaattagaatactacctttgtctctgggagtattcaggtattcacagacaaattcgtactcatgatgtgagcagaattggaaaaaaaaaaaaaaaaaaaaaaaaaaaacaagcgac

SEQ ID NO: 454708 - DNA, 122 bp, Homo sapiens
ggctccctgcgctccacagcgccagctccgcgctgtcagctcagctcgctacctccgcggcgatgttgcaaccactgcctgggaaaatggcttttttatgaatgggagggaagggagcgcca

SEQ ID NO: 454709 - DNA, 122 bp, Homo sapiens
atgttttaccacagctaagagaactacaccagcttctaaaatacccacaaaagtcacattcgtgatcacctctatctagaaattagcatctagaatccataaagatgtgttttctttatgat

SEQ ID NO: 454710 - DNA, 122 bp, Homo sapiens
agcttgggggcgccccggcagggagggacgtgcggctgggaagagctggcaggtggcacccgacccgcagcctggtgagcaaggtgccaactgtccgcccaatttcctgtccttgcagtaaa

SEQ ID NO: 454711 - DNA, 122 bp, Homo sapiens
gaaactgaatgccactggggtgttcccatgtgagaccccattcagacacaattggcctcccgcaactgcccacttccctcgccaccctccatccctgcccagtctagcccagtagttaccac

SEQ ID NO: 454712 - DNA, 122 bp, Homo sapiens
agctcgcggggtgacgccattctgctggggttctggagaggccaaagctggagacggtcccgtttgtggtcagcacggccttttactttctggccgtgactggcaactgcaccaacgtcctc

SEQ ID NO: 454713 - DNA, 122 bp, Homo sapiens
cagttgcttctccagtgactgccagctcagcagcatcaggaactaaaagtttctttgcaccgccagggatggagaggatctggacagccaaggagacggcagcagccagcctgatacgattt

SEQ ID NO: 454714 - DNA, 122 bp, Homo sapiens
ctcaagttcctcatcttgggtcatgagaactccaagatctcctacataccaaatgttgctcgtggggaatatgctgctcactactgtctgtttgtgtctaatctttcacacccacttcatga

SEQ ID NO: 454715 - DNA, 122 bp, Homo sapiens
gacggcggggcgggggcgctgctgctgcgggggcaggaagcggcaagggcggtggcggcccgctccagccatgccgaataaaacaagaaggagaaagaatcaccaaaagcagggaagagtgg

SEQ ID NO: 454716 - DNA, 122 bp, Homo sapiens
ctccggcgtctgaggagataagcgcggtgtgggtcagaccccgaggggtcctcgcatctccgtctggaactcccctcaacgctctcaccattttgccccgcgaaggctaatccgccgctccg

SEQ ID NO: 454717 - DNA, 122 bp, Homo sapiens
gcgggtgtggaggcggggagagaggaggagtaaaggctgtttacaaacttgacgtacacacgcagtcctatccctacggtcctggaattgggggttactatcttggaatctaggggcactcc

SEQ ID NO: 454718 - DNA, 122 bp, Homo sapiens
aaaaaaaaaaaaaaaaagttgtaaaaggattgtggaaaagggatcttatgtggttaaagtcggcaccgtcccccaaatcaccaacccccaggtcccaaggcctgggctgggccagggctgac

SEQ ID NO: 454719 - DNA, 122 bp, Homo sapiens
gtaatagcgtcgtggggctccccactcggccctcagggccaaaggtgggcgccggacacgcgggaggggcccttggacgcaccccctctcgcaaacgcccggttagtcccggcggactcgca

SEQ ID NO: 454720 - DNA, 122 bp, Homo sapiens
aacctaggttaaatggtaccacctaattgtgtgagctggaaatcccaatgtttttctttccgcttttcagtttatcttatgtagatggtcactaaaaccttttggtctacctcctggatgtc

SEQ ID NO: 454721 - DNA, 122 bp, Homo sapiens
ataactttgtcacatggtatccccttcatttcctcatacaggagagacctcccagtggctcgggaccagaaatcacgtgatttgagcaagttgtttgatttttatctcatgcacagtgtaaa

SEQ ID NO: 454722 - DNA, 122 bp, Homo sapiens
gctcttcctcagtcttgtctgaggctaatccacagaaacattctgaggtttccctattaccggtggcgcccagactcttgaggacggatttttttgtttgtttgttttaaggggtggaacga

SEQ ID NO: 454723 - DNA, 122 bp, Homo sapiens
ggcggtccccatggcgtccgttgccgctactacctagtgagtaccagcaggactgggcagcggaacggaacgggacggggtggggcagaggaacggaacgggacggggcggggcagaggaac

SEQ ID NO: 454724 - DNA, 122 bp, Homo sapiens
gccacgcggtggcaaaaaggagtcacacactccacctggagacgccttgaagtaactgcacgaaatttgaggatggccaggcagttctacaacagccgctcacagggagagccagaacacag

SEQ ID NO: 454725 - DNA, 122 bp, Homo sapiens
gattcagagggtgacactacacacgcagccggtttgctgcggaggaacacggggctggggcgtctgctgcttttagagcaggcctgccctttgtccaggagggaggtatcgctgtatcctcc

SEQ ID NO: 454726 - DNA, 122 bp, Homo sapiens
cagatcagtagcggagttcgattctcacaggatcgtgaaccccattgtgaactgtgcatgcgaggggttaggtttcacactccttatgagaatctaatgcctgatgatctgtcattgtctcc

SEQ ID NO: 454727 - DNA, 122 bp, Homo sapiens
atttaccttgattcgtgattttaccaagcaaaggaatgcagtaaattgacctgcttcaaacgtaggtagaagtgagaaatggaaacagaaaaccatgaaacagccctagtgttgcagtgaag

SEQ ID NO: 454728 - DNA, 122 bp, Homo sapiens
aggaggcgcgcgcgctaggcagggccgcacagcgcgggcagagtgcgggatgcgggcacccggtgggtacgcagtaaacatttgctgaaggaatgtgacccttgggacagttccgatgactc

SEQ ID NO: 454729 - DNA, 122 bp, Homo sapiens
ctggaccgtttaaaagaaaacataaagaggactctaccattaagatagtccttacaatttcgcaagccctttcacgtgcattatcttgtggatcctctcagtaatcccctgcaagaaggaat

SEQ ID NO: 454730 - DNA, 122 bp, Homo sapiens
ctatagaatagtaagcagatttgcctcttcttgcctctatgtctactcttcacagtctcacgtgaatgggttgcagtatcttgctggggttcccttcctaattaaaagagttataaaaattt

SEQ ID NO: 454731 - DNA, 122 bp, Homo sapiens
ttcggctgcccgggccctgcccctgaacctcgcacccctcctgcctcgttcaggaagctccgcacctatccggccgccaccctcagcacagccacggcagccgactcggcgttcctactgcc

SEQ ID NO: 454732 - DNA, 122 bp, Homo sapiens
ctcccacagcgctggcctattaacgttttaacagaatgaactgaggctcagctgggccaacgcggaccccggcctgcgcccacgcctcaccggctccccagggcctgggaccggcacagccc

SEQ ID NO: 454733 - DNA, 122 bp, Homo sapiens
agaggtgctgacaagtcctttcaagattcaagatcaacaagaagctattgactggcttctcggtctagctgtgaggcttgaatatggagataatgctgaaaaatacaaggacttagtacctg

SEQ ID NO: 454734 - DNA, 122 bp, Homo sapiens
ccacgaggaaagtcccattgatgcgagttggcagtgtagaggatgctcccctccggccgccgcggaagccgtcgtccaaatgcaggcgagcggggaggaggaggccgggatgcggccggcgg

SEQ ID NO: 454735 - DNA, 122 bp, Homo sapiens
aatagggtaatgggattttgagtgatctctgagtggatgggcatggtcaggaaagtgaaacgagctgacacctgaatgttgagaaggaaatcaccctttaaagatctacagaaagaactttc

SEQ ID NO: 454736 - DNA, 122 bp, Homo sapiens
attaagaattcatgagaagatttgcccggagctggggaggcctggccggcctccctctcccgcgcttgttcctgaattaaagtgttcacgtggcagggcccgctttggacagcatcaccact

SEQ ID NO: 454737 - DNA, 122 bp, Homo sapiens
cacttcagtaaacacaccgcgcatgcggcccctcccaggtgctggcatggcaggccatggcggcgcgtgcggacagcccagcccaagggaagaatcctcagaaagaatgcaatggccccccg

SEQ ID NO: 454738 - DNA, 122 bp, Homo sapiens
ccgttgaccaagcacctgccatgtgccaggctgtgagctgtctcatttcatctgttatcccggcagcacagctgtgctatccccaggcctgcctgagcagggccgcaggggccagcctctgg

SEQ ID NO: 454739 - DNA, 122 bp, Homo sapiens
cccgttaccctggggaatggctgcagatccctctgtgcatatggggtgggagggtgagggcgtggggaagagtcacaggttacctgtggcacattgcagggtccttcccaaaggggcctggc

SEQ ID NO: 454740 - DNA, 122 bp, Homo sapiens
ggctggggcctgggccgaccctggtcttttgtgccccaggactttgaacgggatgaggagcgctcagccaacggtggctccgaatctgacggggaggagaacatcggctggagcacggtgaa

SEQ ID NO: 454741 - DNA, 122 bp, Homo sapiens
gcatccgagaaggggtgggagaataagcacggcatggaaaaaggagctgggagtcccccacgtccgcagtgagaccccacagatgtttcatggctgtgactgtttgcctcccactcaagaag

SEQ ID NO: 454742 - DNA, 122 bp, Homo sapiens
ctactctgactctacctcaaaagaatgtcttctttgctgactcaaagttggaatcctccccgaccccttctgcgattctctggttacgtgtatgatgggaagaattgagtcctgtctagagg

SEQ ID NO: 454743 - DNA, 122 bp, Homo sapiens
agctcttagaatccttgaatgtctaaaaatatgtttattcccacataaaatctaattttacggagcattggaatctcaattcaaaatgattttcctttaaaaccgctgccttctaccagtca

SEQ ID NO: 454744 - DNA, 122 bp, Homo sapiens
cccaggtaagggggcccagcgccgccgccgcagtgggtcggggcctcaggaggcagaccgcgctgggcttgcagcccagctttcagattgctcctgtgccggagccctgcgaatcatgcgaa

SEQ ID NO: 454745 - DNA, 122 bp, Homo sapiens
atgtgtaaagggtcctttagacctcgccctaaaaggtcaggggcgtggcttaaagaggaccgcgcttcccgggccccgaccccagaccctacatcgtgtgtgacgcccgccgccgccgagca

SEQ ID NO: 454746 - DNA, 122 bp, Homo sapiens
tgaagtctggctggatcccctgcatgacctggtgttgcaggtgcagcccggggaccgctgcgcggtttcggtactagacaacgacgcactggcccagcgaccgggccgcctgagtcccaagc

SEQ ID NO: 454747 - DNA, 122 bp, Homo sapiens
gggctgctgttttgcagccctgcgaggcgtgcagtcggagaagtggtcggggttccacaccgtccctgagcctgcccccggccaaggtggcccgacgtgctgcagtggctggcgcaggtgat

SEQ ID NO: 454748 - DNA, 122 bp, Homo sapiens
aatttagaatatttttaaatttggactgtgtagacagtgagagttctgcagagaattaaacgaagtaatattcacttttgggggctttatctagactagaaggtatgttgaagtgaggaact

SEQ ID NO: 454749 - DNA, 122 bp, Homo sapiens
ggtaggtgatgtgctggatctccgcacccacgatcttcctggtctcatagtagatggtgtcgccgtcccagtgcgggttcagcttgagcagctccgtggcaatgcggttgtgctcgcggaac

SEQ ID NO: 454750 - DNA, 122 bp, Homo sapiens
gggggagagaaaggaaagcaaagatgtgggaagaaagagtacttgcagccccaagttgggcgaactcctcccagctacttataccacagggtttggggagcagagcccctttcattaaactt

SEQ ID NO: 454751 - DNA, 122 bp, Homo sapiens
caattttagattgtggtttgccaaagtcaagttgcttaatttttacaaggccacaaaaagcgcaattatgccctgcagtttaaaatggaaaacgtgttggaagataagaaaacttagtttcc

SEQ ID NO: 454752 - DNA, 122 bp, Homo sapiens
cgagagtgggaacccctttgggggcagtgagaccaacgggggcgccaacccctttgaggacgactccaagggagtgcgcgtgcgggcactctacgactatgacggccaggagcaggacgagc

SEQ ID NO: 454753 - DNA, 122 bp, Homo sapiens
acccctccatctgtgaccagagccccccgggctgtgactccgtgtgtgactcccagcctccgagccccgctgtgtgactccatgcccactccgaacaacagcaggctgacttctctggtttc

SEQ ID NO: 454754 - DNA, 122 bp, Homo sapiens
cctggaaccccatttcagctcatctacctgttgctttgtatttattcttcaaaactctgccgtcttccctgaccttccggagccggtgtttgtggcgcctcctgctggtcactgggttcagg

SEQ ID NO: 454755 - DNA, 122 bp, Homo sapiens
aggaggacaccaacccagcagatacggaattgagtcctcaagaccagggagtggcggggacgagtaggccaagaggatcctccccagggacccctcgggggccgagctggccacacaggagg

SEQ ID NO: 454756 - DNA, 122 bp, Homo sapiens
aactggaaattccctgagaaatcaccaggaaagctgaatgccatataaagaaaagaaaaccgaaaccaaggaggacaatatgtgggaaaaaaagaagctaagacgttagaactgtgctattt

SEQ ID NO: 454757 - DNA, 122 bp, Homo sapiens
ttatactttctagtccactttctaacttgccgccagagtgagatttcaagcacaaagacccggacagataagtcctcacatgaacatttcatgacagcctattactgtctaaagacaaaact

SEQ ID NO: 454758 - DNA, 122 bp, Homo sapiens
aacaactatgtatttaatagaccaaggggagctattgaccatacttgagcagggcaatgacgtagacctctgttttaggaagatctgcttgactatatgatttataatgaccatggaaaatt

SEQ ID NO: 454759 - DNA, 122 bp, Homo sapiens
gcgtgggcggccgtggggtcttgggcgcgcgcggtgtttctggcggtgggtcaggacttgcgggtcgcctccgccggtgttgaagcctcttgtgtgcacactttctcctcagcacttgggac

SEQ ID NO: 454760 - DNA, 122 bp, Homo sapiens
atcgtaacagttctgactcaatagtcatggctacacaagctatcagctgccccaaaacatcgaatgttagaagcaaataactttcttactatataaagatttctaacacaacagtgttgcaa

SEQ ID NO: 454761 - DNA, 122 bp, Homo sapiens
gtggaggattctaaggatcagttttacaatgtggaaaagcctgttctggtcagttggatccggagtggacacgggaaggcccgcagtgagggttttgccgcctgctgatgacagtctgtggc

SEQ ID NO: 454762 - DNA, 122 bp, Homo sapiens
aatacttttaatggtgaaatacttttaatggtgaggctctccccaagaccaggccagccccgtcccatgctcatgtactagcgaccagaaattagcatgcactagctaatacaacattcctg

SEQ ID NO: 454763 - DNA, 122 bp, Homo sapiens
ggattggactctgtttactagcagcgtgactttaagcaagtggcttaacctctctgaatccgcttcctcatttgtcaaatgattataataaaaacccgtgccttataagggttgttatgagg

SEQ ID NO: 454764 - DNA, 122 bp, Homo sapiens
gtttccccagggaagctgtcctgacccctgggttttgtagaccctgccactttctcaattcgtacctatatcttaatgtcattttagggttgctcgctctctctcctgcactgggctgtaag

SEQ ID NO: 454765 - DNA, 122 bp, Homo sapiens
ccccccacctaaccctacaaagctttggacctcattcccaattgttccctaattctgaggcgggtagaaaatcaggcgaggtgagcggccaaatcggaatattctaagacgcccccacggga

SEQ ID NO: 454766 - DNA, 122 bp, Homo sapiens
tgtcgcctcctgagggcgcgcgcctcgtgacaggggccttgacctggtaaagccagagctcggggagctccgccgtctcctggcacccaggtctcctcgccaagcctccgcgggcctcctcc

SEQ ID NO: 454767 - DNA, 122 bp, Homo sapiens
tcagatggagataaggccggcatgtggttccaacagctgtttctggcgggagtctagctccggcctgtgcacatagcaacgcctcacatctctcacccaacctcttggctactctcaagtcc

SEQ ID NO: 454768 - DNA, 122 bp, Homo sapiens
ctcctgctctcctccggcttcccctcagctctagcttttccctaaggggtcatcacagggcgccaaacgcgcgtccgcgggaaggccgggggcggagcgcggcgcggcgcggcacgtcagtg

SEQ ID NO: 454769 - DNA, 122 bp, Homo sapiens
gagctccctaagctacatcccacctacccctctgttttcagtggcagttggaaggcagatcgaggtgagtgcaggcttctctagggctgacagtgctctgccagttgtgtccagggcatgtt

SEQ ID NO: 454770 - DNA, 122 bp, Homo sapiens
catacattggccgggcacctgttttcaatattcaaacacaacttcccggggcgaggtgggcggggtattgggggggtggggaagagaacgtgaacttcactgggtgagtcacgtgcaactgc

SEQ ID NO: 454771 - DNA, 122 bp, Homo sapiens
aggcaaagagcccctgccctctttggtctttggattacccatcccctcaggcactgcgtccgcgcataatggacagtcaccagatggtgaatgctggaaacgcatcggtgtttttgaaagtg

SEQ ID NO: 454772 - DNA, 122 bp, Homo sapiens
ccatgcggcaagagcgagtcgcaggaacaagtggggaatcttggccgcggccccctcccccgccttataaaaaagaaattgacttttgtttggagtttgtgaaaagtggggctcggggccca

SEQ ID NO: 454773 - DNA, 122 bp, Homo sapiens
caaggcaccatttccccaggaaaggttgtgcaacttgagctcaggccccaaggggcagggcgcagcaacaactggagaggtagatggagctgttctgctgaagaactgttttcctagcaggg

SEQ ID NO: 454774 - DNA, 122 bp, Homo sapiens
gtaaaatgagtcaggacaccaaagatgagcccctaaatgttgttaaatgtcattttattacgatagagagtgctaacttacaacagagagtatacatttcggggttcacctggctcgttcta

SEQ ID NO: 454775 - DNA, 122 bp, Homo sapiens
ccgaccgattcgcagcaccccacccccagtcggggccatccatccacctgattaactcgccggcagcaactcccagcgtagaaagtagggcaaatgaacacacacagtcggtaaagcaggaa

SEQ ID NO: 454776 - DNA, 122 bp, Homo sapiens
cctatgtctttttcatattgccttaaaaaattaacatttggatgaaaagccataattttgcgctttaaaatttgatcttggaggtgctttacaaaatgttctacatggcggtccttaggaag

SEQ ID NO: 454777 - DNA, 122 bp, Homo sapiens
gcgggcgggcggcggggggctccaccgagctggcggtggcggctgaggcggggggcggggcgggggctcccccggcccctcccccgcgcctcccgctgcgaggtggcgcgcgcctcggccgt

SEQ ID NO: 454778 - DNA, 122 bp, Homo sapiens
ggaaaaaggtagctcagatcttgcagaggagcaggacgcgcgtggaggctcccgctactccgagaggaagaaagggctccgcgccacgctcacatcatacgatgactagaagacaaatggaa

SEQ ID NO: 454779 - DNA, 122 bp, Homo sapiens
atatgctcagaggagttaaataaccagtcaaagttcacacaacaggcaagtgacagaggccgaatttgaactaggttctgaaagttcagtttactgctgagtatctagtgtctggcatggta

SEQ ID NO: 454780 - DNA, 122 bp, Homo sapiens
aactcctggcctcaagagatttgtccgccttggcctctcacaaagtactgggattacatgcgtgagccaccccacccggccaggatttctgtactaaccaaggtttctatttcctctcaaac

SEQ ID NO: 454781 - DNA, 122 bp, Homo sapiens
ttaaacccatcgccttgggggcaagactagcctggcttttgcatctttatagcctttctccgcaggtgcagccaccacctccaaagtgactgccggtcggtccaagcgctctaacaggctct

SEQ ID NO: 454782 - DNA, 122 bp, Homo sapiens
tgaagactgtggtcatcgccaagacccccgggacgggaggcagcccccagggctcctttgcggatggccagcctgccgagcgcagggccaggtgagatcaagcacagctctcaggggccccg

SEQ ID NO: 454783 - DNA, 122 bp, Homo sapiens
cagactgactggaaagtggacagttcccggcctatccacgccggcaccattagagggcgccgcgggtcctcctagccccaggcactggcaaactgacatctgctacctaacagtcgaggctc

SEQ ID NO: 454784 - DNA, 122 bp, Homo sapiens
cccatgctgccgactggtacactttgatcccggcgggtttgctgtgctggtgtcagaggccgctgttccggggaaggagcgaagggagggaatttatacaaccagctgggggtggggcagag

SEQ ID NO: 454785 - DNA, 122 bp, Homo sapiens
tagtgagacatgagccggagtagccatagtaagtgagggcagcctggcagcggcattaatcggggagtggatagcttcacttcgggaggagagatagagattggcagccatcttgctttggg

SEQ ID NO: 454786 - DNA, 122 bp, Homo sapiens
ttacccagaagatctagctaagatcattgatgaacgtagctacactaaactgattctacacgtagaccaaaaagccttctattggaagaagatgccatctaggactttcatagctagtgaga

SEQ ID NO: 454787 - DNA, 122 bp, Homo sapiens
tcttttgcagaatgagttcagattaggcgaggatatccatcaccatttttcagaccagctcgcagcctgggggcagtggttcaagcacaggctttggagccgaaatgactgcgcctgaagta

SEQ ID NO: 454788 - DNA, 122 bp, Homo sapiens
ctgcgaactgcaccggttgcgaggggctggctgttgtcaaccatcctgtctggggaccagcgctgtgtggtcctcctggagggtcctagcaaactgagtaggcggggttttgccgcgcttct

SEQ ID NO: 454789 - DNA, 122 bp, Homo sapiens
atgtggtccaagaacaggacatcattagggaaacgcacgctgcgatcagccagcatccgccgccgccgctgccgtgggctgtagcgggcatagcgggcagttctgctaggcatcttgggcgc

SEQ ID NO: 454790 - DNA, 122 bp, Homo sapiens
acgtttggacgtaagagtgcttaatgcagtttttcaactttccttatccgccaggtttaacgtacagatatcataccaaatgaaaaccagttttgcacaagagtatataagctgattaggtt

SEQ ID NO: 454791 - DNA, 122 bp, Homo sapiens
gaaaaaacatatatatacctttctctgaaacaacagctatcctggtattgctttgagagtcgaagtgtaattgagtatatccatcttcatccaaattttctaaatcaggatgatattccatt

SEQ ID NO: 454792 - DNA, 122 bp, Homo sapiens
cctaggacacacggcctgtgagcgcccatcccctcgcccccagcagcgtgcactggtccccggctgcagctcacctcatagatgatcctctgcaccagatcgaactctccttccagagacgc

SEQ ID NO: 454793 - DNA, 122 bp, Homo sapiens
tcgttcgcgcctcccagcgaccggccagttgccagctgctggagagaatgagcttggagccgcagggcttaatcccgcgcggctcagagatgggtttctggactcgcgaagcagctgcaaca

SEQ ID NO: 454794 - DNA, 122 bp, Homo sapiens
gggaggggaatgctgcctgaaataatgcattgcttcggcggcggtcagagatccatgtgacgcgggggcactttagggaccattgctgagggcctggttagcatttgggcagctgaatcctt

SEQ ID NO: 454795 - DNA, 122 bp, Homo sapiens
atttctgctccggttccctctgcatcgcgggggcagctgtcacctgtaaggcgagcgcggcgcgggggatggaagcaggcgcccattggacagaatacaaaggcagaaacctaccccgaagg

SEQ ID NO: 454796 - DNA, 122 bp, Homo sapiens
gcctcacccgcctgccctacactaagccgtgaggacgtcttagtgtaggaaaggggtgagcgctgcccgcctgtgcccaaggggccacattcaaccaagggtgggaaaagaggtgagtcctt

SEQ ID NO: 454797 - DNA, 122 bp, Homo sapiens
cctggtcccgggaacactgggggtctgtctgctcgcccacacaccttggggccgggtctgcgcgctgacgcactgaatgtcccgtctctggagtggttgccctaacttcccagacggtcaag

SEQ ID NO: 454798 - DNA, 122 bp, Homo sapiens
acacgttggtctgggactgagggatcacgcatatggctcagtggggtgctgcctgagggccggtccactcacgccacccagacaccaagggcagggtggaagcaaggtctctttttccttcc

SEQ ID NO: 454799 - DNA, 122 bp, Homo sapiens
actcctcccgctgagcttctccgctggccttggccaccactgatctctcctccctctctgcggctttgcctctgctgaatacaaatcgggttctgctatgttcatccttctgtgtctggcct

SEQ ID NO: 454800 - DNA, 122 bp, Homo sapiens
cggtgcaggcggtagagggtggcgaggtcactttctccgtggacctcacggtggcctcagcgggtgagtggttcctggatgggcaggccctgaaggccagcagtgtgtatgagatccactgt

SEQ ID NO: 454801 - DNA, 122 bp, Homo sapiens
attacataagaggagatattcacagattaagatggctggagaggaactgaagaattataccgagagtttatataggaggaatgtcttgtgccagccttaacacagtgcgagccatggatggg

SEQ ID NO: 454802 - DNA, 122 bp, Homo sapiens
ctccgcggcgccggcggcgtggtttggggcgggcagctccatggcaacggaagactccatcgtggccggagggggagcctcgcccgttctgctccccggctggagcgggtggtttggtccga

SEQ ID NO: 454803 - DNA, 122 bp, Homo sapiens
agaccccgcgagaagagatgaccatgaccaccatgccagaaagtctcaacagccccgtgtcgggcaaggcggtgtttatggagtttgggccgcccaaccagcaaatgtctccttctcccatg

SEQ ID NO: 454804 - DNA, 122 bp, Homo sapiens
tcaaaggggacttgcctcagaagttcttgaattatcactagttttatttgtatttttgctcgaggccatagccttgtagatgaaggtgttagaatgctttgtaaatcccagttcttgaaata

SEQ ID NO: 454805 - DNA, 122 bp, Homo sapiens
accgcgtgatccacccgcctcggtctcccaaagtgctgggattacaggcgtgagcccccgcgcctggtcaactattttatgcaatcagtatttattatgctcctactatgtgccaggcactg

SEQ ID NO: 454806 - DNA, 122 bp, Homo sapiens
gatttccaccccggtgatgcagtcggggaatcctgtgagcagaggctgcctagaggtacccggccccttcctcaaaacctcctccaggaaaccttcctagaccatcctggtcttctggaatg

SEQ ID NO: 454807 - DNA, 122 bp, Homo sapiens
tgacatcaagggctttgggatctggggccacgtgcagaacctggccaagcagcagaggaacgaggtgtcatttgtaattcacaacctcccggtgctggccaagatggctgcagcgagcaagg

SEQ ID NO: 454808 - DNA, 122 bp, Homo sapiens
acggcggcgagcactcaccccacgcgcacactcatgaaaccatcccgaccgtcacggcggcgagcactcaccctcaaaggtttatagtcttttattcaaagcagttggaacaacttaaaatg

SEQ ID NO: 454809 - DNA, 122 bp, Homo sapiens
agagtcacatagccctggatggggaataacagccggaagccgctgtgatgcacgacccgccgctgctcattgagcttccaccccacaacagcttgcaaattgaactctaggtcctatcctga

SEQ ID NO: 454810 - DNA, 122 bp, Homo sapiens
gaagtccaggagggaaaaatgacccggaaagacctttgccggcctgggccagccctcttccggagctgatgtctcctcccaccaaccaggagaggtccgccctaggccccgcccgtgccggg

SEQ ID NO: 454811 - DNA, 122 bp, Homo sapiens
gatttccccctgtaagatgctgtatcatttggttgggggggcctctgcgtggtaatggaccgtgagagcggccaggccttcttctggaggtgagccgatggagatttattccccagacatgt

SEQ ID NO: 454812 - DNA, 122 bp, Homo sapiens
aactattggctccagtacatgacaggctgagacagagtctttgcatcatctcctaacacacggttggcaacactgttatgcggtaagcatttgctgagttctagttgaggaagttttaaaat

SEQ ID NO: 454813 - DNA, 122 bp, Homo sapiens
gcgctggcgagccaacccggaacctcccggtccgcctcccgcccccggccccggccccagcgcgcctcctgcatacacgcccgcacccagaaagttcagtcaggggcgagcccggctcggcg

SEQ ID NO: 454814 - DNA, 122 bp, Homo sapiens
cccggtgctgtccttcatcctggaaagcctttcctaaccggagacttccaaattgaaaatcgcaacgctctgttgaagagaagacagagcccgttcttaggcattacaaaaattatccaacc

SEQ ID NO: 454815 - DNA, 122 bp, Homo sapiens
gcccggaaggaggcggagacagcctcgcatggcgcgcgcgtccacctcgccgttccccctcgcgcagctccaaccaaagagagacatccaaccccgggggagtgacaagggggcgggattgc

SEQ ID NO: 454816 - DNA, 122 bp, Homo sapiens
cactctagcctcagagcaagactccatctcaaaaaaaaaagggccaggtggtgtggctcacgtggtaatcccaacactgtgggaagccaacacgggcatatcacttgaagccaggagttcga

SEQ ID NO: 454817 - DNA, 122 bp, Homo sapiens
taattcatttgattctcaaacaaccacacaagcttggtactgctattcccatttagcagacgaggacactaagatgtaaaatggttaaaagcttacctgctgtcacacagcagtggcaggat

SEQ ID NO: 454818 - DNA, 122 bp, Homo sapiens
ggacccccggcccctcgagctatggcagaatcacagaatggcctcctgtttgccaagcttcgcagtctgcaaagcctgccctctgcagcttccctgccaatggtcccagcggctttgcagtg

SEQ ID NO: 454819 - DNA, 122 bp, Homo sapiens
tgttggctgcgctgcgagcagtgagactcggtctagctagccccccgaaaagttgggccacggggatcagcagggcagagccggcctctccagtccccggcttcccccccaagatgatctca

SEQ ID NO: 454820 - DNA, 122 bp, Homo sapiens
gcaaagccaaacctatctcatcttgttttctgtggtgaaggtgatggcagtcagttggagcgagcataccctaaagctctacaatgtggccaaggactttgactgtacattgttcttttttt

SEQ ID NO: 454821 - DNA, 122 bp, Homo sapiens
acgagatgtaggctgggtagccaaatcctatcaggttgcagaggagagaggctccataaccgaacaccaggtacaaggccaccagtccgatgacacctggggaccacaaggagagaagtggg

SEQ ID NO: 454822 - DNA, 122 bp, Homo sapiens
ggaatcgggggagggcattgaagtatctccttcctcacttgagggaatagacttcgtctgcgctgtgctactaatccccttggggaatagggttgaaccagaaggaactgaacgcttgccat

SEQ ID NO: 454823 - DNA, 122 bp, Homo sapiens
ctgtgcacgaaattgttgcgatgaaggtgcaggacgccacaggccacctcacaggccatgcgctgcagggtccgggggtcgggagccatggactccgccacccggcagctccgcaggtagcc

SEQ ID NO: 454824 - DNA, 122 bp, Homo sapiens
gaagatggctgagaagcagaagcacgacgggcgggtgaagatcggacactacgtgctgggcgacacgctgggcgtcggcaccttcggcaaagtgaagagttgagtacgcgctccggaccgct

SEQ ID NO: 454825 - DNA, 122 bp, Homo sapiens
cagttgaagatctcctctgcccgccgcaggtatttggtaattttcagcttcacagcctcacgtcgctccttgttggggtcaactgtgggagacaagagtcaccagggtccccagccatggcc

SEQ ID NO: 454826 - DNA, 122 bp, Homo sapiens
tttcttggaaccatggctctcaaacttgcgaatttgcatttttaacaatttcccagatgacgataaagctagtctgggaagaacacttcataatcactattataaagaaaacctgaattgtt

SEQ ID NO: 454827 - DNA, 122 bp, Homo sapiens
agaatcaggacccaaggccagattcattgactcaagatcctgtttttttgtacaatacaccgtggatagagagattaatgatacccaacattttttagtaataggaacgctttacatatata

SEQ ID NO: 454828 - DNA, 122 bp, Homo sapiens
ctctcatgcccatggaccagcaggcaaataaaagagttagaatgttgcccctggtgtactcgatcctctttaccatgagaacacccaggttgctgctgctcagtgaaactcagaggatttgc

SEQ ID NO: 454829 - DNA, 122 bp, Homo sapiens
aaacttcttttggtttcttccttggtagagtatttagtgatttataaaaaaaaaattgctcggattttacttaaggagacactgtgatccttctgaaatgtaattattttataatgtgaata

SEQ ID NO: 454830 - DNA, 122 bp, Homo sapiens
tcgggaagtggagcaggtatgtgcctggaggtgggcgtccagcaccaaagtcgccccgtacgcgtgagggtctcgggacaacagaacaaacagcagaggggcagatgccggctgcaaagggc

SEQ ID NO: 454831 - DNA, 122 bp, Homo sapiens
cacactaatactgcaagtaatgttaatgcaacaaaagggctcagaggctgaattcctctccgttccatagcctttcctctgcaatctataccatcaatcccctcacgccttctactttcagc

SEQ ID NO: 454832 - DNA, 122 bp, Homo sapiens
ggcgtctaccagtgcatggccgagaacgaggttgggagcgcccatgccgtagtccagctgcggacctccaggccaagtgagtgtagcccaggggtctgagattccagctgatgattcactga

SEQ ID NO: 454833 - DNA, 122 bp, Homo sapiens
ctctgagggaatcttcgcgacctgcgcaggcggtcgctctgataaccgcatcccggtttccgggacgacagcggaagtcacttctcacacgcctttcttattggataccggcttttcatggg

SEQ ID NO: 454834 - DNA, 122 bp, Homo sapiens
atagcgaaatatataattaaggagagttcgggggcgtatcctgcaatgggatgccgagttcgataaagttgcaggatgctgggaaagtggattgatttgctgttgctaaatgaatggaaaca

SEQ ID NO: 454835 - DNA, 122 bp, Homo sapiens
acttcgagccaccctgaacttggtaagagctgccctgactcaggatttctaaaaggagaccgacagactcaccagcttagaatggagagaggacagatggacacgtctccaagacaaaaata

SEQ ID NO: 454836 - DNA, 122 bp, Homo sapiens
cgtccaccgtaacttccctgacatcagcagagttaaatctgtgcgacttgacttctgggacgacagtattgtggaggtagaaaggcatgcccgtggagagccatggaactgcgggactggag

SEQ ID NO: 454837 - DNA, 122 bp, Homo sapiens
ccgacaggtggcagaggcaaggcagctcactgctatacagtgtcccaagaaccaagtggccgtgacttcctatcctcaatttcccagcgacacccggaaagacaccgtgccatagatcgagg

SEQ ID NO: 454838 - DNA, 122 bp, Homo sapiens
aggtttttgctacaatccagtagacttgggaagtttctaaatacttgaagttggttagttcgaactttcaagaaaaggaaacagttaaaaacagagcttgacaggtcacccaggtgacccgg

SEQ ID NO: 454839 - DNA, 122 bp, Homo sapiens
ccgcgtggacctgacagctctcagaagctccaggcctcgctgggtggggcgggtagcggccgccgctgcctcagcagccctggtcccggcagagcagggctggcgaggccgctgctgccgcc

SEQ ID NO: 454840 - DNA, 122 bp, Homo sapiens
ccctccagcacctgacaggtgagcgtcgtggatgaaatgagttatgtgcctcaatcgctccgaagcagggcctgtcataaacacacgatctgctaccttttcaaggaaaggaactgctttgg

SEQ ID NO: 454841 - DNA, 122 bp, Homo sapiens
cctcctcctccccctcctcctccctcttttctctcctcctcctcccctttctctcctcctcgcccccctgaaaacctgtggctcggagagaccttggcttctctgggactctacccctgggg

SEQ ID NO: 454842 - DNA, 122 bp, Homo sapiens
tcggccccagaagcaggatcagtgttagctgcagcctggccctcactggctgggttactccgggcctcccttgccatcggccacccccaggcttggcgcggaggcgcaggccgcctgggtcc

SEQ ID NO: 454843 - DNA, 122 bp, Homo sapiens
gggcggggctgactgcggggaccggctagggtctcacaccctccagggaatgaatggctgcgacatggggcccgacggacgcctcctccgcgggtatcaccagcacgcgtacgacggcaagg

SEQ ID NO: 454844 - DNA, 122 bp, Homo sapiens
gtgcatacatgcatgaaggagggaaggaagcaaggaaggaaagaagaaaggaaagtagaacggtggagaaatcaatgaggccaggagagatcaggtaagtcttaatttaataaagagatagg

SEQ ID NO: 454845 - DNA, 122 bp, Homo sapiens
tcttcaatgttttttgaaacagaaaagtggtggtatataaaagttgttgctacacatacacgagaagcatgttgaggtgtgcaggggcagcgccgtgtcctattttctgacctccttgctgg

SEQ ID NO: 454846 - DNA, 122 bp, Homo sapiens
ctggaactcaaacccaggcaagccagctgtagaaaggaagagaataagtgacctttcatccgtttctccatatgacttatgtagatgtttcttttgcacagcacaggttggtagggtcaggg

SEQ ID NO: 454847 - DNA, 122 bp, Homo sapiens
ctcagagaaaaagttccctcttttggaggggctttgggggggcaaggcctaggaaaaaggcgagcgcagaggaaaaaaaatctatcatagaatatcgctgctagggtgttttttttctaatt

SEQ ID NO: 454848 - DNA, 122 bp, Homo sapiens
cagtgggccaggcggcccggcgaccaatcggtgcgcgcgctcgcaccctgccgcggcggccgggctgctgtttccaccaccactcctggcccggggtcgcagattcaaattttactgcactg

SEQ ID NO: 454849 - DNA, 122 bp, Homo sapiens
agatagcatcaggatctcagtgaagtgggatggtatctgagtgcctagcacagtgccccacgcagagctcaatgcatcttagctgaacaataacgaatgcagctgcacatcttcaggcccat

SEQ ID NO: 454850 - DNA, 122 bp, Homo sapiens
aaagctcttgcgctaaggaatgtcagagaagccagcgcccggtgcagccgagaagcttagcgacagggttgctgggccggagaccacgagatcctagaggctacaaagaaacatttccccat

SEQ ID NO: 454851 - DNA, 122 bp, Homo sapiens
tcctggtgagggcgcaagcaccttagtgcagcccaccgcccctgacggaccgggaagctccgtgctgcctaaccctggtgagggcccgagcacattgtttagctctagtgcttctgtggacc

SEQ ID NO: 454852 - DNA, 122 bp, Homo sapiens
ggtggttgtttaatctactctgttcgttcataggtaagaaaaactaccacctaaaataaacgactgttcaatgtctcacagcggattggtgctcaaactgggatttaaaattaagtcctcaa

SEQ ID NO: 454853 - DNA, 122 bp, Homo sapiens
accgggttggagattagctctgtgaaaccagcctcaaggtccacagagcagggaaggctgcggatgcatccctgtgctggagcagcaaagggccccagaccagggtatggagaagcttaggg

SEQ ID NO: 454854 - DNA, 122 bp, Homo sapiens
taggaccctccgagccgggtgggggatataatctcctggtccgccgttttttaagcctgtcggaaaagcgcagtattcgggtgggagtgacccgattttccaggtgccgtctgtcaccactt

SEQ ID NO: 454855 - DNA, 122 bp, Homo sapiens
tcatggcctgggggttggggacccctgcttgaggttaaagcagcccagagcaccagtggccgctgtaccctcccttgtgctgtgccctcagctggaatgctgccaccctctgcatggagtca

SEQ ID NO: 454856 - DNA, 122 bp, Homo sapiens
catccaggaggctgcgcggccccggctcctcagctccctcagtgtgccccgtggtgtcaccgggactccaggcacccgctcccctgcgaccatgccaggcacgctgggaggaggacggcagc

SEQ ID NO: 454857 - DNA, 122 bp, Homo sapiens
gcgtaagagtcagaggaggacgcggcgtacccggagagcggagggtacctacataccctgcgtggcggtcgatcttgcctgggccccagcagcagaggcagagtgccccggtccctcacccg

SEQ ID NO: 454858 - DNA, 122 bp, Homo sapiens
ggccttggctgggccgtcggggtggcgccgtgccctggaggtcgtggctggaagcgaggccgcgggggtccaggagcgctcatcggggcgccagatgcagcctgcgggacgtccagtgcccg

SEQ ID NO: 454859 - DNA, 122 bp, Homo sapiens
tccccctcaggaacttgactgcttgggctctgactgcatgcctaccatgtgtcaggtcttcgaggaggagtcccagtcctcaaggagtttaaagttttgggtagagaaacgtgtggattgcc

SEQ ID NO: 454860 - DNA, 122 bp, Homo sapiens
gctgatttttaaatatttttttgtagaaataaggttttgccatgttgcccaggctggtctcgaactcatgggttcaagccatctgcctgccttgatctgcccgccttggcctcccaaagtgc

SEQ ID NO: 454861 - DNA, 122 bp, Homo sapiens
ctcgtagtggagatagtttgctgtgagccgagggggtaggagggggcatgtggggagggccgggtcttgctggcacctcccagccacccgctcctaatggcgtgaatgtggtcggattgctt

SEQ ID NO: 454862 - DNA, 122 bp, Homo sapiens
tgctcgcactgcacatctagggcactagtagcctcatccaggatgaggacccgcgggtctcgtacaagggcccgggcaatggccagacgttgtttctgtcccgcagccagctggcttccctt

SEQ ID NO: 454863 - DNA, 122 bp, Homo sapiens
gacactcccctcattctggtgataattaaccttggctccctctattaacagcaacaaacacggttcaaagactgatccagagcaatgaatcagcaattatttacttacttcttcccagcaca

SEQ ID NO: 454864 - DNA, 122 bp, Homo sapiens
attcctcatctatgaaacggattgataatatctacctctaggaataaactagctaatagacgaaagtgctgagcacagtacccagcatgcaacaagtgcttctaacaaggtagcaatcattg

SEQ ID NO: 454865 - DNA, 122 bp, Homo sapiens
ccacgccctgccgaagcaggacgttcccacgctggggcggccccgagaaaggctgtggggcgggccgggggcgggcgcccgcactcaggtccctccgcagcgggttctcagttgctcgctgg

SEQ ID NO: 454866 - DNA, 122 bp, Homo sapiens
tgcttcagctctgagaggttcctggctggtctgaggggtgaggaaccagaaggcagaaggcgagtgccctcgcatggcaggagaatgaccctgaggcaggggcagccactccccacatggcc

SEQ ID NO: 454867 - DNA, 122 bp, Homo sapiens
cccgcgaggctccggggtctcgggcttccgccttcttgctgccctcgttcttgccagggccgcggttagtccctgctggccaccccactgcgaccatgttcgttccctgcggggagtcggcc

SEQ ID NO: 454868 - DNA, 122 bp, Homo sapiens
cgcctgacatgcacagccccgcctggggctgaacaaaggcccagctctgccttcccgttacggctcatcctgtaaacggtgtcctttctgtggtctgttgagtgccgtattttttgaatttg

SEQ ID NO: 454869 - DNA, 122 bp, Homo sapiens
ccacactcaccataccctgacaccctgtgtgtgttagggcctagtgctatgcactgcagacgctggaggaagcaggaggagagggagtgaagaagggagaaagcttagtttcagggcagatg

SEQ ID NO: 454870 - DNA, 122 bp, Homo sapiens
gcagccgcactctgtccgatgagtccacacgtgggcggctgcgttcagtgctccctggcacggggaccccaagccgtaagccggacaccacgttcccaaagccaggagggtcatgacatgtg

SEQ ID NO: 454871 - DNA, 122 bp, Homo sapiens
gttctcatgtcccatgaatcgcttctgcctcagcattttcagagtgaagaacaataaggacgggtaccttccctcatactccagaccttttagtgaccctaggctgtgttctcagtcatccg

SEQ ID NO: 454872 - DNA, 122 bp, Homo sapiens
actccttagattccctaggcttcctcccagaggaacgtggtaggacagaattttaaactacgaagaacttcaagttcagtccttacatcctatttgaatgtgaaataacttcacctctctgt

SEQ ID NO: 454873 - DNA, 122 bp, Homo sapiens
tttcttgcagccctcaaggcccctcggtgtcagcgaaagagccctcatgttgtacctcggcgccccgcgggaatgcccacccagcagagccggcccacggggagtcaggctgccggcccggg

SEQ ID NO: 454874 - DNA, 122 bp, Homo sapiens
cagccctttccacaactctttcttcccagggacctgttcttggaacagtaaaagactcaccggccatggcttttctctcctacccttcttgtgtgggctgaaactgaaagtatgtttcgcct

SEQ ID NO: 454875 - DNA, 122 bp, Homo sapiens
gcagaggaggaggacgaagggttttctgggtccggagtggtgctagccagatccactgcacgcttggggtttccgctcccaccctggccagggccctgggcagcttccccagtggcatttgc

SEQ ID NO: 454876 - DNA, 122 bp, Homo sapiens
ttttaataccgtgccaggccatggcaaagtgaggtgcctctgacgtttgggctgccacagcgtgtttttcagttactctggtaacacctgtgacctgagggttattctattcgcgttagcaa

SEQ ID NO: 454877 - DNA, 122 bp, Homo sapiens
ttatcatgaaaagggcctgatttgaaggtagagataggcttagatgagaaaaattgataacgcaatgttaatactattgatatttcataggtatattttgttagaaattggttttttggtgc

SEQ ID NO: 454878 - DNA, 122 bp, Homo sapiens
cacactcgcgcgcacacatacgcggcgctcgccccccggcccccggctcgggccgcgagtcgcagctccctgccgccgctcccgccgccacggatgcccgcagctgctcccctctgcagtgc

SEQ ID NO: 454879 - DNA, 122 bp, Homo sapiens
caaaaagtagttatttcagaggcaaagggtgcgggctgcctggaacacacattaacaaatcgtttgaagaaggcattagtgctaaagatgtcggtgccacaaaaccaggccggtggctagtt

SEQ ID NO: 454880 - DNA, 122 bp, Homo sapiens
caagatctccaggtaatgcctggtaaaaggagggctccagggagaatgttggggccaacacgcaaagcgcgtcaccttccaaccggcggagagtgaaggaaaacaggtacggctcggcttgt

SEQ ID NO: 454881 - DNA, 122 bp, Homo sapiens
tgaggcagggcccagagcaggcatctgcactggaggggagggggcatctgcgctgccctgcgccctgcctaaggcccaactttcattagcaccagggctccccttaagtggcctggagggga

SEQ ID NO: 454882 - DNA, 122 bp, Homo sapiens
tgagaacagtaactacggtggtgcatttttcccccctgcacgtaacgtacagcactctaccgttttgccaagcactttgtgctcctaaaatttctgttgcattgttgtttgaatgaatgaat

SEQ ID NO: 454883 - DNA, 122 bp, Homo sapiens
gccggcttggacacttcgtttttggttttctttcgggacagcatccttctcgacgaggcccgaggccgcgctgaactgcctccctagggctccgcgccgggcgccggccgtctccgccgcca

SEQ ID NO: 454884 - DNA, 122 bp, Homo sapiens
ccgctcagctcccgcgccgacgctacttccggccgagtcaaggcccctcccccttagaaacgccacttccctccgtgaaaacggctggacaaggttgaacctagacgcatgcgcccaaagcg

SEQ ID NO: 454885 - DNA, 122 bp, Homo sapiens
tcttgctgccttgaccttgcattgacagcacccctccctcccccacaacgactgggcaaccgactggctgtgggcccaaggccctgtgccagagagatatgttcacccccttggaaacccgt

SEQ ID NO: 454886 - DNA, 122 bp, Homo sapiens
catgacccacacgcacgtctgcagcagccccgctcacgccccggcgagcctcaacccaggcgtcctgcccctgctctgaccccgggtggcccctacccctggcgacccctcacgcacacagc

SEQ ID NO: 454887 - DNA, 122 bp, Homo sapiens
tgagcctctgagcccgagacagcaaggtcattcaacccacacgtccccacccagccagggcgaggatcagagatgtggcaactcccggccttggactcaggcttgttactcataaacccgca

SEQ ID NO: 454888 - DNA, 122 bp, Homo sapiens
gtggctcatgcctgtaatcccaacaattcaggaggccgaggcaggcggatcacctgaggtcgagagttggagaccatcctggcaaatgggatgaaaccccgtctctattaaaaatacaaaaa

SEQ ID NO: 454889 - DNA, 122 bp, Homo sapiens
tgcaggggcccggcgagcaggacgcgagggcagccaggtgggtcctgggccaggccgggccgaggctcgcgcgcacgtgcaggaggcgcccgggccccgctctcctcctcgaagtcctcgtc

SEQ ID NO: 454890 - DNA, 122 bp, Homo sapiens
cctgtccttggaagccctttccaagagttcgttttacacccacacaaacaagacctcaagcgtcccagatacgtcagcagttcattctgcgggtgaagaaaatattgacatttttcagatga

SEQ ID NO: 454891 - DNA, 122 bp, Homo sapiens
ccctcccgcaggcgccgtggcgagatcactctgaatatgtaacatatttgtaacgtgcgccgaggtgtgatgtgtgtgctgaaatagggggatgggggaattcgaagccggattgggaaggc

SEQ ID NO: 454892 - DNA, 122 bp, Homo sapiens
ggcggcactcgggctggaatccctagcttccctaacctcctttttccagtccggagtgagcgggggccccatcgccccacccccctttcctggctctggttacggccttgcgagttgaacaa

SEQ ID NO: 454893 - DNA, 122 bp, Homo sapiens
agcctgggggaggccatttatacccctccccctgggcccaccagcccaactcgccgctgccggcctgacctcgctcccagccctgctgcccagattctaggtgaggcccagcccggcccgcc

SEQ ID NO: 454894 - DNA, 122 bp, Homo sapiens
ggaagcgttgcagtggcagccgcaggcaggtaaaactagtatttgcactcacacactccccggattcttcacagacagggatggaagagaaaacttaggaagttgaagtttggcattaaaat

SEQ ID NO: 454895 - DNA, 122 bp, Homo sapiens
ccgtagagggtgagtcggtggcaggtcctgacggccggcgggtccttgggaggtggtcgccgtctttcatccttgctctccctgtctctggcttccgcgggggcgcgtagggggaggccgga

SEQ ID NO: 454896 - DNA, 122 bp, Homo sapiens
atcttcgcggtttcttttttcccacggatgtagatttcgccagcctctggacagcacatgcgcagtatgctgctagcgccgccccaggcgcccggagctcaggaagcgcaggtggcgctgcc

SEQ ID NO: 454897 - DNA, 122 bp, Homo sapiens
ttttctactttggaagatcaatgtaaggtagaaagttaatccctttcttcttgccctccacgccttccacgctgatcgaagcgaccgtcctccctcgaacatttcgtgggctcattctttgt

SEQ ID NO: 454898 - DNA, 122 bp, Homo sapiens
ccaaagtggctggttcaccttcaagtaggaaaatgttctgatatctgagaaggtcccctacgtaaaacactgtgagcttcctagctggctgaactgccccccagacacagtagtcttaacac

SEQ ID NO: 454899 - DNA, 122 bp, Homo sapiens
aggctgcaataatttccctttgatgacatcatccactgtggaagaacccagttgcttcagcgagtcgaactacagttttaacctcatcaaatatggcatctcccttgcttgctgcagcaggg

SEQ ID NO: 454900 - DNA, 122 bp, Homo sapiens
ttacctggctttcgatgacacatttccgtcgcaaagttggagggtgggcataactcgggtcggtacttcgggtcaggcagtgcgctggatgcctaagtcacacactccttcggtggtccccg

SEQ ID NO: 454901 - DNA, 122 bp, Homo sapiens
ccagccatagtcagagggaaatccactatcccagcagctggaacttgaaatttggctagccgtaccactactggctaaagcactctgggttcctaaataaatcttaaaagcagcctaggcca

SEQ ID NO: 454902 - DNA, 122 bp, Homo sapiens
gcggcgggaccggtgcgggcgttcagtcagcccggggtcctggaggccggcggggggattcgcagcagcccgagggacggatggatggcagaaaggagtctctacttccaggttcccagtga

SEQ ID NO: 454903 - DNA, 122 bp, Homo sapiens
atgtcaactacatattcccctagatacgaatttgtgaccacaaaattccttacacaaattcggatctacagggtatatacagaagacagacagatcttcttggcccagaaattttccagttc

SEQ ID NO: 454904 - DNA, 122 bp, Homo sapiens
gccagccccgctccgccaggtgcagcgcagcgcaggggtgggcgggggtggggctcggcgcgcacgttcacggggcggggagggggcgggtcaggggcgggaccacagccggctgggccggg

SEQ ID NO: 454905 - DNA, 122 bp, Homo sapiens
aagtggggagcccggagaagtggtcgggattgtaagcagaaagtggggacctcagaacaccgagctcaggttggaatgatctaaggacacaaaagcatggggcctcggggctggggcggtgc

SEQ ID NO: 454906 - DNA, 122 bp, Homo sapiens
ttgtctgtgtgatcagaagcttcggccaactgagaggcggggaggaagacggagggtggacgcagccctttagagttgcagcgccacactccacagcagcaaggctgcgcagcagagccagc

SEQ ID NO: 454907 - DNA, 122 bp, Homo sapiens
agcagagcagctatcggggctcctggcccaaggtgcaaagtcagagacagtggctggggccggtgccaggcgagccgtgaggggacagggaggtgccaggtcccctaccagaggtgcgtgca

SEQ ID NO: 454908 - DNA, 122 bp, Homo sapiens
agcatcgaccgctacctggccctggtgaaaaccatgtccatgggccggatgcgcggcgtgcgctgggccaagctctacagcttggtgatctgggggtgtacgctgctcctgagctcacccat

SEQ ID NO: 454909 - DNA, 122 bp, Homo sapiens
tcactcttccaggtggcctcaaacactaagcagaacagttccaagccaggacccacctgtcgatgccaaggtgaggtaatagagaagggatccacactggttgaggagaaagggcatcaggt

SEQ ID NO: 454910 - DNA, 122 bp, Homo sapiens
ccacgaaggcccgctcagcctggtcgaaggaggacttgttgacccagatcccccaggtcacgtggtggcaggccacctggtttccatgggtgcagagaccccaaggggccaaggcaggaggc

SEQ ID NO: 454911 - DNA, 122 bp, Homo sapiens
gccgggtcaaagagtgtcagcacttgccatatcgacaggtaactgtcaaactaacctccacgatagcactacccacttattgtagatgtcagcctctacttcccccacaatcccaccaacac

SEQ ID NO: 454912 - DNA, 122 bp, Homo sapiens
tgcggggtgaggaaacgtccacggaccctgcttggggtggaacggggacagcgggtgggacgcgggggacatacgtctgacggggaccggagatactagaggaagggacgcgtctgctgcct

SEQ ID NO: 454913 - DNA, 122 bp, Homo sapiens
ccccggctccgccagcccaatctgtcagagaagttgtgtacaaactgcgcggccgccctgcgcgcgaagctcgtggcccgagaggggtgcggtcgggccgacggaggcggggccctggctgc

SEQ ID NO: 454914 - DNA, 122 bp, Homo sapiens
ccgggatgcggaatcttgagcctcggtgtcgggttacagagttgtcctggtgacgggatgcggagcgtttcctcctttttgttgtgggggcggctggtggcaggggcagctggtggcagggt

SEQ ID NO: 454915 - DNA, 122 bp, Homo sapiens
ccaatcaagcatcatggaataccacgtgccaggtctcattcatgcctcgctggtacttcccgggtcctcctgccgcgtccgtccgctcccggtttgctcacttttctaacaatcttactcat

SEQ ID NO: 454916 - DNA, 122 bp, Homo sapiens
tttagaattcaatcactggacaccaggaaaggcaacttcagcaggagggacaggcactagcgccagggccctgggaagcacctctgaactgcctacatgtggggctctgtacaacaggaatt

SEQ ID NO: 454917 - DNA, 122 bp, Homo sapiens
cctattctgtcttaaattacagtttgtgggcatacttatttcaagaattagaatgcatgccgtctgaagattgtttttctaagttcaaagtgcagactatgttggaggtaatataatttata

SEQ ID NO: 454918 - DNA, 122 bp, Homo sapiens
gtccagtatgcccctataggagccccctcacctgtgggtcaaaagctgggtaggaatgtacgtgaatcaatgtgtgggtcagtttgtgtgtgtgttaatatgtcagtgttgctctgtgtgtc

SEQ ID NO: 454919 - DNA, 122 bp, Homo sapiens
agctcactgacgctcggaacacaagtgacgagggatttcatgaaaacaaagccaaacaaacgaggcagcttccacgggcacctggctgaataaattaaacttgattgaatcctctattgtaa

SEQ ID NO: 454920 - DNA, 122 bp, Homo sapiens
gctggtcagtcctcgcggctctagcccctcgctcaagcctctccctcccgcccgtgaggccggctttccccgggcccctctgcgcagtgtatggggttatttttactttcggttatctagct

SEQ ID NO: 454921 - DNA, 122 bp, Homo sapiens
aaggatgccgtgagcctgccatgggggcagatgtgcaacctgtgagtgcaaacacgggggcggcctgtccacgtgggcaccggccgcgtttgaacggaaacttcaccaggccgaaggggcca

SEQ ID NO: 454922 - DNA, 122 bp, Homo sapiens
gactcgacaatgcccagctggtgtcctcagccttgaggttgagtggcagacaccttcccacgccctgtctggctgtgtgcatgactcagcagttcctgtagggagaaggtcatccagggcct

SEQ ID NO: 454923 - DNA, 122 bp, Homo sapiens
taacctgcaggacccgaagcgaggatcagggaaggtcggtccggaccccagccccagccccgcctccattccctggccacagcagcctgtagcttacccggaaagagatttttatccggtac

SEQ ID NO: 454924 - DNA, 122 bp, Homo sapiens
ccccctcaacttctgatgcttgtcttctgatacatcacccttcggcccacctgaggcccccgaggcacaggaggaagtatccaaagccagttacctgacactccacttctctgctcagcttc

SEQ ID NO: 454925 - DNA, 122 bp, Homo sapiens
cgttatctccacctttagacctggggacacagaacacaggcatcggcatcggggctgtcccgacctgagtgcaggcgccacttgcgagaatcagttttcataggaatgtggctggggaccca

SEQ ID NO: 454926 - DNA, 122 bp, Homo sapiens
cttgtgaaggattagaatgctaagtggctttcagcttttttcacactaaggtacgttttacgtcgcaacctaggacacagctatctaaccaaatgagacgtgatggaagcaatgtttctcgt

SEQ ID NO: 454927 - DNA, 122 bp, Homo sapiens
tcgggaagccgtcccctttggagtcaaacttaaatgcttctttccacttcagcatgttctcggttacagcactccccactatcggtcctgtcttaaacctgaataagttcctatctttcttc

SEQ ID NO: 454928 - DNA, 122 bp, Homo sapiens
cttaatttgcaagctgcctcaacaggagggtgggggaacagctcaacaatggctgatgggcgctcctggtgttgatagagatggaacttggacttggaggcctctccacgctgtcccactgc

SEQ ID NO: 454929 - DNA, 122 bp, Homo sapiens
ggaaggaaatggatcagataccttgtctccttcttctgcactaccaaacaccccaaatggcgtccctagcaatcagattccagaaacgtttcctctcctcttgaaagcccaccgctcccttc

SEQ ID NO: 454930 - DNA, 122 bp, Homo sapiens
agcgaggccggtgagtgaccctggcccggggcgcaggtcacgatccctccccatcccccacggacagcccaggtcccgggtctgagtctccggtctgagatccaccccgaggctgcgggacc

SEQ ID NO: 454931 - DNA, 122 bp, Homo sapiens
gccacgtctcacacacggaattggctcccagtttaatctgctagtgaaagggagacattccgcctctgttttgggtcaagaaacgtaaaatggttttgctagctaaagaaaaacaaaaacgg

SEQ ID NO: 454932 - DNA, 122 bp, Homo sapiens
agagcggctaccccagccataaacacagtggcctcttttcttctgctttgcttgctgaggcgactgcagctctgggagacctgaagaggctccaggatgaaagagcctcccacccttaaacc

SEQ ID NO: 454933 - DNA, 122 bp, Homo sapiens
cgcgcccaggcaccaatgatggggttggtgctgataggtggttgcgggtgacctcccgagcgcgcccgtaccccaccggccctcacctccccaggggcggccgcctgatccgatgtcccgac

SEQ ID NO: 454934 - DNA, 122 bp, Homo sapiens
agtgaaattgctgcgtgcgcccagggcggcggcggcgccaggcaggcgcggatcccgctgcgagggacttgcctgctgacctggggccgcagggagctctgctttatcaggagaatatttga

SEQ ID NO: 454935 - DNA, 122 bp, Homo sapiens
ggggagagaaaaaatggaaagtcagcagccagccatgaaggggttccacaaatatccttacggcctcatcaggatctcatggcccttgggagatatttataggaattggggaagtcactaga

SEQ ID NO: 454936 - DNA, 122 bp, Homo sapiens
gggacatgtatacattggagccactgaagcattggtatctccactgatactttcagtcaacgcatgtggtttgcagaacagctggctagatatgcatagatcatctgcctctgtctcaggaa

SEQ ID NO: 454937 - DNA, 122 bp, Homo sapiens
cctgttttcgttggccgcgctgggatggccgccacagctgtaggtgctgctagtgtttagcgctggtctttgccgggcgttgagggcagctcagcctccttgtttgtccggttcgcctgtgc

SEQ ID NO: 454938 - DNA, 122 bp, Homo sapiens
ccaacgtggccagtcggaactccatcctaccaggcatggcagaggtagagcagacctcagcggtcacacggagccgtgagcaagccagtatttactcaccaaccccgtcaccgtttggcccg

SEQ ID NO: 454939 - DNA, 122 bp, Homo sapiens
aagatacagtgtttcactgctgctggagtgcagtggctctatcatagcttactatggcttcgaactcctgggctcaagtgatccttgagtagggctatagctaggactataggttcacgcca

SEQ ID NO: 454940 - DNA, 122 bp, Homo sapiens
gtggttctgctttggtttccgagtggacgaggttctctgggcagcgggactgagtcttggcgcccaggtgagccgcccttctccgacgagaaactacttgttggcgttttccggattcaggt

SEQ ID NO: 454941 - DNA, 122 bp, Homo sapiens
gcgttgcgcctcggcgggagcctcctggagaggctctctggcagagccccagggatgcagcgacccagccaaggtccgtggtccgtggtctccgctggggaggggctccccggcaacttggc

SEQ ID NO: 454942 - DNA, 122 bp, Homo sapiens
agcctggccctgctcacccacccactgcctgggcctggccataccttggtctcggtgcgccgggttgtgccatcttcggatgtgacaatagacacatgggaagtgggtgtgccggggtcctc

SEQ ID NO: 454943 - DNA, 122 bp, Homo sapiens
acaccgtcccttgcaaggtgacaggccgctgcggctctgtgctggtgcccttcatccccgcgcccaggggcactggcatcgtctcagctcctgtgcccaagaagctgctcatgatagctggt

SEQ ID NO: 454944 - DNA, 122 bp, Homo sapiens
gtcgggggcggggcaggtgaacggaacctggtagggtctcccgaagaacagggtcgacaacgcgatccaccgggcccgaaagaaggccaggcccagtcaccgcccgccgcgggcaggcccaa

SEQ ID NO: 454945 - DNA, 122 bp, Homo sapiens
tcagggtaggtgttatattttctgcatttttgtaagtctaagatcaggcatataccatggcgtcagtaaactctgaaagagtgggggtaggaagaaaagatatgtgcttatcaccttttctc

SEQ ID NO: 454946 - DNA, 122 bp, Homo sapiens
ggccgtgccatcacaaatggctctaggtcaacacctccagcctgcgtgcactgcagcatccggatgccgtaacctggtgctgctggagccacacgcagccagggccggcatgggcagaagcc

SEQ ID NO: 454947 - DNA, 122 bp, Homo sapiens
agaaagcagcgaggcaatgcctggatccgagaggaacgcttctctttttgtgtctcaagtcgcctgcatcctgtcatttagctccggcttcctctcccttttcccacacttgttcctcttcc

SEQ ID NO: 454948 - DNA, 122 bp, Homo sapiens
agcgatcaaatcaaaccctgaaggacaaaagactgtttgattcatatggaaaaagaagagcgagaattaagaaaatagcaaatcagtggtctgaagcatttcatgtccaaatcttcaatagt

SEQ ID NO: 454949 - DNA, 122 bp, Homo sapiens
cacccggcgcggtgtcctggagccccgtttccagccgcgccttcttctcccctcctagctcgttatccattagtataatcctctgtccaaacagtgcagccgggacggccagacgtttggtg

SEQ ID NO: 454950 - DNA, 122 bp, Homo sapiens
gtggcccgcctgggcggccttgttctttccgcagcagccaggtcgggagactctcgcagtcgctttaaaataagtttctctccccctcttactcttttagcatattgcttttgttagagctt

SEQ ID NO: 454951 - DNA, 122 bp, Homo sapiens
tgaaagaagtcggcgggaagtcccgccccggtgggggaggggaaatctaaagggccaaaccgaaatagggggaaaaaaaaagcgagcttcttgtttccgtgttctgaattttgtaacgtgca

SEQ ID NO: 454952 - DNA, 122 bp, Homo sapiens
tcatctggcccttcatgttttgtgagattcctgtgctgctgcgtatgcaggtaattaaaacggtttttcttctgttaatctgtcttatgtcggccaggcgtggtggctcatgcctgtaatcc

SEQ ID NO: 454953 - DNA, 122 bp, Homo sapiens
aaggggtgacggacggcacctggaaaatcgggtcactcccacccgaatactgcgcttttacgacgggcttaaaaaacggcgcacgacgagattatatccggcacctggcttggagggtccta

SEQ ID NO: 454954 - DNA, 122 bp, Homo sapiens
acacttctgctccagagagggccctgcaagagcggtgtgcgtgggttgcggctgggtctgcgctggggtagtgtaggctgcactctccggggagccgctgaccttgggctccctaacctcct

SEQ ID NO: 454955 - DNA, 122 bp, Homo sapiens
tagagggctgctttcatctccgcagctctgagacacgcctctgtggacggagggcacagacggctgcctccatctccgtggctttcagacacgcctctgtggacccagcgtgtagacatctg

SEQ ID NO: 454956 - DNA, 122 bp, Homo sapiens
ggaaggctgcggcgaatggcatgtgagaggggaggtttgcgggaggataccagcaggtggcgcgtgtctcctccgggcagattagaatgctttgctcagggccaagaatcccgcaggaatta

SEQ ID NO: 454957 - DNA, 122 bp, Homo sapiens
caggtctttcaaactcctcacagaatttggtattcttcagatttattttcatttctgcctcgtggctcctcctaaggcccttcatttgattaagggaaattagttcccgggatactttcaga

SEQ ID NO: 454958 - DNA, 122 bp, Homo sapiens
agggaaagccggcagctcgcaggagtggctgagtgcctgctctccagcgcccacggagtgcgctcgctcgggaggtgtctctgtcctcggcgtgggagggtctttgagaaggtgaagcttgg

SEQ ID NO: 454959 - DNA, 122 bp, Homo sapiens
aagatgaaaggcagcttctcaggttaatggttggggatcacccccaccccttgcccagcccggccctgccattgtcatccctgttatcaaggctggcaggagaccaaaactcacaccggtgg

SEQ ID NO: 454960 - DNA, 122 bp, Homo sapiens
tgtcccttctaacaggacagggcttgtgcagccgggcttggtcttgtggtcagggagaagcgggcaggccagggccgagctgcgtccggctctcagggacttcctctccctgtgctctgccc

SEQ ID NO: 454961 - DNA, 122 bp, Homo sapiens
ttgggggctcctcctccacctgcccaccagtgaggcccgaggggacccccgagtcagggacggggagaggacagcaccacgatgcttagtaaggacgcatgaagtctaggaagtccagacaa

SEQ ID NO: 454962 - DNA, 122 bp, Homo sapiens
cctggcccttacccagacctgggcgggtgagtgcggggtcgggatggaaacggcctctaccgggagtagagaggggccggcccggcgggggcgaaggactcggggagccgcgccgggaggag

SEQ ID NO: 454963 - DNA, 122 bp, Homo sapiens
cagataggaaaaggaagaatatttctgacctgtgtgcagtggaggaataaatacacaaagcggcatttgtggaactacaaatagttggtcaggactagaggctagggtgtgtaaagcaaggt

SEQ ID NO: 454964 - DNA, 122 bp, Homo sapiens
acctacgccgtttccctgtggccagggtgccgccagcgagtgggtgaggcacacgtgcctcgcggttatcctttgacttccacctcagaagtaagcttgcttttcagatagcttagtttgta

SEQ ID NO: 454965 - DNA, 122 bp, Homo sapiens
caactccctggccatgggcacagctttgtttagagagttgcaaatccattcccacctccccgctcccccagaagctctttattattttattttatttatttatttttttgagatggagtctc

SEQ ID NO: 454966 - DNA, 122 bp, Homo sapiens
aatgtaaaaaagaaaaagaaaaaaggtcacctttatggttctgcttcctcatctgcaaaacggagatagtcactcctgctcccagagctgctgggggaccggacactgcagtgagggaagcc

SEQ ID NO: 454967 - DNA, 122 bp, Homo sapiens
gagccgccccgcctgggaggccgctctggcgcccggctggtgccgggcaggaggcccttgcggacccagcggcctcctcgtcggcaacgcccaccccgcggttcagccacggagcggatgcc

SEQ ID NO: 454968 - DNA, 122 bp, Homo sapiens
tgcacacgcccaccaacagccttgttcctaaattatcttttatgatcgccagcaaatctgcgggtagggggcatttgtacccaaacgaagccgttatttgtggtggcagacatggcattaat

SEQ ID NO: 454969 - DNA, 122 bp, Homo sapiens
gggtataactcgcttaagcaggtctttaacacccggttcccatctttccagagaccctcccgggcgccctcccaccagccaaaagctcacacccctagtggaggaggtgatagggtctgcag

SEQ ID NO: 454970 - DNA, 122 bp, Homo sapiens
atttgtccaatttagtcatccaactgacaaagcaaagcaaccccgcgcttgatccagtgccgagtaggttggtctgtttttaacaacattgcaatgacaaagttagtagaatgtcccgtagt

SEQ ID NO: 454971 - DNA, 122 bp, Homo sapiens
aaatgtctggtacatggtaaggtctcaatatacagtggcaatagctactatttattataccgtggctaggtctctagatgcattatttaatataatccctgccaccaacctataacgaagat

SEQ ID NO: 454972 - DNA, 122 bp, Homo sapiens
ggtgtgggatatcatctcctggtgcaccgtttcctaagcccattggaaaagcgcagtattcgggtgggagtggcccgattttccaggtgccgtctgtcacccctttccttgaccaggaaagg

SEQ ID NO: 454973 - DNA, 122 bp, Homo sapiens
tgttacagggcttgtgaagaaggggcattatgtctgtttcttattacaataaaggctcctcggtctttactgacccctaaagtcctgaatcacaccagaaagacgagaaggcacttatcaca

SEQ ID NO: 454974 - DNA, 122 bp, Homo sapiens
gctccaaaactactactgccaattttatttcagttgctcaggcaaatgtttccaagggagcgattccgaatgtctgcacgatttttacccccatgccggtctccgattccccgtcctcacca

SEQ ID NO: 454975 - DNA, 122 bp, Homo sapiens
gcgggaagaaaagtgggtttggcccaccagcagccggcgggcaccctcccagcctcttcacggactctccttcaggttttgggcgcccggccccactagagtcatgtgggcatttccttcag

SEQ ID NO: 454976 - DNA, 122 bp, Homo sapiens
gtgcggcgtgcgcgtgcggcgtgcgcgtgcggcgtgcgcatctctggtggtgtcagtacacgtggcacagacagttgcggatgcgtgcaacctgcataagtcttggaaccacaaatgtcact

SEQ ID NO: 454977 - DNA, 122 bp, Homo sapiens
catagtttctaggaatctacagcccaggaccacagaactgagatatagttaagtgtatcacgacaccatttcagaacacgtcatcaactcggtcttgaatttgcagcattcaactgcccagc

SEQ ID NO: 454978 - DNA, 122 bp, Homo sapiens
cagaagtggccacgtggcacccacggctctgcactggccaggtggaagaaggaggaaccacgtaagattcaggcgagggcgtacaatcatccccagctttccagtcttgcttcttgttttct

SEQ ID NO: 454979 - DNA, 122 bp, Homo sapiens
ggcggagaaatcgggctagctggaagggcgcagctcctctcccagagctcattctggagtcggagaactgggagagcggcccccgaggcggagcctccctcccgccccgagtcgcgctgccc

SEQ ID NO: 454980 - DNA, 122 bp, Homo sapiens
tgggaaagcaatcaaaatacctgattaggtattcaaggagaactgggacagctaccaaaccgataattactttaaaagggagagtcgttatattctagttatgttctgatacttctcgggat

SEQ ID NO: 454981 - DNA, 122 bp, Homo sapiens
tagtatccaagtcttacctgtgacatgcacagagcttggaaaatggtttttcttccctctcgttatttaatagtcttcttgtttatgacagtagcctttaaacagggaatgtgttcctgaaa

SEQ ID NO: 454982 - DNA, 122 bp, Homo sapiens
actccacagagataagagcaacagcagccctgaaagcacctcaaggacttctgctgcaaccgaggcttcccactgcatttcccccttacagactctccagtaattctttagactctgtaagt

SEQ ID NO: 454983 - DNA, 122 bp, Homo sapiens
gctgcctattgatcgtgggcctagaaaggcacagctgagctcgttcaaagacgtttgtcacggagccacaggtttccatcttgaccttcttgccctggttttcattcctccttctcttctcc

SEQ ID NO: 454984 - DNA, 122 bp, Homo sapiens
cggggagagagggagagcgggggcaaaggatgttctcttaaagtatccagcgatcagagccgctgaagcctccaaccagaaactcaaacttccctggattgacttttccccctttgttcaca

SEQ ID NO: 454985 - DNA, 122 bp, Homo sapiens
ttgctgaaaaggaagccagtgagaggactgtggcacgcagaggaagtggagccctgtcttcggtcacaccattgatggaggacagatggacagccgtatggccagtcacctctcctcttaaa

SEQ ID NO: 454986 - DNA, 122 bp, Homo sapiens
cagagagggctgagccacccactcatactccccaccgcgtcacacagggtgtgagtgacacggcctcaggggaagacccctctatgctggggctgcaataaacccctgtgctgggcccattc

SEQ ID NO: 454987 - DNA, 122 bp, Homo sapiens
gcgagagcgccccctttgggcctggaggcgcactgcggacaccggcgccatctgttgggccggcgagggctttctggtccaaaccctgggagcgacagctgaactgagaacagtgggggcaa

SEQ ID NO: 454988 - DNA, 122 bp, Homo sapiens
ttatcaaacaaactgcagaaacccagactgttggggctttcaaggcctgttctgcggccccgaccttagaaacccttgtggtgaagaggtcaggaatactctgctggatgcgaactggcatt

SEQ ID NO: 454989 - DNA, 122 bp, Homo sapiens
gctgacaaagcaccatctcctaatcctatcagctgtgtgagcaagagctgctgtctctctcggtgacctaatgttgggtgatctgcacagcaacaaggagcagctgacgtgcttcacaacac

SEQ ID NO: 454990 - DNA, 122 bp, Homo sapiens
tgtcttctcccaaagcagtggaatttcagcagattcccattctcccctcagcaaagatcccggtcacagtagccagatgaaaagcctctttgaacttggtaggggtccattttattatcatt

SEQ ID NO: 454991 - DNA, 122 bp, Homo sapiens
gcatcttgctgagctcggcgttgtgcaggtccgggttctgcactgccagccgtttcctctcgtccttggcccaaaccatgaaggcgttcatgggccgccggatacggctctcggagcccttg

SEQ ID NO: 454992 - DNA, 122 bp, Homo sapiens
tacctttagaaccaggggaggatctgctctcaagttcactgagcctttccaaccagtgagcggtagagtggatcctccccctaccaagccttcagatgagaccgcagcccagctgacacctt

SEQ ID NO: 454993 - DNA, 122 bp, Homo sapiens
gcccaggacgcagacccctcccggagtgggcctaagggtgccgggacgcgcggcacggagcgggaaggaagtgcggagcccacccagcccagccgcctaccgagagcacagcggtccccgcg

SEQ ID NO: 454994 - DNA, 122 bp, Homo sapiens
ccggcgctgggggcttccaggggccccaggagaagctgggctgtgtggtaccaacagccccgaggggtggccttgccctgctcccccggggacccccaggctgagggttctgccgcgggcta

SEQ ID NO: 454995 - DNA, 122 bp, Homo sapiens
gcaggaatgcaatacacagcagtctctggagccggagtcagatacatccacaccttttagcggaatgctttcttagaatatggtaaaccaggttatcatctaaaaacgacaggtcatcatca

SEQ ID NO: 454996 - DNA, 122 bp, Homo sapiens
ctctgctgataacagggtatcccttgacataaatcagccaaaaaataattatcacagaatcgatgtcacctagaaattatacccaaactaccctttatgataatttatatcatgagacttta

SEQ ID NO: 454997 - DNA, 122 bp, Homo sapiens
catggctctcgggaagctttgacgagcccagagacttgggaaggggcggagtgaggggcgcgggaggctctcttaaagcgagaagagtgtcgggatccacacaggaacacacaggagaaatt

SEQ ID NO: 454998 - DNA, 122 bp, Homo sapiens
gtatacctgaagatttacaccttgggagtcaacatggtattggggcacgtacatgggaatcggagtcaaagagctctagggtcaagtagcagtttgtgagccttgtgtctttgcactagtta

SEQ ID NO: 454999 - DNA, 122 bp, Homo sapiens
gcagtaggtctgggatagattctgcatttcttactcacttccaggtgattctggtgctgccggtccttggaccacagtttgagtagcaagagtttagcagattcagaattctacattgacac

SEQ ID NO: 455000 - DNA, 122 bp, Homo sapiens
tctccggtagccccaggggattgtccgtgtgaggttgggtgggtggagtagagccagaggcgcaaatgcctcctggctaaggggcagcgcgcattagagctgggtctcctgctttcggagcg

SEQ ID NO: 455001 - DNA, 122 bp, Homo sapiens
gcggggacacacggcgataaagagccaggccctcgctgccaaggagctttcccgtaacaccgatgcatcaaacaaaaggtagtaaaagtgcctgggtttttgcgttgaaatatctttccctt

SEQ ID NO: 455002 - DNA, 122 bp, Homo sapiens
ggccagctcagccctgatcagaacaggagcctgaaataactcagctaaaattactcatgccgtgtgctgacagcctatgaggctgtcagcagctcaaagcccatgaggttgtcagctggggg

SEQ ID NO: 455003 - DNA, 122 bp, Homo sapiens
tttgtaaaagtttatatttagaatcacagttactttgtactttataatattcagtgtttgcgccttggataccgggcaaccctactccaactgggcctaagacctttggggttcacatgccc

SEQ ID NO: 455004 - DNA, 122 bp, Homo sapiens
aaagtgcaactggcaatgctctagagaaatagatacaattgcaactctctcattcaaccacgaaagcttttctccacgaacaggactttaacatgtcccacctaagggaagaagacagtagg

SEQ ID NO: 455005 - DNA, 122 bp, Homo sapiens
gccagcttactgcaagacaatcacagtctcccatttgttcatcttttaggtaaaaaagctcgcacatttgacttggaagcaatgtttgaacaaactcgaagaacagctgtggaaagaagttg

SEQ ID NO: 455006 - DNA, 122 bp, Homo sapiens
gtccccgccgccgtcggcgtgagcctccacgggcaccacggtgaagttggtgggcatggccgcctgcagccgacagtccccgtcccggcccggcccgcgctgcgccgctcccgccgacgcca

SEQ ID NO: 455007 - DNA, 122 bp, Homo sapiens
gagccaccacgcccggcctctttccctttctgaattgaaattgttactacactctgggtacgtaggggaagatactcttttcatttatgaagtataacaaggagctaatttaagaccttata

SEQ ID NO: 455008 - DNA, 122 bp, Homo sapiens
tacgctcccggattgacttgtcctcctctgatgcctggttcctctgccatcaagacccgccgtctggtgtgaagggaaacgtccctcacccttctgcagtcgccaccgagcactcgtggtgt

SEQ ID NO: 455009 - DNA, 122 bp, Homo sapiens
tagtgttgggggagaagtgtgctgctctgttcaagcaagaggataggagattccgtggcccgtgctgggcattaggtcatttgtgtctggcacaggcttgatctatagtctaatgctgtgtt

SEQ ID NO: 455010 - DNA, 122 bp, Homo sapiens
cttctcaggtgtgagcagctgctggaagaggaggtgctcctgaagacactgcggccggcccgcctgtgcccttggtgccctggctgcctagagagcctcacccctgggccctggggccagga

SEQ ID NO: 455011 - DNA, 122 bp, Homo sapiens
aacacggggacttttttcttccgtgcctgacagctcattagaagaattaatttactctagcgtttgcagtttaaaggacattatttactggttaattgttgttattacaaaatgttaaatat

SEQ ID NO: 455012 - DNA, 122 bp, Homo sapiens
ttatttatttttgacagagtcttgctctcttgcccactctggagtgctgtggcgcaatctcggctcactgtaacctccgcctccctggttcaagcgattatcccgcctcagcctcctgagta

SEQ ID NO: 455013 - DNA, 122 bp, Homo sapiens
agcacttgcgacctaaaataagcaatggaatgaacaggaaggcgaaaccagagtttaaagcggcaggacaaacaggaaaaaggaagagtgaggcaggaagggtttaaatgcaggctcctcgg

SEQ ID NO: 455014 - DNA, 122 bp, Homo sapiens
cttaggagtgggactgcagggttgcaagtggatatcaacacgcagttttccaatgtggcccgtaccatagaaggcctcgtggtgatgccgagtccatattccagcactgacgcaggattgcg

SEQ ID NO: 455015 - DNA, 122 bp, Homo sapiens
gggaacccaggggggttccaagccatggtcatcggaaccgaggaaccctggtgggtccaccgcagagggattgctcaggaatgttgcgccagaagcaagacacaggctggactgaggctggg

SEQ ID NO: 455016 - DNA, 122 bp, Homo sapiens
cctctgaaatagctgcctgctgactcatagtgtaaacacaggggttcattcccttctctccgaaatctgctcgtatgcacccaaaattattattatctatgtccaatcatggaagcaggaca

SEQ ID NO: 455017 - DNA, 122 bp, Homo sapiens
cgctgcccgcccgggccggcgcgctgctgccctctgcctccatcctggctcgcggctccgcgacctgctgcccagcccgggttcaccgcgctggcccgagcgccttcctgatgctgctgctg

SEQ ID NO: 455018 - DNA, 122 bp, Homo sapiens
gaaatgaaggttccttctactggggaggcttttggagactaccctgaaattggaacacatcgagtatctggaaggaagaccctaaggctcctgcattttgcatgttgatggccgttgtgtta

SEQ ID NO: 455019 - DNA, 122 bp, Homo sapiens
tttgaactccagagggatcttttctttggaggttccccgatgcagccctcaagatgcatccgcactccacacctaggaattgcccgcgcccatagagggcaggagtgcggccctttgtactg

SEQ ID NO: 455020 - DNA, 122 bp, Homo sapiens
gatagaagtacttgttttactagacatgctgtaaaacaattaaataaggcattacagatacgattgtattaggcaaaactaaatgaattgaggattgccttggtgagaagtcttacagattt

SEQ ID NO: 455021 - DNA, 122 bp, Homo sapiens
atccttctccgccccgcccctccccgctccgccccgcccctccccgctccgcccccgggccgccccgccccgcaggctcgccattcccgggcaggccccgccccctgtttccgctggcggcg

SEQ ID NO: 455022 - DNA, 122 bp, Homo sapiens
acccagcccctcgccctcacccgtgcccaagagcccctctgtggacaagtacaacgtgagcggcaccaacgggacctgcctgctggccagcatggggctgcagctgaacctcacctatgaga

SEQ ID NO: 455023 - DNA, 122 bp, Homo sapiens
cattgccatggccatttatttcctgagtgctcgctctgtgccaggctctgtgccagacctcgtggcccaagccctcctctcatgaggcccacaggctgctggtgccagtatggtacctatgt

SEQ ID NO: 455024 - DNA, 122 bp, Homo sapiens
tttacacagacagaagtatgactaatgcatggccatcttcaactgactggctgacttcagcggcgggcacccatgcccatcctgaccccagtgcccacacccccagaggacccaggcacaga

SEQ ID NO: 455025 - DNA, 122 bp, Homo sapiens
ccacttatcactcatggaagatccctcctcctgcttgactccgccctctctccctctgcccgctttcaataagaggcagagacagcagccagaggaaccgagaggctgagactaacccagaa

SEQ ID NO: 455026 - DNA, 122 bp, Homo sapiens
cctccgccccctgctcctggttgcagatgtacctgttcttggctatttgtgccccagctccgtgtcctccggtgtgtgtgaggccaagctcctggggtggggacttgggggtgtgtctgcag

SEQ ID NO: 455027 - DNA, 122 bp, Homo sapiens
gtctgaggcgctggccgggcttcgtgaattagacctttatcctaagctccttccctctgccgggcactcggtgtccccacagcagctgaccgccctcctgcccggcttctcatcgctagagg

SEQ ID NO: 455028 - DNA, 122 bp, Homo sapiens
ccacgtgtcctggctctgtcctcgcgcaaagcacctctcctctcctgtggctgtggctgccgctatagctgccatctctgccaccagcccgggtgcaggtcacagctcctccgcccggtgga

SEQ ID NO: 455029 - DNA, 122 bp, Homo sapiens
caatatttcattcccggtggttgtctggggaggtggttggacgaggtcctgcttgaggctcggggatcagaacgatgtcaagtgaagaaaaatgcacgggggcatgctgagccactggagtt

SEQ ID NO: 455030 - DNA, 122 bp, Homo sapiens
aaggaaaaattcctgcttccaactaggagtccctgaaaagtagcctccttccccatcccacgcaattgcagaggacaaagctcccacatgctacaaggttattcctggtgacgtcaaactgt

SEQ ID NO: 455031 - DNA, 122 bp, Homo sapiens
gcaatgaggctggaacaacagcgtacaacatcccaaacattttattggctggttacaatgcgttaggcatggtgcaaagcattttccgcgaattattacctataaccctcatagcaaccctg

SEQ ID NO: 455032 - DNA, 122 bp, Homo sapiens
ccgcacctcggaagcgctcggggttcgtgcggacccggcagggcccgggcgccgccgccgcggcagggagcacacacgcgctcgcgcaagcagctaaatccatcaaagccccgcgcccggct

SEQ ID NO: 455033 - DNA, 122 bp, Homo sapiens
aggaaaacatgggcccagctggagcaggctcggcaggacagtgcccacgagaaaggcccacgcgggaacggacctactctggccacgctgcaggggctgagcgggggcagtgggtgggtgcg

SEQ ID NO: 455034 - DNA, 122 bp, Homo sapiens
tgaagaggtaggtcttcccctgacagttgatgcgggtgaaggcggcatcgatggggccctcgatgccccagacatctcggatgagcttggggtacccaggcctcactgccttttcgtccagt

SEQ ID NO: 455035 - DNA, 122 bp, Homo sapiens
gctgcacctccccccggagagcaccggggtcctgcaggaaaagcagaggtctcctgtggccgctatgcctcttccagaaacttccgtacgcacagaatgagcgtcgcatcccaaatgcctgg

SEQ ID NO: 455036 - DNA, 122 bp, Homo sapiens
tctggcgccctctgctggccgctcacgcgcaccgccaccacgccgggcccgggcctgcgccgctctcacccgtcctggcccaggaggtcgctgtcccttgcccgtggccaggcccgctctgg

SEQ ID NO: 455037 - DNA, 122 bp, Homo sapiens
agttttttatttgaagacactctgaccccacagtgccactgcaggagccagcctggtggacgcagagccctgaggtcacggtagacaagaaaacaggcaccagttattgtccaagaacacag

SEQ ID NO: 455038 - DNA, 122 bp, Homo sapiens
agcatccggggttggcatgtggtgccttcatcatgccatctggggctgcaggggctctgtcgttccactcagccatcgttagtttgtgactttcgtgcatgtttcatgacaggtgcaagatg

SEQ ID NO: 455039 - DNA, 122 bp, Homo sapiens
ggagcaagcgtcccctgagaagcgtctgggctccctcggggcagctgcggtggggagctccggctctatccgcagggctttctttagtccctagtcagcgggaatatttttactgattggaa

SEQ ID NO: 455040 - DNA, 122 bp, Homo sapiens
tgagtgccagggtagcatggcatggcaggtgccagagaatttggcaagtccctcttcctccgtgaagaggaaccttcctaaaagttatcaagaatcctcaaagattttttctttatgtggat

SEQ ID NO: 455041 - DNA, 122 bp, Homo sapiens
tatgcaaatatggtttgaaaagccggcgggaaatccgagtttcgcgggaggaccttggcgcgtaaaccgtatcccttcattcattgtcagcagcagcttcctggagccatttttcagctgcc

SEQ ID NO: 455042 - DNA, 122 bp, Homo sapiens
cccccctgtgacatagtttgtaatatcttggggaagagagggtaatattactccccatatcgtggagggcataaaacccctgtgatatggtttgtaatattccatgggggagagcgtgatat

SEQ ID NO: 455043 - DNA, 122 bp, Homo sapiens
ccctcagcctcaatgtttgttattgttgttcgggttcaggttgcttctgccccgccccatcgacgcaatctccaccaatcaatggcgtggtcgttttgagggacaagtggtgagagccaatc

SEQ ID NO: 455044 - DNA, 122 bp, Homo sapiens
atggactgtataggagattaacaattgggccatatggttataggtgcgtactcttgaggacgcccaaaaaactaaattgttgaatcttcacatgctatgtagatacaagttgatgataatgg

SEQ ID NO: 455045 - DNA, 122 bp, Homo sapiens
ctcccagaacagaaacacttgcatcgagtctgttcctaagaactagttttgaaaaagaagcgatgtacaaaaatatttaacagaactatgaaagatgcaggaaaggagtctttcttcgtagc

SEQ ID NO: 455046 - DNA, 122 bp, Homo sapiens
ggtctcactgtgtttctcaggctgatcttgaacttttgcactcaagtgatcctaacacttcggcctcccaaagtgctgggattataggcgtgagccatgtgcaggacctggaccaagtcttg

SEQ ID NO: 455047 - DNA, 122 bp, Homo sapiens
gctttcaccggctgggagtccggagctgcagcagaggccacacccagggcttggtggtcccgcgctttccggagctcagcaggcgcttgctgcttgaaccggtcaaagaaggaacgaatgaa

SEQ ID NO: 455048 - DNA, 122 bp, Homo sapiens
atcacaccccagtcccagcagctgggcaggagaggcggagccaggagaagccaggccctccgaggagtgctgttagacaggtctcagacaaagagctgcgggtaaggtcatcaaaccccaga

SEQ ID NO: 455049 - DNA, 122 bp, Homo sapiens
cagctgccagaggggaggcaaggtgtggggaagttttccttcccgggcgaagaagctctgcggaactgtcattttccggaactggatgcttgcttcctggcggggttctgaaagcgaacacc

SEQ ID NO: 455050 - DNA, 122 bp, Homo sapiens
ggaggaaccactgtttgggaagggctcctcagtgaggtgtctgcctgggtgatcctaccacgcttttctcagattcttctaatatttgccctcactgctattctttttccctttttctcaga

SEQ ID NO: 455051 - DNA, 122 bp, Homo sapiens
agtgtgtgtgggggtcgtccgggctcgtcctccaggggtcctgggtggtggctgaaaacccggctcggaaccctcctgcctctaaaaaaccgttgttgtgcttcgcagcggttcttctctgt

SEQ ID NO: 455052 - DNA, 122 bp, Homo sapiens
aggagtaacgcctcccctgctattttccctgaataccagctctgggaagaccactggattcggtaagccaaacacagtgcttgacgtgtgcatgaatcagttaagggaaccagggaaaaatc

SEQ ID NO: 455053 - DNA, 122 bp, Homo sapiens
attctgccaagaaatccacttcctagtcaaggaatattcttggagcccagtgctccactgcgcctcccaacacatacacaacagggcacctgtacataaatctattgtcttgtctgagcttg

SEQ ID NO: 455054 - DNA, 122 bp, Homo sapiens
gagcatcccagagtggctctatgttgcagcctagaagcctgacttcaggcctgtcttgagcgtcaagaacagatggtaccaaacacaaactgttgcccagaacagttttccaaagctaggtg

SEQ ID NO: 455055 - DNA, 122 bp, Homo sapiens
aacaagagtcgctgaggcaggcaggaagtacccccctgcacaccacgagcggacaccagccgtctctagcaagctgacaacctccggagtgggaattaatcacctggcaataactccctttc

SEQ ID NO: 455056 - DNA, 122 bp, Homo sapiens
tcttccaatcctgcatgacatagcagattgttttgcttggggctttggcttggtctggggcgtgcagttccatgggggaacctctggcaatcccaccagggggagccctttccccatcttgg

SEQ ID NO: 455057 - DNA, 122 bp, Homo sapiens
gcacacacacacacacgtgaatatatatatatatatatatatatatatatatatgaaatccggatggatcaagatgtttatagaaatgcaaagctttaaatctgtggaagaaatgagagaaa

SEQ ID NO: 455058 - DNA, 122 bp, Homo sapiens
ccagcggtgagcgtggaggacgtacttggccacccggtccagctcttcagctgtcacagccggctttcaccccgcagcgtgatcatctgagacacgttttcactcacagagatcaggatgct

SEQ ID NO: 455059 - DNA, 122 bp, Homo sapiens
aacccagttgtccctggctctgttaagaagaggtttcctccacatggaacaggcttggcccgcatgctggaatcagctgcgccgggcgtgagggtttccaggcttcccaggctgttccagtc

SEQ ID NO: 455060 - DNA, 122 bp, Homo sapiens
attggagaaatggacatttatataactgtgagaagcagagtaaaataaatgctaatggtgcgatgagaatacagagtctggggcacattgggaagatttcacacataagcgagaatttggct

SEQ ID NO: 455061 - DNA, 122 bp, Homo sapiens
ctctagaggagaaaggagcatccaggtgagaccaaactaagcgctggacatcttgttgaccgaacacaggtagctgacctctttcccatgccaggaaggccagaggcacacagcgctctccg

SEQ ID NO: 455062 - DNA, 122 bp, Homo sapiens
tgccgtcgccgcggccccgcccctcccagccaggccccgccccaccccgcgcccccggcccgcctgtcgcgtccgcagaattaactttggactcccgccagggagcgacctctggatccccg

SEQ ID NO: 455063 - DNA, 122 bp, Homo sapiens
aacttcacagacccattaaaaaggtcagaaagcaagagataagctgacatccctgcctagcgcccaatttctggaagcccctaaggaagatgaggccagcatgcaggggtctttccccacgt

SEQ ID NO: 455064 - DNA, 122 bp, Homo sapiens
tcacttctccctccgaggctaagtgtgggactagggctccagggcccaaggagcaacggccgaacccggcgtcgtgcggcaccggagcgagtcctctcctcgcctcgcctcgcctcgcctca

SEQ ID NO: 455065 - DNA, 122 bp, Homo sapiens
tagctgggatttcaggcacatggcaccacgtccggccaactttggtagttttagtagagacgaggtctcaccatgttggccaggttggtctcgaactcctgactgtcatacatgtccatata

SEQ ID NO: 455066 - DNA, 122 bp, Homo sapiens
gcagcaaaccaaagtcaaagtatccctggcacgacacacttggctgacttatgttctgtgcgcattctggcaggaattctgtctcttcagagactcatcctcaaaacaagacttgacactgt

SEQ ID NO: 455067 - DNA, 122 bp, Homo sapiens
aagtaaaagggaagagaggcccaagaaagggtaccaacactggtgagattcaactgagaccggaatgtcatatttaatgactaagtcatttcttggtgaactttacaaataatttaaatatt

SEQ ID NO: 455068 - DNA, 122 bp, Homo sapiens
gagagacgggggcgggggaaggagccatcgggccttctcctgcgcatgctcgctgtgagacgagcgctgtgagccctggggactcgctgcccttttgattaactcgtcttattacgtggctc

SEQ ID NO: 455069 - DNA, 122 bp, Homo sapiens
ggcgtctggcggtcagagagagggtcccgggaccccgcgtgagggtgaagcatcctgcagcgaggctggaccttccaccgggcgaaacgccacccaccaccaccgcaagggacccgagagtt

SEQ ID NO: 455070 - DNA, 122 bp, Homo sapiens
ctttaattaggcgttttttggcccaaatctcgcggcttcgtaaaaatatcgcgatgcttccgcttttaatgtttttagtttggacaagccctttgagataaatttaaaagccaattcttttt

SEQ ID NO: 455071 - DNA, 122 bp, Homo sapiens
ttcatatcaacgcgagtagagttagctagctatgtttgtaaacaatattccgatatgcttcgttaaagtaagccgatattaaacatttatataaatccatcctcacagggtcaatctggaga

SEQ ID NO: 455072 - DNA, 122 bp, Homo sapiens
tcggctagtagttctcgccggcaactagaggaacctgttggcgtggcccagaaggcttagcgggattgcacgaggttagttgctaagcaaggtggtctttggtcaactgccgcctggaccaa

SEQ ID NO: 455073 - DNA, 122 bp, Homo sapiens
cccctctctcagacgactcatatcccccagccctggcctccttcagcctcttcagactcacgccagctccgccaccagctgggatccctcccacctatggcataggcagcccgcgaggtgcc

SEQ ID NO: 455074 - DNA, 122 bp, Homo sapiens
actagctgcatgtcctccttatgagtcatagtggctcaaaatccagtttagctcttccaccgcacatctaagtctgtaaccacttatgaggtcagcgtgtcatcaagacctggccagcaacc

SEQ ID NO: 455075 - DNA, 122 bp, Homo sapiens
tcttgttcagtgaggtaactggataatcagacagatgagctttgcaaacgctagagggggcgagagcagccaaaatgaagcatcagcctgccaaagctaggatgccatttggtttgtaggca

SEQ ID NO: 455076 - DNA, 122 bp, Homo sapiens
cctggcaagggggctggctccacaccttgaaggccagggtggttgttccatgaagcatttcgattcctggctcttctgggacaccccagcctggcgcggccaggctcagaccatcactgaga

SEQ ID NO: 455077 - DNA, 122 bp, Homo sapiens
gtcttagtttccttatctgaaaaatagtaataagaatatctacctctttcattactgtgacggatttaataagatgaagtgacttcagttgcactgtagctctcaggaactatccaaatgtt

SEQ ID NO: 455078 - DNA, 122 bp, Homo sapiens
atcagagggtcatctcctgccttctgagtataccacacaagggatgacacaaactagaaacggaccacttgatgaggaaaactgggttctgcagcaagaagacagcatttctttccaagtct

SEQ ID NO: 455079 - DNA, 122 bp, Homo sapiens
aagcttgcagatttcttttctactttcttttgtgtacatggatgcacacatttgcacatccgcatttgcacacataggcttttgccctcccctgctaccctctgctcctggggtggggtggg

SEQ ID NO: 455080 - DNA, 122 bp, Homo sapiens
taaccatttggagcaaaggcaagctctcagggacgcgggggttgatagggggcaggtctgcgaaaaagagaaacacttcaaacagcgctgcggagagtgggggatggagctgtggggagcga

SEQ ID NO: 455081 - DNA, 122 bp, Homo sapiens
aatgccagttggtccctgggccaggcagcttgctggaaagaggtgctttcggctggctaccggtgcgcggggaccacactcacaaaccgcattccggtcttcccgcccgaaaatccgcgctg

SEQ ID NO: 455082 - DNA, 122 bp, Homo sapiens
cgttctctctcacgggatgtggaccgggaacgcctacctttcctccgtggggagccgctgcgactgccacccatttggagtctcgctccccggaaacgactggttttttcatgtttgtttgt

SEQ ID NO: 455083 - DNA, 122 bp, Homo sapiens
ccggcctgcagcagtcgggcgctgtaccgctgcgccgccgtctcgtgtcccgggtgttgccgggctccgggctccggaacagcggcggctccgcctccctgcagcggtggtggagtgagtgg

SEQ ID NO: 455084 - DNA, 122 bp, Homo sapiens
gcaataggagctatccaatctccagccgcgtccatccgcccactcgagcccacctgtttgcggaccacagagcggcagcacatccctacacggggctgtcaggcaaggtcaacgcgctagag

SEQ ID NO: 455085 - DNA, 122 bp, Homo sapiens
ggttctgagttggctttaggtggaacccaggtcattcctgggtatgccttgggagggcggcgaggctggccgcagctgggcccggcatcggagaaaattgtgtctctctggagaccctgcag

SEQ ID NO: 455086 - DNA, 122 bp, Homo sapiens
actgagcataggttgtgcctcttttcctcccgcaatcagtgatttttccacccagctgttcggccttgtgatctgcagggtatgatgctgaagctcatgaaagtaaatgtccacttaaatac

SEQ ID NO: 455087 - DNA, 122 bp, Homo sapiens
gagacctcaccgtaaaatccccgacgtgcatttcacagaatagacactgctgtcctgtgacgcttcagagcctgctggtcaacaaaaaccagagagaacgttctacacgccgttttctagga

SEQ ID NO: 455088 - DNA, 122 bp, Homo sapiens
aagcacgagaccagagactagtgtcatcaccggtcacggcaggacaagcgccccagaggtcggaaaatcctgggacaacgcgaaagcggtggtcgccccacactctgcggagaaagtggttt

SEQ ID NO: 455089 - DNA, 122 bp, Homo sapiens
gctggctccgggtgtaacaggtgcgcggtgaaatcgcatcttgtgtcggggccggggcgccgggggaagagcagcagtgacccaggccctccccgccggatgatgcaacccgcccgcggacc

SEQ ID NO: 455090 - DNA, 122 bp, Homo sapiens
ctacacttggtgggggggactccaggcatccctgagagaggtcggaatgggtgtgcctgccggcccaggtctggggtttggccttcgtttcgctgtgggtgtgtgatgagatattgtggcct

SEQ ID NO: 455091 - DNA, 122 bp, Homo sapiens
ccgcggcgccgggcggggctctgtccccgaggaacgagggtctgcgtcctcccctctccccgcccgtcttcttaataagaagaaaaataacgtgggtgctccgaatggctctccagctctct

SEQ ID NO: 455092 - DNA, 122 bp, Homo sapiens
ttccagctactaataggactgctgagagagagggtttacctgagaaagcatagactcaaacgctttcaaaattgtgaagtgatgggtttcaggacgtgtcatcccaaaatatggcacttggc

SEQ ID NO: 455093 - DNA, 122 bp, Homo sapiens
cggggggtggggggtgtggatgcccgggataggagcaatgttagggcggaagctgcaggccgagaggcccgacaagccctgaaggagaaaacgagctgtgcctcaccccagtggaggagaga

SEQ ID NO: 455094 - DNA, 122 bp, Homo sapiens
gtctgtagagtgtggcttagattccaggacttagaacctctgaatccttatctttcacatcgtcttctccgggaggggtaattaacgtttgtttgggggtgccaagaagagacattctcctc

SEQ ID NO: 455095 - DNA, 122 bp, Homo sapiens
ggacgcatttccagctttctctgaaccgggctggcttcctagcagatagggcgggaccgtcgggttgagtgacggccggtggcccgccctgggcgtgacgttgttctagtgttgttgccagc

SEQ ID NO: 455096 - DNA, 122 bp, Homo sapiens
ccggacctcggctcagcgccctgcgagagaagcagaggtcgctgccagcgtttcctcccgcgcagcaagaaattggtgcctgagaagcaaagttgaggaatgggctttttaaaagcggcagc

SEQ ID NO: 455097 - DNA, 122 bp, Homo sapiens
agtgcaaccgggatcccgcggcgataaagaatcactgtgcagaaccctggagctgggagtcggcccgcccccctcccaaagaaaccgggatcccgcgtcctccccgccgctagcgcagcgcg

SEQ ID NO: 455098 - DNA, 122 bp, Homo sapiens
caagtgtttcctgtctcccagatgctttctattggcttattgtaaggactttgacttctgcgctacgtgaactggggagtcactggaagagtttcagaggtgcaccttggtagactcaggct

SEQ ID NO: 455099 - DNA, 122 bp, Homo sapiens
ggggccttggagcctgggaaagcaaccgggggtctctggggagtcctgagcgcaggcgcccgcccacggccaagaccgtggcccagccctcctcagacctcccaagggggcctgcctgtccc

SEQ ID NO: 455100 - DNA, 122 bp, Homo sapiens
acgctgtggtaaaaaagtgaattctttaccacagtagcagctgccccgagcgaagtctcgcgatatttcggccgcagggatccagaggcgcgtagtgagtggcggaggactgtgggggtggc

SEQ ID NO: 455101 - DNA, 122 bp, Homo sapiens
gagagagagagagagtgtgtgtgtgtgcatgcgccatgacagggggaggaggaggagtgccgagacactgattcagttaatttcacaagtggaaacaagtgtatgtttcagaatgcctccct

SEQ ID NO: 455102 - DNA, 122 bp, Homo sapiens
gaagtgcctcgaaggaggcgggagatccctaaggaatactcttggcgatcggggcagaatcgcaggcactaacagtaggcatcgggataagactggcaggactaagatgccagccaggctcc

SEQ ID NO: 455103 - DNA, 122 bp, Homo sapiens
agtcagtccaacccgacccacagggaaacagctgcaggaagtgactgcggaaccgggaggcggtggaggaggagactgagggcgccggctcggcgtcgccactgcgcatgtgcttggcggag

SEQ ID NO: 455104 - DNA, 122 bp, Homo sapiens
taacagacggcccgggtagctccagaaaaactacaaatcccggaagaaaccgcatccaggcgacgccagcccggcttgttgacggagcccaaggcgcctgcgcgtcccggggaggggggggg

SEQ ID NO: 455105 - DNA, 122 bp, Homo sapiens
ccatttcctcccaggtccttaaagctccacatcataaaacggatgtgcgcgtgaaggaaacgtgggtgtccacagagagctcccccggagaaggccacgtccacggtgccgcctgacagcaa

SEQ ID NO: 455106 - DNA, 122 bp, Homo sapiens
ctggctgtggtgaggatgcatgtgtggcccctgccaccaccagcatcagctacaggaccccgactccccgtctcgcttttctgcttctcagcccccactaacctcacagcatccatatctcc

SEQ ID NO: 455107 - DNA, 122 bp, Homo sapiens
ccagtggccacccagtgtcactgtggcaagtgtgacagcgacagcactgattgtactgtgcgaggcctggggcccagctactgctcctttggtgaaatgaaagaataaagatcagtggacat

SEQ ID NO: 455108 - DNA, 122 bp, Homo sapiens
gcttgctgctgcttccaaagcagggtccaaatgtggaccctgcatttccacagttggcctcggggccagcattccccaggctgcagggacacgttatgagacctaggcaccagccagaaaag

SEQ ID NO: 455109 - DNA, 122 bp, Homo sapiens
tgacagctgcaggcctcagagcaattttcagagcccgggtgcgggttggagagggaggaccgcgcacctgacttcccaccgggaggagcaggtactgtggaggtgcctccaggaaccctgag

SEQ ID NO: 455110 - DNA, 122 bp, Homo sapiens
cttttgagacattatccaatagctttgctactttttaagctatatgtgagcaataccattcgatttctgggtgaagtaaaaggatgatttcaaaaacatgaaaggatgaaaaacatccttga

SEQ ID NO: 455111 - DNA, 122 bp, Homo sapiens
tttgttgtacatagctttttttggtcaataaatatatattcacagcatcatttttatgaacggcataatattagttgttttggctataccgtaacttagataattcctctttattggataaa

SEQ ID NO: 455112 - DNA, 122 bp, Homo sapiens
aagtcaaacatcactgactccgctgagagggagccaagagaacgttaaggccgaggcccccgtttcacagacggggaggcaagtgcccatagagggaagcctttctaaaggttacacagcag

SEQ ID NO: 455113 - DNA, 122 bp, Homo sapiens
tacgcaagcaacagccactcaacaaacatctcctaagctatcacacaccagatgcaggggcgggcacagactccagcacccccagctccgttacgagtcgcccatggaaaggcaacgggatt

SEQ ID NO: 455114 - DNA, 122 bp, Homo sapiens
aaaaagcgagagggagagcgagcaaaaggcgcgatccagagagccaggcaagcggggcgccgacctcgggcggccccggcccgcgcccttgcccctcggccgggcggacggtgggtgagcgc

SEQ ID NO: 455115 - DNA, 122 bp, Homo sapiens
ggagagaattccgagaatcctcctcataaatccttctttggatataagctagccagatgtcgtttctgccatttgccactccaacaccatcagccagatatccaggtgtcccagatggtgaa

SEQ ID NO: 455116 - DNA, 122 bp, Homo sapiens
gtgaggcccttcctgtattagggtactggcagtgggatagaaagggaatgatgtgcaaagcgttcctgagggaagaataatcaggaactggtaataatagactgtcccagaagtgaagaatc

SEQ ID NO: 455117 - DNA, 122 bp, Homo sapiens
tggctttccattttcaactctaggttagtcttgttcaaagtcaactcatctaagacacttcgcaggcccttgctatcagcctcaacacagtgataaaggacaactttactctggcatctgaa

SEQ ID NO: 455118 - DNA, 122 bp, Homo sapiens
atcaactaagatactaatagctagttttagagaagagaagaatatctgtgaaaagagtttcggtgacagcataggaaagaaggggcactgggtaaatgccatagactggtatttatttacag

SEQ ID NO: 455119 - DNA, 122 bp, Homo sapiens
cctggggagggaaggtgccggaaggcatcgctgtggggctgccgccagctccggaacccccgggaacccaaggggcacacgtctccccgtgttcttgcagcccccgcgtcccgtgacccacc

SEQ ID NO: 455120 - DNA, 122 bp, Homo sapiens
gggacaaagaagccctcattcctcctggccacaggccattgcgacagagggaatgggggtcgcccaacccttctgctgcctcatctgtcaaaagcaaagctttgatgggaagaaactcagtt

SEQ ID NO: 455121 - DNA, 122 bp, Homo sapiens
ctcctacgccgcaaagcagcacaattacagcctgggaggggcaagtcttgcggggcccgtcggtaactgccattatttgaatgcgatataggagatcccacatagaccctgctctaccgggt

SEQ ID NO: 455122 - DNA, 122 bp, Homo sapiens
ggaacttgaacttggccgaacataaatcaagaaaagagtcccatacaggatggagacagccgcaaggtgagaaaaacaggtgaagaaagctttttgcttcccatcagcagtctggatcttca

SEQ ID NO: 455123 - DNA, 122 bp, Homo sapiens
tgtgtggtggccttcctctgtaatgtcaccctatgctgcttctactgtctgtgaatcttccgttttaccttttaaaattcctgctgttgctttgctggtgtatattctccctacctctcctc

SEQ ID NO: 455124 - DNA, 122 bp, Homo sapiens
cggtgctgtgagagcagctagcgggggctggactgggtccctgcggccaggcttccaagtcgagctgccgtttgggtgggaccagaagacgggctagtctgcgccccaggatccctccctga

SEQ ID NO: 455125 - DNA, 122 bp, Homo sapiens
agcactttgcagcaatgcctgtgggcaaaaccgaaatgggttttgttgatatcaccgcaacgatgttggtattctggacactcctgaaaggagagactgcaagatttcaagtcctggttgat

SEQ ID NO: 455126 - DNA, 122 bp, Homo sapiens
caagaagtagcggagcgggttttatagacatttgcatacaatataatgtgttctgaagaccgggacgatggctcaccctcataataccagcactttgggaagtgaagttgggaggattgctt

SEQ ID NO: 455127 - DNA, 122 bp, Homo sapiens
ttgttagttcgctgttacagatcaagtcccaagggccccatgataataaccaactgcaaacgatcccagcaaaaccagagctgtgcctgtccgtgtacctcgagaaagaggggtgcacccag

SEQ ID NO: 455128 - DNA, 122 bp, Homo sapiens
cagtttcagagtattttagtgtaaagcaaaaataaaaccctaagccccccgctaactggacggatcccccttcatggccaagagaacctgagacacgggattcccggccatggtgggaagcg

SEQ ID NO: 455129 - DNA, 122 bp, Homo sapiens
ggccggatggcttctagacttccgggtgattccgggagatgggggacgccttgcagtaagcgtctttgcttctggaaacatctcggatgttccctagagtctagcctatctggtgccaatac

SEQ ID NO: 455130 - DNA, 122 bp, Homo sapiens
ttaggagaatttatttctcacacattttccctccactctctcggaggtgtcccatggcaacgagcatcaggtgagcctcattcttccatcttctgtgggagaaaaaaataattgtacatagg

SEQ ID NO: 455131 - DNA, 122 bp, Homo sapiens
atgcacaggccacatgggatggagcaggacagtgtgagatttcatcacgctactcagaggcggcaacgtaaaagttattgtttatttccaaaattttccatacaatatattcaaatggtggt

SEQ ID NO: 455132 - DNA, 122 bp, Homo sapiens
aacactcagttcctttgtcatatacagctgataacagtaactccccggtcagaggaccggcgacaattccttgagacaaggagcacagagcctggcacagtcagccctgatcaggggccggt

SEQ ID NO: 455133 - DNA, 122 bp, Homo sapiens
tgcgcggagagaagagcccgggcagcctgaaggaatggctggagtgggcggggtctgcgccgctttaaggtaaaaaaatcagagttgtgtgggccacttatggtggaaaccaaaatgttttc

SEQ ID NO: 455134 - DNA, 122 bp, Homo sapiens
gcttacactctccctcctcaaggaggcagatgcagggggagcacagctgctgctctgctccgcgctcaccggagtctcccttcctggcggcccagccacccaccacatccccaggcactggc

SEQ ID NO: 455135 - DNA, 122 bp, Homo sapiens
ctccgaggtgggttttcaggttgcccagccagggggccggcgggacctaccgcggactcgcgcatttacgttcgcaagaagtgaatcaccaaacgtgcccacggctaaaactctcgtgcggt

SEQ ID NO: 455136 - DNA, 122 bp, Homo sapiens
gttcattgtcccggagcatcacaataactaaagtggaaagataatctccatgcaggatctcggataaaggtgacagaagaaagagatcacagcatctcccatcctaaacacctatagaagtg

SEQ ID NO: 455137 - DNA, 122 bp, Homo sapiens
tctgaggagagagaaggcgggtggtgatctctccgaggccagccagcctcccagaccctccgggtcctcacctgctcctcccaggacgtgaccaccaccaggtgcgcgtcctccagccggca

SEQ ID NO: 455138 - DNA, 122 bp, Homo sapiens
aggatcgctgttgtcatcctcggggcggggtcggggagcctctgatgccctattggctggcgctctgccccgccctctcccgccgctgatccacacgttcgggcgggaaaagaagcaggttt

SEQ ID NO: 455139 - DNA, 122 bp, Homo sapiens
gggatggtttagtgttgatgaatatgacatgtgaccattaacgatgttgattttatctcccgagattagcatgatttacttcggatggataataatgtcatttgcttgatgcagtagatctg

SEQ ID NO: 455140 - DNA, 122 bp, Homo sapiens
gcctttcaagtattctcttaaaaaaaaaatcgttttttttttccctccagattttgccttcgtttgcttcattttctgggcagaaggcccagtctggtttatacttattgtgcatctatatc

SEQ ID NO: 455141 - DNA, 122 bp, Homo sapiens
tcggggacgcaggggcagggcgcaaggcctggggcgctgaccagtccccggggatgacatcgcgacaacgcgcacgcacggccctgcccggccgcggcgcctccccgacctaggccggagct

SEQ ID NO: 455142 - DNA, 122 bp, Homo sapiens
gctgccctggtgggaggcggcagggaggggctgtcatgctcgggctctgcttcgagtaggcgcctcctgttcccgggagcagcgacagcctctaatttcctgtgacagcagcggcccccgca

SEQ ID NO: 455143 - DNA, 122 bp, Homo sapiens
gtaaggggcccgggaaggcaaccggagaagggaagggggaggggaaacggggacaacctgcgctgctgcttcggctcctgtcactagggttgctcagtcaaaatggcggcccttgcccgtga

SEQ ID NO: 455144 - DNA, 122 bp, Homo sapiens
agaggaataaggtggcagggagagtgttttggccaagatgcccgccacgaaacaggaaagcggagacagcgccaactgtaaccactaagagaaagcgcaaaccgcacaagaccagttcaaaa

SEQ ID NO: 455145 - DNA, 122 bp, Homo sapiens
ggaactaggcacactctggtttcttgccactgcagttcctttcccacctgacttcacccccgaaaactagtcccaccaccagctgggccaggagcaggagacaggctggttcaaggagctgg

SEQ ID NO: 455146 - DNA, 122 bp, Homo sapiens
aaggaagggccaatttcctttgatcctggagacccgactaaacgggaagccccgttctcccgcttccgctggttacgtcccagccttggttagaggactagcagtcaggaaagtttggacgc

SEQ ID NO: 455147 - DNA, 122 bp, Homo sapiens
acagttgaacttatttcatcatcaacaaatttttctctttcccatggattctttaaaaggcgtcttttgaagatttatttctattcggatgcaagcttttgtttaaaaaaataaaagagatg

SEQ ID NO: 455148 - DNA, 122 bp, Homo sapiens
tttgggggtctgtgaaggcctgcgcaacgcgggcatctgcctcggaaccgcaggggttttcgtcccctccccatccggagcagcctctttgctaggctagatccagacgaccgctccccaag

SEQ ID NO: 455149 - DNA, 122 bp, Homo sapiens
ctcttcccccactggcttttgggacccccatcgcgatggggggaggcacccccagcgaggcggggactgacagccagcaactcttctgccccgggctcttgggacccccatcgcaggggcgg

SEQ ID NO: 455150 - DNA, 122 bp, Homo sapiens
tctttcccatcccttcttcacaggggccggacatggtacattctttcactgaccctctgccgtttcctggcctggaattattttgcacaccttcgtttggaggttttacagctgacccgcca

SEQ ID NO: 455151 - DNA, 122 bp, Homo sapiens
aggtgctttatatgagtatgtaaatgtgttgctcatttactcctcacaacaatgctatgacgtaggtactgttcctaccctcattccacagctgaggaaatagaggcacagaaagggtaagt

SEQ ID NO: 455152 - DNA, 122 bp, Homo sapiens
gcctcgtccacagacagcagtacggagaacgggtcctcgccgctgtagcccgccccccagcggaggactcgaccaaggtcattccctgggacacaagcagacacagagcatctgtccacacc

SEQ ID NO: 455153 - DNA, 122 bp, Homo sapiens
gacaaagcgagcctccatctcaaaaaaaaaaaaaaagttaatattttcctaaatcttaagcgtcaaggataaagaaagaatcaaaccaggttccaggcgttaaaagccaaagtggcagcttg

SEQ ID NO: 455154 - DNA, 122 bp, Homo sapiens
agggaaaggaaaggcaggcgcaggctgcggccgtttccacaatccacctcgtagctggggcgtgccgcttgcctcggcttgtcccggcagaacactcttacctttaatggcgactgaaaagt

SEQ ID NO: 455155 - DNA, 122 bp, Homo sapiens
ggctacttcaacagctgcctcaaccccatcatctacccatgctccagcaaggagttcaagcgcgctttcgtgcgcatcctcgggtgccagtgccgcggccgcggccgccgccgacgccgccg

SEQ ID NO: 455156 - DNA, 122 bp, Homo sapiens
acaggccctaggggctggacgatttaacttgctggcaagaatgcattcaggaagggcactcgtgtttattttgggtattaccttctcgcctctttagtgtaatccccccaaggcttaatccg

SEQ ID NO: 455157 - DNA, 122 bp, Homo sapiens
gcccgtggctgtgggggcggctgtgcttgtcgttttgactgagtacgtttgtttattcagcgcctcctgtttgccaggccctgcctcggctctgcaggtgcagtgaatagaacacacgtctt

SEQ ID NO: 455158 - DNA, 122 bp, Homo sapiens
agcagcactcttcccagctccagtctctattttacgtctgtgaagaaacgcggtggcctgcggaagggtgggcgggaaggccggagctcacgttagctcagtgctagtgccacctagtggct

SEQ ID NO: 455159 - DNA, 122 bp, Homo sapiens
cctactcagtttcctgaagcatgcgcagttgcctttccgtcaattcctgtcctgggcgtacgtcaagatggcggcgtctgtattaaacaccgtgctgaggcggcttcctatgctatctctct

SEQ ID NO: 455160 - DNA, 122 bp, Homo sapiens
acacaccagaccacaaactcccggagggcagggacgacgttttgttcatcactagctccccggcacctggcaccatgcctggcacaacatgagcactcaataaatataatttattcaccaat

SEQ ID NO: 455161 - DNA, 122 bp, Homo sapiens
gcagccctcagacctcgacacggaaaccccacccgggtctgcagccctcagacctcgacacggaaaccccacccgggtctagcagccctcagacctcgacacagaaaccccacccgggtctg

SEQ ID NO: 455162 - DNA, 122 bp, Homo sapiens
ccgagcggcgaaggcagcacgcgcgggaaaaggctgccgctctgggaggaggggccgcggcgatccacctgaggtcctcgcgagcggcgacgtcacttccgctggttcaagcaccgcgagac

SEQ ID NO: 455163 - DNA, 122 bp, Homo sapiens
cccctctccctccgggttcctgcagcgcagcagcaccgggaaggtctttttggctgtccacgcggcgggggagcagtgtggagtgtacccccatccaatccctgtcccgtgcagggaccccc

SEQ ID NO: 455164 - DNA, 122 bp, Homo sapiens
agagctgctttgaattagcccagaaccgggcgggacgacctcagaaggcaaaacaggaggcgccccgtgcacatatggacccaggcaccgactgtttacctgccgattctcttctaaactct

SEQ ID NO: 455165 - DNA, 122 bp, Homo sapiens
actgttgactccctcctgacagcgaggcggtggtgaaccgagtgtttgacaagctgtccccgctgcacgagcgcatctactgtgcactctctggttcagctgctgatgcccaagccgtggcc

SEQ ID NO: 455166 - DNA, 122 bp, Homo sapiens
agggaactccctgaccccttgtgcttcccaggtgaggcaatgcctcgccctgcttcggctcgcgcagggtgcgcgcacccactggcctgcgcccactggcactccctagtgagatgaacccg

SEQ ID NO: 455167 - DNA, 122 bp, Homo sapiens
cgccggatgctaccacttctcgcctgcggtccagggatctttcttcggcaagggccgaggcggccgcctggacatcccaagaaaggacaggcccagctgcttcccgcaagtagtccctgatc

SEQ ID NO: 455168 - DNA, 122 bp, Homo sapiens
tactgaaggtggacccaccaaggtttctccagctggggtcccatccacagaggacaacatcggtgggaatagactgcagctggcgggattgaggtcaggccagggagggaatccccaccata

SEQ ID NO: 455169 - DNA, 122 bp, Homo sapiens
cgatgggagggggataaagccagcagcatctggcctgacaaggatcatgacctggggaaccggacagccctgagttcaatcctggctcagccacagcctggctgggaggacttggcaggtta

SEQ ID NO: 455170 - DNA, 122 bp, Homo sapiens
atttgtttttcatctggatatttgattctgcatatcctagcccaagtgaaccgagaagatcgagttgtaggactaaaggatagacatgcagaaatgcattttaaaaatctgttagctggacc

SEQ ID NO: 455171 - DNA, 122 bp, Homo sapiens
ctcagcgcgggtcatggagagtcgcccgggcggctgtgcgcacccacggcctgccctgcccgtctccctgctgagcggcgtccactgcacctatgcatggcggctcgttctgtgctcactga

SEQ ID NO: 455172 - DNA, 122 bp, Homo sapiens
gtgagctagtgatggctgctgggcccaggtcccaactcggcgattctttcctcagcccaccgctggtgacaccaccccagtcgcccgtgtccccgcagccgccagccataactcaggtccat

SEQ ID NO: 455173 - DNA, 122 bp, Homo sapiens
gacagaagctttcaacaaacttcttaaactcctgtttatactcttaaattgcttggtaaacgcctccttctaaggtactttaaaaggtcaagttttgcccaagtctcctctctgaaaactaa

SEQ ID NO: 455174 - DNA, 122 bp, Homo sapiens
atgcaggcccagacagaaatgaatatgagatatcagtcatgcacccactctctgcacccacgcctgggggcaattgtttaaagtaattttgtcactgactagctgtctcacctgttaccttc

SEQ ID NO: 455175 - DNA, 122 bp, Homo sapiens
atgggaggaagtgggtgccagtttatgtatgggtccttgataagcatccatgtagggcaccggggcctgggacagaaccccacttgctgcctggcttcttggcaggaggacagggttcttcc

SEQ ID NO: 455176 - DNA, 122 bp, Homo sapiens
acgcagatctccctgtcaacttacttgtccataggggtcataagctctgcagccaagacacgggagatctgtggcaagagtaggttgcactgcagttatttcactcaccactatccttagga

SEQ ID NO: 455177 - DNA, 122 bp, Homo sapiens
gaccccaaggtaaacattcctggatgtttcttcaaggagacattctgaatggagagagctcggcctcttagaggtcaaggtcaggatcctcgggtcccttggcgctctacctacggaagaga

SEQ ID NO: 455178 - DNA, 122 bp, Homo sapiens
ctggcaagcctggcttcccgggcgctgaaaaccccgtggctcagggatcgccgcgtagcacgctctggctctactcgggccctgggaccttgcccagtttcaatcccggcagcctccgaaga

SEQ ID NO: 455179 - DNA, 122 bp, Homo sapiens
atggggaaatagagccccagagtcgagatcagtcaagctccaagtcacacagtgtgtggccgggtaagaactagtccctgggagttagttcttgttgaactgatcatgaataaatgcttcgc

SEQ ID NO: 455180 - DNA, 122 bp, Homo sapiens
tccagttgaagttggtgctgttgaggtacagcacgaggttggcggtgacgccgaagaaggcggcgcgctccagcatctccaccagcagcacggccgcgcccgccgcccgccgccaccgtcga

SEQ ID NO: 455181 - DNA, 122 bp, Homo sapiens
tactccaacatccgtgcggccggaggggcagtctgtgagcagcccctgggcctcgagtgccgtgcccaggcccagcctggtgtccccctgcgggagttgggccaggtcgtggaatgcagcct

SEQ ID NO: 455182 - DNA, 122 bp, Homo sapiens
acattccaaaaacgtgaatctacaatggtgaagaaataggatgggctcttacgtgtgctgcggaatcccacgcatatttcctcaccctgtgggcctcactcactgggactgtctccgtgaat

SEQ ID NO: 455183 - DNA, 122 bp, Homo sapiens
ggaagcagaggttgcagtgagcagagattgcgtcattgcactccagtaagactccatctccgaaaaaaaaaaaaaaactagcccggcaaggtggtgcacgcctgtaatcccagctactcgag

SEQ ID NO: 455184 - DNA, 122 bp, Homo sapiens
gtcgggttcggaccccctctgcgtcatgcaaccccacggccgggttcggacctctctctgcgtcatgcaaccccgtggccgggctccgacccccctctgcgtcatgcaaccccatggccggc

SEQ ID NO: 455185 - DNA, 122 bp, Homo sapiens
cccgcaacaccccgcccgggagtccctttccgggacccgccacactatcgtgtccttttgcgcccgacggccccagagcccatctaagatgggggaaacagaggcccggagagattcttgcc

SEQ ID NO: 455186 - DNA, 122 bp, Homo sapiens
accctggagcaatcctagcggcccggcggccgctgtccccctgcccgtgactcgggctcgcgcacaactggggagcccggtgcaccctcggcttctgcgccgtcccctgggtgagggctctg

SEQ ID NO: 455187 - DNA, 122 bp, Homo sapiens
ctttcccctcctccgccagactcaccccccctcccggctccccgatggcctccttcggggcgctcgctactccggaccctccagttggtggtgctccagcccccgcgcttctccccggccag

SEQ ID NO: 455188 - DNA, 122 bp, Homo sapiens
gatctccaacccaaataacagactgtcttaaatcattaatttgatttgccaatttttgatcgatgccttgttgagaattccacatttgggtggaaatggcttgccaatcattaacaaaatga

SEQ ID NO: 455189 - DNA, 122 bp, Homo sapiens
ttatacagctgctgcagggaaattccctgcgacactagagacaggtaaataaactgcattcgttccaaagcagggggaagggtcttctatcagtgacgagtttacataatgcaacggaaaac

SEQ ID NO: 455190 - DNA, 122 bp, Homo sapiens
ggaaagttaatttttaaatgcgcttctgctgtctaaggtgcaaagccaggctagggagtgcgtggctggaatctgcatgctgataagagaaggctgatgtacttacagtgacagagggcagg

SEQ ID NO: 455191 - DNA, 122 bp, Homo sapiens
agctgtgagctaaatgtcggttgcttgaagccgccgacgggggtgttttgctgtggcggccggagtggcagagactggggagatcctggccacaaaagcggcagggcctgcccctccagttc

SEQ ID NO: 455192 - DNA, 122 bp, Homo sapiens
tttttagggcaaacgagccgagttaccggggaagcgagaggtggggcgctgcaagggagccggatgaggtgatacacgctggcgacacaatagcaggttgctctttgtgctaagactgacac

SEQ ID NO: 455193 - DNA, 122 bp, Homo sapiens
gactgggcagatgccactttaggaccctatcaaaataacttgaccacagatgaccagcctcgttggaactcactgcctaattctgcctagaaattaagacctcatcttaattatttagttct

SEQ ID NO: 455194 - DNA, 122 bp, Homo sapiens
ccctttcctaggtgtcttttaaagcagaattgattcccaccctgcggggagaggggcgtgcggtgtgaacctgctggcaagaaggggagggagtgaaatctttacagagcaccctccgtgag

SEQ ID NO: 455195 - DNA, 122 bp, Homo sapiens
ttggcaaagccgctcccatccacgtacagctcccagtctactgatgtttaagggtggtctcggaggttaggcctactagaataaactgagtccagcacctctaaacagttatgtttaactgg

SEQ ID NO: 455196 - DNA, 122 bp, Homo sapiens
gagtccatagcagagcccgctgagtatagagtacagtaaatcgggaccctcggcggacggcgcttcccgcccgcctgcccgccatgttggggagccctccctgccccccgcgccgggctggg

SEQ ID NO: 455197 - DNA, 122 bp, Homo sapiens
tgtccactgcgcctctgatccagctaggcgcccactgccgctcccgatcgggctggggctcgccattgttcctgtgcagctaagtgcctggttcatcttaatcaagctgaacactagttgct

SEQ ID NO: 455198 - DNA, 122 bp, Homo sapiens
cagcagcgccaggaatcgaggatggtaaaatgacccaggggaagaagaagaaacgggccgcgaaccgcagtatcatgctggccaagaagatcatcattaaggacggaggcacggtgagctga

SEQ ID NO: 455199 - DNA, 122 bp, Homo sapiens
agagctgcctcagagctatgcaggccggtggccctgcctgggtcatgtggacatggagcccgaaggccagccaaggcgcaacccctcagtgaagttgttttccgggtaactccttcccacgc

SEQ ID NO: 455200 - DNA, 122 bp, Homo sapiens
cgggtgcaggtgtgcccgtgaaaatgcgtgtgaatgtagcaggggctgaacacattgatgcgattattacctgaccatggatgattgtaaactgtgaaggtcggctatggggagggtgtgag

SEQ ID NO: 455201 - DNA, 122 bp, Homo sapiens
gtgggaaagacaccgcagcaggggagcagggtgcgcagggtgcagtgggtgacgctcattcgctgaaaactgaccctgctttcaaagccttgtcagttcccaaagctgtatgaagcctttcc

SEQ ID NO: 455202 - DNA, 122 bp, Homo sapiens
ccagtggttctcaaccttggctgcacattagagtcagctggggagttttaaacattccaacgcccaggctgtaccccacaccaattaaatgacattctctggagataagagccaggcaccag

SEQ ID NO: 455203 - DNA, 122 bp, Homo sapiens
ggtagagagggggtggggggcacaaggaaacaagacagggcaggaagcccaggcaggcggcgggcactctgggccaggcacaaacaaccaacacaggaaaccacagcccacccccgcccacc

SEQ ID NO: 455204 - DNA, 122 bp, Homo sapiens
catggggatgagatgtaggggctggggatggggaaggtatccagaccagacttggaagaccgagatcctggaagaagtacattttaagttgagtcccatcggaaagatgagaaacagtaagt

SEQ ID NO: 455205 - DNA, 122 bp, Homo sapiens
ccagtcctcctgggccatgctccgagctggctgtcaagagtgctcaggaggaggggtcctcggacatgaaccgactcagctatgcatagaaaggtggttttctctgctttggcttttctgga

SEQ ID NO: 455206 - DNA, 122 bp, Homo sapiens
aagatccttttctactacagtagatatacctgtagtcaggactttgaactcacagctattcgccgcaccattccctcttaaggaactactgcgccctccagcggaagaacagcggcggaact

SEQ ID NO: 455207 - DNA, 122 bp, Homo sapiens
ctggaatagacatgacaatggctgctgccaaactgttttctcttctgaggacagatgtcccgtgcaagtggcttggtggaagggactagtgtctctaatatagggtgatttataagcaggaa

SEQ ID NO: 455208 - DNA, 122 bp, Homo sapiens
gagcacagggaagggtcttatctcttcaacctcctgtagaaatcatcataataggccctacgcgacctcaagactaactttcggagcctgcgaaagactgccccctcctacccccaaaggcc

SEQ ID NO: 455209 - DNA, 122 bp, Homo sapiens
gcctctctgtggttctgcctggaagacggaaggcaggtggttggctctagtcatccacgacgggctggcacctctccagctgcggccagtctaaccccagggcctgctgggaaatgtagttc

SEQ ID NO: 455210 - DNA, 122 bp, Homo sapiens
aaagcatttctttttaggcagaattttacattagttgcattctgggatcaggccccctaccgtgttccattgactcctcccagtgggtgcccccctcactcccagtctgacaagcaggtgtg

SEQ ID NO: 455211 - DNA, 122 bp, Homo sapiens
aaagcattcccaaggctgaagggaactgtagtcctccttccgagtgcccagggctgcggacgcggcgaaggactacatttcccagaagcgccggtgacatcccgggggcggtgcgggctgcc

SEQ ID NO: 455212 - DNA, 122 bp, Homo sapiens
aatccgtgaggaagcccgggggtcgcagtgaagcccaacccactggtgctgggataacctcgcccgcaacccggatccaggccgcaggtcccccgaggctccgcccctgacggcgacactca

SEQ ID NO: 455213 - DNA, 122 bp, Homo sapiens
gggcctgcggggagcccccacccactggggcggctactgcctaaggtacaggaggtggcccggtgcgtgggggagttgctggctgcggccggtgccagccgggccctacctacgtcctcctc

SEQ ID NO: 455214 - DNA, 122 bp, Homo sapiens
ctaagtgataattaagacttaatatttaactgggttatctatgatcacaaaatcagtacacggttcactaatgcaatatttaaaaatgtaaagatcagggccgggcgtggtggctcacacct

SEQ ID NO: 455215 - DNA, 122 bp, Homo sapiens
gctagaaccagcctgttctgagttccggactgacagttgcggataatgagatgcctgagacgtatctctttcttattctgaaccttagtatttcagccagtagcctaagaggtctattacag

SEQ ID NO: 455216 - DNA, 122 bp, Homo sapiens
gtctgggtcccaatgaccaaaggccttattagccttaaacttggactccatcttgaagtccgtggcaatctctggttttaaactggcacctggtctagtcaggtttgtttttagattgatta

SEQ ID NO: 455217 - DNA, 122 bp, Homo sapiens
gtgatcgtgtggctcagggtcagcgtggcaggagggcggcgtgtgcatcgtcgtgtggctcggagtcagcgtggcaggagggcggcgtgtgcgtcgtgtggttcggagtcagcgtggcagga

SEQ ID NO: 455218 - DNA, 122 bp, Homo sapiens
aacattagccttgttaatttttcagaaatgcacggggggctgtgacaatggggaagcgaccgcagatatgctttactgcagctcagctcttccccagttttaaatgccaccagagcctcagc

SEQ ID NO: 455219 - DNA, 122 bp, Homo sapiens
acagagcccagggctggcctcggctccagcctcccctgccacactgcacctgtcggtgcccggtgggtgctgagtgccgcacggtgcattccacccaccactgacgcaactgtcagtcacgc

SEQ ID NO: 455220 - DNA, 122 bp, Homo sapiens
acagcaggaaaaaaaccccacaattagataactaaagttaaaaaaaatagctgaaacttccgatcccagcagggcacctcaggtgataatgacattgccctctgaatggcacaaagggagct

SEQ ID NO: 455221 - DNA, 122 bp, Homo sapiens
caacaccgaagggagacgacttcgctgtagctcagagtctttttccattcttcacccacgcgcggggcagtcgcgcggcgcggtcgcgcggcgggtaggaactaccatcccagcatcctctg

SEQ ID NO: 455222 - DNA, 122 bp, Homo sapiens
cgagagggaggcactagatattggcgacttttcctcctcccccccacccccattaccctccgaggcaaacactggcattcaaacacgcacgacaaacacaggctcaaacaaactcatgaatg

SEQ ID NO: 455223 - DNA, 122 bp, Homo sapiens
acatgtagcaaggacatttagtccaatccaggaaacaaaatctaagctaaaatgataaaacggaatcacctgggaaaattgccaaaggaaaaatgttccaggagagagcatctacatctaaa

SEQ ID NO: 455224 - DNA, 122 bp, Homo sapiens
ctatccaaatttaccaatcagaatcttgcactgaaaaaataaaccaatcgtgaatctctacggccacttccggaatttagcaaccgatcactaacagggatcgtccacaatccaatcagagt

SEQ ID NO: 455225 - DNA, 122 bp, Homo sapiens
cagaggggccacgcttgagttggatttgctcctcctggtgtctggtgcctccccgacctccgtgctgggctcacttctattcagctggaggaggcccagacccacaggtgtgtggccaccca

SEQ ID NO: 455226 - DNA, 122 bp, Homo sapiens
agcgtctggcccggcaatacccatctgggcgcccctcctgcttcctctaggctgtgagtacgcgtgctgccccagactctccctcctccacccacacccgcagtgacaccccttccgccaaa

SEQ ID NO: 455227 - DNA, 122 bp, Homo sapiens
ctaaaggtcccaaggctggagtcccctttactggaccctaaacatgtctgcctcctgccccgcaatcagacttagagaactgtggacggtggaaagtcttatcatgaccaggccatccttcg

SEQ ID NO: 455228 - DNA, 122 bp, Homo sapiens
cagacggggtggctgcccgacggaggggctcctcacttctcagacggggtggctgcagggcggagggactcctcacctcccagacggggtcgcggccgggcagaggctgcagtctcggcact

SEQ ID NO: 455229 - DNA, 122 bp, Homo sapiens
ggcgtcgggagcgcgctccgtgtggccaatgctgccagtgttgttgtggctgtgagaaggcggcggcggcggcggagtagcagccggaccagactccctagtagctcaggcgctgccctgct

SEQ ID NO: 455230 - DNA, 122 bp, Homo sapiens
ttattttaagatctcattcagacagcttcattgaatgagatccagcccctcctgctggtgcgtggtagactacagcattcactccagagagatctgaaaccggattcaaatgttttcaccaa

SEQ ID NO: 455231 - DNA, 122 bp, Homo sapiens
ggacaccgtttaattcagcatcttactgttcacagtgtctagcaccctgtcttgctcatgcgtagcaggagcttaacaaacactccatgcaaacaacctctgacaacagtggattcctgatt

SEQ ID NO: 455232 - DNA, 122 bp, Homo sapiens
tcgcggcccctttaagcagatacaaaggctcggcttgttttgttacagttcattctattccgcgccgcggagcgcagcggccggcgacaggagacgcgcgcgcatgcgccccgcggccgcca

SEQ ID NO: 455233 - DNA, 122 bp, Homo sapiens
taattgcacttaaaaactcatgctcaaaatttcagtaccagaaactagcatccatcatctcgacagcaaaacacaaaacgtaagaaaaactaatcattcctttaagtgaaataaggcaattt

SEQ ID NO: 455234 - DNA, 122 bp, Homo sapiens
agaaacctgcagtcagtgtgatggcctgactgagcagcactgccttctttgagctcctagcgaatgtctttccttggagggaggcagggttataaggacccagagaacactaatccctctaa

SEQ ID NO: 455235 - DNA, 122 bp, Homo sapiens
tactcaggttgtggtacaggagatctaacactcctacacaaatgcatgtcgtgcttatttcgtaccaaactggtctggcggcggttcttcgtccagacgctggcgggccagggtggaggtag

SEQ ID NO: 455236 - DNA, 122 bp, Homo sapiens
aaaatccacgccaagccctcggcaggccacaccccctgcaccgggcctcggtcactcacccggaccctcattggactctggaccggtccgattggaatcactgaacacggcccggctgaagt

SEQ ID NO: 455237 - DNA, 122 bp, Homo sapiens
gtggagccaaccgagagcattggcagagggtgacagcactgtcccgggagggcgtttgtacgtgtgagtggcagggaccaggacaggaaccaccactctccgtgtcctttacctttttattg

SEQ ID NO: 455238 - DNA, 122 bp, Homo sapiens
ccagaagagccagcatgcagggagagggaggaaagcaacaaccttaaaagatcataaacgcggttatgcacaaaggaacggagctatgaaagcaaacaagcagaccagggtggacccagcca

SEQ ID NO: 455239 - DNA, 122 bp, Homo sapiens
gaggcgcccctcgagatgggaatagtagttttaaatagacccaggttggccgctcatcagcgctcccacgtgctgaagtctagtgcacgtctgaccctaagggagcaatactgagaacagca

SEQ ID NO: 455240 - DNA, 122 bp, Homo sapiens
ccctcccagcccccgcgcagaattagcctctctgtgccgccgggaaatcggcaattagaacgctccttgcgcgcggcacccaggcagccctcgagaatgcctgcactgtggcctgcccatcc

SEQ ID NO: 455241 - DNA, 122 bp, Homo sapiens
ctgcgtggtctgaggacagcaccggtcctgggcctgtcttggtatgtcgggttctcgttgcgtgttagggcaggtcctggaggacctccgggatgctcacagatggatgccaggccccctct

SEQ ID NO: 455242 - DNA, 122 bp, Homo sapiens
ctctagtgggcaaaaatggaagcaagaaggctacatagaaaaatccaccccttacgaatgcggcttcgaccctatatcccccgcccgcgttcctttaaggccatttaggaagctatttcttc

SEQ ID NO: 455243 - DNA, 122 bp, Homo sapiens
catttccgctaggcataaaagagacacctttccagaaagcaactctaaaaatgaatgcaccgcctagtgaggtgcgagccttcctccccacgaggcgtcccgtgcaaccgcacgcggacagc

SEQ ID NO: 455244 - DNA, 122 bp, Homo sapiens
taattcctagtccatttgattttgttttgcttttaagatcacgaagctggtgtacacttccgtgcgagcttagagtggtaatgaactccacaatacactgaaaagagcttgaggagacagca

SEQ ID NO: 455245 - DNA, 122 bp, Homo sapiens
gccccctacaggacgcctgagccgcgggcgggggtccggggtccggggtggaaggagcctcgctaacctccctgtgcccattcctattgcagacaccatccctgaggacttccaagagtttc

SEQ ID NO: 455246 - DNA, 122 bp, Homo sapiens
cggttccagggcgggcgcgtggcgagggcggtgcctgggggcaggggcctcctcggagggcggcggggacagacccgtcgccccggctccgcagccccgccccggccccgcctccgctccgg

SEQ ID NO: 455247 - DNA, 122 bp, Homo sapiens
gtgaatattttattcacctgaaagctgtgcatatctggactccaactggacaggggaggccgcagaggggcaggctagttcctttaaggagacaccatgagatgaccagggactatccaaac

SEQ ID NO: 455248 - DNA, 122 bp, Homo sapiens
taaattatcaatctctgagtgggggatgtagtgaggaagtatggaaacacccattagggtcgtgtgtgcttgctcacgtgcctgtaatcccaacacttggggcaggagtttgagaccagcct

SEQ ID NO: 455249 - DNA, 122 bp, Homo sapiens
cctccgctaagcggtagaggagccgagagtaccaatgcatgccagtcggctggacggccccgccggggagcagcgcccctagcgcgtgcagcagtctcaagggggcaaaagcgcggtgcgcc

SEQ ID NO: 455250 - DNA, 122 bp, Homo sapiens
atacaggatcatttctgaatgtctccctattagcccccaacaagtcacctcttacagtgccggagaaccttggagtctgaaagcccactagggagtgctctacagtgagcacagaatcgaaa

SEQ ID NO: 455251 - DNA, 122 bp, Homo sapiens
cccatccgggcgtgacacttgaccgcgtctgccggcccctccccttgtccgtcccctccgcgccgctggcgcgcgccttctgaatgccaagcattgccataaactccggggacaaaagcctg

SEQ ID NO: 455252 - DNA, 122 bp, Homo sapiens
cctcaccttgttctcagttgtaatttgggctttcagcacaggcatcactccctggggatgcgtcccaggggcccctggcgggtcagagcctgggcctccagcatcttcggctccctccaccc

SEQ ID NO: 455253 - DNA, 122 bp, Homo sapiens
ctcgtctttgatgaggatggcggtattgggcgacttaagcatgcccatggtgagcttctgcgggaacatgtgcgcgatgagtgcgtgcagcgtgtccaggctgctgacctcgtgcgtgatgt

SEQ ID NO: 455254 - DNA, 122 bp, Homo sapiens
ccccatgaggactccgtagccctggctttggtttctgcccgccggggactgggataggcgcggaggttctcacttctgccgcttcgggtgaggcaaggcaagctctgcatccctctcctcgg

SEQ ID NO: 455255 - DNA, 122 bp, Homo sapiens
tcccttacacttaacagaggaaaggatctgtaaggcgcgtacccctctactgcccactgtcgacgaaaacagcctcgccctgcaccgccaccgccacgcataaggcggtgtgtgggcagctc

SEQ ID NO: 455256 - DNA, 122 bp, Homo sapiens
ggcggtctccctccatccggcacaggcgcggcggtctccctccatccggcacaggcgtggcggtcttccccatccggcacaggtgtgaaatttaaaggcttggacggagtttcctttttcct

SEQ ID NO: 455257 - DNA, 122 bp, Homo sapiens
ccggccgcgaaggtaagtgttccggaaccgtgaggactgcggggacggcggggtggggaccgggcggcaggggcaggccgaacgtgctcgtgtcgcccacaggtggcaagaagaagccactg

SEQ ID NO: 455258 - DNA, 122 bp, Homo sapiens
ggacccatccccgtaccacacccggggacccaggatggggaaggagggtccagggtcccgcgagcgaaaggaaggcagaacttactccgcggtcctcttctgagaggaagtccgggccgtcg

SEQ ID NO: 455259 - DNA, 122 bp, Homo sapiens
cagcgccctcgggaggccaagggcagggagccgacccaaggtctaagccctccagctctccgtcgcgggtttgggtcccgtctcaagagtggggcgcgcgggctgggcctccggcctgacac

SEQ ID NO: 455260 - DNA, 122 bp, Homo sapiens
cacccacacgactgcaacatacaggtgccttggggaaatgtggagaacattcaatcttgccgtcactattcatcaatgaagattaacactgagatccagagaggctggatgacttgctcaag

SEQ ID NO: 455261 - DNA, 122 bp, Homo sapiens
cgtcgtcctgtctgcggtggcgtcgtcctgtctgcggtggcgtcctcctgtccgcagaggcgtcctcatgtcctcagtgttgtcttcctgtccatggcgttgtcttcctgtctgcggtgtcg

SEQ ID NO: 455262 - DNA, 122 bp, Homo sapiens
ctgagagttggaagctctgagtcatgactgagttggaagcttacatgttgatttacaaggcgtctttgcccattacatttatttacatgtccagaggtcatggcctgaaaggcttggctcca

SEQ ID NO: 455263 - DNA, 122 bp, Homo sapiens
cccggacttcaagagggctttggacagcagtcccgaggccaacactgaagatgacaagaccgaggaggacgtgcccatgcccaagaactacctgtggctcaccatcgtctcgtgtttttgcc

SEQ ID NO: 455264 - DNA, 122 bp, Homo sapiens
cggagccaccctgggagcgtccgggctgcggactgtgactccggggcaggtaatccggggcgccggctgcgggctccgggcggggcggggcgcggaggcagccagggctcgggggagggtcc

SEQ ID NO: 455265 - DNA, 122 bp, Homo sapiens
accaaaccatccaacacatcctgggcagcggaaaccgaaatggcaaatgaatgaccgcgccggggcgcaagggaggaaaaacaaagccacctcccgccgtccgctacctgcggcgagggccg

SEQ ID NO: 455266 - DNA, 122 bp, Homo sapiens
ctttaggacatgttggtgcccagacctgtgggttgacagcgaggcccggagcacggaggccgcctgtgtggctcacatcagagctttaaacattcagtttgacagggtgtcggggcgactgc

SEQ ID NO: 455267 - DNA, 122 bp, Homo sapiens
gtttccagagccaaacaaagccaatgacaagttccagagataaatgtactccagcgcccacgcgctgcaggtggggcgatcccccgggagccgagagccaggggtaccgggcaaaacctcag

SEQ ID NO: 455268 - DNA, 122 bp, Homo sapiens
taggggcaaggcgcagccaatgggaagggtcggaggcatggcacagccaatgggaagggccggggcaccaaagccaatgggaagggccgggagcgcgcggcgcgggagatttaaaggctgct

SEQ ID NO: 455269 - DNA, 122 bp, Homo sapiens
cgccatgctcccctgtggccccagaattcaggatggggtctgggcagggcctgctccacccggaggccgtccctcccttctcctgcccactctgagacagagggctggtgtctctctgcagt

SEQ ID NO: 455270 - DNA, 122 bp, Homo sapiens
tccgttgtccctccatgctgcggccatcttttcagcaaaggcatctgggctttttcctgtcggtcagcgggtgactccttcctccgtcgtccctccatgcgtgcggccatcttttcaggaaa

SEQ ID NO: 455271 - DNA, 122 bp, Homo sapiens
aactgctgggggaaccttcgccaccctctcccgggcaactctacggggaaagcccagctgcggacaagccagacttgtggtcttctgccaggggcggcaggccctatcccctctctgggcct

SEQ ID NO: 455272 - DNA, 122 bp, Homo sapiens
gtggctcatgcctgtaatcccagcactttgggaagccgaggcgggcagatcacctgaggtcgggagttcaagaccagcctgacaaacatggtctttagtagagaccagtctctactaaaaat

SEQ ID NO: 455273 - DNA, 122 bp, Homo sapiens
ggggaacgcggccaccctgagtctggtgagtcgactgcggcggcctgtgtccgaagtgtccggggccgtgaacaagggcagcggcctggcctcaggcctgcgttcccacgtttggaaacggg

SEQ ID NO: 455274 - DNA, 122 bp, Homo sapiens
ccgtttcagtcaagggtcgtaaaggtatgcagctgacgaaagaataattgcccggaaggccgaaggaaagcaccgtgtgttgatgtaacaatggtacatcaagtccttacattttaaaataa

SEQ ID NO: 455275 - DNA, 122 bp, Homo sapiens
ggcccgggcgggggcggggcgggggcgggagctggaccacctgcaaccattccccggctgcgtattccaatcccggcctcctctctggaggctgcgtccaggcatcgcgttgaataagccgc

SEQ ID NO: 455276 - DNA, 122 bp, Homo sapiens
tttgcctgagttcactaccacctgattggtttgtgtgactactgaaattagtgcgtgaagcgttagctcgaggaatgccagctgctcccccaattccatttcttaaccttcccaatgttgag

SEQ ID NO: 455277 - DNA, 122 bp, Homo sapiens
agagccggctctggtctcccacccggcagcagcacaaaacttaaccaggatttctcacttcggtcaactcttgaatcaccgcgcccagtctggctggctcggcagcagatggaatgagggcg

SEQ ID NO: 455278 - DNA, 122 bp, Homo sapiens
cacgcacacacacatgaacacacaagtgcccccacacacagtgctgtctagtgctagcctcggttcctttctgtgccatcgcccatgattaatgtggatgctttcatgaatgtgttttctct

SEQ ID NO: 455279 - DNA, 122 bp, Homo sapiens
caccgcgagtgggttcacagcctcatcccgaccccgcgtgtcaccgcgagtgggttcacacgctcatcccgaccccgcgtgtcaccgcgagtgggttcacacgctcatcccgaccccgcgtg

SEQ ID NO: 455280 - DNA, 122 bp, Homo sapiens
gggctggtgcatcagtggtttgatgaattctatccacgacccatccatcttgctgacggccgacctgagcagctacctgagagctggcagcgctcgctcgatgaaggccgccgaatgacctg

SEQ ID NO: 455281 - DNA, 122 bp, Homo sapiens
cccatgttttcctccaatccttaccaaagatggtgcccttcgcttcctctctcggcagcacgcaggtcccgggagcctctacccgacctctctatgatacgtcctccagccccgctcccgac

SEQ ID NO: 455282 - DNA, 122 bp, Homo sapiens
aaagagccgtcactttttcacttctagattctatccaaggaaagcccaccttgtggctcccgaagccactgttctatttcattcctatcgctgtgaacttccctgacgaggggtgattcctt

SEQ ID NO: 455283 - DNA, 122 bp, Homo sapiens
ttacttcatattctgctaagtctcttataacccctcactgtgattcctatccccagctcccgctaacccccagcatttctgcaagtgtgaagtagactggattcctgaaggttttttttctc

SEQ ID NO: 455284 - DNA, 122 bp, Homo sapiens
gctgcctcgttcctttgaactatgccctcacccttctgccctcacttgatttgaaagggtcgttaactctcccttacaggtgctttgactcttaaacgctgatcttaagaagctctcttcat

SEQ ID NO: 455285 - DNA, 122 bp, Homo sapiens
accaccatccctcccagctgctggggcagaaggttaaataatagctctttaggggccggacgcggtggctcaagcctgtaatcccagcactttgagaggccgaggcaggtggatcacctgag

SEQ ID NO: 455286 - DNA, 122 bp, Homo sapiens
agcaatgctttgggacaaaataaaagtttggtggccattgatgttgcttctggcaacatccgttctacattctggaagaatgtaaaacaaaaataaaattctaagtccctcaatcatctgaa

SEQ ID NO: 455287 - DNA, 122 bp, Homo sapiens
gaaaaaagatgacttagacacctggtgggagagacaaatcgtgcaagaaggaaacaggctcggcagcctcgccgtctgcttgcaggacttcttatttaggcttcagcaacctcagagggaga

SEQ ID NO: 455288 - DNA, 122 bp, Homo sapiens
gcgcccctggcgtccgggcaggtgccaggtgaggaaagaaatgggggccgctccatgaagcggttcctgccaataaagaaaacgacatccagagaatacccaggcggggaataaaggggtcc

SEQ ID NO: 455289 - DNA, 122 bp, Homo sapiens
caattgttccactgcctcgtcattcgtccccagcttgtgagaacgctcacgttggccctccgtgcccctcctgattgtcacccactgggtgaatcagtttcctgagcaaaggttcgcctcca

SEQ ID NO: 455290 - DNA, 122 bp, Homo sapiens
acctaagttacagtgtgctggtaagtggcagagccactatttgaacccagatctctatgacgacagctcttttgcccatatgttttgatgcctcaaagatccaggcctaaagtatacctgtg

SEQ ID NO: 455291 - DNA, 122 bp, Homo sapiens
gccgggtcccagagacgccctagggtcagaggtcatctccgtggcaacggaaacttcccgcgctacggcggctccaacgggccgcttccgccgcattgcgtagcgaagcccccggcgagccg

SEQ ID NO: 455292 - DNA, 122 bp, Homo sapiens
aagcgctctcggtctgggaggtggacactcgtccatcagtcaccaggaggctgcccatcgcggtgggctcccgggggtgtcccccgccagaaacgttaccatggttgcaagctgaggcgtcc

SEQ ID NO: 455293 - DNA, 122 bp, Homo sapiens
ttggtccaaatggcccgggtggccactcttccagatagaccaggcaactctccctcccaccggccacagatgaggggctgctgatctatgcctgggcctgcaccagggattatggttctttt

SEQ ID NO: 455294 - DNA, 122 bp, Homo sapiens
cagacccaggctgagaacatggagaagcgaaggtcccacatgatgacacaggaggagatgcgctggtggtcacacctttcagggaggtgagtatgaagaagaggagtacaaacctgtcaaaa

SEQ ID NO: 455295 - DNA, 122 bp, Homo sapiens
gcctcctttgtaattctgccgcccggtggcgaagggttttaagccaggcttggctgctgacgggagggggaaggggcgtactctccctagctttctggtctctagggcagctagataaacgg

SEQ ID NO: 455296 - DNA, 122 bp, Homo sapiens
actggtccacagacaatcaagagacaaaatatagcaatacagtatacctcggatatccaccgccgccataattccgagagcgtttacaggttctctttccggcgcaaagtaaacgtaagcct

SEQ ID NO: 455297 - DNA, 122 bp, Homo sapiens
ggcttctcccctgaatgcgccttcaagtgcttgttgtatgaggacttatcgttaaaccttcgcccacactcctggcattcataaggcttctctcctgtgtgtgttctctcatgcacagtgag

SEQ ID NO: 455298 - DNA, 122 bp, Homo sapiens
tcaaaaacagtgttctggggattcattgctacctggttcttggccgcatccccaatgagccgctcggtgtctgtgaaggccacgtagctgggggtggtgcggttgccctggtcgttggcgat

SEQ ID NO: 455299 - DNA, 122 bp, Homo sapiens
ccctgtgagtttgaaagaagctgtctgcgaagtggcccttgattacaaaaagaagaaacacgtattcaagctaaggtgagagtcgccgtgcttcatggctgccagagtgggtttgcatttac

SEQ ID NO: 455300 - DNA, 122 bp, Homo sapiens
ggggctctggttgccgggaaacggtggagtcacgtgccctgagcattgcccctcccctcccgagggccaggttgattccttgcagatccagggttccagtccctgcttggatagggaagtcg

SEQ ID NO: 455301 - DNA, 122 bp, Homo sapiens
atccggcgataccctcccgaggctgcagccatcgccccggccccgagcttctggggtacccgccactcttcgaactccaatctggccccgaaggtgcagccgcctcgccctcctggctccca

SEQ ID NO: 455302 - DNA, 122 bp, Homo sapiens
gaagttatttctccactgctgttcaaacccactcccagacctggccttccctgaggagagcgtctcagccaaatccaactgcctctagctcaagtttccttgcggggggcccgctggcctca

SEQ ID NO: 455303 - DNA, 122 bp, Homo sapiens
gggtcgaaggcctgcgtccaggtctcaggcagcctcactgggccgtggggagctttgtcccgcctggcacagctatgtagctgagcagggtggggcgtcctggattgcccatctggcaacac

SEQ ID NO: 455304 - DNA, 122 bp, Homo sapiens
atatatgaaactggagactttctctgacggggtttaggaagccttggctttattgcttctcggccttttggctaagatcaaatgtaggaagccttggctttgcagttagatgtttggaatag

SEQ ID NO: 455305 - DNA, 122 bp, Homo sapiens
tcctggaatgcctttccccctgtgaccaccagatggactcctaatttgcaaaacaaaaagcgagaaaatctggctaagtatgttttttgtttgtttgtttgtttgtttgttttgagacgaag

SEQ ID NO: 455306 - DNA, 122 bp, Homo sapiens
ggagcagcgcggacccgagccgggcagggggcgcccgccacggcacccgcgcgctcctagcgccccagacccgcctgcgggcccggatcctccttgccactgtcccacccgccgtccctgcc

SEQ ID NO: 455307 - DNA, 122 bp, Homo sapiens
tctaagatcatttccaatgtgaacaatttctgatgttaagactttatgaatttactccctcggtttttatccaactgacccagcctctttccaactatcctctcacttctcatcattgttcc

SEQ ID NO: 455308 - DNA, 122 bp, Homo sapiens
tatcacccagaattagctgcaaagtgtcaggagacttggccaggcagccccaagcatcagcgagggctggaagccttcactgtgaagccctttatagaaagccgcggttggcagcccccgct

SEQ ID NO: 455309 - DNA, 122 bp, Homo sapiens
ggaaagatttacacgcagttctcaactttacgtgacgtgactagggagggaattgacggtcgcaccgtctacctagcccaaacggggtcacagcaggacaaggaagtagccgatctcccaga

SEQ ID NO: 455310 - DNA, 122 bp, Homo sapiens
ttcatgcagtaggctgtgatgacataaagatattcattgagagactaccatggtataccacgtgtcctaggactagacaatttgttcctcagttttctggttttaaaatgaggataataaag

SEQ ID NO: 455311 - DNA, 122 bp, Homo sapiens
ccgttcagcggggagcgcggggagggccccagccttggctgcccttgccccgcccctgcccgctctcgggaagccaagacagcagaggaggttgggaaaagatgacacactggggttcctga

SEQ ID NO: 455312 - DNA, 122 bp, Homo sapiens
ctagcccctgtgctcttaactatggcccccctggaggggccaagccatgagccttggttccggccaccgccaaagcacctgcacctgccctgagtcctgtgaaggaacaaggacagaaagag

SEQ ID NO: 455313 - DNA, 122 bp, Homo sapiens
ccgggatggagactgatgagccggatgtgtcccagcgtgtaatgcagggtgggctgagtgcgccccccgacgtctgtgtgggaatcctcaccagcaaggccatggtgttaggagggggtgcc

SEQ ID NO: 455314 - DNA, 122 bp, Homo sapiens
cactgggggtggggaggaggtgttactgtaaaatgcaagttggataaaaggaggacctctcgccaagggccccaatgagtggcacacagtctactatcaccgacaggttggtatgaattcct

SEQ ID NO: 455315 - DNA, 122 bp, Homo sapiens
aaaattcagtatgagacatccattgtacccaaagctaggtggccttaagaaggtcagtgtcgctcagcgacagggctcggccccccctcgtgcaaacccaccccgaggtgtgaggccaggag

SEQ ID NO: 455316 - DNA, 122 bp, Homo sapiens
aggcaaatcaggacatgtattaatagagaaatgtccatggaaatgcatgtacccacccggcgtgctggatcctgcttctgtgacttcacgcgtgtggatccgtggaaatgcgtgcacccgcc

SEQ ID NO: 455317 - DNA, 122 bp, Homo sapiens
tgctgggtctcttccctggagtttctgagtgtgcaggtgtggaatagagctcaagatctgcgtttctaacatgttctgagctgctggtcccagtactacgctcagccaaccagccctccaga

SEQ ID NO: 455318 - DNA, 122 bp, Homo sapiens
cttccggggcttcttcgattacttccggttcgcagcgcggccgacggcgcgctgtgttttcgcaaagcttccgaggattctcggcaatttccgcccacgcccgaaagccaagccccacccct

SEQ ID NO: 455319 - DNA, 122 bp, Homo sapiens
gaacacaagctgctgccggggactgtcctgggtggacggcaggtgaacacaagcggctgccgcatgtagccactcactcgactttttttcagctgtgaccattcccgggagctctttgagcc

SEQ ID NO: 455320 - DNA, 122 bp, Homo sapiens
ttttgagagtagggaatctactgcaggtttgatttattagcctaataattattgaacacacgttgtacaccagcataagaatcagagttggtaattcagttgtgaggaaaataaggaagaat

SEQ ID NO: 455321 - DNA, 122 bp, Homo sapiens
tttcctttcagctggctctgggaaccttatgctgatgtaatggagataacctttgtgagacgttaaatcagtgtatttgcctgcccagtaagtctttgtctccatggcttcccccttgagtc

SEQ ID NO: 455322 - DNA, 122 bp, Homo sapiens
ccccgtaggctccgggcgagcggctgctgcttcttcagcgggtcggaggactggaggctccgctcggcatcgccggtgccggcccccgagccgaggacgcagaggggctgcgaggcggcagg

SEQ ID NO: 455323 - DNA, 122 bp, Homo sapiens
ccacaggtgaggccggcgttacgcttggccaagacgcacttcatcctcaggaagaaggagcgctcgatctcatactctgggagagaggaacgaagggaagctcaggtcgtgtgacaccggcg

SEQ ID NO: 455324 - DNA, 122 bp, Homo sapiens
ggggcgtccccccagtccttcccatgctgggtcccggcaagcgggttaggctgggctgggcggggctcggggaggtgtggggtcagcttgccccgggagcccagcttcagggaggatgcagc

SEQ ID NO: 455325 - DNA, 122 bp, Homo sapiens
ctaaatggtctaactttatattgaaagaccatttaagattggaaagtgcaaacaatataccgtttaatctgagagttgatgtagtagttatgaatcaaacacaaggtataaagaccctagca

SEQ ID NO: 455326 - DNA, 122 bp, Homo sapiens
tgaagccagagaaagagaagccacgtttcccgccatggaaacacacttatgagtccttcgcgatgggcaaagcccacgtttgagtagcagctgctcgtccccttgccctttgcccaggtccc

SEQ ID NO: 455327 - DNA, 122 bp, Homo sapiens
gaaatcgagaaagggagtggggcccgcctcttttctgacctaagggcaggagtgaggggccgggaggattacgggcggctccccctagacgcgcccccaggcgagctggagactggggcact

SEQ ID NO: 455328 - DNA, 122 bp, Homo sapiens
cacccccgctgcaggtcactgaccctgcttggaaaacaccaggcttgctcatataaggagcgtgggccaggcctgagtattcagcgatggcatttgcatggtggccctgtctcatcttggct

SEQ ID NO: 455329 - DNA, 122 bp, Homo sapiens
ttggctgcatttcaagcgctggtggctgccgtgttggacagtgtggatgtagaatgtcctcgtcatcacaggcagtgcgataggacggtgccatgctagaagcacgaacgccataagactct

SEQ ID NO: 455330 - DNA, 122 bp, Homo sapiens
ctagaatacaaaagccagccaaactatcaagtaattttgaggctacagtaggtacatactcggccccaagcaaggcctcaaatcattttcctcatttctaacatttctcagaaagctacttg

SEQ ID NO: 455331 - DNA, 122 bp, Homo sapiens
atttaaaagagtttggaacctccctcctctttctcttgttcctgctctcactatgtgatgcgcctgctcccctttcttcttctgccatgattggaagcttcctcaggccctcaccaggaaga

SEQ ID NO: 455332 - DNA, 122 bp, Homo sapiens
gacctctagggacctctgaacttctggagttaagatgaaggcatggacagtctttttttgcgaagtgtcatgtagcaacagagtttgggctttagaatctgacagacctgggctctagggaa

SEQ ID NO: 455333 - DNA, 122 bp, Homo sapiens
tcccctgagtttcctcctcataggcttgtccctgggagtgtgggcggcccctttcttgagcgcagaaacacttacttttccccctaccctgctcctcctcctccacagccgtctttctcttt

SEQ ID NO: 455334 - DNA, 122 bp, Homo sapiens
gcacggaggagcaggggggccatgggctgagtctgggcctggaccctgtccagcagtcagcgtggccatgaggtgggtgaggacgggcgggagtgggagacgcgcctgccaggacagctcgg

SEQ ID NO: 455335 - DNA, 122 bp, Homo sapiens
tcacgctaccttgcctggcggcggccccagccgaccctgggctcggggaaaagaggtccgcgttccccccgcggcagctctgtttcccagcagccggacagcccccatttaaagccagccgc

SEQ ID NO: 455336 - DNA, 122 bp, Homo sapiens
gggctcctggagggcaaagctgggggtggtggggtcctgcagagcggggccgagcccgcccgcagcgcctggggcctggggagtgggtggtagggtaggactggtgtcacgaagacgccccg

SEQ ID NO: 455337 - DNA, 122 bp, Homo sapiens
cccagatccgtggcttggacacgctgcccacacactcaggagcgtctgccgcgtaacccacgcgccccaggcagcttccctcgacccccgcccactcggccttggcctgctgggtcacagcc

SEQ ID NO: 455338 - DNA, 122 bp, Homo sapiens
aaaggggagcaggcggtgccccgtcccagcggccaggccggccgagagagccaggagccacgtgcccggtgggagcacgccaaaagcaggagaacacctgaccgtttttttggcccaccaag

SEQ ID NO: 455339 - DNA, 122 bp, Homo sapiens
cagttctatcagatttaaataagtataattcaaaaatacagcctcaagattaaattagctcggagaactctggactgagcaaagtttaacagatttcttcaatatagcaagcttctttatta

SEQ ID NO: 455340 - DNA, 122 bp, Homo sapiens
cagacagacagcaactgaaaacaaaacgaaaaaagcatgcacaattaaaatttttaagtgcgataaaggacttctatttgagtttgaagaaatagcctgcacaagcctaaacacccatcgag

SEQ ID NO: 455341 - DNA, 122 bp, Homo sapiens
ggcacggcgctggggctgcttacctggcaggctcagcaatgagggcggggcggcggcgcgcgggcctctggaaccctgccggtccaccgaaggtcccgagcccgctatcttcgtaggtgcgg

SEQ ID NO: 455342 - DNA, 122 bp, Homo sapiens
gtgctcgaagtacccggtgtcgtaccggctatcatacacggtgtgtacatgtatcttcctcgcttaggctgtgcactcagcccccggtattgtgtgcagtaggtgcctggtaccctgctgcc

SEQ ID NO: 455343 - DNA, 122 bp, Homo sapiens
ctctgccagatgggcattccctgtatagtgctgagggctgggcattgggctgcgagttggcgatcaagatatctggctttaagaaaatcccaagagctttctcaatagcctttcacctacgg

SEQ ID NO: 455344 - DNA, 122 bp, Homo sapiens
tctccacagcaacggagtttcagagcgcgcggcagcttgggggcggggttcccagtcccccggtcaaattttaggacttttcagcaggaaagctgcacaactggaggagggcaggacgaggc

SEQ ID NO: 455345 - DNA, 122 bp, Homo sapiens
gagccggaggcggagacgtggttggcggggactgtgcgccctgggaggggtcggagtcggcgggggcggagccgagcgggcggggagggtgctgggtcgcgcctggcctggggccgaggcgg

SEQ ID NO: 455346 - DNA, 122 bp, Homo sapiens
gcctcagcatgcagcaagcccgtggggtcccgtctgcccagcctctgcctcggttcctgccgggcacatggacgcttcccttgaatccttctgccgacggcatctgtgggagggcaggtacg

SEQ ID NO: 455347 - DNA, 122 bp, Homo sapiens
cgacctgctgcgctcactctgggtgggggaagcgggttccaggcgccgggcctcactaggcgaggcgcagacggaagaggcgtctctggaggtaacttttcgaccttcctgggagtagctct

SEQ ID NO: 455348 - DNA, 122 bp, Homo sapiens
ccaggtggtttaacaagtgctgggcgccgggctatatctccaggcaccgccttcacccttcgggaactgtgcgtgtctgggtcaccctggaaccggcactcatctcacccctgctttggggt

SEQ ID NO: 455349 - DNA, 122 bp, Homo sapiens
acaggatttagccacagcatgacccggcaacttgggttcttaacgctggcaaaagccagccgaactaacagggagcaacttataaaaatgcaaagacgtacaagatcaaaacaaacaaaaaa

SEQ ID NO: 455350 - DNA, 122 bp, Homo sapiens
gacaggactcgtggagtaatgggaggagcactggactgggagtcaggagacttgagctaccgtactagctgtgcctctaacttgctgtgtggccttgggcacctcacttcacctctctgggc

SEQ ID NO: 455351 - DNA, 122 bp, Homo sapiens
cctcctgcatcccgcagccggcggaagcgattattccccggcgtctggcggggccgggggcgggctcgcacccggaggagacacgggtctccccgagcccacctttgatcgcaccgccccgc

SEQ ID NO: 455352 - DNA, 122 bp, Homo sapiens
ataagtgaaaaggaagaagatattgaagagacaagatccaggtgataactgggaagaaggcggaggtggtggtgatacagaaaaatcttcaggtccctggaataaaacagctctggtacaag

SEQ ID NO: 455353 - DNA, 122 bp, Homo sapiens
tcgcgcccccggaccaggtaccgaccctcctccccgggctgccctaggggacccaggcggcgccctccagcttgcagccagcagagatttattgaagatctgctgtgtcccgagcactgcgc

SEQ ID NO: 455354 - DNA, 122 bp, Homo sapiens
tttgtcactgtgagagagactcgatcctgctgtgtgagttgacaccatgggtgcagtattcggcaccacagtactcctgcacattggaaactgggagactggtgttttgaagaaagtagctg

SEQ ID NO: 455355 - DNA, 122 bp, Homo sapiens
ctgctttctttgctgccgaccctgcgcccagcacggagactgtagttactactaggacctcgcctacccgcggaacacactgagagccggaagtgttgccttagctccggacgaccggatgg

SEQ ID NO: 455356 - DNA, 122 bp, Homo sapiens
agtggatatactaaaaaccattgaattgtacactttaaaaatggcaagtttgaggccaggcgtcatggctcacgcttataatcccaacactttgggaggccgaggcaggtggatcaccaggt

SEQ ID NO: 455357 - DNA, 122 bp, Homo sapiens
aaggagagaggcacgcgctgggagagctcgtccatgagggcgctgaaggtcttaaaggcgcgctggtgaacggccaggcggaccccagcaaaccgtggatcccctcgcttgaggaaggtgat

SEQ ID NO: 455358 - DNA, 122 bp, Homo sapiens
gctacggcctctacgcagtagaggtaccgcgtctgtgggtcgggtttccggggccggatccggctccaaggcacggaggaggaaggcgcaaatcacaaacgagggggctgcagcggttgaag

SEQ ID NO: 455359 - DNA, 122 bp, Homo sapiens
gttgctcacacccagcgaccatgtggtaaactcctttccccacctctcctggctggtattcgtggtggtgatggattgataggttgcattgggaacttccctaagtgtgggagcagataaga

SEQ ID NO: 455360 - DNA, 122 bp, Homo sapiens
tgagacgctgtgctggccagacgagctgctaaatggatgtgacttcttccacaggggatgcgggagagaagggagacaaaggcgcccccggacggcctggaagagtcggccccacgggagaa

SEQ ID NO: 455361 - DNA, 122 bp, Homo sapiens
agtctgcaccacagacacgtccaggtaactggccataggctggtaggttcccggatatcccggatagaaggcaaactcagtggggcggctggggtactcttccccggccgtgggagtctccg

SEQ ID NO: 455362 - DNA, 122 bp, Homo sapiens
gggaagaggaaggggagagtcggcggtcggagcggggtgacgaggacctcatgcacgaggcggcgaaggaccgatggcagagaaccgagtgcggcgcgaggcggtggccgcggccagcgggt

SEQ ID NO: 455363 - DNA, 122 bp, Homo sapiens
gccgaggtcctcttccaggattggctacctcctcataaccataagataattaaaacttggcggggggggggggcagggttaaaaaaactttttttatcagtcagaggataatgcaagtgttt

SEQ ID NO: 455364 - DNA, 122 bp, Homo sapiens
gagtggtgggctcttattcttgtgcttcaaaaccagaataggtactgcttgggtgcagagcggaaaagacaactccattaaaaatgaatggtactgggaattttacttctacccagaatgta

SEQ ID NO: 455365 - DNA, 122 bp, Homo sapiens
gcgctatgacctccgggatcggataaccagactcggggatgtgcagtacaaaattgacgacgatggctatctgtgccagagagggtctgacatcttcgaatacaattccaagggcctcctaa

SEQ ID NO: 455366 - DNA, 122 bp, Homo sapiens
ttggtcggctgcagagaggcggcccgtaacgcgacgcgaaagaagtggggcatagcggcccggggaattcttgctagcttccgattggacgaaagcagaacgcctgccccttcgtagaccca

SEQ ID NO: 455367 - DNA, 122 bp, Homo sapiens
ccatcgagtgactggatgatctgcaaaagaggaaaacaacccggccagagagtcaggggacggccaccagatggccctgtggaccgccgcccgacccccgagcaagccgtgtgccccgaggg

SEQ ID NO: 455368 - DNA, 122 bp, Homo sapiens
cagtcccagcccttccccagcttgcactgaggggacactcctgctctgtcccctgactctcgctgatggatgccccctgctctgtccccgccaactctcactgacaggcacccccctgctca

SEQ ID NO: 455369 - DNA, 122 bp, Homo sapiens
gcgctcgccctctagcctgaggcggaagacaggaagtggattctagttcccaagccgcaccgcctaaatactgccggagtctgcgctagttgtgacgcatactatagcgctgttttcctgca

SEQ ID NO: 455370 - DNA, 122 bp, Homo sapiens
aggcctcgttgcagagagaggagtttatctgagaattctccggtcttttttttaaccactcgagcaatgggtttcccaacccagaacttcttccgtggatacctaagaagatgacatacata

SEQ ID NO: 455371 - DNA, 122 bp, Homo sapiens
ccccgaaacagaagccaggctgtggacacacagcagccagagccccaggcactacccgcacgccagccctcagacctcagacctcagaggctgggctgctgacggagggggcccagggtccc

SEQ ID NO: 455372 - DNA, 122 bp, Homo sapiens
ctgtgggggagtcctccatcccatatgggggaaatggacttccagacatgcgtacagcagcgaggtaggaggtagactcgagtgtgtcctacaggaagccttctgtgcacaagggaaagcat

SEQ ID NO: 455373 - DNA, 122 bp, Homo sapiens
atcccttgtgagagggaagatgcttccatcaccagcctggggtggctctcctcctcaagccgggccccaaatgcactggcagctttatcccactttctacagcgatgggtctccaatcgttc

SEQ ID NO: 455374 - DNA, 122 bp, Homo sapiens
tgtggggggagaggcgcaggcaggaaccagggctgtgtgcagtgctcgcaggccagcacgcgttccgtgtgggtgcgggcttggcaggccccacgctcaaagtggccggccagcaccgctgg

SEQ ID NO: 455375 - DNA, 122 bp, Homo sapiens
tttccagtcagcagtgggctttgcagcacagatcttgtttcaatattacaagcccaactccgcaactctgtggattgttaaatttatatgctagttcaaggaaaaggcagggaaaaaagaga

SEQ ID NO: 455376 - DNA, 122 bp, Homo sapiens
tcgcccttgcggaggccctgagggcggattcaaggccccgcgagaagccatctgaggcggcgacgactgttctcagccccacgggaacgccgcggacgcagcgtccctctcccggacaagaa

SEQ ID NO: 455377 - DNA, 122 bp, Homo sapiens
ctttacccatgaggcctgccccgttcgcgccctgcttgcaagctgggccacccaggacagcgccacactggacgccctcctggccgccctgcgccgcatccagcgagccgacctcgtggaga

SEQ ID NO: 455378 - DNA, 122 bp, Homo sapiens
cgcagccgggatcccaagcctgagccggtacctccgcccggccgccgactccgcgccgcgcgtaacccgacgtctgagatcgcagtgcctgattggcgcagccaaggttggggcgggcctcg

SEQ ID NO: 455379 - DNA, 122 bp, Homo sapiens
gcagccggctgaccacatgtcgatggacgtggagtacagcttggccccaaagaggacatccggtgggcggtaccacagtgtgaccacctggaggagaccccccccgaaagggacctcccact

SEQ ID NO: 455380 - DNA, 122 bp, Homo sapiens
ctgatgttttgagaagtgcatggagtttcctaaactttgcacaaaagaatatcctggggccgggcatggtggctcacgcctgtaatcccagcactttgggaggccgaggcaggtggatcata

SEQ ID NO: 455381 - DNA, 122 bp, Homo sapiens
tgcaacagaccagacatccagcctgccgaggaggggcagggggtcttgctgccttccccccgcccagtccctgctgcctccacggccggacccccagcttccgtgggtgggaggccgcactg

SEQ ID NO: 455382 - DNA, 122 bp, Homo sapiens
aaatcaggatagtggttatctcttgaggaggaagaagaagatgatgattaaagtagagcacgcagaggattttcaagtcactggcaaagttttacatgttcatctggataacaggtacacag

SEQ ID NO: 455383 - DNA, 122 bp, Homo sapiens
actctaggcacatgaccaataagtactccagtgccagcactatccatgcaaaacagtaaacggtgtgaagcaatgcatgcatgtatgtgaaatttagctccatacttaaccagcttcatgct

SEQ ID NO: 455384 - DNA, 122 bp, Homo sapiens
aaatttaaggagaattctattatggctgcagcacgttatataaaaggccgatgtcaggagcgaaggccttcgtgggtgccctctgatggctgatatgcttgcgccaggacggaagcccatgg

SEQ ID NO: 455385 - DNA, 122 bp, Homo sapiens
gtcacagagggctcctccccctccttccttcccctcatctgccaggacctgtcaggaaatcgctcagaccagggttccaaagcttccttgctgtgtgaccctagctaagtaacttcacccct

SEQ ID NO: 455386 - DNA, 122 bp, Homo sapiens
aggaactggtccttcactacggatggcttgagaagcaatgctttgggccagagaagtaatcgacactctccagtactctgatctctctctgtctggaccacctcccttcttcttacctctta

SEQ ID NO: 455387 - DNA, 122 bp, Homo sapiens
gggcgttccaacgcggcgccccctattggacctcccacccatatccggtttccggtctgacgccccctgctcattcgccaggcagccttgattggcatgacccctgcccaatggctgacccg

SEQ ID NO: 455388 - DNA, 122 bp, Homo sapiens
caacgtggccccgcccacccgggggccgacggggcctcgccctggtcccgcctctccgggcgccctggctctgattggcaaggaggccacccttttgccgggcggaattgcacgaagccacg

SEQ ID NO: 455389 - DNA, 122 bp, Homo sapiens
acgcgcttgttcctaacgcagcccgtctctccctcccgaagagcctgcttccctcaccttcgccaggactgaaggttccctgaactccccagaggccgagcagaagcacgaggcttcctgta

SEQ ID NO: 455390 - DNA, 122 bp, Homo sapiens
attttgggtcattgggggattaatttattcgtgtctcgtaagcactggcagaacaccacccgtgtgaacagcattggtgaagcctggggagttctttttgagacttccttgagcttccggca

SEQ ID NO: 455391 - DNA, 122 bp, Homo sapiens
gttagtaaaatgctgtacagcattaagcaagtcactaacttccttgaatctttgtttgttcggtaacaaaacaatagggataagagtatctgttccttttgttttacagaactttgtaggga

SEQ ID NO: 455392 - DNA, 122 bp, Homo sapiens
tttgtccacacgaaaagccatggaatagctgagggaaaggaaaccggaagtagcgtgggccgtgaggaacgggaaatgacctcagcacgtcggaagtgtactcgtttccaaggcgacggccc

SEQ ID NO: 455393 - DNA, 122 bp, Homo sapiens
cgcaggtggttggaccgcctaagccagatgcacccggcccacctcccttagcaggggttccgaatagaagtgtgaaaatgtgtgcaatgacttctgcaaatcagaggacttgttgaaaggtc

SEQ ID NO: 455394 - DNA, 122 bp, Homo sapiens
cacgagtttatttaaaaactcgtgtccggggagtttatttaaaactcggaagccggcggccgcgagccggttgtttatgtaaacccggaaacgccccggggggcgggggcggggcggggacg

SEQ ID NO: 455395 - DNA, 122 bp, Homo sapiens
tggcggagcccggcccgctctcccgagcgcaggtatctcacctggatcaggcgagggtcacgccaagccggctacacaccacggaaaggagcccttccgcgcttttatcccaccgaccaatc

SEQ ID NO: 455396 - DNA, 122 bp, Homo sapiens
ggctgccagacgtcaggccatcctttaggacagtgctgccaagccttttactcgtcctggcgcacaggaaaaggaacatctttgtgtgacaagatggcagagtcctggagggcggcagtccc

SEQ ID NO: 455397 - DNA, 122 bp, Homo sapiens
ccaaagagctgccttctgtggttacacctccacttctccttagtcagtgggtaccaaagtcgcctgcactggtgagaaactactgctttccgtgtctctagaaattcaattcttaataagag

SEQ ID NO: 455398 - DNA, 122 bp, Homo sapiens
tccagcctgggcgacagagcgagactccatgtctaaataaataaataaataaaccaatgccgtagatatagcagtgaataaaacagacaaaaatgtctctgtcctgagagaacttacattct

SEQ ID NO: 455399 - DNA, 122 bp, Homo sapiens
caagtcgggataggaaggcgggaagttgggatacgaaggcgggaagttgggataggaaggcggggcagtttcgagtcttagtcttctgtcctgggggcagcaatcagcacggaagaaaggca

SEQ ID NO: 455400 - DNA, 122 bp, Homo sapiens
gcagctggctcgtggccacatggttcaaccagccggcccgaagatccgcagatgcaaggccgggcaagctaaagtgccccacattgccctgcacaccgcgttgggacccatccggcccatcg

SEQ ID NO: 455401 - DNA, 122 bp, Homo sapiens
aggagtggcagcgaggcatcaaatacccttgtttcctaatgtctccagcccaaacagtcccgcagacataccccagaattcacatccccagccctcagcctctacagaccgtccccatattc

SEQ ID NO: 455402 - DNA, 122 bp, Homo sapiens
gaagatgctatttgcctggggacttggcagccttacttctcagtttccactcagtcattccgtggctatttatatacagctgagtgttggccttacaggtattctgtgtttgagatcaattc

SEQ ID NO: 455403 - DNA, 122 bp, Homo sapiens
tcactggggagtgccagacagtgggcgcaggacagtggttgcagcgcaccgtgcgtgagccgaagcagggcgaggcattgcctcactcgggaagcacaaggggtcagggagttccctttcct

SEQ ID NO: 455404 - DNA, 122 bp, Homo sapiens
gtacactaaggctgtcaatgttatcttgacccaacaccttttatcagcactagaatattacgtagagacaagacagctaaaaatttctaggctcagatctgggagggaccaaaacaactttt

SEQ ID NO: 455405 - DNA, 122 bp, Homo sapiens
gacacacagagagaggaggccttgccccggcccacacagcatcagcagcagagctattcccgtggcgctcccacatcagcaagcgggggtagaagaggccgcgtgcgcctcagccctattcc

SEQ ID NO: 455406 - DNA, 122 bp, Homo sapiens
ctctcgcgggggcttttcgtgtgtcccccgagatgtcgaggaagccaggtgagttcctcgcgacaggcggtgccctttgcaggaggggacaggtagctgaggcgtggacagagtgacaggcc

SEQ ID NO: 455407 - DNA, 122 bp, Homo sapiens
gccagggaatttcttgtgtctgaaaaacttccagagcacaccaagggagaagtctaaatgcgaccatagcatgagaccctcggggcctcagtgtggatggcccttgccagagaagatgtcaa

SEQ ID NO: 455408 - DNA, 122 bp, Homo sapiens
gcttcgtcactgccaaatcagactcagggtgagacgcttccgcccggatgaaggtattgtcggggtgatagtccttgcttccggaaaggcgagctgagcattatgggttaggtgaggaacct

SEQ ID NO: 455409 - DNA, 122 bp, Homo sapiens
ggctgtgcagcttcctcctaggcctgcccgggcccatgcctcccccgaagcggcgggagtcggtgcagcctcaacttctactgcgtgtcccaggtcgccaaccagctttgctcgcgtgccgt

SEQ ID NO: 455410 - DNA, 122 bp, Homo sapiens
ggccagccggcgcccgccttcgctgagggcctccccctgcagcaggccccgccgaagctccgccagccgcttcacccccagcatgagcttcttctgatgccctgagatgggggacggaagtg

SEQ ID NO: 455411 - DNA, 122 bp, Homo sapiens
ggaagaggtgaagaagtgacagcaagctgttcacagtctttgaacatagactcagacccccgcaaacctaatctattttctttgaaaatagtggaaataaactgaaggccttgaaaattcac

SEQ ID NO: 455412 - DNA, 122 bp, Homo sapiens
agggtataaagtcaagacggtactgctcctccctgtagtaagtccttttatcagggaaagcggatgaatagagtgatttttagggttaaaatggcagggtgaggttgttccacagaccttcc

SEQ ID NO: 455413 - DNA, 122 bp, Homo sapiens
gctggtgctgggcttcatcattgccctggcactgggctcccgcaagtaaggaggtctgcccggagcagcagcttctccaggaagcccagggcaccatccagctccccagcccacctgctccc

SEQ ID NO: 455414 - DNA, 122 bp, Homo sapiens
tctttcagaatttacacgcacgtgggagaccgcgaagcgcaggcagcgttaaaactagggcgctggagtcacccccgtaccccgaatgccgtcggcgctccagggcccccagagggtgcggg

SEQ ID NO: 455415 - DNA, 122 bp, Homo sapiens
cttaggcttcccctttcccagttttttttttttaattttttttttttttttttttgctagcgagagcaggctataaaagctttttaatctatgcctgttgggggtccgaattgcaggcctgt

SEQ ID NO: 455416 - DNA, 122 bp, Homo sapiens
tgattctttgcatgagggagggaagcccgtgctgtgtgggccctgctgctcccatgcgtccgccacacatgcatcacacggtagtagtcactcctccacacctgcctgggacccgtctaacc

SEQ ID NO: 455417 - DNA, 122 bp, Homo sapiens
aaaccagttagagccaaccgtgcccagtgtggtaaattcagttcctctctggtttcctgtcggccctacagggagagacccctgtcgcccctgctccctcccatcagcaacgctcttatcct

SEQ ID NO: 455418 - DNA, 122 bp, Homo sapiens
tacttgggaggcagaggcaggagaatcttttgaacccgggaggcggaggttgcaatgagccgagattgagccattgcactcaaacctgggggatgagtgagacttctctcaaaaaaaaaaaa

SEQ ID NO: 455419 - DNA, 122 bp, Homo sapiens
tctgcccaaggtcgcggccacccagatgttcggtccccactccttcctccgctgaaaagtcgcaccgatgactaacgttgcctgccggcctggtggtttgaaaacgaatgccgggcattgat

SEQ ID NO: 455420 - DNA, 122 bp, Homo sapiens
tggggtgtggctcaagaagtaccggggtatgggctcactggatgccctggagaagagcagcggcagccagaaacaatacttcatggagggggataagttgaagatcgcgcagggtgtctcca

SEQ ID NO: 455421 - DNA, 122 bp, Homo sapiens
ggtcaaggtgttaaaatgtgggcagaacattccggaagcagtcgggggctggaagtcttccgacctgagtggaggctgctttcccaagggtccggaagcaaagggacccttgctgtgagggg

SEQ ID NO: 455422 - DNA, 122 bp, Homo sapiens
gcctcccccacctgccagtatgggggatccaggcagcatcctccaggtctggacaggtcccggggctggcagctggcgccacttcctcacgatactgccaagcagccctccccctgccaggc

SEQ ID NO: 455423 - DNA, 122 bp, Homo sapiens
cagcacgggcggggggcaggggctggggccgaccgggaggccggtgccaaggatgggggccgcccggctgccccgcgcgtgaggaggccgaggggcgcgccaccccggcccggggcggccgc

SEQ ID NO: 455424 - DNA, 122 bp, Homo sapiens
gggaatgcttcccccaccctgctgtccctgttggcatcgctgactgcagcagaacggtcacggggtgactaactgtggtgccccagagactggattcagccattaaccactttgccaaaggc

SEQ ID NO: 455425 - DNA, 122 bp, Homo sapiens
aatactttccttcatccacccatgaaagatttctttggccctcctcaatgccttttatcccgcactcttagtgagggagggttacactgatgacatgcagttacagaacagctttaaaacac

SEQ ID NO: 455426 - DNA, 122 bp, Homo sapiens
ttgagagcacccctggcagagtgagtccactttctctctgggaagtcctgctctctgcatcgaattgcgctggcttgatttacaaggcagcagcctcgagctggccaaggctcctccggctc

SEQ ID NO: 455427 - DNA, 122 bp, Homo sapiens
cgcctcctcgcggctggtctagagccagggactcccgggcggcccagctggtggctggagcgctgggtgcctcttcgggctgcccggatttctattgcagtcccatctcaaggacaatcagt

SEQ ID NO: 455428 - DNA, 122 bp, Homo sapiens
tgcaccctgcaccctgggggcatcctccatctgcctgtgtctctcagcccatcacaattccggcaaccctagccctgcagtccctccagtccctaaagagggcgcccctccccacttggccc

SEQ ID NO: 455429 - DNA, 122 bp, Homo sapiens
agcagaggcaaaatcggaggtcagatagaagattcagatagaaaaaccccaaagttccctcggtggggcggcggtgagatcggcctccgccccctcgccagacccaggcgcggccccgggag

SEQ ID NO: 455430 - DNA, 122 bp, Homo sapiens
cttgccccatagcagttgctcaataaatggtagctaagaattgaattgaaaatagctgcacgtgaaggtaactgcaatccaagaatattctgcgtaaattgtgaagaaaaagcactgtggta

SEQ ID NO: 455431 - DNA, 122 bp, Homo sapiens
ggctcctagtgcgcccgtgtgggctgtgactcccagatttggccaaggcctccccaaccacgggagagcgggagctctttaaagcagtaattgacctttggcggttttgcctttatggtcaa

SEQ ID NO: 455432 - DNA, 122 bp, Homo sapiens
tcgcttgctcagcgcccccacttcctcgccactgtcactagttgactcatcagccctgcccgacgctaagaagatgccctggcaaccgccgcgcccctcacccgctcctttctgacgctgtg

SEQ ID NO: 455433 - DNA, 122 bp, Homo sapiens
tagctgtggtgtggtgcccactggggtcaccctgtgagctgacctccaggcactctttgccgaaggctctccctgtgtgacctagtcctccctccttcccccgctccccggccaatcgtaag

SEQ ID NO: 455434 - DNA, 122 bp, Homo sapiens
ggctgcaagctgcattcaaaggggcttctcaccccagactgagggtgggagcgagggctgcgaggctgcaccctggagatgcagccaggccaggcactcacttacgctgccaggcggttcac

SEQ ID NO: 455435 - DNA, 122 bp, Homo sapiens
ccaggaaaacaaagacttcccgaccttttaaaccaggagctcatagtcctgtggcttcatcgtctaaagaggctggagggggcaggggggcagagaatgtctactatatttttgccccaagg

SEQ ID NO: 455436 - DNA, 122 bp, Homo sapiens
cagccccaggtctgggaatgcaggggatgggattcccagatcctctgtggggcacctattcgctatgcctatccattgcccccttgcctgggcctcagtttacccccgacccccaccgctgc

SEQ ID NO: 455437 - DNA, 122 bp, Homo sapiens
tatgacagtgagggtacctcacagacccttctccaaagtctggcgggccttggggtttttcggggccaccaggctcggtggaatttttgaaacgctttcgaaatacatagtttcctctgtgg

SEQ ID NO: 455438 - DNA, 122 bp, Homo sapiens
gcgggctgctgcacggattggctgggtgcggaaagtgatgtgccgtgtcctgtcattggccgaaagagtctcgttttgatgccacccgggctcagattggcccagcgggtccagcgccgcat

SEQ ID NO: 455439 - DNA, 122 bp, Homo sapiens
tcaacaggtgaacaccagggtccagcagtcactggctggctgtgtggtgtcttccagcaacggcactctgtcagctcttgccctctcctgccaagggagatggcgggcaggtgtggatgtgg

SEQ ID NO: 455440 - DNA, 122 bp, Homo sapiens
tttcctggcaggtgtgttaatgacctagctttgcacattgcacacacaagaggttcattgcgtgtatctgtcttgacttgagaaagcagatgctgtttagacatatgtcaagtggaaaagaa

SEQ ID NO: 455441 - DNA, 122 bp, Homo sapiens
gcgcagggccggcgggtggtgttggttacgtcaggcggcaccaaggtcccactggaagcgcggccggtgcgcttcctggacaacttcagcagcgggcggcgcggtgcaacctcggccgaggc

SEQ ID NO: 455442 - DNA, 122 bp, Homo sapiens
cgcacggcaccccggaaagcgcggcgcgccaggcgtttccagcccacattgctcctacctcgccagagcgcaccttcctgcccgaaagccgtgcgcaccgcccacattgtttatctactgat

SEQ ID NO: 455443 - DNA, 122 bp, Homo sapiens
aaatcagtagggagaatgggcaaagtgcagacagagccctttgagctgagataaacaggacgaggaagggcttaaatcaggacggcaccagtaagggggggatctggacgccggacttacag

SEQ ID NO: 455444 - DNA, 122 bp, Homo sapiens
tggagatagttcagcctcctgcctgccacgtcaccaccaggagcaggcgctaagctgctgcgggcctagcgggctgcctgaggaatcccaaaccagttatttggagcttgcttgagaagccc

SEQ ID NO: 455445 - DNA, 122 bp, Homo sapiens
gatcgtggtgaggtctagacacaggcaagcttccaaaccctcagtcccaattccgttggccgggaaggagtgcatgccagggtagcccgccctcccggctcctgctgctctcaccccgcccc

SEQ ID NO: 455446 - DNA, 122 bp, Homo sapiens
caccaaaacagggagcgctgactgcagtgaggagccagggcacgtgggctccggagggagcgcgaggaattccattcacaccaaaacagggagcgctgactgcagtgaggagccagggcacg

SEQ ID NO: 455447 - DNA, 122 bp, Homo sapiens
ctgggatgcttacggggaatgggtcattaccaagatttctccatggcggatattttggagcgcgtggaattagaacgagtagggggagcgcaagcgctgtcagctccgcgggaaattccagt

SEQ ID NO: 455448 - DNA, 122 bp, Homo sapiens
atggactacaagtcccggcaggccccgcgccgcggcgcatgctaggcgggcgtcccttcgcgagcccggccgagcccgggggcccagttcaccattgtctggccaacaggggcggggcgggc

SEQ ID NO: 455449 - DNA, 122 bp, Homo sapiens
ggcttgggggacggggagaccgggggaactggggagggccgaggcgggagaagaaggaagcgctgctgccgaaccctctcacgagacgaagggtgagtctgggcagtgtctttctttttaat

SEQ ID NO: 455450 - DNA, 122 bp, Homo sapiens
ttccaagtctttgaaatagggtctcactcagctgcccaggctagaggtcagagatgtgatcgtggatcactgccacctccgccttctggcttcaagcgattcccctgtctcagcctccccag

SEQ ID NO: 455451 - DNA, 122 bp, Homo sapiens
ggttcagctcagctccagcgaatgttaggatgtgaggcttcgtgttacagtagaaaggagcgcactcataggcatacagaacactgtgcaggtctaagacttaggagaagacggagatttct

SEQ ID NO: 455452 - DNA, 122 bp, Homo sapiens
gtcagcgtgggcatctttggacttcaggatgtattctcaaccagtccagtagaaactaaacgctttgacggtgctggagcctttgccttcgcggggactgccgtttctgcgcactctaagat

SEQ ID NO: 455453 - DNA, 122 bp, Homo sapiens
acacgcgcgcgcgcgcgcgcacacacacacacacgtacactaaaaaactcggaccagccgcgccgcagctgctccaatccctggaaaaggcaatcgagcgccctccggaccgctgcgcacag

SEQ ID NO: 455454 - DNA, 122 bp, Homo sapiens
tacagcggcctgcttaggggagcagcgtgttcagagcaaatggagagcttcctgtatctccgaggaaaaaagaaaagccgccgccccggcagcctcggcctgctggggacctgtcctcccca

SEQ ID NO: 455455 - DNA, 122 bp, Homo sapiens
aggagccaggcagcactgcaggagtgcagtctgggtataatctgattccagctcagggggcgctggacctcagatactcaagccaaatatccctctcctccaccactccctctcctggcagt

SEQ ID NO: 455456 - DNA, 122 bp, Homo sapiens
tgtcaaaatatgacaagattctcttaaattccacagcaggtataacttcctctctaggaacgtttctcactctgcgggcaagtgctccagtagaaactcctagtactcccaccaaagtcacg

SEQ ID NO: 455457 - DNA, 122 bp, Homo sapiens
tatttgggatgactggagccgctggccctttaaggctcctgtaacaggacacctcctagacgggacaggacgactgactgtgtgtgtttccccctccctcctcccctttcccgcgccaggcc

SEQ ID NO: 455458 - DNA, 122 bp, Homo sapiens
gccgacaggaccctgggctcccgggtactgggtggcgccattttttcagcctgcacggctcgtctcgcgagagcttgtcggccgaggagacgggacgcgtgcgcaccacgcatgcgccaggt

SEQ ID NO: 455459 - DNA, 122 bp, Homo sapiens
gaaatgaacaggccagatagatgttccctaaacctctgatggcctcaggttccatgggggcgggggcaggggcagggggccgagtcagcatgggcccatccggggagctctgccaacactcc

SEQ ID NO: 455460 - DNA, 122 bp, Homo sapiens
ccctacacttgatatcactttccgtgctttgcccaataaaacatctcaaccagctcttttcggagagtcagggaattctcgctctcttgtgctgcctcccttatacccaggcataagctcca

SEQ ID NO: 455461 - DNA, 122 bp, Homo sapiens
gcctttcagggtccgtcgctgcgggccgggccttcccccgagaggcaggcggccttgggacggggggaccaaagcacctcgcgcacgtttaccggcagccaggcttttccttgtctgcccat

SEQ ID NO: 455462 - DNA, 122 bp, Homo sapiens
agtgcctctccctgaatgcaccaagcactttttccatctcggaccccaagcctttattcacgctgtaccctctccctgaatagtctaccccagacaaaagcctgtccactcccctagaccca

SEQ ID NO: 455463 - DNA, 122 bp, Homo sapiens
gaaaaagtgaatgggagaccagtagccatagcagtgatggttttgtttttgcctctctcacgtcatctagagctgtgggtggtgagaagaacaccgaaagctacataatagtacgtgatgag

SEQ ID NO: 455464 - DNA, 122 bp, Homo sapiens
atactcagcaggctgaccccaagacaactgtgtgttttattaatggaggtgtcctgttaccgtgattgtattgatggtggttcttgtttctgctttatcaaagtcttacctacacgtagttg

SEQ ID NO: 455465 - DNA, 122 bp, Homo sapiens
agagtctctttcacataacgggggccagagacacagtcacagaagtgcacattggccaggcgcagtggctcacgcctgtaattccagcactttgggaggccgaggcgggcagatcaccttag

SEQ ID NO: 455466 - DNA, 122 bp, Homo sapiens
ccatgtggagtgcccgcctgctcatgtgcccatgtggagtgcccgcctgctcacacatgtcgatgcggagtgcccgcctgctcacacatgcccatgtggagtgcccgcctgctcacacgtgc

SEQ ID NO: 455467 - DNA, 122 bp, Homo sapiens
agcaccacagagtgtttccaggtcggcacaaaagcgaacgggacagggcgccctgggcggcggcagcttggccggcccgctgcctagcgcgcccccgaggggcggtaatggaacgtaccttt

SEQ ID NO: 455468 - DNA, 122 bp, Homo sapiens
tcccattggcatttacagacttgaggttgcttggactctcaattcaatactccttttctgcgggttcgtgagaattaggtgtgaacgtgatgtccgcggatatcagtggctagtgggcaagc

SEQ ID NO: 455469 - DNA, 122 bp, Homo sapiens
gggtgacagacggcacctggaaaatagggtcactcccacctgaatactgcgcttttccaacgggcttaaaaaacggcgcaccacgagataatatcccgcacctgggttggagggtcctacgc

SEQ ID NO: 455470 - DNA, 122 bp, Homo sapiens
aagatggctaacttctcagaagagaaggctgaagagggccttgtatgtcaaatggggagacgggaggtgagtgttgccctagactttgagagccaaaggggctaactgtcatcagaaacagt

SEQ ID NO: 455471 - DNA, 122 bp, Homo sapiens
tcctgtaaattctaaaactctgaaggatactaaatcatacaggaagttacctaaatagtccgacattagtttggggtctaatttctgtttcttcaagtcagcaggatctgggtaaattgctt

SEQ ID NO: 455472 - DNA, 122 bp, Homo sapiens
cttgtcttccccagtcagatacctacagccgctgagagccggtattccaacgccatgagacgccttctgtcgtgagcagttgacaagaaagacccagcacttactgcaaccggaaggagcgg

SEQ ID NO: 455473 - DNA, 122 bp, Homo sapiens
ctgaccagcctcacaaaagcagacaaacacacaatctttttgcacctgtttcttccactccggttgccgtgaatagtgaggtgttctcacagattcagcttcacagacagcattttgcaaac

SEQ ID NO: 455474 - DNA, 122 bp, Homo sapiens
catgtccaccatcaatgcctcagtccagcggtcaggtccactgtccatgcctcagtccggcggtcaggtccaccgtcaatgccagcggtcatgtccaccatcaacgcctcagtccagcggtc

SEQ ID NO: 455475 - DNA, 122 bp, Homo sapiens
caagatggccgaataggaacagctcgagtctataggtcccagcgtgagcaacgcattagacgggtgatttctgcatttccatctgaggtaccgggttcatctcaccagggagtgccagatag

SEQ ID NO: 455476 - DNA, 122 bp, Homo sapiens
agcagtgccgggtgagggggtgggggagttatcttttgagtccctgtggttttaatgtggcgttgtcagctggtccctattaaaaacaacagaaagtgaaagacactgattaccataaaaag

SEQ ID NO: 455477 - DNA, 122 bp, Homo sapiens
gcagcccagccagaggaagcaccacagctgaaagccacaagggggttgggtttaccttatcgctcgaatctgctttctaaactggcacagggagcaccctgttcccacctaataggctctcc

SEQ ID NO: 455478 - DNA, 122 bp, Homo sapiens
cttcaagggagaagatgaagtaggaggagaagaggtcttagggatgaggggaacttggaacgaggacattagagatgctgggagcacaggattgcagcatattaacaatctggctcacttgc

SEQ ID NO: 455479 - DNA, 122 bp, Homo sapiens
atcagcagagacatacgtgatgatatagttctcaaaatgtcctgtctcagtttccactgccgttatcctagtccatatctcacatctggattaccacaacagactttaagttggtgtcctag

SEQ ID NO: 455480 - DNA, 122 bp, Homo sapiens
gtggtggccagatacggcctggacctcagtggcctgctggtgaggctggtgagtgttgcacggggcccgggcgtcgtcaccgcaggcactgtctgttccctttggcagcctctgtgttgttc

SEQ ID NO: 455481 - DNA, 122 bp, Homo sapiens
agttctactccttgtattctgggagcgtcttcttgcgctgccctggaaagttccttgccccgaggcggcccgggcacgtgggggccgggcgggggtcccggaaagtcgcggcgtcgccccgc

SEQ ID NO: 455482 - DNA, 122 bp, Homo sapiens
tgctgagtgcggagaccaggaggtgggtgcatcacagagggtcataaaggacatgagctgcgcagtacaggaggtggaaggagggggtcacacgaacagatgtcacccgaggcaagtcccca

SEQ ID NO: 455483 - DNA, 122 bp, Homo sapiens
cgggtggggctgcggggcgggggctccgggcccggggctgtgggcgccccaccgtctccacgcctatggctatctggcgctctggccgcgcaggtcctcgggctccctgcttcttttcaaac

SEQ ID NO: 455484 - DNA, 122 bp, Homo sapiens
ttccgagcacaaggcacacgaacggtgctattagcgtttctaaccccgcagagaactcctcgcaccccagtcctcaaaatcccgccccggacagcggaggcccgggcagtagcttccagacc

SEQ ID NO: 455485 - DNA, 122 bp, Homo sapiens
atgtcatataaataaaatcatataggatatggccttttacgtctgacttttttcacttagcgtatgtgtttgagattcatccgtgtttttgcatgtctcagtaatttattccatgtctcagt

SEQ ID NO: 455486 - DNA, 122 bp, Homo sapiens
gagagcaggagggagggggctgggaagaggaggaggaaggggaggggggtctgcgctaatcgactctggcgcccacataaggactggccacggactgaaggagaggacagggaagtaggggg

SEQ ID NO: 455487 - DNA, 122 bp, Homo sapiens
gagcagaggaccgaggagaacattgtatgcccagggttttgctcaggaaagctagcagcccgaaagcggcgcgttttcttcagcagcgggtcccgcacgcgagagtgctgccagcacgcttt

SEQ ID NO: 455488 - DNA, 122 bp, Homo sapiens
ttctgcagagttgagctgacaggaagtctgtaactttcctgcaaaacgttattctacccccgccaggtgagctgagatggcaaaggctgacgacaagggtcccgggagtccccacagctatg

SEQ ID NO: 455489 - DNA, 122 bp, Homo sapiens
cagttttgcgctttaacaaagcaagaagcgggcctcggcgtcccttcaaaatgcttttgacgcagccagggaagcgcttcgcgtggcaaagtgccatcgcaggcaacaggcatcgttccgac

SEQ ID NO: 455490 - DNA, 122 bp, Homo sapiens
aggctgaggtgagaggatcacttgattccaaaaggctgaggttgctgtgagccaagattgcgctaccacactctagcctgggtgactgagtgagaccctgtctcaaaaaaaaaaaaggaatt

SEQ ID NO: 455491 - DNA, 122 bp, Homo sapiens
agaggaataaatcaggccctgaaaccaggccccaggcatccagagatacagtcctcctcccgcatccggcccgcaccaggcaggtaaagacaggtaacataccttgctgtgtgttctgccgt

SEQ ID NO: 455492 - DNA, 122 bp, Homo sapiens
agagcctttgaggtaacacacaatcactgtcttctaaagtgaagaaaggcatcaggattgcggaaagacatacgtcatcatgagtaaagggtcagtgatgtgactccaagtcaacatcaaga

SEQ ID NO: 455493 - DNA, 122 bp, Homo sapiens
tccactgttcatttctctacaactgaaggaaaatactgtgtgttgagcacctgtgtagtgcgcgaattaaaggcctcatccttctggaacttaaattttaatgaagccatgtgggcaataaa

SEQ ID NO: 455494 - DNA, 122 bp, Homo sapiens
cggaggcagtgggagcgtgaggggtccaggctgcgggcccagtcggaggccgccgaggaacggatgcaggtgctggagagcgagggccgccagcacttggaggaggctgagagggagcgccg

SEQ ID NO: 455495 - DNA, 122 bp, Homo sapiens
attactgtgaggtgggatgaattgatctttcatggaatcctcctgcaatgctcgtgggttcgttccttccttccttcaacaagcgtttcttgcggcatctactacgggccaggtgctgtcct

SEQ ID NO: 455496 - DNA, 122 bp, Homo sapiens
cgtgggtcgaaccttcacctactctttgtctgtacaagctcttgttgtctgggtgagcggcggaggcgctgctgtggattggtcacagggagaaacctctgatctgttcctattggcccgtc

SEQ ID NO: 455497 - DNA, 122 bp, Homo sapiens
cgccttctacggcaccgcgggctcccggggccagagccgcgccgaggccggcgttaagaccgacaagtgcaatgcacccaaaggcagcaagtacgtggtgttttacctggacctgtcctttg

SEQ ID NO: 455498 - DNA, 122 bp, Homo sapiens
ttgaaacacacaagacctggcgcgatccagcccccagtatgggtaaaggctcagattctgcgctctgcaccagcctggcagatgctgcagactgtaaggtcctggaaaattctcccatcgca

SEQ ID NO: 455499 - DNA, 122 bp, Homo sapiens
ggggcttttttctgaattgctccagcctcatgctcaaaatgcatgcagttttatctttgtcgaggccgatgttggggtatctagtgcccccctacatttggggaagggctggctcctcattg

SEQ ID NO: 455500 - DNA, 122 bp, Homo sapiens
tcgaggcgcagagatatgaggttggagtatttgcccctcctctagaaaagcaggacttgccgctcagggtgaaggagaaggggttgggggtttcttgccccccagaaaggcggagaagacac

SEQ ID NO: 455501 - DNA, 122 bp, Homo sapiens
gaaaagtcaacccgccccaaattcccccgtgtggccctaactcgaggctctggctcctcgcgccggcaagctgaggaagagacggtcccctgcgatttagatacaaacgcgcgcgtgcaggg

SEQ ID NO: 455502 - DNA, 122 bp, Homo sapiens
tccctaaggtccaacgagctagcagtcagttgacagggtttctaacaaaaacgcggcatgcgtttaccaaacctagggtggttttatttcagaagtaggaactctttccacgagagcaccaa

SEQ ID NO: 455503 - DNA, 122 bp, Homo sapiens
tgtgtgtatcagtggggagagagagatacttattttaacaaattggccacatgattgtgacggctggcaagtctgagatccgtagagcaagttggccagctggaaattcaggtaagagctaa

SEQ ID NO: 455504 - DNA, 122 bp, Homo sapiens
cgcatgaagaaaaaagtgcttaatgtgggcccagacccaaggtgagcgtgggactgagggcgcccttcccggctactacccagctgctggcggcgccagggaggcctgcccgaggccagacg

SEQ ID NO: 455505 - DNA, 122 bp, Homo sapiens
gcccctttgccctgctggtgtgggagctgctagagatggatgagtcacgtcgcgtccagacgcttcctggttgtgttgcagtaacggtgattgtactcccgccatgtctcctctgcttccct

SEQ ID NO: 455506 - DNA, 122 bp, Homo sapiens
cctcgtcgttgcggatggccagctgcaggtggcgcgggatgatgcgcgtcttcttgttgtcgcgcgccgcgttgccggcaagctccaggatctcggcagtcaagtactcgagcaccgcggcc

SEQ ID NO: 455507 - DNA, 122 bp, Homo sapiens
gacagccctttcctgcgaatggacaatgggagaggctggcgcaaccgagaatagccagcgcggaggaagggctccggacggagctaggagggtggggctcggagggcgcaggaagagcggct

SEQ ID NO: 455508 - DNA, 122 bp, Homo sapiens
aggagcaggcagaccctgagtctccccatctaaaccgccagcggctgtggacacccgattcgcccagctcagctggcttgctggtgatgcactgctggcggctccctgagctcccttccctc

SEQ ID NO: 455509 - DNA, 122 bp, Homo sapiens
catctgctccacaccagcactttggccctggtgacagctttgagaggggctgtgccctcccgcaggggcccatgccatgctctcgcccagccccgcggcagtgggtcctgaggccgctcccc

SEQ ID NO: 455510 - DNA, 122 bp, Homo sapiens
cttctcctggcaaataagtttgtggtcaggttttcagtgttcccaaaccaccctgacatacgtccaccacttaaagttctacattataatttaccaccctgcttgtctatgtctccctacta

SEQ ID NO: 455511 - DNA, 122 bp, Homo sapiens
gccttaagcaggaaaggttagactgccgccgcctcgcccagagccccctcgcatcccgcccgctcctctgctattctcggctaggactggcgcttcccgctggctcggagcccgacactgtg

SEQ ID NO: 455512 - DNA, 122 bp, Homo sapiens
cagtatgaagttttctcaacataaatctgttataattaaaaattacaggcccttgggaagcgtggagtctgggacgcccagcgcgggcccggagcagggggaagggaagcgcagctcggtcc

SEQ ID NO: 455513 - DNA, 122 bp, Homo sapiens
agaagctgccccaggaggcgatgtagtggtggaaagaagaggcagagaggtcgtcgtcgtcgcccagcagcaagggctgcaaaatagtagaactcgtggttgctttggacaggtgtgatttg

SEQ ID NO: 455514 - DNA, 122 bp, Homo sapiens
cttcaggatacgtcatccagagacaagagccaagggatgtagaaacccagggaagcctcgcgtccccacaaagcccgccggccaaatcccgaaggggctctaccgggccagctagcccggag

SEQ ID NO: 455515 - DNA, 122 bp, Homo sapiens
ctatctggggcactctgacagtgactggccctaaacttctccccaagaacatctgtttaacgttcttggagcttagcagtgacctctccagagctgtgggccaaggagaaacacaccgttcc

SEQ ID NO: 455516 - DNA, 122 bp, Homo sapiens
gggctgaggcctggccctccaaggagccctggagggactgtgctgctagggcgcggggctcgatggggtgatctggagacctggggggatccggggctgccgcccctgcgctgccaacctcc

SEQ ID NO: 455517 - DNA, 122 bp, Homo sapiens
acgtgaggagaaaaacaataacaggaaccaacaatgatatgaacatggtgatgagtcatccgccaacccttgctgattgacgtcagaccagccacaaagggtgttttacaagttaaggacaa

SEQ ID NO: 455518 - DNA, 122 bp, Homo sapiens
tgttagtgacgcatacatgtaaaatagccttcaccttatttcctttctaattggttggctcgtcaaagaacaattttaaccaatcaaattgcgcctttcacaattctaccgatgactataac

SEQ ID NO: 455519 - DNA, 122 bp, Homo sapiens
agttgccgaagcaagtccggaagctaccgagcgagtccggaagttgccgaaagggagcagcggggaaggaggatggcggatatcatcgcaagactccgggaggacgggatccaaaaacgtgt

SEQ ID NO: 455520 - DNA, 122 bp, Homo sapiens
atggccacgctccaaacagagcggagctgtgcggttccagtcacagagggtcaggtccagcgtttgcactgaggccttaagaaggccgaggtaggaaaggcgaggccagagaggggagctgg

SEQ ID NO: 455521 - DNA, 122 bp, Homo sapiens
acagaagaccccaccccaccccagcccggtcagacccatttcctcagcagggtcctggcccgggcggcgacctttccaaactggcttcagggctgaacacatcccgccacccccactccctc

SEQ ID NO: 455522 - DNA, 122 bp, Homo sapiens
ggccgtggtgaaaccccgtctctactaatatacagaaacttagccgggcgtggtggcacgcgcctgtagtcccagctactcaggaggctgaggcaggggaatcgcttgaatccgggaggcag

SEQ ID NO: 455523 - DNA, 122 bp, Homo sapiens
tgtgctcacaaatcacacagaagtccccatactccagttcacatggccttcaaaaagattcgatctgaatctccttaactaccaaatgcatattttggttccttttctttctaattattctc

SEQ ID NO: 455524 - DNA, 122 bp, Homo sapiens
gagcccctcctcctggcagccaccccatctgggaagtgaggagcgtctccgccccgcagccgccccctccaggaggtgggggacagcccccgcccggccagccgccccctccgggagggagg

SEQ ID NO: 455525 - DNA, 122 bp, Homo sapiens
ccaactgtactactgtcaaggcttgggacagttaagcgtccgtgaaggtactggatacagcgacagcaggaagtgcagcagtgagaactgaaactaatttcacagactgtggtgttgcctgt

SEQ ID NO: 455526 - DNA, 122 bp, Homo sapiens
gttgaaggatacaaaattaatgctagataggaggaatacatttctaatggtctgtacccgcgatttcccaacctttttggcaccagagaacagttttgtggaagacagtttctctacaaatg

SEQ ID NO: 455527 - DNA, 122 bp, Homo sapiens
tgctcgcgccagccggcccttccctgctactggctcccggccagctgggcgggtcccgggcgaaacttgcccttgctctgggccaccccaggaaccggcccacgggtccccggcctctgccc

SEQ ID NO: 455528 - DNA, 122 bp, Homo sapiens
ctacttaacaatgcaagtagccatccctctgtccagctggctttgacgaggctctgccgccgcagcttcttgcccgtggctctgtgatggggaaaaaaggaaggaaaaatgcgttccatgca

SEQ ID NO: 455529 - DNA, 122 bp, Homo sapiens
tggtcttttatcttgtccaaggctctgggatagtcaccgaaatccttgggctgcttttgacgggggccaccagcctgtctcaaagatgccctgacaagcccctccagccctgggcagacaaa

SEQ ID NO: 455530 - DNA, 122 bp, Homo sapiens
gggctcaggacctgcagcctgccatgcccgagactccccccgctgccctgggctcctgcgcggccagagtctccccaaggagcgccgccccctgcttcacggagcctggtcccatcaaccgc

SEQ ID NO: 455531 - DNA, 122 bp, Homo sapiens
aagctcatgcctttcaagttgaagggaatttctatctactcagctgctcctgtggctttccgttttgatggcaaattcttttcaaatcttgatgaaacattttccaagagaggacatgccct

SEQ ID NO: 455532 - DNA, 122 bp, Homo sapiens
cagtctcttgggccatcatcgtggttgtgttggtcctgttgctcctccttcgagcgcccacgtagggctggggttccctgcgggctgtgggtgccgtgccctccccggctggctccagccct

SEQ ID NO: 455533 - DNA, 122 bp, Homo sapiens
gctgtctggacagtggaaggactttttgcagggagctgccgtcagaggactgagagccagcgttcagcacggcatcactgagggcgcctggcatgcctccgcctgcccgtgagaaggcacgc

SEQ ID NO: 455534 - DNA, 122 bp, Homo sapiens
ccagactgcgaggaggacacaggaaaccaaccctcactgtgtcctgctagggggttaacccgtctacaagcatcagggttgccatttcagagatcagcaaactgaacagcagtcgtgacttg

SEQ ID NO: 455535 - DNA, 122 bp, Homo sapiens
ggaatgatgacatagccaaccatgcacaatcagtcctaaccatctctggcatgcattgcacgtacaagtatttgctaacatcattagagcagaatctctctgtaagtgcaatacgtggcgtc

SEQ ID NO: 455536 - DNA, 122 bp, Homo sapiens
acgtcgcctgtgctgccaaatactcaacctcttctgttttccccctgaagccatgatgtgcgcactgtgcagagaagcgagggactggagctcagaaaggaggcgctttggacaaaacccct

SEQ ID NO: 455537 - DNA, 122 bp, Homo sapiens
cagccggacatggccgagatttcatagtcactggccgaggtgaggggcttgcccatcatccggatgttttttgcactggtaatcctggccatcatgcacacgggcttgtcaaagtacttgac

SEQ ID NO: 455538 - DNA, 122 bp, Homo sapiens
tcatccttggaggcatttgacttgtgcgatttcagagtctgacaggagcagaagaagcggcgctcaggcaagcttttgccactgactttctgcacaaaagatgtatgcaaataccccaaact

SEQ ID NO: 455539 - DNA, 122 bp, Homo sapiens
catatggacttgagccccctgcagtgctaagaaataatgtacaacgcttcatggtgcagacgcaaattttctctgaaaagggatgcaatgctgcgttttagctgtcggaggggatgatggag

SEQ ID NO: 455540 - DNA, 122 bp, Homo sapiens
taatctcttctttggacgtttggcagctccatttcacctccccttaactctgtttgggatcgcttacacaccaaggaagttgggctttgagaattccatcccactggcactgaggagaatat

SEQ ID NO: 455541 - DNA, 122 bp, Homo sapiens
gagagaaatatgtaccccaggaataggtcatgagtttggctatcaagataaaaatgcctccgcaattagggatttgggctcatacccagccttcctttgtgccatataaagcagcattttat

SEQ ID NO: 455542 - DNA, 122 bp, Homo sapiens
ccagagtccctgaaacaaatattcaaaggaacaccctatggttttagttatttgcttgctcggtttctcgtgtcatgtcataatttctcatgggaaagaaacacgtaaaaagaaagtgcatc

SEQ ID NO: 455543 - DNA, 122 bp, Homo sapiens
cgccagcattgagccccatagccaggaggagcacctaccgtacgcttgctctgtgggtggcgcggcgtacagcggcccctaagacaggatgcctgcccccacagcgtgagcacacagtaggg

SEQ ID NO: 455544 - DNA, 122 bp, Homo sapiens
gaaagagctttgacaccccatgagcgacggatggcccagaacctggcgctccgtgctgcgcggctcccccggctcccagagctgcgctctgcgtccggcctgagctgccctcccggctgcag

SEQ ID NO: 455545 - DNA, 122 bp, Homo sapiens
taacagcatttgctatacacaactcttttaagatatattaagacagcggacaactcatggcggtggcggcagcagctgcttgggcatggtgcagtggtgactgagctacgagcctggcggcg

SEQ ID NO: 455546 - DNA, 122 bp, Homo sapiens
caggcagatagcggagcccctgaaggaagtggcatgatcagtgttctaggaaagtaacaccggggtctgtgaaagatgattattgggatgagcagctgtaggtgacaaggccagttaggaag

SEQ ID NO: 455547 - DNA, 122 bp, Homo sapiens
gctccggcgctgtcttttcctcctgggccctctagggagggcagacagggaagcccctgtcgccgccgccggggccctgccactctgcgccacgccttggtcgcacccgggcccagcgggag

SEQ ID NO: 455548 - DNA, 122 bp, Homo sapiens
ctacagtaaactggacagagattcttttcctgaatttgaagaagtaagctgtcatgtcatcgaaggccaggtgaggaggattttaggacatagggtgacctctgtaaaatgagattgatatg

SEQ ID NO: 455549 - DNA, 122 bp, Homo sapiens
ttgcaaggtggcacgagagggcccttgggaccttttcatcactgtctgattctcatattacgcaaccaaatctgctgtcatcactcttggccgccgtcgctggtagcgggtaggagtgctgg

SEQ ID NO: 455550 - DNA, 122 bp, Homo sapiens
agtcatctgtggaatgagacatcaaagcactgtgaacatcttactccccggcaaacttcacgagctggtttcagcgtcattgctgaaggctcttggaaacattgcttacacccgtggttcca

SEQ ID NO: 455551 - DNA, 122 bp, Homo sapiens
caggtgctagcacacatcataaaagggccgacggcaacataaataaatgtctctcggtggcggagccgaaaaacctgaaatgcacttctgaagtgaaatggccacttctgcaaagagcggaa

SEQ ID NO: 455552 - DNA, 122 bp, Homo sapiens
caacgagagcaccgaggacacaaaggtccactttctacttctgggtttccaaaaataaggcggcctgagttttcagcgcctggtcttcccaccacaccctaccaaagaaaggaaatcacctg

SEQ ID NO: 455553 - DNA, 122 bp, Homo sapiens
cctgcgaggagaggtccgtacttgctcgctaagtgtcagcttggcagcttggccccgtcacgagggtgtgggtgtgtttctgattagtgacctcccctcggaattcatttggtgggcaggtg

SEQ ID NO: 455554 - DNA, 122 bp, Homo sapiens
gagggctccagcggggagcgggaaccaggacccgggctctctcctgagcctcacaggtgacgcctcctctcttcctcctgctccaggtgtggaagcggcggctccggccctctctgtgcagg

SEQ ID NO: 455555 - DNA, 122 bp, Homo sapiens
gaatgtgacatccaagggggccccggttgcgccgccctagcccagggacgccttcgccctcggctgccatctatcggccaccgagcgcccgcttcgccccgggcccatcatgtctgctgcag

SEQ ID NO: 455556 - DNA, 122 bp, Homo sapiens
tcatataactatagaacatctaattatgttataaatatcaatatatttggcttatggccacgctgttgtagcaggacagccattatgtatctaatatcaaatttgcctacctccattctgcc

SEQ ID NO: 455557 - DNA, 122 bp, Homo sapiens
cctgcctcagcctcccaaagtgctgggataacaggtgtgagccactgtgcccagtctcagcgtatttcttaactggggtctgggtactcaagagccagcactaaaggcccaggctgaatgac

SEQ ID NO: 455558 - DNA, 122 bp, Homo sapiens
tacaatctacagcatcttacaattgccatccgtaagagtgtagctgcatgtagctatcatcgcctgtccatgcacaaactcgctaacactggtagcatgactggaactcaacttccagtgga

SEQ ID NO: 455559 - DNA, 122 bp, Homo sapiens
cttaattgcacaaaaaagttgcagccaaagtgatggtgagagaaactgattgtgtagatacgcattaggccactcttggaatggggtgtcttagaatagctggtagtttggcctcacagatt

SEQ ID NO: 455560 - DNA, 122 bp, Homo sapiens
aacagcgggggctctccggcaattgtccccgaccctccgtcctggggagggcaggatcagcgcgcgggctgctttgcatctctttgcattttagtgatgtttggtccagtcctggcccgggc

SEQ ID NO: 455561 - DNA, 122 bp, Homo sapiens
gagttaggccaacctgttgtgggtgctggaatcctttgggcaccaagaagtgcttgcacacgctctactgatggggaacttaacacttcatgagtgagtctagtcttccctggacagtgctg

SEQ ID NO: 455562 - DNA, 122 bp, Homo sapiens
agtttggagattcaatcaaagttaaaggaagccagtaacttctgagtaatatatgagtcacggggaaaaggaataagcatatttatgagaaccatgtgaatgtaatattgtaaaatataatt

SEQ ID NO: 455563 - DNA, 122 bp, Homo sapiens
aaaacacaaggtttaccactttagccactttaaagagctcacttggtgtccccaagggcccgtggtgccaccactgccagtgcacaggcccggcccctcccccgccaggcctgtctctaagg

SEQ ID NO: 455564 - DNA, 122 bp, Homo sapiens
acacctttggaaaagaaccccgccctcttctggagaagccgcagcctttccgcccagagccgggtcccccgccacacagcacccctggagtgcgtcccaccccgaacgccccggcgcgctga

SEQ ID NO: 455565 - DNA, 122 bp, Homo sapiens
ccctccattgggaccggagaaaccaggggagccccccgggcagccgcgcgccccttcccacggggccctttactgcgccgcgcgcccggcccccacccctcgcagcaccccgcgccccgcgc

SEQ ID NO: 455566 - DNA, 122 bp, Homo sapiens
ggccgcgtagacctctcctgagtggggaggccgcgtagacctctcctgagtgagggtggccgcgtagaactctcctgagtgggggaggccgcgtagacctctcctgagtgggggaggccgcg

SEQ ID NO: 455567 - DNA, 122 bp, Homo sapiens
cctcggccatttccccacactgccgctttcgcttcccccacgacgcggggcctgggacgacggtctgggccaagaggaacttccccgcaagaagtgtcgagttaaggacgctactaaggggg

SEQ ID NO: 455568 - DNA, 122 bp, Homo sapiens
tcagaagggaatctcctctcctcccggcctcttcgcctgggcgggggccgcaggctgccgcggaagcctcttcccgatgctcttcgctcaggagagcccggcccaggagagggactacaagt

SEQ ID NO: 455569 - DNA, 122 bp, Homo sapiens
ataatgctggtctgggaatcacactttaagaacaactggccagcctggtacggtggctcacgcttgtaatcccagcactttgggaggccgaggtgggcagatcacctgaggccaggagtttg

SEQ ID NO: 455570 - DNA, 122 bp, Homo sapiens
gtgggccgagcagcccggcaagttaatcagggcttcacacccagactccggggccgccggcgagatgtacaggcccttcccaaagcccagctggccacccataacctgggaagccggcggca

SEQ ID NO: 455571 - DNA, 122 bp, Homo sapiens
tccctccctaggctggtcccgctccgcacccggaacgtgtccgccacgatctcagctcctcggtgattggtccatttggagaggcctacgaaaaactcccggcctgagtccgggaggccgcg

SEQ ID NO: 455572 - DNA, 122 bp, Homo sapiens
ggaatccttgtcttccaagagaagcccctccagtgatttccttcattccaaagagcccttcggctttttcccacttgcccactgttgacaaaggctttgtaacggggttgaaacttgactta

SEQ ID NO: 455573 - DNA, 122 bp, Homo sapiens
ttaaaatgaacataacacacagatctgatgaagttgtccggttaacacagtgccacatatcgatcattcagtaaatgttggctattttaattgtaccatttgcctcttcagtactataatca

SEQ ID NO: 455574 - DNA, 122 bp, Homo sapiens
cacctcagggcctgctgctggctctggtgcacatggagcgtgctctgctccagcctccgccgctgccaggtggctgcccagaccagggccccccatgccactcggtgctggaggccagcaag

SEQ ID NO: 455575 - DNA, 122 bp, Homo sapiens
ctgtggcatggatcctatgtacagaactgaagatgtgggcttttaaggctggaacctgaacgtcttcctttttggacagagtccattccaccagtctctgaaaggggtgactcatggccctt

SEQ ID NO: 455576 - DNA, 122 bp, Homo sapiens
catgctgctgaatttctatcccctgccccctcagcagggaccccttctgacacacaaccacgcacagaggccttagacatggtccctgccttcatggagtttacagggaagagaaataagga

SEQ ID NO: 455577 - DNA, 122 bp, Homo sapiens
ggggcaccttcctcgccacgacacgcaggtaaccgggccccgggagccggtcggcggcggcggactgggaccttgatcctgcctgcccggccgcccgacaagggaatgagagcggaccccga

SEQ ID NO: 455578 - DNA, 122 bp, Homo sapiens
ggcctcggttacaaggcaggtgcctgccagctgcgttcacggagccaggatggctgagctcgaatgcctgttggatcgcgcaacttttcagaacacagctgggtcccaggtactgaagctaa

SEQ ID NO: 455579 - DNA, 122 bp, Homo sapiens
cgggccagcggctgcggagggtatgctgggtcccccagcagtgccagcccaccggcgctgcggtagatttctcgcagggccttagctgcctccctgccgggcagggctcgggacctgcagcc

SEQ ID NO: 455580 - DNA, 122 bp, Homo sapiens
gctttttgcccccaccccgcctcggctttttgcccccccgcctacgcggctttttgctgccgtggctttttgcccgccgtggctttttgcccccgccacctttgcaaccttaatttcacttg

SEQ ID NO: 455581 - DNA, 122 bp, Homo sapiens
agtttatttcatcgtcattttacatgacatgggagccttcagaatgaagacccagaggtccggcgaaaaccgtctgtttttatgcttcgcttccgtgaagaacagggcgccgtggggagctg

SEQ ID NO: 455582 - DNA, 122 bp, Homo sapiens
cctgcaggcgctccgtggccggctgccacatcttccagccctgggttttggcagaggagacgctggcgagactgtcgatcgcgccggggggcgaggggctggggtcccgctttacatctggg

SEQ ID NO: 455583 - DNA, 122 bp, Homo sapiens
gtttccagatgctcgaaggcctgtcataccagaggttaggttaaactgtatggagactttcgaggtgaaagttgactcgccggtaaagcctgctcctaaagaggatttagatctgatagatc

SEQ ID NO: 455584 - DNA, 122 bp, Homo sapiens
agggagccctgttcagagagacacacccggaaggagggaccctgttcagagaggctcacccggaaggaggcagccctgttcagagagacacacctggaaggagtgagccccgttcagagaga

SEQ ID NO: 455585 - DNA, 122 bp, Homo sapiens
cgacccagccccctgagcagggcttggatcccacccgcagctccctgccccgctccagcccggagaacctggtggaccagatcctggagtccgtggactcggattctgaagggattttcatt

SEQ ID NO: 455586 - DNA, 122 bp, Homo sapiens
aaacacttgtataagcattgcaatcaatgggcctctttaattatgtgccagtggcaagagcgggtgctgaacccaggggcctgcctcaatccggggcctttgaggcagaataaagtggtctc

SEQ ID NO: 455587 - DNA, 122 bp, Homo sapiens
ttccgtattgaaggcttcacactttctctatccctacccagtgagaaaggccctcctctgcgctgtttccccttgccatggcacctatcaacctgcatgacaaacactgattctcttgcctg

SEQ ID NO: 455588 - DNA, 122 bp, Homo sapiens
gtgagatgtttaaagtactcctaagtaatttataaactgcaaaacgcttcccagcacaagcgtccgctacagagcgcgacgacaccgagccggtttagaagtccagttactggaatccactc

SEQ ID NO: 455589 - DNA, 122 bp, Homo sapiens
tagggacatggtaggggcagagcctccagccccacttccccaggttttgctgacagtggccggcttttagatgatggtgatcttcacctcattgttctcatcagtctggtacaaaaaaggaa

SEQ ID NO: 455590 - DNA, 122 bp, Homo sapiens
agacctgcgtgccgggaagccagcctgtgccctgtgtcccctggtgggtggcaccagcaccggggggccggccacggcccggtgcctggactgtgccgatgacttgtgccaggcctgtgccg

SEQ ID NO: 455591 - DNA, 122 bp, Homo sapiens
ggacaaaatctctgcttctcctggactgaattgggagccacgaggagaaccagtcctgagcgctgtcttggtggagacgtgttcccatcggttacttcttttccattttggtggaccttgga

SEQ ID NO: 455592 - DNA, 122 bp, Homo sapiens
aaaggacagtgtctccagtgcacaggcaggtgtaggggcccttgtgcctgaggattaatgcggggggtggggccacttagaaatgggaaggctcccagggaaaccaggtgtaggtgggggct

SEQ ID NO: 455593 - DNA, 122 bp, Homo sapiens
gcggggtgcgggacggcccagggcacggcggctgcagcgggagcacactgagcgcccgcccgccatgtccaggaagaagacccccaagagcaaaggggccagcacccccgctgcctccacgc

SEQ ID NO: 455594 - DNA, 122 bp, Homo sapiens
gggctgacatatcaaggacagtaaaaacagtagtaccagacatttctgccacaattttttcggtggtgggggggaacagaaatctattaaatatctcagtttatatttttggttctccctgt

SEQ ID NO: 455595 - DNA, 122 bp, Homo sapiens
aagtccagtgggggtgacaaggacggcctaagcagctgtgccctcagcgcctgctacttacgtacgtgatccccgtgagcctcttggccaggtggtagaagacaccgtggatgtaaaaccag

SEQ ID NO: 455596 - DNA, 122 bp, Homo sapiens
cagggctgggtttgcagggctcaggaggcgaggagtagataggcaggaatggagatgggacgggagagatgagtgagtctgaggcatcttgacattgaactgcagtcacagaaattccaatt

SEQ ID NO: 455597 - DNA, 122 bp, Homo sapiens
cgaaggcccgccaggctcaacctcggttcacaggacccccgacttgtgtgagtcgtacaccgctctttaccgtctctggacctaggtcatctcggcagtaaaatggggtgaaatgacccgac

SEQ ID NO: 455598 - DNA, 122 bp, Homo sapiens
ccacagtacaataaaacctgttattcgttaactcatcaagtatgtattacatgattcttgcgataagagaggtgaaactgcccccagtgttggaatctttttttttttttttttgaaatgga

SEQ ID NO: 455599 - DNA, 122 bp, Homo sapiens
cgaggagctcccacagatggcagtgcccaggaccttgcctagagattctcattcagggtccgggtgagacttgggcgtctacgcttctcatgcccatcccttgtccatagctggtgctagaa

SEQ ID NO: 455600 - DNA, 122 bp, Homo sapiens
tagggcctctggaggcctcaccttcagttctgtgaacccctggctggccgcttccagccacgctagccaccctccagcgtccaaatgaggcagccacagctcccctgccaaggtcttggtct

SEQ ID NO: 455601 - DNA, 122 bp, Homo sapiens
cgagaccatcctggacgcctttgacccttacctgattgccatgtcttccatttacttggccggcaaagtggaagagcagcccctgtgggctcatgacatcatcagtgtgtccaacaggtact

SEQ ID NO: 455602 - DNA, 122 bp, Homo sapiens
agcgccccgagggagtccagccggaggcggagaaggccactcggccagaaggtggggagccgccggcgtcccctcgcacctccgtctccacagcagggggaaaggccctgatcgccgtggtc

SEQ ID NO: 455603 - DNA, 122 bp, Homo sapiens
gctcattaattgccttcccttactccctgaccttgccttttcgcacttcactcgctgccacgtggcctcggagcccagtccgcacccgcagcccccagctgagccaggctgcagactacaac

SEQ ID NO: 455604 - DNA, 122 bp, Homo sapiens
tgtactggtaacaagtctaatttgtggccagtgactcttggcagtagttaccaatgttcacgttataccctctgggggcccacagagttgctacagaatgtatgatgtcatattacaagtat

SEQ ID NO: 455605 - DNA, 122 bp, Homo sapiens
gcggccctccctgcagtggaactgggtcaggcccctttccacaaacttcctggtcctccccggccccacgacagagtcccctccctctgatatcgagactccagactcagaagtctgtccct

SEQ ID NO: 455606 - DNA, 122 bp, Homo sapiens
ctgcggagacttgactcccccacgaggcaggagggtgaaaggaaaggagacccccatatccgaccccacaaggagccaccatctccccagagctgaaaagggtatggggcaggtggttgtgg

SEQ ID NO: 455607 - DNA, 122 bp, Homo sapiens
gaaacccgggtggagctcccagttccaacagatgtgtccgggctgcctgcccggtgcagccgcagagactcctctgcaggtcagccacagccacagccacagccacctgcaggctggcaggc

SEQ ID NO: 455608 - DNA, 122 bp, Homo sapiens
gaaggagattgccctgtggggcctgtgctggtgccaggaaggggcccatggaggaggtgccgctccctcaggccactcagcccttcctccagctccaggccagcagaggggagctccaggct

SEQ ID NO: 455609 - DNA, 122 bp, Homo sapiens
gagtcactgctgcattggggaccacggaggtcactaggggctggggcaactgcatgctcccgaccacatcacactgcctctcaagaaaagcatctgaggccacaggacagcacataaacaca

SEQ ID NO: 455610 - DNA, 122 bp, Homo sapiens
agattttccaacctgcaatcagccttttcttttgcattgggaaataaaatgatgaatccacgtgggtgcaagtaggaggcacagacacaggggcagcccttgggaggcagcaagtaacattg

SEQ ID NO: 455611 - DNA, 122 bp, Homo sapiens
cgtgcactgagaaattcagctaaggattcctcaaaaatacaggttgcttctgcccggtttcgaaccggggacctttcgcgtgtgaggcgaacgtgataaccactacactacagaagccctga

SEQ ID NO: 455612 - DNA, 122 bp, Homo sapiens
tcccgtcagtggcctgtctctcttggaggcagctgtcaatcacgggccagcccgcgctcccgggggagttcattgtgcccgcagacagttgtggaataactgctcctaggcgtcagagcagc

SEQ ID NO: 455613 - DNA, 122 bp, Homo sapiens
ctgccctgggaagcggcaagttgagagccggagaatcacatcccacaagggggcggttaccgttgaggcttcttagtccttccctcccacttcctgatctccgcggaagcccctgcctagcg

SEQ ID NO: 455614 - DNA, 122 bp, Homo sapiens
gtgagaaccatcaggagagagtctggcattgcatgaccaggctggagaaggggaagcccgcgggaccaggccacagaggggcatcttgtggcctaccagatggcggagacttccctcaggga

SEQ ID NO: 455615 - DNA, 122 bp, Homo sapiens
cggggcctccgccgctctgagcttgcccttgtgtctggtgcttcgtagagctgccgccgtcgccgctgccgctgccgccacagccgccgctgcagccggagcatccgggagccgccactgcc

SEQ ID NO: 455616 - DNA, 122 bp, Homo sapiens
gaaaacaggcagcaaatgagatgagactgcggcggggaatctttggcttccatgtggaggcgcgagtcccgttcccgcacacggtaattgctaaattacccgccatctgctccgctctcaga

SEQ ID NO: 455617 - DNA, 122 bp, Homo sapiens
agcagtgttacggctcttaaaggcagcgcatctggagttgttagttccttccggtgggttcgtggtcttgctggtttcaggagtgaagctgcggacctttgcggttagtgttacagctctta

SEQ ID NO: 455618 - DNA, 122 bp, Homo sapiens
tggggagggaggtgtacaggtggctgccgtgcaggctcatggtgggggccacagcgcgctcgatggggctgcggctccgctcccgggggtctctgcggcagtctccattggcagtcttgttc

SEQ ID NO: 455619 - DNA, 122 bp, Homo sapiens
cctgggtgtgtgtcctcaatgaaaagaccctgacagccccagaagctgccctggtcagggcgaaccttgggcaaaacttgtatggcggccgggcgcggtggctcacgcctgtaatcccagca

SEQ ID NO: 455620 - DNA, 122 bp, Homo sapiens
cctatgaggggagctgcacggcgtctgtccttttccatccctaggaatgtgactacccaacgtacttcctatgaggggagccgcacggcgtctgtccttttccatccctaggaacgtgacta

SEQ ID NO: 455621 - DNA, 122 bp, Homo sapiens
caagcctgcgctaccagtgcgcccgccggccaggagaacggagcttgtgatagatcctttcgtaacaccaagtattgtaccaggacctgcggctccgccccagaggccgccatcttcctgac

SEQ ID NO: 455622 - DNA, 122 bp, Homo sapiens
ggagtggccgcgccgcccgccagtgcgccgggctccgagaccggcaggggagcacgcgggcgaaggaggggccgccgtcgctgacaccaccgccttcagcccttggcttccgcgcgtcggag

SEQ ID NO: 455623 - DNA, 122 bp, Homo sapiens
ctggagcgtggtaaggaaggcaagtagcggcagaggacggcggtagggcggatcgtggggcgcaatggatgtgccacgttggaaagagcttggactttatgccgtcctcctggaaatgagat

SEQ ID NO: 455624 - DNA, 122 bp, Homo sapiens
caggcagggccgtgagccgggcgagggagagtcctgggctgcccctgagccccggggccacgggaagaacttgcagcgacgtcatccctgccccggacacagtcccgggcccagggaggacc

SEQ ID NO: 455625 - DNA, 122 bp, Homo sapiens
aaagtgctggaatgacaggtgtgagccgccccggtcttcaagtatttaaaatgtgcagttcgctaggtttggacacatatacccccgggagccaccacaaacgtctccaacactcccaaacg

SEQ ID NO: 455626 - DNA, 122 bp, Homo sapiens
agagcccagggcaaggcaaacttagcgctagctaagttttgggatgcagggagtcctgctcggggagaaaaatttgggaaaatgaagaggcaaaggggccagtcaagaactctccacagctt

SEQ ID NO: 455627 - DNA, 122 bp, Homo sapiens
tctgctgagcagcgtcgcagaggcctccctgggctccgcgccccgcagccctgccccccgcgaaggccccccgcctgtcctggcgtcccccgccggccacctgccgggtaggtgagagggcg

SEQ ID NO: 455628 - DNA, 122 bp, Homo sapiens
ggcagaggacctggatgagtttgtggagtcctgaagtaggacatggcttccccaaagccccggtttgtgagggaatagtgatctgccgcctgtcctcccttcttcacccttctagaatgtca

SEQ ID NO: 455629 - DNA, 122 bp, Homo sapiens
cctggcgagcataaccacctctgattttccaccttcatggtccttagtcacttgtcatttcgttttcaggtcagtcactggcaataatgactcttactggtctcttaccagcaacattagct

SEQ ID NO: 455630 - DNA, 122 bp, Homo sapiens
ctcggccttctgccagtaggggaggagtcgggggcggagcgggaggagtggcgcgggccccgcgtgggtcctgccagagatcacctcggccccttgaagaggcagccaagctgcggcggcgc

SEQ ID NO: 455631 - DNA, 122 bp, Homo sapiens
tagaaacggagtgcagtccacatacagggcgggttgtgtggaagctgcgatttggccccacgagcagcgaggagtccaccgagacatttttagaacaaagaaggtcaaatgtgtgttttaga

SEQ ID NO: 455632 - DNA, 122 bp, Homo sapiens
attttaagccttccagtattttattcctattatcactcattcacttaagaagtagctacccgtccatactggtaattttgctattgtttgtgtgtgtgtgtgtgtgtgtgtgtgtgtgtgtg

SEQ ID NO: 455633 - DNA, 122 bp, Homo sapiens
ctcctggcgccctggccttcattggccatgtggtggagcttcactgcgaagacaggagagcgtctgcacccattctgttttggtgttaccatgaaaatgtgactctggggaaagcctcagca

SEQ ID NO: 455634 - DNA, 122 bp, Homo sapiens
tccaactggggcaaggggccaggccttcagaccaccgcatagattagccattggctggagcgttcccaggcggaggcatacactcgggaagggcaaaaggcgtcccaagacagcctggctgt

SEQ ID NO: 455635 - DNA, 122 bp, Homo sapiens
acctcgtgatccgcccgcctcggcctctcaaagtgctgggattacaggcgtgagccaccgcgccctgcctggatctggcattctttctaatggttgcattatgttccgaactatggctgtcc

SEQ ID NO: 455636 - DNA, 122 bp, Homo sapiens
ggccgcatctacgagctcacggtgctcaaagacccctacacggggatgcacaaaggtgggcgcccggccccctcccccctctccccctccctccgcctcccaccccaccttccggcatcttc

SEQ ID NO: 455637 - DNA, 122 bp, Homo sapiens
accgtgaagacgcagaacaaggcactgggagtggcagtgggtggcagagtcgatggcagccgggatgagctgttccgcaggagtccctggcccaagggcaacttctccagccgggcccgcga

SEQ ID NO: 455638 - DNA, 122 bp, Homo sapiens
cattcgccgaaagacccatgctatgctgacggggttccaacctgggcttcaccgactccacgtcagagggtctgtgattccctgagagggtacccttaggctgagagcaagggcccacctgc

SEQ ID NO: 455639 - DNA, 122 bp, Homo sapiens
tggagtccgagtggacagaaagacaagaccctgaccgtggggaatttaaaggccggccagcgtgcttccgaaggccgggggtggaggcattaccgcctctccgtgccctcttctcttaacct

SEQ ID NO: 455640 - DNA, 122 bp, Homo sapiens
actgtgtggtcacatcctatgagtgaccctaatgtcatgaccatttataataaagaacttcggctgggcgcggtggctcacgcctgtaatcccaccactttgggaggccaaggagggcagat

SEQ ID NO: 455641 - DNA, 122 bp, Homo sapiens
cagctgcacacgtacctggtcctggagctgctgcggggcggggagctgctggagcacatccgcaagaagcggcacttcagcgagtcggaagcaagccagatcctgcgcagcctcgtgtcggc

SEQ ID NO: 455642 - DNA, 122 bp, Homo sapiens
ccgctaggtggccactggaggaagatgaagcagaaggggccccactcaaggacttggccgcggggcagagacgttgtgtcccagcttggccttcacgtgactgcctctgtccttactgcagt

SEQ ID NO: 455643 - DNA, 122 bp, Homo sapiens
gcttaccgcgcagggcgcagccatggcggggctggcggcgccgaaggcagctgcggtggccgttgcggcccgttcagtttccgcgcccccaacggccaccaatagcaacgcgggccgcgtcg

SEQ ID NO: 455644 - DNA, 122 bp, Homo sapiens
ggtggggtagagtctaagttgtttccggtctgagccttcaagttgctgggctgtccttggcgtggcgagtcccaggagaaccagtgagacaagactggtggttctcaaagactcatatgtcc

SEQ ID NO: 455645 - DNA, 122 bp, Homo sapiens
taagattgataaaagtaacattgtttattacaagactgagaaattgcttttagctctgggcgagatgccctgagattccaatgccaatgctagatgagtgatactggtatgcctgccttagc

SEQ ID NO: 455646 - DNA, 122 bp, Homo sapiens
gaggacccgctctagaggcggaggtatccgtgctgtccagtatccgtggctataattggtcggacacgctggggaaatactcttacaggcctctagggggcagaatgatcagtataacttat

SEQ ID NO: 455647 - DNA, 122 bp, Homo sapiens
ttaagcaggggaattgtgtaatcatacatacactttagagagatcactcagacagcagcacggaagggaagctggagaaagtgaaagcagaagtggtaagacagtgaggggacatgagaggg

SEQ ID NO: 455648 - DNA, 122 bp, Homo sapiens
gccgtcatagtcattagattaaaaaaaaaaaaaaattcctgctttcctgcctcgcctgtgcgtttccttagtcgccctttcggggcttgttctaatgagtgctacagaaaaatgacgaagtg

SEQ ID NO: 455649 - DNA, 122 bp, Homo sapiens
agggcagcgtggggtggaagagggcgctcgacgcgcgtccgggactgggcggcgccacctcgttcccaccctccgtggggctcccggggaggcttgacttagcgaacaccctgcagtccgca

SEQ ID NO: 455650 - DNA, 122 bp, Homo sapiens
aatgtggtgactggggtagactgtgaagcagccctccttatgcccactgccttttagaatcgtttgttttattcatggtagttttatgaagacatactattattgaatgaaatttaatgtgt

SEQ ID NO: 455651 - DNA, 122 bp, Homo sapiens
ccctacgcaacacggcaggagcagccgcaaactaggccggaaaactgtcgtaaaaggggacgcggaggagaaggaaagtcgctcaagcagtggacagagcggagaaagcgacttcgggttgg

SEQ ID NO: 455652 - DNA, 122 bp, Homo sapiens
gcgcagacgcagggcacccggaggaaagtctgttactactacgacggtgagcaccgtcctcgcggcgggggcggggccaggccgggccggaccgggaacctggaggctgaggctggagcgcc

SEQ ID NO: 455653 - DNA, 122 bp, Homo sapiens
tctgtgggtctctgtcttcacagtccccagactgcacaagggcagcatgagcctttcctccgactgtgtgtagggtgaccctgggcctctgggcctggctgtccacctgtgccacggcccac

SEQ ID NO: 455654 - DNA, 122 bp, Homo sapiens
ggctggtgcggccgccctactcctactcggcgctcatcgccatggccatccagagcgcgccgctgcggaagctgacgctcagccagatctaccagtacgtggctggtaacttccctttctac

SEQ ID NO: 455655 - DNA, 122 bp, Homo sapiens
agctttcagaaagactgcaatgcagcggttaccaaagtccttgttaatatggaaacaactcgtggtgaagccttttgctccccttcacaactgctgactgttgcctgcagtcggaaggagga

SEQ ID NO: 455656 - DNA, 122 bp, Homo sapiens
cgacaatcggctagccactcctgatagcgttcggcgctcgcctctcggcccttgctcctgcgtactacggcttcttccagtcacctcggcccggatcgggaagtgtcaagcgggcgctcccc

SEQ ID NO: 455657 - DNA, 122 bp, Homo sapiens
agagatggggagcgaagccgcccgaccccggggcagagacgccacagcagcccgcagaagcggaaccactaccagccccgccgcggacacaccccgctctcccacccagcgccttccccgcc

SEQ ID NO: 455658 - DNA, 122 bp, Homo sapiens
tgggtaggagcccagactgcttagtcacgaaaagcgacctaagacacgtccctccctgggcgcaatttacgtccgtaaaatggggtaataacctctgctccgccttccctgtagtggttcct

SEQ ID NO: 455659 - DNA, 122 bp, Homo sapiens
gggaggggcggggcctcactgggcgatcgtagtggacgagaacctagactggaaccggtccgaagaaaaaaaggcagccctcattgggctgtcgcctggaacaggagaccaggccgggagaa

SEQ ID NO: 455660 - DNA, 122 bp, Homo sapiens
cgcgtacaagatggcggcgcgtcacgtgggcagcgcggtgacgcaggacggcggcccgcgcggaggcagcgccatagcctaccccaaacgcacactagtgctcagttttgcccccctcccct

SEQ ID NO: 455661 - DNA, 122 bp, Homo sapiens
gagaccaaagaatactcaggacaaaacagctatagaagggggagcacatttaaagagacccggaatgcacaggacttcactgaaaagcgtgagagtctgcagtggattgattgcattaatgg

SEQ ID NO: 455662 - DNA, 122 bp, Homo sapiens
ctgcgccgcgccaacctcacgcactgagccgccatgactgccactgcccgtcgcagtcgccgcgcacgcaccaagcgtgcgtgcaggcagctatacccacttttctgccctactacttcgcc

SEQ ID NO: 455663 - DNA, 122 bp, Homo sapiens
gccggagacactctcttgctctgccttgagtcaggccgcctggtgttgatgagtcaccaccgcctgccctggccccctgcctaccaggaggccactaccgccggacatttttattttccttt

SEQ ID NO: 455664 - DNA, 122 bp, Homo sapiens
gagtcataggtaaaatattcttcaccaggcgaggattgagtcgcagtcgcgtcaggaactcgcctccaggtactgagcgagcgagccccgacggccgcggtgggtggaggggggaaagtggg

SEQ ID NO: 455665 - DNA, 122 bp, Homo sapiens
ttgcgctgcgcctgcagcaacaggtagccccgagggatgggcggaggccccggccgaacccggagctggcctttgtcctgccaattagagggctctccagagggacagcgtgggtgggggta

SEQ ID NO: 455666 - DNA, 122 bp, Homo sapiens
tccccaacctgggccgagcaacaagtggagccagaattaattccatgggcgagaggagcacggaggcgagtggagcgcgctgccgccagaggctgccaaggaggcggggtggccagcgcggg

SEQ ID NO: 455667 - DNA, 122 bp, Homo sapiens
ccgggcggaagtgtccttgcagcgagcaggagctggcgctgggagggcagacacgtggtccgggcggaagtgtccgtgcagcgagcgggagctcgcgctgggagcggagacaggtgatctgg

SEQ ID NO: 455668 - DNA, 122 bp, Homo sapiens
gccctgccccgcaccgcacccggtggcctccccggagggccgtgacccaagcaccgcacccggcggcttccccaggtgctgctccgcccagtgcccccccagatctcaacgtggtgccacaa

SEQ ID NO: 455669 - DNA, 122 bp, Homo sapiens
agggaagggccagggacgcatgtgagtccagggttggggtggctcccacctgggctgtaccggaccactgagagctgctcattgccatcaatgacatcagacacgatctctctggtctctgt

SEQ ID NO: 455670 - DNA, 122 bp, Homo sapiens
tactttcagtgcccccaatgtgaactttccccacctcgattcgctcccccactcctggtccgccccagggctctttggcccaagggtcagcaaccagagctgttcggttcccttccctgccc

SEQ ID NO: 455671 - DNA, 122 bp, Homo sapiens
caggactcagaaaggcctctcttgtgtgattttgctgctcacacgtggcctgctgggagccgcccctggtactgccgggacacggccctgggattttgctgaggccagctttggaacagggg

SEQ ID NO: 455672 - DNA, 122 bp, Homo sapiens
taagaaacaaacctgggcgcttgcctccctacttaaaattctacagagtccctatatgatcgtggtacctgcctagaaccgtgttgccaagaccattcccccaaatagtcctctagctcttt

SEQ ID NO: 455673 - DNA, 122 bp, Homo sapiens
ggggtagtctgtgtttgtgtctcgtgggcatcagacacagatgctgtctgtgctggagcccgccaagaaaagggtggcaccaaccacagggctgccagcgcttcctgagctgacatggaggc

SEQ ID NO: 455674 - DNA, 122 bp, Homo sapiens
agagtggggaaggtcctctgtacatcctggaacctttataaagataagagaggctgcctacggaaatcacaccaaagatttcaactgcagtgggaatctcattgctccaacccagcctaata

SEQ ID NO: 455675 - DNA, 122 bp, Homo sapiens
tcaccctacgattggctggccgccccgagctctgtgctgtgattggtcacagcccgtgtccgtcgcgggcgccggggcggatacgaggtgacgcgcagaggcccagctcggggcggtgtccc

SEQ ID NO: 455676 - DNA, 122 bp, Homo sapiens
gctaggagggacagcctgcctgcagtgcgggggcctccgccagctggtgtcatgaacaggcgtccacctgcgcgagacctgagcaccagggctgccactggccttgcagacagagctcagtc

SEQ ID NO: 455677 - DNA, 122 bp, Homo sapiens
caggcgcggagaggggcacagcggcggcgcaggcgcggagaggcgcacagcgcggcacagcgaggcgccggcccagactccactccccagctgtgaaagggtaagaactgagggtggctgag

SEQ ID NO: 455678 - DNA, 122 bp, Homo sapiens
tgctggtgtgtgcagtaaagggttaaaaagctttggaaagacaccacgcatgtgttaattcgtgctgcagcagcgtgcatcacttccactttgacctcatagttaatctgcgtgatagttaa

SEQ ID NO: 455679 - DNA, 122 bp, Homo sapiens
aggaaccgcttctgtttcacttttgtttggcaaggcaagaaagttaaaaccaacagcgtccgtggcctacagtcagaccccaccttctgcagcacatgagggcacctgcagaggggaactca

SEQ ID NO: 455680 - DNA, 122 bp, Homo sapiens
tcccaaggaccattgtaagctgggcggccaaaatttgaaagaacataaatcgcagggcaacgaaggaggcgggggtctctggaggttacttctattagcgtcaatacgggcgaaatcagggg

SEQ ID NO: 455681 - DNA, 122 bp, Homo sapiens
ccctccctgaatggcttcctgcaagaggtgctaattgcaagtaagggatggagtgcggcccggaccgcagagcttatttcgtgggtggtgtgttgccaccttcctgactctcagtatcccgt

SEQ ID NO: 455682 - DNA, 122 bp, Homo sapiens
ggcagcgtggtctcagggacgtttgctgaggcccgctccttggggtccgttggtcgaggccgggggttgctggccggccctgagttcatgggtttctgctttgtgatgcccagcccctcatg

SEQ ID NO: 455683 - DNA, 122 bp, Homo sapiens
tcagaacgtcaactgatcccaagccctttttttctttagctgttacacacgtgtgttcaccgtgaaccttcaccaagaaacagcatccatataaaacccatagcacatgacaaagtcagtca

SEQ ID NO: 455684 - DNA, 122 bp, Homo sapiens
cgccgggagttggagagcctgtgactttcccgtgaagttgctttgcacactcccgggaagcgtctgtagtctaggggttctggtcctggggagacggagtggcatcgtccttgggaaacttc

SEQ ID NO: 455685 - DNA, 122 bp, Homo sapiens
tccgagccgggtgtggacgcgctggtgctcagggatgtcaggggttttgacccctgaaggcgcaggagtcaggcgcccgcgggggtccctgggggagggggtcctgcgccgtcccctcccac

SEQ ID NO: 455686 - DNA, 122 bp, Homo sapiens
tgatcttgtgatccacccacctgggcctcccaaagtgctgggattacaggcgtgagccaccgcgcccagccaagattgagttttttaagatgtttttcagactgacctcactcagactcatg

SEQ ID NO: 455687 - DNA, 122 bp, Homo sapiens
gaactttggaatccttggcttctggccactcatataactatgtcatagagaggtccttgccgagagatggaaaatagagtcctggtaatactaattgtctccctagatagagttgtaccaga

SEQ ID NO: 455688 - DNA, 122 bp, Homo sapiens
gagggatcctttgcaagtccctgcgcccccccccagactctaagtcctcgtctctacatgcgggacgcccacagccagcaggagattgaaggacgcctccggtccctgtttcttccctcgga

SEQ ID NO: 455689 - DNA, 122 bp, Homo sapiens
acaaaagaagatattcagagggtggcagtgtagtgaggtattttcaaagagctcaaggaacgacatagagggtgaatggttacaggatatgtgacaaactagtcaggagtttgtgacaagag

SEQ ID NO: 455690 - DNA, 122 bp, Homo sapiens
agcctgcctagccttccacagccctcactgaacacatcttctccaaaagtgcaaatccaacgagcttgagctaatcacagtgctttagagaagggacctgtcttcttccagctcctcaatgg

SEQ ID NO: 455691 - DNA, 122 bp, Homo sapiens
aacatttcagatatctggctgagataacaggtgaccaaggaaattcacttcagtgtgaaccggagagctcttagaggcagctgtggttcccttgttgctgtattaagccatacgtactgcaa

SEQ ID NO: 455692 - DNA, 122 bp, Homo sapiens
agtgcaggcatggcaaagaccacagcatcgggcctcagccaggttaaagcaacatgggagcgccgggatcccacccactcacaccacgaagaggcccaaacaaataaacaaataacccacag

SEQ ID NO: 455693 - DNA, 122 bp, Homo sapiens
tacttctggggaaatctatcttccagaggagcacaattatatgagtgaccatgaacaccccgcaaaaaaacttttaaattctattccagtttgtttggacattccaaccaatacagacacag

SEQ ID NO: 455694 - DNA, 122 bp, Homo sapiens
atacaatgcactgaatgaggcaagagtgacagactagtacctccaggcactttcaggcggcgcttaatctctgtgctaggcttggctctgcacagggttcattttaaccttctggtgtgtaa

SEQ ID NO: 455695 - DNA, 122 bp, Homo sapiens
agcacaggaaaggcagattctgagcataactccagagccccagcttttcctaccattaatcgtaagattagatcctggatacagaaatgctaaatgatcaacaaacatagttagctctgaac

SEQ ID NO: 455696 - DNA, 122 bp, Homo sapiens
ggtgaatgacataaaaggagagaatataaggcatatatgttttaaaaaaacaatgtccaccggggttcaaaagttccaaacttaactaggtactgtgttcttaagtaaagcattacaaagag

SEQ ID NO: 455697 - DNA, 122 bp, Homo sapiens
gtaaaaatctgtattcagcgtgaacaccggggccacctacgcacaaaaagaagtctttaccgcttttctttctttttactctcagccagtggaagatgagaatttgccgtttttaaaagacc

SEQ ID NO: 455698 - DNA, 122 bp, Homo sapiens
cgccagcccccgcgcgtcccggaccacctgcatctcagctgcccccgcgcctctccagaccgcccacgtcccagctgccccctggcatctccgatcgccgacgtcccgccatcccccgcgcg

SEQ ID NO: 455699 - DNA, 122 bp, Homo sapiens
gcccatgccggggaggagcgcggaggcagttgggggcggggacaacaggcgcggccccagcggcgcctccaggcccggtcagcccagcgcgcggcgtgggggcggggcctgcggttcccgcg

SEQ ID NO: 455700 - DNA, 122 bp, Homo sapiens
ctacaaaactacaagcctttaccttttcaaacacactgacgcgggccagccccagccctacgcccgcaggggcacgcagaaaagacttagttaccacggccaagtacgaagccttcgagata

SEQ ID NO: 455701 - DNA, 122 bp, Homo sapiens
aggaaatgcccttcttacagtttgtgaagattaaacaataggcagcctgtaaaatgccttcgcacttaatatgcgatcattaaaatcagttccttccctcctgtcctgagggtaggggcggg

SEQ ID NO: 455702 - DNA, 122 bp, Homo sapiens
cctgtcttaaaaaaagaaaagaaaaaaagaaagaaagaaagaaggaaatgactccgtggacgaggagacgtgggctctagccagagcaccaatagtgattttcagaatattgaacggctgct

SEQ ID NO: 455703 - DNA, 122 bp, Homo sapiens
tgttcctgctctgccttggcatctatctgctcaacgccctgagcaacctgagcatggtggcgctggtgagatccgacggggccctccgctcccccatgtattacttcttgggtcacctgagc

SEQ ID NO: 455704 - DNA, 122 bp, Homo sapiens
ctctcctcagatgctcggcagggcggagtcactccctgacccgcacagcccacagctgggcgtttgggtcagcgagattctgcacgttttctgagacacctaggctggcagggttgagtcca

SEQ ID NO: 455705 - DNA, 122 bp, Homo sapiens
agaacactctgggtcatccgggaggttcctagaggaggcgaaatgcatttcccagaaagacgacaagccggtactgctgttcctcacagggacccactgggaggcaggctctgccttctcca

SEQ ID NO: 455706 - DNA, 122 bp, Homo sapiens
aaagtaatcgttatttttcccaacttgagaatgagccagaggcagaaagggagagacagtcgacagagcttcctcaaacatccccaccaggcgctgaagtggttccagttctccggccttgt

SEQ ID NO: 455707 - DNA, 122 bp, Homo sapiens
ataaagtgcttttaggtccttagagatacatgatataaataagcggcttatgatcaagaacgataaatacataggtaaaaatagctctagcaaagatgaccttatggctctgagatgggcag

SEQ ID NO: 455708 - DNA, 122 bp, Homo sapiens
acttacagagacatgtagcaccaggccagagagcaggatcaattccccaaaaggctctctcgcctgctcagcacctgattctgtgctaggagtatggctgccctgactctatttcctggctc

SEQ ID NO: 455709 - DNA, 122 bp, Homo sapiens
tctcaccagcaacaggacactgtgtggtcaaggtctgtaatgaagcctcaaaaaaagtgccggccaaccatgagtgacaatgccatggacggggtgagccggacgccgcagggaccaggctc

SEQ ID NO: 455710 - DNA, 122 bp, Homo sapiens
tttgaggcgaggcagaggactcaggggtctgcggacggctggtcggcccgtggagacggccgcggcgaggcgcctgaggtacggcggtgcggagcgagggcgaggtcccgccggcggccagg

SEQ ID NO: 455711 - DNA, 122 bp, Homo sapiens
ctcccacccacccccgacccggggccacaagactaatctaggtgaccttgggagggttagcgtccttcggtttggttttcccagatgtgagacgtgaaatcatgccccttgcacaaggggag

SEQ ID NO: 455712 - DNA, 122 bp, Homo sapiens
ggagggggagcttagtgagaccatttcattcatacagcatgttcgctgagctcctatgtgcgtggggctctgccccatcacaggcaaaaattactcaggataggattttaataagaatcaat

SEQ ID NO: 455713 - DNA, 122 bp, Homo sapiens
tggggaaggaatgataaacttcagcttcccagcttttagggcaacatgagcctccagacccgactcgtggaagaagttggtgttcatctggaccccactcctagcgaagtccggaatgatga

SEQ ID NO: 455714 - DNA, 122 bp, Homo sapiens
cagggaccgttgtcattaaatcgatagcccgggtggtccatcacactgacagctgacgcgcgcaggaaggtcggttcacaatgagagtcacacagtgccctccacagcgactggagtgaggg

SEQ ID NO: 455715 - DNA, 122 bp, Homo sapiens
atcacttagctagcatgggacagagctgggcttaaatccagacaggctggactcagagagcgagaacaggctctcccaccacaccatactgccacatttaaggaatggagacaccagggatg

SEQ ID NO: 455716 - DNA, 122 bp, Homo sapiens
ctaaatgttgggtcattctcacttgactgtcttgtagttgttggaaaagctatttggcttcgctgtccagtgcctgcagatgaagttgcttctcctcatcgagaaatagatgcatcttttga

SEQ ID NO: 455717 - DNA, 122 bp, Homo sapiens
cgttcagagagcgtttgacagtgtctgtttcaacatttcaaatgcacacagcctttgacccgaggacccaggtgtgggatcccctacacaaagccacagggcgcctgcgcaggccacccacg

SEQ ID NO: 455718 - DNA, 122 bp, Homo sapiens
atcaatagagagcagagcagctcgactcttccctcaaacttagcataaagccagaccaggcggcgagggcagcccgcgaccgccggagctcagggggatttcggggtgcgtcgtggggaaac

SEQ ID NO: 455719 - DNA, 122 bp, Homo sapiens
gcggtgtgcggagacgctgtcaacggcgtcctctggaaaacttggtttgctttcctcaggcgttccagccacacctcattctgatacaaagctagtcttcgcaaaaccagccacggtagata

SEQ ID NO: 455720 - DNA, 122 bp, Homo sapiens
tgtggttacaacagaaaacactcttcctgccaggccgaactcccccggagatgccctcggcggcagacccagggccattgccactttttcaaatcgcacgtagaggatgtccgagggcttaa

SEQ ID NO: 455721 - DNA, 122 bp, Homo sapiens
caaaaaataccagggcactcagaaattgcctacgttgaactgcctgggtgagaagtgtggcgtggccatttcccgtcagatgtctgctatctactcatctgtcctctgttgttcctaattgg

SEQ ID NO: 455722 - DNA, 122 bp, Homo sapiens
ccgaccctgccccgcggtctgacccccccttggatctggccccgcctctacctcccccgacgaactgaaccccctgggatctggccctgccccttgcacctgaccctgcccggagatctgaa

SEQ ID NO: 455723 - DNA, 122 bp, Homo sapiens
ttagagaaataaaaaggcactttccaaccgttccaaggctctcacgctggaggaactctgcggggttgtgcctgagcagctcctgagcgccgtgatccgcgttagcttaagaagcaccaggc

SEQ ID NO: 455724 - DNA, 122 bp, Homo sapiens
cgcggcgtcttacttttctggctggagtaacctggataatagccatagtagccggtgatccgcaggatccggtcctcgatagtggccaccccgttgggggccgccttgacatccatagagag

SEQ ID NO: 455725 - DNA, 122 bp, Homo sapiens
ctcccttgattgtctttctgttccctgggaccgccttcagacatttggagacagcagtctcgcttccttcctctctgcttctctccttccccttccaaatgcgtgactggtcttctgactcc

SEQ ID NO: 455726 - DNA, 122 bp, Homo sapiens
gaggcagccaagtggggacctatggaggagttcacgtgctgcaggtgtgcgccgccgaggcggagccaggctctggagctgccaggggctcagaagcctccctctcagatctctcccctttt

SEQ ID NO: 455727 - DNA, 122 bp, Homo sapiens
ttctgctgtaaagaataagactaggtcaggtgacctttcggggcttgagtgtgggaggaacggagacaatcctccatccggctccgttatccagataatcctgcgctctcgggggttttccg

SEQ ID NO: 455728 - DNA, 122 bp, Homo sapiens
gtagacggtaagtttcctgaggatgagactcatgcattttcacctatctccatagtaccacggcatgtagcaatactgataaaatagttgctgaattgtcatcaatatttattcttcctccc

SEQ ID NO: 455729 - DNA, 122 bp, Homo sapiens
cagcctgtgtgctgagagttggaaaatgtcgttttcccggtttgttccatgccacagaatcgccccaccctgcctgggtaggcactgggagggaacttccttagcactttcggaggtggagt

SEQ ID NO: 455730 - DNA, 122 bp, Homo sapiens
aggctcctcaagacagagccgcttgctactaggtggttgggaatccgggtcctcaggaggcgttaaagaggaggtaggctttctgagctcggccatccgcggcgtgggctgagggagagaca

SEQ ID NO: 455731 - DNA, 122 bp, Homo sapiens
atctgcattctggcagaggccatggtgagattgaaggagctgcactgcgaaggagatatgcgaaattcctaggccaagtcgacacttaatattaaccatcacggtgatcttctagattggcc

SEQ ID NO: 455732 - DNA, 122 bp, Homo sapiens
acagtcggctctgccttctccactaagcctttgatattgttggggcttttcagtgtatggcgggattattaacaagggaaagtcaaagttgtccagcactgccacacagaatcaggagaaac

SEQ ID NO: 455733 - DNA, 122 bp, Homo sapiens
acctagaagtgaaatgactgggtcatattgatacggcagcagcaggcagtcctgagcggccgctgccatcgcgccggctgcagcggaaaggtacaagcggtggcggcaggagccgctgtggg

SEQ ID NO: 455734 - DNA, 122 bp, Homo sapiens
aattttccaacattgttcctgagattgtttcaccagaaaagttctcccccttatccacttcgcctaacaatttctacccatcccaatcctcctgcatttattgcttccaggaatttggcact

SEQ ID NO: 455735 - DNA, 122 bp, Homo sapiens
cttgcaagggcagccagagagcggctggcccattctgatctccaagcaggtcaacagtctcgggccctctctcccgcctccgcgccttgacggcccatcatcctatagctttctccttcgcc

SEQ ID NO: 455736 - DNA, 122 bp, Homo sapiens
cacactgcctcctcctcaactgctggccctgattttggcatccgcagaatgtcgtgtaaacggaattgcagagtgcacggcttctttccctcagcatcgttcctgacaattccatcctggtt

SEQ ID NO: 455737 - DNA, 122 bp, Homo sapiens
cttcaccagctcaactccgtctccagcacctaagcagtatcctcccgccatccctccccacggcgcctgcgttccccggcaaccggcgccgctgggcagcctgggaggcaggaaaaagcgac

SEQ ID NO: 455738 - DNA, 122 bp, Homo sapiens
gcgatccgcttctgtcagtctcgctgctggtgtcgttgagtgtgtttcgggatgtccttgcgcctaacagcagtgaggcgcagaattggcccacgccctcacctgcggcttgcttcgcagga

SEQ ID NO: 455739 - DNA, 122 bp, Homo sapiens
taaagctccctggtgggccaaaggcctcccatttggactggggagcaacccctggagtagcgttcctgagaaacattctagcagaaggggagggacgcgcagagggacgacgctttatttct

SEQ ID NO: 455740 - DNA, 122 bp, Homo sapiens
tggtgtaatgtgcaggctccacttcttacctgggtggtgaccttcttgaggagattgactcgttcagtatgcatttccaaccagcccgccatgggccaggccccaggatgcactcggggaca

SEQ ID NO: 455741 - DNA, 122 bp, Homo sapiens
cttgtctgccaagcctcctcaagtgttccacaaataaagcacattttgctatgacaccaacgaacagcaactggtcccaagcaacagcattcaggctgattcctcaaatgtcagtttgcaca

SEQ ID NO: 455742 - DNA, 122 bp, Homo sapiens
ttccccctgcgttcacttacttccttcttttccttcacctcggcccggctctgaaaggatcgggcccctccggcccgcacccacccccaagaggggccttcagctttggggctcagaggcac

SEQ ID NO: 455743 - DNA, 122 bp, Homo sapiens
cagacccgccccggcacctgctcacgaggcagaccagctgctctggcttccccgcagggccggccgagagcccacacttcaggcaaataaaagcaccctcaccagctgttcccatggccaag

SEQ ID NO: 455744 - DNA, 122 bp, Homo sapiens
ccccgccttcataagcataaaccttctctgcaaaggccaacggggctgtgccgcacactgcgtgcccgtccctgtcccgggtccacctgccgtccatccactgtcgccaaggatgaagagac

SEQ ID NO: 455745 - DNA, 122 bp, Homo sapiens
cctccgtggcctccgccttcagccgctgcagctcctcgtccagcaggttcttctggtggtcggtctcctccagctgcagccgcagtgttgtcagctcctgctccacctgcgccttctgccgc

SEQ ID NO: 455746 - DNA, 122 bp, Homo sapiens
acggggcggccgggcagaggcgctccccatttcccagatggggcggtggccgggcagaggcgctcctcacatcccagacggggcggccgggcagaggagctcctcacctcccagacagggtg

SEQ ID NO: 455747 - DNA, 122 bp, Homo sapiens
ttcagctccagcgcctcctccacacgtccatgccttccaccttgccacatggagcacagccgtgcccccacaagccagagggaacaacgaagctggcaagaaagaacagcagttagagcagg

SEQ ID NO: 455748 - DNA, 122 bp, Homo sapiens
ctccctggcagcgaagtcccagtagctcacccatgcttcatcccagctcttggggttcaccgtctgaaggctctctcctccggatccctctcggtcctgctgctcgctccgattttgcaacc

SEQ ID NO: 455749 - DNA, 122 bp, Homo sapiens
atcagagagtggagagtgtgttctaggcaagaccctgctgcacacaccaggctggaagggcggagggctgaaggctctgactctgtctcccatctccttaccaggctcctctgctaactcag

SEQ ID NO: 455750 - DNA, 122 bp, Homo sapiens
cgccacgggcgtccagagctgcaggatttgctccatttgtgaagtgccctcctggagtcccgaggggtggtgtggttacacctgcagtccctggacggcagggtccggccttggagcccctc

SEQ ID NO: 455751 - DNA, 122 bp, Homo sapiens
gtgagtagggttgaaatcggggaggcacttgctgcccctaccgcgttccgtgaccacaggcgctcggaatgccggagcaagcctgactgtgctcacttgtccattggtcggtttcttaatta

SEQ ID NO: 455752 - DNA, 122 bp, Homo sapiens
gccagcgcaagttccaggtggatgtgggcttggcggaccgcactccaagcggctggctggcgctaccggcccgggcagtgaggggcttagcacccaggccgcagctgccggagggtgcgcgg

SEQ ID NO: 455753 - DNA, 122 bp, Homo sapiens
gaaaggctctttctataaagggaagtcagtaaaaataattgcaattaaattaggtgtgggcgagataactttaaaagcttggggagaattgtacgcatctagaaatgcctgcgtttgcttaa

SEQ ID NO: 455754 - DNA, 122 bp, Homo sapiens
acctcagttaatctgcctgtctcggcctcccaaagtgctgggaatacaggcatgagccaccgcactcggccccaaaactcttcttaaaggtggtcttgcaggtatgttatagttaaaatgaa

SEQ ID NO: 455755 - DNA, 122 bp, Homo sapiens
ttccaccaaattctgcccgggccccgtccctaggtctctggaacgttctgtgggtgaaagcgagttactttgaatcgaggagaagccagtagggtttggaagccttgaaaggcaccgctttg

SEQ ID NO: 455756 - DNA, 122 bp, Homo sapiens
ggattggccggattctccgccgacttgaaaactgccttgctaattggtgcgtgttgtgcacgcgtgttttttccttttcatttcagcctgactgccggaatcagagccgcgggtgagatccc

SEQ ID NO: 455757 - DNA, 122 bp, Homo sapiens
tggttttgcaatgctggtgaagtatgcagtactgagttcacaagttcacatcacagaatacgcagaccaagaggccttaatgagagacagaaggactataagctagccagaaaacttgcctc

SEQ ID NO: 455758 - DNA, 122 bp, Homo sapiens
gtgcgaacaaaggcttcagtttgtagtggctgctgttgcatgggcgagagccttagttaccgacttctgagcttcgacctcatcctgtgggcgctggcggaccacgggggttttccgggttt

SEQ ID NO: 455759 - DNA, 122 bp, Homo sapiens
cctcgtgaatccagaacctagatcaagaaccagagcattaccagcacccagaaacctccccgcgccctcctccactgagcggccctttcaacccttacaatgccggagggcgcaattcctgg

SEQ ID NO: 455760 - DNA, 122 bp, Homo sapiens
atcctgaaagcataagatgctgaggaaatgcaagcgcttactagtaacaatgtgataacccgatctttcccgttcctgtcactctcttgcgcttgctttgttgctgaggcagccctgtgggg

SEQ ID NO: 455761 - DNA, 122 bp, Homo sapiens
agagataaaaggctgttactttgtatcagcaaggcgtctttttctgcaggactgagttcacgaaaggggaaggcggtgggcgggggagtagaaggaagcgggggccgttaatagactttgga

SEQ ID NO: 455762 - DNA, 122 bp, Homo sapiens
acagtgataagtaaaaggcattctctgctgctgtgcctcagctccagcctgaccaaacaccgttaatatgtaacccgaatctgaccacttcttttatgtttacatttggtttcagtgttatt

SEQ ID NO: 455763 - DNA, 122 bp, Homo sapiens
cagctgtttacaagtctgtacactaaactcatccacggacagtcttctagagcagcaggacgctgacagagagaagcagagtatgtacaaatacttgtgccacaatgactcctccccctagc

SEQ ID NO: 455764 - DNA, 122 bp, Homo sapiens
gcagtgctaggcctcctggctgagctggggacacagccgccccagggcacacccctcggtcgctgagggcaacagaatgcggcttgacagatccagggcctgggacccctgctggaatcggc

SEQ ID NO: 455765 - DNA, 122 bp, Homo sapiens
ctggccagagagctgatttcctgacagcactgggatttggaaatccctgcatttcgcatacgtacccgccagctggtcttatccaaccctttcccctttggaaggaagcagtttgacttctg

SEQ ID NO: 455766 - DNA, 122 bp, Homo sapiens
aggctgctctggggcttccgcccgctggccgctgaggtgagatattcaaatatcggtgggcgggtttttcccaggttaatcctctcttaactgactgcacagcccagagggaaatagaagaa

SEQ ID NO: 455767 - DNA, 122 bp, Homo sapiens
atatgctatctccagagactacggatcgcctttgctgcaaatggtcccaacccggcctggcgctctagagcaggcgtggtttctgcgcgcggacactttggagagaaactacgcgtcccggc

SEQ ID NO: 455768 - DNA, 122 bp, Homo sapiens
aaaggcttttggcttgcctgggacacccaacatgtgggcagcagagctgagctgcagacccggcctctgggcaccccatgtagaccaagaactgcccccagggatgaaatgattcccaggtg

SEQ ID NO: 455769 - DNA, 122 bp, Homo sapiens
acaaagtcagggtgaaatgttatgaaaaagaggaatatagcagaaagcaatctgagtaggcgcttttgattttagtccaatcagagccaataatgagtcatttaatccataaggtatctaaa

SEQ ID NO: 455770 - DNA, 122 bp, Homo sapiens
aagtcttctaaggtcctgcaagtgaatggcagggctgggacccaccgtcctggtccctggcgccctgcccagggacggcctctcacctgcatgagctctgcagctggctgctgcgccttgcc

SEQ ID NO: 455771 - DNA, 122 bp, Homo sapiens
aacgcttccccaaaatcacaaactatttctcaccaagagcgagaaccctggccgaattttcgcgggtggctccagtacagctgctggtgacccatcttgctctcagcagtgcaacgaggtaa

SEQ ID NO: 455772 - DNA, 122 bp, Homo sapiens
ctggaaggggagcggtagaacgtcagggcccggctgaggggcgtgattggagggcgccttcggcagccgcccgcggcagaagccgcggctccagctcgcctggcggaattgcacgcggcggc

SEQ ID NO: 455773 - DNA, 122 bp, Homo sapiens
agcctcgcggggacacgctgcttgtattgcgactgtagccgactgttgaaatcccccccccggccaaaaataacattattatcagcgacagacacttggggggggttccccgagaatctata

SEQ ID NO: 455774 - DNA, 122 bp, Homo sapiens
ggcaccctaagaactcaaatggggggcaggccctgcagtctcagcttaagggacaggaaccgacttgccaaggggagcacacggtatggagagcagggctgagccctccccctagcttccgc

SEQ ID NO: 455775 - DNA, 122 bp, Homo sapiens
ggaggaaaagtgagagttttcaagaaggagtctaaaaagcaattgttagaaaaattggagcgaggggttgtggtgcagaagaaaatagtgtctggctggactagtttaagctatttagagat

SEQ ID NO: 455776 - DNA, 122 bp, Homo sapiens
ccgcgcctgtctccatgtgccgcgcagctgaggcacaacattcaagcccgggggtggggccggcgcgcgccgggaggaagcggccgcgcggcagctgcggggcgtgggggtggtggtggcgg

SEQ ID NO: 455777 - DNA, 122 bp, Homo sapiens
tcagagagacagggagctagcgggccggcacaagaggcggctctctttctcaccgagtcacgctcatgcagatgtcccccggagggtccaacccgccttcccctcgcctgccgggcaccctg

SEQ ID NO: 455778 - DNA, 122 bp, Homo sapiens
atgagtggctacatagacaatgtcataaaccaaatgacggtttattcttcagagaagcatcgttgcagtggaagagtttggatgagaacaaggcgctacaaatcaatcagggatttgttctg

SEQ ID NO: 455779 - DNA, 122 bp, Homo sapiens
agcagatcagggcctacctggagggcacgtgcgtggagaggctcgcagacacctggagaacgggaaggagacgctgcagctcacgggtaccagggaacacaagacgcctccctgatcgcctg

SEQ ID NO: 455780 - DNA, 122 bp, Homo sapiens
gcagatggtacgggatggaatttgagagtacgggtcccgctatggcacaggtagatggtacgagacggaatttgagggctcaggtcccgctatcgcacaggcagatggtacgagacgggatt

SEQ ID NO: 455781 - DNA, 122 bp, Homo sapiens
tggccgtccagagcccgccttcctggaactctggttggctgatatagctgtccgtcgaagcggcattgccgcctattgggcaatggccagcttcgcacgccagacccgtgccccgcccagcc

SEQ ID NO: 455782 - DNA, 122 bp, Homo sapiens
actttctgtcccatgtctgttgtccatccagacgctctgcctcaagacccagggccactccgaaaggtacaaggctgccagccgtgcactgaaggccatcagcaaggtaagatggggcctgg

SEQ ID NO: 455783 - DNA, 122 bp, Homo sapiens
cctcgaaaactcgaggagacacattcagctgctcccatttcacggatgaggaaacaagtacgcaatcctgaagctggtgcaaagcccaggccccctttctttttcaagcgtgcttccagcct

SEQ ID NO: 455784 - DNA, 122 bp, Homo sapiens
gggccctaaggtcactcttccccgcgcggctcggggcaacgtgccagggagggctcgggccgcatcctgttggctctttgatgctttcgttttgtcgcttgctagtttctttacagcaaagg

SEQ ID NO: 455785 - DNA, 122 bp, Homo sapiens
ttctggagctggccatcccaaattcaatcagtccatagagacgaacagaatgagaccttccggcccaagcgtggcgctgcgggcactttggtagactgtgccaccacggcgtgtgttgtgaa

SEQ ID NO: 455786 - DNA, 122 bp, Homo sapiens
tttatcctgttgggggcggaagtgagaaagcccttattcgtattggcttagatttgcaagcggcagttgtctatcaaatctatcaagtcgcccttagcgctcaggaagtacgacaccggaag

SEQ ID NO: 455787 - DNA, 122 bp, Homo sapiens
aggacatgctgccattctgccaagagaggctcttctgggggccaggctgggactgggccccggaaaccaaaactccgtgccttacccagccggggccctcctggagccttcttggggtgttg

SEQ ID NO: 455788 - DNA, 122 bp, Homo sapiens
aaacacattccagcggttggcatctgggcgcgcagctgccaggcgcagccactgtgtggccgcgggggctgcggagcgggcgggggcagagcaggtccggcgccaggcctgcagaaagcggc

SEQ ID NO: 455789 - DNA, 122 bp, Homo sapiens
gaaggctgagaaggctgaggaggtgtgtctgggctcccaggtgagcaccaagaggaagctcgcggctgtcagcctcgcttaactcttctccttaccttgggtaccgtaatatgatccatgac

SEQ ID NO: 455790 - DNA, 122 bp, Homo sapiens
ccccatcagtttcttcaatctcatccccgaccctggagctgcggctgtcacccagagcaacgtggaaagtgtatagtctatcaaactggattaaacggcattgaagacaaggccctgactcc

SEQ ID NO: 455791 - DNA, 122 bp, Homo sapiens
tgaatctgggatgtatcccagtttcttctcagatttatttgatcccttcaaagccaagagcggatttatgcaaattaaggtgcagtaactaaacagaaaaacatttttaaacctacccttga

SEQ ID NO: 455792 - DNA, 122 bp, Homo sapiens
cgtccagggaggcgcggagcccgctcagggctaaagcggccgcatctgccgtctcagaaacggctacctgggtggttgtcacgaaacaacgaccccggcgcaagagccaacgccgaaggagt

SEQ ID NO: 455793 - DNA, 122 bp, Homo sapiens
tttttcagttccaactaaggaggcatttgtgggtgctttattcacacccggatgggaggacgtggcagctttgtggctggcaggctgacttcccacgttcttggagcccacgttgaggggct

SEQ ID NO: 455794 - DNA, 122 bp, Homo sapiens
ccttcatccatttctaaaccaaaggcatttcagagcattcatgggttccccaagatattgcgatgaaataaccatgtctcaaccaggctcatgcctgtaatcccagcacttcaggaggctga

SEQ ID NO: 455795 - DNA, 122 bp, Homo sapiens
tgatgctgcctgaacccttcacattgttgtccactccctgctcccaagagcacacctggtcgtttggactgggaagttctggccctaccttctggaacaactctatgcacagatgctcttgg

SEQ ID NO: 455796 - DNA, 122 bp, Homo sapiens
atgtcggccatggctgcgggtccggggagctgcgaagagcagagcgcgcagcggggctggcggcggcgcggaggagcgggaggaggagcgggaggaggaggagagggccgagcaagggagga

SEQ ID NO: 455797 - DNA, 122 bp, Homo sapiens
catggccagtagatgacaggtttgttcaagaaccgcctccaagattttactactgcaccgcgatttcagagtggcgggaaggactgagagtcccatttagaaacttcccaaatcttaactgc

SEQ ID NO: 455798 - DNA, 122 bp, Homo sapiens
ggctcccatatgagtgaccagtttccagcggacgtcccacagggcacctcttggtgctcccgcacggtgcggtcgaggcttctcagcacctgcatccctgctccccatcacaccctggacct

SEQ ID NO: 455799 - DNA, 122 bp, Homo sapiens
gggccccgccaccctggttccgtgccccggggctccagcgcagactcgggtcctggaccccggccgcctcggggctcctctggctgctcccagggcacagctgtaccaggagcagcagcgcg

SEQ ID NO: 455800 - DNA, 122 bp, Homo sapiens
aggccccagggtacctggcccagggttgtgctgccgcagacttggcctgtaccatccaggcggcggtggggagctggggttggaaaggcttcttggagtggactcctgggtctgtctgggag

SEQ ID NO: 455801 - DNA, 122 bp, Homo sapiens
gccctgcccagctccagcaaagggcctgtctgtccgcgctgggagcgtccattggccgcgcgcgtggagagccgacctgtattttaccactgcagatagaaccgaatttcccaaagtggctc

SEQ ID NO: 455802 - DNA, 122 bp, Homo sapiens
gcgtcaggggcctgactcccagggttttccatttgagtagaagaattgcagaccatcccccgaggcgaacgctgaagccccgatccacgtgaagccaatgggcccgaactgcaggcttaact

SEQ ID NO: 455803 - DNA, 122 bp, Homo sapiens
aactaaaagggcttggggctgtgggtgtaagagtcatcttgaccattgacagtgcagtcacgttgaagaacagacacactttatgttgttctatggtcagcaatgaggaggatcagattatg

SEQ ID NO: 455804 - DNA, 122 bp, Homo sapiens
aagtagttctgtagactcagtcccaagcatgcgccgatggcttcccaaactcgggtcccccgactcttagtacatgggcaactgcgggtgattgaacacacttttctggacgatagaggcca

SEQ ID NO: 455805 - DNA, 122 bp, Homo sapiens
ggaaagtgcactaatgccatgagcctgggactggtgtgcatgtggacagttgggtcaggacgtctgcaggtggtagggcttcagtaaatatgtattaaagccagctacgtgtcagtaaacca

SEQ ID NO: 455806 - DNA, 122 bp, Homo sapiens
attaggacctcaggttgcacaatctctgtgaacatggagaactttttgagaatgttgaggcggcagcctgaaagcaagcaggagattgtttgctttgggcgagctgcacctcaggcttccct

SEQ ID NO: 455807 - DNA, 122 bp, Homo sapiens
tctggaccccagaagtcccaagaatgaccgggtgcatccaaggaggcacaaacccaggttcggggagtgagagaaaaatgggtgcaaatctcagtcctgctgctcctgagcttctcagcctt

SEQ ID NO: 455808 - DNA, 122 bp, Homo sapiens
ttaccacagtgcctgaaacccacagatgcttaataaatgtttgctgtgtaaatgaaagaacgaaaaagaataagtgaaggcagagactaagttttaacagtgaacataatagaaatagctac

SEQ ID NO: 455809 - DNA, 122 bp, Homo sapiens
gaggaggaggccggcacagccgccttttatttttctggctgagccaatcacaagaggaggcggactctgttacgcccaatccctgaggtgggattccctccagcagccaatggatctgagga

SEQ ID NO: 455810 - DNA, 122 bp, Homo sapiens
acatgctagctgacaggtgatgctggctgcattgcagccgttagcacgaacaacctcagtcgataggaataaacacgcagagcagtgcttgtcacacagaatttgagactcattctcctttg

SEQ ID NO: 455811 - DNA, 122 bp, Homo sapiens
gaggaatttaaagtgtgggctggggggcgaggcggtgggcgggaggcgagcgggcgcaggcggaacaccgttttccaagctaagccgccgcaaataaaaaggcgtaaagggagagaagttgg

SEQ ID NO: 455812 - DNA, 122 bp, Homo sapiens
cagctggttcgcaaataggtaccctaaagaaatgacaggtgttaaatttaggatggccatcgcttgtatgccgggagaagcacacgctgggcccaatttatataggggctttcgtcctcagc

SEQ ID NO: 455813 - DNA, 122 bp, Homo sapiens
caagaaaataaccaacagtatgaagaaacagcctatacaataacaaaaaatatttgcatccgatatgaatattcgcacctgatatgaagttaatattcaaaatacagaactcaatagcaaga

SEQ ID NO: 455814 - DNA, 122 bp, Homo sapiens
actccccctcctcctccgggctggtctccaggtagtcggagcccagggagctgaaggactcggacgaaatcttccttcgagacatgctgccggcggagctgcagcggccgaggcggtggcgg

SEQ ID NO: 455815 - DNA, 122 bp, Homo sapiens
ccacgcggctggggtgcgccgggaagggagctggatgttttagcctcggggcgcacgctgcgggcccttcgtgttccggacgctaaacaccgagagcaccccgtctccggggcctccggaga

SEQ ID NO: 455816 - DNA, 122 bp, Homo sapiens
cttcagctacacctgccacattagcaacagccccatgtggctggcagctaccaaagtggacggttgcagacgagcagattccggcaccgcagaaaggtaggcgccggacagcgctgcccgcc

SEQ ID NO: 455817 - DNA, 122 bp, Homo sapiens
tgttcacaaaaactggcatctggaccacaggctatggttttctgacccctgattttaaggcgttgagttttgggtgatttgttatacaacaagaactaactgatacactacatgattctgaa

SEQ ID NO: 455818 - DNA, 122 bp, Homo sapiens
tttaatagagatgagggctccctatgctgtccaagctagtctttaactcctgtattcaagcgatccacatgcctcggcctcccaaaatgctgggattacaggtgtgagccaccacaccaagt

SEQ ID NO: 455819 - DNA, 122 bp, Homo sapiens
ccctaggagaagtacacgtaactactagagtgtgtaatagacagaactgacctgtcagggcggccaggctttcctaaggaagtgtgattaagccgagcaggaggaaactaggcagtggttgt

SEQ ID NO: 455820 - DNA, 122 bp, Homo sapiens
gcgcaggcacgtgcacgaacaacacgggacgcgcgcaggcacgtgcacgaacaagggacgcgcgcaggcacgtgcacgaacacaggacacacacagcacgtgcatgaacaacacaggacaca

SEQ ID NO: 455821 - DNA, 122 bp, Homo sapiens
atgagctgtgtggtcctgggaaagccttggtgtcctcttttacctgcacagtgagggtgacggtcgtgttacctcctgaggccacctttcagctttgccattctgtcatttgacaaagactg

SEQ ID NO: 455822 - DNA, 122 bp, Homo sapiens
cgagtcaccccggggacagtgggcgccgagtcacccgggacagtagacaccgagtcaccccggagacagtgggtgctgagtcactctgagacagtgggtgctgagtcacccggggacagcca

SEQ ID NO: 455823 - DNA, 122 bp, Homo sapiens
tgggagaatgtagtggctcagggaaggaccagtgacccaagaggaaccagcctctctctccgcccaaggtgccgatggggaaaggaaccgggagttaagtgaaaagtctaaggaagggtaaa

SEQ ID NO: 455824 - DNA, 122 bp, Homo sapiens
gccttgccgtccttctcgtggaaccctggggagcgggggttttggaggcacagttcattccggcttccagaagtggagccactctgactccaacctcagcagcgtctcccacccccacctcc

SEQ ID NO: 455825 - DNA, 122 bp, Homo sapiens
attcccctgaacggatttcagaaccaaaaactagctgatgagctgggggccatttaaattcgctcccctcgaaggcgcccgaagttcgccttcctttccctttcttccctcttcgctccctt

SEQ ID NO: 455826 - DNA, 122 bp, Homo sapiens
gctgggattacaggggtgagccacagcgcctggccggaggttggttctttgggaggggaccgaaatcactctagaccatgggtgtccaatcttttggcttccctgggccacactggaagaaa

SEQ ID NO: 455827 - DNA, 122 bp, Homo sapiens
tgagacatgtcagcccaggtccctgccagcagctcaagagggagaaaactgtaccattgacgccaaggcattagtcaagcagcctggcccattgttgctataggtgaggttcaaactcaatt

SEQ ID NO: 455828 - DNA, 122 bp, Homo sapiens
tcacccctctgcccagatatgctaatccctccgactgcataaggtccaagctaaagcttccgctggggcacggactgtacggccaccgcgccctcctcacagaaaggcgaaacggggctgtc

SEQ ID NO: 455829 - DNA, 122 bp, Homo sapiens
gtcctgcgccgagggggcggtgctgtggcgtggggcggggtgtggtggggcctggcccagcggtgccgtggggtggggcggggtgtgggcggggcctggcccagcggcgcagtgggagcgga

SEQ ID NO: 455830 - DNA, 122 bp, Homo sapiens
gggttgggagaggagcggggggagactgagtggcgcgtgccgctttttaaaggggcgcagcgccttcagcaaccggagaagcatagttgcacgcgacctggtgtgtgatctccgagtgggtg

SEQ ID NO: 455831 - DNA, 122 bp, Homo sapiens
ctggttaataattgttccccggtggtgtcctgtgtatcgtaggctatttagcagaacccccggattttacccactagatgtcagtagtaccccctactcccagtatgacaaccaaaaatgtc

SEQ ID NO: 455832 - DNA, 122 bp, Homo sapiens
gccgtttccgggaggcggagctcagaccccatttcctttctccacatccaggtcaggtggcgtttgctgtggcggctaggcccgcgtgcgctggagacctccgcgctggcccccgcgagcct

SEQ ID NO: 455833 - DNA, 122 bp, Homo sapiens
agtttcctccgcgcgaagaggaaaacgggcgtctccggcttgcgtgcggcctcacctcagcgtgagaaggagggaaagaacgactcagccaagtgtcccaaggaggagccggctagggaggg

SEQ ID NO: 455834 - DNA, 122 bp, Homo sapiens
ataatctttgtccattcttgttggcttttgctgggtagtgtttggttgaagttggtcccccgtcttaaggaaatgacagggctttaccacacacacatgtgttcattgtatttataactata

SEQ ID NO: 455835 - DNA, 122 bp, Homo sapiens
atgttttaaacccgcggcgtcccggcttgtgcctgcagtttccgccggggctgcccatgtcgttccgcgcacgagcccctcatgtagggcaggaaaataatgtctatcccgcatacacagca

SEQ ID NO: 455836 - DNA, 122 bp, Homo sapiens
cggcaagggctgggtggaaaggaagagcaaggccaggcgccggcgcgagactccccttgtcgtccaataacctgccagcgcctggcctggtcgccatcccacttttctccgcagatctccct

SEQ ID NO: 455837 - DNA, 122 bp, Homo sapiens
gtattttgtatcatgtcatattgtacactaacataaacatgattgaaatataattgaaaccgctacatgaaatagtacttgccattacagttttgatgctttctattcaattttatcccgtt

SEQ ID NO: 455838 - DNA, 122 bp, Homo sapiens
tggaaataaaagctggccattcatttgcatttgaaagccattaacattttcttgataggtcggtaaatagttaccagatctttggttgctttggtggactgtgctcctctgcttttattgct

SEQ ID NO: 455839 - DNA, 122 bp, Homo sapiens
caccacagttcctcgctgtccaccccaggcttccggactggaaggacagtgggacagtgacgggggataaaagaagcctggtgaggccaggagtcactgcctgcagaaccccagcccgactt

SEQ ID NO: 455840 - DNA, 122 bp, Homo sapiens
gcgtcgggggaagtggtaggccccggagactgcgcgaggctcctcagcaaaggaagtgggcgcggcgcgcacgcaagacctcgcacccggcctcgcgcgccgcctctggacagcccagcgcc

SEQ ID NO: 455841 - DNA, 122 bp, Homo sapiens
caacatatcacgtcagcacacatgacctcatttaatggctatgcctgaggctatgaaggtcggtccacatgcttacatatggagaataatattgttgcatttctgtggaaactggctcccag

SEQ ID NO: 455842 - DNA, 122 bp, Homo sapiens
ctcagttaacggggacgctttagagaaacgcactcgcctctcctgttccggttgggtcggcgcgggcttctcaggcgccacgtgggattcggcccgggtgctcttgtgagctgctgctcctg

SEQ ID NO: 455843 - DNA, 122 bp, Homo sapiens
gccctagaggctcctgctacggactggtcggctctggggttgtaggcagaaggctctaagcggtcggaagggtttcctgtgtgtcagcaacttcactttgccgagatagctggcggaagagg

SEQ ID NO: 455844 - DNA, 122 bp, Homo sapiens
gataatgtaattaacaactgctgagagatcaaagattcaacttgccatacacctcaaattcggagaaacagttaatttgggcaaatctacagttctgtttttgctactctattgtcattcct

SEQ ID NO: 455845 - DNA, 122 bp, Homo sapiens
ccaacaagggctctgtgggtcttgtcttagtgccctgtgggtgtccctgccccagggcatcgctctcctggtttgcagatgactccatcccactgagctagaaccagaccctgggtgccaca

SEQ ID NO: 455846 - DNA, 122 bp, Homo sapiens
gcggcgcgcggagcgcagggaggtcccgggcgcgccccctggcggagctggcggccctggcgctccgtggctgcaatgccctggcgccgccgccttcgctctggatctcaatccccttccac

SEQ ID NO: 455847 - DNA, 122 bp, Homo sapiens
ggtccctgaagaacgaagggtgggcacggcgacgtgagggcctggggggcccagggaatgcggtgggaccctggagggcacgtagccacgctgggcaattgtgattgggctgccacgctggc

SEQ ID NO: 455848 - DNA, 122 bp, Homo sapiens
aattaaattacaacaaggtgatttttaaaaaattatttattgtggtattctataaatttccgcattttttatgtttaattggggactttcattgttgtttcttcacttggttcctggaattt

SEQ ID NO: 455849 - DNA, 122 bp, Homo sapiens
aactggaattgaagcatcaactgaagatttctgtgcaactgtggtttaaattgaatgctgcgctttgtataaacataattttttgtggtttaactttaggctgttctctgcggtcttcccat

SEQ ID NO: 455850 - DNA, 122 bp, Homo sapiens
tcactcgtcagtacctgaagacctgggacattgcctctctgtctccacatcactgggttgcgtctctccttttgcagcccaggggcttctgggattaatggaggtccatccagtcctgggtg

SEQ ID NO: 455851 - DNA, 122 bp, Homo sapiens
aggctgcggcggtttccatctgtcccttcctacaccgcggcgcccgctggggagccggggcgcacacaggacagccgcaagccttctgggcctggcgccctcccacacccgctaggagggga

SEQ ID NO: 455852 - DNA, 122 bp, Homo sapiens
tccactggtgtcccacactgcagaagtggtgcatggaacagaggtcaggagttgagatcccgatttggaagttatttacacagaggatgaatctgcaatcatgaagtctgatgaaattccaa

SEQ ID NO: 455853 - DNA, 122 bp, Homo sapiens
tgaacagacgcaaggtaacattttaaagtagtgaccatttggggcaggatgatttcccagcgtggtaatgtgtcatttgtcctcactttaaaagaatccgaattcagatctctctctcctct

SEQ ID NO: 455854 - DNA, 122 bp, Homo sapiens
tcacagtaacagcctctgcccagcaatttccttttcagcctgcagggtcctcacgctcaccggtctggtcacagggttcaccctgttttgccagctgccagctcatccagccttcctaagtg

SEQ ID NO: 455855 - DNA, 122 bp, Homo sapiens
aatgacgtggagccgcgctgtacttaggggctgcctccccttctgctccccgagacctggcgtggagaccgccaccaggagctccgaacacgcaggcccaaattggaataggagatggattt

SEQ ID NO: 455856 - DNA, 122 bp, Homo sapiens
acaagaatgagaaaaccaaacacaaaacctccaactccactgagcaaaagaaagaaccatcgggcacgtccagacaatccaagagaaacggattaaattacagaggtgaatggtggccacgg

SEQ ID NO: 455857 - DNA, 122 bp, Homo sapiens
ggcgaaggccaagggaaaaggcgccaaggcagcaggtgccccgaggagccgcgcgatgggcgcactggcctctgcctcggcgccttcctccaccctggtagcctggcagcctccgcctgacc

SEQ ID NO: 455858 - DNA, 122 bp, Homo sapiens
cggggagtccccactgtgcgcccctggcactttcccagtcccctggcgcggtcgcaggcacgggtggggtctgcctcaaagttgttggtacggccagcccgctgctgtttaaatggtgtgtt

SEQ ID NO: 455859 - DNA, 122 bp, Homo sapiens
tgaagcccgcagagctgaagggcagctggttcctcctgtacccgcttcttgtggccaagccgcaggagcctcagccttgccatgggaatggggcctgtagctgctttttctctctccttcct

SEQ ID NO: 455860 - DNA, 122 bp, Homo sapiens
gacagccctccggtatctgcactcagctcccacgttcctggagcttctcttctcagactgcgcagcgcccagagcttcaggtctctccatatccttcatcaacacctcctgaaagcgtgaga

SEQ ID NO: 455861 - DNA, 122 bp, Homo sapiens
ctcattggaagagttgccaaagcgtgtcttcagggtatacaaaggttgttccggaaggagcgtgaaggctccaggtgccgatgtggatcatggattcagccaagcaggcgaatgtgcactga

SEQ ID NO: 455862 - DNA, 122 bp, Homo sapiens
aggcacttccggtaagaaatctagtgcccttggctcggaacctgcgtcgtagtgcgcaagcgccccgggcctggagacggccgcggatgccgagggagggggcgtgtgagccgaagaggaaa

SEQ ID NO: 455863 - DNA, 122 bp, Homo sapiens
tgagaaccctgtataccgtccgcagccagacacagacacgtgcttcctgtaatgggaacccgtataccagatgcagcctggtgcttcccatgatgggaaccccatataccagactcagccac

SEQ ID NO: 455864 - DNA, 122 bp, Homo sapiens
agaaatacaggatgtaaataaaatcttcattaagcaaggtatatgtaaactctacaagtacggcaggttaatgaccataaggagagaatggccctcacctctggatgctgtggcagggacat

SEQ ID NO: 455865 - DNA, 122 bp, Homo sapiens
tctggatgcagaggggccagatttctgacgagaggaggaagtcatggaagagcatccacacgcagaggtctgaagccagtggttgctaagtgttccactagcccagcacgggcctctctgcc

SEQ ID NO: 455866 - DNA, 122 bp, Homo sapiens
gtgggcgccagaagcgggtgtgtaaatatgtgtgaacaagcgcttctaatcaaacggaggcggctgctcagtccagaagatatgaataaactcatgtttctgaaatccaacatgctttaaga

SEQ ID NO: 455867 - DNA, 122 bp, Homo sapiens
agacaatccctggaatactgatgagtggttccctttgacactggcagcagccttgggccccgtgacttttcctctcaggccttgttctctgcttcacactcaatgtgcgtgggggtctgagt

SEQ ID NO: 455868 - DNA, 122 bp, Homo sapiens
cttcaaacccacatctcaaatgagtaattccattgttcttccaggccaactagtgacgcacgatatttttcttcttagttcagctaaaatctgggctcttgtctcccgatcaggaaaaatta

SEQ ID NO: 455869 - DNA, 122 bp, Homo sapiens
ggggcgcgcgcctcagagagagctgtggttgccggaagttgagcggcggtaagtgagccgcggcgggcgagggtgtagtggggtcttgctgggccggttttggaggcctggagtcaaggggc

SEQ ID NO: 455870 - DNA, 122 bp, Homo sapiens
tcagccacaggggcatatgcttcttctgtgaagtctgttgccttcatagtgtggcctccacggcatcttcccagctacccctcatccagggcccagggctttagggcactacatggcaatag

SEQ ID NO: 455871 - DNA, 122 bp, Homo sapiens
tccttcgggaggctggtccgagcccctgtttccgccgcggcgcaggaagggttggggttccgctgcctgcaccaggcaagagcaccccgagcaaaggaagaagacgacttgcctccggagct

SEQ ID NO: 455872 - DNA, 122 bp, Homo sapiens
ttccagacaccgagccctcatgtgcctctctccggcccgaggcggcaacagctcttactgcggcccctccccggggacgtcacctgccttactgtttcctaactctgcccacacctttgtca

SEQ ID NO: 455873 - DNA, 122 bp, Homo sapiens
aacatctgaaaaagcagcacaagcggttgagataaacatcccagagggttttccacattacgtaaattttcaagtgtgatgtgaagggacccgtgaggtatagtggcagctctacgccaccg

SEQ ID NO: 455874 - DNA, 122 bp, Homo sapiens
aagaaatgagaaacagaaatatacagaagctccacttcctagtccgccaattatcatttccggtgattttctaggaaaggcgtcaactctctggtctaggcgttcccttaaactctccgccc

SEQ ID NO: 455875 - DNA, 122 bp, Homo sapiens
gctctcacaaaggggctctcttgctgggctctatttcttaggaattcgtttgagaaacttcgtattcctctgccctggacacttccaattgtggggtgaggggaaagagaaccaagaaaagt

SEQ ID NO: 455876 - DNA, 122 bp, Homo sapiens
cagcgatggtggggttaggatggacggttatcaagaacccagtctccagtgagagccacccgttgctcagaagtatcctagcatcgtagctttttccttctctttgcctcccttcacaaccg

SEQ ID NO: 455877 - DNA, 122 bp, Homo sapiens
cctgtgaaggtactcagagaaaattagtatcacatacacacttgtctcaacttcctggtccggcattttccccactatcactctttatatacgttaatgctccaatcaaactaaactagttg

SEQ ID NO: 455878 - DNA, 122 bp, Homo sapiens
gggcctaaccttgccaccttggcacagctgccactccagagagatggctatgccggtccgcgtggcgcgcagggccggatggtttggcgctctctgcgaggcccgcaaggctgcacttggga

SEQ ID NO: 455879 - DNA, 122 bp, Homo sapiens
acacgcatctctttgctcagcccaccgttgagatcgttcactcactatgctttcagtggtcgaatgaattccatcaaatggatatgctgttatttacttattcattcccctactggtaattt

SEQ ID NO: 455880 - DNA, 122 bp, Homo sapiens
aaagatgtaggcaaccgcatccgtgccgatggccggtcagttctccgggccagacgtgggcgatttggggtttggacagacagcagtgacctgatgggtgtccccaggtggcctcttgttat

SEQ ID NO: 455881 - DNA, 122 bp, Homo sapiens
ccgtcagcacaggaagcattcacgtctggtcatcactctagcttcagactcaaaagtgaacgattggctggctgtgagccgcaggaccctgcggggagaccagggtggtctctacactgttg

SEQ ID NO: 455882 - DNA, 122 bp, Homo sapiens
ccgcctgggcctcggcgttcctgtgtgtcaggctgtgggagtctctctgtgtccccagcccgccccatgtggttctgggacctgctgggccggagggttcccttcactggtggatctgattc

SEQ ID NO: 455883 - DNA, 122 bp, Homo sapiens
tgacctcatgatccacccgcctcggcctccccaagtgctgggattacaggcgtgagccaccgcacccggccctggaaaagttttttaaaaagttaataaacgtagttagcccatactccttt

SEQ ID NO: 455884 - DNA, 122 bp, Homo sapiens
acagccctcagccccgcccgcttgtccagctgcctcgcaattggctgcaccctctgggtccgagcccccgggagggtaattaacgagggattaatgagatttccaaagtcaacagaaaaatc

SEQ ID NO: 455885 - DNA, 122 bp, Homo sapiens
cggattaaatttctgcaaattcaaactgaatggggctttcttctgctgccttccagagggcgccggcagcccgccgcgcgcttctctccggcgggagcggccgcccagcgcacggctaggag

SEQ ID NO: 455886 - DNA, 122 bp, Homo sapiens
ctaaggctgggaaggcggctgcgcctctgtccagggttccagggcgcctgagagcaggagcgctaggagaatgtcatttgcctgtttcccgcgcgcgcctgagctgtgtccgcagggctggg

SEQ ID NO: 455887 - DNA, 122 bp, Homo sapiens
gcggccccctccacccctggctcccgcaggccgctagtagtccgcgccaggccccgccggcgcctctagggccccccagatcgcgcagaccctgacatccccgcctggccctgggttctggg

SEQ ID NO: 455888 - DNA, 122 bp, Homo sapiens
cagccctccagctcattcttgttgcgccccaaaactggacccccaccctcagcgcagtagcgggccttattccggccccggttccggttgtcggtcagctcttcctcatagtcttcttcctc

SEQ ID NO: 455889 - DNA, 122 bp, Homo sapiens
aaggagaggcttggggcccagtgtgtctgcgcccaggagggcccacggtggcctagggtccgaaacgggggaacgtcgtggggagtccccaggcaccttgggcggagcaaggagcagggcca

SEQ ID NO: 455890 - DNA, 122 bp, Homo sapiens
tccttgacaaagcacggctggtgccgcaacccctcagcgagcaagtcaagctcttcacagcgatgtcttacaagcgcagagggctctgtgacaccctggtctcaccgccactcttccaaagt

SEQ ID NO: 455891 - DNA, 122 bp, Homo sapiens
accctgttcttaccaccagcaattcctccagggacttggtcagcagcccaacttgatctgcgtctctctgctaaggtgtttccgcaacagggtcaactccaagtctcacctttctaggaatc

SEQ ID NO: 455892 - DNA, 122 bp, Homo sapiens
gcctccgctcgccttctcagtagctccgtaggcgtgtggccgtttctccgccaatctgagcgcaccgcgccacagcatcctgtggtcccctgcagatcccacagcgccctggccagaactag

SEQ ID NO: 455893 - DNA, 122 bp, Homo sapiens
acaaaataccgcagggcatattcaggtgtgttgggacacacaggcaccacttggtaaacccggccgatggctgccgagtgcgcagcaccccaggttggagggaggaggtgcaccccagagga

SEQ ID NO: 455894 - DNA, 122 bp, Homo sapiens
ccagacatcctctggagggtgtgagaccctggccccgcccccgcggtcagcccagtcccccgagccccgccccgccccgaccaacccgcggggattttggcctaaaccgaaaatgaaaccgg

SEQ ID NO: 455895 - DNA, 122 bp, Homo sapiens
ggtttaccatagaacttagagtataagaataataataaaaagaaaacaaaacaaaaaagacgtgctaactgctatgctacaggtagagcgaagctcattaccagctggagttagaaatatgt

SEQ ID NO: 455896 - DNA, 122 bp, Homo sapiens
aacaagccataggcaataaatatattagctctggtacatgtccatagacttgggtgagcacgctctccagaacacattaaggcagtgaaattattctgaacatacagatttaaaaaaaaaaa

SEQ ID NO: 455897 - DNA, 122 bp, Homo sapiens
ttaacaaaatcaatctgtatactgattgagttcatgtttatatacatttcacttttgaaacgtttatatacatttcacttttaacatttatcctaaaacatgactcatatgccttagatatt

SEQ ID NO: 455898 - DNA, 122 bp, Homo sapiens
taagtactgggaagcacaggcagcttgaatccactggacgaaggagtgattcaagacagacgggatggagcaggacagcatgagatttcatcacatgactcagaacgctgtgtaatttaaaa

SEQ ID NO: 455899 - DNA, 122 bp, Homo sapiens
cgtcaacattgcgaaaaggagaaggcggagcggtggcccctccccctcccctccccccgccggctcctgggagagaaaagccccagcacacgacctaagtacacagcgcgccagccgcccgc

SEQ ID NO: 455900 - DNA, 122 bp, Homo sapiens
ctggaacccctgactttgtgatccgcccgcctcggcctcccaaagtgctgggattacaggcgtgagccaccgtttcaggccgagaaaagggatttaaaatgagaagcttgaatcttattgaa

SEQ ID NO: 455901 - DNA, 122 bp, Homo sapiens
tgacctgagggcgtcccttaggggctgcagtctcctcttggccatctggaagggtgtgctcggggttctagggggcagatggggcagggtccctgcagccctgtctctgagatgatggactg

SEQ ID NO: 455902 - DNA, 122 bp, Homo sapiens
actccatgttattcccttttctctggttctaaactataatcaagtgaatcttctccccatcgatttcaagtttgcagtcactgagctgagaagtacaagtttggatttctgcatggttaatt

SEQ ID NO: 455903 - DNA, 122 bp, Homo sapiens
tctagtttctacactgcaggacgttgaacaccaaagggggtttactcccccttatttcttcggtatttcctcttttatctccgcccctttctccatcggtccccgttcccttatccttgacc

SEQ ID NO: 455904 - DNA, 122 bp, Homo sapiens
cccatgggtcagtgcctcatccccacataacataaaaagcagcctgggaaaaaattcaagcggcaggcaccaataagggaactagcacagggtgttgtgcctggagacatgcccacggctcc

SEQ ID NO: 455905 - DNA, 122 bp, Homo sapiens
ccgctctgggcacccgggcgggaagcccttgccagaagtccctccggagttctctgcccgcgccctgggtgcaggactcgctcctgtaacttcctggcttatgcacctttgctcccagggcc

SEQ ID NO: 455906 - DNA, 122 bp, Homo sapiens
aaatctaaacccactgtcacctctggggctcgtgcattctgccaacaccccataggaacccggatctcagacgtcccaggtacgtcagccccaccagaattctgtgctcataggacacggtg

SEQ ID NO: 455907 - DNA, 122 bp, Homo sapiens
cggggacgcgggcatccactccagagtccgagtcgaggtctccaccaaaccccggcagcgcgcactttgcgcctcttgcaaagtttccgcgcgaggttaagccaaggtggagcgggacgcgg

SEQ ID NO: 455908 - DNA, 122 bp, Homo sapiens
ccgtttggtttttcaggtttacgcacagcccctttgatgacggtgacatacagtgtgacacggctccttggagggggggaaatggttctcatatgcagaaagtttacctttatcctgctttt

SEQ ID NO: 455909 - DNA, 122 bp, Homo sapiens
gggcaggttgatttcccttgctaaactagtccagaatgggcaagtgacctaattttggcacgtgagacctgagggcactgtactggggcccttgggtgagaagttccacggcccctaaggag

SEQ ID NO: 455910 - DNA, 122 bp, Homo sapiens
ctgcacgcagccagggaggcctgagggggcagctgcggggctggcggccaggagctgcttcgcggcttgcggcgcaaagtagaggccccgctagctcgctcccgcacgccgttctgcgcctt

SEQ ID NO: 455911 - DNA, 122 bp, Homo sapiens
gcttctgatcttcccgacagctcctgcttctcctcctgtgcatctgggaccctgaccccccggctcgcctcttaaagtcggtgctggagaggaatctgattcgtccacagaaggccactccg

SEQ ID NO: 455912 - DNA, 122 bp, Homo sapiens
ggccccaatctgattggactggtgtccttataagaagagacacctgatcatgcacatacacgaactcacacacattctctctccctccctccctccctcccttcctaccttcccacccactt

SEQ ID NO: 455913 - DNA, 122 bp, Homo sapiens
aatctgtatttttaacaaactcctctggtgattcttatgtacactgaaggctgagaaccacgagaaagtaacagtcaaaaaggattttaagttctcttgccaagctcctgataatccttgtg

SEQ ID NO: 455914 - DNA, 122 bp, Homo sapiens
tcagagacagacctgaacagctctcttcctaagaggcacaggcaatcactgggcctcgcccgccccaggttgcctgttctcttcaccaccaataaactagagggaccacgatctcacagagt

SEQ ID NO: 455915 - DNA, 122 bp, Homo sapiens
catcgtcacatctgcgacttctggttaggcggaggcggccgagctgacaaccggatatgacgttaaggactgccctgtagtgcccgcggttgccagtcctctatccgacttgatcgtgcaga

SEQ ID NO: 455916 - DNA, 122 bp, Homo sapiens
gagaagagaaggggcgggggctgccggagggaaatgggaactgatgcttccctgccggagcgcgcttgttcaatgttaagatctttgacaattcttcctgcggagagttcagatctgatagc

SEQ ID NO: 455917 - DNA, 122 bp, Homo sapiens
gcattgccctgggggccggagtatctggattcaagcttctaagttagctgcgtgaccctgcgccaatccgaaggtttagtgactacctctcgcctaaggagtctggctgatctagggttcta

SEQ ID NO: 455918 - DNA, 122 bp, Homo sapiens
gaagcttagctctacaagtgtacatctgttcagcaataaacatgtttctgaaagactggccgtatcttcagtttgtatagactgtgcaaaactggtgccaaggtccccccaaaatacacaga

SEQ ID NO: 455919 - DNA, 122 bp, Homo sapiens
aaagcagtcacctcctcggggacccctcagtgtagtgactaagccatccacaggccaactcggccaagggcaactttagccacgcaaggtagctgaggtttgtgaaacagtaggattctctt

SEQ ID NO: 455920 - DNA, 122 bp, Homo sapiens
agaccaagacagtctcatggagaaagcaagaaggcagaagggaagactatggagctggggcggggactggccagaaagtctgggcagtgaagtcttactaaccattattagtgtttttggtg

SEQ ID NO: 455921 - DNA, 122 bp, Homo sapiens
tgcccagggtatcccaggagctatggctggctagtgacttattcagcctgtcactccctacgaggacatcctgcagactctggagtttccacaggctgggcgatgaagtggaaagaacatag

SEQ ID NO: 455922 - DNA, 122 bp, Homo sapiens
caattctgccttatgctcttgatagcctcgatcagggaaagcactgtagaccagttgaatcgtttgcttctttgtttctttaatatgctagtttaagctacagactctcaatgcccatccca

SEQ ID NO: 455923 - DNA, 122 bp, Homo sapiens
ccctatgccacaacaaggggagttgcacccccgaagacagacagttctgcattgaattcccgaactcctgaacatcatagaagagtagagacgtcacaacctttaggcttatgtcttagagg

SEQ ID NO: 455924 - DNA, 122 bp, Homo sapiens
ctgagaattcagggttgggggctcagagggcactgcggctaggagcccgtcaaagcctgtcgcccaccggggcgagggcaggtgggagcgcctggccgtgcgtcgcgcgctggttggccagc

SEQ ID NO: 455925 - DNA, 122 bp, Homo sapiens
ggggtgagtcacgcgacccggggaagaacttcaggggcggtcaaagttgcaggaaggcggcgcgaagtgccttgggtcgggccgccgcctcggcccgacacccagtagttggggcacgagcc

SEQ ID NO: 455926 - DNA, 122 bp, Homo sapiens
cacacgcacacgccgcccgcccaccaggcagacacccacacacctgtgcacgcacgcgcacgccaagccagcgggccctgcccctgccccggagccctcagtgtcagaaccaggctgctgtg

SEQ ID NO: 455927 - DNA, 122 bp, Homo sapiens
ggctcagtctctttattaggcagcaggagggggggtagcccagctctgttgggagggaaacgacaccaagaggacccaatggaacagctccaacccaaagcttggaggcaacttgttggaga

SEQ ID NO: 455928 - DNA, 122 bp, Homo sapiens
tacctctagccgctctgctcttcccacctcccttcctcagcgccgcgcccgggacaggcgcgagactgggcttttattaggaaggcacgatcctgggaaccgctccttgtgcccaatgtaaa

SEQ ID NO: 455929 - DNA, 122 bp, Homo sapiens
cgaagggctcagaatgtactcatcgcagactgagcccatatggtcacagtggggagagcacgctgcactcaagatgctagcaagcctgcagcaggcggcccagcgagacacggtcccccgcc

SEQ ID NO: 455930 - DNA, 122 bp, Homo sapiens
ttgtcaatcccctctccctctccaccccagctcacggttacttctcaggcttatggcacacgggcctctctaggtgcccacggtgtgtgccaggcagccctgtcgccatcgagcttactcaa

SEQ ID NO: 455931 - DNA, 122 bp, Homo sapiens
cctcttctttctggtcctttatcccgctctatccgttcccttcctccaagtcctttcccgcgatttaaatttatatgacagagccaggcactgtgtttgcggtattataggctctcggtatt

SEQ ID NO: 455932 - DNA, 122 bp, Homo sapiens
tgactggggtggatatttccaaagtggttcactcacatagctgtcagttgatgctgtcctcgggctgtcaatccaagcacttccaggtgacctcttcatgttgtctgggcttcctctcgata

SEQ ID NO: 455933 - DNA, 122 bp, Homo sapiens
gtagcagggacacaggtggcacataggagcctagaaacaggagctttattctctaatgtgcgtccagcaagttccttacacaatcaaggaaatggtttctctttcaggcatcgactctttta

SEQ ID NO: 455934 - DNA, 122 bp, Homo sapiens
ccagcgagtccccagcgcaagtgcaggcggccgcgcagggcgcccgcgggccggccgcggcggtcaccggctccagccgaagcaaaagcagccagagaaggagaaggcaaggcgagcggcgc

SEQ ID NO: 455935 - DNA, 122 bp, Homo sapiens
gggggaccaactattcaagcgccaggaaatggcttattaaaaagatccgtcccccaaagacgctgccagaaaaaggggaaacttccatgccgcttctcccaccaaagagcaaagtcagtttc

SEQ ID NO: 455936 - DNA, 122 bp, Homo sapiens
gcggccggggggaggcagaagcgcgtcccgcgggagaggtggctttgaggagtgagctcccggtcccgcggggacgcgagtgggcccagtgcccgggctgccaggcggggcggggcggggcc

SEQ ID NO: 455937 - DNA, 122 bp, Homo sapiens
cctttcctagtcaaagaaaggggtgacagacggcacctggaaaatcgggtcactcccacccgaatactgcacttttctgagggtcttaaaaaacggcgcaccaggagatgatatcccgcacc

SEQ ID NO: 455938 - DNA, 122 bp, Homo sapiens
tccaggctgacagctctgagccctcacactcaccgggcctccccttccccccgggatccccgctccctgcccaactcggcgcggtccgtctaggctttccatacccttcgtctgtccggcgg

SEQ ID NO: 455939 - DNA, 122 bp, Homo sapiens
ggacaacttgcatttgccctgacacccaccctccctgcagctctacaccctcgccgtgatcggcccaggaccgccagattgccagccagcccagatctctcgccgttactcggactttgagc

SEQ ID NO: 455940 - DNA, 122 bp, Homo sapiens
cccacctgacagccgtctgcctgttctacggctcggccatctacacctacctgcagcccgcgcagcgctacaaccaggcacggggcaagttcgtatcgctcttctacaccgtggtcacacct

SEQ ID NO: 455941 - DNA, 122 bp, Homo sapiens
ctgatgcacgtggaacatacaccagcatcgagcacatcctgagccataaaggaaagcccccgtgcattcaaaactccgacccctttcagcgttatgttctctgatcacagtagaattaaact

SEQ ID NO: 455942 - DNA, 122 bp, Homo sapiens
caacctgcagaacccccaggaggcagggattctacatcaaactggccttcccagtggccacgaaggtatacttgtcaagatcagctgataggacatattgtacttaattgtttgttagcttg

SEQ ID NO: 455943 - DNA, 122 bp, Homo sapiens
atctccgctcactgcaacctccgcctcctgggttcaacctatccttccacctcagcttcccgagtagctgggtctacaggcgcatgctgccgcacccggctaatttttgtatttttagtaga

SEQ ID NO: 455944 - DNA, 122 bp, Homo sapiens
agtcatttttccccctttgtcttgacttctaaagtctaaacttctatgggaaacaacccacggtgataagggtagtaagagtaatgctaggagtagtatgatgtcataggtaaaaattagcc

SEQ ID NO: 455945 - DNA, 122 bp, Homo sapiens
ggagccatcaggaagtggctggaggggtacagacggaaggcagttctctccggggaagcgcggagggtgcagaaacgtgtacagcaataaaggccaggagcctcgaaacgctcggaatgttt

SEQ ID NO: 455946 - DNA, 122 bp, Homo sapiens
aatttggggcgcctgtccgtatgcaaggcgttagcgttctgtaagtcaccttggagaatgcgaagaaggacgggatttgtcccctacccatgctgaggttctgactactctggttattcgtc

SEQ ID NO: 455947 - DNA, 122 bp, Homo sapiens
tgcgttttcccggaagggttggggtctcgggatccgagacagagccctgcctgggcccaacgaacgggagggcgctggctggggccgggggtggccagggccccgggggaaaggcggtaagc

SEQ ID NO: 455948 - DNA, 122 bp, Homo sapiens
gtagggcctcctgccagggagccttgtgcatggctgggaggacggcaaggctgatgtggacgcagccccgacgtgaacaggaccccacgtggacgggcagtgacgtgcgtgtggacccgggg

SEQ ID NO: 455949 - DNA, 122 bp, Homo sapiens
actagcggctatcttcgaaatcacctacctattcctgaactgtacatagtacagaaatggcggctttgtggtcaatgccaagcacatttagtcccccaaatcaaaccgcttccaaaacattc

SEQ ID NO: 455950 - DNA, 122 bp, Homo sapiens
tggtgtggaagagcgctgtgagttctgggaagggtggcttagaacctcaccctggttctgcggctcttagcagatgaactacaactcccaaaaggctatgcagcggcgggcccgcggagaaa

SEQ ID NO: 455951 - DNA, 122 bp, Homo sapiens
aaaattgataactagacccgaaggcattctagatttttcatctcagtactctgaaagggtcgtaagcttaatagccttcaagaaaatggctgccctcttgccgcgggagtgtgcggaccaaa

SEQ ID NO: 455952 - DNA, 122 bp, Homo sapiens
ataatctcctgatgcgccattttttaagctcgttggaaaagtgcagtattcgggtgggagcgacccgattttccaggtgccgtctgtcacccctttctttgactcggaaagggaactccctg

SEQ ID NO: 455953 - DNA, 122 bp, Homo sapiens
actcggctgtcggtacccacctgtcagccccacctgcgtgtccccctggaaggcagggcccgagtctcacccactctgcacgtcagggcctcacccagcagcaataaatgtttgttgaatga

SEQ ID NO: 455954 - DNA, 122 bp, Homo sapiens
catggttgagactggaaagcccggagcggccgggccagggaaattcccggagctccagatcgatccggagtcccgaaggaaggcgacggccccgcccccggggtggagtcggatacgggtag

SEQ ID NO: 455955 - DNA, 122 bp, Homo sapiens
ctgcggtcaagtcaacgtccctagcataaagcaacactgccgcaaaggctgctggcccgacggctgctgcagcgcctcctggactgcatctcccgccgcctgcagcccagacacaatttctc

SEQ ID NO: 455956 - DNA, 122 bp, Homo sapiens
tggcagcacatgatgtagtctagtggatttctgacaatccttgttgaaccattattaaaacgttgtgaatctttgagaataacaacacttaaatgtgtactgtaagacttttagcttctatg

SEQ ID NO: 455957 - DNA, 122 bp, Homo sapiens
ggggaggggctgagtctctccgccccagagggggcgggcacactttctgtagagcaacttcgcggacttccggttcaagccggaagttgtggttaccaaggcgacgcaacgccgcccggcca

SEQ ID NO: 455958 - DNA, 122 bp, Homo sapiens
aacaggtgggagaagagggcccgaacgcacgctcctacgcggcggcttgggtttcgcaggcggttggggatcctctgtacatcctttcaggaaccagcccctcgtggggagcgtgcacacgg

SEQ ID NO: 455959 - DNA, 122 bp, Homo sapiens
gatcgcgctctggacgagacctgcgcggctgcaaccgctccttcttcgcgggtggaagcgcggaataagccccgtaaaaccacagaagtgggtgctggagttagaggaccctcaaagaagta

SEQ ID NO: 455960 - DNA, 122 bp, Homo sapiens
tgcaccacggacggtcgctccgacggctaccgctggtgcgccaccaccgccaactacgaccgggacaagctcttcggcttctgcccgacccgaggtacctccaccctgtctaccaggttcag

SEQ ID NO: 455961 - DNA, 122 bp, Homo sapiens
tgaccccttcttcttcccgttgcatcactggtgtgactgatgttaacattattgttgccccgttttacaaatgatgaccctggaaaggcttggagggccctggggctgcctaaggtcatagg

SEQ ID NO: 455962 - DNA, 122 bp, Homo sapiens
catcttttcaggaaggcgagaacaacgacaagttcttcacccaccccaaggatgccaaggcgctggcggcctacctctttgcacacaatcacctcttctacctgatggagctggccacggcc

SEQ ID NO: 455963 - DNA, 122 bp, Homo sapiens
ccgctgcgaaggggccctgaacggccgtcgccctccctacgggcagcccccgggggttggcgaccgaagtctaggttttcgagaagtgagtgtcccccaccccatgaggtttggggggccag

SEQ ID NO: 455964 - DNA, 122 bp, Homo sapiens
ccttacatttggttcacggtggcatctgtgtctcccctactgagtgatctgtgtaccccccgggccctcctgcaagcagaagagtggggctgcggtcaaggggacgccaccgcacggagcac

SEQ ID NO: 455965 - DNA, 122 bp, Homo sapiens
ctcgacctaccctcgccgccctccctccgctgtgatccagagatcttggctttggggaagcgagacccaaagcggggaatgacctgcggggcccgacctgctgtttcccagttgctttgtcc

SEQ ID NO: 455966 - DNA, 122 bp, Homo sapiens
cgccatcctgctcatccgcaacccctacaaagccctcatggctgagttcaaccgcaagtacggcggccacataggctttgctgcgcatgcccactggaagggcaaaggtacagctcgggaga

SEQ ID NO: 455967 - DNA, 122 bp, Homo sapiens
gctgcaaaggtaaacaatgtacagattatgatagagtggaattgacaagctggttaaaaacggatgatgcatttttaattagcctacagtgcctttagttgataaaataattagatactttt

SEQ ID NO: 455968 - DNA, 122 bp, Homo sapiens
ggatgccacacgttaccgagggtcccttttctgtcccaggatcccatttaggatgccacacgttaccgagtgccccttttctgtcccaggatcccatttaggatgccacacgttaccgagtg

SEQ ID NO: 455969 - DNA, 122 bp, Homo sapiens
ggctgtagggaccgacggccggccagctaatgcttccgtcttggccaccttgcgagcgctcgggttgagtttcccgggcttccctgactcggctacctgttctggaggtcaggctttgggcc

SEQ ID NO: 455970 - DNA, 122 bp, Homo sapiens
tgggtgggatcctgggggcagggcttccctgagtgcagacagctaggcctccacctgccccggcctcccacccaggctcagatttccagggcataaggctccattgtcccagcactggtgga

SEQ ID NO: 455971 - DNA, 122 bp, Homo sapiens
ggagcgcgcacacagatccggagcgcgacggactctcccactgactggcacttgcgcatgcgctgcctgtgatcttggagtactgattataagctgttttaagcgattcccttaagccgcgc

SEQ ID NO: 455972 - DNA, 122 bp, Homo sapiens
tctgcgcctccgtgcctccgcgcctccgcgcctccgcgcctccgtgcctccgcgcctccgcgccacctcaactccctggaggcggtgaaatgcaagatccaggcccctgcagtagcaggcgg

SEQ ID NO: 455973 - DNA, 122 bp, Homo sapiens
ctgcggggtccctggagttccctggcggggcctggtagcggaagacctttccctctgaggcgcccctctgttctctgggggcggccacactgtggggtcgggcaggtcgcacccttccccca

SEQ ID NO: 455974 - DNA, 122 bp, Homo sapiens
atgttttatgaatcatggtttggctgttttgaagatttagagggggtctctgtagtctttcgcttggagttgcaattttaagaaagtggaaattttgtgctgtcagttggctggggcaatag

SEQ ID NO: 455975 - DNA, 122 bp, Homo sapiens
aagggcacgtaagagttggaggtgacctccgggagcgcctaattttgagccgcggaacttcggcccacttctccgaggggaccaggcgcgcgccaatacgcatgtgcgggctctgagcgctc

SEQ ID NO: 455976 - DNA, 122 bp, Homo sapiens
ctgggtcctcaccgtctgctcgccagtcttctcctttgaggactcagaagccaagggttgcgggaggcaccacccatccagcaagtcaggcaaggagaggaggtgttggaagaggtccgcat

SEQ ID NO: 455977 - DNA, 122 bp, Homo sapiens
ggcccagcaaaaggagctgggtcccgtgcagcacagcaacaagaaactggcctaggaagacgctggagcgtctttctttcgcacgttactgcctgctacagtcatttaaaaaaaaaaaacca

SEQ ID NO: 455978 - DNA, 122 bp, Homo sapiens
cttaattcatgcttgaaggacataacaattaatagacacgcaagcctgtaccgacgctcacgcccgtaccgacgctcacgcccgtaccgacgctcacgcccgtaccgacgctcacgcccgta

SEQ ID NO: 455979 - DNA, 122 bp, Homo sapiens
agtttgacgttttgaaattcagacctaaaccaggtctttgacatttgatacggtttggatcgtatccctgcccacgtcccacgtggacgtggaatctccagcgttgaaggcggggcctggtg

SEQ ID NO: 455980 - DNA, 122 bp, Homo sapiens
tccagctcctggattcctccatgcagggcctgagaagccctgagggataaaagattaatccggttcagtggactctgtggttcctcaactccaagtgcccccagcataagtcggacctgcct

SEQ ID NO: 455981 - DNA, 122 bp, Homo sapiens
attccaggaatgtggcaaaatgcaagtctgatagttttcgtgtcttcatggagcagcttccgtcggctgccttcgttagcgtttagatctactcggattagcagttggcttgccctgaaaaa

SEQ ID NO: 455982 - DNA, 122 bp, Homo sapiens
aactctcaggagcacggggctcacaaacaccatcccatcgaagaggcagctgaggaacaccgggtaagagatagctctgtgatcacctgaaagctggagggtggcagagttaaagatattag

SEQ ID NO: 455983 - DNA, 122 bp, Homo sapiens
aggggaaaggcactgacggatggggctgagccagggagcagccatttagtgctgcccacccgactataacaggctgtcactgggtgtgacaggcagtatgagacattgtaggaaactgagaa

SEQ ID NO: 455984 - DNA, 122 bp, Homo sapiens
agcagcgtccacagcacaccgagacgctccatcagggcccccacagccggcagcttcgcccgcaccagctccccgaggacctcctggtcggtcttcaggcccagcatggccgggctgtagta

SEQ ID NO: 455985 - DNA, 122 bp, Homo sapiens
aagttcgccctcctctctgcaaattctcatttccttctgggttgacaagttgctagccatcggccctgggatggctcccacagggagcgaaggggccgcctctcggttgatgcctccatcat

SEQ ID NO: 455986 - DNA, 122 bp, Homo sapiens
tatacccctagcacttactgttttatttctcctgttctagaatctctgtccacttaaggtcgtctctgtggggagttaaggggagagatggaaaaaataaaaataaataattagaggagatc

SEQ ID NO: 455987 - DNA, 122 bp, Homo sapiens
ggcaccgcggagcaaggtaagatccagcccccggcggatgggccctgcgcatctccacgacgttatttggcgtttttgcaacagatctgccagcgctcttcgctccctcgctctctcttgct

SEQ ID NO: 455988 - DNA, 122 bp, Homo sapiens
caaccttgttgttgcctcttgggtccttcacttccttccctcttcactcaataccaggaccgttgtgcagttggaaactgtccacccagggaagcctgttcctggggaaaggattgggtagt

SEQ ID NO: 455989 - DNA, 122 bp, Homo sapiens
tgagcggcggcctccccacacccctttcagcgccaggagtctgggctccgcctgccttcgcggggagtaatttattcatggtgactccctcaggagtaacaatcatccataattagggttaa

SEQ ID NO: 455990 - DNA, 122 bp, Homo sapiens
caaaagctatactgatctgtaactaatctttaacattaaccctatggaaatatctgtaagcgcctaaatggcccacacagtttagtcagttgcagatcctatccactttaagatcatatttg

SEQ ID NO: 455991 - DNA, 122 bp, Homo sapiens
tctgtagtttgtagtttgctcgtgtttgcatggaactcatggcagagttttcccttggcccgtgtactcgctgcttagggctatcgtaacaaattaccacaaagcgggggtcttaaaacaac

SEQ ID NO: 455992 - DNA, 122 bp, Homo sapiens
taacattactacacatttgattccaaacgcttcaggcaattgtttaacactcggtcaggacgtggaatactcaatagggaagcctcgcgtccacccaaaggctctacgagcgtctatggttc

SEQ ID NO: 455993 - DNA, 122 bp, Homo sapiens
gacgggcacaccccggagcgtcggcgactgcggacaggttagagtgggggcaggggcgggcgcgggagcagcccagggccagagagggagcccgagccaggccatctccaaccatgtccgac

SEQ ID NO: 455994 - DNA, 122 bp, Homo sapiens
agcgaggatcgcccaccagtacttcgcccaactctcggccctgcaaaggcagcgcacctacgacttctactacatggattacctgatgttcaactattccaagccctttgcagatctgtact

SEQ ID NO: 455995 - DNA, 122 bp, Homo sapiens
ccgccctcctcccgcacgtgtcggccggcgccattcagtccccgccccctcggcgggtcgcgccccgcccccgagcccccagccccgccgctccgggccctagcgccccctaccccgccagg

SEQ ID NO: 455996 - DNA, 122 bp, Homo sapiens
accccggacggcgagaagcagccgcagctgatcgtgaagggggcgctggaccgcgagcagcgcgactcctacgagctgaccctgcgagtgcgcgacggcggcgacccgcctcgctcctcgca

SEQ ID NO: 455997 - DNA, 122 bp, Homo sapiens
ttacttttcctgactctaagcttacccagtgggaaaaatcttttctcagggagtgtttgtcgaaatggaatgattatgcatacagcaagtatttaaccagcctctagctatggaatacaatt

SEQ ID NO: 455998 - DNA, 122 bp, Homo sapiens
cggggggcgggcgcttgggcttgggccctgcgtcctgtgcgtgttggtttcctgtgggcacgtggggccctcggaagaggggaggagggtgagcacgtcctcagagggcagacccagcgagg

SEQ ID NO: 455999 - DNA, 122 bp, Homo sapiens
tttgtgccttccaaatgactcccttcctccagcaatcacagccgcaacagccatgtattgcgcccccgccctaggccaggcgtgggcatcacctttgcactcctttctgcagccgtgtgtgg

SEQ ID NO: 456000 - DNA, 122 bp, Homo sapiens
aataataataatgataatcataataaatccctgtaaaatagacagaggtatgccttatgccgttttctcttgaagctgaggaaataagacaaaagagatcaaaatgttttttctaagagccc

SEQ ID NO: 456001 - DNA, 122 bp, Homo sapiens
aaatctaaaaactgtcctctgttctgacgttgttagcgaggggaatgggagccttagcttcgttttcctgaggaaactgagtgccggctttctggacaggcagcctggctgcttggttgaag

SEQ ID NO: 456002 - DNA, 122 bp, Homo sapiens
gaccctccgctgtttcttccgcgagcttcctcccccgatttccatctcaggcagcggcagcggcagcgacagcctgcctaccccaggactccagcctcacctggcttctgcctcaactccgc

SEQ ID NO: 456003 - DNA, 122 bp, Homo sapiens
tcagggagcggcggctgcggtggggccgccgaggagctgctggcgacagtcaggcgggcgcgtacgggcccctagccttcacttcgcacaatggcgggaaatagccgccgccgaccgcgctg

SEQ ID NO: 456004 - DNA, 122 bp, Homo sapiens
ctcgcatccgttcgggcgcggtgtaaactccacgcctgagctccacgagacacggcggggcggagggaggagggagagaccagtccacacacaggcgtaccttattatatagaatttgtaca

SEQ ID NO: 456005 - DNA, 122 bp, Homo sapiens
agattgccctcattgccctcttctctgagatgctctatcggttccccaacatggtggtggcgcaggtgacccgggagagtgtgcagcaggcaatcgccagtggcatcacagcccagcaggta

SEQ ID NO: 456006 - DNA, 122 bp, Homo sapiens
gaactccatctggccaattagaagtcagaacagtaggcggaacaagcgaagctgatgtggcgtctgtcagtccaggctctagggacagaaccttcccaaggcgggggggaggggagactctg

SEQ ID NO: 456007 - DNA, 122 bp, Homo sapiens
attaagatactttccccacgctcctctgggtcctggagctagaggatcaggatccaggatcgtaggaaaaggatgtttatacaacacttctggcagaaaagacattttttttccttgcacgc

SEQ ID NO: 456008 - DNA, 122 bp, Homo sapiens
tggcttaagtaaaagtgataaatagaaaaagctcacttttttttttttttttttttgagacggagtcttgctctgtctcccaggctctactacagtggcgtgatctcggctcactgcaagct

SEQ ID NO: 456009 - DNA, 122 bp, Homo sapiens
ggcctacagccccggctacttcgtggtggacattgtggcccgagacctggcaggccacaacgacacggccatcatcggcatctacatcctgagggacgaccagcgcgtcaagatcgtcatta

SEQ ID NO: 456010 - DNA, 122 bp, Homo sapiens
ggcctccaaccccttccaggcactgtccccaaaatgcaggttcactggagagacatcaggcgcctgaagatactggggtgctccggctaccaacctccgatctcatccttcgcccccacgtc

SEQ ID NO: 456011 - DNA, 122 bp, Homo sapiens
gccaaggaaaattacggtagggaatgtacaaatggccctgtcctattccagattctttcccgattttacaaccagtttgtttcatttgtttataagtcagagaacctatattaagaacccct

SEQ ID NO: 456012 - DNA, 122 bp, Homo sapiens
actgtggttgctcagaggcagttccatccgaagacagcagtggctacgcagcttctaccacgggagaattgtgggcccaacactaccaagttttcctttttccagaaagacataatccagat

SEQ ID NO: 456013 - DNA, 122 bp, Homo sapiens
tgcacggcctgagcagagttcctcatgtggatgcagcggcatggctgtcgggagggacagcggcgtggccatcgggagccctggtagcagggaggaactgagacaagtccgtatttgtgatt

SEQ ID NO: 456014 - DNA, 122 bp, Homo sapiens
gtattttatttcacaggttctttccacatcccagtatttactactaactacaaatatgttcgtttttcacctttacatttgacttaagagatattgcactattctgtaaaactgctggaatt

SEQ ID NO: 456015 - DNA, 122 bp, Homo sapiens
aggccacatctggggaccatatggggagtggggggtgcagggggttgggaggaatgaaatcgaagtggggactgtaagtgcagacaagtttagttgtagaaaagggaggtgaccgctggagg

SEQ ID NO: 456016 - DNA, 122 bp, Homo sapiens
gggctccagctgtgattgacgctgggcggcgagaggaggcgcctggcgctaacaaaagtccggcccgcgggcgagctgcgccgggtcgctagtcttcactcgctccggggacccgcaacaag

SEQ ID NO: 456017 - DNA, 122 bp, Homo sapiens
tggatgaaaccccgaataacccataggacatgttttggagcgaaaggccttccgaaactgcgggctttaagatcttgttcagagagcatgctctttgcagggacgtggttggagctggagtt

SEQ ID NO: 456018 - DNA, 122 bp, Homo sapiens
ggagcggtggcgacctcagcctgagcagaggagttgcagtgattcctgcctcgctttcagcggactgcggagggaatcccccaccccaccccactggggatagggtggcacgtcgcagagtg

SEQ ID NO: 456019 - DNA, 122 bp, Homo sapiens
agtcttcgacctgctgatccttggatcctgaatctgtgcaaacagtaacgtgtgcgcacgcgcagcggggtggggggggagagagagttttaacaatccattcacaagcctcctgtacctca

SEQ ID NO: 456020 - DNA, 122 bp, Homo sapiens
aggggggcctgatcttggagggcagctggctgcctctgccacatggacaatctttgttttcgaattgttgcttgtcagtgtacacctaagttaccttctaagtatctcaggtgtctgctaac

SEQ ID NO: 456021 - DNA, 122 bp, Homo sapiens
ttggcactttcttttctcaaatatttttacttaatctcgtggctcaggtcagcagcagcccgcagaactgtggccacagctggagctcccgccttgctgaccacttcccctgtcacaggagt

SEQ ID NO: 456022 - DNA, 122 bp, Homo sapiens
gtccggtcccgattggcagaaaacgatacgagggcggtatacactcaacacgcgcatgaacgattcatcaagccctccgtgtgccgggtctggctcaccaacctcatcctctgagctccggg

SEQ ID NO: 456023 - DNA, 122 bp, Homo sapiens
gccctgccggtcccacccccgccccacccctcacctctgctgtacttgggaacaaagccacgtataagaaaaaaaagagcgacttagcctgcatatggatatccagggatatgtctgttttc

SEQ ID NO: 456024 - DNA, 122 bp, Homo sapiens
atgccaagactctcaggtgggaattcttgtcacagccaagaggttgctggcataggcacccgaggctggcagagcctagcctctgagtctccctacactcctgggcttgctttcctttttga

SEQ ID NO: 456025 - DNA, 122 bp, Homo sapiens
cttcgacgtgccaggtgtgcctccggagagcagccaccaaaaccaccagcagcccgtccgcgccgggaaatgcgccctcgctggcttacggggccactcagacagttctaagtgcctttccc

SEQ ID NO: 456026 - DNA, 122 bp, Homo sapiens
ggtcagtccaggctcctgactcaaaatgcagccaagggagaagctcagaggccagcacaccgagccagcgcctccctctgacctggcaggcataagggtatttctgccacaatgagcaccca

SEQ ID NO: 456027 - DNA, 122 bp, Homo sapiens
atataacatctgataacattactggcagaaaccatcttttcatctacctatagcttgcttcgctcagcactaggcaggagtttgaatgtggattttaagtgttaccaagttgtgagaccttc

SEQ ID NO: 456028 - DNA, 122 bp, Homo sapiens
cacctcaccggttccgctccgcccggcccagccatggggcccgcgccgaccgctggggggcgcctggctctgtctcggagccccgcactccccggacccccggccgctgcgggtaacgcggc

SEQ ID NO: 456029 - DNA, 122 bp, Homo sapiens
ggacacgctgaggctatactacaaagccccgggcttgaccttagtggaaagccgagactgcgtccaggttgctggactacaccgggggcacggtcagaggtctttaggggagggcggcggtc

SEQ ID NO: 456030 - DNA, 122 bp, Homo sapiens
tgaggagggaccgagcacgccctctccggttcacgctgcgcgcctcctccaggcggacaacgcaggcggccggttttgaactttccgggtgcgaacctcccaaggcttcagccaggtcactc

SEQ ID NO: 456031 - DNA, 122 bp, Homo sapiens
gctaggccgcgagagcgaggttaggagaggagaggaggccgcagtactgctcacacgctccgctcttctcccactctcgactctgcagagccgccagcagccccgcaccctttatccgcggc

SEQ ID NO: 456032 - DNA, 122 bp, Homo sapiens
tggcctgggcacacccctaactcgcagtccgggcctcttcctgccaaaccccacacaccccgctgcatctccggactgagtcctcgtagccagcctggcgccaagaaaaggaggtgcagttc

SEQ ID NO: 456033 - DNA, 122 bp, Homo sapiens
catcgccccgcctccgccacgctatataggtcccagatctgatttggttttccaatgaggcggggcgttgagcaaccctctttgcctccagttgtcgtggcttcgtggggccaaccattttc

SEQ ID NO: 456034 - DNA, 122 bp, Homo sapiens
aaactccctagcacaggttcccatctagtgtctgcccacagcccagcctcactgtcatgacgcacactctgtgtgatccaggaactacttgcagctccctgcaatgtctgtgcagcttctga

SEQ ID NO: 456035 - DNA, 122 bp, Homo sapiens
acacagcggggccgatgggggcgcgcgagggaagggcacacagcggggccgatgggggcgcgcgagggaagggcacacaggggggccgaagggggcgcgcgagggaaggcagacgaccctgg

SEQ ID NO: 456036 - DNA, 122 bp, Homo sapiens
gccagaggccagagtctcgctggatactgccttggctcccatacaatgtgtggtctttagcgaatggcttctttgactcagcgcaatgtttttcaggttcatccccattatagcaccatttc

SEQ ID NO: 456037 - DNA, 122 bp, Homo sapiens
ggaggtagccgcaaactctcgcaggtggcagtgacaccagtacttctccggggggttgttcgagtggaggaatactcttacgtgaaagtgctcagtacaccactgcggcaggaaggaggaag

SEQ ID NO: 456038 - DNA, 122 bp, Homo sapiens
catgatctgcctgcctcggcctcccacagtgctgggattacaggcatgagccactgcacccggctgggactttcaaagtcaccttagtgagcgtctgttggttttgcctttgcagggttcag

SEQ ID NO: 456039 - DNA, 122 bp, Homo sapiens
gaagggtccctgccgcagtgcggggcctgagggaagtcggctctggcgtccgtgctccaacgctgggagcagccctgaaactccagtgaccctcagccgtctgcctttgttttgggataaat

SEQ ID NO: 456040 - DNA, 122 bp, Homo sapiens
cctcattagagaaggcgtgattgtgcacttgcccaaagcttcatcaccgaggagtgatatcggaggcttcacattccatgggaaatagactttgataaattgcttagccaagtcactaaaca

SEQ ID NO: 456041 - DNA, 122 bp, Homo sapiens
ggggatcatacagggcagcggcgagcagaggttgagcagtttcttgccctggctgccgtccgcctctagcgctccaggccggggctcaaagggcgcacggggctccgacgtcttggccatga

SEQ ID NO: 456042 - DNA, 122 bp, Homo sapiens
gtgagccactgtgcccaagtggctcttaaatcagacttctgagtccaaagctagcttcttcgactaagttatacagatggctttagggaggttcctcaccctctggggcctcggtttcctta

SEQ ID NO: 456043 - DNA, 122 bp, Homo sapiens
ggagggcgccaggcctggggcattaaccgtcccggggacccttttggcctgaggagcctgcgacctgggcccagctcggtgtcggctccggaccgcagctcctgggcgctgaggcgggaggg

SEQ ID NO: 456044 - DNA, 122 bp, Homo sapiens
ttctttttataaccctggcaaaagtaatggaggtgacattttattagcattggcatctcccgcttacaatgggagctagttcagccttgttgagccgtgtccagagctggtagcttcatttc

SEQ ID NO: 456045 - DNA, 122 bp, Homo sapiens
aacagttcctcctttgcagcctgggaccccagcctaggcccaaccagcgttggtaccaggcggtgtgtgctgcgcctaggcactcttgggagaggggtctcctgtttctgatcgctaagagc

SEQ ID NO: 456046 - DNA, 122 bp, Homo sapiens
atatatctcctggtgggcctgggagttaagactgttctaggtggagagatatcgagatagcgaagtccagaaaatattcacagagttcttcagaaagctagaggatggggtgcaggagggct

SEQ ID NO: 456047 - DNA, 122 bp, Homo sapiens
ttcttggtacagaacagaagccacacaccagcgacaatcagaggttacataggcttggggcgtagcttttctgatcagatgagtttcacggctttagtacagaaaatattcaaagccagtgc

SEQ ID NO: 456048 - DNA, 122 bp, Homo sapiens
tccacagccctccccctccccagtaaacagcaacaaccgtgctgatggcgggacttggcacgagctccccgccaagcattatcagacaccccagacgttggaggctgctatcaggtgggggc

SEQ ID NO: 456049 - DNA, 122 bp, Homo sapiens
tcctccctttgaacttttgttcctgctcttcccaggtctggaattccctttccaggcttacgcttcatttctcaaggtcccctctggcaaggcccctggaatcctccctcaggcccctcctc

SEQ ID NO: 456050 - DNA, 122 bp, Homo sapiens
aatatcatattaagcgctgtttctattgcacgactattcttcatatttaccactggagggcgcacagaactcgtagtatactagataagaggtcatgaagaaaccacctgagcgtttctgca

SEQ ID NO: 456051 - DNA, 122 bp, Homo sapiens
caaggatattgtaaaaagggtctaaatgcactttgactcatgtctgtgatgttgcaaaagcgcatcaactatcgagggactgctttgaagggaaacggtcatttgactacatttgctctgct

SEQ ID NO: 456052 - DNA, 122 bp, Homo sapiens
gagcaggagctcacaggcgactgacagggcagcgaggccagggagcggcccagggtggaccgcggatgggttctagaagttctgggcaggttctagaaggggctgctctgttgaccacctct

SEQ ID NO: 456053 - DNA, 122 bp, Homo sapiens
aggtaacaacctgtgctaacctggtttccagcgaaaaggccaaaagtgtactgataacttcggcttcagctgagactgggataacccgcttgagccagtgccaaattccacccatccggcgc

SEQ ID NO: 456054 - DNA, 122 bp, Homo sapiens
ttggtcactggtgcatcccagcacctggtgtgtgttggggggtggggggtccttcccccccgctgtctgtcccagtgcaaaaaagaaagagggaaagactgggccaccggaggccagacagg

SEQ ID NO: 456055 - DNA, 122 bp, Homo sapiens
taagagcattttattagtttcaggccaggcattgtggctcacacctgtaatctcagcattcggggaggtcaaggcaggaggatcacttgaagccaggagttcaagaccagcctgggcaacaa

SEQ ID NO: 456056 - DNA, 122 bp, Homo sapiens
cctggcagaggctcccagcccgagggtgagcctaaggatccctccccgccgtgcctcaggcgccccgcccactcctgctaaatggctggggccaagccctgaatctcctccctacccgtggg

SEQ ID NO: 456057 - DNA, 122 bp, Homo sapiens
agaaaatacgagatcaagattcaagtccagactgaaggacgactttccaggcctgaagagcgaagggaccctctgcttgggctgcgctgaaagaattttaaaaatgtgactgcaggctaatc

SEQ ID NO: 456058 - DNA, 122 bp, Homo sapiens
gtgttgggggtggcagcctcaagcaattccttattttgaggctgagaatgacagttgatgcgactaaaactcagaaatgggctagatcagcaggatcttgtatgtcacactaagaagcttga

SEQ ID NO: 456059 - DNA, 122 bp, Homo sapiens
caccacacctgcgctggccagggcctgcacgtagcccgacaccgccgatgccagggcgcccgtggcctcatccgccacttccaggaaacctgccagggagggagaaaggtgaggcctagctc

SEQ ID NO: 456060 - DNA, 122 bp, Homo sapiens
ggtcttgctctgtcacccaggctggagtgcagtggccccatctcggctcactgcaacctccgcctcccagtttcaagcgattctgcctcagccacccgagtagctgggactacaggtgcgtg

SEQ ID NO: 456061 - DNA, 122 bp, Homo sapiens
acgccggccccaagcaccccgggtctttacacagtccgcgtccacagactctgacgaagacgtggatctgctctcgctttagctgctcgcggtcctccagatcatgtccgcgactcctgcga

SEQ ID NO: 456062 - DNA, 122 bp, Homo sapiens
ctgggggcagggcagagaggtgggcggcagttggggtgcggtgattgtagtaggctagggcgctttcgggtccccattgcagcccccggatgagcccgcagtattttccttatatgatcagg

SEQ ID NO: 456063 - DNA, 122 bp, Homo sapiens
accggaaccggcagtggcttgggggcgggacctcgcggactgctgtggcggcagctggagcggcggccgcggtggcagaaccgggggcggccgctgcagtctggagccccatagtgcggggc

SEQ ID NO: 456064 - DNA, 122 bp, Homo sapiens
ttggaagcccccacctccaccacagcactattggtggccggggtcagggacaccagagagcgctcggcgggggcttccacagtgacagggcgccccctgtcggccgccaggcccgcgggacc

SEQ ID NO: 456065 - DNA, 122 bp, Homo sapiens
catacttatgaagagaaaacccagctccctaactccctttcatgtgaacctgcactccagcgatctccccagaaggtccccagcaccatacgctgctgaaggggtttccattcaagtgtggg

SEQ ID NO: 456066 - DNA, 122 bp, Homo sapiens
acctccatccgaatcagccaataggaattcccggcttgggcctccgcccgacccggaccacgcgggagccggggcaatcaaactacatttcccgacacgcatgtgctcgcgtcgtggccaat

SEQ ID NO: 456067 - DNA, 122 bp, Homo sapiens
cgttgttggttttctcgttgtttggctcctgaaagtaacgataaataattgcatttagtgcgatcggtgtcaggcgcggccaccacgctcggtccccctccgcgaccgaggctctcggcctc

SEQ ID NO: 456068 - DNA, 122 bp, Homo sapiens
tccggctccgccccttgctggaaaggctacgtattcagccctggaggtgccatcccgggccgcgactccgctccaggcaggacccccaacccgcccagcccgctccgccttgcgccccggac

SEQ ID NO: 456069 - DNA, 122 bp, Homo sapiens
atgtttgcttttgttgtcattcgggtcctaaatctcccagtttgctcctgccctgcttttcgttcactctccctgccttactatctcattctgtagagagcccttctcaaatctctgtcaat

SEQ ID NO: 456070 - DNA, 122 bp, Homo sapiens
ggggccagggcctgtggttaagtcagtggccctctgcagacgcgcacgcagcaggagccacgccctggtccctgcccgggagtggcctggtctcccccagctctgattccctgaaggaccct

SEQ ID NO: 456071 - DNA, 122 bp, Homo sapiens
tgtcggtattctcggagtagcatcatgtcttgtactgttccatgggtgaaggctctaacacggccctgtaaaaactgggtaaggagatgtaagagacatgggccaagtgctaaatggaggaa

SEQ ID NO: 456072 - DNA, 122 bp, Homo sapiens
acaactttcacatgcttgctttatggccttaactaactgatgtcattacttaactgtccccgcggggacggggaactgaatgtattttcacaaacgtcagttcaagacagatttgtgggaga

SEQ ID NO: 456073 - DNA, 122 bp, Homo sapiens
cgagctcaaagtgggagggcaggagagctcgctttttaaaagatcgacagcgccatctaccggtaagagcgcccaactcccttgctaaggatgatatcattatgctagggtgatagtagcaa

SEQ ID NO: 456074 - DNA, 122 bp, Homo sapiens
agcactgtgtctgagggcagtggcaacagcaacaatccggtctcggagtcgcacacgcagcgctccctgagctgctggtaggtcacctggtcccgcgcactggggtcaaagaagaacttgtt

SEQ ID NO: 456075 - DNA, 122 bp, Homo sapiens
aacgtgctggccagtcagcgtccatcacgatcacgtcaggccatgctcccaccagcagggcgtgaaagcgaccagctcacttcccgacataagcgtgatctattttaatcttcatagatttg

SEQ ID NO: 456076 - DNA, 122 bp, Homo sapiens
cacttttcacttcatgaacaaccacagcatgcacagtactgttctttgctagcctagtcacgtatcccctcaaaaccctctctgaaattgggggatggttaccagctggtggtaaaagtaca

SEQ ID NO: 456077 - DNA, 122 bp, Homo sapiens
accatgaaccctggctacgcgggccggtctaaccttcctgacaacttgaagaagctgttccggagcttggccatgaccaagcccgaccggcagttaatcgcccaggtcatgctgtactcaca

SEQ ID NO: 456078 - DNA, 122 bp, Homo sapiens
ggtgaggaagctgaggcgcagagcacagagcagcaaacagggaccggcccgaggtcaccccgcaccccagggcggggcccggaggcccaaccccggctctgcaccgcccagcctgggcgcct

SEQ ID NO: 456079 - DNA, 122 bp, Homo sapiens
tcatacagtgtttccaaatcctcagggtagacgtgtgagcttagtaaatgagaggaatagcggacgaacctctccgtgtgtttgtgtctcgagtgccctcatctcaggagcaattttaataa

SEQ ID NO: 456080 - DNA, 122 bp, Homo sapiens
gtgagatctggggtagaggcaggtcccaggctctgacctggggtgtggggcactgtaggccgttctcagcaactgagatgatgttgctggacaggatgcagctgaagatgttgaagtacagg

SEQ ID NO: 456081 - DNA, 122 bp, Homo sapiens
actaaaccggatgtgacgttgacctaccttagtcacattgttagggaaggaagtgtgccgcgcctacctatctgccccgccttgagtctcagccagtcggcgtctccatcctggcgccagca

SEQ ID NO: 456082 - DNA, 122 bp, Homo sapiens
cattactgcagtcacgctgggatctcgaatagtttcccattaggtgaacgcactctaaaacgtcgcccgaagtttggtgtcatactgaagctctcgggagctacctggaagatttcagagga

SEQ ID NO: 456083 - DNA, 122 bp, Homo sapiens
actgtttttctcatctatgttatgaagataataattccggccctaaccgtagtatgcttgcgagaatccaacaatatgatgtttctgaaagcgccggctgaactaagagcgcgtgaaataga

SEQ ID NO: 456084 - DNA, 122 bp, Homo sapiens
gaggagagtgaattgttatgggccttggctgactctggagtagcagctgctagcactgtgcggtcaccaagcaggggaggggctgtggctctgctataaatagtgctgggagccagagtcgc

SEQ ID NO: 456085 - DNA, 122 bp, Homo sapiens
tgcaacaaatgttaccacagctatggagaaatcaacagggtgataagggaatccgggatccgcagttgagggaatgggttgtcaagccagacttatgggtcaggagccccctctactgttta

SEQ ID NO: 456086 - DNA, 122 bp, Homo sapiens
ttgcgcggcggtggcggcggcggccaagagcaggcaaacccggctccgccaggggcgcagcgaggaaatggcctcctggcgcacaccccgccgccgccgccagccatcgccaccgccccggg

SEQ ID NO: 456087 - DNA, 122 bp, Homo sapiens
aggggtcagggagttccctttccgagtcaaagaaaggggtgacggacgcacctggaaaatcgggtcactcccacccgaatattgcgcttttcagaccggattaagaaacggcgcaccacgag

SEQ ID NO: 456088 - DNA, 122 bp, Homo sapiens
cccttcctcccccttttttttctcccccgcttcccagaccctcgtcccctccccgcaacccgagtgcggctaattccgggcgtctatattcactcaattagagaaatctacagagaagatcg

SEQ ID NO: 456089 - DNA, 122 bp, Homo sapiens
caattagtttattgcctcataggacacatcagcatggtaaagtgatcacaggccattaagcgtaggggtgaaaactgtataaggaattattcctcttaaacatctatgtagagtcttgggtc

SEQ ID NO: 456090 - DNA, 122 bp, Homo sapiens
gccacgcgcgccaccatcttcgcgaggcgccccgccctgccaaacaggtcgccgggaaggcgagttccaggccatccgattcaggcccacatccacgaggctaaaactactaatcccagagg

SEQ ID NO: 456091 - DNA, 122 bp, Homo sapiens
tgatatagtaatgatagactattcaatatgtggtattggacagctgtttatatatttgtacgaacctaagttagattctgtggtggttcaaaaatatatcctctaattatgacctgcttccc

SEQ ID NO: 456092 - DNA, 122 bp, Homo sapiens
aagatcagcatccggtcaagcggctgtgcagccgagaagcaacccgggactgcaagtctgcgtggcggggacggcgcaaccactcaccggcatgactgaggcagcggcggtgtggcggcggt

SEQ ID NO: 456093 - DNA, 122 bp, Homo sapiens
gggaggaagacctttgttttgacagaaatcagctctggccacacgataggcagtcagggtcggaggttgattgatcagtggttgagaggctgcctgacaactcaccaaaggaagagcaaagg

SEQ ID NO: 456094 - DNA, 122 bp, Homo sapiens
aggtttcagccaccacttaacaacctgcagaatcccaaacaatcataacaatagctaacacgcaccgagcatggctcattcaatcctcaccaacctaatgcactccacgctacagaggagga

SEQ ID NO: 456095 - DNA, 122 bp, Homo sapiens
gctttaattgagccaagatgagtggaccgtataatccatttctggattctcgtaagagaacgtcttgtgttggggtgaactcatcagcttttcgggttgagaggagttttagtgtctgtggc

SEQ ID NO: 456096 - DNA, 122 bp, Homo sapiens
cccttcttcctgctggactagcctgagacgatgcgaggctatcgctgccgcagtaccgggcggagggcctgtctgagagggagccaacctcgaggaaactgggtcaacaatggacaacgaga

SEQ ID NO: 456097 - DNA, 122 bp, Homo sapiens
gcctgttccggcaactgttataaagcaggccaaagccacgtcacgtccaattaatgtcaacgaggaacatctgtatttaggcacccacgttccttaatgcaaacatttcgtaattacagcct

SEQ ID NO: 456098 - DNA, 122 bp, Homo sapiens
ctttgggtcaatgcacactcactcccatctcctacaacctgtggctgcagtactcactaccggccagttgcaatccaagatcggaatgttgagtctgacatgctgcgacgtttataaccatc

SEQ ID NO: 456099 - DNA, 122 bp, Homo sapiens
gctggtttgcccagggctgtttcagtcaagctccggggaaggtttctaagttgcctggaccgtttctgtggatatatgtgctgctctcctctggctgctgcctctgcaccactcatcattat

SEQ ID NO: 456100 - DNA, 122 bp, Homo sapiens
aggacctaggggccttgtgaagtgaaccaagtcaacacttggctctcacctctgcaccttcgactgctgggggtgcagaagggatggggcagtggtgcaggccattgtagctcagggtggtg

SEQ ID NO: 456101 - DNA, 122 bp, Homo sapiens
ggcctgaagtccccgcggctggtcgcccccgtcccgcccggagcagccccggccaatggccgccttagcagcagcagtggctccgccagtgaccgcacgtcctccaaccccttcagcggccg

SEQ ID NO: 456102 - DNA, 122 bp, Homo sapiens
tacagtcttcagtgcagtcacacgctgtgcaggtgcagcctgggagcaggaggcctatgccgttcggcccaggcgtgtaggggcgacgccatccgggtctgcgttcagcccaggcgcgtaag

SEQ ID NO: 456103 - DNA, 122 bp, Homo sapiens
cctcccagctccccagccgcctggcaagaccccgcgtattgataggcttccaccgcccgccgggccccgcctcctactgctccattgggtccttctgcaggctctgccacgcccccaggcac

SEQ ID NO: 456104 - DNA, 122 bp, Homo sapiens
ccttccatttgatgtgctctgtgcagggaggggctgagaggggccccatgatctctgctgcgtgcatgttctcctctgtggagatgagcctaggatccagaagcttccagagcacggctgtc

SEQ ID NO: 456105 - DNA, 122 bp, Homo sapiens
cacaggctctgcgctcctctctctccggagcgtcctctcctctgtgtggcaggctcggcgcgtgatggaggagccccttctgcagggctctgtttagagggtgcccgccccacagcctgtgg

SEQ ID NO: 456106 - DNA, 122 bp, Homo sapiens
ccagtgcagggtgcgcgctgccggacctcgccaggcctccatcggagctgtcgccaccgccgtcgccgccactgcctcgcccaggaggctgcaaagccctcgcgcccaccctgaggccccag

SEQ ID NO: 456107 - DNA, 122 bp, Homo sapiens
aacagctagcgccgggaggcaggaagccgatcgggggcggggatcgaaggcctcagacgtcgacgccggcgtgggcgcgagcacggtgcactctgggagctgtcactaggcccttcggctcc

SEQ ID NO: 456108 - DNA, 122 bp, Homo sapiens
cagagcagagggtctgggaagcctccatgcgctgggtgttaacccttagttcctgggtggcgaggggacctggagcttcctggaacaggggctggcagcagcaggccctcacacttctccgg

SEQ ID NO: 456109 - DNA, 122 bp, Homo sapiens
cgcacccggttcccgcggggctgggctgcctcaggcgatggcccggcctgtggctgggcccgcactgcctttggtttgttggattttgcgatatttaccataataattaatttgccgccatt

SEQ ID NO: 456110 - DNA, 122 bp, Homo sapiens
agggctatttttgaggagattgcagacgatctgatgaatcatagcaaacacacatggctccggcgggggacagcccttcctcatgttgctgtggaaagtggagcttctcaaaatgaatcagc

SEQ ID NO: 456111 - DNA, 122 bp, Homo sapiens
ccccagctcctcactcttatcctgagtagtcattccttcagttttagagactggctcactcggtatgagaacagcccttccgtccttctggctgtccagaagaaatggcagctcagattttg

SEQ ID NO: 456112 - DNA, 122 bp, Homo sapiens
gccaggtgtggtggcgagccccgggagtcctagttactcagaaggctgaggtgggaggatcgcttgagcccaggcgtttgagtctgaagcgagctgagcttgaattactgccctacagcctg

SEQ ID NO: 456113 - DNA, 122 bp, Homo sapiens
gcaaattcaaactgaatggggctttcttctgctgccttccagagggcgccggcagcccgccgcgcgcttctctccggcgggagcggccgcccagcgcacggctaggagcgatcgcgggagcc

SEQ ID NO: 456114 - DNA, 122 bp, Homo sapiens
aatcgaggcccgggtgaggcccttggaggtccggccatgacccaggggacgggccctaaccggaagccacgccgccggcccggtgctggccaacggggaggcccggggtagcccttcaaggg

SEQ ID NO: 456115 - DNA, 122 bp, Homo sapiens
aggctttggagaggttgctgcccccagaatcccagccagagggcagtttatccaggagcccggtgcctcctctgttgggtgggcgtggcctcagagggcaccaaccagaagacacatgctgt

SEQ ID NO: 456116 - DNA, 122 bp, Homo sapiens
ttaatagactaaagctaagtgaagcctaaacaaacctgagcaaccactcccctctagccccgtgcaattttttctccttgctcctaattgatatcaccacattaaaaaagcctggtttccaa

SEQ ID NO: 456117 - DNA, 122 bp, Homo sapiens
tctagagtccagtgctttctgccaaaactactttctataagtcagttcaccagtgacctccgggtcaaattcaggggtctctgctccctttgcatctttgacctcgaggatgaatttgaaac

SEQ ID NO: 456118 - DNA, 122 bp, Homo sapiens
ctcagcttcctttttcagcgcttgccatccctctaggctcttggcagactgagctgcatccgcattcacctcccctcctcctcctttccctatccttacttgggagtcccgagaacccccac

SEQ ID NO: 456119 - DNA, 122 bp, Homo sapiens
tgtccacaaatgtttctacaggctacagtcctccgctctaccagctgagctatcgaagggcgcacgtttctggggttgggtcattgatctttcagcaaatgcaagactccttgcaactctag

SEQ ID NO: 456120 - DNA, 122 bp, Homo sapiens
agcaggtccctggctaaggcactgctagggacagctcgcggcggttcgggggttaattctcggcagccctccgtcacccggtgccccacccccgccctgcgcctgcgcggtgaagcgccata

SEQ ID NO: 456121 - DNA, 122 bp, Homo sapiens
aaaaagtaatggttgaccataaaaaagatggcggccgcagcttctccacagcaacggcaacgccattctcaagcaagcgcatcaatatatttagttccggcctctttgcacgtcatttccgg

SEQ ID NO: 456122 - DNA, 122 bp, Homo sapiens
ccctgcactcgcgcgccagcactcccggaggggcctggggaaggccacgcgcacggagagcgggaaactcctctaggtttccaggtgggagatccagaccctactgagacccggaaaccgcc

SEQ ID NO: 456123 - DNA, 122 bp, Homo sapiens
acactggcttagaattaggaaatggagagtcttgctctatttacttgtgatagaagacaccgtattctaaatatcagtgataaggcttctttttaaggaaagcttatttgttttctattttg

SEQ ID NO: 456124 - DNA, 122 bp, Homo sapiens
gtggacccagactggggattttgccaggggggcgatgggaggagcaggtgctttgcctggcggctgtgtctgcatttctggacgccccagagcacagaagttgccggcactttgaggtcttc

SEQ ID NO: 456125 - DNA, 122 bp, Homo sapiens
taatactttacaacactttaagaaaagtgtattctgaatactaatcatttggatatgaagcgtatagcaggtgcacctgacagcactaacttacgcacacccttagaatgaccctgtggtct

SEQ ID NO: 456126 - DNA, 122 bp, Homo sapiens
ccctatttaaaaagagccctggacaccttttgggggacatcatcattctgcccaccaccccgggacaggaggcacatgaatgaactcacaggtgtggccatgagaggtgaagagcttggtat

SEQ ID NO: 456127 - DNA, 122 bp, Homo sapiens
tgagagttttacccacgcttagaagagtttttgttgtcgtccattcccagcctgagctcacggtaaatgcctaccaaccgaatgtctgtatttatagaagcgtctgaaccggcaccctcgac

SEQ ID NO: 456128 - DNA, 122 bp, Homo sapiens
gagctgggagggaacaagggcggaggcgcggagcctgcgcggctcgaggctagggatgggcgggacaggttaattccccagctgtcgaaaccagcctgacaggtccccgagcccgggctagg

SEQ ID NO: 456129 - DNA, 122 bp, Homo sapiens
ggtgcaggatacaatctcgtggtgcgccgttttgtaagcccgtcggaaaagcgcagtattcgggtgggagtgtcccgactttcaggtgccgtccgtcacccctttctttgactcagaaaggg

SEQ ID NO: 456130 - DNA, 122 bp, Homo sapiens
cctgtaatttcttgggttgtctgtcagaaatacacacaaggggctgggtgcagtggctcacgcctgtaatcccagcactttgggaggccaaggtgggtggatcacctgaggtcaggagtttg

SEQ ID NO: 456131 - DNA, 122 bp, Homo sapiens
ccaggttatgcaaagcgggggtcagcggagagtcgggggtgtgacagccagggcctccagcgggtaggggatgcgacctaggagtctatgagaaactgactcctgcttggactctgtattct

SEQ ID NO: 456132 - DNA, 122 bp, Homo sapiens
tgtagatctctggcgcgcactccccccatcagaccccgctcgcagccctgtgttgaggggcgacgttaactgctctgggcgccctcgaccacgcgtggctgagcctcccccaccacttggaa

SEQ ID NO: 456133 - DNA, 122 bp, Homo sapiens
ggtaatcccttctgtgcccagggcaccagagctgacgtttcccttcagcaaggcaggggccgaggctgccagagccctgctggcgtcatcctgcctgggatagctcgagaggtggggtgggg

SEQ ID NO: 456134 - DNA, 122 bp, Homo sapiens
cctccctatggtgggcagttggtgacacacagtaaacgctcaataaatgtttccgctactcgatctccttggaattaaggggatgctcctgagcgcccctcattccacacagctctggtgcc

SEQ ID NO: 456135 - DNA, 122 bp, Homo sapiens
ccagctgcggggactgctgggacttgtagtccgcgcgttgggggaccgggacggcagtgtcggggggctcggggctggtgcccggcgggcctctgcgtgtcccctggagcctggggccgagc

SEQ ID NO: 456136 - DNA, 122 bp, Homo sapiens
ttttgtggagggcagaggtgatttcggccggcagaagatggagtttaaactcttctttgccggattgtcctgggctgagccgctgaggaggatcacgcagcgggcgatcaactcaggtccct

SEQ ID NO: 456137 - DNA, 122 bp, Homo sapiens
aacctgccttggatagtagaaagagcgtgtcggaacgcactctgggggtttcgttccccccgcgcaggggagagcgagcatgttcctgccccgggcgccgtgcggtcgcagcagcagcgcgg

SEQ ID NO: 456138 - DNA, 122 bp, Homo sapiens
agtctaatggctttcaaatgtaatttccatttgctaatggtgatcttgccacatctggcacggagacgacacagtaatgctgaaaaagcctctatgtagtcctgttagtgtcttaaagaacc

SEQ ID NO: 456139 - DNA, 122 bp, Homo sapiens
tctggcaagaggaacaacctcttcaggtgactcttgggtttggattcaatgcctccctgacgtagctactaggtatgcctcttttgaaaagattcccatttgggaatgagtcaactcaaatg

SEQ ID NO: 456140 - DNA, 122 bp, Homo sapiens
ggcaccaaggtgtggagccagtgaaagaacaggcgcagcgaacgttccggcaggcattgccgtgcacggacacacaacttcacaagggcctcttgtgcacgtgggacatggagaaaattggc

SEQ ID NO: 456141 - DNA, 122 bp, Homo sapiens
aatctcggacgggctgaagagaggcagcgaaggagatggggccgcccccgcaccccgggacgggaactcaccttctctgaggcaagggcgggtgtctactttaaaactactgccccccctcc

SEQ ID NO: 456142 - DNA, 122 bp, Homo sapiens
ctgttctacggctcggccatctacacctacctgcagcccgcgcagcgctacaaccaggcacggggcaagttcgtatcgctcttctacaccgtggtcacacctgctctcaacccgctcatcta

SEQ ID NO: 456143 - DNA, 122 bp, Homo sapiens
gtctgggacccctcctgggatccccagcacattctcctgctcctgggagaggcctgggggcggtgctcactgggagggccaggactcagttcctgctctcatcctcccctgccctgatgtca

SEQ ID NO: 456144 - DNA, 122 bp, Homo sapiens
gctggcatgaaccccctccccaggtggagggtgcgggtgatggggcgcgggcgtcaggagcgctggacctgggctggggccgaggaggaggtggctttaatgcagggggacctgtcacatgg

SEQ ID NO: 456145 - DNA, 122 bp, Homo sapiens
aacctcaacatgagggtgctggggagttgggctaagtcccgtgttaggacccgccatggccgcatggccccgaatctccctcgctggccccgtctctgtggctcagtctctgctggctccag

SEQ ID NO: 456146 - DNA, 122 bp, Homo sapiens
cccgctcccgataaagtacaaatttttacttctcatctctggaaaaaagtccacaccggccgtctacacccgcgcctgggggagaaagcagggaagaaacggggggtgcatgagaaacgttt

SEQ ID NO: 456147 - DNA, 122 bp, Homo sapiens
agccccagctcagcgcctcccagacaccgtctgacttcccggaggcagtcatcgacattgcgcccactgcacagatgagaaagctgagggtcagagctgttactcaacctccccaggtcact

SEQ ID NO: 456148 - DNA, 122 bp, Homo sapiens
gggtgactgacggcacctggaaaatcgggtcactcccacccgaatactgcacttttccgacgggcttaaaaaaccgctcaccacaagattctatcccgcacctggctcagagggtcctatgc

SEQ ID NO: 456149 - DNA, 122 bp, Homo sapiens
gcagggactggcgggactgcgcggcggcaacagcagacatgtcgggggtccggggcctgtcgcggctgctgagcgctcggcgcctggcgctggccaaggcggtgagtccgtgccgcggaccg

SEQ ID NO: 456150 - DNA, 122 bp, Homo sapiens
gggttcctggcaagctcccagcctgggtgccaatctcccttcaatgtactccttcttccccggagtgcagaagcgtatgaagacagttatgacatggacacatgcatgagctattatacata

SEQ ID NO: 456151 - DNA, 122 bp, Homo sapiens
aacctcaaattaagcaacccacagaaccaggaagttcaaggaccatgtctgttttcaccacgatgtctttccccacccccccaccccccactccaccccccactaagggcagggtattgtat

SEQ ID NO: 456152 - DNA, 122 bp, Homo sapiens
agagaagcgttgggcgatgggcttggagcgggatgcggaacccagctaccggcccatgggcgctgggaagcggagatgggctaggggtgggccggagaggggcgtctcgcctgggggcagtc

SEQ ID NO: 456153 - DNA, 122 bp, Homo sapiens
tgattttgtgttggttggcctccagctaggagttggtgctctcaagaatgcatcagtatacggaggatcaggcagtgggtgagacctactcctggccttaaagctcccaagagattatgtat

SEQ ID NO: 456154 - DNA, 122 bp, Homo sapiens
aggctccggcgcggcacagcggccctgctaaataaggaacgcctggagccgcggttggcacggccccggggagccgaaaaaccccgggtctggagacagacgtccccacccgggggctctgc

SEQ ID NO: 456155 - DNA, 122 bp, Homo sapiens
cacatcttgccctgactcagtgaaatgcttagggcagcgtattgggaggcggctcagaagcgttgggcagggaacacgttgggcccctcgtttccacacacagagcagtttcacttacattg

SEQ ID NO: 456156 - DNA, 122 bp, Homo sapiens
gctgtggggctgatcagcatccggggagtggactctggcctgtacctaggaatgaatgagcgaggagaactctatgggtcggtaagtttaaggttttttttttttttttttttttttttttt

SEQ ID NO: 456157 - DNA, 122 bp, Homo sapiens
gcacatgcagagggcttaagaggtatctcctgcaaagactgaccagactgaaactgggagcggcagataatggtaattttctgacacacaaaggtgatcaacacgttcatgtagggaaagca

SEQ ID NO: 456158 - DNA, 122 bp, Homo sapiens
ccagcccccaagcttgaggagcctctggtcactcaccctgtgtcctgtggcctccccaggcgactcacggaccctgagccactgcatggcctctggctccttggcccatgtctgcaatacta

SEQ ID NO: 456159 - DNA, 122 bp, Homo sapiens
tgaggaggaacggctgcttggaaggtgtgcttgccggtgtgacttggctgagtgtgagtgcgctgagatcagtgtcactgactggccgagcagcatccgctcagggcacctccaggcactca

SEQ ID NO: 456160 - DNA, 122 bp, Homo sapiens
tgtcttttcttttggcctcccttttagagcctgggacagggctttgagaatgggggaagacgaaggctctggtattgttacccgcctttgcactgctggaagataggacagcatatttttcc

SEQ ID NO: 456161 - DNA, 122 bp, Homo sapiens
cggtcagtactctctgccccgatggggcgagagctccgggaacctgccccctgcccggagcggcgctcggagccccgctccacctccgctcactcgaccgctaaatccctgggattcgggag

SEQ ID NO: 456162 - DNA, 122 bp, Homo sapiens
ctggcctctgtagctccagccccagagctgccgagaaaggacccagggcaccagcgtgttcggagggtggccctcctggaagaagcaccttcagagttaggccagaaggaatgggcgtgggg

SEQ ID NO: 456163 - DNA, 122 bp, Homo sapiens
aaagcaagtcttgtctcctgctcaaatggaccgcatgcaagaggcatggaagtgatgcttcgaatacttacatagtatgcctagtctattttaagtccttaacagtttatttcccctagttt

SEQ ID NO: 456164 - DNA, 122 bp, Homo sapiens
agccactacaaggcatgcagaggtgtgtgtgcgagcgcaggcacgcacaccgaggggacgcgcactctgcctggcttcacgctgacgccattggggaggggcacaactctgagtttacctgt

SEQ ID NO: 456165 - DNA, 122 bp, Homo sapiens
tgcagatcagtgcttgcctggggatgagggagggcagggagagatgaccaagagggaacccggggtgttcactatgctgattgtggtgatggtttcacaggagtatccgagtgttaaaacgt

SEQ ID NO: 456166 - DNA, 122 bp, Homo sapiens
cccaacctcaattcccaaggaggcggccactacttcatcgaccgggatggcaaggccttccggcacatcctcaatttcctgaggctgggccgcctggacctgccccgtgggtacggagagac

SEQ ID NO: 456167 - DNA, 122 bp, Homo sapiens
gtttccctccctgttttcctacctctacggcaagcccaaagtgtcttcccgggagcccagcgcagcccccggctcttacccaggaccccgccccgtgctgagccttctgctgaggtccttgc

SEQ ID NO: 456168 - DNA, 122 bp, Homo sapiens
acagctggcagttatgtgctcagcgacggctttctggggcatgcagaggccccaggttgtcgccgtacccccaccattcccccgggagtggcgcagtctgggcgggggcggtctaggagacg

SEQ ID NO: 456169 - DNA, 122 bp, Homo sapiens
cgccgccgatacagcgcctccccgttgaccctccctccagccggctcggctccctctccgcgccagtcccaggagagtctgccaggggcagtatctccgctaagcggaaggaggcggagtcc

SEQ ID NO: 456170 - DNA, 122 bp, Homo sapiens
ggatcgtcagggtggtggcttttctcctccgctcctaaaagctcaatgtatgaatagccccgggatttccaaattccgtcggatcgggaggccggggacacggcccgatcggcctacccacc

SEQ ID NO: 456171 - DNA, 122 bp, Homo sapiens
tagcaatttagatcaccctgaagaagggaggctttaaaaggggggatgcaccggaagtgacgccagtcagaggttaacggaaaacggaagctggctggctgagaagaagcttccgttagtcc

SEQ ID NO: 456172 - DNA, 122 bp, Homo sapiens
acggcgagttttcggagcagcaggctcatgatcccgggccagtggcgagagcagtgacaccgagaacccaaatctccgcgcccccatccgcggcccggtgtcctcccggcccctgctgacct

SEQ ID NO: 456173 - DNA, 122 bp, Homo sapiens
aagacctgtatttataagccgagggctcagggagcctaactgcgggacccgtcagggccccgtgacccatccccgtccccacccccccctccaccgctgggcccatcagtgtgtgttggggg

SEQ ID NO: 456174 - DNA, 122 bp, Homo sapiens
gacctgtttacagatgaataaactagggttcagagaggttgcgtgacttaacccaggtcgcgcagccatcaagaagtggagccagggcttgaagccaccaagtcccactccagatccttcac

SEQ ID NO: 456175 - DNA, 122 bp, Homo sapiens
tctgtgaagggtgtgcacagagagcttcggtagcctgcgaagcagccattttcacttccacggagcaggtattttattgcattatttcgagctcaaggactccagaattagatccccaaaat

SEQ ID NO: 456176 - DNA, 122 bp, Homo sapiens
ggcacaggatgagtgagctacgcctggtaacaagagtgccactctcgtgtaagggggctgcgaagtagaaaggaggccagccctttggaagatgtttctagagggtgtgggcagaaccaagt

SEQ ID NO: 456177 - DNA, 122 bp, Homo sapiens
cggccaggggagcgcggactgggcgccctaggtgagggcttgttctggagtgcacaggtgcgtgggagtgttgctagggcccgtgctgtgtccgtggtgagagtttgccctgtgttcccttg

SEQ ID NO: 456178 - DNA, 122 bp, Homo sapiens
gggagggtcgctgtcagtcaggccgagcggggctcgctggcctgggggcggccgcaggggcgcagcgcagcctgagggcgcggcggccccggcagcctccgcagtggcagtggtggccgcgc

SEQ ID NO: 456179 - DNA, 122 bp, Homo sapiens
tctgactggaggaggtccgagtatggacagcctcatactgggacaacatgtggttgcaggcgctcacacagattcatctgttcaggtgcaaacaggtgtgtgcacgtatgtatgtttatctg

SEQ ID NO: 456180 - DNA, 122 bp, Homo sapiens
gctacagtgctgcatgcaaaagctggcctctctactcctgagcagactctgctctttccacgccctctctccagccaccggggagactgtgccactgtgcccgtggacagggagtgacaaag

SEQ ID NO: 456181 - DNA, 122 bp, Homo sapiens
aaatacaaaaaagtagcttgatgtggtggtgttcgcttgtagtaccggctactcgggaggcggaggtgggaggatcacctgagcttagtaagtcgaggctgcagcgaaccatgatcacacca

SEQ ID NO: 456182 - DNA, 122 bp, Homo sapiens
cagaggccgaccatctcctgcgtgaagtcaggatccccacggcaactcctgcagcaaatccggagtcttgacttcccgcccgcagcagagaagcaggacgtcagcatcctgcctgtgtctcg

SEQ ID NO: 456183 - DNA, 122 bp, Homo sapiens
aatttacaaagcccctatgcatctgattttattttccatgaagattaagtttttcccagacggattacattccttccatcattagttaagcccatcttagtaaaaattctattcaggaaaat

SEQ ID NO: 456184 - DNA, 122 bp, Homo sapiens
tctgtgtgtgtatgtgtgtgtgtccccgtgtgggtatgcgtgcgtgtatgtgtgtgtctccgtgtgtgtgtgtatgcacacaaaagcagctgagcattcctcaggcctggcctggaatttca

SEQ ID NO: 456185 - DNA, 122 bp, Homo sapiens
gagccgcgatggccttccaaatgcccttccgttctttggcaaaaaccaagagcaaaaagccgaaacccacacagggagttcccaaggtcacagagttgtgtctgccatttacgaatgtctgt

SEQ ID NO: 456186 - DNA, 122 bp, Homo sapiens
ttcatggttaagacctgtggggggcagtgacgaggggggactgctttaaggccccttccacgtccccatccctcccagaaagtcacaaagcctcaggaagtgagcgctgggtgggagtatac

SEQ ID NO: 456187 - DNA, 122 bp, Homo sapiens
tttttaaaggggaatgaatttctaaaggaggagtttccagtctagggctgtaggggcctccgggcaaaggaagtgcttgttgaaaaacaacattgtgatcacttccagcggcgaagggtgtg

SEQ ID NO: 456188 - DNA, 122 bp, Homo sapiens
tgggggaagatttcatgatgaccaagagcccttccggggtccaggattctctgctccacacgtaattttccaagccctgtcttgcgtcttccctgtgtggatgctgcctggcctttctcttg

SEQ ID NO: 456189 - DNA, 122 bp, Homo sapiens
ggggctccccgccactgtccccaagatatcccggggctcagcatttcatgtagttatttccggaccccaggcattcggaggcccatatggctttggctaccaggcagagccgtcgactggga

SEQ ID NO: 456190 - DNA, 122 bp, Homo sapiens
gtcactgatgccttagtctgactcagtgaaacaatggggcagaggaagtgatcagatatgcgtttgtctcacccgtgagcctcaggaggatgactttgagttctgcctgtccttggtccaca

SEQ ID NO: 456191 - DNA, 122 bp, Homo sapiens
ggaccggtgagccgaactggggtgtgcggagccggggctccgggggatggcccggggcggcgtggcgggcatgagagctcggggctccgtcacgtactccgagtcccgcacgcactcagcgt

SEQ ID NO: 456192 - DNA, 122 bp, Homo sapiens
agctgagtcctgcagctggagagcctggaggctgcagtccccacatctgcccactgcactcggtgccagggctggccttgcacacatagctcttgcctgcagctcaacaccctgagctcctt

SEQ ID NO: 456193 - DNA, 122 bp, Homo sapiens
cgtgcgactgctgctgccggggaagatgggcaagctcgccgaggcccagggcacgaatgccgccctcaggtacaccaaaagcaagtgagctgtctcaggagcgcctgagcacctgggaaacc

SEQ ID NO: 456194 - DNA, 122 bp, Homo sapiens
tccatcactccgcagaggctttcaagcaaaacacagcctcgtctctgggcctgtttctgccgtgcgggcacgtccagcccgacgctctcagaagcagctgggatgggctcggggaggtgggg

SEQ ID NO: 456195 - DNA, 122 bp, Homo sapiens
cttgttcttctggagcctggccagccaaggctgggaagaccctagagactgcttccatcccgagcttagacagctcaggcaaaggttctctccagttggggtctaggcaaatgggtgatttt

SEQ ID NO: 456196 - DNA, 122 bp, Homo sapiens
gggctgctctaagtgcgctacaggtaacgccattaacccgtgcaagacccaatgaacagacgctatcataagccccacttttcaggcgagcaaacaggggctcgtggctatcgatgccatgg

SEQ ID NO: 456197 - DNA, 122 bp, Homo sapiens
ctcctctgtttccctcacattctttagctgtctggatcatgctggaactggcactgcagacgctggcaggcaaggggaggaggcagccacgagttctggcactgtccccaaggtgagctgtc

SEQ ID NO: 456198 - DNA, 122 bp, Homo sapiens
cattgtttacactagcgttttgcaggttaggaacggtgccggtgggaaccgagctgacaccgtaagcgcttccctgggactgaattgaccctacaatcagtggagggaaaagtcaccctccg

SEQ ID NO: 456199 - DNA, 122 bp, Homo sapiens
aagtggcttttgcagcggtccttgcctgtgacgccgggccatggctggagctccttgctccgtacctctcaggagcctccatcctgtaccaatggccagagagccggggggtgacagacagg

SEQ ID NO: 456200 - DNA, 122 bp, Homo sapiens
gcccagccggtacagacgccccctgccaggctccgggccagcgctccgacgcgctcacagcgcccggcttgccgaccccgaccccgaccccgagtcctacgcactcgaggtccccgggccgg

SEQ ID NO: 456201 - DNA, 122 bp, Homo sapiens
ggtggaagtggagtaagtccaattttcccaaagaaacgctggtcactggcgtggcagctccgccctagccaggccaacgtgaaaggagaggggttgcacaaaagtacccgctttcgccatgg

SEQ ID NO: 456202 - DNA, 122 bp, Homo sapiens
ccaattgaagaaagggtttccatgaagagtctgacggcggcatctggatgaggggtggtccgggtaatgggaagtgagtagagaagaaggagctaagagcccaaatccttatgaaggatgac

SEQ ID NO: 456203 - DNA, 122 bp, Homo sapiens
ggagccagggaagaagagaagtcactgaaatcgcctcgtttcctggcacttaaagtcttgcgaaagggggcagattttcagagactcaggctttatcaggcaaatatggggcaagctaaatt

SEQ ID NO: 456204 - DNA, 122 bp, Homo sapiens
tgttgcagctgtcaccactgctaggtgttgggaaacgactctcctgcctgtgcattgacccgaaggcattttccatttcctaggcccctcccgcttcccgtccctcacctctagcccctcgg

SEQ ID NO: 456205 - DNA, 122 bp, Homo sapiens
agctcatcgggccggtgggagaggcggcgaacagagccgcttccgcttccgctcgcgccgcgcacaccccggggtgacgtcacgcgcccacgactcgccccgcctgtctctgttagtgctct

SEQ ID NO: 456206 - DNA, 122 bp, Homo sapiens
tctcccaccaggaaccgatcccagaagtaggaggggcgtcttcccctcgtgggccctgagcgggactgcagccagccccctggggcgccagctttggaggttctcgtttggggaagcggggg

SEQ ID NO: 456207 - DNA, 122 bp, Homo sapiens
ccctccctccgcccctcccgctgctttccctccagccctcggcagttctgaaaccattctcgccccggcccgccccggcaccgccccttccaccgccccgtctaggcccgccccgccccgga

SEQ ID NO: 456208 - DNA, 122 bp, Homo sapiens
ccaaggccctcgacccaacttggggctgtcagcaagggctcctccaggattgcctccttccgtctccccagcattgcacagcccgggtcaggaggctggggcggctctgcccagccctccct

SEQ ID NO: 456209 - DNA, 122 bp, Homo sapiens
caacataagagaataattatttttaattttaaacctgattctctgttccaatctcctgcacgtgtgagggaaaactgtaggaaataaacaaagcacataaatcaagctttggaagagaaaaa

SEQ ID NO: 456210 - DNA, 122 bp, Homo sapiens
aaatgggcgggtcttcgtgagaagtgagctccttctatgacaggtatgaaagagaaagctcgctggttccaggtgacagctcccatcgaaaattccaggagctgctctggaggaaatggtgc

SEQ ID NO: 456211 - DNA, 122 bp, Homo sapiens
ggggggcggagcacatgcccccggaaggctgtgaaatcccgccagtggcagtgacagaggcgaatatgagggtcctcagaggaaaaacaaagaagataggagcagcagaaaatggcccccac

SEQ ID NO: 456212 - DNA, 122 bp, Homo sapiens
agggcagggcctgtggctccaccctgtgtgctgctctgggggcctggaggcctgtgcccccgcctcagcctgcctttgccctgctgcaccgctggcctgcctctttcccattcgggcacctg

SEQ ID NO: 456213 - DNA, 122 bp, Homo sapiens
tttggtttctttaaattccgggacttactcaatccgagtttttcagctccgtgagctatccgtagtaaagcgacctcgcgactctcttgcccgcttggcattctgactcttccctagttgct

SEQ ID NO: 456214 - DNA, 122 bp, Homo sapiens
actaggcgcgcttggggagcctaggggccgtctcggagaaatggggtggtccccgccaggcggcggcggggcgggccctgggcgccgaaggggttaaggcacctgggccaccgcccctgccg

SEQ ID NO: 456215 - DNA, 122 bp, Homo sapiens
cgtcgggggcgtgtcttgagctggggacgcgactcctcggcgggggtgcacctgagaggccgggaccagcgaggccgcgccccggtggcaggtgaccccgggcgcgtctccgagcgccaggg

SEQ ID NO: 456216 - DNA, 122 bp, Homo sapiens
aaaaaaaaaaaaaagaaagagaaagaaagcatgacactttggtcagggagctggattagtcgcctatctaccaggctccaagcaaccggacggtcatccaggccccgcttacttctggttcc

SEQ ID NO: 456217 - DNA, 122 bp, Homo sapiens
aggggctcctgagtgagaggggctcctgttaacaggcccccacgtcacagactaacttgccggttaccgcacaggaacgggaggggccgactcctccccatgcaaacagcggcagcttcccg

SEQ ID NO: 456218 - DNA, 122 bp, Homo sapiens
tttctggatgcccaggtacaggagagagtcgcgcgcttatgacgtctaccactgacggcccgcccctccgagccagacccgttttctattggttaaatcatttttgacggacaggcccacgt

SEQ ID NO: 456219 - DNA, 122 bp, Homo sapiens
gtagcctccaaagggacgtgccacttggcgctcctgcaaggggagaggcactgaggctctcggtcctcaccagcacgtccttgtgccacactcaggcccggcgggtggtgtgggggccgcat

SEQ ID NO: 456220 - DNA, 122 bp, Homo sapiens
ctcctggatccatcagtaaaccccaaaactgcacaggaaagtgtgcaatcaacataagtgcgaattacaaaatatactggcaggtccatttttccagattaaactgtaaaaaaaaaaaggaa

SEQ ID NO: 456221 - DNA, 122 bp, Homo sapiens
tgtgaactaacccatgcataacaaacagatttttttaatggaagaattccagctaggacccgagcagctgggatcttcacactgaccgtccatgctgtgaacgtaaaaaacaaaaacaaaaa

SEQ ID NO: 456222 - DNA, 122 bp, Homo sapiens
cccggccgcgctggccgccgcccgaggagggccccgccttgtgctgccacagccagtcttcggccgctacgtcacgcgcgctcgcccactattcagacgagctctctcaggtccttcctgat

SEQ ID NO: 456223 - DNA, 122 bp, Homo sapiens
cagctggagccgggcccagcgggggcaccctcgccggctccgggcgctcccgggccgcgccgacgggccagccccgccgacctggtctacttcgaaaagtctcccgacttctgcgagcgcga

SEQ ID NO: 456224 - DNA, 122 bp, Homo sapiens
gctcttttataaatatctgcagagacgctcacacacatacagctctagaaaaatctaccccgaggtattcgcagtagttgtctttgtgtgggtgggattatgagtgttttcttactttcttc

SEQ ID NO: 456225 - DNA, 122 bp, Homo sapiens
gggcagaaccaaaggtccctccccctagattggaagctccatggggtagggccacaaggccgtcaccactgcgggctggccttttgggggactttgcggggcgctgggcgggagtccatccc

SEQ ID NO: 456226 - DNA, 122 bp, Homo sapiens
gagatatttacataaatgaggccgttcttgtaaggagcctggcacacggaaagccctcaacgtcaactgtcacggtcttattatccttatcgtagaactcctcttagggtgccctctcctca

SEQ ID NO: 456227 - DNA, 122 bp, Homo sapiens
tttctttatctataaaatggggatgacaatagtttgcctcctaggactgtcagaagagttcgacaagcaaaaagcatttggacttcaacttagcacatgacagatggtctctgaataataat

SEQ ID NO: 456228 - DNA, 122 bp, Homo sapiens
tctccgtggaaggccaagagattcctgtttccatctctgtgtactgggagccagaagggtcggggttagatgaccacaggataaagaggaaagaggaacatctctctgtcgtgtctgggagt

SEQ ID NO: 456229 - DNA, 122 bp, Homo sapiens
gcctgttcctgatctagtccatccctcaatgcctttcagagacctcacccaaactttgaacgctcagtttctccatcactttttccctagtctgagtagcttctccatcaagtccctctcct

SEQ ID NO: 456230 - DNA, 122 bp, Homo sapiens
tactctgaccgttctacctgtgattctcgctggtggagtcaacctggaatggattcccgccgaaccacgcctccctttcctggttcgcccgcagtttcggcctatcaggttgagtcgggtaa

SEQ ID NO: 456231 - DNA, 122 bp, Homo sapiens
ggggaagagacaagagagggcaccaggaatgaaggcatgcagcataaaggactctgaaagcgagtcaggtgaataaatggaagaaataagaaataggtctcacatctaacaagatgagtaca

SEQ ID NO: 456232 - DNA, 122 bp, Homo sapiens
cggcgccagcgaagacaggtagggaggcggagggactggaagcccccgggcgcccagcggcggggaccccgcaccccggggcttctgcaggaatttgctcgcctggctcacggcgacggggg

SEQ ID NO: 456233 - DNA, 122 bp, Homo sapiens
tcctcaaccttcccagcgcaacgagccgcggccggccctctgctcagcagaagcctcctgcgcgctctcgaggcagcaccgccacccgatatcagagcgcgcgccccaaaactgggggtcgt

SEQ ID NO: 456234 - DNA, 122 bp, Homo sapiens
gcagtctcactctgctaagacagacagcttagcgccgggctcctgctgaggacactgccccggggagaaaccctgggccaccccactcactgttctagtcccgggcggggccggcagggcct

SEQ ID NO: 456235 - DNA, 122 bp, Homo sapiens
ctcaggtgatccgcccgcctcggcctcccaaagtgctgggattacaggcgtgagccactgcgcccggctagaatgttgtcttttaatactaaggtttcacttgcaaagggaaagaactgttt

SEQ ID NO: 456236 - DNA, 122 bp, Homo sapiens
gttggccatgattgttagaaaaatatccacctgactccagtgcctgggttctatccacaacgtgcattgtgcatcttagcttttatgatttgtttcagaacatattcaaattagatgttctt

SEQ ID NO: 456237 - DNA, 122 bp, Homo sapiens
agcgcggcagcgccgcgaggcggggcaccgtcagggcatagagggcgctcattggccgcgcggccgcaccccgtgaacttggccccatgggagctgcagtcccagctccgggctcccggggg

SEQ ID NO: 456238 - DNA, 122 bp, Homo sapiens
tctgttgtgccacctcggtctctagcgaatcggaggaagatttccggcaccatgttctggcgattttgagccttgtgcattggtgtggtctatactaatgctggcgtttggcttacttttaa

SEQ ID NO: 456239 - DNA, 122 bp, Homo sapiens
cgtgtaatcccagaagcaatatgtataaaggcaattggaggctgggcacggtggcttatgcgtgtaatcccagaagtaatatgtataaaggcaattggtgactggtacggtggcttatgtgt

SEQ ID NO: 456240 - DNA, 122 bp, Homo sapiens
gctaatgtggaaccataaatacaacacaagactccccatcccccagctccgttttatggccgtttcaaccaaacatctgggctactgattccacaacagggaatattatatgggccagggtt

SEQ ID NO: 456241 - DNA, 122 bp, Homo sapiens
tttttttccgcccccgccgtcccgcccctagcattaatttttaaaactcgctttagacaccgtttggagggggccaggtgctgaatacctgctgatgtaatgcagtgattttttgtttgagg

SEQ ID NO: 456242 - DNA, 122 bp, Homo sapiens
cgatacagtgatttgtaaaggtacgtgtttgaggcttatagcacattacctaatgtatcccgctattggccactgacccaaatgagaaataagaatgtctgcctttcctcagtctatcagta

SEQ ID NO: 456243 - DNA, 122 bp, Homo sapiens
aggagcaccccccatccctcatgagattgttctggatcaggcagcaatcatctgagatggcgcagaagccccccacccgaagccttggggcgagtggtggttcctcctgcacccccacctgg

SEQ ID NO: 456244 - DNA, 122 bp, Homo sapiens
ggtgacatcaggtccgcgtgggaaacactgccctaaacgagcaggaagtagcactcggcacgcccaggcccagggtcctcttcggtgaggggcggctgtaaacacctggaggaagggtgggc

SEQ ID NO: 456245 - DNA, 122 bp, Homo sapiens
gctgggattatagacgtgagctacgtctgtgtcttttaatagagttttgtcgtttttggccgggcgtggtggctcacacatgtaatcccagcactttgggaggccgaggtgggcggatcact

SEQ ID NO: 456246 - DNA, 122 bp, Homo sapiens
acaaaaattgcccagaagtaaactttgtgctggaacccctgcctccattgacagtcccgccggggacccagcccacagcagcccaggggagaagcaggctgtggggactcacacgtagtcgt

SEQ ID NO: 456247 - DNA, 122 bp, Homo sapiens
agctccacctgccacccgcagtgagctgacgctgtctcacatcggcgtgtgggcctcaggcgagtgggagtgcaccgtgtccatggcccaaggcaacgccagcaagaaggtggagatcgtgg

SEQ ID NO: 456248 - DNA, 122 bp, Homo sapiens
tatgcctactccttccatgaaccccacggggaagtctgaagcagcttccagataccacagcggcatttcatgagtaaataagaatgctatttttgagtagcccaagagttgtgctgttctca

SEQ ID NO: 456249 - DNA, 122 bp, Homo sapiens
aggctcagtcgatactaagctatgagctaatgctctttaatcttagccaaaataaaataacgaacaggacctagggtgtggcagaatcctgagtctgcagatagatttgaggtgatcccgac

SEQ ID NO: 456250 - DNA, 122 bp, Homo sapiens
aggacggagctcccgattcttcttgttacgaggaggccctggagaggctccggctgtggtcggaacggtctcttcctcccagtatcgccgcggtttctacaggcacatcaggaactccgcac

SEQ ID NO: 456251 - DNA, 122 bp, Homo sapiens
caggagtcgtcagttaggggcaagagatgatccctccagatatgcagcccccccaggctgcggccgggggcgacactctctgtcctcactcgaaacctaccggttcttcctctctgtgttca

SEQ ID NO: 456252 - DNA, 122 bp, Homo sapiens
gtacttggtccaaacctctgggctcctctggcgggcctccctgaatgtggcctggactcgcgcacaggccctgtctcgcaggtttgcaggtgcgcttggcttttcctccgctttgtggggca

SEQ ID NO: 456253 - DNA, 122 bp, Homo sapiens
ggggacgcgtgggtgtcgctcgggggcgctcgcctcccccacccagcctgtcccgggccgcgagcgcttccagtcgggttacttctgggggacaagaaaggcaccgtctgaacggtcgagac

SEQ ID NO: 456254 - DNA, 122 bp, Homo sapiens
aaagagagaaaaatcccttattgagcaggaaacatagcttatgcccataatcctaggagtcgggaggctgaggtgagaggatcacctgagcccagtaggtcaaggctgcagtgatccgtgat

SEQ ID NO: 456255 - DNA, 122 bp, Homo sapiens
atgagctacatttatccctttcagcttgtaaaaactattatcatcacataaagtgcagcgcgtttaaagaggtactatattataaaacaccaccatctaaataacattttctgctatcaatg

SEQ ID NO: 456256 - DNA, 122 bp, Homo sapiens
cgacagcgacggcacccggagctgagccagggtgaggctgtggccagcgtcatcatctaccgcaccctggccgggctactgcctcataactatgaccctgacaagcgcagcttgaggtcagc

SEQ ID NO: 456257 - DNA, 122 bp, Homo sapiens
ggggactgggggcacccgctgctcacaccctcccctccccagcccgcatccctgacgacccgcatcccagccctgcgggctcaggctctgcggcggcccctgcacctaggaccttggcctgg

SEQ ID NO: 456258 - DNA, 122 bp, Homo sapiens
catatcactgtgtgacactcttaacccacagctcactatggtgaacattagacaccagttcgggacagtccctggtgctacccagtttcttttgtgcctcagcatccatctagagagtacaa

SEQ ID NO: 456259 - DNA, 122 bp, Homo sapiens
ttccagggattttacattgcggcttgttagggtgattcgaatttggtgaatggccacctccggctccacgggtgttttccggtatccttaaaagccaaggctgctgcgcggcttcctgaccg

SEQ ID NO: 456260 - DNA, 122 bp, Homo sapiens
gccccaggagggaaccggctctggaagctgctctcacagcagggtcagctgggatgctgtcgggttttagcaggactgggtcaaagctggcgtctggaactcagaagggaaatcagacattg

SEQ ID NO: 456261 - DNA, 122 bp, Homo sapiens
gtgggtattaagagtggtcaaagacgctggggagggcagtgctgggagaagggcagcgcgcgtcttggcgaccccagcgcagttcgaactactccggagtctggtgtggagccgagagggag

SEQ ID NO: 456262 - DNA, 122 bp, Homo sapiens
gctgaggttgtgccagtgcacttcagcctgggtgactgagaccctgtctggaaaaaaacccgcaaaccaaatgagtaaaaattatactgaatttctgactattaccttacagtgtctagaat

SEQ ID NO: 456263 - DNA, 122 bp, Homo sapiens
aggaggggtcaggggactgctgaggaccagaagtgggcggctgctgggtgcgggagtaagcggcacgggggaatgttgaagttgggtaggaaaagaagagggtcttttaactagtggtctcg

SEQ ID NO: 456264 - DNA, 122 bp, Homo sapiens
tcgtgcaggctccgactccggggctggcgccggggtcccgggccgaggggaacccgcgaccggacttgtgggggagaatgaggatgaaaacgtggagcttccattgtctagggtttgaccgg

SEQ ID NO: 456265 - DNA, 122 bp, Homo sapiens
gtgtttgtagggacctcaggcaggtggaatgacatagtgtttgtagggacctcaggcaggcggaatgacacagtgtagggacctcaggcgggtggaatgacacagtgtagggacctcacgca

SEQ ID NO: 456266 - DNA, 122 bp, Homo sapiens
gccgcaggccgcgcccgctccttcagccccgccgccggggaggggtttcccgggacgatccggcccctttcatccaggaagtgaaatcgacgtcggggtcaatgaaaacaaacggggagccc

SEQ ID NO: 456267 - DNA, 122 bp, Homo sapiens
cgctcagtgaccggaggcaggtgggtcctcggtgggtgaccgggagcgcgcggggactgccgggtctgtgcccttcggggccctccgcagggctgggccggggtttcgcggtgggaacccac

SEQ ID NO: 456268 - DNA, 122 bp, Homo sapiens
cccctcatcaaccccagccccttacctgcggccacaggtattcccagcgttgggtccgggcgcagagagtcgccgaacagccttacagcagctctctgcggcctgggcttggaggctgagcc

SEQ ID NO: 456269 - DNA, 122 bp, Homo sapiens
cctcccacagtctggggggcgtcttccccttcctggaccctctgccccaagtcctccctccgtctttaccaatatggcctcctgcgacaggggctgcaacgcagctttagtgagcgccccac

SEQ ID NO: 456270 - DNA, 122 bp, Homo sapiens
atgaaagtccatgccagccccagctgcagcccagctccgtttttgcaggttgtgctgtgacgctcgctggacgcagggcttggaagaggctgcaggcggcgacgccccaggactgaggagtc

SEQ ID NO: 456271 - DNA, 122 bp, Homo sapiens
tgccccaggactcagctcaggtttgtgtaaccccaggaccgtgttccttgtcgtgggcagcgagaggccccaggcaacatagcgactccagagcagcagcaccagcacctgacggtaagggc

SEQ ID NO: 456272 - DNA, 122 bp, Homo sapiens
ggggccccaacgtccctggctcttagggagattttgaggacccctgggggaaccgcgaggcgacgaggaccttgggaagccgggggcggggacagcagagcttcagggccacaggccgcctc

SEQ ID NO: 456273 - DNA, 122 bp, Homo sapiens
gtagggttatagattgagaaggcagaggcgacgtttctatggtaattgaaggaaagtacgcgggttactatagcacttgacagaccttgagtacagataacagacaggatggtaacaaatag

SEQ ID NO: 456274 - DNA, 122 bp, Homo sapiens
ccttgccacccagctggagccttatgatgcgcagcgcgtccaggccacaggctaggggcccgttacagttcctgccttggcggaaactcgggcccaggtttattcacattctagccggcttg

SEQ ID NO: 456275 - DNA, 122 bp, Homo sapiens
cctgcccttccctcctgttagggttggctctcgagcttgtgtgccagttcctgggttggccgtgagagttctacagacaaggaggaagtgctctcggtgtatttcctgtggtgggttcacac

SEQ ID NO: 456276 - DNA, 122 bp, Homo sapiens
ggacctgccggctctggactgccgcccccggtgtaggcgctgatgaaaggcccgggcgagcgccagggtcgcctctggagccagccgagctgcatttatgccagcgtcattaccacgctaag

SEQ ID NO: 456277 - DNA, 122 bp, Homo sapiens
gatgacgtcagctacgcgaccgcggtctgccccagccgcgagtgcgtccccggaatcagccggcacgacaacccctaccatttgcacctgcgcagtggggcgcgccttctcctcttaactcg

SEQ ID NO: 456278 - DNA, 122 bp, Homo sapiens
aagcgcccggggaaatattacatcagatgaaatgacaatgattaaaatcagcctctcccccgccccctccccgagcccggaggaggcccgggcgccgcgtggccggccggcggggggcgggg

SEQ ID NO: 456279 - DNA, 122 bp, Homo sapiens
acatcactcctccagtggcttccatctcccttggagtcagagccaaaaatccctgctctacgtccttcaaggagccagctggtctcctctcctcctcctcctgcactctttccactctgacc

SEQ ID NO: 456280 - DNA, 122 bp, Homo sapiens
cggcccgtcgccgcccggtggcgagagcgcgtggcggctcgagggatgcgcggaggtcgccgggtcttgtctccacgctgccctcagggggctgccggcaacgcctccatgcgcgcgcgggc

SEQ ID NO: 456281 - DNA, 122 bp, Homo sapiens
ttccgcagccgtctggtggcccacgcctaccgcctctacttctcccagcagacctactaccgggtcagcaacatggacgggcggcttcgcaaccctgaccagtctctgacggaggacgtggt

SEQ ID NO: 456282 - DNA, 122 bp, Homo sapiens
aagtgttggattacaggcgtgagtcacagagcccggcctccacattttctcgacagggtccgtaagacctggttcccagaaaggtggccgtagaatggctttgggagttcagcgtccccagc

SEQ ID NO: 456283 - DNA, 122 bp, Homo sapiens
tcgcggccagtagcctccacaggggaccgggttccctcgaaggttcgcgtacctcccccgcgcgctgcaagctgcagccagacacccgcgaagttccgggactctccgcacccgctagatct

SEQ ID NO: 456284 - DNA, 122 bp, Homo sapiens
aggccaggttaagtttctagaaatattctatgctttccttgcacttacactcaatcctgtcgtctacagcgttggcactgacagtgttctggtggcaatgaaaaatatgctctagagcaaca

SEQ ID NO: 456285 - DNA, 122 bp, Homo sapiens
ttctattttgattatttttatttatagagttcacctgtcctgaacacactacttcttcatcgaatatatcaggtatatataatccagtctttgtctcttctatcaccatgtcttgtagacaa

SEQ ID NO: 456286 - DNA, 122 bp, Homo sapiens
tggaccgctttccattctgagtagcaacaacgtactaatttgatgcacacatggatgcctcgcgcactctgcaaattcatcacccgcatcttgcattagtcatctgacggactgccaagtgt

SEQ ID NO: 456287 - DNA, 122 bp, Homo sapiens
tgctccaggccagatggcgtgcccaccgtgtccttttgctgctggggctgcgtcgcaaagcggttgtttacttagttatgcagaggcaggcactcctaagacttcagacaccaattttctta

SEQ ID NO: 456288 - DNA, 122 bp, Homo sapiens
agattgcttctagagatcttttgaaaatttcacacgattgaaggcttaggggcttcactgcgttcgcatttcaaactcagatcagtgggatcacaatcaaaaatagaggtctggaaaatttt

SEQ ID NO: 456289 - DNA, 122 bp, Homo sapiens
ttatatgaataaaaaagtacattcaattcatccaccagtaatctggactgtagatttaatcgaaatgataatttaacctcactctttccatctcctaaatgagagcatagcattgatttcca

SEQ ID NO: 456290 - DNA, 122 bp, Homo sapiens
ctttgtagcccctgccctgtttgtcatcgtggtacgtttcctacccttgtgggcgcagagcggggctggggaggggcaggaggagagggtgtggggctctggagatggcggggggctccctg

SEQ ID NO: 456291 - DNA, 122 bp, Homo sapiens
ctgtagccccaccatcgaatcatagtgcacagcacagagtagatgcccaataatacacttcgataaattaataaaggagcagaatcaaaatagtctacagagttggtaaatagctggtggct

SEQ ID NO: 456292 - DNA, 122 bp, Homo sapiens
gcgcggggccgcccgggccctgagttttcaggaccgatggcgcgccgacagtggggaggtcggcgtcccagctgaatcaaggacgtcctttagcaccgcagtgataatgaacacacaacaat

SEQ ID NO: 456293 - DNA, 122 bp, Homo sapiens
ggtagtagattattttagtaacaagagattcaacaagtcttctcggctagtgctttaaatcgtatatgccctattataaaaccggtgaaaccagaaagcaaaccgtcctcctcacactgccc

SEQ ID NO: 456294 - DNA, 122 bp, Homo sapiens
catgtatagctgtgcctgagtatgtgtcatgatgtctcacagtgacctgcatttgacccacgctcagcatttcctcagtgaattgttgtgactctgtgatatttgtcttcacatcattgatt

SEQ ID NO: 456295 - DNA, 122 bp, Homo sapiens
ctgtccccttccgtctagggaagatccagagaactcgaggaactccccaggcaggacctgcgcctcagtcgaaagccaggcgctttcccccagctccagctgagcctcggaagcccgaaggc

SEQ ID NO: 456296 - DNA, 122 bp, Homo sapiens
agtaagaaaaagtaggaaaaaccctcccatcagaccagcaattggctcgacgcttgagcccggatgtacggcacgcgtcgcgacctaacccggaaacactgcctcccgaaaaaaaggtaaac

SEQ ID NO: 456297 - DNA, 122 bp, Homo sapiens
ccaatcagacacgcagaactgggaaccgtccaattaggcacacatttggagcggcgaggacggcttccgggatgtggctgggccattgtttctctctgctgccggagctccaggtctaccct

SEQ ID NO: 456298 - DNA, 122 bp, Homo sapiens
caatgtgcacacacacaaaatgaaccttttaagtcaataccatgcgtgctcctggccgcgcgccacccctcagtgccctatccgcaccaccatcacagtgacgttgtcggccgagccccgct

SEQ ID NO: 456299 - DNA, 122 bp, Homo sapiens
agcctggccagggatgagaagccgaggaagatgacctctctcaccacagtctcattgacccgctccatggagcatacatcatcaggagacaattagggagagaagaggagtcagcaccaaaa

SEQ ID NO: 456300 - DNA, 122 bp, Homo sapiens
gccccggcggcagcagactgaagcctagctgagcccggcgctgtcacttataggcaccagcgagcagccggtgcggcgggctagagagaccgtcggcacccgcccagcgcagcggcccctgt

SEQ ID NO: 456301 - DNA, 122 bp, Homo sapiens
agatgctttaagccccaggccccccacagtcggtgacagagatttcccaagtccctaacacgggactcgccctaggagcccctactcgccagcgaagacaatgcatttatttctccggcggc

SEQ ID NO: 456302 - DNA, 122 bp, Homo sapiens
ggtaagcgcacgttctcgaggacataggggagtaagcagagtcgttctgatggcttgtgccggacccagctcatcacggtctcaaacacctgagcctcctcggtcacgtaaaggtcatcact

SEQ ID NO: 456303 - DNA, 122 bp, Homo sapiens
agtgatccgtctgccttggcctcccaaagtgctgggattacgggtgtgagccacagcgcccggccacactgagacattttagagggagatcagtctatggaacaaatgctggcctggggctg

SEQ ID NO: 456304 - DNA, 122 bp, Homo sapiens
gccgagaaataaaagtatcttctgctccggctgtttcactgcggacggctggggctgctgcgcgttaccttgctgcaagcggggcgccttccacctggctgggggtctgcgccacagtttgg

SEQ ID NO: 456305 - DNA, 122 bp, Homo sapiens
tgttgatgggtctgaactaatcaatggtgttaaactttataagcctgagagccttcccttcgcatgctccctaacatgtgaggtggatatgtgtgaggctaccctggtgggaagaagaggct

SEQ ID NO: 456306 - DNA, 122 bp, Homo sapiens
ccgcagctccccacgcgcgcgggcgccccccagcaccagtctcggcccgccccctccgcccgaccattggctgctgctcccgtcactttcaggccacagccaagtccctcctcagctcattg

SEQ ID NO: 456307 - DNA, 122 bp, Homo sapiens
gcgcccattcccacgccgcgccaagtgccacgggatcaggtggggccgcgtgtacaggcgcgagacggtcgggccaaagctgcccctcatgatccccagcggacggtgcccggcggtccctc

SEQ ID NO: 456308 - DNA, 122 bp, Homo sapiens
ctacagagcttcctgggcgtagggggctgtggtcgcttgaaaagaaccagcctgggggtccgagttccaccggaattgggttcgagcgcgggtgaaaagagggacccgacagcacccaccct

SEQ ID NO: 456309 - DNA, 122 bp, Homo sapiens
gccagggtggggcatgggcctagaccctggagtcaagggacttgggttctaatacagcctcgttaaaatgttgattcacttaacttccccaaaggcaagtttctttatctgtaaaatgggga

SEQ ID NO: 456310 - DNA, 122 bp, Homo sapiens
ctccgccgccgccatcttggaccgggcccggtcagcttccgcggagccatcggcagacgccgcggcctcccttgagccccgacccccgtcgtcagaacaaccccgggcccactcccccaacc

SEQ ID NO: 456311 - DNA, 122 bp, Homo sapiens
tcttcctgaggtctaacttccatctttcctgctgtcacttaagtatgtttcttcttattccgcccccttctggctgtcaccctgtagtgccttggaggatcagggcagcaaccccagcagca

SEQ ID NO: 456312 - DNA, 122 bp, Homo sapiens
aagccacatggagggccactcacttctttttcatggcctgctttattcattggtattacccgccgggaacctgtgagcaactgagtttatgactgttgctatagataatagaagggcaaggt

SEQ ID NO: 456313 - DNA, 122 bp, Homo sapiens
tccccatctcccaccagggcgcttcctgccgtgcaggccaggggagagcttagtaagaggcgctggggtgggcctgttcccacggccacagcacgtgagctcacacggggtgcgcacatgcc

SEQ ID NO: 456314 - DNA, 122 bp, Homo sapiens
ctgcttgcaaagctgttgcattttccattcccaccagcagtgtgtgaaggttcagcctgccgtactttaatgattattggtgacactctttcaagtaacttgttggtaataagaagtcaatt

SEQ ID NO: 456315 - DNA, 122 bp, Homo sapiens
tgccagcaaggtcctgcaggtcctagggacaccctgtgtgcatgcatgcatgcctgtgtgcgccgaactggttggcggcgggggcgtgctggcgtgcttgtgtgactgtgggcgaccatggc

SEQ ID NO: 456316 - DNA, 122 bp, Homo sapiens
gaacatttacaacctgagaggttctactcagttactattgttaatttaggatctcatcaacgaaaatggtatagaaatttgttttctcattggttacatgtgcacctacataataccctcgg

SEQ ID NO: 456317 - DNA, 122 bp, Homo sapiens
tttttttttttggtaaatatttgccataactaagccaggcacatccagtttaaaaggctccgtcccacaaaacatcaggcttttaatgatatgcatctcattagcgtgtcctatgaaagggg

SEQ ID NO: 456318 - DNA, 122 bp, Homo sapiens
gttttccacgtttctttagagacggtttctgttgccatgtcacgagtttttcccgtgcagcgtctaacctgtcagcaccccacgcaggacacccctctcctcaaacatcggagttttcatgt

SEQ ID NO: 456319 - DNA, 122 bp, Homo sapiens
agacaagcgtggagtctgcttcccagccagcacggagggtgcagcccaggctctgcccctcgtctgagccctgttcacaaactcttcctgtgagtcagctactgtggcttcttcatgctctg

SEQ ID NO: 456320 - DNA, 122 bp, Homo sapiens
aaacctctttatgtttacaaaagtgttaaatagatccaaacactacggcaagaaaataagcgtgtttcaatcagggagaaaaatagagtgcttactcaaatatacaactttgcaggctttgg

SEQ ID NO: 456321 - DNA, 122 bp, Homo sapiens
agtaggcggtgagaccgcaaattccatcagaatcctactctgacccactagggcttggcccgctcagagtcgcattccctcctccaaatgaaccaactctcctcccagcgatactccgacct

SEQ ID NO: 456322 - DNA, 122 bp, Homo sapiens
ctgccgtgcgccccgcggacgcctgtgttctctccctgcccagatgggcttggaagccaccggagtttgaagaaatggtcctgattattttgactgtggtttacagattccagtcttcgtgg

SEQ ID NO: 456323 - DNA, 122 bp, Homo sapiens
cagtgtccccgttgggttgtagacataacacgcttactttgcgtaggggaacggctctgccggcccccaggtgccctcgcgcatattcatggaggcccgtaggtcagaaccgcagtctcacc

SEQ ID NO: 456324 - DNA, 122 bp, Homo sapiens
tcggcccaacttgcctggattgattccatcctgagtgaaatagactccgatcccggaccccgtcgccccgaggaaccaagcccttctcgcaggcaacgctgaccctcgcgctcgctagaatg

SEQ ID NO: 456325 - DNA, 122 bp, Homo sapiens
ggatccagcccgagcagaaggggccggccaatgccctgtggatgcagatctgggagacctcgcagggcgtgggccgcggcggctcgggcttcgcgtcctatttctgcctcaactcgccggcg

SEQ ID NO: 456326 - DNA, 122 bp, Homo sapiens
aagggcgccgggggagggggcgcgggcggggcggggcggggcggggcgcgggggcgcgcgcgctcatccagctcagggcccgctggctcgccgctctgtaactcgctcccccaaccccaccc

SEQ ID NO: 456327 - DNA, 122 bp, Homo sapiens
gtcacaagtagaaacgtgactgatacactcattcctttgtacacttttataagaaatccccgcagacgctgttttgctttggtccctttgaggtgcttagaggagtggctggattctccaag

SEQ ID NO: 456328 - DNA, 122 bp, Homo sapiens
gtctcttccacactcagactggtgctgggagggtgggcacccgctcacttatagccctgtcgccctcccggcccagcccctcaacgctatatataacacaaattacagcctgcgggccgagg

SEQ ID NO: 456329 - DNA, 122 bp, Homo sapiens
agatgaggcagttcggctggggccagcggcgctttggaacccgaggtggggggaccctggcggtggggcctggtcctgctatatgccggcgcctcggctagagtgagcggcggcgacgcctc

SEQ ID NO: 456330 - DNA, 122 bp, Homo sapiens
tcatctaaaagcttttagagatttgaacataagttcatttcctgttaatcaaagacattccgtaagttggcaaaagaaattgggagagagaaatagaaggcttgatattctggacagcatta

SEQ ID NO: 456331 - DNA, 122 bp, Homo sapiens
tgctgtccttaaaaaggaattaccccggtgcccttcagagtcctgtgaaaagtctcagaccgacaggctgccctagatttcactgattatcctaagtccccaaacatgtggttctggggagc

SEQ ID NO: 456332 - DNA, 122 bp, Homo sapiens
tttgaggggggaagggttgaggggcaggatgtgggggttgggtgtgagggaggtcacgggcgagactggagggaggagacctggccacacaggccttgcccactctcgggggcctgaatatt

SEQ ID NO: 456333 - DNA, 122 bp, Homo sapiens
agaaataagaccctcgccccacccatattacttatgactcaggacagtagttcgtcctcacggggacccactggccaacttttcaccaaccctcaccagaggtggatgccggccctagcact

SEQ ID NO: 456334 - DNA, 122 bp, Homo sapiens
tgcagccctgtccagggtcccctaccttccccccagatccctcccagagcaataccaacccgggcctaccttccaggccattcaacctgcagccccccggcctctgtagacatcgcaccccc

SEQ ID NO: 456335 - DNA, 122 bp, Homo sapiens
ggcagcaccaaggcgcggtgcagggaatggttcaggattccgagcagatgcgggccaggccggcttccaggagcggccagcgcaggtgctgctgcgtggtcagcggcgccaggggcactcgg

SEQ ID NO: 456336 - DNA, 122 bp, Homo sapiens
gagcaaaggtgcctggggaaactgcatgggaagtggtgggagggagaataacattgatttcgacagtaaagtaggggaaggcaagaaaagaaaccaagaggccgagaggcatgatcacagag

SEQ ID NO: 456337 - DNA, 122 bp, Homo sapiens
agatcttcaggtccacgctgggcttcggcacccagaccggcacatcgatggccacgcccacgaccctgaaatgcagctgcatatggacacaggagctcagcaacaggagttccttgggcaca

SEQ ID NO: 456338 - DNA, 122 bp, Homo sapiens
atgttaggtaagcaaacaaggttgtttttatttatatccttggaatcttgcaataacgcacgttgcttctggtcattttttggtaacttgctcttgcaaaaaaaattgccaatagtcagaga

SEQ ID NO: 456339 - DNA, 122 bp, Homo sapiens
ggctgcagtccctgctgagagcctgactgcaaactcccaagagagcctgggccagagccacgcaatcaagcctcagccagattcctggccctcagacactgggagataatcagtgtggtgtt

SEQ ID NO: 456340 - DNA, 122 bp, Homo sapiens
agatagcttcttatcttcatgggattgtgcccagaaagaccaagcacagtctaaacattacgcgataagaaaaaacaaaaaatagatcaagtgaccttggacaagtcatcttacctctcgat

SEQ ID NO: 456341 - DNA, 122 bp, Homo sapiens
gggcatttccaggtatagcaggtgacagaaggcggtgccccagtgcacacctggtccccacgtccctgaagcaaatgctggcacctgagacctcccagacaggccccctctgcggactcgaa

SEQ ID NO: 456342 - DNA, 122 bp, Homo sapiens
cctcaccggtgcgttttacctctcgaggcaccgtaagtttgaagtcctccaagttgtggtcggcgccatcatgacgccggcgactgtgagttgtttttttgtttattttcttctaatcttgc

SEQ ID NO: 456343 - DNA, 122 bp, Homo sapiens
tctccactcctgagccaagaaataattctttccggacttcccgagaagctccaggttatccggagtcaacggtaaggagggaagtggattcggtgacactaaggttctttacccactgcgaa

SEQ ID NO: 456344 - DNA, 122 bp, Homo sapiens
gactgtcaatgttgagaatctaacaagtgccaagcattgtcctaggctctggagataaaacggtgagtgagacatagtctcactgctttcaagaagcttgcagttaacttatctatataatc

SEQ ID NO: 456345 - DNA, 122 bp, Homo sapiens
tgatatatgctacaatgtggatgatcctcaaaaacattttgctaagtaaaaggagccagacgcaaaagaccacatagtttatgattctatttatacataatgtccagggacagcaaatcaat

SEQ ID NO: 456346 - DNA, 122 bp, Homo sapiens
acctcttcccataactctctgcatgcagccttctcacaggctccaggccggactttgacacgcacctacttcagtccagactccctggatgcctccccagagccccagtgcattcctttcct

SEQ ID NO: 456347 - DNA, 122 bp, Homo sapiens
cctcggctcttgggcccttggggtgataactggggaggcaacgtttttgtggttcccatgcggggacgttttgaagcacaggggcccacttttgggaatttaagcgagacatagtctccctg

SEQ ID NO: 456348 - DNA, 122 bp, Homo sapiens
cagctcctccgctgtagtattgctccttaaaaacccctctctctgaaaatgacatgccctcgcaatgtaactccgaactcgtacgcggagcccttggctgcgcccggcggaggagagcgcta

SEQ ID NO: 456349 - DNA, 122 bp, Homo sapiens
tttggccagcacggggcggatcccactgctctgaattcagtgtttaatagaaagcccttccgtccggtcaccaacatcagcgtccccacccaagtcaacatctccttcgcgatgtctgccat

SEQ ID NO: 456350 - DNA, 122 bp, Homo sapiens
cccgcccaccgcctattggccgaggaggcgcgaagagccgtaacgattggcccggggaggcgcggggcgagcggggtaggctgcgcgagaggccgagagggggcagcaggcgatggcggcgg

SEQ ID NO: 456351 - DNA, 122 bp, Homo sapiens
gatcctgctgcatgtgttctagggtaaggagatttgactacacctaatccttgacagagacgcatgatgacatgttgagatttgcatttagatcactgcaaccctgaggaggctgaaagaca

SEQ ID NO: 456352 - DNA, 122 bp, Homo sapiens
tggagaactcaggtccggagccggtgaattgccctccgcgcttatggagatcgcctgcagcgccacctgcaggctggaggagcactccgggccccagttcaccgccctggacccagctggca

SEQ ID NO: 456353 - DNA, 122 bp, Homo sapiens
gcgacgggtcactttggccaatgatctgcagccgccagggtattgcagccagtggcgagtcgagggggcgggaggcagcaggttaggcagtgagaagttagtggcgctgctgggacggggga

SEQ ID NO: 456354 - DNA, 122 bp, Homo sapiens
ggatgtggtcccgtggaggagtatttaccagaatctagcttatttagcgtcttcagaacacggcacttgcctggaattatactgaccccctcaacccataccaaccacccagagatggctgt

SEQ ID NO: 456355 - DNA, 122 bp, Homo sapiens
cctggaatttctatctttagaacgaaccaaaggagcaaggcgcaggacctggcaaagaagcggccaacccatttacttcttcttgaaagcagggttctgggcttgggttttgtttctttctt

SEQ ID NO: 456356 - DNA, 122 bp, Homo sapiens
ctggtttcatgcagtgttcaattgcttcacctgacattcctcgggtatcgggttctgtgccgggcacggaggctactaagatgaataacacctggtccatgacaggatggcatctaccccag

SEQ ID NO: 456357 - DNA, 122 bp, Homo sapiens
tcgaggtctccgcccatttcatggcaggaaatcagcgttttccaagaacgcccagtggcgcgggcacgggcctgagtcccgccgcccactgctctcgagaggccggagcagcagctccgtgg

SEQ ID NO: 456358 - DNA, 122 bp, Homo sapiens
gatttcaatgatttaatgggaaacttggaaaaaattgttggaattttgaaaagatggctccgggagcagttaggctggagaactgagataaagtgagaaaataacacacaactcattagcaa

SEQ ID NO: 456359 - DNA, 122 bp, Homo sapiens
cctttccaccccggctctcagccaggtttaagtcggcgggtggggcttcctgtcacagaacgctgtttaaaaactcagtagcatctgggcgtgagcaggctttgtcgggtggagctgattgg

SEQ ID NO: 456360 - DNA, 122 bp, Homo sapiens
tgtttgtggcgagcggcagctgcctggaccagctggactacagcctggagcacagcctctcgcgcctgtaccgggaccaagcgggcaactgcacagagccggtctcgctggcgccccccgcg

SEQ ID NO: 456361 - DNA, 122 bp, Homo sapiens
gctgaacacctgcccatgccggggactgcgtgagagcccccatacctcataaggaccacacggctgaacacctgcccatgccggggactgcgtgagagccgccacacctcataaggaccaca

SEQ ID NO: 456362 - DNA, 122 bp, Homo sapiens
gccccagcatgacttttatcgggacgccgttgtggaagcctcacgcaggagccctgcccccgtggagaagatcccactggtgactccaaccctaccaccatgaatggggtcctgatccccca

SEQ ID NO: 456363 - DNA, 122 bp, Homo sapiens
ggcccagcactccccttccgggcacaagcccagaggaccaaaagccgaggctccaaggggcgtctttaccccacgttcacagcagcgttatttataataaatgaaaaagggaagcgtccccc

SEQ ID NO: 456364 - DNA, 122 bp, Homo sapiens
tgtagggtttctgccgagagatccgctgttcgtctgatgggcttccctttgagggtaacccgacctttctctctggctgcccttaacattttttccttcatttcaactttggtgaaactgac

SEQ ID NO: 456365 - DNA, 122 bp, Homo sapiens
atggcacccaaagcactttatgaaaggttatttcaggaacagcggaagggttactgatcccgggagcacacagcattgcacagtcgtccagatatgctcttcattgagagaaagacatttgc

SEQ ID NO: 456366 - DNA, 122 bp, Homo sapiens
gcgattccgtgcgccttcctgcagttggacatcagttatatttcaggctttcaaagtaaacgacgaactcagcactttggcagagtccaaaatccgccagcgaacttgggtgctagagttcg

SEQ ID NO: 456367 - DNA, 122 bp, Homo sapiens
ccattctatcattttgtcagggccagatgagaagtgtcagataaagtcccacataaagaacgtccctccaccaagaggactagacccaggtatctgagcccccagagggcatgaatggctga

SEQ ID NO: 456368 - DNA, 122 bp, Homo sapiens
acctgcctgaaagaaaaactggtgaattctgaagtcttctaatagtatataaaacaaaggcgctgcttgcacaggggtctttctaacactgatttcgcgtttgacataatagaggatggctg

SEQ ID NO: 456369 - DNA, 122 bp, Homo sapiens
gttgctatcatatttctctgcaatgtgacactcctctgacgggatcatgtgtggagaaaacgtgcccctttgacagagatgttatttcagcagggtgtcttctttcaaagggttctcccttt

SEQ ID NO: 456370 - DNA, 122 bp, Homo sapiens
tggaaggaaagggaggaagactccagttaactggtgctaatctaagacaggacttgggatcgatgtcttaacttgccacagagatattttccagagtggctaccaagtaatgttgaacttgg

SEQ ID NO: 456371 - DNA, 122 bp, Homo sapiens
ccgcagcccagcagagcagggcttggccaagcctggcgccagggacttcccccctacccccgccacaagcccctcgccaggtgagaggcactggcagagtcccagacagatgccccagacag

SEQ ID NO: 456372 - DNA, 122 bp, Homo sapiens
gcactggtgggaactgccccttttattgttatttatttacttatttctgagacggagtctcgctctgtcatccaggctgtagtgcagtggcacaatctcggcttactgcaacctccgcctcc

SEQ ID NO: 456373 - DNA, 122 bp, Homo sapiens
gaccctgaggcgagggaaggcccaggatctgtgagttgcctggaatgccacgcccgaagtcggcccccgtgggggatctccggtgtcaaacttcacaccctttcccctaatgccccacgttc

SEQ ID NO: 456374 - DNA, 122 bp, Homo sapiens
cctcctcggatagtgagcgcggtctccagcggcgagcgaggcctggggtgaggactcagccggatgcggggctgagggtggggggcggggcctcccgtggagagacggcctgcgaagggaac

SEQ ID NO: 456375 - DNA, 122 bp, Homo sapiens
gccggcagctgggcaattgctttgcgaggctgggtgttgagtcgagccgcgggaaaggcgcgtgtcggcctctcactggcgcagcctgcactgccgctgccgcctcgccccgccctgccctg

SEQ ID NO: 456376 - DNA, 122 bp, Homo sapiens
atccctggaaaccgggaccgcttggaatgggacttttcacagtatttcacaggactggcccgttcagacacctgaaagagccggacctctgggcaaatgcaatccaggagctggtccagagt

SEQ ID NO: 456377 - DNA, 122 bp, Homo sapiens
ggatgtgcaggctatcctagaggaataagtctctcgaagtcagctggagtcaaaggccaccgatgaaggaaaagcctgtcagaaccagactagtcctgggccctagactataggttagggta

SEQ ID NO: 456378 - DNA, 122 bp, Homo sapiens
ctcaggtgatccgcccgcctcggcctcccaaagtgctgggattacaggcgtgagccaccgcgcccggcccaggattttattatttgacaggctccaggacagggcaccacctcctccttggc

SEQ ID NO: 456379 - DNA, 122 bp, Homo sapiens
caggtgctgccagggacgctgctcggagctccaggctgcagggacagggccaccccgggccgcccgctcgcccggcctgatgtctcccacccggcactttgatcctctgaaagcctgtagac

SEQ ID NO: 456380 - DNA, 122 bp, Homo sapiens
tcccagtaaaacacgttcaactctccagatcgtggtgacatttccagcttgatgtggtaacgtgattgtgagcttcaggtatgaccttcagcataaatacgtgtgccatctcctgtgcaatt

SEQ ID NO: 456381 - DNA, 122 bp, Homo sapiens
ttggggaccttgattagtaggtcataccgcagtgcccaccgcaagggtggccactgcggacgcgagggcagccccgcctcaagtagcgccccagagcggccactcctcgtgcggccaccagg

SEQ ID NO: 456382 - DNA, 122 bp, Homo sapiens
tcttacagctgttgacgagtgtcctgaaggggcaacgatggggatggcagtgtggccccacgaacaatggtcacagagcatcggctccacttggcaagagaggcaccgtctgctggtcggta

SEQ ID NO: 456383 - DNA, 122 bp, Homo sapiens
tgccggcgttaagggaacgcagggatgttctgggcttgcgcagtggcacaaaatgacgggcgtggcggctatgaatgtgagagcatgcgcaatgtggccccctaatggtggctgcgctgagc

SEQ ID NO: 456384 - DNA, 122 bp, Homo sapiens
ggctccctcccggctgcggggagcggcgtcccggggctctcctgaggcgcccccgctcggcgccagcacccgtcccgctgcgggcacccgcgcccccggcccattgtctgggggccgcccgc

SEQ ID NO: 456385 - DNA, 122 bp, Homo sapiens
tttttttacttcatcaggctggtcaagagggtctcccctacctatcatttcctggccccacgaaatttttgagacgcaatccagcagcctgagagaagtgagaggagttgagctcactgcca

SEQ ID NO: 456386 - DNA, 122 bp, Homo sapiens
gctggctcatgagtgaagctgccgaccttcccagtgagtgttacagctcttaaggcagtgcgtctggagttgttcgttcctcccggtgggctcgtggtctcgctggcttcaggagtgaagct

SEQ ID NO: 456387 - DNA, 122 bp, Homo sapiens
ctgaaagtctggtgagaagacacggcgagaatcggggtccagcacagatgatggcgacagcggagaagggaaggtaagggagggggctcaagcttttatcgttatgggacctcctgtgtcta

SEQ ID NO: 456388 - DNA, 122 bp, Homo sapiens
aatgcagaggtttctaatgcaaatcagactcttcaacatccagagaacataaaacaatgacgccagaccaattcttgtgctccatcggcttggtgcgttataccagaagcgtattgtgacgc

SEQ ID NO: 456389 - DNA, 122 bp, Homo sapiens
gtgacagatcatcaggcattagattctcataaagagcacacaaactggatcccttgtgtgcgcagtttacagtaggtttgtgctcctataagaatctagtgcctcagctgatctgacaagag

SEQ ID NO: 456390 - DNA, 122 bp, Homo sapiens
gaagggctcaggaggcggggcaggggcggggcgttgactatgtcgtagaacatggccaggcggtgcgcggactctgggaggcgaagcttaggacgggcccacttggggaggggcccagtgcc

SEQ ID NO: 456391 - DNA, 122 bp, Homo sapiens
cctgccaaacacagcaagtgtttaacaggatcacactcccctgccatatgttcacatagacgtttgttcacacacattttcaaaggctttatgtgcattctcctcctgatctctgaaaaata

SEQ ID NO: 456392 - DNA, 122 bp, Homo sapiens
gggaggagtgccctggggccttgtcctcctggggtccttgtgtggtcctggaaggtgcagcgggtgatttgcttagcactggggcagaagcctagatggcattccatagaaagcactagtta

SEQ ID NO: 456393 - DNA, 122 bp, Homo sapiens
acatatatctcaggccttcactgcatcttttcattactcctccaaaactgaaaacctatgcgtgagcctctggcttgctgagcctaggcaaagcctacatataataactcccatggagatgg

SEQ ID NO: 456394 - DNA, 122 bp, Homo sapiens
tgtaagtttcattctctaagatgaaaaaatgcttattccatttatttaaaaagaaattggcgagcagaatttgcttggcactctgagagtgactttggcttgaactatgtattagacatcaa

SEQ ID NO: 456395 - DNA, 122 bp, Homo sapiens
cctccacctcatctcacccgggagggagacccaccactgctcccagtgctgcagccacgccgggggccgccgctaccactgcactcgcaggcctcgaggcccacacccacataggtcagtaa

SEQ ID NO: 456396 - DNA, 122 bp, Homo sapiens
tactcacaacacccctggggagtgattttcactctctaaataccatacataaaacagaatcggtcaggcatggtggctcacacctgtaatcctagcactttgggaggccgaggcaggcagat

SEQ ID NO: 456397 - DNA, 122 bp, Homo sapiens
ttcctgtccctctttttcatattttaagtggtgtcctgagccctttctacccatctttatcggagtgacttcaaacaatgatctacatttaaaaaaccttagaattatcatcctcatttgga

SEQ ID NO: 456398 - DNA, 122 bp, Homo sapiens
caggacttcacagattcaaatcttggtacatgacctggcctaagtctctttgaccttacccgaaagatgggaattatattacctacttcacagggttgctagtgagattaaatttgttcatt

SEQ ID NO: 456399 - DNA, 122 bp, Homo sapiens
aggagggcagtgcctggaagtccaaggacatcctggtggacctgggccacttggagggtgcggacgccggcgaagaagacctggaacagcagttccactaccacctgcgcgggctgcacact

SEQ ID NO: 456400 - DNA, 122 bp, Homo sapiens
gcgcgaaaggtcaggcgcatgccgggcccaacttgggctcctcccaggcccacgctgctccgatattgatcctgggagaaagataaacagaaaagctggacattcagtcatgaatactaatg

SEQ ID NO: 456401 - DNA, 122 bp, Homo sapiens
gggaccttgtctcatccttggaaccactcgtaaatcttaggtcaggcagccggcagccttcggggaccacagtccccccaaagctttaggaagccagttactacatccggaaagattcgtgc

SEQ ID NO: 456402 - DNA, 122 bp, Homo sapiens
caccgcgaccccctccatggtcgggagagacaccaggcgaggcgaggcggcgggagagcgcgggagttcggccggcctcggacgccaccactgcgcaggcgcggcagcctgaggggctcgcc

SEQ ID NO: 456403 - DNA, 122 bp, Homo sapiens
cctcagctcttgccaggctgaagagacaaagttgtgtttatcttgaaaagtctttcagtgcgtggtgccacttgtcctggagaacacaccagcctctgcccctgcactgtaccatctcctat

SEQ ID NO: 456404 - DNA, 122 bp, Homo sapiens
catcgactggcagacaggccctgggtgcaacacggctggtttcttcactgtctttgcaagcgagttatcggtgtatacgctgacggtcatcaccctggagcgctggtatgccatcaccttcg

SEQ ID NO: 456405 - DNA, 122 bp, Homo sapiens
gagatggtctgcttgcaaccagatttgactgctgcatatgccaacctcgttgcctctcttcgtccttccttacagaaactagtctagtggttcaataaaggtgctgaatgggtttaaaaata

SEQ ID NO: 456406 - DNA, 122 bp, Homo sapiens
cacaccctgcaccaccaagaaagcaggcgggccgccttcctggtgccaccgagatatgatcgttctgagatcgcgggggtccgccgtactggcaccacaagcaggcagcaccactttgacac

SEQ ID NO: 456407 - DNA, 122 bp, Homo sapiens
tttccttctacgaaaaacttttctgagccggagcctccagcgcgctgtgtattcgttttacgcctcaacgaaactgcagcaatacctcactttccgtactcgcttcctgtctttcccctggc

SEQ ID NO: 456408 - DNA, 122 bp, Homo sapiens
gatgagatacattctcgcagggcagggtgtctggtgaacagaagagtccaacacaaaggtcgcaaaccggtgggcatggcggcatccagcccacagatgtgttttgtttggccttctctgtc

SEQ ID NO: 456409 - DNA, 122 bp, Homo sapiens
tggagggacgctctcccgagactgccgcagacagcgaggtgtcatcattatcgccggttacgtccgacagcctccgagtgacttccaaggtcccgtggccgcgatcccacctgcggcgtccg

SEQ ID NO: 456410 - DNA, 122 bp, Homo sapiens
cagcagtgccacaggagccctgctggggctttgatttgggaaaacaaacagaaatggcaccgtgggcccttctcggcccccaccccaagacctatttaactagaaaactctagctcaactgc

SEQ ID NO: 456411 - DNA, 122 bp, Homo sapiens
aggaggctggacctaggagcgcgggtcacgcccccatgccgcccattggctgcttttgaacgttctgagcccgcccctccgggggccgtggcgtgtttataaaagacaagctgtggctccgc

SEQ ID NO: 456412 - DNA, 122 bp, Homo sapiens
agaagaacaaacagaaaaatctccatgttttcatcctacatttcaaagctgcattgaaaccgcagttcctctcgtcacaaggcatttcctaaaaattcatgaaactctttaaaacaggaagt

SEQ ID NO: 456413 - DNA, 122 bp, Homo sapiens
cctccgcagtctcagtggcgagctctgggtgctgtggcccggccttggcggggcggcctccggctcaggctggctgagaggctcccagctgcagcgtccccgcccgcctcctcgggagctct

SEQ ID NO: 456414 - DNA, 122 bp, Homo sapiens
aggagtcggcggctcggcgagccccccgggctgcgggatctggggtttattttagtccggcgccaggtttacgacagactcggggggcggagcaacatcccaaacgagcaaacaatggtcat

SEQ ID NO: 456415 - DNA, 122 bp, Homo sapiens
atctattcttatcagcttgcctgactgcccaggtcataagtcaaatacttgaaaagcccccgagctgaccatgattgcaatgcattatgggctgcaacaaaatacagggagacaaccctaaa

SEQ ID NO: 456416 - DNA, 122 bp, Homo sapiens
agggagggaggtagcttccgacgacggctcccaacccacgggccctccgctcaccgctagcggaccagcgggcagtccacctgcgccgcctccatcccctgccgcgtagcccacgcatccaa

SEQ ID NO: 456417 - DNA, 122 bp, Homo sapiens
gccgcgtggccggccggcggggggcggggggctgggccgcggagggcgctggggcctgggcgcaccgctcccgggagggtcctggccgcggccccggcgggaaggcgcgggcttcgggagag

SEQ ID NO: 456418 - DNA, 122 bp, Homo sapiens
cggactacatctcccacaatgccttgggcccagcctccctcctgccgcccggctgggtgccgtctccaccaacagaaaggcagaatttccagggccgttctcggcagccaatgagcgcggcg

SEQ ID NO: 456419 - DNA, 122 bp, Homo sapiens
aacaaaaacaaaacaccagggacacatttctctgtcttttttgatcagtgtcctatacatcgaaggtgtgcatatatgttgaatgacattttagggacatggtgtttttataaagaattctg

SEQ ID NO: 456420 - DNA, 122 bp, Homo sapiens
gaggatcatacggggagcggcgcatgagagcagctcaggttattcggcttattgtgtccacgcacctcctcctgtctgacacttttcccgacccccgaggaagccagatgtggctccctctc

SEQ ID NO: 456421 - DNA, 122 bp, Homo sapiens
cggagtaaggaagagcagctcaagggcagtcacggaggccgcaggtgcggcttcttcacccgcggtgctggagttctctcaagtggaagcccaggacgatgaaaacctcataggtaggctgc

SEQ ID NO: 456422 - DNA, 122 bp, Homo sapiens
ggggagggtcagttggtcatctgtttaaacaaagtcctccaagatggctgagaaagcctgcgggaagtgagtgtgggcaagccttccttcttgacaaagatgcccagggagatggtagggag

SEQ ID NO: 456423 - DNA, 122 bp, Homo sapiens
aactctgtgctgcctctccaagagctgccgctcggctcgcgctcaccactgccaccacaacgacagccgctcggtggtgactcccccaacaccccacttcctcgggtcccctccccgctccc

SEQ ID NO: 456424 - DNA, 122 bp, Homo sapiens
attgtctagaccagctgaaaaccaactggaaccaaccagttccttcctcaccatagcaggcgcctggctccccttggaccactgcccaactccttcctcaccgtaggcgcccagctctcctt

SEQ ID NO: 456425 - DNA, 122 bp, Homo sapiens
cagagtgtagactgatgaaattctgtgcggcaaattgaaccagatgtccatcactgtcatcgctactacggcattgtggtaggcattttacatattttatcctttttaaacttaatacaaca

SEQ ID NO: 456426 - DNA, 122 bp, Homo sapiens
cgaggatgcgcggtgcccggtgtgcctggatttcctgcaggagccggtcagcgtggactgcggccacagcttctgcctcaggtgcatctccgagttctgcgagaagtcggacggcgcgcagg

SEQ ID NO: 456427 - DNA, 122 bp, Homo sapiens
agcagagaacagcgggagctcagcagctccctttgaattgcgaggaaaccaagacggagacgggaggtaggagcacgggcctgaagcggtcagccgaccctgtgaggcccgcgctgccgtgc

SEQ ID NO: 456428 - DNA, 122 bp, Homo sapiens
ggcaccttgccaacatgaccccgggaggctgcagcacccgtgtgcccatggggaacagctcgctgggcccttctgtgtgccaggcaccttgccaacatgaccccgggaggctgcaacacccg

SEQ ID NO: 456429 - DNA, 122 bp, Homo sapiens
atttttttccctttcagcacagtgaactggggtccggagtttctattttcctttcacaagcgccattgcgttgcttcctgcagctgtcctgctctctgcctcggggatacctagttccagac

SEQ ID NO: 456430 - DNA, 122 bp, Homo sapiens
accttctgcaggggtctcccaaacgaaccccaagcccttatctcatcagagagctaggaccggtgcatccctctggttaagtgctatgtctctgccaataggctggagcctctcaagcagga

SEQ ID NO: 456431 - DNA, 122 bp, Homo sapiens
agggcaggctcagagtgaccgccaggaagcaacaaagcagcgacacaaacaggaagctggcgacagggtggggcctgcgcgggcctggaggagccggcagcagggctgcgggggagctggga

SEQ ID NO: 456432 - DNA, 122 bp, Homo sapiens
gactcggaacccggggtacttcgtcaaccagaaaacgaacctgtgtaggcgcagtgtcagcggcagccgccggggcgcatgcgcggcccgccctatccgggggggggggggttaggccgcgt

SEQ ID NO: 456433 - DNA, 122 bp, Homo sapiens
gttgtggagagagggaggttcctggactgggctgcagagtggagtcgggccagatcgcagcgcctccgtcagcggcggccggacggggcgagaccggaggggctcggtaggggccgcgctca

SEQ ID NO: 456434 - DNA, 122 bp, Homo sapiens
aggcaggactagagagcagggctggacacaggtccctcacagtcactgttccccagacaccgctccacctggctgtgatcaccacattaccgtctgtggtccggctcctggtgacagctggt

SEQ ID NO: 456435 - DNA, 122 bp, Homo sapiens
agcactcacccctcgggggtccgaggacgacgctgctctcacggtcactctcctgtgacccgagagccagagcaggacccgccaccctcctgtgccgtgtcccttcctgtccaccatgtgtc

SEQ ID NO: 456436 - DNA, 122 bp, Homo sapiens
atgtaaaggcttaaaatataatagcaagatgtctggtctgtcttgggagtctctgatagtcgcagctaattttgggtgtgggtgcagatcctgggctcagaaatgaaatagagcaggccggg

SEQ ID NO: 456437 - DNA, 122 bp, Homo sapiens
aaaccaagaaaaaggaagacatagcagccaggtaagaggaagtgcaacacaagagaactacgaaagggattctaggatgacagcgagcatcaggtctagagcgtaaacactctatattagaa

SEQ ID NO: 456438 - DNA, 122 bp, Homo sapiens
caggattccacacagagagcacagacatgtgttcggtacccctctgcccagcacaccagacggccgggactcggggaaaggcctgtgagaccgcctgtgcctctgcccctgccagcaggaca

SEQ ID NO: 456439 - DNA, 122 bp, Homo sapiens
tacttgtcagcatgttttgctgtttccaaatggaaatagttaaacacctcggctggatcgcgagcagtccctatctgtcaccttccctgccggctaagcgctgccgccgctgccaccgccgc

SEQ ID NO: 456440 - DNA, 122 bp, Homo sapiens
gaaactcggctgggggtgggggctcagaagccgccccagaaagcactgaaagccacagcacgtacacccactccagggatctgccagcaccctgtggggcccagactacaggctgatggcgg

SEQ ID NO: 456441 - DNA, 122 bp, Homo sapiens
aaaaacgtgaacttgaagccgatgatgaacagggtgcagacccgctgccttggggcgccccggagcagccgcagcaggaggtcggggggcttggacatggtatccccagatcagaccaggag

SEQ ID NO: 456442 - DNA, 122 bp, Homo sapiens
tcttccttccttctgagtcaaggctcccagccagtgagtcattcccccaccatccccagacgcaccaccgtcacaccaggtcaggctgggacaggggcaccttgggagcaggacccagggct

SEQ ID NO: 456443 - DNA, 122 bp, Homo sapiens
tcccgctccgtggggggccgcagccacactggcaggagggaatcctgggcctcgaccagacgccggcggcgtcaggagaaacggcccgcgctgggcaggcggcgggcaccgcgtagctcatt

SEQ ID NO: 456444 - DNA, 122 bp, Homo sapiens
acgtccgacgtgtctggtaaggccagagcgcctttcctcggtcctcctagacatggtgtccgctgactcatgagaaatgaaagtgggttgcgcgttgcagtcgtggctggaggctgcagttt

SEQ ID NO: 456445 - DNA, 122 bp, Homo sapiens
gcctgcacagagtgacgtctgcagatatgtgggtctctctctgagcccggtcaggcttcacgcccctcagagcctgccctgatgttacccccagcagggctgtgagttacctggttccacct

SEQ ID NO: 456446 - DNA, 122 bp, Homo sapiens
ggaattaatgtgccacaagtgttgtggccttcctgaactgggaagtccctggctggcccccgggggagaggggcaaatgcctccgggactgacactccaggcagctttgccttctctcccct

SEQ ID NO: 456447 - DNA, 122 bp, Homo sapiens
aaggggccaagcacagtggtacacgcctccaattccagcaccttgggaggatgaggcaggcggattgcttgagcctaggagttcaagactagcctgggcaacatggcaagaccccatctcta

SEQ ID NO: 456448 - DNA, 122 bp, Homo sapiens
gcaggttatcctcaaataaaaaggtcacatgatccagccacgaaactccaagcagagccacggggaggccacacggctcaggcactggcatcaaggatgggcgccaggttttcttaaaaacg

SEQ ID NO: 456449 - DNA, 122 bp, Homo sapiens
gtggggtgcagattgcttaaagggctgggtccgtttggcggccgttgacccggcacccttcgtcctcccagatacatacttgcccaccctttctcatccatgccctggggagaggagtaatc

SEQ ID NO: 456450 - DNA, 122 bp, Homo sapiens
aggggctggggggatggggaggagggtttcaaaagggtggggtgagggggtattgcttcgcgttcttccagctgcactcatgtagggatgaatatgcagaaattgagagggtcaagtccagc

SEQ ID NO: 456451 - DNA, 122 bp, Homo sapiens
gtgggaatccttttcaaccaaggagacctgtccatggtcctgaccacatcatttgccactcgcctccttcatggacaccgtttgctccaagtaccggacgggagggcgcccggcgccaggaa

SEQ ID NO: 456452 - DNA, 122 bp, Homo sapiens
cgcttttaagcatgcacatctgaccaggctagtatgctgctgaaacctttcagtgctccccgtcatctgcaggagaaagacctggcctggccggcaggcccttcaacatctggcccctctga

SEQ ID NO: 456453 - DNA, 122 bp, Homo sapiens
ccgaggccaggcggctagagaaaccgcgaaccaaggacgggggggctgggtctttctggtcgccagggggcagaagtgtagggcaacttaaatccgcaactacccgctgttgcccaggctcc

SEQ ID NO: 456454 - DNA, 122 bp, Homo sapiens
gtggtggcccacccagggcccgaggagcaggactccctcctgcagcgcaagtcagctcggcgctgcgtcaaacagcgaccctcctatgatatcttcgaggattcggatgactcggagcccgg

SEQ ID NO: 456455 - DNA, 122 bp, Homo sapiens
ctggggcgtgaggtctggtttgctaggggaacacaggtccatgaaggccgcggggactgtcggggcagggatggagaaagactcactagagaagctgaacagagcggccggggtcagggcag

SEQ ID NO: 456456 - DNA, 122 bp, Homo sapiens
tgccctgcgcgcagctgtggggcagccctaactccaccaggccaagcctgaagcttcctgcggcgcaagctgcgcacgtgggccttgctgggtggggcagtgctagcgaggccggcgggcag

SEQ ID NO: 456457 - DNA, 122 bp, Homo sapiens
gacacatcctatgaggacagcggctcccaggaggcctccagaggctgggaggcctttcaacgcgaggatcttactggccacaggtgctgctcaaacgaacgctccgaaagtctcagcaggtg

SEQ ID NO: 456458 - DNA, 122 bp, Homo sapiens
aagcctcgcaactccgcgatcccccatccactcgggagcccccgcactcgcgctccggggcgcctcccccacgacgtgtggaaagccgctctccccgcgctccggaaccgttagccgcaccc

SEQ ID NO: 456459 - DNA, 122 bp, Homo sapiens
tgaattttatagtttaattgtgcaatttaaactgtttgtttattctccatgagtgtttcacgttatgcctttgtgcctgcttcagtgctgggggacagaccttctaccctcctggttcatgt

SEQ ID NO: 456460 - DNA, 122 bp, Homo sapiens
aatacacacaacactttatgaagcaaagacttgtcttacctcatgcacacatcttctgaacgcttaccatcaccttccctggggtgaaagccctcactgcatggctgctgtcacactctatg

SEQ ID NO: 456461 - DNA, 122 bp, Homo sapiens
cggactcacatcccatggcaaggaggtgcccgcgatcagtagccagcatcgctgtggaagcggcgaggtccacactgccctgcccaaccctcttgggctgcccgcctcctctcatgtttcct

SEQ ID NO: 456462 - DNA, 122 bp, Homo sapiens
atgctgcgtgggctttagcttccactctggccttaatcttttcctgacttccatgcttctcgtgggcctggggtttccatgatctggctcaaagtcttccacagtaaacgtttcccagttca

SEQ ID NO: 456463 - DNA, 122 bp, Homo sapiens
ttacccctgacgtgtgcttccaggaaagcgtgacaggccacaggcaaagtgcagtcacaacggggctttgcgccgagcaggaaaagtctggatttgaaatcagagcggggccttgccaatgc

SEQ ID NO: 456464 - DNA, 122 bp, Homo sapiens
tgcttcggctagcacccgttggctcaccggcccgccgggcccgcccccggagccccgccccggcccgcccctcggagttgtaactccacgtccgaaggcagtttccaaggtggaagctgggt

SEQ ID NO: 456465 - DNA, 122 bp, Homo sapiens
tcccatgctaggagcaggccgttccctgagaacctcattaaacccggcgttcttgtcacgcgctccgctcagggccaccaggccaccagcccgaccagacctgcaccgaggcccagccccag

SEQ ID NO: 456466 - DNA, 122 bp, Homo sapiens
caccgggtcctcttgcaggatgactggaattgttggcggtggctgtgcacctgccctctccggctcaggggaggatcaggcttgagggctgttgctctggggtaggcacgcagtgccgccgc

SEQ ID NO: 456467 - DNA, 122 bp, Homo sapiens
aaaaaaaaaaagtccttatttcaccttaagacagcttagctggagcctggtgcggtggtccgtgcctgtagtcccagctcctcaggaggctgaggcaggctggagttggaggctgcagtgag

SEQ ID NO: 456468 - DNA, 122 bp, Homo sapiens
aatacgtcacattgatgagcaatagctaagcaggtgttggtaaacggggacgcagtaagccgcgaggaaaagcgcaaagagaatgaacgtcaggcccggcgaaacgccgacctgttggttag

SEQ ID NO: 456469 - DNA, 122 bp, Homo sapiens
ccgggcgcgatgcgttgagcgctcggagggccaaccgccggtccccttggcggcaaccggcggcacccatggaaccactgggcaactggaggagcctgcgggcgccactgcctccgatgctg

SEQ ID NO: 456470 - DNA, 122 bp, Homo sapiens
gttctgaagcaggaggacttcccagggcattccagtttgccgtgtttctttcactcattccgccaaacatatttattggtggccaattttgtgacatcaatgtgctaagcactggggtagtg

SEQ ID NO: 456471 - DNA, 122 bp, Homo sapiens
ccaatcccggtggcagccgtgggctccaggctctcagccacggggactcacaggcagtcacgggctgtgcgcacacctggaaaccctcgtggaggccagccctgcccagatgcctgccctgc

SEQ ID NO: 456472 - DNA, 122 bp, Homo sapiens
ttatctccagtcccctggatggcatgtgtcttaccacggcatctgctctgattaacgtgacgccctctatatggtggccaacatgctgttttgcagaatgtctagatggttcagggtggagg

SEQ ID NO: 456473 - DNA, 122 bp, Homo sapiens
ggctgcagaccctccagggccactgagactggaacatgtatccatgatcactcagctgggcgaagtttggcatgcaacatcctgaaatgtggagtgaagaccaggaatttgcagagccccac

SEQ ID NO: 456474 - DNA, 122 bp, Homo sapiens
tgctggtggactgggcaggtgggtgctgggcccgagctgggtggggcccagcatgggaggcgcaggggagcacaacatcaggcaaagccataaatagccctgactggcccagctgtcagtca

SEQ ID NO: 456475 - DNA, 122 bp, Homo sapiens
cccacctcctcctgccaacccagctgctgccgcccagcctcctgcgtgtccctcctctgacgccccgtgtgctcccgcccagcctgctgaggcctccgctcaggtcagaagcccagctgctg

SEQ ID NO: 456476 - DNA, 122 bp, Homo sapiens
ataatctgaaataggctgattgaactaaccgaacttctgggtagactcccactatagctccgtcttagaaagtctatgtgattactgcttctatataaagggttaaacatgataaaattgat

SEQ ID NO: 456477 - DNA, 122 bp, Homo sapiens
gccccgcccccacccgccggccccgggggtcgggaccccagcgccgcgcgcccagcgccccgcgcccccgccccacccacctgtgcagaagtggccgccgcccatggccgcgctggccctcg

SEQ ID NO: 456478 - DNA, 122 bp, Homo sapiens
aactgccgttgtgtggcctatgatgccctctggaggctccgcagagaggcatcctcctagcgttcaggatctgggttgcagtctgacctccgctctcatataggtactcaagacacagctgt

SEQ ID NO: 456479 - DNA, 122 bp, Homo sapiens
gcccatgccagacagctatggcctctcactcccccatttgggctcagggcagtgtggcagcggcagtgctggggcttcccgggactcggtctgtccaggacgtcccaagtgccttggggtga

SEQ ID NO: 456480 - DNA, 122 bp, Homo sapiens
aggagtgagcgagcttccactcacagggtcacagccaggtgtgcagcccccaggcctgggcggttctagggcatgattttttttaggctggaaatgagctctcacttgagatgcacccctca

SEQ ID NO: 456481 - DNA, 122 bp, Homo sapiens
aataaagagcttcaagaacactctaatctttaaaaaataaaatacctataattggccatacgaaaaaattggtacttgacatatgctgagatcgttttattttgtgctagacaaatgaagtc

SEQ ID NO: 456482 - DNA, 122 bp, Homo sapiens
tccaggtcacacacactcactggggccctctgtgcagagcgaggccagtcctgagaatgccgcgcgggagcggagccgggtcaggacgctgcgccaggccttcttggccttgcaggctgctc

SEQ ID NO: 456483 - DNA, 122 bp, Homo sapiens
gtaaggttgggtaaccgtgggcgggggctcctccaggggcgggggtggggtaacggcgggcggggggcactcaagcgacagggcaggggcgggaaggccgcgggcgggggcggtccctccgg

SEQ ID NO: 456484 - DNA, 122 bp, Homo sapiens
taacacatgatgagcacccagtatacctaccagctattctaccattttgtaactttactgcgtgctttagggattaccacacataaactatacatcgctgcccagtctgcaatcacaaatca

SEQ ID NO: 456485 - DNA, 122 bp, Homo sapiens
cctcctcggcctcccaatcaccccatcttcacgtggaaatgcacttcccaggagcgtgttcgctgtgactgctgccttcccatggctatgcgtgaccctgaggtagggaaacgtttcttaaa

SEQ ID NO: 456486 - DNA, 122 bp, Homo sapiens
ggaatgcggcgaccaatcagggccgcgagctgggagttggcgggcgcggggcgggggaggcggggcggccgggtgcctccgcgggaagctcgggcgggcgggaccgcgaggggtcgcctcgg

SEQ ID NO: 456487 - DNA, 122 bp, Homo sapiens
gaggagcggagaaaggcaggggtgtaaatctggcttccaaactggaagcgtcaacaaaggcgtgggaggtctaaccgcgcaggcgtgcagcttcggcaagctttacaattccaacagcgcgt

SEQ ID NO: 456488 - DNA, 122 bp, Homo sapiens
caacctagtcttcgggtcttcttcacagcgtgtgaacagcttagtattaccgcgggggggcgggagggggttggggggtggtgaggtgaagcaaatcttccttcaacacggtggatcatggg

SEQ ID NO: 456489 - DNA, 122 bp, Homo sapiens
tttgcgagtgacctaaggccacttctcgggggagctgggggttgccttcccacgtctgcgcgtctgcaccccatgcccgggcctggaagtcagactcgggggcggtgctgcagcaccaggcc

SEQ ID NO: 456490 - DNA, 122 bp, Homo sapiens
tcagagaaagcacagaagcagcaaggaagagaaaaggacacagagagaggctcaagcaggcgagggcttaaatccttcctggctgggactacacttggcacccaagccagcaggtggggctg

SEQ ID NO: 456491 - DNA, 122 bp, Homo sapiens
gtcttcagcgaattctgagcaccatggagtagatgatggttagccatagggtacaatcaacggtcgatggttttgattttaattccaaactcaccgacagcgttgaatgttcactgaagcaa

SEQ ID NO: 456492 - DNA, 122 bp, Homo sapiens
aaagaaaaagggggaagggtgtgagttttcggatccgcaggctgctatgaataaagatgccgtagtcagttggcatgcgtcttcgttgcttctgattttttttccttatctgcataaagctc

SEQ ID NO: 456493 - DNA, 122 bp, Homo sapiens
ctgatcctccaggcctcaaatccagtccgcgtttgctaagtgccgtgcggtcggggacggcgataagaactctcctgtgagggagagctagcgagactttagtccggtttccatgtcaacga

SEQ ID NO: 456494 - DNA, 122 bp, Homo sapiens
aagaagtcagtgcattttatggccagtggagtgttgatggttcagtgcacatagcacctgcgtctgtgagtggagtgttgatggttcggtgcacatagcacctgcgtctgcggtgatcagca

SEQ ID NO: 456495 - DNA, 122 bp, Homo sapiens
gtttcccagcaggcttgtgcaggtcgagatgctcacacaggactgaccctggtgccccagcgcatccgggaaaaaggaaccacaaattcctcgggaaatacacagagaagatcccgctgcca

SEQ ID NO: 456496 - DNA, 122 bp, Homo sapiens
gccgtcggggggagctgggcgcctagcgggtggggcaggcggaagttggacacatttccacgcaggtgaggccatccatggggtgatgcgggtgttggggctcgctgctttcgctccatgaa

SEQ ID NO: 456497 - DNA, 122 bp, Homo sapiens
cgattggaccctaagaggatgtctagtctaccctgctgcctggagtaggcctaaaataaccggctaaaatggaactctggcctgttttctgaagccgctagggaaggtgtttccacaacctt

SEQ ID NO: 456498 - DNA, 122 bp, Homo sapiens
tgatccaatgagtaattaagagagggctttttcttccctacctctcccctgcctccaccccgctccccaactaaagcttaacaggttggtggcataatgtggagacttttaaggggtgtcat

SEQ ID NO: 456499 - DNA, 122 bp, Homo sapiens
ggacttcattgattttttcagagagtagaaaacaacttagtttttcttttttcctgaatgcgtcataggcttgtgagtgatttttgtccattcaattgtgccttctttgtattatgataaga

SEQ ID NO: 456500 - DNA, 122 bp, Homo sapiens
cccctcatggtgaaatggaagcgtcaaggaacctgggtggcttcgagtccccacagctaccgactgagcaacttagctgatccatctttgttgacaactgtttcccaatctgaaaaatgcgt

SEQ ID NO: 456501 - DNA, 122 bp, Homo sapiens
ctgaggggaggggagggggaggttgggagggagccgccgccgcgcgcgtgcggccggcgccgccgccgttgccgctccgctcactccagcctgtttgggggcactttgtttgtgtcccacaa

SEQ ID NO: 456502 - DNA, 122 bp, Homo sapiens
ggacactcattttacagaggaggaagtggaggtgcagagccgcgttgtaacagctgggaccgcttatggtggtggcagagcaggaacagaatccagctcacccagccccgaagtcgctccct

SEQ ID NO: 456503 - DNA, 122 bp, Homo sapiens
cacttttacgacggcccctgaagtcgggtttgacgcagactcgaggagtggcttccggcccgcttcccggaagcaagcgtcacgacgtgaagggactggagattttttttttcccctctaat

SEQ ID NO: 456504 - DNA, 122 bp, Homo sapiens
cccgggcccagtgagcgcaggcagggagggactgggatgggggaaacctacaccctaggccgcttgcccgaaagccttcagtcctggagtgggacttggcatctgagccttaactgtcacta

SEQ ID NO: 456505 - DNA, 122 bp, Homo sapiens
aggctcgtcgtcctcagggagcttggagggcgagactgcggcagcagacagcggggatggcgcgggcacggtcgacgacaccgggctcgggtcccaagacggctgccgctccggggcgacgg

SEQ ID NO: 456506 - DNA, 122 bp, Homo sapiens
tccttccactcccagctcctgtaacaatccttcagccacttctgaaaatgctccttctagcgccgtggtctaatttaaggctgggaggaaccttaaaattatctaacccattggcttccaaa

SEQ ID NO: 456507 - DNA, 122 bp, Homo sapiens
atccagggcagaaactgatcacacccaagcccagaggccccgaggatatcgcagagaccccgaggaaatcgatcgaaaccagactcatttccacggttcaggagcttgtcactgctcctgac

SEQ ID NO: 456508 - DNA, 122 bp, Homo sapiens
gcgctggcgaggttttactgctacactgagaggaccattgcgaagcggctcgtcttgcggcggtgagacagccacggggcgggcggcgggcgggacgcgggaggaacgcgagagggagcgcg

SEQ ID NO: 456509 - DNA, 122 bp, Homo sapiens
ttatttcatcctcaggagagtcttaaatttcaagttctttcaggtgaatggatgttttctcggtcttggattgccgttttaaatgacagccagagaaatagaggtaaccccataactttcta

SEQ ID NO: 456510 - DNA, 122 bp, Homo sapiens
ccaaccaataaagacattcagagttggagagcgggcgagtggagtgtcctttagactccgcggactcgacgggagggaccctgcaatgcttaattagaaccggttgccatggcgacagtctc

SEQ ID NO: 456511 - DNA, 122 bp, Homo sapiens
tggtttaaagaaatggcattcttaaattgagagacaaaggtcaaagacaagcagtgccttcgctgttaaaacgtatatcatgaagcacaaatccttaacggcatacagtggcagtccatggg

SEQ ID NO: 456512 - DNA, 122 bp, Homo sapiens
ttaacatccctacgacagccacattgccttagtgttcactgtccagagaaagacaacttccgtgaaatgcccgagtgaggctctgctagtttttggaggatctgatgtaggagaagacgtga

SEQ ID NO: 456513 - DNA, 122 bp, Homo sapiens
gggggaaaaaagctcttcctcacacggagagaaaggttctgctgatagagctgcagcactcgccatgggaaggttagagactgtggaagtgctggcttctgcgagcacacagcgatttgcaa

SEQ ID NO: 456514 - DNA, 122 bp, Homo sapiens
ttccagctgttcctgcagcttcttcaccgtgtccttctcccttgccagctgctcctgggtcgtcttcagaagctcctgcagtctcgtggcggcgcgccccaggtcacttgttaacttcttct

SEQ ID NO: 456515 - DNA, 122 bp, Homo sapiens
agaggtccccccgagggggcgcagccgccaccagagccccggccgagcccgggagcgaagcggggccgagccaggacccaccagctgcttcaggtcctcctccgagagctccgcgtaacggt

SEQ ID NO: 456516 - DNA, 122 bp, Homo sapiens
acctcaggtgatccgcccacctcggcctcccaaagtgctgggattacaggcatgagccaccgcgcccagccctcctgctggaaatgttgaaaccacataagaccagaacagtggtgggagtc

SEQ ID NO: 456517 - DNA, 122 bp, Homo sapiens
ggagcctgaaccctgggggatggggtctgaaggcagccgccgagattcagatgagattggcgcagttatgaacgtgatagcagcctagcatactctagaaagaaaagatgaaaagcgtcggg

SEQ ID NO: 456518 - DNA, 122 bp, Homo sapiens
ggtaaggtgggcccggggtcctctcggagcagcccggggacagctggggcggggtgggggcggggcggcccaggtcagcccgcagcccgcccaacgcccacctgcccaggtgcctggaggcc

SEQ ID NO: 456519 - DNA, 122 bp, Homo sapiens
aagaggaagtcgaggtgctattgggtcattctgtggttatcccaggctctacccagccagcggttcccttgggccagctcgaaacgctggccgtaggtcatgggagctgcaggagctgttag

SEQ ID NO: 456520 - DNA, 122 bp, Homo sapiens
gtgctttgatgccaggaatgccgcctagtttatgtccccggtggggcacacagcggggggcgccaggttttccttgtcccccagctgctctgcccctttccccttcttccctgactccaggc

SEQ ID NO: 456521 - DNA, 122 bp, Homo sapiens
tcgaggaaggcagggcactgagggtcggaggcgcatgcccggccacagcaggtgccggggcgggggcgcgccgccgccgccgcggcggcctcccggcctcccctttaagagccgccaccgcc

SEQ ID NO: 456522 - DNA, 122 bp, Homo sapiens
ccaacctggtctgcagctggagaaaggccatgcgcctctattaccagccagtggggcttccgccttaggagggtcttagaaaagtgtttttccttaatgaaaggagatactgtgcagtaaat

SEQ ID NO: 456523 - DNA, 122 bp, Homo sapiens
agcccagcagggatgcggcccccttggggactgcaggcaccaacttggaggccaccatcccgcaagccatgggtctgaatccctgtggaatgtgtacaagtcctgagcctctccaaggcttg

SEQ ID NO: 456524 - DNA, 122 bp, Homo sapiens
gtaaggatagttgcatgttgtcatagcaactctttcttcacaagttgaagacaagttagacgttaacctgcacattcctcaagagatgaaacaggtgttgatttaggatgtgttaggaagca

SEQ ID NO: 456525 - DNA, 122 bp, Homo sapiens
ctgctttctgcacttccgggtgtatgacctaatctttctagaagctgacccaagaggctccgcaatgtgagccacaaaaagtcatcagcattccctacctgcctctctgcagtctgcagcat

SEQ ID NO: 456526 - DNA, 122 bp, Homo sapiens
atgactcgggagacaaggcctgggtgacggataaatttagcgcacgagtcgagtagctagcgcgggccggcaggcgtgggaccgcgagccgcgcgggggcctcgggggcagccctccatccc

SEQ ID NO: 456527 - DNA, 122 bp, Homo sapiens
ttgcgggagggagcggggcaggcgctgtgggccaggcccctcctctggctcctgcaccaccgcctcttttcgggctccgccggctcccgccgtccctgcaatgccgctctgtgcccgccgtc

SEQ ID NO: 456528 - DNA, 122 bp, Homo sapiens
gctgcaaagtttcatcagggctagggggctggtgccgcctcataggcagacgaggatcatcgctgggggacctttcccgtgggctttcttcctttctctctttgcctttagtttgcccgaca

SEQ ID NO: 456529 - DNA, 122 bp, Homo sapiens
ccttaatgcccccatttattaaggacaatatttaaaactcggcaagccaggagaggcaaccgaccctcagtgcttgaagctttctttcgcctgggcgtccgccctcagctctttctgcgctc

SEQ ID NO: 456530 - DNA, 122 bp, Homo sapiens
atgcatatgtggggccggatagaattgtggcaggcggcgctggggctgatgctcctcacccggattatcctctctaatcctcagccctgtgaagtgggcactgccctgaacattttgtaaat

SEQ ID NO: 456531 - DNA, 122 bp, Homo sapiens
tgttgttctccaggaagtggagtgggaggggggtggggtcactagggcaggcggggtccccggaagcctctgtccctgcataaagcagcctgtcctggcaagggatggtcatcctctcaacc

SEQ ID NO: 456532 - DNA, 122 bp, Homo sapiens
ccccccaaatcgtcttcctcccatggcaatgactttaggcgcctgtgagaggcacaaaagcggcaaagcttcttctactagttcttctggtaggcttcacttaactgggacttttactctag

SEQ ID NO: 456533 - DNA, 122 bp, Homo sapiens
tttcctcttatatcaaccctgaaaatgttgtctgtccgtttcctaagtcgtgtttccactcgctggtgtacggattgtcaggttctaccccatgcagctgggtgggcctctccggctccttc

SEQ ID NO: 456534 - DNA, 122 bp, Homo sapiens
gcccctctggccccttgctgcccacatcccagccacatccggtgctcccttacctctagtcgctgtggtgttccgaggacagcgggtgctctgtgtgctccccaccttgcccctcctcacct

SEQ ID NO: 456535 - DNA, 122 bp, Homo sapiens
tgcccacacacccacccctcccacaggcagcccctcgctcacccatgggcgtgccgatgccgtagcccttggagtcaatgaggcccccgatctgggtgaggttgcagttcctctgcgtgacg

SEQ ID NO: 456536 - DNA, 122 bp, Homo sapiens
ctcaaagcatggcccatgtaagttggtgtttcttcttgaaatatggggatttttatattacgtggctattttccttaattgacctgaagcattcttcatcagaatgtaccatctaattgcct

SEQ ID NO: 456537 - DNA, 122 bp, Homo sapiens
ggaggcgtgtcggcgcctgagccagtagggtgtgcagggtggaagaggccacagaggtgccgcctgtctgtttgtgccgccaggagaccttggaagggacagagaaaggtaacggaaggcca

SEQ ID NO: 456538 - DNA, 122 bp, Homo sapiens
acagataagcagaaggtcaggtgaatcaacgataagggatgataaggctccaggacccaccggctgttcctgcctcctggggccccacagaggaagctcattttcagcttactgcagaacct

SEQ ID NO: 456539 - DNA, 122 bp, Homo sapiens
agagcgcgggaaagcttactggtgaggcaagtgtgcgtctatttccatggcgccctggctcgcggcagcccctggctgggcgaggggtgtgatgtgggagtggggtgggagggggcagcagg

SEQ ID NO: 456540 - DNA, 122 bp, Homo sapiens
ccttccctccgcagcggctcgcgcagctccgctcttgcgccccgcgcccggctcagcggacggactagcgcgcccggtcaagaatcctggggaacccgctccgccccctggctccagcgccc

SEQ ID NO: 456541 - DNA, 122 bp, Homo sapiens
catggtttcaaagatttctgtcaagtttatgttaatgagtcttcattttgcccacgtcaccgcatttttagaaaatgcgcgtcagctggagcaatctgtggacaaaaaagcaaacctctgct

SEQ ID NO: 456542 - DNA, 122 bp, Homo sapiens
gactacatgaaagtttccctggtgctgagcaaaggagtaagagaaaaatgaaataaaaaacgatcattcacccctgagaagttatgagtgttgactgaccctcactgggagagtccctggga

SEQ ID NO: 456543 - DNA, 122 bp, Homo sapiens
aagcgcccacatgcgcccgtctccaccaaaactgagaaagccgccggtcacctacgcccgcgtttcccgtgcaccacctagccgctccgcatggcggatccagccaatcagcgcgccgtgca

SEQ ID NO: 456544 - DNA, 122 bp, Homo sapiens
tagtaaagcactttgcagaggaaggcggtgctaattgagcagggcgtgaccgacctcctccgggttttcaccccttgcccttgagagaatttaaccaggcgaactggatgttccctttaaag

SEQ ID NO: 456545 - DNA, 122 bp, Homo sapiens
ggagctcgccaagatcttccaggcggacgtcgtgctggggctggtctaaggcgccctcaccgtgcttgctctcgctgccgacgctatttttccaccagctgtaggagaagcccgaagaccac

SEQ ID NO: 456546 - DNA, 122 bp, Homo sapiens
acgtacatcgttcaaaacgtgcccagtgtttccctccgagggcactgcgtgccgcgcaggcgcaaagggccaggtgctggaggtgctgtcatggcctgcctcaacccggtggtaaggaagac

SEQ ID NO: 456547 - DNA, 122 bp, Homo sapiens
ctcgcaaccctcctcgaaggacgcacaaggggcggggcttaaggccaacggaaaacagagcgagaggcgcctgcgcattaccgaagaggcaaagttgtttttgtagtttcttcgggcttgct

SEQ ID NO: 456548 - DNA, 122 bp, Homo sapiens
gaggtcgttgggttttagacccagagagcacgttccgtaagctcccggcccaaatcccctcggaaaaattaatcacaaccaccagcggatgcaaaatgtgtgcctgtgttgagtctgtcttt

SEQ ID NO: 456549 - DNA, 122 bp, Homo sapiens
gaagactacaaataaattatgaagtcagcatcatttctataattaactttcaaatttggtcgagttctgcagccaaagcaaaatggcatacagtatcttcttatttgggaagaggatgtccg

SEQ ID NO: 456550 - DNA, 122 bp, Homo sapiens
tgaaaggtgttctccactaagggacaccccactgaagtccccacactgcttcccggtgagcgtggctgctcattgtgagaggtaaagggatgttgggcattccttggtgaccgagctctacg

SEQ ID NO: 456551 - DNA, 122 bp, Homo sapiens
aactcaaccaattgccaatcagaaaatttttcaatctacttatgacctggaagccccccacgcccttcgaggtgtccctcccttctggattgagccatcataaatcttacatgtattaattc

SEQ ID NO: 456552 - DNA, 122 bp, Homo sapiens
caagctatcaccgtgagcagtagcatcaacagttagttattcagggatttggggcacaggcggttgtgaccacatcacaaaagttcaatttgttgggttaggcgtttagccataacctaagt

SEQ ID NO: 456553 - DNA, 122 bp, Homo sapiens
gacaatcaagctgctgcggcctccagggaggtcctgtctccccagccgggtgtcggagagcgattggggagctgagcgaccacccaccgctccatggccgtccccttcgaaacacggcgcac

SEQ ID NO: 456554 - DNA, 122 bp, Homo sapiens
aatctccaactatgtcgtaaaatcccttgccagtttacccagtctgctggagaggctcaccgtttctttttcgagcgaattacacagttgtcttggcagcgtgatttgccctctggttcctg

SEQ ID NO: 456555 - DNA, 122 bp, Homo sapiens
ggaccctggctcctgcaagaattaagacttgcggcgtctcacggaacttgggaacaaggacgacccccagaatcccccttgccattcccatccctgtatggtccttcctctagggctgtttg

SEQ ID NO: 456556 - DNA, 122 bp, Homo sapiens
actgctagacagagggtccagagtggccaatgagtgtcagggtgggtggctgaatgatggcggtggccactgagctctgtatacctgatgggcctgggtactgaagcaggtagcacccatta

SEQ ID NO: 456557 - DNA, 122 bp, Homo sapiens
tgagcacactgcctcaccatgcagctggtcatcagagcctcagagggcaaggaaggttcacgtatagagggaaccagtgaaaggcaaatttactactgctgcttcaatctgtgaaatcgcaa

SEQ ID NO: 456558 - DNA, 122 bp, Homo sapiens
gaccttccttggctgccccctagcgagggccgcagcgcagcctgagacacccgccggggccgctccacggccgtcggatttagactggaagctcggtccaggtccccagcttgatgcgcccg

SEQ ID NO: 456559 - DNA, 122 bp, Homo sapiens
cgtggtagctcttcccggggaacagcgaggggcgcggatgtccctcttcctaaaactgcacgcggggtgcgatccgagacccagcggcggcgagcgcgcccgagtctgctcgcgggcgccag

SEQ ID NO: 456560 - DNA, 122 bp, Homo sapiens
ctcagagctctctcgttcagggacccgagagtgacacgcgtggcatctctttgcaacccacgtccgcgccgcagcaccctcccctgcaggtgcctgcccagccccgggatgcccctgacctc

SEQ ID NO: 456561 - DNA, 122 bp, Homo sapiens
ttcccatccccgccctccaagctcccgggagcgcctgctccgctgcccgcagacaggcgtcgttcaaacctcagctctgctcggtctgcattcatggaccccagatcttcaccctaggattt

SEQ ID NO: 456562 - DNA, 122 bp, Homo sapiens
agactcctgggctcaagctatccacccgccttagcctcccaaagtgctgggattacaggccgtgagccaccgcacccggccttgtactgttactgtttatgggaggcagtacacagctgggc

SEQ ID NO: 456563 - DNA, 122 bp, Homo sapiens
aagcgaactgtttgaaacgcacaaagtattaactgcgcagtccagatcctttatcctgggcgcagcaggacgggacggaagagctggggctgccccgtactctgtcgtgggctgaaggcacc

SEQ ID NO: 456564 - DNA, 122 bp, Homo sapiens
tcagtgcggcgccagctctgcagagcccagacagggtccggttggggagggtgagtccttcgagggacccccgcgggcgggaaggaggcggagaaaaggggctgggggcgcgggcggcgatc

SEQ ID NO: 456565 - DNA, 122 bp, Homo sapiens
gcccagggagtccctgcctggcaagctggggctcggggaaaagtccagcagcgagagggccgcgtgtcccgggacggttccaggggagcccgcgcggaaacgcggaccaggcgcttcggccc

SEQ ID NO: 456566 - DNA, 122 bp, Homo sapiens
ttctgcctttcattctgattaggtcaatctaggttacatgtccatctttggaacattaaccgtagccaggggaagaccaagcactgaatcagttgctggtaaagagtacaagattaccagcc

SEQ ID NO: 456567 - DNA, 122 bp, Homo sapiens
tcggatttgctgcgcagcctcagctggccgggtgccgccccgcccccagcgcctaagccccgcccctaggtctccgcccctcggatcccacggggtcccttgcggccctcccactcctcgca

SEQ ID NO: 456568 - DNA, 122 bp, Homo sapiens
acctccctgcctcattctcctgcctcagcctgccgagtgcctgggattgcaggcgcacgccgccacgcctgactggtttcgtatttttttggtggagacagggtttcgccgtgttggccggg

SEQ ID NO: 456569 - DNA, 122 bp, Homo sapiens
atgtcgctgcccttctcgagccatatttgggtgttgggcactagagccccctccctcggccggttcgcggcctgggcccccgcccgggtcccctgcgttgaccaaagaaggagcgggttggc

SEQ ID NO: 456570 - DNA, 122 bp, Homo sapiens
tgtaccctgggatagggagcgatctccgagcgaggcggcaagatggacgcgggatttttccgcgtaagtagaagcgccgggcgccggggtgaggccagggacttctcggtaaggcctggtag

SEQ ID NO: 456571 - DNA, 122 bp, Homo sapiens
gggacgtctacactcccccaactccagttgccgccgtgtgcgaggcccggtcggggtcctcgttgtcagccccgggcctgttccgcagaaggggaaactgaggctgtctttggaacctcggc

SEQ ID NO: 456572 - DNA, 122 bp, Homo sapiens
accagctgagtgtcctataattccgttcagcctctacaccatctacccggcgatggtgtccggccccacgaggggaagctgtcccacaagccacccgcactgcaggtcccgatcacaggtct

SEQ ID NO: 456573 - DNA, 122 bp, Homo sapiens
ccggcagctgcatggagggcgggctgcctttggggtccctggcagcggggcggggcggggcggaggcgccactcgttcctccaggaccccccttattccttaggtgtgtgcggtttggggaa

SEQ ID NO: 456574 - DNA, 122 bp, Homo sapiens
gctgggaactcctgccctgcggactggaatgggtaccgagatgaaatgctgggtgcgctccggctccccccgcccgccccggggcagaaggtttagggctgggaagaactctgattaggttt

SEQ ID NO: 456575 - DNA, 122 bp, Homo sapiens
tacctgcaatggtgacacttccatggtgacggtcgtgaaggggctcaagaaccctgaaagcgactaaacaggcaggaccccacgagaccacccccgaccaagccgcttctccacagacgcgc

SEQ ID NO: 456576 - DNA, 122 bp, Homo sapiens
gacctcatctgcatctggcatagccttaattaagtcttgagaggtctgccctaaacaccacggaacccgaggggggtcttaactagtcatagtctcaggaccacacatctccatgggcattg

SEQ ID NO: 456577 - DNA, 122 bp, Homo sapiens
cagacccaggcctcacacccggctgggtagggaccttcgtcaccgtaaggcatgtgtggacgtgggtgtgaacgggacatccaggtggggagagaattctcctcaaccccagaaaagacgaa

SEQ ID NO: 456578 - DNA, 122 bp, Homo sapiens
gtgtgggagcgcatgcgggaggccctggccgctcctggcctgcgaacgggcggcgccaggcgtggggggtcagccctgggctttgtcttctgggacttgtcaaagtcggaagcctagtgctt

SEQ ID NO: 456579 - DNA, 122 bp, Homo sapiens
aaaacacaaacaaaaacacctcaaggctaaaaagccaaagaaagggaagcccccctgcagcggaaatcctgtccttatcagaggaattggcagatattctcaatctgctatgtcaaaaaggc

SEQ ID NO: 456580 - DNA, 122 bp, Homo sapiens
tagctcctcagcctaactactgcagaaaccaggagtgcgtcctccttttcggattcttgacgtcaagctccgacagccttggagcgtcgcaagggcggtagagagctgagggagggtgacag

SEQ ID NO: 456581 - DNA, 122 bp, Homo sapiens
ccccagccctctcccgccagcgccctccccgccccgcttccagcacggtccctaaaggcgcggacgactcaagccggcagagccgagcgtagagatccccacctcgccccaccgccccagtt

SEQ ID NO: 456582 - DNA, 122 bp, Homo sapiens
gcttctctttttgagacatttcaagtacttttctcagtattatgaggtagattacatgtacgaatgactcaacatttctgaggctgcttaagagtgttttctggtaagcctagccactacat

SEQ ID NO: 456583 - DNA, 122 bp, Homo sapiens
ccgcgttcctgccgaggaaacaatggccctcggggttaagacactgcccaacaccggccgcgcctgatagacgcaggttccgaatgcaggccccctccaaagtcttgcccactgctccacaa

SEQ ID NO: 456584 - DNA, 122 bp, Homo sapiens
gggagagttcggggggctgcggcgcgctggggcgaaggtggctgctgggccgcgggctggcgcgggggcggagccggagctgcactcgcacccccggcccgcgtctggcctccctcgcgggg

SEQ ID NO: 456585 - DNA, 122 bp, Homo sapiens
ccctgcagtccctcttatgacggacactctgtctgcaggtttcggtcccctccctgggaccggcctagctgtttccagccctttctcattggaagccctggctcctggcatctgtatgagtt

SEQ ID NO: 456586 - DNA, 122 bp, Homo sapiens
gtcgcggccctactgcctcaggagacgatgcgcagctcatttgcttaaatttgcagctgacggctgccacctctctagaggcacctggcggggagcctctcaacataagacagtgaccagtc

SEQ ID NO: 456587 - DNA, 122 bp, Homo sapiens
ggctccgtcgcggctgcccattgctcttttctgggtcccaagcacagaagataagactgtcgtactttcccctgtcatcccaggacccttttaacttcctctctcgtcttagggctgggaag

SEQ ID NO: 456588 - DNA, 122 bp, Homo sapiens
acttgtatatttcccacacaaggggtgggtgtcctgatgctaagcagcaaaccaaccagccgaccaaccaaccaaccaaacgtttactattaagcctacagatgtagtagtctctgaacaca

SEQ ID NO: 456589 - DNA, 122 bp, Homo sapiens
ttcagcccattgccagaacttaactgccccggttagtaatggcttaagagttgcttctgccgacatgtactaagtgcatgtcgacctctgcaagtggcggtgcgtatgcgtgccactgaaca

SEQ ID NO: 456590 - DNA, 122 bp, Homo sapiens
agaatgaatccttctatttcctatccggtaaagtctggttttttggggatttctgagctccgggaagaaatatcaaaaactaaccaaagagaaacatgcttgcattattccacttccctgca

SEQ ID NO: 456591 - DNA, 122 bp, Homo sapiens
gaacacagctcacaaccaactaatacaatattctactgggcgcgctgtcagcgggccccacgcgggagccggctccccgaggaggacggcccagccgcgcagcgcaggccgaggagggaggc

SEQ ID NO: 456592 - DNA, 122 bp, Homo sapiens
caaagcagggctgaacctaacggctgcccaggtctagtcccttctcaaacatgccacttccgtgtcctgaagcacaggtctgcggcggacctccccaggccaggatgccccgttgttggagt

SEQ ID NO: 456593 - DNA, 122 bp, Homo sapiens
tattcttcatttgatttgttttatttgctcatgtaggaagaaaggtggtacttttatttgcgttaatggtgcattagggaagagagaagttttgctaattgttattttcattttcatggtgg

SEQ ID NO: 456594 - DNA, 122 bp, Homo sapiens
ttctttctgctggggctgtattccccctgcccctcccgagcagcgaatgggatgagcgaccgtgaaggcgtcacgtgggaatcctgatgggacctgtcccattagtgtgtgcatgtcactca

SEQ ID NO: 456595 - DNA, 122 bp, Homo sapiens
ttggtgcttctgctaggcgaagatacgatgggggtcttccccttcgccattttacccattcggaaggaactgagataagtgcttttcaaccaaccttcgtcctttttttaaacataaaatgg

SEQ ID NO: 456596 - DNA, 122 bp, Homo sapiens
cccccaggctcagtctattcacctaaggtaaaactagaccctatttgtacagaacatattcgtctttgtgcaggcgcacacagaactgggggagctctgctctggcccaggaaagagataga

SEQ ID NO: 456597 - DNA, 122 bp, Homo sapiens
tcggggtgctccattcctaattcctttagctttggggctctgcatatctgacctggggctcggctgacagggagcacctgataactatcactggttaaaggtagcatgttcaggcatcttca

SEQ ID NO: 456598 - DNA, 122 bp, Homo sapiens
tgaacttctgtttctctactaagacaggaattaagaaagaggttgtgaggctcactgagccgataagggggaaaatgcattgtaagcaaggccatgtatagaatagtatttacattttaacc

SEQ ID NO: 456599 - DNA, 122 bp, Homo sapiens
ggtctggggagtgggtctcaagacagctacgaggggctggcaccgggaggctttggctaacgcggcgaggccccggggcctcggagaccagacgcctccggcctgggggtgtggcgcgctgg

SEQ ID NO: 456600 - DNA, 122 bp, Homo sapiens
tgtcctaagacacagagtgaatgtccagtctccactctaattttgtgtttacatatttgacgtgtgactcacccttgtaatggattcgggctgtttctgagagtgatatctgaagggctttc

SEQ ID NO: 456601 - DNA, 122 bp, Homo sapiens
ggtccgtcgccatcacctcctcttcctcctcctcctcgcccactcctgcactttccaccgcggcggtcgcctccccggaaagcactctcaactccggcgcccgcaggccacttccgcctatg

SEQ ID NO: 456602 - DNA, 122 bp, Homo sapiens
cagcgcccagcgtgcgcgggtatctctgaagttggggtttaagattcttgcccgtgagagcgaacgagcctgccgtacttctgattttgaaacacctgggtctgggcttcccgggcgagcgg

SEQ ID NO: 456603 - DNA, 122 bp, Homo sapiens
agggtccattcaccccatcccttttaaggttctcctttctccgaagaatttggggaaacgcggaggagattgcctgctttgagtcagcacaggctgcacccagcttccacaccgctctactc

SEQ ID NO: 456604 - DNA, 122 bp, Homo sapiens
agagttcctgacctgtcaccctcctcacatgcagctaccaagaactgctcatcaccacggcgatcaccaccttcccagtgggctgctgagcagactccacactggtctccctgcctctgctg

SEQ ID NO: 456605 - DNA, 122 bp, Homo sapiens
ggttctggattggtcagtctagagttccaggggtgtggccaaaagtctgtgaggcggggccgtaggcagcctaaatcaggcatcggcgcggtcagcctcgtggcgcgcccacgcccccacgc

SEQ ID NO: 456606 - DNA, 122 bp, Homo sapiens
ccgtcttccctttgaagaggcagtagatgcccttggctctgcctggagcgctccatgtttcgtgatggaagtctctggatggctctggtaacaccgggtcccccatatggctaatttagaaa

SEQ ID NO: 456607 - DNA, 122 bp, Homo sapiens
gctggcctcatgttatccccgaaggggcgtcacgccggcctgatgttatcctcgaaggggcgtcacgccggcctcatgttatcctcgaaggggcgtcacgccggcctgatgttatcctcgaa

SEQ ID NO: 456608 - DNA, 122 bp, Homo sapiens
agctcctagtaggtggtgggggcgcagcggctgtccccactcagtcctggtggggtcgcacgtaacggtcctgagctatgcataagccgtttgaccacgcatggagaattttaccacccaga

SEQ ID NO: 456609 - DNA, 122 bp, Homo sapiens
ttcaggtagtgaagagtggtatgagtaatactgtgagccaacagttagaaatcctaataccgaactgtggatgtatatctgagggcaatctttactacagctgctgccgtgaaagtcagaat

SEQ ID NO: 456610 - DNA, 122 bp, Homo sapiens
acctcaggtgatccacccgccttggcctcccagagtgctgggattacaggcgtgagccaccgtgcccagcctaatgtttgtaactcttgaggcagagaaccttccacagaataagcatttta

SEQ ID NO: 456611 - DNA, 122 bp, Homo sapiens
agaataaagcctacatttgtgggtggccacaaatcttagctaaaaattggctgaactatacggacgtgacttagagaggttggatttattgaaatgttcacaggctgaggtgtcagaagagt

SEQ ID NO: 456612 - DNA, 122 bp, Homo sapiens
cattctgtgtgtttgcatacattaatcagatttagagatgatagccttagctctgtgccccggcaaagataagaactatataatacttttttttaaacaaaaatttcacaagaattttacag

SEQ ID NO: 456613 - DNA, 122 bp, Homo sapiens
cccagggctagccaattccccgagacagtaagggactcacctgcaaatgcaccttccatacgcaaaccagccaatccgaagcccacacccccagccacctccttcatcagactgttatactg

SEQ ID NO: 456614 - DNA, 122 bp, Homo sapiens
aattctgcctccgtcttcatcctgttagagggctgcgccttcatttcaaagccaagctcgcgaaccatcatgtcatatgcatcgggctaaggtagaaagaagaaattcttcattttaaaaat

SEQ ID NO: 456615 - DNA, 122 bp, Homo sapiens
tgctcccaccaattttcttcccccaagtcacactgcccaggaaagaggaaaatgcacccccgagcagagcttggcaccccagggtatggagaacactgctcctaaccctttagtgcctgtca

SEQ ID NO: 456616 - DNA, 122 bp, Homo sapiens
aaccataagtgaaagccagttcccttgaataacagactagtttcccccttttcttttatccgccttcttcctgatccccacacactgcaggcctttcctctctttcattgacctatttaaaa

SEQ ID NO: 456617 - DNA, 122 bp, Homo sapiens
cataatgcagcaggtcccaggtgtaacccggaggaaaaggcagacaaggtcctgcgatgccgcagctgaaaggaagctgacgccaacgggcttctcagaagaacaatgactcattagtcccg

SEQ ID NO: 456618 - DNA, 122 bp, Homo sapiens
gagcaatcccttctccctcctcctcctccccccgctactatccgcggcccagagaactgccgcttgccgccattgacacgcacagatagaacccaaagaaaggcaaagagtcctgcccggca

SEQ ID NO: 456619 - DNA, 122 bp, Homo sapiens
gtggcccgacattctaggtaacctgattccccagacgggataggcggcggcctgctgctgcgaaggcgcgaccacgtgacctttcctgcctgcaccggggaaatgcataccttgttcagaaa

SEQ ID NO: 456620 - DNA, 122 bp, Homo sapiens
acgcataacgtccacgtggagattgagcagcggtggcatcaggtggagaccacacctctccgggaagagaagcaggtgcccatcgcccccgtccacctgtcttctgaagatgggggtgaccg

SEQ ID NO: 456621 - DNA, 122 bp, Homo sapiens
gtggcttatggagaggcacgaagcacacacaacgcaacacaatccgtccaagttcacagccgcagaagaaccacacccaaaattgctgagagtgtgaaccttgactgccttacaaacacaga

SEQ ID NO: 456622 - DNA, 122 bp, Homo sapiens
cttgagagaacttcagaccagggcacggccagctggaggccacctaatagggagggtgtccggagaatagatacccttgaccacactctcttctctccccaccccccactggctgaatccag

SEQ ID NO: 456623 - DNA, 122 bp, Homo sapiens
gatggaagacccccgtccccatggaggaggatcccctgctggacacagacatgctcatgtcggaattcagcgacaccctcttctccacactttcttcacaccagccggtggcctggcccaat

SEQ ID NO: 456624 - DNA, 122 bp, Homo sapiens
tgaaaagtggttgaactgccactcacctcccaagtagagtgagtcttcctccatgtcgcccgcaacaaggatcacaaggtttttctgctgggactgcaggttgcagaaagacgctatctctt

SEQ ID NO: 456625 - DNA, 122 bp, Homo sapiens
ccgcctcccgggttcatgccattctcctgcctcagcctcccaagtagctgggactataggcgcctgccatggcgcccggctaattttttgtattagtagagacggggtttcaccgtgttagc

SEQ ID NO: 456626 - DNA, 122 bp, Homo sapiens
cgaagcgttttcttatttatttccgttttctcgccactacagcctcctgacaaggtgatccgggcgggccccgcaggaattttatcccctcaccggcctcacactagtatcgcatgtccact

SEQ ID NO: 456627 - DNA, 122 bp, Homo sapiens
tacaaaggtggcagccacctattgtctccagaaaggaggctgtccctgtgggtgtggtgacggtgggaaaggagaggcacctgcaggctgaagccaagatcacctgattttcaaaaccaaat

SEQ ID NO: 456628 - DNA, 122 bp, Homo sapiens
atgtgtgagctatgcggtcaccaaggcccaccctgccctggtgtgcgctgtcctgcattccgaggtggtggtggcccttatactgcagtattatatgctccatgagactgtggcaccttctg

SEQ ID NO: 456629 - DNA, 122 bp, Homo sapiens
tccgcagcacatgccctcggcagggggagctgcccggggcagcctggctcttcttcaagacggccgcgctgttcaccggcacggggccctcggtgtcactggtgtcacagctggagatgggc

SEQ ID NO: 456630 - DNA, 122 bp, Homo sapiens
ctctgggcagaagtgctggcagccgctctctgaaaagctaggtgttgcctcagggtctcccggtgtcctgtggaaaatgcctggccacggtttccatggttcccaggctccaaccctgcagt

SEQ ID NO: 456631 - DNA, 122 bp, Homo sapiens
acgaaacaaaacaaaagaaaaaaaccttagtttcagcccgcacattccctcaactcctatcgctgcctgcaaatgtttcgccatcttcttggacaatcctaagagggcattgcagaggcttc

SEQ ID NO: 456632 - DNA, 122 bp, Homo sapiens
agagaagcccggtctccgggaggcagcgggtcccagcggagggccatggagtggcgccagcgcggctgggtgggaccacctcttctttcccagcagtctgggccaggatgggggcgagggtg

SEQ ID NO: 456633 - DNA, 122 bp, Homo sapiens
cttcgccgccgccatggcaatgagacagacgccgctcacctgctctggccacacgcgacccgtggttgatttggccttcagtggcatcacgccttatgggtatttcttaatcagcgcttgca

SEQ ID NO: 456634 - DNA, 122 bp, Homo sapiens
gattttcttttctcccgccttcttggcagccaggacatggacatgtgacttgagatcagccgactagagatctcagctaggactaggaagctggagtgagtcacacaaaaatgagaaatcac

SEQ ID NO: 456635 - DNA, 122 bp, Homo sapiens
tgacctcctcccaggccagggcttccaaggcagggaagaaggataactcttctctagttacgagttcaggcacctgctgctgcttccaggtttggtataaaaacctcagcccaggcaaagcc

SEQ ID NO: 456636 - DNA, 122 bp, Homo sapiens
tcatgcagtcactaagccaaactgaggatccagaaatgagcttttaggtttacggtcaatcgattttcagcaagggcaccaagaggatgccaactggcaaaatacagtgttttcaacacatg

SEQ ID NO: 456637 - DNA, 122 bp, Homo sapiens
cctcagctcccggttcctcaaccctgggtccctcagcccactgttgggtgccggcggctccgcgctgtcatcagcctcttctgtccacccacccgggggcgctgaaaataatcttctctggc

SEQ ID NO: 456638 - DNA, 122 bp, Homo sapiens
ttgcggcttgtctgccagggcctcagtcctctcacctccgttgctgtttgtgtctggatgcggagcgtcttcctcagtcctctcacctccgttgctgtttgtgtctggatgcagagcgtctt

SEQ ID NO: 456639 - DNA, 122 bp, Homo sapiens
gtcacacccaccacaaccacacacggcccgcccgtctccgttctggaggagtcgtgtccccgccccccagactgggcctgaccctctgtatgtaccctgccgggctcctgcgggcacccagg

SEQ ID NO: 456640 - DNA, 122 bp, Homo sapiens
cacaacttgtgaagaagcgaacacttccatggattgtccttggacttagggcgccctgcccgccttttgcagaggagaaaaaacttttttttttttttgcctcccccgagaactttcccccc

SEQ ID NO: 456641 - DNA, 122 bp, Homo sapiens
gagggtgcccaggctcccacctgagtgccgtgagctccaccttctcatggtcgttggtgacgagctccgggatgaggctgaggtgggagatctgtgtggaggcccagccaaactggaagatc

SEQ ID NO: 456642 - DNA, 122 bp, Homo sapiens
gaagctgctgccgctgctcccactgccagcaaccgcccgggcgtggcagggacaggcgggcgacttcacaacatcatcactcggcgacctcggttctgcggcgacaccgggtcaatggcagc

SEQ ID NO: 456643 - DNA, 122 bp, Homo sapiens
cttggggtttctgacggaccccgccccgggggtggggcggggagtggtcacgtggaggggcgccccgtccgccgagccccgccccaccccgccccgcccgcccccgcgctcggggccctccg

SEQ ID NO: 456644 - DNA, 122 bp, Homo sapiens
ccgttattaacagacatacaaacgcccctaaccgccacacgttccttagggatgacagtacgttacaaaagtgcttctaaagtactactgaaagctccgtgggagtgcccgctggcgtgggc

SEQ ID NO: 456645 - DNA, 122 bp, Homo sapiens
ctgaccccttccctgtagacccctccctgagcccgtccccagcagcgctgccccccgccccgggcactgagctctcctacctcaacggcaccttccggctgcttcagaagccgctgcgctgg

SEQ ID NO: 456646 - DNA, 122 bp, Homo sapiens
caattacactggggcttcaattttgcatctaggtagcaatgttatccaggacattgagaccggggctttccatgggctacggggtttgaggagattgcatctaaacaataataaactggaac

SEQ ID NO: 456647 - DNA, 122 bp, Homo sapiens
gcccgccccacacagcgccccgcggcgccctgcaccccccgccggacttcggccccgccgcgctcccgccccaccccgccgccgaggcttcccctgggttcgcgtcccccgccgcccccgtc

SEQ ID NO: 456648 - DNA, 122 bp, Homo sapiens
ccctgggcccagcggccaatccatgaaatgggctggcggaaaaggtgctgtccttggcgccggcctcagccactggggctgccaaccccccaggagcaagacgcagtgaagccgcccaggcg

SEQ ID NO: 456649 - DNA, 122 bp, Homo sapiens
aaaaatacatgggcatttttaaaagtgctcaatatccagaaagaattggtgtgagaagaacgccctctgatggagttgggagtcattgaaataatgttgttgccacctcctggacatccctg

SEQ ID NO: 456650 - DNA, 122 bp, Homo sapiens
ccccaggacggcctggttgagacattcactggagggtctgggtgcagcccgctgcctggccggtaggcggcgcgcacaggccgtggggcccgggtctgggcgtgcgcgcggctggtagcagc

SEQ ID NO: 456651 - DNA, 122 bp, Homo sapiens
cttgtgagatcacagacctttgactacttacttaccttgtcagacatatccaagtgaactcggggggaaaagctaagacaggaagtaggggtggggaaaggaaggattgttattttgaaaga

SEQ ID NO: 456652 - DNA, 122 bp, Homo sapiens
cacctcctcatgtaacccaactccgtaaatctctgctccccgccgcaccctcctcgccctcgcactcacccttggtggcccctgcctcctgcgggctcaggagggtcatcagggtgtggaac

SEQ ID NO: 456653 - DNA, 122 bp, Homo sapiens
cgcagaaggggagaagatggggcaggggcagaaaccctcttctttcctgaagtaaagattcgcaaaacttcagacattttcatccaggaagtaggaggccgcattaaaagaagtatttgtgg

SEQ ID NO: 456654 - DNA, 122 bp, Homo sapiens
cagcccaccaggccccggcagcctggaagaggcgggactcgagttcagggggaacgcccacgtcccgggaggggacaggggccggagacaggggcgaagacaccttcgaaacgccgccccac

SEQ ID NO: 456655 - DNA, 122 bp, Homo sapiens
atcttccccaacaaagctcctcactgatgatccgactcccaagtgctcagtttcccagttcggacagaaacatgggtctgaaccaccacccctctatgtgaacacaaccctcagccctagcc

SEQ ID NO: 456656 - DNA, 122 bp, Homo sapiens
gacagacagttcaggagtcagagacagggatgccaggcgaccccggcacagagtcggtcacgcacgtttcctccactgtcctgacctgcctacttccgcctaacccatttggctgagctggt

SEQ ID NO: 456657 - DNA, 122 bp, Homo sapiens
gaggggatgagacccccagggagccatcctcctggggggccagggccgggaagtccatgtcggccgaggacctgctggaacgctcggacgtccttgcgggccctgtccatgtgaggtccagg

SEQ ID NO: 456658 - DNA, 122 bp, Homo sapiens
ttccttatcctcctttgaaccaaggcctgttccaagaactccagggcctctctgcttgcacgtcagggttgagctgctcccccaggccccatgcacggagttggcagctccctggaaaaatt

SEQ ID NO: 456659 - DNA, 122 bp, Homo sapiens
gtggacagagggtcagtgggcgggagtcccactgaggggccaggcagctttcctctaggccggggaggggtgggaagtcacaactcaggcaagggtcacaggactggtgtgggcagggcgag

SEQ ID NO: 456660 - DNA, 122 bp, Homo sapiens
gactgccgtgaggtagggtatgggcctaaataggccattgtgagtcatgagcttggtctgcggaggctgactggagaaagttctgggcctggagaggctgccgggaggtaggagctgggcca

SEQ ID NO: 456661 - DNA, 122 bp, Homo sapiens
ggccgggcgggcagacacgcgcgcgcacacacagcccttttccaacgacgacggctccggcggcggcctctggctcccgcagcagggagactacaaagacagcgacctccttctcctcctcc

SEQ ID NO: 456662 - DNA, 122 bp, Homo sapiens
tggggctctgcgggcagcggctccccgcggcgtgggtcctgcttctgttgcctttcctgccgctgctgctgcttgcagcccccgcgccccaccgcgcgtcctacaagccggtcatcgtggtg

SEQ ID NO: 456663 - DNA, 122 bp, Homo sapiens
cagagccagcaggggctgccccaggtcacagtggagcgcaggactgggtgggggaggttccggcgcagcctgaggttgagtggccagagcccagtgccacatctgatctgcagcctcccagc

SEQ ID NO: 456664 - DNA, 122 bp, Homo sapiens
gggaggtggaaagggctggaaggaatgtcatgggagaggcggcacgtgcaaataacattgcggcagagacactgaaaacgccacttcccttgccactgttgcaattctcttcgtgtatcatc

SEQ ID NO: 456665 - DNA, 122 bp, Homo sapiens
gaggttgggaatagggaagtctcattgtgacccctagaaagacaagccttcaggctaacccggtaacacccatcgtcaggaatccttcacggccgccagagggcgcaaggagctgcggctgg

SEQ ID NO: 456666 - DNA, 122 bp, Homo sapiens
taaacattaggtgtttgtttaaaaaaaagaaaaagaaaatactgatgcctcggggccatgcgcagagatcacagtttcacctgtgtggacagtgacctgagcatgggggtctgaggagcttt

SEQ ID NO: 456667 - DNA, 122 bp, Homo sapiens
accagacaacagacttctccccacctcaaagccccctgccaggctcttccctcaggtaggcgacaggcagattctgcggtagccctcaggccacagctgaactgtcaccttctccaggagcc

SEQ ID NO: 456668 - DNA, 122 bp, Homo sapiens
cgcgccacgcgggcccatagcgcgacaggaacacccctgggggcgggacggacacgtgggcgttgccatgaaggccttggccccaccctccgccacccactccaaccctggcgctccacaag

SEQ ID NO: 456669 - DNA, 122 bp, Homo sapiens
acaaaatacttggtcacatgtgaaactgtgtacaggttgtgggtaagaaaaagggagcaacggtgggttggagaaagcgtttacagaacgcttctgtagagtttcagtttcagcctttactt

SEQ ID NO: 456670 - DNA, 122 bp, Homo sapiens
caagggcccggcctcacctcctcccccttggcgatgatcttcctgtgtgtcagggcttctcgcagcgtcgagccttccacgctgaggagctgccaagggcaggcgaggacacggtgagggtg

SEQ ID NO: 456671 - DNA, 122 bp, Homo sapiens
atgccgctcggtggtgggggaatctggcggcactgtccaggaagagcccctctgcctccccggaaagctcccaccgatgatccactgagatgcacagacacgacccagaggccggctgggct

SEQ ID NO: 456672 - DNA, 122 bp, Homo sapiens
tgcaggccccctccccgcccccaacgcagcaggtccagcaggagacgggcactgagcctgcggggcccactgtgcagaccccaccagcaccaccggcccacgcttcccacgccgcgccctcc

SEQ ID NO: 456673 - DNA, 122 bp, Homo sapiens
tacatactaaggaaaatttttttctaactcctggttgcagctgaggggagcggctgagggcggggacaggggtgcggcggacccactgctcccattacccgaccagcgcctcccttcctcct

SEQ ID NO: 456674 - DNA, 122 bp, Homo sapiens
gtcggggcctttgtgaagggaaactcgctctgggtcactctggtggtggcggggctggtacgtgacgcggccaccccacgggcgtgatgagacacgcgaggctggcgtccgggcatgcgcgg

SEQ ID NO: 456675 - DNA, 122 bp, Homo sapiens
gcccgaggagcacttgtccttctgtgggtcatacttcttcaagctgatctgcacctacaccgtctcctggaatttgtggcgctagcgctggttcctgtgcaggactttccgcactgcctccc

SEQ ID NO: 456676 - DNA, 122 bp, Homo sapiens
gtgtcccagtaagagtgtacgagctgggaggggccgcagcagcccctccccagacgccagcgactctccggccaggcaggaacctttcatcagatacactgggtagggctgattatggagga

SEQ ID NO: 456677 - DNA, 122 bp, Homo sapiens
gacatagcactgtcaatttagaggaagtagttgaagctgtgtgtggaagaggctccactccggtggtattgctacaaatgcaaaggctgaataccatgggtcatgctctttctttgaccttc

SEQ ID NO: 456678 - DNA, 122 bp, Homo sapiens
cagctctcctgggaggcgctcagggcatcttgtgagcctgtcagcactgaccttgtcacgcggctcatgactgctcctcatccgacctcagatgagtcaagaggggaagcaggcgcaaaggg

SEQ ID NO: 456679 - DNA, 122 bp, Homo sapiens
cggccgacgcgcccaccgatggggtggttgatgtagggggtcccctcggggtccttccgccgctgctgccggtgcttgcgagccgcgaagtcggcagcctccagcagctgcgccgcctcaga

SEQ ID NO: 456680 - DNA, 122 bp, Homo sapiens
gcagttctgctggaatccaaatcctccccatttaacctactgcatgagatgcatgagcttcgcctcctgggtcacctgtgtgacgtgacagtcagcgtggagtatcagggtgtccgcaaaga

SEQ ID NO: 456681 - DNA, 122 bp, Homo sapiens
gtgatatgagcttgtagatgagttggggagacctggtgttttgcacccgtggcagtggcacgcttcttgggctgttctgctctgctttttatgtccgccgataaggtcggagagtctctccc

SEQ ID NO: 456682 - DNA, 122 bp, Homo sapiens
agtcgggagacgcgtcgatcagagaccagggttttattcctcactgcgcagaagacagcacgggcaggagtctgtggttcccttggccccacatcccacagggccgcgtggaacagctcagc

SEQ ID NO: 456683 - DNA, 122 bp, Homo sapiens
gggcgggacctgggcgacggaagtgcgtagccgcgcggcattctggggccggaagtggggcgccagctgcgggctggtgtcatggcaggtgggcggcgccgcaggaggcgcctggcggagct

SEQ ID NO: 456684 - DNA, 122 bp, Homo sapiens
tgatcgcgggcaggcgggcgtggggcacgccagggccgggagagcgactcttcagcaccacggccagcgccacaggctccgccccgcctggtgccagcagtagggcctgcctcccccgctgc

SEQ ID NO: 456685 - DNA, 122 bp, Homo sapiens
tgacccgctggagccctgtggagtggcggactctggggagtagctggtcagtgagattctcgcagcaatgtgaggcatcctcctcacagaaatgcatttacggatgttgctgtatcccctga

SEQ ID NO: 456686 - DNA, 122 bp, Homo sapiens
aattttcccagaacttatgagtcccaggtcctcattgcagtggtaagcgctgagtgctcacgggggtgtgtgtgggacaggatgtggtttgagttctgtgatcctcaccccgacctcatgcg

SEQ ID NO: 456687 - DNA, 122 bp, Homo sapiens
tcccagattaatccccatattttaatctgagataagcaaactctccatggggtaaacttccgtgagacacctctaacaaacctggagaggccagaattcggggcaaaaagcaagtgatctgg

SEQ ID NO: 456688 - DNA, 122 bp, Homo sapiens
gcggagagggatgacgtcctccagggccttgggctccgaggaaccgaagactggtgcgctcgccgggccccgcgcactagctctggggttcgcagaggcgccgcgcccggcttccgcggcag

SEQ ID NO: 456689 - DNA, 122 bp, Homo sapiens
ctcatccccatgtccctctagtacagggttcccaaccttggctctgcattggaattccctcgggagctttaaaaacccatgtgtgggtcttccattcaccctcttattaattggcctggagt

SEQ ID NO: 456690 - DNA, 122 bp, Homo sapiens
ggcagcccagtttccctgtgtgggcttcgtgtcagtgctctggttccctggagcagggcacgtgggtggctcatccctgaagtcacgttctccctttgtgtctttcagtgagctcttccgcc

SEQ ID NO: 456691 - DNA, 122 bp, Homo sapiens
ggtggagctccgagggtagctaggttctaggtttgaaacagatgcagaatccaaaggcagcgcaaaaaacagccaccgattttgctatgtctctgagctgcgaggtgagttgcattgtatga

SEQ ID NO: 456692 - DNA, 122 bp, Homo sapiens
tcttgattactgagttttttgtgcccaaggtgagtgtcttgctcacttgctcaactcacccgttctttgttccaagggaatcacctgcctctcctttatcaagctgacctatgattgcttca

SEQ ID NO: 456693 - DNA, 122 bp, Homo sapiens
gtgggctttgggccaaattttaagtttgaaaatcaagattgcctctttttgaggggccgccggactgagcagatacaaacaccgtgaaaagagggtgccatgttcagattcaggaaacaagg

SEQ ID NO: 456694 - DNA, 122 bp, Homo sapiens
tgctggggtcgtggtgggggagataggaaatgggctagctgcttccaggctgagcctcctcggcaggggcatgggccccgctcaagtcaggaaaccgatgttcaagaccttaaaggacctaa

SEQ ID NO: 456695 - DNA, 122 bp, Homo sapiens
ggagcgtaggttcaacctgcagagcgctgacgtgggtgtgatcgctagcagcttcgagatcgggaacctggcgctcatcctcttcgtgagctacttcggggcacgcgggcaccggccgcgcc

SEQ ID NO: 456696 - DNA, 122 bp, Homo sapiens
tggagtgcagtgacaccattatggctcactcactgtagcctcaacctccccagggttaggcgattcctcaagggatcctatggcctcagcctcccaaagtgttggggttacaggtgtgagac

SEQ ID NO: 456697 - DNA, 122 bp, Homo sapiens
ggagcctcttggcgtaagcgcggttgggcggggcattcctggattggcccactccggcgtcgcagaacgcttggcgtatcgtccttcagccaatcagcgtggagctgctgcctcgccccgcc

SEQ ID NO: 456698 - DNA, 122 bp, Homo sapiens
gctacacataacagaaaagtccaatatagtacagacttatacaatgcagaatttatttctcgtgtaagtcttgagataggtggttatggcaagttagcagattatcagaggcccaggcccct

SEQ ID NO: 456699 - DNA, 122 bp, Homo sapiens
ggaggacgggggaggggcggccctattaacagcgtcttcctttgatgtcgctcttccccgcgtcccagaggaagcgcctgtcccctgggggtagagggacagaccctccgcggaggcctggg

SEQ ID NO: 456700 - DNA, 122 bp, Homo sapiens
cccagctgctggaagtgttggcagtcaccactctcaacagtttctcctcgggacttgcttcggctgaagagagccacaggttgaagccctgcattgagcgactggtcaatactggggtgtaa

SEQ ID NO: 456701 - DNA, 122 bp, Homo sapiens
aagacttggctaagagtaggaactggcatgcaggtccccaaaggggttcgggggttcccgcgacccctgtgggacctgacctagcagccttggcctcctggccagctcagcctcaggcggga

SEQ ID NO: 456702 - DNA, 122 bp, Homo sapiens
ggtggagatgatgtacaatggatgctacctggaggcagggactgtgtattataatggcgccgtcccctgtgcctagtacaccgtagtttgacacaaaataagcactttgtaaatttagtccg

SEQ ID NO: 456703 - DNA, 122 bp, Homo sapiens
agcccggtgcgcggggcgcgcctgccggacgccatcttcgcctccgagcccccgggccgccgcgctcgccctgtcccgctttgcccagcccgctccgaccaagcgcccagggcagagggcag

SEQ ID NO: 456704 - DNA, 122 bp, Homo sapiens
ccctttcaaatgaaatcaagcccaggtaaagctgaaacccaacccacagagtactggcaccgttttcaggccaaaagaagacaagggtttcaatttcatcatcttgtaatgctgataaatgc

SEQ ID NO: 456705 - DNA, 122 bp, Homo sapiens
tggctcctctctgtccttcactcttgcctctgactgtcctcagtcttacagagtcaaccacggtaacacgtcctgcccacttccctcctccctctacctttggagcctgtcctccattcagg

SEQ ID NO: 456706 - DNA, 122 bp, Homo sapiens
cggcgatggcgataccagtttctttttccagggctaccaggtctggagctgtctcagggccggccagggagctctctcatgtggactgggcggaggaggaagagctccggtccagtggagtc

SEQ ID NO: 456707 - DNA, 122 bp, Homo sapiens
ccccgcccccggggtttcgtcactggcctgggaaaaggctgaatttggagccctgtgggccgtgcacttggtgaggactggtgggtggggtgtgtcccggctgccaagggaggaaggcacac

SEQ ID NO: 456708 - DNA, 122 bp, Homo sapiens
cctggctctggaagtctccatgagccacgcgctgggtccgggcctctgcgctccccgggccgctcacctggtcaatgaaggccaagtgccgctggatggtggcctcgtagtgctccctctgc

SEQ ID NO: 456709 - DNA, 122 bp, Homo sapiens
gtcctcctgtcagacactctcctccacacctgggtaggtgtggcctggcctagcgctgggcggggaggaacagcccctttgggtgctcactctcccaggaacccctcgagggctcgtggggc

SEQ ID NO: 456710 - DNA, 122 bp, Homo sapiens
tccatcactaaactaagaaccgtacccaacaaaggacactgacacatggcacaggctggccgtgctgccaggcagagataggacgggttctatctacacagggagaacaagaaggctggagt

SEQ ID NO: 456711 - DNA, 122 bp, Homo sapiens
gggggcgggtctccgtgcgcgcaagcgcgctggcgtcacgcacgccgacagacgtggcggcgccggagtcctaggcgcgcaaggtccagttcccgtcttgggcctgtcctggatagcgttag

SEQ ID NO: 456712 - DNA, 122 bp, Homo sapiens
gctctcgggggagggacccggtgcgctgggtctgaggggcaggagcgggattcaagcagtcgctgagctcagagaataggctctggctcgggtccttctctggggcggttttctttctttct

SEQ ID NO: 456713 - DNA, 122 bp, Homo sapiens
tgtttgttcaaaaatacagacatctgccacctccttgccgcccgatggcagtaagatagtcgtagaaggacaacagcagctttctggtgttatttacatatctgggcaacacctggctggag

SEQ ID NO: 456714 - DNA, 122 bp, Homo sapiens
cttttccccagccctagcccctagactccagcttagtaatcagctctcacagaaccatcacgtcggaggcagccttccaccccctttcctcccgcgcacaggcaggatgagctgctcccctt

SEQ ID NO: 456715 - DNA, 122 bp, Homo sapiens
aggcaggagtagggtggggggcagcggtagccgcggagttgcctgcggaggtttcagtggcgccagccccctgggatcgcccgcgggtggttttggcgcgtccccgcagcgtcggtcctctg

SEQ ID NO: 456716 - DNA, 122 bp, Homo sapiens
agtgctatgattgcaggcgtgtgccaccatgcctggcataccaagagtcttaaagtcatccggtaccagcatcctattttgtgatccatgctgaggggaatttgtgtgtcagagagggcaag

SEQ ID NO: 456717 - DNA, 122 bp, Homo sapiens
cggggtgcgcccccacccatacacagcccccggggtcacccccgctggcacggcccacgccgcttactcccctgaggaggcggggaggtcctacccagacctcttcagtacgggtccccaga

SEQ ID NO: 456718 - DNA, 122 bp, Homo sapiens
ttcattaccgtcggtgtgttgagtggtaacgccagtgtgcgaattcattaatggaaatcacgggaccccgagcggttggagatctgccacacccctctgcctgcgttaagacagcctgaccc

SEQ ID NO: 456719 - DNA, 122 bp, Homo sapiens
ttcgcctcccagacataacttaggctccgtctcgagctcctccagcgccgccgccccgggcgcgcgccaaccgggaaggccactcgctgcaaaaaacgttcgaattacccgccctgcgggaa

SEQ ID NO: 456720 - DNA, 122 bp, Homo sapiens
ttgctgctcctcggacacaggcacctgcggcagccagaacacaaagtcctgcagcagctgcgcagccgcggggacaacgtgtacgtggtgactgaggtgctgcagacacagaaggaggtgga

SEQ ID NO: 456721 - DNA, 122 bp, Homo sapiens
ctccctgctagcctctcatcctcagtggccgccatgctgctccggaagcgacgtccgccgcgacccggaatcagtgcccgcggagagaaagaaccctcctgtgctgaaccacagggtgccgg

SEQ ID NO: 456722 - DNA, 122 bp, Homo sapiens
gagcgctcctaacggactttgcaaggcccagtacacgggggctgccgcgagcggggagcgcgactgggccccaggacaccatctgtgcgagcacggggactctgggccttgacctgcgcggg

SEQ ID NO: 456723 - DNA, 122 bp, Homo sapiens
caggtctgggactctacggggctgtgtgcccagccacagcctcaaggagcccccgacggccggcacccgtcagccctcctgagcctggggccacacagtgcctgtccgggaagcagacacca

SEQ ID NO: 456724 - DNA, 122 bp, Homo sapiens
ctcaagagcacaaattcagatggcgcctccgtagactgtatttccagtgttgcagttcagcggactggctgcgtccgaaatcagagacaaagttaatacagatttcagggccctcggcttac

SEQ ID NO: 456725 - DNA, 122 bp, Homo sapiens
cctttccaggcccagtttttcccttccggcggcctctccgggcccagaacctcctcaagtcggcctctccagagccacttgcaccctccgggcgtcctctccgggcccagctcttcttcctg

SEQ ID NO: 456726 - DNA, 122 bp, Homo sapiens
tgtacctacctgggcatacagattctgctgggggtaggcacttctgattggatacatggccgtctgataggggttgggtgatggggagtaggggggtggagcagtgttactctgggtcggtg

SEQ ID NO: 456727 - DNA, 122 bp, Homo sapiens
atgccactttggacatgtgtgattctttggccagcctcagtatgcgagcacgtaggctagcgctcagcacatgagtctatggaacccaggggaagcaattgcagtttcgtagtagtttgtgt

SEQ ID NO: 456728 - DNA, 122 bp, Homo sapiens
agcgaaacccccaaatcaaacactggcgaacttgggcttctcccaacgcacccggcaacccgaaaggttgcctgtctgtaaagatactccggaggagcagccgagctggaaaagacagctgg

SEQ ID NO: 456729 - DNA, 122 bp, Homo sapiens
agcagcgggacacagagggctcatccctcctcatgctcccacacagcagcgggatatagacggtggtccctcctcgtgctcccacgcagcagcaggacatagacggctcgtccctcctcatg

SEQ ID NO: 456730 - DNA, 122 bp, Homo sapiens
ccactctgctcccctgcctctcaggaagacagctggctacaccaagtgcagggagcgaggcgccacccccattcattcactccaagcatttatggctacagagcctgcgcccagggcggttt

SEQ ID NO: 456731 - DNA, 122 bp, Homo sapiens
gtcacctacctcggaaggaaggcaggaaagcactggcgtggtgtccttaagctttctccacgggagctgggcacctcgttcccattccgacttcttagttttaattaacaaaagggggaagt

SEQ ID NO: 456732 - DNA, 122 bp, Homo sapiens
gggcagggaggcccccgggctgggtttagctcgcagcgaatgagggctggaaaactggagcgcattgggagacctctagggcccccctaaaacagagaagggatggtgggttccccccccac

SEQ ID NO: 456733 - DNA, 122 bp, Homo sapiens
ctacctctggtcttcctcattgctcattattcgctaattacaatgcattctcatgctaaacgacactcctaccagcaccatgacagtttataaataccatggcaacatttagaagttaccct

SEQ ID NO: 456734 - DNA, 122 bp, Homo sapiens
ctcagggccaaccaccccgccccttcacctagggctcggcccaggttctgctccctgacacgcagaggccctgcgtccccacacgccttggttctcgtcaggaggcgcctttctgccttccc

SEQ ID NO: 456735 - DNA, 122 bp, Homo sapiens
ttttttttttgagacagaatctctctctgttgcccaggctggagtgcagtagcacaatttcggcttgccacaacctccaccacctgggttcaagagattctcatgcctcagtctcccgagta

SEQ ID NO: 456736 - DNA, 122 bp, Homo sapiens
ggggtgggctggattggggggcaggtcgttgtgtaggggaaactcgggacccttaagctgcgcctcggcggcctcccctctcacgagctctctgattggcaggtgggagcctcggcatcccg

SEQ ID NO: 456737 - DNA, 122 bp, Homo sapiens
ctcataggtatcatggtctccgttcacgccgtagcagcgtgaaagcagtcagagatgacacgtaagcaaatactcccgaccggcctctggtaaagcgtccgttgtggaagtgtttaacagac

SEQ ID NO: 456738 - DNA, 122 bp, Homo sapiens
accaagtcgacagcccgtaagtgcacccatggtaaggcgctgcacaaagaaagcattttgcgtttcaaagctttgtcatgatggcgctgcagaaagcaagcgagctaggcctacctggcggg

SEQ ID NO: 456739 - DNA, 122 bp, Homo sapiens
gaggctgaggcgggcagatcacttgaggtcaggagttggagaccagcctggccaatgtggcgaaacccagtctctacttaaaatagaaaaattagccaggcatggtgttgcgtgcctataat

SEQ ID NO: 456740 - DNA, 122 bp, Homo sapiens
catcttcgctctgttggccgtggctttagtaagcacacacctgcctgctactctggttatcgtggcgacggcaggtctggattgccagacaggtttttctttttacctcgaggctttctctg

SEQ ID NO: 456741 - DNA, 122 bp, Homo sapiens
acatgagtcaaatagcagtaaccatggtgacaacactgaaagccagctctctctggctcacgtctccaccagcacacacacaggacccagccctccacagtcaggtggcctccagtgaggcc

SEQ ID NO: 456742 - DNA, 122 bp, Homo sapiens
tggtcccgcgcagagtcttttccgcccagaggatcctgagggaagtcatctccctcctgccggccagttactgccgcctcggtgcccgccgcgggcagggggcagcgggaggctgctagggg

SEQ ID NO: 456743 - DNA, 122 bp, Homo sapiens
tattatatcttttttttaaaagatcttttccttattgttccactgccatgctcctgccgccgttcacagctattgccactgggcggtgggaacgccgggagaacagggctcagcccagctgc

SEQ ID NO: 456744 - DNA, 122 bp, Homo sapiens
gcgcggtgggcgtgatccgggcacttagggcaggatgaacgctgctttccaagatggcgacggagggaggagggaaggagatgaacgagattaagacccaattcaccacccgggaaggtctg

SEQ ID NO: 456745 - DNA, 122 bp, Homo sapiens
cccactgagaacagagtcttgttcaattttatgggaatttcaacaagtaaccaatacaggcggccttcccctcttatttttgtattcccttggaccggctgtcaatcacacacacacacaca

SEQ ID NO: 456746 - DNA, 122 bp, Homo sapiens
attacacatgacggcgcacttttaatacgagtaatatctcatagagcctattatcaacttcggaaaagaatgcccattcctttaagatgtcttgaatcccccttcctccaagtagatttcat

SEQ ID NO: 456747 - DNA, 122 bp, Homo sapiens
aagcctcctggaggtgctctaaaaaccttcttggtgacttctcgggcctttggacaacttcggtcgtcttagacaagttgatgggtttctgagaggctcttttaatacttgcgaggagatac

SEQ ID NO: 456748 - DNA, 122 bp, Homo sapiens
gaccgggagccccctgctctctggtgtctgcaacatgttttcgggcaggcaggtgcagagcgcgtacacgggccgaggggtgtgggagccgccgcgcaagccccgggggaggggttggacag

SEQ ID NO: 456749 - DNA, 122 bp, Homo sapiens
agcaataatgtcccactaattctaagtgttctgatcccctaaaaatatacaattcttggccgggcgtggtggctcacacctgtaatcctagcactttgggaggccgatgtgggcggatcaca

SEQ ID NO: 456750 - DNA, 122 bp, Homo sapiens
ctactcgcgtttcttctttggttattcttcctcatttccaacacaatgatgagggtctcacgcaggcgtccagaagactgaaataactaaaagccagctggggcccctagaccaatgcttga

SEQ ID NO: 456751 - DNA, 122 bp, Homo sapiens
aggagcgcaggcgcttctgcttcctggtggagaagcagtgcgccgtggccaagaactccgcggcctaccactccaaggtgaggcggctgggggctgcgctgtgccggcgctgggccttgctg

SEQ ID NO: 456752 - DNA, 122 bp, Homo sapiens
attttgagtaactaccaaactgtcttccaagttggctgtaccaattttcaatcccatcagcgaggtataagggttccaatgtttctttatccttaccaacacatgttgttgcctgtcttttt

SEQ ID NO: 456753 - DNA, 122 bp, Homo sapiens
atatatgtttatgtggcacttatttggttttatgaatgttttagagggaaagttgccaggcgagaactcatcctctaaggacgcttgatagcatgctggaaccattcgttctggatctgcgc

SEQ ID NO: 456754 - DNA, 122 bp, Homo sapiens
ccacacgcttacacatacaacacacacatgcactcacacacggaggaccgtgttcacctgcgtctaggtcctttccacctcgaggtttacctttattggacctggaacccgattacgggcag

SEQ ID NO: 456755 - DNA, 122 bp, Homo sapiens
ttaaaaaagtaatgtcatgaggcctggctttcatagagttggtctaatgaaactgggatgcgggaacaaagaggaaataaagtactactacagaaagttaattttaaaattttctttttaat

SEQ ID NO: 456756 - DNA, 122 bp, Homo sapiens
gggggttttccggccgcaggcgctggggccgctcctcctacggcgaggcccggggctgcgcgctgcgctctttgcagggcccccgtggccctcccgtcacggccaggctaggcggcccctcc

SEQ ID NO: 456757 - DNA, 122 bp, Homo sapiens
aaggacagttgcaaagccttggctctgacatccataacctgaggagacgatgccagcaaccgcctatatctagacttctcaggaggagagaaaagtaaagtctctgactggtttaagccaaa

SEQ ID NO: 456758 - DNA, 122 bp, Homo sapiens
aggctggagaaatgaaaggagtagcggtgagggctagtggagtgcagtgaggcagagcagcgctgtcacctcttaggaatttgatccttcctgccaggtggctcccattttctgggatggct

SEQ ID NO: 456759 - DNA, 122 bp, Homo sapiens
gcggccccctatgacgccttggcagagcctctgcgtccgtctgcgtcccgttggcctggacgtctgcggtgcagaggggccggcatcacatcctaacccagaggccacaggcctgagcaaag

SEQ ID NO: 456760 - DNA, 122 bp, Homo sapiens
aaattgttaatgtccctggaatgaggaactaaaagagagtcaaaaggaattgaaactcaacgagaagaaaaagaatttccttgggcatcccagcatgcttaagtgaggagcaggggatgccc

SEQ ID NO: 456761 - DNA, 122 bp, Homo sapiens
agactcagttctcattcccaatgggtgtcgggtttctagagaagccaatcagcgtcgccacgactcccgactataaagtccccatccggactcaagaagttctcaggactcagaggctggga

SEQ ID NO: 456762 - DNA, 122 bp, Homo sapiens
ccctggagggaaagaaaaggcaagacaggatgaatgaggagtggggaatgtgaggcggggcggaaatgaaagaatatgagctgtggagaattcaccttattcaggaatgagaaaaacagcaa

SEQ ID NO: 456763 - DNA, 122 bp, Homo sapiens
cggtgagggctccttttcacaggtgcccacactgtgagtcacctccttatgctgagagttcggtatgctatcataaaatactttgttgtgtattatttatgaaggactagagtatctattgt

SEQ ID NO: 456764 - DNA, 122 bp, Homo sapiens
tgagtcgaagaagaactagagatgttcagcagggataaagagccaatctaataggccgggcgcggtggctcgctcctgtaatcccagcactttggaaggccaggagttcgagaccagcctgg

SEQ ID NO: 456765 - DNA, 122 bp, Homo sapiens
tcaatgacaagtcacagctgcatagacgcagccccatctatgtgctgactcaggaggtaacgcagtgcttcctctctttgattaccaggggtcttgacttctgtactaaagtaagagagaaa

SEQ ID NO: 456766 - DNA, 122 bp, Homo sapiens
tgctgggattcagtaagaggtagattttgtttgacttcagcagctctctttatgtaaaagcgaacccccataaccagccagtgggtggaggaacggaaaaatgagaaagcaaggaaatggaa

SEQ ID NO: 456767 - DNA, 122 bp, Homo sapiens
gaccatgtggatccgagagtgttggaggggcagctctagcttctctgggcttttcggatccgagttctgttcctgggaggcctggctaaaatctacccttgggccctgcactcctccccatg

SEQ ID NO: 456768 - DNA, 122 bp, Homo sapiens
ttcttctttcagctgttcgttcaaggctatgccctgcaactgcaccagttacaggtaacccgcgggggcatcgcgtcctggggatgggagtgggcaccggaacagagaggctagaggtgaga

SEQ ID NO: 456769 - DNA, 122 bp, Homo sapiens
taacgggaccctcatatatgcggcccatcattgacttgaaacgacgtgaattttgttagccgggcatggtggtgcccagctgtaggttagccgggcgtggtgacgcacagctgtaggttagc

SEQ ID NO: 456770 - DNA, 122 bp, Homo sapiens
cagcgccgtctgagggcagaacttctgggccaacctggtcaggaagacagagcccagagtcggggtccgtgtccccctctgcctccgtgacccacactggcccatcccctccctggacttgt

SEQ ID NO: 456771 - DNA, 122 bp, Homo sapiens
atagtgaatgtccttttttttaatatcaaaaatatcgataagtaggttttgtgttttcaacgtagggaaaatgttatcagtgaataggtggtgtactttacttggtataatttaaagttgca

SEQ ID NO: 456772 - DNA, 122 bp, Homo sapiens
cctggatgcactgttgggggtttctggttcttgtggcgccccctggagtcagccgtgagccggggagagttggcccccgccgctctgtccctctcaggtcttcgtgagctctctggtaactg

SEQ ID NO: 456773 - DNA, 122 bp, Homo sapiens
ctgaaaaggccactgcctcatctaggtttttggtttgtttttgaaacagggtcgcagtggcgtgatctctgctcactgcatcccaggctcaagccatcttcccaactcagcttccctagtag

SEQ ID NO: 456774 - DNA, 122 bp, Homo sapiens
ccagtaagccaacacggctggataccagggtgcttaggccatagcaaactgcatgtgagccggtgaaggctcagcaggctttaaacggggatgccggcccggctggctgagtttcagaaaga

SEQ ID NO: 456775 - DNA, 122 bp, Homo sapiens
gggacgcgcagagctggagcggcgggcgcgcgcggcaaacgggcccgcgcggcctctgcgcgtccccgctccagcaccctggcgaggcctagaccgccgtgaagaccccggggaaggagtgg

SEQ ID NO: 456776 - DNA, 122 bp, Homo sapiens
ccacctgtacatcgacagcgtgaacagaaaccggctcctctggagagtgaggacccgaaacggccccgggttcctgaggagctttgctggaggttgacatgctgagcctcgcatgagcccgg

SEQ ID NO: 456777 - DNA, 122 bp, Homo sapiens
acacgcctcactgccctgcgcccgatccttttacacaggtggtccctctgtttgtagagtcgccctgctcttcgtatctccctgcctgttctgtgaagttcagcccagtgccccttccttgg

SEQ ID NO: 456778 - DNA, 122 bp, Homo sapiens
tgccggggcaggcgcagagctggcaagcacgtggtggggcccctgaggtgtgcagagggtcgcgcacctagaagcctgtcgctggcgcggtctgggcgggaggttctgcggcgggaggcagc

SEQ ID NO: 456779 - DNA, 122 bp, Homo sapiens
gggtgcccttacaccgcgccggtgcgtgcgtgcgcgtgcgcgtgtgcgtcgaaggagaggcgggctttccaatttccttcagtgactctcaggcaaggaacatggctgtctccttgggagtg

SEQ ID NO: 456780 - DNA, 122 bp, Homo sapiens
ctggacagccgacccttttccagtgcccttttcactacatcacatcccttgcggtcctcccggccctgcttaaagaggcagggttggtgcggctctccctcaggaaaaaccgagggtgcaaa

SEQ ID NO: 456781 - DNA, 122 bp, Homo sapiens
aggcagagtctgtgtgaatatgaaaatggcagcccctccttctgggcagggtgcagggctcggttccagcttgcccctatcccttaccaactggacaccgtcatccagcatacaacctatat

SEQ ID NO: 456782 - DNA, 122 bp, Homo sapiens
tttctgtgcgtgccgtctggctgggccctggctcctggggtctgggtttcagacgtgccccggtgcccattctgctggaggaaagaagaggccctgaggcccccttcccttatacacttggg

SEQ ID NO: 456783 - DNA, 122 bp, Homo sapiens
actcaggaatctttagagtgcttatttcactggggcaaaggagcttgagtgagtcacaggcggcacatgacagctgactctttaaaggaaagcagaaggctggaaatgaatcatttgtatat

SEQ ID NO: 456784 - DNA, 122 bp, Homo sapiens
aaataaactgcccaaggtcactcagttggtaaatgctagattccagggactagagttttccgtggctctccaccttgagcacacatcagaatcccctgcggtcttgttgaaacagattgctg

SEQ ID NO: 456785 - DNA, 122 bp, Homo sapiens
ccatcttggcctcccaaagtgctgggattacaggcttgagccaccacacccagcctcaggcgtggctctaagccctttacatatatgaacttgctagtttattccatgtgtcagccctgtga

SEQ ID NO: 456786 - DNA, 122 bp, Homo sapiens
ttctccagagagctgcgatgagcatcatgcttttgtgtgcttttgggaagtctgcgtgcacgtggagttgtgtgtattcagggagtgtcttgttgtaacgtggttctgcatctttttcttgg

SEQ ID NO: 456787 - DNA, 122 bp, Homo sapiens
aagcaaaagcaagaggagaaagtcacagtgtgctggcatcaagttgcattgagaggagcccgcggggtagtgcacccgcatttcctcgttgcgttgagaggcgcccgcggggtagtgcaccc

SEQ ID NO: 456788 - DNA, 122 bp, Homo sapiens
tcgtgacgtcagctaccaaggcaggatgtactggaatctaagggctgatgtttggaggttcgtcctctctacttttctgtatgcttaaaatttgtcaatttaaaaaagtaccgctctgcctg

SEQ ID NO: 456789 - DNA, 122 bp, Homo sapiens
ctcaccctgcccatcacacgcccatttgtcagaccaacaccgccccatctccggaagcaccgacttggccttcggtatcccccaactcccaacagcggactcggacagaggtccgtccgctg

SEQ ID NO: 456790 - DNA, 122 bp, Homo sapiens
catgtgtgtccctactgcgccaaggagttccgcaagcccagcgacctggtccgccacatccgcatccacacccacgagaagcccttcaagtgcccgcagtgcttccgcgccttcgccgtgaa

SEQ ID NO: 456791 - DNA, 122 bp, Homo sapiens
cgccctcctcggcctctgggccgcgctctcccgcgacgtttgctttcctctccccacccgcgcctgcctggttcccggcctttgccaggcccaagttctctgggtcgctctccctcctgtag

SEQ ID NO: 456792 - DNA, 122 bp, Homo sapiens
tggtcatcgaaaggcaggtgatgcatgtcgtgtcatttagcacctggtcatgagatacggcgagacccccaggtccagggaaaggtctccccttaaaaccacgtggagctctgctgtctctg

SEQ ID NO: 456793 - DNA, 122 bp, Homo sapiens
agcctcctctatccaaaattgtttttgatacttatcccctgattttttcttcctcactgtcgccccggctggtgcacagtggtgcaatcacggctcactgaagcctcaaccttcacctgctt

SEQ ID NO: 456794 - DNA, 122 bp, Homo sapiens
ggcctgaagtggttgggggagggcctgcagaattataggtaaattgtagtttggtcctggcggcattagccaactctggaggtttgaagagagaagaattagcatatgtatggtcccaggct

SEQ ID NO: 456795 - DNA, 122 bp, Homo sapiens
ccctgggtgactgctcactcagcctctgtgatggcagtgtgagctggactgtgtcagccacgactcgagcactcattctgctccctatgttatttcaagggcctccaagggcagcttttctc

SEQ ID NO: 456796 - DNA, 122 bp, Homo sapiens
gctcttcctccttccaggaaatctgaagctagtattagctttcttgtcttgcttccactgcgcttgctgctaaggaggaaaagcaacaaaaatacaaaatatagtttggtagagggaattag

SEQ ID NO: 456797 - DNA, 122 bp, Homo sapiens
cttttatttttttttgcaagcctgaataaagacttctcaaaatatttcagtttcctgctgcggagctaagccaaggaatggcttggttgttaacaacaggcagttcagtatattgtaaagga

SEQ ID NO: 456798 - DNA, 122 bp, Homo sapiens
gctggactggcagtgtgattgggtgggtcaccttgctggaactaggggtggggcggcctccggcagcctgccctccccgcccccacctgccgcaccttggtgtggggcggggccgcctcggc

SEQ ID NO: 456799 - DNA, 122 bp, Homo sapiens
acccccagcggctccatagaaagtattggcgcagggtctggacgggaaggatgggcaggtcggctccacacagagcgtgtgtggtgccttgttccacctggggacaggcccataggcatcga

SEQ ID NO: 456800 - DNA, 122 bp, Homo sapiens
agtgtcacataccaattacacttgaacctcactccaaaggctttgctccttctactgacccgtgttgcagaaatgcctggccttttgtgagcactcggtaaatgtctgtcattgttggagag

SEQ ID NO: 456801 - DNA, 122 bp, Homo sapiens
tcccgttccgtcccgtcgggtcccagccccgccaactctcaccctgcccggcccttccagcggatccacttgcagcccccgacccctgacttggtccccgaggtcggggctcggtgggaagg

SEQ ID NO: 456802 - DNA, 122 bp, Homo sapiens
tctaacgtactcacaggttctaaactctaccgttcctcgtgaccgagggactaaagggcccgggcaggggctcaactctgagagaaaaaaaggcaagaaaactccaaagttggacagcaagc

SEQ ID NO: 456803 - DNA, 122 bp, Homo sapiens
aatctctagtctttgtgagggtcatattgccatttactttttttaaaaaacagtattatacgttagggctgatgactttcgttatttggaaaaacactgtgacttctgaatccatctattct

SEQ ID NO: 456804 - DNA, 122 bp, Homo sapiens
aatccgtgtaacatattttaaaacaggcggacctatccggcagtggtgcagacggcctgacgaggttccttggccgggggttgggcaggggcctggggggcttccctggggggcttgtcgcc

SEQ ID NO: 456805 - DNA, 122 bp, Homo sapiens
tgcggagccctggcagcgcaccacaagtccagtcaccctcggcgcccggagatgacgtcacgagaccccacgtggtccgaactccgccctccgtgttctgcctaacccagcaaggaggcccg

SEQ ID NO: 456806 - DNA, 122 bp, Homo sapiens
aagaagattagtgtttcagagaggggtgagagggagagtaatgcaatatgatgtcagagacgagccagtttcagagcatgagaagctttaaagttcaaagttagtgaggagttgagattttg

SEQ ID NO: 456807 - DNA, 122 bp, Homo sapiens
gactgaggagcaggtcacagaattcaaggaggccttctccctgtttgacaaggatggggacggctgcatcaccacccgcgagctgggcacggtcatgcggtccctgggccagaaccccacgg

SEQ ID NO: 456808 - DNA, 122 bp, Homo sapiens
ctcacaaatagaggttctcacatgctcacacataacacacatacaaatgtgtggcccacgcgcctgcccatatgagtcctagttgcttttatgatgttacacagatcactcaaggttgtata

SEQ ID NO: 456809 - DNA, 122 bp, Homo sapiens
accctgggccagatgcctcttctgggctcccacagccccagtgcatgccccatcataggacggtgagctatggttagctgtggtctcgactcagttctgttgccctgctccccaaaaaactg

SEQ ID NO: 456810 - DNA, 122 bp, Homo sapiens
ccaggctcgcagcgctggggcagccgagacttgtagttcttgtccctctaacagacggcccgggtagctccagaaaaactacaaatcccggaagaaaccgcatccaggcgacgccagcccgg

SEQ ID NO: 456811 - DNA, 122 bp, Homo sapiens
ctaatctgtttctcagaaattcatgggaagttttaggacatgaaaggctttgaggcatcccgaagtgaaattagaaaacacccaaaactagtttaatttggttagacaataaacgtatttgt

SEQ ID NO: 456812 - DNA, 122 bp, Homo sapiens
caactttgttaaatgggaacaaataggttcctcaaaagatgagcattttctggcctgccgcggaggctcacgcctgtaatcccagcactttgggaggctgaggcagacggatcacttgaggt

SEQ ID NO: 456813 - DNA, 122 bp, Homo sapiens
gaggggtcaatggcattttaacgtagaagaaccaagtgttagtaaagagcttttcttctccgggagcttggtcagctatgttttctgtgaagcctgattggggagtcaaagtcccagtggaa

SEQ ID NO: 456814 - DNA, 122 bp, Homo sapiens
ctgcggttccgcgggctcagcactcctaggggagcgcagctgacgtttcagaagcactcgcgtgcaccggaaaaactcacagaagcagcagcggaaatggccccgcgcggcaggaagcgaag

SEQ ID NO: 456815 - DNA, 122 bp, Homo sapiens
cttctaaagaagttcaaaccctgtatccaattttaatgataaaatagccaagaggtatatcgatgatggaaattagccacatgtacactacattttttctaataaagccatttcttatatga

SEQ ID NO: 456816 - DNA, 122 bp, Homo sapiens
accctacaagatttaggaaaatgtaacgttgcaagggaagcaaggtctctgtgtaaacctcgtaatcgccaccaaaagtcggtagctgggagccttcaaagcccgccaaacacactggaagc

SEQ ID NO: 456817 - DNA, 122 bp, Homo sapiens
aacttgcagattcttctataaaagtcaaaaagaaggaaagggagttcagagactcttacacgagtcttccgcctcgccgcgttctcctgccagtttagagctggggacagggcccagccaca

SEQ ID NO: 456818 - DNA, 122 bp, Homo sapiens
cttggcagtggagtggtaacagctaatggctctttctacctggcatgcagcttcctgtaacgactattattaatagagccaggctgatcgtgaggcgccagaaaaggtgtatggtggaattt

SEQ ID NO: 456819 - DNA, 122 bp, Homo sapiens
tgcgactccagggcgcaaggggccgcccaccccgcctcgcccacccggcgggggcctccgcgccttttctgagaaagccagaggaaaggagccgagaccgcagtcccctgggcccgtttcct

SEQ ID NO: 456820 - DNA, 122 bp, Homo sapiens
ctctttggagagtggcctcagggtggccaggtgcctctgcagcggctcacagaggctgagcgctgtgcacacctgtgccggggcactgtccggggccccacggagcatgctcaggatggccg

SEQ ID NO: 456821 - DNA, 122 bp, Homo sapiens
tgccctttacggcttgccatccgtgccatctgtttggagcctccttggttatgtatatgacgttcttaatacacccacatcgattaattacacctacctccctgcgaggagaactcagggag

SEQ ID NO: 456822 - DNA, 122 bp, Homo sapiens
gagaaccactagcacagatagattggtgcaaaaggtacgttttagtatctaaggagctaccgatgtaatttatccaaaaatttatccagccttaaatttgccaacattgagaaaccctgatt

SEQ ID NO: 456823 - DNA, 122 bp, Homo sapiens
tgtatgaatcaggaaagaactatcccaggaagctggaaggcagggcgtgcaatgaaagaacgaggcctctgacttgaggcagccctggcttttattccccgccctggcatctatgggcaagt

SEQ ID NO: 456824 - DNA, 122 bp, Homo sapiens
aaccgtccaccttggaacctccaccttcctgtgctcgtcttagaggaattctagaactgtcgttggaggaacaccgctgttttctagaggtcccacagccgtccttctgttcatgcggagta

SEQ ID NO: 456825 - DNA, 122 bp, Homo sapiens
caagactgccttgtatttctcttacaggatgcctccccttctgctgcggtttttaatcagcgtttctagggcaggcttgcaggcggggccgcgaaccccctgtagttgtacacggagctggg

SEQ ID NO: 456826 - DNA, 122 bp, Homo sapiens
tcaagcctgtgccgagtgcctgagatgatgaccgttgccacctccctgagtcacaatcgtcgtcatgaatgcctttcattcccacaggcctgtggaggacctgagtgtgacctggaagagga

SEQ ID NO: 456827 - DNA, 122 bp, Homo sapiens
atttggagaaatatccaagctagaaatacagatttgggagtaatcagtagaagtccgtgacgtgatagaagtggaactacaggttacaaaggttgagagagtggaaggttttcaataaattt

SEQ ID NO: 456828 - DNA, 122 bp, Homo sapiens
ccttgttttatatagctgaatcccccacttcctcagatgatgcagtaaatgttcgcatttcgtgtgcttttctgtgttcgtgcaaaatgacacagtattctggtgactttctaaattgggtc

SEQ ID NO: 456829 - DNA, 122 bp, Homo sapiens
cgagctcggcttaccagggagcaagtaataaaacccctctgccgacagcaccactttcatcgtgaataaatgagctcaattacctccacgcagaaaaaggagcgcttcaaagggaaagaggg

SEQ ID NO: 456830 - DNA, 122 bp, Homo sapiens
cagagggatgaaaggtccattaaataaggtcatgattgaaaccgtgagaaacttgggaatcgcttggccgtgcttctttgcataaagaaaacttccctgctggtttgtctcccaggagaaat

SEQ ID NO: 456831 - DNA, 122 bp, Homo sapiens
ttgtagtgaggattaaatgtgatagcataagtgaaagtgccctttgaagaaagaggaaggcgaaagcgcttattgtgtcaggagaaatgtgtggagagccccctgttgttctcaggtgtctc

SEQ ID NO: 456832 - DNA, 122 bp, Homo sapiens
ttcaccaagtgcctgcgggtgggcatgctcaaggagggtgagcgctgggcaggggctgggcgagggctgggggagtcggggacccgggccaggtgggggtgaggcctgggagttctggtgag

SEQ ID NO: 456833 - DNA, 122 bp, Homo sapiens
cccgtggtgggtcccgatcccccggccggctctgccactgaagcctctccctgtgtcctccgtgccccccgagtggcctgctagcccgctctcccacacagtctccttgatgtgaagtgtca

SEQ ID NO: 456834 - DNA, 122 bp, Homo sapiens
atcttacacctgatcacatttttaagtccccattctagttaataatacagttgggccgggcgcggtggctcacacctgtaatcccagcactttgggaggccgaggcaggcagatcacctgag

SEQ ID NO: 456835 - DNA, 122 bp, Homo sapiens
aacgcctcgtacctgttagccacctggtgtgtacgagtgcgcacgggcgactgtagcgtgcgtgtgaaatggggggaggaccatgccagttggtaactcagagtgcaatgtagttagtggaa

SEQ ID NO: 456836 - DNA, 122 bp, Homo sapiens
cgagttcccaggatcaagcgatcctcccgcctcggtctccctaagcactgggattgcaggcgtgagccacagcgcccggccgctgtaactttaaattgcccgggaggactctgcagcccaac

SEQ ID NO: 456837 - DNA, 122 bp, Homo sapiens
aataatgagacagggagatgaaggggcatctggccccaatgccggtgaaaaccaagatgccggtatatgcagagaagaaaactgagatgacggtgtacaccgagaagaaaaacgagatgacg

SEQ ID NO: 456838 - DNA, 122 bp, Homo sapiens
caacagcagcagggccgggaatctaggcccgtgtctctacagccagagctaaagagctgccgcgggctccccgttccacaagccccggtccccggctccccgttccacaagccccggtcccc

SEQ ID NO: 456839 - DNA, 122 bp, Homo sapiens
aaaaaaaagaaatagagggactgcctttccctggagagaggcaacaagaatcaggctcttcgtctaattgctgtgtggttagtgaattttctactatttctcggtagtccctaagtagccaa

SEQ ID NO: 456840 - DNA, 122 bp, Homo sapiens
gtgtcttattgcgatgctttccaaacgatgatgctcccttcgtcatctcgcttctgcggccgagaccagaaagtggctttttgtttgtacacaaaaattttccaggcacggtggtgcacacc

SEQ ID NO: 456841 - DNA, 122 bp, Homo sapiens
gaccccgcctgcagcagtgggtgtgggggcgctgctgggctcatcccgaagctcagagagcgtggggctgcccctaggctcggaatgagtctcccactgagtccgcagctcccctcctgccc

SEQ ID NO: 456842 - DNA, 122 bp, Homo sapiens
caggcgctggcgaggttttactgctacactgagaggaccattgcgaagcggctcgtcttgcggcggtgagacagccacggggcgggcggcgggcgggacgcgggaggaacgcgagagggagc

SEQ ID NO: 456843 - DNA, 122 bp, Homo sapiens
tcatgcccatatactccttatgctcatagaatgttaaagctgcaaggaatgtctttagaccgtggagttcctaatccagaccctccatttcacagatgaggaaactaaggcaaggaagataa

SEQ ID NO: 456844 - DNA, 122 bp, Homo sapiens
tgaatacactccgactctgatctagaatgaaaaattgttgagatacggtcatcgggcgcccggctagctcagtcggtagagcatgagactcttaatctcagggtcgtgggttcgagccccac

SEQ ID NO: 456845 - DNA, 122 bp, Homo sapiens
gagtcaccttctcgttgaaccaggcctccgcgtccctgcggttctgctctgcaagggcttcgtactcagctcgcatgttgttcagcagaactgtgaggtccaccccgggggctgcgttcatc

SEQ ID NO: 456846 - DNA, 122 bp, Homo sapiens
ctcagctctagaccaggactcccagtcttagtgcaaaatatatgcaggaaagagctgcgccgattggccggcacgccactgggaccgccccctactcccttccaggtcctcccgcttccctg

SEQ ID NO: 456847 - DNA, 122 bp, Homo sapiens
tgtgggagggaagctcacagctcccactggctgggcaccgagtccacccactgcagcgggcggctctctgcttaaaggggacatggctattgtcaaggctggctccaggacagggtccaaca

SEQ ID NO: 456848 - DNA, 122 bp, Homo sapiens
caaggccaaaacaaagatttttagaaagaaaattggtgctccaaataacctatctgaaaacgaagtctgttgagccaccacagagagctgtaatagtcatgtctggggaattctaggcattc

SEQ ID NO: 456849 - DNA, 122 bp, Homo sapiens
tggccctcccagggggagcagggacagatgtgcccggtggtcccgggaagtgcccgccgccgccagcttcccccgcagtccttacgtaggcggggccgctgccactgagccccgtgacggca

SEQ ID NO: 456850 - DNA, 122 bp, Homo sapiens
atcctgctccccacctccgggcgtcctgccctgttccccgtcctgagccgccacttccagcgaacacacacaggtgtcctgccgttggaccttcacctcctagagataaaccagcctcagct

SEQ ID NO: 456851 - DNA, 122 bp, Homo sapiens
cgatgcgtccacactgccgccgaccacagacacccacccctgatgcgttcacactgcccccggccacagacacccacccctgatgcgtccacactgccccggccacggacacccacccccga

SEQ ID NO: 456852 - DNA, 122 bp, Homo sapiens
ggcttccggctagagggtcgtggaaggcgcccggttttgctgcgcgttcacctccggtcccgccccctcacggggcgggttttcggccccctattgcatcgggacatcccggagttttagaa

SEQ ID NO: 456853 - DNA, 122 bp, Homo sapiens
ccaccggcatcatgagcgaccagatgcagcgccacagctactgcaacctcaaggattacccgctcccctgcgcctaccacgccttcctggcggccgccgtctgcggcggcgtctgccacggc

SEQ ID NO: 456854 - DNA, 122 bp, Homo sapiens
tctttctcaagaatgatgagcccaaaggcatcgcataacaattgtgatctcccagctggacgtttcctgtagcacaggtgttcacagtgtggctcccaaaccagcagcctccatgtcagtca

SEQ ID NO: 456855 - DNA, 122 bp, Homo sapiens
caggacacccagtctccgggagtgtacctgcgggaggaccccgtgtgtggggcgcaggtgcgcctgcctactgtcccaccttgggggaggggggctgcacttggccctgagccactgaagac

SEQ ID NO: 456856 - DNA, 122 bp, Homo sapiens
tcactctcgcttttaactccgagaacccgctcttctccagttcagtctccatggccccgccgcctttgcacattgcacttcccggcagcctccgcgtgggcgccccctccaactcctgcctt

SEQ ID NO: 456857 - DNA, 122 bp, Homo sapiens
ccttgttgtgacgaggtgggaaccgtggaaattcgaacccacgacgccaggtcgctgtgccgctgagcagttctaggcctgcccccagcctgccagaaggtctgcaccctaacgccggagtg

SEQ ID NO: 456858 - DNA, 122 bp, Homo sapiens
aggggaaaagtgacggcgtgtcgcagcgggaggtgtgtggtgcaggcccacaaatacggacgcgtggcggaacccacacctagggcgctggctccgccccgcaagccgctcgccgtgaaggg

SEQ ID NO: 456859 - DNA, 122 bp, Homo sapiens
agccggggtccggcggcgcgatctaggctcaagagtcgggatcatgtgctgtttgttccgcggaggcgcagagaggtgccaggcccgggcggccgccggctggctggacaggaggacgggtc

SEQ ID NO: 456860 - DNA, 122 bp, Homo sapiens
cagcagaagaagatctttacaatccaaggctgctacccggtgatccggtgtctcttgcgccggaggggctgggtggagaagaagatggtccatcgctcaggccccaccctgctgccacccca

SEQ ID NO: 456861 - DNA, 122 bp, Homo sapiens
gcgcacctcttctggagcctggggctgtgtttgccttggtgggatttgttttccctagcacgctgcctggagcgctgatgtgttgtaggagaaagacgttgttatgacaatgttagcctctc

SEQ ID NO: 456862 - DNA, 122 bp, Homo sapiens
cagccctcctggacgggagcctctgggcccagcttagggtggcgtccagcgtgacctactcgggaatggcagccttcagtgtcctgcggcctcgggttccgggaagctcggggacctgggca

SEQ ID NO: 456863 - DNA, 122 bp, Homo sapiens
gagcgccaggtgagggcggggacgccaagggccgcgggatgggcagcggcggaggagccccgcaccccaggctggggcagtgggtgggggcggggacagccctgcgccgaggaccgggcgcc

SEQ ID NO: 456864 - DNA, 122 bp, Homo sapiens
gtgcctttccttatccccataccacacactcttgataactgaagtattatagtcagtcttcgtatcaggtagtttaagtcctccaaccttctctttctaaaattgttgagctgttgtgagtc

SEQ ID NO: 456865 - DNA, 122 bp, Homo sapiens
gaccttccgggcccataaggcgggaggcaaggagggcccctgggcagccccgcgcttgcgcgccaatcacggccgttatggatttcgatacgttaccaaacggtctcctacaaaggcagaaa

SEQ ID NO: 456866 - DNA, 122 bp, Homo sapiens
caaacttagtagattcaaaaggcagccttttgtttgctggcatttctgcggttggcatttcggctggggtcacagcatcctgtgtctcatgaggcatcagctgagctcactcaagtgtttgg

SEQ ID NO: 456867 - DNA, 122 bp, Homo sapiens
ataatacacaagtaaatggttgtaatttcttgtttgtgcatcctggcattataccctccacgtatacaagcctgtgcctgcacaaaccaggctacttgaatgccaaacatcattcctgggtt

SEQ ID NO: 456868 - DNA, 122 bp, Homo sapiens
tcagtcgcaggggccggggcaggggcctctggctcccgacactggccgagaggtgggttccggggcgggtcgctgctccttgaagccgggcggggacgcgctgcccccgccctgcctccctg

SEQ ID NO: 456869 - DNA, 122 bp, Homo sapiens
ttctttagagtcattattattaacttagttgcttcttcgtcagttaatatttttacttagcgctttgctttaacgagttctgaacacaaagagattgaaatatttccttagttaatttgttt

SEQ ID NO: 456870 - DNA, 122 bp, Homo sapiens
tgggggctgtttctgccgctggggagtttgggcccctgaacccatcccctcagtgactgccgtcccggccgatgtcacccgtgtctgtgtcagggtgcggcgtctgcaggtccccaggtgcc

SEQ ID NO: 456871 - DNA, 122 bp, Homo sapiens
gtagtgtgtcttcagcacgacatggggaaattcaaaggcagccatccgtggaagagccaacggcagcccgtgcaggcgtcagcgcctggggaatagtagcagtctacatctttagctgtcag

SEQ ID NO: 456872 - DNA, 122 bp, Homo sapiens
ccccgccctcctggagctcgctctggggtagacacgcatgaaagccggtgtgaaatgcagcgccctggattgaacatcagagacggagcccacaggagtcgtgcgtttcctgcgggggctgt

SEQ ID NO: 456873 - DNA, 122 bp, Homo sapiens
ctgcccgctgggcccgggggctgcggggagggacggctctcgtgcgctgagtagttgactcgcccactgcagacctcagaagcctcacgacccggaccccgggagccccagccccgcgccct

SEQ ID NO: 456874 - DNA, 122 bp, Homo sapiens
cccagggccccggaccacacaggggctcacccgggtgttggctcacccgggcgccttctccgaacaccttccatcaagtgtcttgaattctgcagagcagcccaggtttcagggctttgctt

SEQ ID NO: 456875 - DNA, 122 bp, Homo sapiens
ggccctggtcaggaggcacccaggacaaaatgcacctgcatctcctgttctcgggctggccggctgcacaggagctacgcctgctcttagagccgagggaacaccccggatttttacaaccc

SEQ ID NO: 456876 - DNA, 122 bp, Homo sapiens
taactggagtttatccttatgcatgtatgagctggggtctaacttctctgcccgatggagcgccagttatgtcaacaccatttgttaaacaaactgccccaacagaatttaaatgctgccct

SEQ ID NO: 456877 - DNA, 122 bp, Homo sapiens
gcaaggacagatgcagccaccactgcccttggacgggggaagtcattgaacagaagggcacgaagacgtggcacacaaagcctattgtccctgctgcggccatgctgggcacctcagtgcct

SEQ ID NO: 456878 - DNA, 122 bp, Homo sapiens
ggcacttttaaaatgcagacagcaaaatgtaagggtatccaaatcctggattaggaattacgatagctgggtccttgtcccagctgaaaatgattagctcaagtttcttgggcaactcaacc

SEQ ID NO: 456879 - DNA, 122 bp, Homo sapiens
tttatgaaacacacacgcccaccccgcctcccacgtaaaggccagtcttgactcattttgcgcccagatgcaaactcagctggaagttgagggtagggccaaagaggtgaggggagggtaag

SEQ ID NO: 456880 - DNA, 122 bp, Homo sapiens
tggcttgtagcccaggtgtcggaccagcacagccaccccatcctgcggccgtcctgcccacgtgggccacgtctctgggcacagtgacttgtacctggggacaggaatgcacgcggctccca

SEQ ID NO: 456881 - DNA, 122 bp, Homo sapiens
gcggtaccacgcgccgccagtgcggatcatctgggcactggcgccacctagtgctggcagcgcggcaatggcccttttaccgactcgcgcgtctatagtgcggcctcacacaacctctgcgg

SEQ ID NO: 456882 - DNA, 122 bp, Homo sapiens
gccagtaactggaaggagtttggcaaaacagcatacataggagcagacagatggaagaaccgactatcccaagatttagctagaatagtgcaaggaaaatcctacccgaacttgagcaggag

SEQ ID NO: 456883 - DNA, 122 bp, Homo sapiens
ttaagaaatgggtttgacagtccctttgtacacactgctatgcaaaccccaaagggttggcggctgtccgggcgatgacactccggtcccctgcgagaccccgggccagccaggcccgtccg

SEQ ID NO: 456884 - DNA, 122 bp, Homo sapiens
tggggtacctggacaagcacagggggccatgaacagggccatgcctgtgtgcctgcccctcgctcagaagagggcacctgacgggaataccagggcatatctgcaccatgcccgggcagtag

SEQ ID NO: 456885 - DNA, 122 bp, Homo sapiens
tggtgggtccctggtgccgtgggaaatcttcctcatcaccctggtctcggttgtggcggccgtggggctctttgctgggctcttcttctgtgtggtgagtgcctaatatgtaagaaaatgcc

SEQ ID NO: 456886 - DNA, 122 bp, Homo sapiens
agcaggaacagcagccgggctgtgggaccctgaggagggagggcagccaggcttcgaggacggacatggcccctggctgtgctaacagaggcacagcttgcagactgagggcggtggggaga

SEQ ID NO: 456887 - DNA, 122 bp, Homo sapiens
ggcagccacaatgacctcacccagctctgggggtctcacgtgatcgacaaagttaactcacggcaaaaaaaaaccccatcgtaccgagcagttcacgtcatgaaaaagcaaagtgaagcctt

SEQ ID NO: 456888 - DNA, 122 bp, Homo sapiens
gaagtttcctatgcctcactcgcgccagcaccgttcacagtgcccactggctgtatttatcgctgacataaggatgaggcctggaattgcattcactgcagagtcccaccgggaggaccgac

SEQ ID NO: 456889 - DNA, 122 bp, Homo sapiens
tctgtgttcagcaggtggaggctttgggagtcacaggccactacctcctttgcaggggaccggcttcggcagacagaaaaccgcgccacgcgctgcaaggtggaacggctgcagctgcttct

SEQ ID NO: 456890 - DNA, 122 bp, Homo sapiens
atgtaaaactgtgctcattacattcttgtggatttatttagtctgattcctcttctcagtcgccccagagaaatccacttttatgatcacgaaaggaatcatagtcttgtttgaaaattcag

SEQ ID NO: 456891 - DNA, 122 bp, Homo sapiens
agcccgccatgcctgagcctcccacccactccatgggctcctgtgcggcccgagcttccccgacgagcgccaccctctgctccacggcgcgcagtcccatcgaccacccaggggctgagcaa

SEQ ID NO: 456892 - DNA, 122 bp, Homo sapiens
tttttcattattgctctgcctgaaaagccttttgactactttattgcctaatcaccccatcgcagtgaaatttctctgcatctgtttatgggttgtagcccttcggagggccacaaaccatt

SEQ ID NO: 456893 - DNA, 122 bp, Homo sapiens
tcaggcagaacaaaccctagacccaggtccgtgggttctcaggctgagatgctcctttcccgcaggctgtgggtcccttctctcatctgtcaggcacgccagagagcggatgtccatgggtg

SEQ ID NO: 456894 - DNA, 122 bp, Homo sapiens
tcagctttctcctcagtcttctctcctccggatcccaggatcctccagtgccctcagagtcgctgggggcttctgaagagcccttgagcctcctcaaaactttcagggccctccttagagcc

SEQ ID NO: 456895 - DNA, 122 bp, Homo sapiens
ccaaaaggtccgtgagcctggggtcccacgcggtccacccctcccgcggggccaccctgccggaactggcctacctggttggggtgctcacagaggatgttttccggctttaggtccctgtg

SEQ ID NO: 456896 - DNA, 122 bp, Homo sapiens
gacccatgtagggaaaagcatcaatatttgttgagcagttacttggtggcagagacgatgcgaggagttaaaggcatgcagcttagcaaagccacgcagagcaggcacactggaggcagaac

SEQ ID NO: 456897 - DNA, 122 bp, Homo sapiens
ccatatgggaaaagagcccatatagggaaaagaagacccaaggatgcagtgagagtcaatcgcttctatactggttgcacaaaggacagtagttttgaaaaggcagctaaattatgtgggga

SEQ ID NO: 456898 - DNA, 122 bp, Homo sapiens
ggccggccagtcgtgactgggcggcaatgaggtcagtgactgccgggagtcctgcaggggcggggcggcgccaagcgcagggagcccggctgagtggcagcccaggtgagcgctcagggagc

SEQ ID NO: 456899 - DNA, 122 bp, Homo sapiens
gagcccgggccccgcgcggcccgcgcccccggcccccgctgagccccgggggccccgctgcggccgaggccatgttcccggtgtttccttgcacgctgctggccccccccttccccgtgctg

SEQ ID NO: 456900 - DNA, 122 bp, Homo sapiens
gccataatgaaggcagagtaacaataatcaggaagaggtcatctcacaagagaaatgtaccgaatgggatcaagatgccacagggaaagatgctgctctcatcaaatgtgtgccaacagtgc

SEQ ID NO: 456901 - DNA, 122 bp, Homo sapiens
tggcccaaagttttctcatctgtaaaatgtgggtaataataactttccccttacaattgtcgtgaaaagtaagtaactcctaaaaattgtcttgctcagtgccagacccagagttagtgctt

SEQ ID NO: 456902 - DNA, 122 bp, Homo sapiens
tggagacaggtaaacaaatacttgcaaagtgtgtggtgtgagagaggtgtgacgggtgggcgggagcctgcagcaggcacgtctgactcatcctaggtgtgtatagggcagagaagttagtc

SEQ ID NO: 456903 - DNA, 122 bp, Homo sapiens
gcttagggcttgcaccctctgaagccacagcccaagctgtaccttggccccatttagccacggttggagcagctgtggaaaaggtctctggcaagccctagagacattttccccattatctt

SEQ ID NO: 456904 - DNA, 122 bp, Homo sapiens
gaagcctgacaaatgtggaatgtggctggccgaggatgctgtcattggcctgtggctggacgggttatgaatgatgtggtaccatgaggtggtaccatgaggtgtcatagcatccaaatgac

SEQ ID NO: 456905 - DNA, 122 bp, Homo sapiens
ttataaaagacaaatgcattcattcactatttcttccaacaaacctattcttttttgagacggagtctcactctgtcgcccaggctgaagtgcagtggctcgatcctggctcactgcaacct

SEQ ID NO: 456906 - DNA, 122 bp, Homo sapiens
attatcattttttaatcgaggtataatttatgcatttaaaaaatcagatcaattgccccccgggctctgggatggaaggcggtgtgcgcctgcgaaggtcagaggcccagcggcgccagggc

SEQ ID NO: 456907 - DNA, 122 bp, Homo sapiens
caggaattattaagcaaacactaaatgctggacaccctagtcactgctggggagacaattcggaagacttcatttctgccctcagtgagtttatagtggaggagaggaatagggacatagcc

SEQ ID NO: 456908 - DNA, 122 bp, Homo sapiens
tattatatgtgatggtaacaaatgtgagagcctggaacccagtcttaggaaaagagctttcggtttccagtggacaatttcaaatggatcttaccagatgccctttaagatctattccaacc

SEQ ID NO: 456909 - DNA, 122 bp, Homo sapiens
tcctgaggccagatctcaaaggtcttgtcacaaaactgggctgccgataaaccgcaaacccggagagtctccagtgtgcctggtgctgaaccaggcagacgaagttaactgagaaagaaaag

SEQ ID NO: 456910 - DNA, 122 bp, Homo sapiens
gccccgcacaaggagctggcgctgcagaaatgccccggggactttgtgtccaacaggaagcgggctctttcttctcatctagagtcttttgatttggttcagttcagcccaacatgcatttc

SEQ ID NO: 456911 - DNA, 122 bp, Homo sapiens
ccgcgtcggcgcctgccccgttgtgaggtgataaagtgttgcgctccgggacgccagcgccgcggctgccgcctctgctggggtctaggctgtttctctcgcgccaccactggccgccggcc

SEQ ID NO: 456912 - DNA, 122 bp, Homo sapiens
ctccctgccccgcgaggcgtgggggactcgggccgggggcgtggcaggagccagcgggggcgcggccagaggacggggcggagcttcgcggccgcagtgtccgccccgcccctccacgtcac

SEQ ID NO: 456913 - DNA, 122 bp, Homo sapiens
aggccaccgtggttggcttagaccaagcatgattcaccccgctatgactcgagaggaggtcgccttccctgaccacattggaaggtgaaccccagaacaaaatttggccttagctactgggg

SEQ ID NO: 456914 - DNA, 122 bp, Homo sapiens
aaaaaaaaagaaaaagaaatataaaacccaaaccaaccaaataaatcacaggccggtgggcgagcggtaaggggtgagtgaaacacacttgggtgctttgcagggccctcccattccgtgcc

SEQ ID NO: 456915 - DNA, 122 bp, Homo sapiens
tggaagtctcatccagctgcctgtgctcctgagagatccttagggctgctgggagcaggccgggctggtgatctggggcgactcacacttgggaatcagcccccaggggatggaacagctcc

SEQ ID NO: 456916 - DNA, 122 bp, Homo sapiens
acccacaggaaccccctcgtccagtccctcactacccctcaggccctgtcaagccggcgccggcgcaggccctcacgcgtaccttcaacggcgcaagcccaagcctcctcctcctcctcctc

SEQ ID NO: 456917 - DNA, 122 bp, Homo sapiens
tcgctcaagcacttgtctaaataatggactcctgccctgaccttgtaatttactttacaacgcatttataatcccactcaatatatctcactcctgggtaaatctcttaaacaagattagat

SEQ ID NO: 456918 - DNA, 122 bp, Homo sapiens
gcagggaaaaagaatgagttcccgccaggcgcggcaatgtagcggagtgagaaacgtgggcgcctacggctgcctggctgctgccatggaatgctctgcagtgggcggctacgacaacagaa

SEQ ID NO: 456919 - DNA, 122 bp, Homo sapiens
gggtgtcctgatgcgtagactcctgtggatacctacttaattcacaccggtgtcctgatgcgtagactcctgtggagacctacttaattcacacctgtgtcctgatgtgtagacccctgcgg

SEQ ID NO: 456920 - DNA, 122 bp, Homo sapiens
tttcatggcacaaacagaactggggtcttggcctcttgatccccaggccagcaggctttccgcaagcaacgccgtccctgcctgagattccctcaggccccagccttaaacggagtgcccag

SEQ ID NO: 456921 - DNA, 122 bp, Homo sapiens
tactgtggcctgggcctcctccactccatccagtccggcaaagcgcaaatcgggcccgggcgtaggcagggatcctgcccagcatccggctcatgcatacaggaggcagtagctgaagcagg

SEQ ID NO: 456922 - DNA, 122 bp, Homo sapiens
ggtacaatgttattagattattccagccacgttgagtcaggcctgcctggggtcctctatcgggaaatgatctcaagtgtctgcaggcagttgcttgttatgagggaatgggaatctgaacc

SEQ ID NO: 456923 - DNA, 122 bp, Homo sapiens
gggcgggggcgcctttcctcttgaagaacttccactggaccttgatggcgagcatccagtcgctgaccgagggcctctggcaagcggaggtgcagacatgcgcctggcgggggtgcggggcg

SEQ ID NO: 456924 - DNA, 122 bp, Homo sapiens
tcacatggcccagtagtggaaagtcgagacacatgtgaccgcatgtgagtggattagtgacgaggacatggcagatgctcaatgacctgtgtctaatttgaatcaaactacagtggttctag

SEQ ID NO: 456925 - DNA, 122 bp, Homo sapiens
aaattatgacacaaattgaggggatatttacatttaatatttatgagtctcctataaccacgttacaatctgaaggaccatctgtatggcagtaacagaaggaagcaattctgttatacctg

SEQ ID NO: 456926 - DNA, 122 bp, Homo sapiens
atgatatgatttttggatattgtatgatgtaatatgttaacatttagaatatttgaagaacgtcttccagctgaccaatgtgtgctgctgcaaaattgcacatgggtaaaagacctattcaa

SEQ ID NO: 456927 - DNA, 122 bp, Homo sapiens
gaggagaagttctcctaggtgacaagcatttgctgaagccatgggatacttagaagctgtcgtcaccctcctcctgaccccggtcctaatgaagtccctggaattaatatctttccatttcc

SEQ ID NO: 456928 - DNA, 122 bp, Homo sapiens
gggctggtcggctgaagcgggcggtgctcgggggcgccggagcagaactctgggctcggccgcttcctcctccacccgccctcttgtctgagggacccgggacctggggccgccgccgccac

SEQ ID NO: 456929 - DNA, 122 bp, Homo sapiens
tggacaatggaaatgaacccaggcagccattccagttctccttctcaagtgactcatctacgccttgcaaaatccagacaagtatctggaaacttaaagttccttgctgtagcacttcggat

SEQ ID NO: 456930 - DNA, 122 bp, Homo sapiens
ctgaggaagagagtttaattcaaaccttactgctgagcaaccaacctgtcttcctccctccgggcccccaatcacaaaaataaacaagatctgccactagggagattgttgaggtcagggag

SEQ ID NO: 456931 - DNA, 122 bp, Homo sapiens
catgacagcgacgtgtgctttgagctcagtccacagcaaagaccaccttggttcttgtcccgccgcaaccacatccgaagaaaggggtcaggtattctaggcgtacggggactgataaattc

SEQ ID NO: 456932 - DNA, 122 bp, Homo sapiens
cagtccatctcgttctccttcccggtgtcctgatcccgcatggtccgccgatgtgcggcccggatccgaaatacccccaggataatcatgaacaccaggaagctgacgcacaccacgatcac

SEQ ID NO: 456933 - DNA, 122 bp, Homo sapiens
cccacggttctttttgttccgggccaggagcactttcacaagtggttagaaagtcttgggcgccatctaacgggagcagcaaaaagttgacgctgggtggaggttaggcccgacaggagccc

SEQ ID NO: 456934 - DNA, 122 bp, Homo sapiens
gccaggactcattctcctgaccactgccgagagcgccacggtacaggccgctgccagcgccgcatggatccctggcacgtgccaggaagtgtccatttcacaggcagggaactagcccgaag

SEQ ID NO: 456935 - DNA, 122 bp, Homo sapiens
cgggcgcggcggggagggtactcactgtgaagcacgctgcgcccatggatcatgtctgtgcgttacaccagaggctccgggctccactaattccatttagagacgggaagacttccagtggc

SEQ ID NO: 456936 - DNA, 122 bp, Homo sapiens
gtgggccgggtggtgattacaaccctgagcgctgtccctttggaacctgactcccgactccgctcagcaaccgggaggttgcgacctcaaagccctctgtgcttctccatcgataccgggcc

SEQ ID NO: 456937 - DNA, 122 bp, Homo sapiens
gccgccgggcgggcgggctgcagccgccctccgcgctcgcctgccagctccctcgccgcgcgtccgtcctccgtcctcccgggccagccagccagccagccagccgggccggcggcgggcac

SEQ ID NO: 456938 - DNA, 122 bp, Homo sapiens
ccattcaccaaagtgccaggcattaagtgggccctttcaacttggaacatcaagctccttcgttctgggaaatttccttaaattcaaggtaccatcgtcatgaaatttctgaactttaaaga

SEQ ID NO: 456939 - DNA, 122 bp, Homo sapiens
cagttgccgacccccggccagaggcaagcggaaacctgtggccggtcggagagacagggacgacacttttacgacggcccctgaagtcgggtttgacgcagactcgaggagtggcttccggc

SEQ ID NO: 456940 - DNA, 122 bp, Homo sapiens
agctgcctgtgcacgagggacttttctgctggagccaatctgggagaggaggaataaaaacgagcacatctcaggtctcgacgcatctgttagctgtgtactcacaaagctgtggcgatatg

SEQ ID NO: 456941 - DNA, 122 bp, Homo sapiens
caaacccctaatcaccactttctctcccatcccaactctaaattcaggtgaaacaatgaacgccagctgctataaattgacatgtgattttccttctctcgcgtggctcaccattttgaatc

SEQ ID NO: 456942 - DNA, 122 bp, Homo sapiens
gaccctcggaaagaaaccccactggggggtcgtggtcagggagacagcccccaggatacccgctaacgaccgagacgcctggatcatcgctggtcaccgtctgtgtgtgtaatctgacgtga

SEQ ID NO: 456943 - DNA, 122 bp, Homo sapiens
caggccaagcagctctgcccctagcgggagtcggaggcatgaaactcccttttaggaagacggagtaagaggcaccaccacctgctcctgctgcctctgctgtcctcagcttctgggagcat

SEQ ID NO: 456944 - DNA, 122 bp, Homo sapiens
tgtacatttgtgggcaagcatttgcgtgggcgtgtgttttctgttctcttgggtatataccgaggagtggaattgtggggtcatgtggtcattctatgtttaattttttttttggccatgtt

SEQ ID NO: 456945 - DNA, 122 bp, Homo sapiens
cctattggctggctggcgcagttcccgaggcgcgcgccgcggttggtaggctcggacgcgcggggccacactgcccgccccctagcctggcgctgggcctccgggacaagttggctgggtcc

SEQ ID NO: 456946 - DNA, 122 bp, Homo sapiens
cacagtagccacataaccaccagcacacgaaggaactaacaaaacgcagtgcacacacaacggaatgttactctaccataagaaaggaatgaggtgctgctacacgtgtgaaccctggaaac

SEQ ID NO: 456947 - DNA, 122 bp, Homo sapiens
agtctcgtcacagaggagcagcctgaggaagataatgcatccatctactattccagtaggcggcgtcctcacctctccatcagcaccatctttacattggcagccagggctgcagtctctca

SEQ ID NO: 456948 - DNA, 122 bp, Homo sapiens
cccgccctctcagcgaaggtggctgccgaggtgggcggggaggtcaggtgacgcggccggcgtcccaagatggcggcggcggcggctcccggaaggccgcggcggcgtcccggctgctaagg

SEQ ID NO: 456949 - DNA, 122 bp, Homo sapiens
gtgagagtattttgaaggctctttctcgactggggttttctcatggtcaggttggggcagcggtgttttgggaggaagcccgcagaggcaaggcgccgcccccctcccatcacatcgaggct

SEQ ID NO: 456950 - DNA, 122 bp, Homo sapiens
atgagcaggactgaagataggaagatagcatctcattatgagtcattcacctgctggaagcgggtgactgacaacttgaggtttttggctcagtattctagagcaatgttttaaaaacatta

SEQ ID NO: 456951 - DNA, 122 bp, Homo sapiens
gtttggcattaaaataaaggactcgccaccactctgtgcaccttcttgagggagttcattcgtccggagcgcctcacagcttagtgcgcctgcgcacgcgcgaactgcggccccgcctctcc

SEQ ID NO: 456952 - DNA, 122 bp, Homo sapiens
ggggcctggggggcgtggctcccgtctcgctcagccaatcagtgccccggggccgcctcccgccccctcctgaggagacagcgcttgcgtactcgggccaaggtgctcctcgggccccgccc

SEQ ID NO: 456953 - DNA, 122 bp, Homo sapiens
tgcgcccggctggagggcgaggcgtgcggcgtctacaccccgcgctgcggccaggggctgcgctgctatccccacccgggctccgagctgcccctgcaggcgctggtcatgggcgagggcac

SEQ ID NO: 456954 - DNA, 122 bp, Homo sapiens
aggcctcctggaagacctgaaccctgagttaagtcttgaacttgaaaatcaggggcgagtcgagcagaaaatgggcaagaaaacaccatatgcaaaggcacaaaggtgttggggaaggcaga

SEQ ID NO: 456955 - DNA, 122 bp, Homo sapiens
agggatggccttagtgtctgagagcagagaccagattgactcccacttgagaccagaaaacgaagaggaagcggaacccgaggtggctgcggctcccccgggacacaaccgggagaggaagt

SEQ ID NO: 456956 - DNA, 122 bp, Homo sapiens
gggctccgtaaatccatatgctgccatggaaagaacggggcagacggacggtcacctatgcgttcctctcctgctcagcgagcatgcttttgacaggaggaagagcaaatggggcagtcacg

SEQ ID NO: 456957 - DNA, 122 bp, Homo sapiens
acttccgcgcctaccctatcccttcctggagcacatccgggactcggcgaggcgtggtctcgggaggcggagtctgacgcaagccggcccagcccacctggctaaattcacagtcgcgctcg

SEQ ID NO: 456958 - DNA, 122 bp, Homo sapiens
cctccttcccaccccttgcgaggcccctccccgggccgcgcgccctggcgcgcgcacacgcgcacacactccccagtcgcctgtaccaaccaccttctcaagttgtagcggtcgctcgcctg

SEQ ID NO: 456959 - DNA, 122 bp, Homo sapiens
gaaatatgaactgagcctttcaggtgttaatttcttttagagagcctgaattcctcccctcggagcctctcctctttcccttctctggtctagtgatgctcagtagggactagggcttgtct

SEQ ID NO: 456960 - DNA, 122 bp, Homo sapiens
acggcaaaattgaggctattctgcaggtactcatattaccgattgaaatgcaactgtttacgagggtagaccccattgttagctcttgggctgtaatagtccaggcagctggcaggattcgg

SEQ ID NO: 456961 - DNA, 122 bp, Homo sapiens
gggaaagggatagttgagatggaatatacatttgtcgattctgcagaccaagctttgcagcgagtgatcgggaggaatcgtagacttgcatgtacttacacctcgctccctgagattcggga

SEQ ID NO: 456962 - DNA, 122 bp, Homo sapiens
caaggcctgcacccttaacccctctactgatatgaaagtggggaaggggaggaggggtgacgaaggtaccaagaatgacccctaggtttctgtcttcctgactcaaggaaaagtgtcattca

SEQ ID NO: 456963 - DNA, 122 bp, Homo sapiens
ggggagggtgttgtttcttattattacattttttgagaaaagctatgcaggcctgggagacgtctgtgccctaggagtcccttctggcctgaagactcaaggctgcaaacaggtgctgagag

SEQ ID NO: 456964 - DNA, 122 bp, Homo sapiens
gagtgtaatcgtatgtcttccataggacccaatttaggaattcaaatatttttccccagccgttgacactctaatctgagagaaaggtttcttaacatctaggttaaaaaagaaaagatatt

SEQ ID NO: 456965 - DNA, 122 bp, Homo sapiens
aaattgtaagtgtttcctggaaaagctatgctatttcaccatttaaaaattatggccaggcgcagtggctcacgcctgtaatccctgcactgtgggaggctgaggagggtggatcacctgag

SEQ ID NO: 456966 - DNA, 122 bp, Homo sapiens
tctttcctactagagctaaaaggcagggtctgagcgtcttacgcgcctccatcttcaaggcgtagcacagtgactgaaaaaaactgacgttgaacgtgcactaaactgaactgctcaaacac

SEQ ID NO: 456967 - DNA, 122 bp, Homo sapiens
ggcttagagaaggcgcggtcgaccagacggttcccaaagggcgcagtccttcccagccaccgcacctgcatccaggttcccgggtttcctaagactctcagctgtggccctgggctccgttc

SEQ ID NO: 456968 - DNA, 122 bp, Homo sapiens
gcgtctccccagcctcttgcagcctgttcagcagctcaggtctaggagcgccgacggctgcgcccaggctgtcctcctcccgagcctgtgcccctgccctgtgctgaccccactcaccgagg

SEQ ID NO: 456969 - DNA, 122 bp, Homo sapiens
ttactggactccttctccaagcgttcattgttgtccgggccgcctcatcatgcccccacacgtgtcctcctctggggaggtttggaaaagagcctttagcccaagttactgtgacctttggt

SEQ ID NO: 456970 - DNA, 122 bp, Homo sapiens
cccagtctgagcaccagactttacactttatgtttgcatttctctctttgtgactattctcgtaagaaaaggactgtcatgctgctgtgttttccaaaagttcaggggtaaatgccactgag

SEQ ID NO: 456971 - DNA, 122 bp, Homo sapiens
agctggatggtttgatgcctcaagtcagaagaccacactgcctgcgtctgaaccccagctcgccagctgtgagatcttgggcaacttaatgtacctttcagagcctcaacattttcatctgt

SEQ ID NO: 456972 - DNA, 122 bp, Homo sapiens
ccagggcgcagtgggaagggggccgcggagcccgcgaggcacatgcgcagtgcaggaccccgccattttgtcttcaccgcagccacggccgcaggtcgcgagtgcctgccagcaaatgattg

SEQ ID NO: 456973 - DNA, 122 bp, Homo sapiens
caaaataaaaatgctttgcaaagccgagtttcacccagccgatttcgcagtctgggaggtcgagaagaggtctcggcattgtgctgggggcggaccaggaccacgggccaggctggcgcgga

SEQ ID NO: 456974 - DNA, 122 bp, Homo sapiens
gagtcagctctgggatcctccggttttacacagcccaggatggcaccgactggctgcgggcggtctcagccaacatcagggagctgacacttcagaacgtgagcacacggtgtttctgagtc

SEQ ID NO: 456975 - DNA, 122 bp, Homo sapiens
tggccactgcatccagcgtcgcctcctggtgctgcgggcccctgacggacagaggacgctcgacccctgcccgccaccgcccagggagtcagcccgactcccaggcacccgcccctctccct

SEQ ID NO: 456976 - DNA, 122 bp, Homo sapiens
taaggtgggaagtggcagctctgcccgcggcgcatgcccaggagcgcagacaggtggaggcgggaaaagtgctgcctggaaagactaggacacagcacttcagaaagcagcaagcagaaata

SEQ ID NO: 456977 - DNA, 122 bp, Homo sapiens
ccgttgcgtcacaaagagctctggcgcatgcgtaatttcaagagccagcccacctcccgccggcggattattacacgcttgggttttgggctcagcacccccacccataaacccgccgggct

SEQ ID NO: 456978 - DNA, 122 bp, Homo sapiens
tatatatttggttctccttccctctcctggcatagaactcctaaaaaatccttggaatcccgaaagtattaagtatctttttgtatgctaatgagttttgactggtggctggccacctttag

SEQ ID NO: 456979 - DNA, 122 bp, Homo sapiens
cggaagaggcggctcgcgggggcggggcttggctcgcgcttccagcgagtgacaaggtttcgtggcctgggggcctgagctgtttcctcttggaaaggccgaggaggctccgccactctcct

SEQ ID NO: 456980 - DNA, 122 bp, Homo sapiens
cgctgctcgcccttccccagtccccgccgctcgccctcgcccttcttcagtccctgcatccgccctgacaagactagaaatctcagtcgggccaagcttttggacactccaacctctcccgg

SEQ ID NO: 456981 - DNA, 122 bp, Homo sapiens
acggtgagacactcagcagaggacaggcatcaggcagccctcagggcatgttgtgctcagcgctcctctggttaacaaagagaatcaagtcccaggagctgaggaacaggcccagacacctg

SEQ ID NO: 456982 - DNA, 122 bp, Homo sapiens
tttttctggagattggaaatggtattacagtctttgttgtgttattgtggaaatctccggcgtctctcctgatgttgccgccctgcacggccgttggagagtacttgcaggcagccccgctc

SEQ ID NO: 456983 - DNA, 122 bp, Homo sapiens
gccgtcagagtcccatccagtgtaggatgtgaggtctttacaggctggggcttctccctgcggggcggcgggcccggcctgggctagggctgggccagggctgggccgggagcgcggcgccg

SEQ ID NO: 456984 - DNA, 122 bp, Homo sapiens
gaggaaggcgctgacctcgaaatctggatggtggcgaatcgggcggcagagctcaggctccgggcatgggcagtcggtcccggccgcgagccgcagcgccagcagcgccagcagcgccagca

SEQ ID NO: 456985 - DNA, 122 bp, Homo sapiens
cacacgcgccgtcttctggttatccacgaagaggcacacgcgccgtcttctggttatccacgaagaggcacacgcgccgtcttctggttaactgtgtgcgggacccacaggtcccctctgtc

SEQ ID NO: 456986 - DNA, 122 bp, Homo sapiens
acatctccgcgagactgggccaaagctttggggcctgcactcctcgcaaaggagagcctccgagaccggaggttcatctcaacccccgcgttcgagcccgggcctggagaaaagtgccctcc

SEQ ID NO: 456987 - DNA, 122 bp, Homo sapiens
gaataagaatgcaggagagaaaaggcccaaggattaaccccagaggcacttcaacatctccggtgggaaggtaaagagcttggactgaatcctgaagtgtagttctccaagtgtagttttcc

SEQ ID NO: 456988 - DNA, 122 bp, Homo sapiens
ggcgtcctttcgcacacagcaacctggtcatttgagtagtgcgttatgacaggagcaaaacgatacaaatggaaagtgaactgagctgattatgagagcctgttgcctagctacaggcctgg

SEQ ID NO: 456989 - DNA, 122 bp, Homo sapiens
acggctcacccggccctgatgctgtcccctgaccgccggggggtccgcctggcagagcggcggcaggaggttgctgaccatcccaagcgcttctcggccgactgctgcgtactgggggccca

SEQ ID NO: 456990 - DNA, 122 bp, Homo sapiens
gaatcaacacgcccgcctgcagtggtcaccagagccccgacacccccattcgggccaggccgccttcacatggggacctcccgggaggcgcagcagcaagcaggtgtttagtgagggaggga

SEQ ID NO: 456991 - DNA, 122 bp, Homo sapiens
ggtctgtgattccctgagagggtacccttaggctgagagcaagggcccacctgcactctgcgcgaaggactgtggttttcatcgggttgtcgagagcgttctaacccaaaatgctttaagaa

SEQ ID NO: 456992 - DNA, 122 bp, Homo sapiens
tgcatccctagttcccagcacagtgcaaggcgctgcaaacatttgctgaacccagggtctcgtgtcttgactgtccagcagaggccgctctgggccggggctctcgggacctgagggctgag

SEQ ID NO: 456993 - DNA, 122 bp, Homo sapiens
gtggagaagtcgggtctgcaggaggcttggctggtgtgcgccgggtttcccagggtgggtcggggtgcccggggcgtagaccctgcggccctgcagcacgcagccacgctctccgcgttcca

SEQ ID NO: 456994 - DNA, 122 bp, Homo sapiens
agcatgtttctgacacaggggtgtctgtgcctatcctcattcctccctcatcaccatcaccggagcatgctccttgcatcagataaacagaaagagaggaatggaaagcccattgctcacac

SEQ ID NO: 456995 - DNA, 122 bp, Homo sapiens
tgagttatggggctttgaagggagacgggatcctcatcgtcgtcaacacagtgggtgctgcgcttcagaccctgtatatcttggcatatctgcattactgccctcggaaggtagaggccctc

SEQ ID NO: 456996 - DNA, 122 bp, Homo sapiens
actgcctccattttggggtaatcttggtgtgtagcaatcagcactcatctggcctacagtcgtcattatcagctgcccccactgctggaggaaatgtcacccatatcagttcagacattaaa

SEQ ID NO: 456997 - DNA, 122 bp, Homo sapiens
gcccagtctggcccggcacagctgctgcagaaggcgcacgacgagctcgtgtggtacatgcgggtcaaggaccagaagaagatgatcatctggtttccagacatggtgaaggatgtcgtcgg

SEQ ID NO: 456998 - DNA, 122 bp, Homo sapiens
tcctcccgcgccagccaccgaagaacgctgcggacccagctcgctcctggtagcaagacccgaactgtaaggaacaaaaccctcgtgaaagaggagcaaacctttcacttcgctgcgtttta

SEQ ID NO: 456999 - DNA, 122 bp, Homo sapiens
gggcgctgccccactgcccacgccgggcaccctcttcaaaagacttccttttcctctgggcgacggttttccgatttcttagaaataccagggtcctgtgtctgaagagcaggaccaggtgt

SEQ ID NO: 457000 - DNA, 122 bp, Homo sapiens
ctggttaggttggagtcccttggccatcaaccttttcacccggtagagctggttgcctgtcgggatgccaggatacgcagttaattactatacggtgactgaggtgctacttatggcttgcc

SEQ ID NO: 457001 - DNA, 122 bp, Homo sapiens
ggagcgctatatccccaagatcctagaacattaatcagcacctagtaggtgtggaacaaacgtcttaccttaacagcgagtcaatgaaccagggaggggaggaagaagctttcccggagatg

SEQ ID NO: 457002 - DNA, 122 bp, Homo sapiens
tccctccagctggcttggaccctggcggggcgggctgtgggccgagcggcggagcccaggcgccagcccgtggccgagaagaaaggtggcggtggcggcggcggcgcagcggacgggacggg

SEQ ID NO: 457003 - DNA, 122 bp, Homo sapiens
caggtgtcgctggtcgcacagacccctcgtctctattttattgttgttcttccttccattcgtccgcccatggccgcgggtgggactaggcctgtctggacccaggggtcccaaatgtcatg

SEQ ID NO: 457004 - DNA, 122 bp, Homo sapiens
cctctggccgcccaatctcctattacccaggctgagttggcgggtcgcagctgctggtagcggagcctgggggagctggaggtgcacgggggcggggcagtcggtaccaggcgagccgtggt

SEQ ID NO: 457005 - DNA, 122 bp, Homo sapiens
caagaggacccctgacaaggccaagaaaaaggtacacccatgtccaagggggttgggagccgcaggtgagcagcctctgaggtcagccagggcagccccagcgcccacactgactcacaccc

SEQ ID NO: 457006 - DNA, 122 bp, Homo sapiens
cctttcatctagccggtttgaaacactctttttgtagtatctggatgtggacattttgagcgctttgacgcctacagtgaaaaaggaaatatcttcccataaaaagtagacagaagcattct

SEQ ID NO: 457007 - DNA, 122 bp, Homo sapiens
ccagatggtgacggccgggcatcagaggccacaccttcaactggagctccaaccccacagcgtcagcacctttctgtcggggagagagtgtgaccgtgatgagaacaacagtgcttccacac

SEQ ID NO: 457008 - DNA, 122 bp, Homo sapiens
tgcaagctctgaggtgaccacagtctttgctgcaggctctgagacaatcagagcctctaccgtaggctctgagaccaccacagtctctaccacaggctctgagaccaccacagcctccatca

SEQ ID NO: 457009 - DNA, 122 bp, Homo sapiens
ataggctgtagtttgcagacccttgctatagctgaacaccagtcgcccacactgggtttgcggtgttccggggtgggaagtcgctccgggctgcgaagcacctcgagggatccccccggccc

SEQ ID NO: 457010 - DNA, 122 bp, Homo sapiens
ctgcagagctggcggggccgggcccagagctcccctgtgcccagagcccggcccgccctgcggatgatgccaacctgaccagaaccccgctgtcccgggggcgcagcaacttggtgaagggg

SEQ ID NO: 457011 - DNA, 122 bp, Homo sapiens
caattttcattcccacaggcagcattctggctgctccacatcctaacacttggcattttccgtcgtttccttttcagccatgatggtgaatgtctagcagcatcaaatggtgattttaattt

SEQ ID NO: 457012 - DNA, 122 bp, Homo sapiens
gcagcagcggttggggcagcagcccgagttgaacgaccctccgaggtctgtgggcgagcacggctctttcgggtactaatgcgaatgatgccgcgtaccaggcggccctcagcatcctgctc

SEQ ID NO: 457013 - DNA, 122 bp, Homo sapiens
cacagcttaaaaatgtcctgaatggttgtggagtcagggtgctaaaataacaacgcaaaccgggaggaggccgggatgcagacagaaagagaggacccggcctgaaccaagcactggccacg

SEQ ID NO: 457014 - DNA, 122 bp, Homo sapiens
aagtctcagctaaaaaatcccctatggcagagatccgagtacacatgcagcagtttccaccggtggggccccgaggaaggggaggatgatgggagaagacaagcaactacaagcccccgcac

SEQ ID NO: 457015 - DNA, 122 bp, Homo sapiens
tgccttctgagaaacacatacctcggccgtgtcttctgctgcacactgaagagccatcgacggcggccctgccacgccactagtgtctgcaacactctatggtgatgggaagagtcagtcgg

SEQ ID NO: 457016 - DNA, 122 bp, Homo sapiens
cttcagtgtccatttgacccccacccccatccccggggaatgcacactgcacccggcacccgtctctgccttgcctgggttagtttaagggacttcatttccctgtgctgccatagcaacca

SEQ ID NO: 457017 - DNA, 122 bp, Homo sapiens
agaacagcccacctcgtgactgggggctggcccagcccgccctatccctgggggagggggcgggacagggggagccctataattggacaagtctgggatccttgagtcctactcagccccag

SEQ ID NO: 457018 - DNA, 122 bp, Homo sapiens
cagccggtttaccgctcggattagtttagaaagccaaggggtctgcggtccaaataggggcgggctagataattaacttccctctggaccttcaaatacgtctcaggagataatgagtttga

SEQ ID NO: 457019 - DNA, 122 bp, Homo sapiens
aacggggacacagatgcccctgagagagcagcggtagactgggatagatgaggttggtcacgtggtagagaggcatgttttttggtaccagcacttcacctgcgtcgaccttctcaactgga

SEQ ID NO: 457020 - DNA, 122 bp, Homo sapiens
ctggagcagcagacgtttgccatttctcacgcctgagggcaggcgttggagcagctcagccggcgttgctggtcagggtctcccgtgaggctggagtcagccgtgggttgagctgctctcct

SEQ ID NO: 457021 - DNA, 122 bp, Homo sapiens
accatcacttctcggttctcgctggatgtagcgtggggctcactggggtcacacaccctacgggattttgaagtttcaaagacctctgggttttatttgtctcctgacctgcccgtgttcat

SEQ ID NO: 457022 - DNA, 122 bp, Homo sapiens
gaaataaagagttgctttttctggacatattcccttccttttcctggcagttactggtaccgacttgctcttaattatctcccattcaatgctagtcataaccacccgcccacttcacactt

SEQ ID NO: 457023 - DNA, 122 bp, Homo sapiens
ctctctctcttttgtgctcttagagtctttgctctaaaagtcttcttccctccacctcctcgtagcctcagctcactgtgctccccttccctggcccccaaggaggcagagccccctcctcc

SEQ ID NO: 457024 - DNA, 122 bp, Homo sapiens
cctgccctgcttgaccctaaacactcacacacagtgagctctcaatatcttttcatggcccgatgtctttcccaccctttgccctttctccttgatctgggcacaacaattggtactgactt

SEQ ID NO: 457025 - DNA, 122 bp, Homo sapiens
ggctctgaggccttgctctggggggtgcccgggtaggactggcttcagggtccaccccgccgggcagggtcctgccgggcagagccgccggccccgcctggacacagaaagcggcgcgtgca

SEQ ID NO: 457026 - DNA, 122 bp, Homo sapiens
ccaacccacacaaccttctttagagaatgagattccagggcattggccactcaaaacaaccggcctgcaggtgccaagagccagtgttaggtccaccctccctcccctcttgccccttcacc

SEQ ID NO: 457027 - DNA, 122 bp, Homo sapiens
ctgcgcccagaaaactcaagccccttcctacctggaccttcagctggcaaaagtgcagggcggagagaatcagggcaagcgagcgtggagtcttctgagcaggccggggaggggcctctgcg

SEQ ID NO: 457028 - DNA, 122 bp, Homo sapiens
cctcaggcaatcaccagcctcggcctcccaaagtggtagaattacaggcgtgagccactgcgcccagccagtacctggaataatttctaactgcatcaagatgaacgaacatgcaatagtat

SEQ ID NO: 457029 - DNA, 122 bp, Homo sapiens
caacacagcgcatggttatttcatatgcggggatacagcgaagatggacgaagatctacacgcaccagtgcggatagccctcgaggacatgacgttgagtgaaaaaagaaaattgcaaaagg

SEQ ID NO: 457030 - DNA, 122 bp, Homo sapiens
atagtcaaccctctgtaaacactcaatgtgttctcaccttgttatcattcccaatgatgtcgaatgcgtggttgccctctccagtataaaagtttgatgcagctttgcctggatgtacctgt

SEQ ID NO: 457031 - DNA, 122 bp, Homo sapiens
acttggtaggggctaggtgccgggagtgggaggctgggtcatggttggtgccttcccatccgctgaactgagcacctgcacccagcctgtctgagttacttgcaggatgccccaccccaagg

SEQ ID NO: 457032 - DNA, 122 bp, Homo sapiens
atctgaatgtcaaggcatagcttttccaggagcttttaaaccgacctttcaattcgaagacgtaactgcgccaggagctttgtctccctggcatataaaagcatagaagagagcaacttctg

SEQ ID NO: 457033 - DNA, 122 bp, Homo sapiens
ttcttaatattggcatggaaggcttacctcttattaaaggaaaccatggggaaggaggagcgttgttaatctgtgacctgagtcatggatttcttctagcagaaataggaatcatgtgactt

SEQ ID NO: 457034 - DNA, 122 bp, Homo sapiens
tggagtatgacttgagaggttaaatggtttgtttcaggtcacccaggaaaggtgaaagagcgaggaggggtgcccgattttcccctgcacacttcgcatgccataccctatctccactgcca

SEQ ID NO: 457035 - DNA, 122 bp, Homo sapiens
ttcagagtcagacgactggcttcacgagggcccggtgtgcagacagcctgccagggcctgcgggctctccccacgtgctgtgcccccaccccagcccaaacactggccccaaatgcttctct

SEQ ID NO: 457036 - DNA, 122 bp, Homo sapiens
gtttcatagttgtgacgccagagttttctgcatggttgactcattacattaacattatagcggctaatcctgagaagagtactatttctacaatgagtatcctattacatctctcttaccta

SEQ ID NO: 457037 - DNA, 122 bp, Homo sapiens
acgtcctcccgggggttgacggttgagaacttccaaagctgttttccttcttttcttccacgtgcggaaggaaaaaaaaaagctaaaactagattttgataactgctaacacagacaaagag

SEQ ID NO: 457038 - DNA, 122 bp, Homo sapiens
attacccacgagaaaaatctaagtggtaaagtcactggtccaaggtcaagctgagccagtcgcaggcagggctagtccgcgaccttctaacctttccatctcccacccagccgcgcacaggc

SEQ ID NO: 457039 - DNA, 122 bp, Homo sapiens
agccttttggaaagaagccagaggacagcacagacttggaaatcatcaggtgcacccaggcgagaccgtatcccacgttacacccagcatctcttctgaatggtcagttcaattaccacact

SEQ ID NO: 457040 - DNA, 122 bp, Homo sapiens
gtggagctctgagacagatgctctcgttgggtcacgcctttcccattcctgaagaataagcggagtgcttcctgcagccgaagactccatgcccaagtgcctgtaatcccccccctcaaggc

SEQ ID NO: 457041 - DNA, 122 bp, Homo sapiens
tttctagatatttgagtaaaataatggttctgcaaatgaggctccactgaggttaattcacgccctggtctttatttatttatttatttgataaaacaaaagaaaggtgtcaaatgataacc

SEQ ID NO: 457042 - DNA, 122 bp, Homo sapiens
taaatcttgctgctgcttgctctttcggtccgcaccaccgttaagagctgtgacactccccgcgagggtctgtggttgcgttcttgaagtcagcaggaccagaaacccacgggaaggaacca

SEQ ID NO: 457043 - DNA, 122 bp, Homo sapiens
gttcactttgttccctttctccataatcaattccttttaaccaaaacctttcacctctttcgaagtcattggcctatgaatcctaacactggccatgtaatcaagaagacactcaacacagg

SEQ ID NO: 457044 - DNA, 122 bp, Homo sapiens
ttggagtggtgatagaggccaggaatgttgctaagcattttacaacatccagaacagcctcgccacaacaaaaaattatctcacccaatatgtgcacaggttgagaagccctgctgtaatct

SEQ ID NO: 457045 - DNA, 122 bp, Homo sapiens
aatgtctgggatggtctggtattgcacagccgaggaacaccagagttccttctgggaagacgggctagggagctcagtggtctcaggtctggtttcagagttccgcctctgcgtgcctcagt

SEQ ID NO: 457046 - DNA, 122 bp, Homo sapiens
gaaaatcagggtctccacccccagttagaaagttctgtccctggaggctggactgatagacgccacatcagctttgcttatcccgcctactgttctgacttctgattggccagatggagttc

SEQ ID NO: 457047 - DNA, 122 bp, Homo sapiens
ccagctaatttttgtacttttagtagagatggggtttcaccagattggccaggctggtctcgatctcctgacctcaggtgatatgcccacctcagcctaccgaagagctgggattataggca

SEQ ID NO: 457048 - DNA, 122 bp, Homo sapiens
tttaccctggctgtgtattaaaatcccctggagggctctgaaaaaatattggtgcctggacgccaatgctgatttaatcagtttttgggagctctcctgttgattctatttattttttaaaa

SEQ ID NO: 457049 - DNA, 122 bp, Homo sapiens
tttctgttgttaaccttctgaagcacttaaaacatttttttcttttttgtgatggagtctcgttctgctccccaggctggcatgcagtggtaagatcttgggcccacggcaacctctgcctc

SEQ ID NO: 457050 - DNA, 122 bp, Homo sapiens
cagctgtgtgggagatcagtctccccgagcacgggggagcagagttttaaaagataacttcgtgggtggggggaagccagtgagccagaagtgctgattggtcagggatgaaactgtaggga

SEQ ID NO: 457051 - DNA, 122 bp, Homo sapiens
tgatgacctgaggcgtccaggctcccgaggaaagcctgccgccctggttcctacaagggacgcctaaacacagagtcctaaacacagagtcctaaacacatgcagggttggagggagactga

SEQ ID NO: 457052 - DNA, 122 bp, Homo sapiens
agaatgagttcagtaagtgtgagccagtattagaaaatgtttcttgaatgaagatgtgaacggaatgagccctgaacttgagtcacagtggtgacacatagtgcatgtggggatgaggcagc

SEQ ID NO: 457053 - DNA, 122 bp, Homo sapiens
cccaagatctcggtgcactttccctgggagaattatgacctgtttgccagggctcataagcggcaggatcgtctgtctgccgggcagggagggttaaatatgactgtggtcccggccctggc

SEQ ID NO: 457054 - DNA, 122 bp, Homo sapiens
gaaattaattcccttacgccatcatgcatatcccctgcaaagtcctccacacatacaccccggaatgcagaaatctgcaagggagagactatctgagggaaggtttgtcctaatttctctgg

SEQ ID NO: 457055 - DNA, 122 bp, Homo sapiens
agagcaggcaggattctagcatcacccagtgccttcatcaagagtctttaaccccaagcccgctcgctagcgacctccaggccggtttggggcgcggtgtggccggtggcgagaggtggagt

SEQ ID NO: 457056 - DNA, 122 bp, Homo sapiens
gcaggtctccaaatggtcgactctgtcccccgaggccccgccctagcctcgttcgggccccgccctagcctcgttcgggccccgccctagcctcgttcaggccccgcccctcgccccgcccc

SEQ ID NO: 457057 - DNA, 122 bp, Homo sapiens
agcttcaggtgtgccaagaggatggctgcgggcggggcggggcggtgagctgggcggggccggagcggggccggatgggacccaagacggagagggcagggcagaggcggggagagggcgga

SEQ ID NO: 457058 - DNA, 122 bp, Homo sapiens
agagaggagagggaggagtaaattcaaccacccccacttgttgttaaagcaaatttactgcgttattgcaagctcaggacggggggctgggatgagagttgagaggaagggttgagttggga

SEQ ID NO: 457059 - DNA, 122 bp, Homo sapiens
gttttgctcccttgctattgccccgcgacatttcttacctggccttgctgcagccgtctccgctccggtctgctcccacgccgccccaggccgtcctccagcgacagcgagctggagtggac

SEQ ID NO: 457060 - DNA, 122 bp, Homo sapiens
ggaggctcctccccggggtggccgcgcaggaagcggggcgggtgggggcggtgcggggcgcgcacggggccggggcggcgggggaggcgcgggcctgggcggccagccccggcgcacagccg

SEQ ID NO: 457061 - DNA, 122 bp, Homo sapiens
ccacccaccgccgcctgcgccctgcctgcccctgggctggcgcctgggagcgcgagggcgcgggaacccagcagcccagcggtcctctcccacgggcccagcctccctcccgccgccagcgc

SEQ ID NO: 457062 - DNA, 122 bp, Homo sapiens
tccctcctcctgcgtctgaaagagcaaagggagacagtgacctcctgagaggcttccagacgccccgccaggcacttccctactggtgcatgaagtgtgtggctggacagaggcagcagggc

SEQ ID NO: 457063 - DNA, 122 bp, Homo sapiens
tcaatctggaagctgctaagagcctgtctgtcactggcagagaaagagcagaccctgtgccggctgcaaagtccttgagttgcaggaaagtccaggcctcagcctctttcaggcctggggca

SEQ ID NO: 457064 - DNA, 122 bp, Homo sapiens
cccatgttctctttcagtgtgttttgtgtttcagcaacaaccccgtccctgtttaggccacgccccccattcaaagtctgtccatccttcaaggccggtgctggagccttgagcttctcggc

SEQ ID NO: 457065 - DNA, 122 bp, Homo sapiens
tgaactagctaaactctttgaggggcatggtgatctttattctgatgatcttcaccccaacggtgcctgtccttagcaggcaccaagtaaaggtttgacaagtgaacaaatgctactctgaa

SEQ ID NO: 457066 - DNA, 122 bp, Homo sapiens
actgctattcagccaattattggcaccctatccaaaaggcaacctgtgctgctataaaaacgtccttcaacctcctgcagcattaggatgtcccaagcacatgtctcttctcagtgagaatt

SEQ ID NO: 457067 - DNA, 122 bp, Homo sapiens
tggggaagtccgagtggggggatggggggccctggccgaggggagcggggaggtggtttgcgctgagaactgttctcgaacccggggaacttcagaacctccttcagggcttgtggaaaccc

SEQ ID NO: 457068 - DNA, 122 bp, Homo sapiens
cgcccacccttattttccctccaatgtcaacaagcaaaacgaaaatatttccagggtgatcgctcgcagctacccgcttccaattcggattagaagctgaggctggagcggcgaggagaaaa

SEQ ID NO: 457069 - DNA, 122 bp, Homo sapiens
tggccaccgtgttgccgctccctggggcgggatgggggggcgggtgaccgggggctgggccgttggcctgcccgacacccacccaacaggcagcccagcaggctcacctctggggaccacga

SEQ ID NO: 457070 - DNA, 122 bp, Homo sapiens
ttctctccgccgttcgaactcctcaaaggagattttcccttccaagtagtcgatgagttccggactgaaccctgacatgtttacagggtctgtctgtgcaaccccaggaaccgggacagaga

SEQ ID NO: 457071 - DNA, 122 bp, Homo sapiens
ttgccacttgaaatatcttccatttggataaagtaggaatatttatacatgtgccccaaacgtccctccgtgtcccccacccccaagcggaaatgtgaaaatgggccttgcctttgctggtg

SEQ ID NO: 457072 - DNA, 122 bp, Homo sapiens
tgggatcccagggctgaagaaaatcatggactggtttggctactatggaggcccctgccgcgcccccttgcaggagctgagccccgctgaggaggaggcactgcgcatggatttcaccagca

SEQ ID NO: 457073 - DNA, 122 bp, Homo sapiens
gcaggacgaaatcgcctaaccacatatttctcagagtatcacatccccatcataatgcgacgcctaactgtatattgaaccagccttctacgaccaaaatatggtctgggcagaaaaaagct

SEQ ID NO: 457074 - DNA, 122 bp, Homo sapiens
tatttttcggtgtgaggttgcctagccagtgtgcaaggttgtggcttttgcggagtctctcgggacggtcttgttatcgggcattccggcgtgagaacgctgcctctggggcccttcccacc

SEQ ID NO: 457075 - DNA, 122 bp, Homo sapiens
ttgactgaaaaggggctgggtgtggcagctcatgcatataatcctggcactctgggaggccgaggcaggaggatacattgaggccaggagttcgagaccagcctaggcaacgtctcaagaca

SEQ ID NO: 457076 - DNA, 122 bp, Homo sapiens
cagtcacagtcaccctgcctcgggaagctcgcaactgcccaggaggcctcctgacccgcccggcctcacccaggccccactactcattccaggacacagggtcaatccagcctgtggattgg

SEQ ID NO: 457077 - DNA, 122 bp, Homo sapiens
ggcccacctgagattaaagcgcgaattccgataaatcagctctaaggaaaccctgggccgcggagagcagaagggctgtcgcggatccaccacgcgggcgccgggccgcggagccgggagcg

SEQ ID NO: 457078 - DNA, 122 bp, Homo sapiens
ctagagcaagccaggaaatttacacatttgtatggggtgataccattagaaaataccctacgtgccagctaaaacctctcttgaaatgtgttctaatcaccccccactgcctccagtcccct

SEQ ID NO: 457079 - DNA, 122 bp, Homo sapiens
cgctgcgagcagtgccgccggagggtcaccaagtacttctgtagccgcgcagagcggccgcgggggggcgctgcgcacaaacccgggagaaaaccctaagggtttcctctgccccctccttt

SEQ ID NO: 457080 - DNA, 122 bp, Homo sapiens
cgggcactacggtctgccaggcaccacatgtcacagctactcaaacacccagggccgccacggagggccaatggccgcaggatggctcaggacccgccccacccctgtcgctgcctttctgg

SEQ ID NO: 457081 - DNA, 122 bp, Homo sapiens
ttagttccttcgtgcagcttcttgcccctgttgacgtggaatgctgtgtctgctttagcacgcacgctccgaatgactcctggtgctaggccatgctggctgctgtcactgagcgggactca

SEQ ID NO: 457082 - DNA, 122 bp, Homo sapiens
tgacgcacttgggaattgctagcacgagatgttggccacttttatcgttggagaggatagcgctgtttattcagtgtcagcgaccctgctcttacaggcagcgtcaaaaataatgcattcac

SEQ ID NO: 457083 - DNA, 122 bp, Homo sapiens
agtggcaccgcgtgcccctgccggggcgcggctcctgcactgcgggcgcgcaggcggcggcgggctctgccggcgccccttattagcatgcaccctgggtgcgcctggcctgctcccgctgc

SEQ ID NO: 457084 - DNA, 122 bp, Homo sapiens
ctggcagacaataagctgaagctttcattagcagcttaagctgaggactatctatgcaaccgatactccctgtgtgctccccgggactgcttaatgtgagcccttgtggagcgattggcacc

SEQ ID NO: 457085 - DNA, 122 bp, Homo sapiens
aaaataaatgaatgctcattatattatcaaataatgataatggttatggagaaattaaaccgggatatatcagtgaggattctagcaggaaacagatggctcattcgagtgcagtaattcaa

SEQ ID NO: 457086 - DNA, 122 bp, Homo sapiens
ctcccgcctcgcttctgggcttttgctccaactctcagccgccgtggagatcgcagggggcgtagggccaagccagggattccgctgtgccccgggctcgggagaggtgtcccgggagtcta

SEQ ID NO: 457087 - DNA, 122 bp, Homo sapiens
ctccaaggccccgggatagctggggtcagagaaatgcagggctctggccagaggggccctcggcagcgcccttcggttcccgtgaggcccaggcagcggttccaggcctcccgctagggccg

SEQ ID NO: 457088 - DNA, 122 bp, Homo sapiens
caaagtgggtatcattatctaaattttatagatgttccaccccagaggtgcaaccgtggacgtgttatttacacaggacaagcatgtaaaatacacacacaaccattactcttaattacatt

SEQ ID NO: 457089 - DNA, 122 bp, Homo sapiens
tttggggttgggaggtggccatcggggctaagccggggcgctcttggggtcctctttgtacgcccgcgaagcgccgtgccgggccttgctcatagtaagcgtttaatgcgtgctcgcggggt

SEQ ID NO: 457090 - DNA, 122 bp, Homo sapiens
ggataaagacacgcgcacagcgtggctgccacagcaggctgggcggctggggagagcagacgtctgcacgcggggcgccgcaacccgaaaacctttcgctactctcttttctttcccccatt

SEQ ID NO: 457091 - DNA, 122 bp, Homo sapiens
gaattactcttttcgccactgcaaatcccatcttgataaatccgctctgtctaggcaatgcgcaaggtgaaccccttgggcggttacacttactctggctccccattctgctgcgtgacttt

SEQ ID NO: 457092 - DNA, 122 bp, Homo sapiens
tattgaacttaaagtatgaagatatggatcaagtcccaatctcaccacctgcaagctattcgtacatggtaagctaaagttctgcatcaacttcctcacctgtaaaaaatgaggctaattcc

SEQ ID NO: 457093 - DNA, 122 bp, Homo sapiens
acatttttaagattaaaaggtggggtttcaaaatcaaaaatcctgcctgactttgagctccgctttcttctaggaggtgtcctttaaccaaaagtttgactagcactttcttgctgagcagg

SEQ ID NO: 457094 - DNA, 122 bp, Homo sapiens
ttttagtgtttgtgaaaattaagcttaaactggacagaataattatttctcagacaatggcgatgctactcattacaagtgagataggtggagcttgccccttgatggagaatttttttggt

SEQ ID NO: 457095 - DNA, 122 bp, Homo sapiens
agaggcagtgggaagactgagtgggataactcacacatggacaccctgtgcatcagtgtgcgtttaattcaaagacagacctcatttgatagcaatattgacatgtcattctaatgaattag

SEQ ID NO: 457096 - DNA, 122 bp, Homo sapiens
tccacttgcagggcagctcctgacttgctacttgtcccttgcagagatggaatgtctaaccgtgggataccaagtgacaacatggtagatgcccattgtgaactggatattacacaatgaat

SEQ ID NO: 457097 - DNA, 122 bp, Homo sapiens
aatctgcgccttattctccgcccccaaaggctgctggcaaccaattctcggtggcgaagtcgtgacgtcagctgttgcgggtcagattgggagagcttcctggtccttacctagcaagattc

SEQ ID NO: 457098 - DNA, 122 bp, Homo sapiens
tttctcccggtgaacctgccggaattctcagtggactcgatcttcagctttgtccactggcgcatttcaccaaggccgcatttaccgctttgaggcaaatttgagcttcaaatggagcggga

SEQ ID NO: 457099 - DNA, 122 bp, Homo sapiens
ccaggccctgggccactgcagcctagctcagcagaggggctgtgtggggagcagggcgggcgggggaggcattaaaatagctctttgccttggctacatcccctgactttcccagaaggagg

SEQ ID NO: 457100 - DNA, 122 bp, Homo sapiens
tgagcttataaagactctcactctattaacccagctgtggcaaatggcattaaggtaccacgtttctgattcactgtgctactgacaatcatcactggtctgttatattggctttaggatct

SEQ ID NO: 457101 - DNA, 122 bp, Homo sapiens
cggaggagctctgggcaaatgaataccgaggcgccgctctagctggttaggcttgggatgcgataactcagtgccctcttgcagacttgcatagaaataattactgggttgtcgtggagggg

SEQ ID NO: 457102 - DNA, 122 bp, Homo sapiens
ggactgcttacaaagttggactgtggcacgaaggcctcctgattaaaccaacaaagaggccgcctctccagagctcagaattgtcctgacatgaaaataatcaagttctgacactgccagga

SEQ ID NO: 457103 - DNA, 122 bp, Homo sapiens
tgacatctcccaactccagaagcaggcctgctggagaatggcagtttggtgtacgctgtgcgcacgcgtgtgtgcgtgtgtgcgtgtgtgtgtgtgtgtgtgtgtgtgtaggggggaggagg

SEQ ID NO: 457104 - DNA, 122 bp, Homo sapiens
gttgccaagcaaaatgtgtgttccccagattacattctggtcttggcgaagccagcctgacggtggttcctgcattcacatgaaatttgacttgtattgttcctggctgtccctaacactga

SEQ ID NO: 457105 - DNA, 122 bp, Homo sapiens
ctcccaggccccaccttccatccagtgccctggaccctcggctgggtagcgccaccagagcgaccaaacgtcccgcgccttccaggccgcactccagagccaaaagagctccatggcggcgg

SEQ ID NO: 457106 - DNA, 122 bp, Homo sapiens
ccttccgaggtggaagagttttggcagcggtagaaagcatgaactcctaccattttcagtcgctttgtcactctgctgaagattcacattccagagatgggtatccatggcgtggcttggtt

SEQ ID NO: 457107 - DNA, 122 bp, Homo sapiens
taaatgtggaggcttcagaatgctgatatatatacatggagaaggctgacaggctatgtccgaagagaccacacaggtaacatttgccaggttgaatttacctctgacagggacacgggcct

SEQ ID NO: 457108 - DNA, 122 bp, Homo sapiens
ccgcgactcaaaggagcataggggaacctgcaggggcgtggccggggcgtagctgcgcgccgacggcggggggtcgaagggcacgcagtgccggcgtcatggcggcctccgcgcacggctct

SEQ ID NO: 457109 - DNA, 122 bp, Homo sapiens
cccgagcgaggtgaagaagttcaacgagtggctgggtaggtccctcctgccccgggcgggcggctgtgctgagcaggaagggggctcccgccagctcccgaggctgcctgcctgcctttccc

SEQ ID NO: 457110 - DNA, 122 bp, Homo sapiens
tgaagaactatgtgtaagcgccaggtacagtgtacctggcacgtattaggttttaataaacggcaaccaactctgactaacggttgtccctggggaacacctgccaggcacagagggaggcc

SEQ ID NO: 457111 - DNA, 122 bp, Homo sapiens
gactggctgggaagcggtcggtcgagtgtggcctgtgtggactcgcatcttgcccgaagccgggcggaggagagctcaagctaaggtggaaggggaacgggggaggccctggagaggagtgg

SEQ ID NO: 457112 - DNA, 122 bp, Homo sapiens
agcggcggcggccgcggcggtggactcaggcggctggtgcattgtgttgggtaccgggggcgcggaggagacgagtgcaatttccttctgcaccgtaatctttgtattggagacgccggaga

SEQ ID NO: 457113 - DNA, 122 bp, Homo sapiens
acccctctagacacactgacttccttgtgttcccggaacaaagcaagcatgcttccacctcggaatctttgcatttgtgattccatctccctggaatgctgttcctccatagagcttcctag

SEQ ID NO: 457114 - DNA, 122 bp, Homo sapiens
cagggtcagcttgcatggccagcaggtgcagggccctcccggccaggcccaggagccgggcgcggatctccacacagcccacgctcagcggctgcaggctccccagctgtgccagtgccccg

SEQ ID NO: 457115 - DNA, 122 bp, Homo sapiens
acacctttcttctcattccatacaccaccctgcagtaccaccgtgactgctaccatcccgcgagcaccttgcctttgaggatttgaccagttttcatccgagtagtaatgtatccgatgtcc

SEQ ID NO: 457116 - DNA, 122 bp, Homo sapiens
ttctgtgggggtaattaggggctggcctgtcttcctggtcccgttcttcactgtttaaaccgcaggattcctagaacacgaccgtggaactgctcttctcctcacccatccctggaatgaag

SEQ ID NO: 457117 - DNA, 122 bp, Homo sapiens
gcccggaactccactgttagcttatactggggctgggggagacagagggtccatactaagcgccgcaaccgcccccagcctaggccggggcgacaacctagtgccctagcccgccggctgcg

SEQ ID NO: 457118 - DNA, 122 bp, Homo sapiens
tgcacgtccctctccatgtgtgcacgttccgtgttcacgccgcccatgtctgtgcaggggcgcttcacgcgcgccctctccggcccgcgggcggccagggacccgcgctgggctccacgctt

SEQ ID NO: 457119 - DNA, 122 bp, Homo sapiens
ggagaagggggtcaaagcaaggatctttcacccacagaaagagagcactgaccccgatggcgatggactactgaagccctaactcagccaaccttacttacagcataagggagcgtagaatc

SEQ ID NO: 457120 - DNA, 122 bp, Homo sapiens
attaaaaattctggttttcacatatatgggcagtgtcccaacaggctgctggggggtggccgtttgtgatggcctcaccagtctttcccagagagggaagtgcacatttttaggctactttt

SEQ ID NO: 457121 - DNA, 122 bp, Homo sapiens
ctcgtgtgtgtgcatattcaggcaggtgtgcatttgtgcatgccagtgtgtatgtatgtgcgcatatggacacgcatggacacgcatatggacacatatggacacacatatggacacgtgtg

SEQ ID NO: 457122 - DNA, 122 bp, Homo sapiens
gaagccgtgaacacaaggctgagtttgcgcctctgatttgcgccacgtgatgggacttgccggggcctccctgcccgtgaagaggctgtttttgctttgagtctgcgtgcacggtgggtctg

SEQ ID NO: 457123 - DNA, 122 bp, Homo sapiens
cacctagggtggcgttggggctccccaaccgcccggcagctttcagacgcccttccgagacgtggagcgaaagacttaagcgggcctgtgggtgacatcaactcatttacataggagggcta

SEQ ID NO: 457124 - DNA, 122 bp, Homo sapiens
aaaccaatctgagcaactcagaaagcaaatggccccaaatgtgaacttaccaccaccaaacgcaggatctccaggtgttttctttccttttcctgcagagacaagattgtcaggatgtcaag

SEQ ID NO: 457125 - DNA, 122 bp, Homo sapiens
gcctctgctgccgcttcccagagccaatgacaccccggccaaccccccggcagccgacggcgagccagcccgaaggcccgcctcacgacacccggccacgccttacggccgcgccgcgccgc

SEQ ID NO: 457126 - DNA, 122 bp, Homo sapiens
acgcgcgcgggcacctggggcgagagagcgctgtcagcctgccaggcgctggggtccgcgcgagcccgagctctcccgcgctgcagctcacaggcagcgaaaaagtcgctctgcggaagccc

SEQ ID NO: 457127 - DNA, 122 bp, Homo sapiens
gaccataaatcatcttcgacaatgcagtatcactggagtgtctctgaatctcctgtgattcgacaggttgcctgattcataaattatttgctcatttaaactatgttcaatttaatttgtct

SEQ ID NO: 457128 - DNA, 122 bp, Homo sapiens
ggggaggacgaagagctggagagcgccaaggacgacgagcgcagctgccgggccgcgagtcggacgaagacactgaggatgctagtgaaactgacctggcaaagcatgatgaagaagactat

SEQ ID NO: 457129 - DNA, 122 bp, Homo sapiens
ccttcagcttcagaattcaattttcctactctcaattttctgctgttcaaatgctgcagtcgttttgttgcttggatataaatggtggactccagctctgaaagaaacaaagttggtgaaaa

SEQ ID NO: 457130 - DNA, 122 bp, Homo sapiens
agctcacgtggtgtatattcagcctatcaagctcctgatattcatgaatgctgtcatttccgcttccgcctccttctttctcgacaagatggccacaccggcggtaccagtaagtgctcctc

SEQ ID NO: 457131 - DNA, 122 bp, Homo sapiens
tgaacccgggaggcgctggttgcaatgaaccgagatcacgctactgcactccagcctgggcgactgagtgagaattgagaagaaatggcaattagttcagaggacttaatgagtaccttttg

SEQ ID NO: 457132 - DNA, 122 bp, Homo sapiens
gaatccttttaccttctctgcctccattaggtgctttatggtctgaaagagacacaggaccgcaacactgaactggttcactctggacattttaacccattgttccttctccatattatatc

SEQ ID NO: 457133 - DNA, 122 bp, Homo sapiens
acaggtttcaggcaggaaatgtcagggcgcctttaagaggaatctgcggtaattttccaccgccccgccgacgcggcgggatgctgggcgcggcaaaatgcggctgcgcggcagggcgcgcg

SEQ ID NO: 457134 - DNA, 122 bp, Homo sapiens
gttgggattgtgtccagaattcgcgggttcttggtctcactgacttcaagaatgaagccgcggacccttgcagtgagtgttacagttcttaaaggcggcgtgtctggaatttgttcgctctg

SEQ ID NO: 457135 - DNA, 122 bp, Homo sapiens
aggcgagccctcctggttgtcgagcctcggctgagagccgggctgctcgcccttgcttcccgcctctctaatctaaaccatgcggggctcccagcccctacccggctcgcggggcccgaggg

SEQ ID NO: 457136 - DNA, 122 bp, Homo sapiens
cacgtcgtctttgacctgcttttaaagcacattcccgtgtgtcgtgaacaacgctgtccccggcgtctgctcatcaagaggtgcgaggtgcttctgccggtttctcctccgctggggacgca

SEQ ID NO: 457137 - DNA, 122 bp, Homo sapiens
atttaggccgacagctaaagaactgttctgctcagctgtttcatccattcgacactagatcgtgcagtgggctggaagagaattagaaaacgagtaacaggaggcttcgagaggatacagaa

SEQ ID NO: 457138 - DNA, 122 bp, Homo sapiens
tcgccgtttctgctctgtccttgttggtctctgcctctttaaggatggcttatcctgctgcgtgcatggctgaatgcacggcttaacctctatctagatttgattgattggcagtgtccctc

SEQ ID NO: 457139 - DNA, 122 bp, Homo sapiens
tagaagattcggaaatgcccttgaggtttggtcctcccaggagagcacgaagtttatcctcgcgcgcagcctctcttccccggcccgcgcccaccggcctagcccggggctagcgcccgccc

SEQ ID NO: 457140 - DNA, 122 bp, Homo sapiens
ggtgccagcacttccccgacattggttccggaccggaagccccatctcagaccccacccacgggttttgttctgtctgtttttggtgtctgtgatgcttggcttgttttgttgaaatatgtt

SEQ ID NO: 457141 - DNA, 122 bp, Homo sapiens
cagggggctggggagcaggccgcccgccagggacttgggcagctccttggagaaagtcagcgtgccctgaagcgggcgaaaggcggaggaagagaagtcacccggcggtcctgcaaacccca

SEQ ID NO: 457142 - DNA, 122 bp, Homo sapiens
cccagaaccgggagacttaaggcatctttattgcgggatcctcacacggcctcctgggcccggcgatactcatagacgctgccgtgctcgggaaaggccagtgcttgcgggggcgaccccgg

SEQ ID NO: 457143 - DNA, 122 bp, Homo sapiens
ggggattcgtggcgacggcggcggcagggacagcaggagcagtggtgctgtcagcgcggccgtcggagacatgggagacccggggtcggaggtgagtagtcgagtgagggtcctggcgttct

SEQ ID NO: 457144 - DNA, 122 bp, Homo sapiens
cacagactggtaataataagtagctcttaagcccaaataatgaaactcttcatatgtaaacgtcattaggactttgactaaagcctgttgacacaaactaggctatcactgggctctggaag

SEQ ID NO: 457145 - DNA, 122 bp, Homo sapiens
tcaggggcagatcctggcacaaaacttgggatatgtgcagtagtgtgtgtgccaacttaacgttcagttggaatgtgaaattggggttcccatccccactgtttggaatgaagggccaggtg

SEQ ID NO: 457146 - DNA, 122 bp, Homo sapiens
aaggtgctcagtaaatatttgttgaacagatggatgaatgaatccatacagatggagagacgatccacctcaagggagctggtgaggagcaaaggagctaaaatcaatgacagcaactaact

SEQ ID NO: 457147 - DNA, 122 bp, Homo sapiens
caaaaagtttcatctgttcccagaatccgagggagaactgaggtgatcgttagagcatagcgacatcacgtgcggtttcttaatgtccctggtggcggatacgccgagtcctcggaaggaca

SEQ ID NO: 457148 - DNA, 122 bp, Homo sapiens
accctattcttactctcatgtgtttgtcaaaaggacctaacccttgtccctcacaggcctcggttccctggcatcagattttccttacatctatagctttgattgtactctttatggaatct

SEQ ID NO: 457149 - DNA, 122 bp, Homo sapiens
tgtagtgtatgcacaaaccagtccctttgcacagaatcctctgcctatctgcagactagtcggcaacagagaacaaaaaagtgcagaactgtagacattttttaacctgaaaataaaatctc

SEQ ID NO: 457150 - DNA, 122 bp, Homo sapiens
tgaagagtagtccagagcaacaatggtgacggtcagaacacccggccgagaagtgctcagcgctgactggggccgcgccgtcccgatacggaggcgagggtcgaacgccaggacgtccccgc

SEQ ID NO: 457151 - DNA, 122 bp, Homo sapiens
acctcattcccacagtgtctcagcctggccagggaagggaccggccggctgatctcttaccgctgagcctccagacacctcgagagctcctggtcccgtctgtcagccctagccctaggctg

SEQ ID NO: 457152 - DNA, 122 bp, Homo sapiens
tttgtaagtgttcactggcgcacctgtgtattcattcagcaatatttattgaggacctaccgtgtgctccatgctgctcgggatgcagagaggagaaagacagacaagcttgctcccctctg

SEQ ID NO: 457153 - DNA, 122 bp, Homo sapiens
cctttggtcccactgagtgtttacaaaatagcaccagtaaggatagcatcaactggcaaacggagaaggaggagaacagagtggagaggaaccctgttaggagaaattgagcggcattccat

SEQ ID NO: 457154 - DNA, 122 bp, Homo sapiens
gggatgtagcgaggactcccagagttgggagacgttgtacgcttactgggacctaaatcccgcacgagttcccacccaagtgccgccgccccagcctacgcacgcgcattcgcaccgtctcc

SEQ ID NO: 457155 - DNA, 122 bp, Homo sapiens
tcgccctctgtgatggccagtttccgagctacctcctcttatttgcggtcagcctccggccgcagtgtgcttggcctctttgagctgcatctcccgaatccatcttctcctcatccctcata

SEQ ID NO: 457156 - DNA, 122 bp, Homo sapiens
cagcctttccccgggcctggggttcctggactaggctgcgctgcagtgactgtggactggcgtgtggcgggggtcgtggcagcccctgccttacctctaggtgccagccccaggcccgggcc

SEQ ID NO: 457157 - DNA, 122 bp, Homo sapiens
cggaggtcccgtgtgtccacacactgcacgtcccgcactgaggaacctccgccgcagctgcgggagcactggggaccgagagacgtgtatggacacatccccatgtgcaggcccacaggcgt

SEQ ID NO: 457158 - DNA, 122 bp, Homo sapiens
gtaaagtagcaaataccatccctttaaattctgtttaacatgaagcctttgttgactgctcgtgatggttctgcataatgtaatgctcttttaagtgaatactatttagcttcttcacgtga

SEQ ID NO: 457159 - DNA, 122 bp, Homo sapiens
tggctctgagccggggcctcctcggggcaggctgggctccagggtcacccctggctccaccgggctcctcggccagcagactgatccaagagctgggcaggactcctctctgtccttgcagt

SEQ ID NO: 457160 - DNA, 122 bp, Homo sapiens
tgtcagcttcaaagtcagatagatttttctcccagcatgttctacttccgaggctgtggccgttgggtcgcggtttccttcaccaagcagcaatttccgttggcacggttgagcagtgacag

SEQ ID NO: 457161 - DNA, 122 bp, Homo sapiens
accggacccatctttgtgagcaactacaagtctcaagctatcctgggacctgtagtttgtcggcttacacaattaacggaaaccatactgtacatcttcagtctgacttagggtactgggca

SEQ ID NO: 457162 - DNA, 122 bp, Homo sapiens
gaattggtccctgccatccgtgctgcctgagtcacagaattgaagaagagatggcaaaaacgagtattcaagaccacacagcccaacagaaaggcccgcagcccacggagacttgtggtttg

SEQ ID NO: 457163 - DNA, 122 bp, Homo sapiens
caaaggatagagattactctgtttaatactattttatggtgatgaattcctcttcttatacgtacttcacttgggttaaaagaacaaaagcctatttgctttaaaaacactatcttagaagt

SEQ ID NO: 457164 - DNA, 122 bp, Homo sapiens
ggctcctcggctgcctggggctccagacttgtgctgcgtgcggctccggagctctgttctcgctcctgagcagctgctaggtttcccaagcgactgtctcaaccgcccggccgcctcccccg

SEQ ID NO: 457165 - DNA, 122 bp, Homo sapiens
ggttagaggctgttttcctccttaggcagaggggttccccaggctgggctcttctgtgaacgttctcaagctctgccctcagggggccagcggctcctctaggaggatctggggctgcttgg

SEQ ID NO: 457166 - DNA, 122 bp, Homo sapiens
ctgcggccaggcggggccgggaggggcggatgccggagggcgctgggggaggccgacccgcgcggggctggtccgagggcggaggcaatccgccggcgacgccgcaggtcccgggtggctga

SEQ ID NO: 457167 - DNA, 122 bp, Homo sapiens
tgctagcctctcatcctcagtggccgccatgctgctccggaagcgacgtccgccgcgacccggaatcagtgcccgcggagagaaagaaccctcctgtgctgaaccacagggtgccgggtgag

SEQ ID NO: 457168 - DNA, 122 bp, Homo sapiens
ctgagccctggcaagctatgattttaaactataattgttatcaagtacaacaaggggacccggctccctccctgggctctcccctccgctaccccccgcaactctgagttatgggcgatcag

SEQ ID NO: 457169 - DNA, 122 bp, Homo sapiens
tttattataagcgccccgagggctgtgtccacatctccttaatgttctggaagcttcgcccgctctccgcagaccagtgcagggcggtacatattgattggtgcgggcgtgcttgttctatt

SEQ ID NO: 457170 - DNA, 122 bp, Homo sapiens
taaagtcagaactgtccttggatactattcttcagcccaagatctcccataggatgaaagcgaggccccaagagactgcatcgcactttcagtgctgtaagcaagtgcgtagtttggatgga

SEQ ID NO: 457171 - DNA, 122 bp, Homo sapiens
aggacttccagcatcttgcctacaccacgctgtttgcagcggctctgcagcatactgcagcgctgttcataacgcccatgtgggatcaccgcttagagaagcaaagaaagcactttggcaga

SEQ ID NO: 457172 - DNA, 122 bp, Homo sapiens
ccgacgcgagtctggcggctgctgcttgcgactgcggaggccgggcgaggccggtgaggacgcggcgggcgagcgagaggccgagggtgaggacgtgaagcggcctgggcgcgtggggcagg

SEQ ID NO: 457173 - DNA, 122 bp, Homo sapiens
aggctggattaggacaagcgaaacagtttaaagcattttgtcacttcatgtccaaaaatacgtacaatctttagcttaaccacacagtttagcatcatcaagcaagctagagagcactgtca

SEQ ID NO: 457174 - DNA, 122 bp, Homo sapiens
cagcccggctgtgaacgtccaggccccggtcattggggtgaccccctcactgcctccccacgtggggccccagctcccgctgatgccaggccactactcgctccctcagccgccctctcagc

SEQ ID NO: 457175 - DNA, 122 bp, Homo sapiens
ggagcgcagcgcacccgcggcctgcgtcactcggtcagtgcagtcgttctaaaatcgaggcggaccctgctttcttgcctggagtcacttagagatgatgactaaaggataaattcagagtc

SEQ ID NO: 457176 - DNA, 122 bp, Homo sapiens
atggcatggggcgctttggcaggtaggagggcctggcggcaggcaggggttgcggcgtggcgggcggggtgtgtgcggtgcaggattgcctgctccagatgccttcacagacgaggggcgtg

SEQ ID NO: 457177 - DNA, 122 bp, Homo sapiens
agtctatgtctatcaaaaataaactatgcattgaacaaaacgccaggtagtggggaacgccggaagaaaggatagagctggctcaggagatgaggggaagggagggcttactcatgggtaag

SEQ ID NO: 457178 - DNA, 122 bp, Homo sapiens
tggtgtccttgacgcctgcccaggggtcccagtgctgcttggggtcatgaggggagccagcgtgggcaagggaggcctgcagtagggcacagcccgggggtcttgcctgagcccaggatcct

SEQ ID NO: 457179 - DNA, 122 bp, Homo sapiens
aagcttggctgccacggccacggagttgaagtagcaaaagcccctgcgggagagaactgacgctggagacgaagcgcaggtgggcggtggccagtttctccacggcccgccagagagccact

SEQ ID NO: 457180 - DNA, 122 bp, Homo sapiens
cgccgctgccttcctctcctcccggggcttcaggagtggctggcctggccaggtcctcggcgcgggcctcggctcactggtttaactccagcgcccagacttgctgcggccagccggtgcgt

SEQ ID NO: 457181 - DNA, 122 bp, Homo sapiens
gaaagtggacgtggggaaggagcggcctgggctcaggcctcagtttccttagctgtaaagcgagattaccttcaggatcccttccgtatctgatgcgtgtgggggccactccacctactgtc

SEQ ID NO: 457182 - DNA, 122 bp, Homo sapiens
gatcgcacgaagccttgctcatggtaacacaatatcgctggggaagaaagccgcagctttcgcagtgagaaggttctagggctcaaggtcaagtcttctggatccctgcaacgccccagggg

SEQ ID NO: 457183 - DNA, 122 bp, Homo sapiens
ctgaccattagcacagtctcaaaagttccctccctcccaagacacactctcaccagcttgcggatccgatccagcactgggtcaatgatctccttgccaatggtatagtgaccacgggcata

SEQ ID NO: 457184 - DNA, 122 bp, Homo sapiens
gctggggacgtgaagaatgaagagactggtggagtttacaagaagtaggagtgggagtggcggaggaaggagcgtctttcttcggggaagttcccagggcaatcgttatctgctggcccctg

SEQ ID NO: 457185 - DNA, 122 bp, Homo sapiens
gcgggaggcagctttgggcagataaaaagcctctgccgctcttggccctctggctcaggccgagggctgggctcctctgtagagccggtgctgggagacttcctccctacacctcggggtct

SEQ ID NO: 457186 - DNA, 122 bp, Homo sapiens
ccaatctgacctgcagcttctcctcccaccatctcattctatggattaatgtgtggaccacgctcttccaggcccatgctcacttctttcctgagtgttccaatcacaacactcaggacttg

SEQ ID NO: 457187 - DNA, 122 bp, Homo sapiens
tgcggcgggaggagagccggctggcgagcgggcgagagcgggcgagagcggacgcggcgccgctgcctactcccgaccacagtgtctcctgcctggcggagcgcggcttccgacaacgggcg

SEQ ID NO: 457188 - DNA, 122 bp, Homo sapiens
tcaagcctcctaggagaccttaacagtttaatttaaatactgatagatcaggcagataagcgtagttaacacatacagggtgcttactccctatcagacactgtgctaaacattttacatat

SEQ ID NO: 457189 - DNA, 122 bp, Homo sapiens
cactgagtcccaaagcaggaaggcactgacggttagggcccctcccaacgcaggaacagccggggtaggaagggcagaggtcacagctggaggaaggagtgggcagttaccccctcagtcca

SEQ ID NO: 457190 - DNA, 122 bp, Homo sapiens
cctgtctttggctatccagggttgtggaacgaggtgaaacataaaactccgaggtacttccggctccctccagtgtctgagggtaatctgcaggactgagggtaattgcagatgctagctgt

SEQ ID NO: 457191 - DNA, 122 bp, Homo sapiens
cagtgggacctggacccccacgggtgtccaggctcttggcacaagaagaaaattcaaggacgagaccgaaaatagtgaaagtagggagatttgttgaaaagtgaaggccaggcgcggtggct

SEQ ID NO: 457192 - DNA, 122 bp, Homo sapiens
agttcaactctggcagcaagaaaacaaaaccacataatctaaggctcacgcccaactctccgaagccccatatgtgctagttcctgtgtggtttgcctacagactgcagggctgactagggt

SEQ ID NO: 457193 - DNA, 122 bp, Homo sapiens
tctgcacctcgggcgtgcggctcagtgtggggggcagggctgctgcctgttccctcaaggcgtccagggttggccggtggcttcgaatctcctcctccagggcccgatgctgcctggctaga

SEQ ID NO: 457194 - DNA, 122 bp, Homo sapiens
caggcacgctcgcccacactgcatcagaacatcttgttcctgcaggatggcccagcccttcgctggctgccctgccggccacgggaccgaatcaccatcactctcacccacaaagctgcttt

SEQ ID NO: 457195 - DNA, 122 bp, Homo sapiens
gcggacagcgcggcagctccaccagtcacagcaagcaagaggctcagcctaacccggaggcgaatcgctgaggcccggaagtgacgcaatcgcggagccggtcccgggaaggggcgtggttc

SEQ ID NO: 457196 - DNA, 122 bp, Homo sapiens
taagtgacgtaccctgccccgggtgtctcctgaatggctgaggggtcagccagggccctccgccttggctgttgggagcgtgactggctctctgccctgtgagcttggagagttgttttgct

SEQ ID NO: 457197 - DNA, 122 bp, Homo sapiens
gcgtgaggtgggcacaggctggcgttgaagccctggggtggactcacgtccaggggagggcggtgcttcacacgtcccaggcactgtcttgtgtggccccaagtgctgtctgaatctctcct

SEQ ID NO: 457198 - DNA, 122 bp, Homo sapiens
cctggaccggaatggctcctggcatccggggtttaactgcgagttcttcaccttctgctgcgggacctgctaccatcggtactgctgcagggacctgaccttgcttatcaccgagaggcagc

SEQ ID NO: 457199 - DNA, 122 bp, Homo sapiens
ttcgtcgtcacttgtcactctaaagcagccagtgggcaagaaggtttatttcagaagccccgaagggaggcagtgctttgaaaaccccagcagagtttaaaatattcaggttagtctccctc

SEQ ID NO: 457200 - DNA, 122 bp, Homo sapiens
tcgccaccgacgccgcaggaagccggggagacgcccccttagtcttctagtcgagccggccgaggacccatcctgggatcgggctgtctaccgcaaacgcctgatcacaaggtccgaagtgg

SEQ ID NO: 457201 - DNA, 122 bp, Homo sapiens
cgatctcctgacctcaggtcatccacctgcctcagcctcccaaagtgctgggattacaggcgtgagccaccccacccggccaagaggtgttaaaatctaaatcagactatgtcatgcctcag

SEQ ID NO: 457202 - DNA, 122 bp, Homo sapiens
tcattaatcaagaaaatctgtacacaaacaaatttgcacatacacacacttgagaattagcgtagggaattctattgtgtgcttttattcaaatgatgaaaacatgagaaatatgatttact

SEQ ID NO: 457203 - DNA, 122 bp, Homo sapiens
tcactccccacctggatctcagtccacgtctctatctctcagcccctcggtaatccagggcgtccacctgccctgataacttcaaagcccggatcacaggccccagcgtggtgacccagccc

SEQ ID NO: 457204 - DNA, 122 bp, Homo sapiens
tttgggggtctgggagggcctgggcaatgccggcatctgcttcggaaccgcaggggttttcgtcccctccccatccggagcagcctctttgctaggctagatccagacgaccgctccccaag

SEQ ID NO: 457205 - DNA, 122 bp, Homo sapiens
ctgtgcagcgaccccccggcccaagtctagccctccgctggtactgcagccctagtcgctcggaaacctcagtgggctgatcccggaccgccttaagcagcgccctctacacccagtccctc

SEQ ID NO: 457206 - DNA, 122 bp, Homo sapiens
tctcatccccgagcttcagctgcaggacaatgctgccagaggcctggtcctcagagctcacgtaagcatctctggtgtgcagtatttttactccgtttttgaccaaagacacctgaacattc

SEQ ID NO: 457207 - DNA, 122 bp, Homo sapiens
gaacctccgtccttctccggctctgtccctcccccagcaggacaaagggaacctctgccacgctaaatgtccctcgtcctgcggcagggcccagtgtatgcccggggtgtgaggctgtatcg

SEQ ID NO: 457208 - DNA, 122 bp, Homo sapiens
ttctgctacttgaccaggtttaattcgagttgtccatgtcgggaatctacagggaagtgacgcaggctgccatcttgctcagcaccccagtgtggcgggcgccccagtgtggcgggcgtccc

SEQ ID NO: 457209 - DNA, 122 bp, Homo sapiens
acagaaatcccgggtgaactcgctcgactcgtttttatcttgtgattttcgacataatcacgccacctgtgaagaggaaaagggtcggtcctgcctttccagtccgtgtgccttcgacctcc

SEQ ID NO: 457210 - DNA, 122 bp, Homo sapiens
tctgggaaggcaggaatggactgagttggggtggaggccgggtttcctttccctggctggcgctggaatctgatgggaaggctgtggaggagggaacagtctgcagcgtggggtcataaggg

SEQ ID NO: 457211 - DNA, 122 bp, Homo sapiens
agaggggcctggactcggtcccgcccgcctccagagcagtcccctggaggacctcctcatcgagcaccccagcatgtccgtttacgtcaccggcagcaccatagtgctagagcccgggtccc

SEQ ID NO: 457212 - DNA, 122 bp, Homo sapiens
aattaaggttataagtaaaatactcctcagatatttgactgaaagtatatgcttgctcttcgtactttgtaggaagagcacagagaggcaggaaaggaaaggaatgggttttggagagcaca

SEQ ID NO: 457213 - DNA, 122 bp, Homo sapiens
aggtacggcgggggcggggcctggcggggggcggggccagcactgcggtcgctgcagctgcgcaacggcgcccgcccctccggccgctctaggggcgcgcgccgcctctcgctccgcccaac

SEQ ID NO: 457214 - DNA, 122 bp, Homo sapiens
tttgattttcataacaatcctgctatataaagcttcttctatcaggctcctcctgaaatccgcttggagtagatactgtccttattttacagatgaggagactaaagttcaagtaatttaag

SEQ ID NO: 457215 - DNA, 122 bp, Homo sapiens
tcaaacctaggatatgcagggtgagagcatggcaggggctggtgggccccagggttgcctcgaggccggtcgtccagggagagcagcagcaggaagagcctcaggagatgaccctcagggat

SEQ ID NO: 457216 - DNA, 122 bp, Homo sapiens
accttgcgatccgcccacctcggcctcccaaagtgctgggattacaggcgtgagccactgcgcctggccagcgctggttaagagaacaccttcatctaaattacaagctgtgtctattattg

SEQ ID NO: 457217 - DNA, 122 bp, Homo sapiens
ggcaagccgccgccgccctggggccacctgaccccgctcctgaacgcggggcctcagaggcgagttttgggtctacacagcaaaatgtggcccgttagaaagcgtccttcctcaccgcgccc

SEQ ID NO: 457218 - DNA, 122 bp, Homo sapiens
ccagtagggaggcagaacatgggccagaggtgtcgtcgggtgagggtactgagaatcagccgggtaagcgctgggatgagaaagagcgggaacggcttgtggagaggggaagaagtttgagt

SEQ ID NO: 457219 - DNA, 122 bp, Homo sapiens
atccgcccgcctcggcctcccaaagtgctgggattacaggagtgagctgccgtgcccagccggcaaagttgattctgaaaccctgtattacctcaataatcgttgaagtgcctattatatgc

SEQ ID NO: 457220 - DNA, 122 bp, Homo sapiens
cgttggggaagaccccagtcttccagccagtccccaggagaagggatccgggccgcagtgcgcgctctgccagcctggcccctgcgccctgcagggttcccggctgctcgcggggactgtta

SEQ ID NO: 457221 - DNA, 122 bp, Homo sapiens
atactattaaagaatcagttcacaagcaccaaattaaaagaagtcaacttgaatccacagcgcatataaactgctttggttccaactacagtgcactcaaatggctaaaaatcaagtttaat

SEQ ID NO: 457222 - DNA, 122 bp, Homo sapiens
cgcgcacgccatcaaatccccgcgggaatagaattccgcaggtccagaaagccgggaaatcgcgagcggaggcggagttacctcggtgagcgtgaaggcggagcccgctccgaggggcgggc

SEQ ID NO: 457223 - DNA, 122 bp, Homo sapiens
ggtgtcccagaatagatcgtgttccccagaggttgtcaggttcccgcaattcggcgcgggcgaggcggccaaagagagggcgctcattggctgccacagccccggtccgagaggccgaagaa

SEQ ID NO: 457224 - DNA, 122 bp, Homo sapiens
cacttagggttccagggtgcttgctgctgcgttttgttggacgtgtgcctctgtgccacacgctgtcctgcgctgctgttctgagtggaagccccgtggtggagagaggggactctgcctta

SEQ ID NO: 457225 - DNA, 122 bp, Homo sapiens
gcttattgctctattccttgtccattaatgccacatcccacattcatgggtttttaccctcgggtgtaacaattcatgatacttgttttcaaagacagtgatagatgcaggtctccatatat

SEQ ID NO: 457226 - DNA, 122 bp, Homo sapiens
cggatcctggtctcagctcagcctactttggtgcccaaaggggaataggaaggcaaacaccggaggctctgcacccgcctcctctaggccatggattaatgctgctgcgccagggccctttc

SEQ ID NO: 457227 - DNA, 122 bp, Homo sapiens
aatagcgacaggggagttcaagactgcccctgctagtccttccttggctactctccgctgcgatcgcaggatagctctcattagcaggagaatcgggcaagtgtgtggataagtagagagtg

SEQ ID NO: 457228 - DNA, 122 bp, Homo sapiens
gtacaccaaaataccataaactggatggcttatcaacaaatttatttctcacagttcttccgactggagtgcccaaaatcagggtgtggtcagatatggtgtctgatgagggcccacttcct

SEQ ID NO: 457229 - DNA, 122 bp, Homo sapiens
caagtcacttgcagaactactgattgactcaaagtacaaataactccaaaatgtcacacacgtcagttataagctactcatttccctcaagcaaatccaagagtacacaaactattatttgt

SEQ ID NO: 457230 - DNA, 122 bp, Homo sapiens
gggccattaacaggttacagcccaaattcctcttctcccctgccagagacattatctcatcggcagagttcgccagaggctgaagttatatctcattaagagtctcctaagcactgagactc

SEQ ID NO: 457231 - DNA, 122 bp, Homo sapiens
cgtcatccatggtgccaggaatgcccagtgcctctgaggctgccctctacagccccgaggcgcatgggccagcagtgtgctcatttacatcctggatagagagtcctttgggctggccaggc

SEQ ID NO: 457232 - DNA, 122 bp, Homo sapiens
ctcaccagcccgggaaggcaagccccagtcaggcggaaggtagctggctgcggggcggggcgactggcgggcggcgggaggcgccaaccgccacagacgactcccagctggccgagggcggg

SEQ ID NO: 457233 - DNA, 122 bp, Homo sapiens
gagctcccactggtaagcgtggatgtgagtggggcaagtttgcaggatgccctgtggcagcggctccaggctgaccctgcagctccagccccaaagacaaacagagggtggaggctgctctt

SEQ ID NO: 457234 - DNA, 122 bp, Homo sapiens
ctcaacggcactctcactgcctgggctttggtctttgcccaggagcctgcccatggcctacgctccccgctcgcagcatggcagaccctgacgaggctgcccgccttggtccgggaatggac

SEQ ID NO: 457235 - DNA, 122 bp, Homo sapiens
tattatggggcaccatcataatatgcagtccatcattgacggaaatgtcattatgcgacacgtgactggcaatgagttaaggaaaatgggagccaggtttctcaatgttcaggaagagaatt

SEQ ID NO: 457236 - DNA, 122 bp, Homo sapiens
ttccctccaatgtcaacaagcaaaacgaaaatatttccagggtgatcgctcgcagctacccgcttccaattcggattagaagctgaggctggagcggcgaggagaaaacgacatcgagtcac

SEQ ID NO: 457237 - DNA, 122 bp, Homo sapiens
tgtcagatcacttgttatcttgtaaacgtgagccctcaaaggaagccgtaggcctgcagtcgtgttctgcctgagatgtgtgtggaaaatggtggtgagaagagccgtgaagcgtagcccag

SEQ ID NO: 457238 - DNA, 122 bp, Homo sapiens
gggtcttgctgggggagccaggcagcacagtgggcaggttaatgcagctcattgcgcctccgggaagttcacgaacccgagtactctccaaggccgtcccgcagtaagcccctggttcccgc

SEQ ID NO: 457239 - DNA, 122 bp, Homo sapiens
ccatgggacctaagccaagcatgattcctttgagcttgcccagtttaaacttgcaaggtgcgccgccaccaccccccaacctcaacccaactctacccccaactaacatacccacacacatg

SEQ ID NO: 457240 - DNA, 122 bp, Homo sapiens
ataaggccttgggaaacccagcttcttgtcaggttgctctgggcaatgttgatcatcacccgccttatcggaaggtatggagaggggaggaagttctggggcctagagtcagctgctcaggt

SEQ ID NO: 457241 - DNA, 122 bp, Homo sapiens
ttgggttatgaggtcccctgcggggtacctcacctcagccattgaactcacttcgctggccgtgagtctgttccaagctccggcaaaggaggcatccgccgggcccctccccgaagggcggg

SEQ ID NO: 457242 - DNA, 122 bp, Homo sapiens
gggccctgcctctcgaggatgtctaggatgagtgatatcaggcctgtcatgaataatcaccgttctcctttcgtctcgctcccctcgtacttctcgcctgtctgattctctaagttcatttc

SEQ ID NO: 457243 - DNA, 122 bp, Homo sapiens
gctgtgaaattgttagaagggctagagagagatgtctgcaggcactgcagccagggacagcgcatcaaatcttacacagaattggcccaggccggatgctgctgctgtgttcctgggcgtag

SEQ ID NO: 457244 - DNA, 122 bp, Homo sapiens
taaccatctattcacaagaagagtaagaaatggaatgaaaggaccaggcgcagtggctcacgcctataatccctgcactctgggggggctgaagaacgtggatcacttgaggtcaggagttc

SEQ ID NO: 457245 - DNA, 122 bp, Homo sapiens
ggccacagtgaccccacagtctgcttggcagatcacccaagggcagttcgacgagcattacgtgctgtcttctcgggtgcgcactggccgcagcatccgtgggctgagcctgcctccagcct

SEQ ID NO: 457246 - DNA, 122 bp, Homo sapiens
gtgtccaggctcgggagggcctcgtctccagagccttcacgccggcatcacgtgtgagagcgtttatccaggacgggacacttgtcctggggcatcccctgcatggggaatggcctctgact

SEQ ID NO: 457247 - DNA, 122 bp, Homo sapiens
ctcctgcaccgcgccaggtcccgagagagagtccgcaggggctcccaggagagggaaggccgggcaacccaggcctcggcgctgccacccctcgctcctcaccgatgacgatgcgcaggtgc

SEQ ID NO: 457248 - DNA, 122 bp, Homo sapiens
gggcttggctctttgcggagtgcgggttggcaagaggcgcttggagtagaataaaggcggcgcagggccaaaaactacctaaagacacagctcccgcaggcgcgcccaaggtgcggaggaaa

SEQ ID NO: 457249 - DNA, 122 bp, Homo sapiens
agaggttaatacaaagtgtctcaagctgaacagagcccaaaaaagtgctcacctccactgcggcttgcccagagtccacgtggagttagttaagcagcctgaggctgagcccctgctccttc

SEQ ID NO: 457250 - DNA, 122 bp, Homo sapiens
cccgcccccgagccccgcccccgtccccgtgcctgcccatgagccgcgccccgccccccgcgtcccgcttagccccccaccccgagccccacccaccgaaccccgcccgcgccgggagcatc

SEQ ID NO: 457251 - DNA, 122 bp, Homo sapiens
gctacagcgaggaccggcctattctcggttgagtaaacgaaccacgcagcaacgccagggcgtgacgtcgagaagaggcccggctctgcctagtggagcttgtctcctttatccttgatccc

SEQ ID NO: 457252 - DNA, 122 bp, Homo sapiens
cctcaaccacgtgagtgggagctgagttggcccctgggggaggtgctctgcactggtttacgagaacactcccactcacctcatgctgaccctgcgggtggggccatccgaaagacagagaa

SEQ ID NO: 457253 - DNA, 122 bp, Homo sapiens
ttttagaatgaagagctgtgaatcgggtcctgtgggccctggggcatagtctgtggtaggcgcttcgcatctctgaaccttgctgccctgtttctgacatccccttaactaacacccatccc

SEQ ID NO: 457254 - DNA, 122 bp, Homo sapiens
tctttgtaagattgctttaagcaacaaaattttacattacatttaaaagtcagtttaatacgtgcatattcaactctcacaagagcaatatgatctaggcagtgtggccaagggaactggcc

SEQ ID NO: 457255 - DNA, 122 bp, Homo sapiens
cagcgcggatgacagtggaacagcgggtcaggcggtgggcgcctgagcgaggggctagagcgggatgggcgggcggagcaagcctgccagcctgggcggggcctcggcacaggagctggctg

SEQ ID NO: 457256 - DNA, 122 bp, Homo sapiens
gacacctgtggagcagctacagagccaaggtttggagtgcaagtgtttgcagaaagacagcgggtcttgggttcaggatgttgactagcctgcagcagtggtgcttctagtgcctcagatgt

SEQ ID NO: 457257 - DNA, 122 bp, Homo sapiens
tgcctgccatgtgccttggataatgctgctgtctattaagccctctgtgtcctactccctcgccagctttgctccattgtgctgttggtggggacacagcccaggtggttgggtgatgcctg

SEQ ID NO: 457258 - DNA, 122 bp, Homo sapiens
gccttgggacctctcccctccaagtgcaagttgtagcaacctgccgggtccacgcatgggcgggtcatactccacgggttccggtttccactccctgtgaaccaaaagccagagaggcccac

SEQ ID NO: 457259 - DNA, 122 bp, Homo sapiens
aaagaaaaatttaattagccaggtgtggtggcatgcgcctatattcccagctactcgcggcgattgaggcgggatcccttaagcccaggagttcaagattacaacactgcactccaccctgg

SEQ ID NO: 457260 - DNA, 122 bp, Homo sapiens
ctaagcgggcttgggatgatgcgcacgcggggggtctgagccagccaaggggccgggcgccgcctgggggcgctgcggctgctgcgggacgcaccaggcctagtcgcccgcaggctccgccc

SEQ ID NO: 457261 - DNA, 122 bp, Homo sapiens
aaagactccacctggtggagcattgctttttttttctgtacggggccgagggttggggggcggtgtttgtttctttataatatactattctgtacaccagtcatctggtgcattggcccttc

SEQ ID NO: 457262 - DNA, 122 bp, Homo sapiens
agggttcctggccagctctaaaacgaacacgtcattcaagtaacactttccccaactcagcggggaaggtgccccgttccccgctccacagcactgtcgggaaactgcattgtctgcccagc

SEQ ID NO: 457263 - DNA, 122 bp, Homo sapiens
gctcgccggagaagaggagccccagcgccccggtttgcaaagcaggtaagtgctgggggtcgcgcagcaagggggaggcggctgcgggaaggggtcccgggcgcgcgctgcaatcgcgcggg

SEQ ID NO: 457264 - DNA, 122 bp, Homo sapiens
taactagtctccctgcctctagtttctttatcttctaatgatggagtattccatcttagacgtgtagatactgctgctagatatttataacctggtattcaaggccctctacaatctaccct

SEQ ID NO: 457265 - DNA, 122 bp, Homo sapiens
ctacccaggccaacaggcgtctgcccttgttaattaccggagcgacagactagggagctccgcccgggatttgcccatcggcggaggcgccaggctcccgtttctccccatccctctcgctg

SEQ ID NO: 457266 - DNA, 122 bp, Homo sapiens
ttttgtttttcctaggaggctacaggcaatcaggaataattagataaggattgggggcaccgttcatttcagtaagagcagaatcgaagagctctacgcttaggacagattaagagactgac

SEQ ID NO: 457267 - DNA, 122 bp, Homo sapiens
cctgtctcacagcagatgctgcctgagtcacttcctctttgaggccttccctgaccactccgtccaatttgttgccatttctcttcccctatctctagagcctctctctcagcattgccttg

SEQ ID NO: 457268 - DNA, 122 bp, Homo sapiens
gttcccccgagacctggctgtttaaaggtgtgcggcacctccccaccttgctgctgctttcgccatgtgacgcgcctgctcccccttctcttccaccaggattgtgggtttcctggggcctc

SEQ ID NO: 457269 - DNA, 122 bp, Homo sapiens
cacatgcaccacacaaaatgcacatacgcacacatgcaccacacaatacaaccatgtgagcgtgcacatgtgagcacacacaccacagatatacatgcatatgagcatgcacagaggtatcc

SEQ ID NO: 457270 - DNA, 122 bp, Homo sapiens
gcagaaaagagggttggggtttgatccctgctggtgaaggggcaggttcccggggggtcgcggagggggtctagacctctagtcgagggctgctttccctctccgtgcagatgggcggcctc

SEQ ID NO: 457271 - DNA, 122 bp, Homo sapiens
tcgccgggttcccccaggcactcccagcagcagacaccggtattccgcggcgggcggcggcgtggtcaaaaaaaggcgccgctgcccctttaagaggcaaagcaccttttccaagataccat

SEQ ID NO: 457272 - DNA, 122 bp, Homo sapiens
gaaacagggctgcccaaaggccacgggaagccgcagcacctgccctgctcacctgtgcctcgcttctgaagtcgcagccgcttaagcacctccgagaacttctcatgcttgcccaggttggg

SEQ ID NO: 457273 - DNA, 122 bp, Homo sapiens
ctctactacccacacaaatttttcacacctaccaatgtccatatgcttgggtagtctcctcgcagactgatttaagtgatttgctttgatccttgggacaatagcaattgtaatgttaatag

SEQ ID NO: 457274 - DNA, 122 bp, Homo sapiens
tggttcccccatgtacttcttcctcagctacctctccttcatggagatctgctactcctccgctacagcccccaaactcatctcagatctgctggctgaaaggaaagtcatatcttggtggg

SEQ ID NO: 457275 - DNA, 122 bp, Homo sapiens
accacatttcacctgagaactttagtggtctcagaccctgtttgtccctgtttctagtctcgtcccttccaattcattctccatattgctgccagctttatctttatatggtacccataatt

SEQ ID NO: 457276 - DNA, 122 bp, Homo sapiens
gctgtagccgcgcggggatctggggtttctctgggacagcggcggcggcggtgggcggaccgtggcgcggggacgagcggccggttagcggcgtgtcggagccggtgtcacctgcgggagag

SEQ ID NO: 457277 - DNA, 122 bp, Homo sapiens
ttacagcttctccaggtcctccacggccatctaagggttaaggaccatgtgcatccctaccgctaccattctccgtcacttcacatttccgggcccaagactccttttgcagcagaggttaa

SEQ ID NO: 457278 - DNA, 122 bp, Homo sapiens
ttggagggagggagggcaggggcgatgcctttgtttaccttcttccgacatggcctcccccgcgggtttcaagatgtgcctccaactggggccgtccactttctgcgatattttggaggggg

SEQ ID NO: 457279 - DNA, 122 bp, Homo sapiens
gggtgtcacacaacaaatgttaatgtcctttctcatgatcctgtcagctatccaatcagccggactccggttctctcttgaaaagtgactttccaatttggatgaccattttggaggagact

SEQ ID NO: 457280 - DNA, 122 bp, Homo sapiens
tggtggggatgcagaacaactggaactctcctatgcactgcggaaggggtaaattaataccgcccctttggaagaacagtttagaagcatcactaaagctgaatatattcatgcctactccg

SEQ ID NO: 457281 - DNA, 122 bp, Homo sapiens
tcgacggagcacgactcagcgacaacaggagcaaagggtgggggtaggaaggtagcgttgcgtcaccccgaccggctgctcagtcagttcccaatctagctccttgttgtaccctttccgcc

SEQ ID NO: 457282 - DNA, 122 bp, Homo sapiens
gccgggcggccacgaccgtgacccttcccctcgggccgcccagatccatgcctcgtcccacgggacaccagttccctggcgtgtgcagaccccccggcgcctaccatgctgtacgtcggtga

SEQ ID NO: 457283 - DNA, 122 bp, Homo sapiens
cccctgccccagcaagctgccggagccgccgagcctgccgccttccctccatgggcccagcgctccatctccgaaactgcgtgggggatggcgtagacctgtgccctccgagcaccgctccc

SEQ ID NO: 457284 - DNA, 122 bp, Homo sapiens
cgcgcgctcagagggaggcgctcagccgcctcggaatttgcagctctgggcgctggccgtcggagggaccctcaggtgctcagagctgacacaagcgcacactgactctgaggcatacaccc

SEQ ID NO: 457285 - DNA, 122 bp, Homo sapiens
cccagcctccccgcccttacccgcccccactcagccctatttccgggataggccccggagcgtcacaggcaccgccctctcgggctaccattggctaccagattcccgaggctccgcccagt

SEQ ID NO: 457286 - DNA, 122 bp, Homo sapiens
gcaaagctatccacggagctcctgacagttaggcccggctttggctgctgatgcaggggccgaatgacgctatttctgcagcagccggccgcaggcgctgacccaccgcgggatgtgcccca

SEQ ID NO: 457287 - DNA, 122 bp, Homo sapiens
ctgggcctctgagtctaggccctgttctgacaaggaaggtctctttcaaataatcctaaccgctaagagcaatgcaaatacagtcacagaaccattagcagagctgtaatatcataaaagaa

SEQ ID NO: 457288 - DNA, 122 bp, Homo sapiens
acagaggcagagcctgttgtcaggagcatatcacaggcagagggcatcgaggcctcttcccggacagtctgacaggtcagcctgctgcactgaaggcagtaagtgcacccagcagcctggga

SEQ ID NO: 457289 - DNA, 122 bp, Homo sapiens
ttcccacaacctggcgcactaggagccctccgaccggcaccgcccccacgtgttgcacgccgcttccgctttccggcccagacctcaagaccgcttccggaagcctctcggcttccgtctgg

SEQ ID NO: 457290 - DNA, 122 bp, Homo sapiens
ggattaggagggcagataaaggtagaaccccacagaggagggggtgggaatgggcggctccggattggttgctttgcatttgagtggtgagctccccggtgagttgtttgctctctctagga

SEQ ID NO: 457291 - DNA, 122 bp, Homo sapiens
tcgcacctcgtgacgtcacaggcgcgctgcgcctcctgattggccagccggcgcatcgcccgcagtaataatagctgggcgaagggcaaccaggccccaagaagcgggccttgaggtgggga

SEQ ID NO: 457292 - DNA, 122 bp, Homo sapiens
ggcttgggcagcgtggcgtcgggggcgagtgtggtgtccccgttggcgccgccagctctgcgcctgggcttcccctcggctcactcaggatccgcggcctccgtgtccttcaggtgcagcgg

SEQ ID NO: 457293 - DNA, 122 bp, Homo sapiens
cacacctgcccgctctgcccacgccgcttccaggacgccgcggagctggcgcagcacgtgcgcctccactaagctcgagacccggcctgtgctgccctgcccgtctcagggccaccaagtct

SEQ ID NO: 457294 - DNA, 122 bp, Homo sapiens
actgtggctggcagatcctgaggaaggaggagctcaaggcattctacaagggcattgtcccgcgctgggccaggtcaacctggatgtggccatagtgtttatcatctatgatgaggtggtga

SEQ ID NO: 457295 - DNA, 122 bp, Homo sapiens
aatcttagatgaggaaagctgtaggaaaagcaggctgggagagaaaccgagacttcggctcggttaaaacgcgtaaaaatacgcgtttacggaatgaatgaaagcagccgccgaatgctggg

SEQ ID NO: 457296 - DNA, 122 bp, Homo sapiens
cagctgatatatcagctggtggccgaattagccaaggcacagccaacacacatgcagtggcggggcatccaggaagagacacctcctgctgctcagctcagaggggaaacagggagtgtgtc

SEQ ID NO: 457297 - DNA, 122 bp, Homo sapiens
atggggtcatctactccacaccattgcctgagaagttctttcagaccccagaaggtctgtcgcacggaatacagatggagccagtggacctcacggtgaacaagcggagttcacccccttcg

SEQ ID NO: 457298 - DNA, 122 bp, Homo sapiens
caaatgctcggtacgtggctgtgcgaggggcgcccagaaggcacgccagtctccgggcctcggtctcctcatctgtcggatgggacagcacgagccacttacaggggtagcaggcaacatga

SEQ ID NO: 457299 - DNA, 122 bp, Homo sapiens
ctcctgcatgatcaagtaagaaaccattttaaaaaagtcagtatgaataccacatggcaacgtgaaagatgtgtttaatataacatcaaactgaaaagcaaaagataaccgtaagtacagtg

SEQ ID NO: 457300 - DNA, 122 bp, Homo sapiens
ggtgggggttgcaaaaagcaaggtccggggcaaggacgccgtcttggtcaaggctttccacgccgggctggggagaagagcgcagccacgtgggagagttaacaagggcccccccactggga

SEQ ID NO: 457301 - DNA, 122 bp, Homo sapiens
gcagcaacagtaccggcagcagtggcagggatggagagctgcacgtagcaagggtcaggacggccagcaggtggagacgtcagtcgcagccagctgcttcctccagaccagccgccccgccg

SEQ ID NO: 457302 - DNA, 122 bp, Homo sapiens
ccgatgccaacagtgtcacaattaccagctctgtcaggactgcttctggaggggacatgccggtggttctcatagcaaccagcaccaaatgaaagagtacacgtcatgggtaaggcaaggtc

SEQ ID NO: 457303 - DNA, 122 bp, Homo sapiens
cgccgcagccccgctgcctaccttcttcagcgccggctgccgctcccgggcagacatcgccggccctgactttggggctgacaccgccaaagggcagtcagtgctcgcccaggccacttcgg

SEQ ID NO: 457304 - DNA, 122 bp, Homo sapiens
aaatcacagagaagcgacgtgtccactccattcatccctgctgtggcccctggggagtggcgcaattcagaggctggggaggaaatgcccattcttttgctgcacagctgggggaaccccag

SEQ ID NO: 457305 - DNA, 122 bp, Homo sapiens
gctgggtgggtgattgtgatgctttgaattgaaattgattttggttttagttttgggctgcgaggccccggaagtgggatatatgttttatttcgtaacaggaaatagccaaagaaaatagg

SEQ ID NO: 457306 - DNA, 122 bp, Homo sapiens
gctgctccctgggtcccccgactccaggcctcaggactccacggctccaagggcctgccccggcccaggcctggggaccactgagccccacactggtctttgctggcctctgtccacctccc

SEQ ID NO: 457307 - DNA, 122 bp, Homo sapiens
ctctcactgttgatgtcatctcctgtcttctcatttttgcacctggctgcttttcttttccggttttgggagtcaaaattgggaagttactggtggtttgtatgcttcattgcttacgtgaa

SEQ ID NO: 457308 - DNA, 122 bp, Homo sapiens
tgcggccactgctcccagtgccatgttcccgtaccccggccagcacggaccggcgcaccccgccttctccatcggcagccctagccgctacatggcccaccacccggtcatcaccaacggag

SEQ ID NO: 457309 - DNA, 122 bp, Homo sapiens
caacctgagccgcctcgccactctcggacactacaggcccgagaggcagccggactcatccgtcccatatgactctcggtaaagaagcccaaaacaaacccggagcccgatgtaaacaactc

SEQ ID NO: 457310 - DNA, 122 bp, Homo sapiens
ccctgtttacttatctcccgtgtaagctccccaccactgctacactgtgaattcttgaagcggggaggtagattcatgtctttttgtttcctcctttaaaaaatctgtagctgggcgcggtg

SEQ ID NO: 457311 - DNA, 122 bp, Homo sapiens
ttgtcactgccttgccactcgtcgaagtttgtcttgggctctaaaagtggtagccgggaacggctgggaaggtctccacagggaccaccacatgggcaaggctggtgtccgcgccgagggat

SEQ ID NO: 457312 - DNA, 122 bp, Homo sapiens
ccgccctgcccccatcacgcagccaccgccctcactctcgaccccactcattggtcgagtcgggcaaacgccctcccagcctttagccaatcggatgcctaaagacgagactatacctggag

SEQ ID NO: 457313 - DNA, 122 bp, Homo sapiens
gcctgacctcgtctacggaggactcctcaatcaggcgaggggcctctgcagacaggatgccgtgggtggccataacatagatcttataggcgcctctctctttcaggatctccgcggcagca

SEQ ID NO: 457314 - DNA, 122 bp, Homo sapiens
cgcgccaaggaaagtgctacaaaagccatccatcttgcaagcgttggtgccgaggcgcaacgctgagaacgcaaatactaaagggcgctgttctttcctcgtggagctcacagtccgctggg

SEQ ID NO: 457315 - DNA, 122 bp, Homo sapiens
acggacggcagcctgctcaccaccacgtgcaaggacaagaagctgcgtgtgattgagccccgctctggccgtgttctgcaggtggaaccctacattttttgagattgaaggggaaggtattg

SEQ ID NO: 457316 - DNA, 122 bp, Homo sapiens
gtcttctgaatggaggcagctgttggtctttttctcccggcctcattaccctgggcaggacgtccggtgtgaggctcctgggagggagacggactgcagggaacccctccatcccatgctac

SEQ ID NO: 457317 - DNA, 122 bp, Homo sapiens
acccagcccgtggaatttgctgagagactgcggctttctggggactggaaaaaatggaggcgggggtagagaagagacgagtaagcctgggtctgtgcttcccagcctttgtaggggaatca

SEQ ID NO: 457318 - DNA, 122 bp, Homo sapiens
agagaaggagctgggagcagtaaggatgtgaccacaccggagatgtgctggaggttagtccgatgtcgtggaacgtccctggtcccggctctggcaggagctgcaggactctgctcaggatt

SEQ ID NO: 457319 - DNA, 122 bp, Homo sapiens
tggagcaaccagcgggcaatgagatctgagcaggatgggggcccagggctctgtggctcacggccatcccaggagcctggccaagtcattctgtggttttaaagacagcgacctccgaacct

SEQ ID NO: 457320 - DNA, 122 bp, Homo sapiens
atccggatgggggacttttccctcggggcaggtgagagcgcctggagaggcccctgcccccgcgcacgcgtcctagcggttgccgggcaacgcggcccgggccatggaggcgtcgtacgagt

SEQ ID NO: 457321 - DNA, 122 bp, Homo sapiens
gcagaggaggcagcacagccagaagactctggggttaacaactttgcgatggcaagcaggcgagcgctgattggctgggagggcagtgtccctacagtctgcactatcccccgctgcccccg

SEQ ID NO: 457322 - DNA, 122 bp, Homo sapiens
gtcatcagggaatgccaggtactgtttcatttagccttgtttccttggccagtcactggtcgcgggtgtgaggatatacttacccttaaactaatcaagcccattctgagagcccagggaca

SEQ ID NO: 457323 - DNA, 122 bp, Homo sapiens
ttttttcctggggttttatgggcttggttactaatcagcctgtaatcaagatctgaggcccggtgcggtaatcctagcactttgggaggctgaggcaagaggatcgcttgagcccaggagtt

SEQ ID NO: 457324 - DNA, 122 bp, Homo sapiens
aggtttagttgctctagacatgtctacaatttagaactcatgcaccaaagatgaaaattccgtgctccgggacgaactgctgttcctgggcggcccggctagctctgcctacgcgctcagcc

SEQ ID NO: 457325 - DNA, 122 bp, Homo sapiens
aaccgcagtatgtatttcacaaccagcttttccaaactaggtcccaggaagcactggtttcggcgagtgttaccagatctcctgcaggggagaaacggtcacgaaacatgaactggtctgcc

SEQ ID NO: 457326 - DNA, 122 bp, Homo sapiens
gcatggagaccccagtggcattgttgttaaaacctgctttctgaaaactgcctttgtggccgcaggaagctcactgctcctttatctctcttatcgaattcctgatgctgtttccatgaaag

SEQ ID NO: 457327 - DNA, 122 bp, Homo sapiens
tggactgtaccacagtgactgcgaagggaggggaagacgacggcaaggaggcctactacacgagcagtaaggtccacacttttgcagacagatttcacaggattggagaagaagttggagtg

SEQ ID NO: 457328 - DNA, 122 bp, Homo sapiens
cagcccccacgtttcggttacctcatgaatacactaaattgtttggataatatatcagatcgtaatggatggtttctgtccttgtccccaatcaagtaggggtttagccagtgaataaacgg

SEQ ID NO: 457329 - DNA, 122 bp, Homo sapiens
acctcgctatctgcccgcctcggcctcccaaagtgctggaattacaggcttgagccacagcgcctggcccattgtgtgatttgcttcaggtacagtaagcaatgctaggttcctggtgttgg

SEQ ID NO: 457330 - DNA, 122 bp, Homo sapiens
actcaggtgaggggacgcgctggaggcggggccagaacctcattaccatacagctgaggacgcgcccccctcctacctccgggaccacgccccgccctcccccacctcagggaccgcgcgtc

SEQ ID NO: 457331 - DNA, 122 bp, Homo sapiens
atagaggaaagggctgggtgtgatcgcagtttttgctttcaatgttttactgaggaaatccgtacaactgcctatttccgccgcacgtgaggcttcgggtgccctcgcctgcaccagtgttt

SEQ ID NO: 457332 - DNA, 122 bp, Homo sapiens
ccgtggtggcgggggcataatgggagggcttcaagtccccccggacctggggtgtagaggcgtagaggccatacccccatgcccaccactcaggccgccggtctccctgtctcagggctccg

SEQ ID NO: 457333 - DNA, 122 bp, Homo sapiens
cggccaccattggccgaggctcgctgagacccggatgagcacggggatgcggggagcttgcgggcgcgcgcgctgctccgttaggcgcgcgtgcgctctcgctgcgttccagagggtaaggg

SEQ ID NO: 457334 - DNA, 122 bp, Homo sapiens
caaaagaattttaacatttaacactcccaccaccaatatatgacagttccacttatgtcacgttctttgccaacacttgatgttgtcaatcccttaccttttagccattcagataggtatga

SEQ ID NO: 457335 - DNA, 122 bp, Homo sapiens
acctccccggtccagcagtgctggggaggggaccccgcacgtgtgcccggagcgcggacacggtgatgcggctgcccctcgccccggccccaggctcgctgcgccctccctccccggtcgcc

SEQ ID NO: 457336 - DNA, 122 bp, Homo sapiens
ggctttcccgaatggcgcgcccaggacggctcttgcggctggctgtccaaactgggcccgcgtcctgaagtgaccccagcctgatctcggccagctgcttgtgaccttggcctgtcccagca

SEQ ID NO: 457337 - DNA, 122 bp, Homo sapiens
ctttcattttactcaggtattattactattattacttcttttgagacaaggtctcatttccgtcgcccggctggaatgcagtggcacaatcactgtcactgcagcctcgacctcagagcaag

SEQ ID NO: 457338 - DNA, 122 bp, Homo sapiens
aggggggaagtacctggagccaggcttggccaagccctgctctgctgggctgcgggctggcggcgctcacccagctcctcacctatcccgcatcttcctgtttttcttccctttctggttgg

SEQ ID NO: 457339 - DNA, 122 bp, Homo sapiens
tactagaaagatccttctaaaggcagtgtggaagcaaggccagagtggaaccaggttgcgcgcaggtgccccagtcagggagtgagacataagaatggaaggggactggatgcagtggctca

SEQ ID NO: 457340 - DNA, 122 bp, Homo sapiens
aagataataggattattcttacagtgtaataataattattggtgctaatgtttaggaagccgtgaaagataacacgaggggagaaagtggatagaaaaaccaccgctggcagttcttttcat

SEQ ID NO: 457341 - DNA, 122 bp, Homo sapiens
gccccctggctctgggaagatagcagtgaacaagccagatggcccctcaccctccagagccgtgagtcctgcagaccaaacagcgtgacaggtcctttccctgtccaggaggcctctgtggg

SEQ ID NO: 457342 - DNA, 122 bp, Homo sapiens
gtacagactccactgcaggggccgtcataggcccagaccacgccatttgagagggggagtcggccttggcctcagctctgttggggaggtctctagcccagagtcaggatgcctgcaatggg

SEQ ID NO: 457343 - DNA, 122 bp, Homo sapiens
agagcccagggcagaggtgacagcaaggctccagggacaattgttgctgtgacttcccagcgaggcttcagctaacgcaggagccgacaggcagagctccaggcagagacgcggtccacaca

SEQ ID NO: 457344 - DNA, 122 bp, Homo sapiens
ccggaggcctcctgggaggcggaggaggaccggggaagatacagcagccggccaaggccgcgggagggagggagtcaggagactcccatcagcaggcagccctcttccaagctcctcgaagc

SEQ ID NO: 457345 - DNA, 122 bp, Homo sapiens
tgcccagtagaagtggctgctcttccaatgagttgaaagctaagtgttttggtactgctgcgtcaccaaagggccagtcctttcctgattttaagtttcttccttggcatgcacataaaaca

SEQ ID NO: 457346 - DNA, 122 bp, Homo sapiens
tcttctctccctcctccccccgccggcgccgaggcgcagtgcaccaagggttttgtagtccgtccgggaacagcggaaaagggaccgcatgaacctccggaactttgattcccagaaagcca

SEQ ID NO: 457347 - DNA, 122 bp, Homo sapiens
ggcgtgtggacctgaattccctggaaacaggctggggccgcgaggggcctccgctccgggcggggtccccagatagccccgcctcgaataaaaatgacgagcacgggtcctctctcgggccc

SEQ ID NO: 457348 - DNA, 122 bp, Homo sapiens
caggcggccaggcgggcgccctgccaaattccgcgttcctctccaggagacggggagttgcgtcccaggctcgggaaagcccgcagttcgggcttgggactcgcttacaaagccccccaagg

SEQ ID NO: 457349 - DNA, 122 bp, Homo sapiens
ggaacgaaaaactccagacgtgccaccttaatgaaatataacactcaccgcgaaggtctgcggctttacccctgaggccagcaagaccaggaccccaccggaaggaacaaacaactcctgag

SEQ ID NO: 457350 - DNA, 122 bp, Homo sapiens
ttttttttccagtcagtagcgcagagactgtgataagaaaaatcacaattcccagaatgccgcggtgctacggcagccgaaggggccattccgtgtgcagcgctcccgcccaccctccggtc

SEQ ID NO: 457351 - DNA, 122 bp, Homo sapiens
tcatgtgcaaatgaagacagagctttcaggcacctccgccagaacacacttcatttgaggcgacggcagggatgctactaaaaccccaaagagttaagctgaaatggttaatattcctgtct

SEQ ID NO: 457352 - DNA, 122 bp, Homo sapiens
cggcctctgggcccatcccctgagggggcggggccgtctcctccacctcccggtattccccgaggaggcggctcctcatcctccgagggtcctcacagctactttttgtccctcgtcgattc

SEQ ID NO: 457353 - DNA, 122 bp, Homo sapiens
acatgctgggctggaagtctgaaccccttgggaagtgacctcaggtcccctcttgtgctccgtgttactaagtattgaaggggaaatgctggggctattcggcttgctgctgccactggtac

SEQ ID NO: 457354 - DNA, 122 bp, Homo sapiens
actttgaaacagaaaaataaggaaacctcaaaacgtgaaggacaatattaaaaggtctaacgtatttgtaatttcggtacccaaagttaaaattggggcatacttctaaatacccaaagact

SEQ ID NO: 457355 - DNA, 122 bp, Homo sapiens
aacaaggaaaaaggagaaagaaaaagaagaaccgttcatacaaatcatcccaaagctctacgcatgaatcagaatcagagagcaaggagtctgtaaaaaagaaaaagaagtcaaaggatgaa

SEQ ID NO: 457356 - DNA, 122 bp, Homo sapiens
gtgaactgactccagggacaaaatttcaagatataacaccaaaggagttcaactctggcccgcagctgcaaggtatgaattctgaggagttccattcacacctcaggcagcataatgtgaga

SEQ ID NO: 457357 - DNA, 122 bp, Homo sapiens
gggagagtaggccccttagtaaggacagcatgggagacaagactggtttttctgtaccctcgcagagtgctagtctgttatttacaggtatgtgttttgggatcaggtgcagtggtgcatgc

SEQ ID NO: 457358 - DNA, 122 bp, Homo sapiens
ggagtgcgcgggcagagtgagctggacccccggagggtcagaggccctttcataaaagcgcgcagagcagaggagtgatgtcccccagctcccccgcagagggtcctgcacctgcggcctgg

SEQ ID NO: 457359 - DNA, 122 bp, Homo sapiens
ggaggtaattagagacccccacccccaccccccagtcctcaggctgcgcgggaatcgcagcggcagtaacctccacctcaccgggatgctttacaccttactttaagagtttgcaaaacaat

SEQ ID NO: 457360 - DNA, 122 bp, Homo sapiens
cgttcgtgcaagaccagtcgccatttaaaacgcatcgcatttcacttttcattattaagtcggattttaaatcgtgagaaaatttctctgaaatgtattgtccgtttttaggctgtaatcgg

SEQ ID NO: 457361 - DNA, 122 bp, Homo sapiens
tctccaaaaaaaacaaataaatataacaaaattcctctggtagccgggtgcggtggctcacgcctgtaatctcagcactttgggaggctgaggcaggtggatcacttgaagtcaagagtttg

SEQ ID NO: 457362 - DNA, 122 bp, Homo sapiens
cccactcctcccatttcaacattccccctggatcctctaccacctaaactcccagctggacggtgtcagtaagaacagagtggcagtaactctcactttgtagtggtatatttaggatttga

SEQ ID NO: 457363 - DNA, 122 bp, Homo sapiens
ggaacgggtctggcgactcacgggacacccccaggacctccctctttcctaccagggacacgccggctggagtcctccatcaagctgtgtccccctgagacgcagctgtcgaaagcagctgg

SEQ ID NO: 457364 - DNA, 122 bp, Homo sapiens
ggcgaagagggggacgttagtaggggagccagacgctgttgggggcagcagggcaggggccgggcccggggagttgggggcaggcagtagcgggtccgagtcgctgcaggggagggggcggc

SEQ ID NO: 457365 - DNA, 122 bp, Homo sapiens
agagccggaagttgcgtctgtgtgtatgtacttctttgcttttgttgtgttctcagccctcgcagggactctaaccacttccccctgaacttcaggccgtacgggaacctcacctctcttgc

SEQ ID NO: 457366 - DNA, 122 bp, Homo sapiens
gaagtcagccaggaccatagcacagaacgggcccggggccaggccggacagctccacgaccgagatgccctgcagtgccatggcgcttcccagtgccccgctgaaggaaactgagcagccct

SEQ ID NO: 457367 - DNA, 122 bp, Homo sapiens
tggtgtccctttcttgtttcccctgggctccttcttctcctggctgtggacaggtgcacccgtcggttttgtgcccggcatgccgtgtgcccttccaggcagcctgcccagccctggcgtgc

SEQ ID NO: 457368 - DNA, 122 bp, Homo sapiens
acctcatgatccacccacctcagcctcccaaagtgctgggattacaggtgtgagccaccgcgcccaaccagctagggttttgaaggtatgaagttataagagggcatgttaaagacaggagg

SEQ ID NO: 457369 - DNA, 122 bp, Homo sapiens
aggaatccagaatcagccctcaagcaactcaagacaagttagcaatttccgccgggaagccgtgaacatcggcagccactggcgtttcctccgagtcctcggaactccggaaactctgggag

SEQ ID NO: 457370 - DNA, 122 bp, Homo sapiens
ctaagcatattcttcctgcctttacctcctctcccaaggccaactgccagatgagtcttccgaaaacactgctcagaaggtgccaatggccgggtgtggtggctcatgcctgtaatcccagc

SEQ ID NO: 457371 - DNA, 122 bp, Homo sapiens
gggggaaatggggacagggaagtgggcaggcggggagactgcagccgcagatctccctggcggggaggtcgtggccactctttcctttgactctgcctcatttcattttgaatcctgatgtg

SEQ ID NO: 457372 - DNA, 122 bp, Homo sapiens
tttgagcaaggcttcccgcttgatgatgtgtaggtcacagtacgtcagtgcccggacgttcgcacatgcatgggcaagggtggtttccttccagaagatgtctccaaatacatcacccttcc

SEQ ID NO: 457373 - DNA, 122 bp, Homo sapiens
agtcctatgacgaatccctgggatccccacaatgtgtggagacagaagccaaccaaagagcgagaaagcatctccaaaccagcagaatcaggggcaggaggcccgccaaatgcacagcaagt

SEQ ID NO: 457374 - DNA, 122 bp, Homo sapiens
ctaaaggaccgctctgggcagcggcaaccctggtccacttcccttaagttactgccggggcgcttaactccgcgccgcacaaacgctccgggccggatatcctcagccttcagagtcccgta

SEQ ID NO: 457375 - DNA, 122 bp, Homo sapiens
gggccctaggacattctgttcttttttacactgttggctgccaggccaggaatgtgtaatcgcccctgctgtggtcacagagttgcaggaatgtgggcaaccagaggcagcgcgagggccac

SEQ ID NO: 457376 - DNA, 122 bp, Homo sapiens
tactctgaacccatataaacacaaaaaaaatctatctaccgtgcaaatgttattctgaatcgcttttccaattacaattttgacttgcgttgaataaattaagtttctataccataaatact

SEQ ID NO: 457377 - DNA, 122 bp, Homo sapiens
ggaaagaactgtgagtacctaagaaaaagaagaatacacgttagctctctttactgaggtcggaaccttccgagacccgccacatttcagcccgacaaacccgagatcacgttcacttcctg

SEQ ID NO: 457378 - DNA, 122 bp, Homo sapiens
cttggaatttatgtcctgacttcacaagtctaagaatgatggctctggctgcctgcgctgcgtgatctgctggagcctggaagccccagctgtgctttctctgcctctgacacctcccgtgg

SEQ ID NO: 457379 - DNA, 122 bp, Homo sapiens
gagacgccaagttagacccacccctttccttacgtacgaaaaatcagccggtagtattagcgaagtcgcctgtcattcctccgccctgaggcgttgctagcgcctacatcccaccttttccc

SEQ ID NO: 457380 - DNA, 122 bp, Homo sapiens
gagaactgatctctctcccggtacccatgacaatctcagagctagatctatatcgtcccgcgcccagcaagaagcactgtgtgactgtactcccccgacccccaggacatccccacgcccag

SEQ ID NO: 457381 - DNA, 122 bp, Homo sapiens
ggtcatcacagaacatcagctctgcctgaagggtggccggcagcccagtcaggcttaacccgaggggtactcaaacggaggttcttgacaccttatcagggtgtgtacgcttctgcagaacg

SEQ ID NO: 457382 - DNA, 122 bp, Homo sapiens
tcacgtgatccctttcaaagatggccgccctgttgttttgatgaataatacttggtggggcgagggggaaagagtaggggtggaggggtaggaggatttactcttccagcgagagctacgcg

SEQ ID NO: 457383 - DNA, 122 bp, Homo sapiens
gctctagattctctcttaaaagttggagagtctcaatcaaatcttccacaccacccgctgcgctgctgtgtcccttctcctccttccctccatgcccctcagtttcttctgtcgactttcaa

SEQ ID NO: 457384 - DNA, 122 bp, Homo sapiens
tgtttatcagaatcacccagagggcaggttgcaacacacatcactaggcctctccttctacgaggtagggcccaaaatttgcatttctaacagcttcccactgcttatttgccttggatgaa

SEQ ID NO: 457385 - DNA, 122 bp, Homo sapiens
catcctggctaggaacaaaagcaagatgatggcggtactaacttagacacacaacaccaacgtttccatagacagagcgggttcaaccccacacaggctgcacatttagaggtgagacactg

SEQ ID NO: 457386 - DNA, 122 bp, Homo sapiens
acactcccgcagccgctcctcagaggcctgtgcccatcgcaggcctgggaggaaagtgggcgcagagccctcctgctcacacagctgctgagacttcagggacccatcagaacttggtgcag

SEQ ID NO: 457387 - DNA, 122 bp, Homo sapiens
tgcctgtgtccctgagcactgactccagaggtttaatcattaacgggcacgtttggccttcggtcgtgggctggaatttgggacctgtgcccgggaacaatgatctccgacacattattttg

SEQ ID NO: 457388 - DNA, 122 bp, Homo sapiens
gtgatcctcccgtcttggcctcccataatgctgggatgaggtgtgagccactataccttgcggtttttatttttaaatggttgaaataaaagaataaaacttttcgacacatgaaaatttta

SEQ ID NO: 457389 - DNA, 122 bp, Homo sapiens
aaattctaaaagagctgtaacactggggttttgtttctaatacaaagtaaaactactgatcgccagtcaagagggtgaacccagctgatgtgggaaagcacctccaaccaccctcaccctgt

SEQ ID NO: 457390 - DNA, 122 bp, Homo sapiens
tcccttctcccatccctcgcagtggttagttgcacactagcaggcaggtggattttactccggtttcttttacccagtcccgttgctttcagggcaatttcattctggtcagcttcacagca

SEQ ID NO: 457391 - DNA, 122 bp, Homo sapiens
ccagggaatgaaaaaccgcacagtgaatgacctcggcctggcagtcccacacttaaaactcgattgtgaaggcatgctgagaaaggcaccagatgatttgtgtccagacctgttcgctggac

SEQ ID NO: 457392 - DNA, 122 bp, Homo sapiens
cctacgcacctcagggagtctgaggcgggcctcttcgcaccccgggaggtgcacttggagcgtgcaggcgggtacacttccaaccaaccgcgagcatcttcagaaaagactggtccccacac

SEQ ID NO: 457393 - DNA, 122 bp, Homo sapiens
tgcagaccttgcagaagctcacaggaaagagggggaggccttagcaaaaccggtaccactcgtgatccacgcgcccgtcagcagcacctcctgagacaggtccggtcatgcctggctggaag

SEQ ID NO: 457394 - DNA, 122 bp, Homo sapiens
gactctggccaggtgcggtatgtgtctggtcctcggctaagttctcagtgatattcacgccgccagaggtcccagagtgaatgttttcctggcgtccctgaataaggaggcaggacagtggg

SEQ ID NO: 457395 - DNA, 122 bp, Homo sapiens
aatcactgctcattgcaacctcgacctcccgggctcaggtgatcctcccacctcagcctccggagtagcctggaccacggatgaaggccaccacaccgggctaatttttgtttttttttttg

SEQ ID NO: 457396 - DNA, 122 bp, Homo sapiens
tggttcaaggcttagtttcgttagtaaacagttcacattatccaaaaagatgttcctgaacgtggcctcaaagagctaacacgggtaggccctgacgatcgtccttttccatctctcagatg

SEQ ID NO: 457397 - DNA, 122 bp, Homo sapiens
ggttcgcaggcaaggactggcctggaaagggagtctcttctccccacaggggctgacaggcgtactgagttcgcctttactgacaagcttttaccatttattttgaacttattttcctttga

SEQ ID NO: 457398 - DNA, 122 bp, Homo sapiens
gctgcttacccagaagtagtcgcagtagctccactcggttggtttcagcagctgctgttccggcatcgtgtctgggtgagggaacgtcacacagtttatctgtagggcacagaacaagaaag

SEQ ID NO: 457399 - DNA, 122 bp, Homo sapiens
ataaaatatgaagaaaaggagtttgcctgcatcatctcaaaagcagtgatttcatgaatgcgtcagtttccatttatgtcaacatcatcgctttgtctcttatctcctgatttcttgtcctc

SEQ ID NO: 457400 - DNA, 122 bp, Homo sapiens
atgagaaggtgctcagaagacagtcagctgctcagcgccacacccaaacctgcagctgcgcgtcccagcagatctcacggcaagacgtggggtcagacggccctgcctgctaggtcagatgt

SEQ ID NO: 457401 - DNA, 122 bp, Homo sapiens
atcccgagcccaccatccccacggaggcctcgtgcccgcaccctcagagcgtgagctgtacgggtggcccatgtttgcccttggtttgaggtgcaggatttttcaggattctgaaatgagta

SEQ ID NO: 457402 - DNA, 122 bp, Homo sapiens
tattggacaggacggagctattataagcggagcgcaccatcgcgaggcaggggctggatgcgttagggcaagccttaggtgccagtgggtgaaggagtctttgaaagatggaaatacgaaag

SEQ ID NO: 457403 - DNA, 122 bp, Homo sapiens
cgagcggcctccaagtcgcagggtccccctggacggccgggggtcgggggagagcccgggcgcccccagacttgcgctcagcacatcttggcatcgcagcactttgcaaagcttgtgatgga

SEQ ID NO: 457404 - DNA, 122 bp, Homo sapiens
tattcacgagtccaaattaaatactccctattcacatccaatttaaacctgcatcccctgcgtgggcggtggatgtaaacgctgagaaagccaaagctaagtgtggccccctgccaggccag

SEQ ID NO: 457405 - DNA, 122 bp, Homo sapiens
gagattggtgcaatgactgacccctcatgctgatgagaatgaggcttattgtgttccaaacgtgtatataccatggactgcagagtgtccgcagcaggtcctgatctctattccttctcatt

SEQ ID NO: 457406 - DNA, 122 bp, Homo sapiens
gggcggggtcgccgccggccacatcgccctctgctgttggggaggagaagcgtcccgctgcgcacggcctcagggattagaaatgggcttacctggtgctcctcccgcccctcaacagcctt

SEQ ID NO: 457407 - DNA, 122 bp, Homo sapiens
aggaacatgaatgagaaattacaactgcatgactgtagacgagaagtgggagtggaggatcggcagccggagatgcagacagtttgctgagactgctagtgctctaggctgagactcacacc

SEQ ID NO: 457408 - DNA, 122 bp, Homo sapiens
tgccctcagatcatgaaaagtgcttgaactcatttcagagaagaaatgttttgaaatgcccgtggaaatactgagtgggccacttttttattttgtgaaattagaaacgtataaactatttt

SEQ ID NO: 457409 - DNA, 122 bp, Homo sapiens
ctttcttcatccctggcttgcagctgtcaccatcaagcccttgctcttgggttcattcttcgggagccccaggggcctatctatggggaagggagtgggtgtgacttgggagccaatggagg

SEQ ID NO: 457410 - DNA, 122 bp, Homo sapiens
acagccaaacctatcacccagtaatccctgcttctgtcttaatttgactttcccctcacacgtggctctgattcacctttgctcacctgctgatgcggttctcatgttacacgtgttcttca

SEQ ID NO: 457411 - DNA, 122 bp, Homo sapiens
ggaaggtggctcagtagcctggggttggtgcagagcgtccagagaggcaagggcataaagcgtggcagaagctgggggcaggtcccacactgtcgctatgccctgcctgcctgcccacaggc

SEQ ID NO: 457412 - DNA, 122 bp, Homo sapiens
gggcctttcctttgtctaacgggcaatatccttacatccgggacctgggggtgccgagcccgtgaacttcccttgcggcctgtggttggagacaaatagctgtgctggctccgttggcagag

SEQ ID NO: 457413 - DNA, 122 bp, Homo sapiens
tgagttgattgttgagttcttattttttcccagggaattagaagaaatgtataagccttccggtgaaaaagaaaagtttaaatagttaagaaatcagaggaaaatagcctcagatgatcagg

SEQ ID NO: 457414 - DNA, 122 bp, Homo sapiens
ttcttttttctcctctagatttgtaactggaaagagaaggagaaaaagcacttgcctgagcgatgggtgatttaaaaatatctcttctgctgtccctgtggttatcaagcttgtcttcctgc

SEQ ID NO: 457415 - DNA, 122 bp, Homo sapiens
aatttttactttctgcggaaagggtgctccttgcagatggaacaatggtgagaccacacccggacaggggaggggaaggagttcttgttcctgacgcaggtatcccctactgctgtgtcatt

SEQ ID NO: 457416 - DNA, 122 bp, Homo sapiens
ggcgagaaatcgagcgcagcgccggtgggccggcactggtgggggacctagtacagcctccgcagctgctggcctgggtgctaagcccctcattgcccggggccggcagggccggccggctg

SEQ ID NO: 457417 - DNA, 122 bp, Homo sapiens
gagagaagcagggggagagcggggcgagaaagaggtcggaggggagaggagggggagagacgactcagaaagtggaatctgtaaaagcaagctagaggagaagaaggaaaaccctgaatcgt

SEQ ID NO: 457418 - DNA, 122 bp, Homo sapiens
gcctagatatggagaagaacccaacagtgcttgttggtgtggggttctctatccgttcatcgccgcactgccgcacactcaggtcaagcagggacgtccttcttagctctgtccacgttgtg

SEQ ID NO: 457419 - DNA, 122 bp, Homo sapiens
catacgcatgtaaatgagctcagcatcacacaacaaaaacaggcatttctggggagaaaacgatctgagaatcacagtgaaacagcagctgaattaaattagaagtggagttatgtgaaagc

SEQ ID NO: 457420 - DNA, 122 bp, Homo sapiens
gaataggaagggctggcctttgacacatggctcattggctgtctcaggagaaaacatcatcgccctgcccatggcagcttaggttattctagggctgcccttcctcacttgaaaaacaggaa

SEQ ID NO: 457421 - DNA, 122 bp, Homo sapiens
agagggaggagacactgaccaccccagaggccgccccattagctcgcttgctttgggcggcgtcgctcccacggcgcccagggtacccccgccgctgtctgcctgtcttcctccattaccgc

SEQ ID NO: 457422 - DNA, 122 bp, Homo sapiens
cgtggccgccatggcgcggaatgtggtgtgagtaggggtcgtcacccccccgtcgcggggcgccccttagtgtcacaagcagacggaccccacagggcgcgcggactccggggagcggggtg

SEQ ID NO: 457423 - DNA, 122 bp, Homo sapiens
cttcggttagttaccaggtctaagttaggcttctggattccaactccacgctccaccgcgcggaactatgcaatcttgagttagctaccgggtctaagttaggcttctagattccaaatcca

SEQ ID NO: 457424 - DNA, 122 bp, Homo sapiens
ctgagacccccagtgtgctggacgtgcctacttttcaggcaggcccaggctgaggcgtggcgggacttgaaacacagttagaacgtagatgtggtattctacattgctttcttggctttggg

SEQ ID NO: 457425 - DNA, 122 bp, Homo sapiens
cccttggatcaggctgggcactcgctgtgctctcccctccttggggcgtttaggactgggcgtctccaagcccaccatggcccagatggacgtgcaaagcccttggaattttctggcacttc

SEQ ID NO: 457426 - DNA, 122 bp, Homo sapiens
ggcggcgaggcgtcccaggacccccattcctccctccgccccggggcttctggggagcggcgcagcttgactgccaccgactgcgggcctccctgccctacaagcccccacccccgcccccc

SEQ ID NO: 457427 - DNA, 122 bp, Homo sapiens
cgttagcgccgtggcatcgctgttttgttgttgggtcacgagtgcgcctctgcacgcaggcgccgccgccgcccgggagttgtgtgcagagctgacttttggagggccgagttgcaggcggc

SEQ ID NO: 457428 - DNA, 122 bp, Homo sapiens
agccgtgggtcacggaagagaatcgtggaacccagtgattagtgttcagctcgattaggacgaacccagcacttagccgtttaggaacaatggcaagcctctagcccaatcgggagcagcaa

SEQ ID NO: 457429 - DNA, 122 bp, Homo sapiens
ccaggcgcccggggctccccgcgttgccactgacaccccagcgagggccgcgcaaaaccgcggaaatgcccatgggcgaggtcgccccgctacccctcgggaaaaacacacgcacgcgctaa

SEQ ID NO: 457430 - DNA, 122 bp, Homo sapiens
ggcgtaggaccctctgagccaggtgccggatataatctcgtggtgcgccgtttttcaagccggtccaaaaagctcaatattcgggtgggagtgacccgattttccaggtgcgtccatcaccc

SEQ ID NO: 457431 - DNA, 122 bp, Homo sapiens
ccttctcctccctccacctgtgggcttgggctgctgcactggggatggagacctgggaggcgaaggtcccctgggctctcctgtggcaccaccccatcccacctgtgacctcaggccagcct

SEQ ID NO: 457432 - DNA, 122 bp, Homo sapiens
acgccctctggagtagggcactacactcagctgaaggtggtggctctacccaaatatatacgtgaagtttagatacgatgaagaatttctagtatgtttgccactccattcccattctctaa

SEQ ID NO: 457433 - DNA, 122 bp, Homo sapiens
aagtaaaataaaatttaaaaaagcacagaatgatttgctaggatgcaccattcccagtaacgtcaaatatttatcagatataacataaacattttttttaaaagtggtatttctttcctatg

SEQ ID NO: 457434 - DNA, 122 bp, Homo sapiens
ttggagagggacctcccctctcagcctttgggtgccagacttaccaagtgggtgccaattcggcgcggaccaagcgcaggatgccagccacagtcggcgcccacaagccccactccgaaccc

SEQ ID NO: 457435 - DNA, 122 bp, Homo sapiens
ctgggcccttttaaggatatcaagggccaatgggaaccaagcctggagaggtgtgacttccgcatcctcctccccttcttccccaaactgtcacctgctaagtcaacaagggctaggttggg

SEQ ID NO: 457436 - DNA, 122 bp, Homo sapiens
gtcctcgggaagggggtgggggacgcggaccgcggcgagagtggtcctggggtagccggtcgtggggagggccgcggggccgcgcccgggcgccaggcggagggcgccggggccgcagcgac

SEQ ID NO: 457437 - DNA, 122 bp, Homo sapiens
cctggccggccggctcgctaggcgcggggtctaggccaggctggggctgcttggaggctgcgccctcccctgcccgcggcgccccggcccccgccgtcgagagtggacgcccctctggggta

SEQ ID NO: 457438 - DNA, 122 bp, Homo sapiens
tgtagccattccctatctggccttaacaaacttgataccagcttggtcgttcatgatgctcgttaataacagactaaacttcttccccttccccaacacaccctgctctttcagcctctttg

SEQ ID NO: 457439 - DNA, 122 bp, Homo sapiens
tataaatactcctttaaatccactttctttttcgaagaacagtagctgttcaaaatcatgcggttacacaagaatctgaatcaagcagaaataattaaaaatccaacattcagtcaattcta

SEQ ID NO: 457440 - DNA, 122 bp, Homo sapiens
tgtgccccacctcttgccagatgcagagcccagtggggggagggaacgtgccacccgccacgtgcacccctgcagcagctcagcctgcagcaacagagccgcccctgcctctccctcccaat

SEQ ID NO: 457441 - DNA, 122 bp, Homo sapiens
ccgcgccttaaataacagtctccttttatttagttagtttcctcggcaggtttggcagcccgcttgtctctgcccccctacgggcccggggcgcctcgggcgcctcggtgctgcctgcagcc

SEQ ID NO: 457442 - DNA, 122 bp, Homo sapiens
agccataatttgcacacatgtgatctggaggagggctaaagctgccacaccgagggctttcgccaagatcaaggtcctcttgttggtagtttgggattgcttatgacccgatcctccttatg

SEQ ID NO: 457443 - DNA, 122 bp, Homo sapiens
gaacccgctgcaggccggcggaggcccgcttcagcagcggctgcgtgccaccccacagagcggccaccagcaccagagccaacacctgccctgaatgcagacgagtgagtcaccctgacccc

SEQ ID NO: 457444 - DNA, 122 bp, Homo sapiens
ttcagaagtgtttctcctaaagaaaaaaaaatgactctggataatgtaacatcagctactcgaagaagacagtgggcagacactgaagcttttagttcacaccagggtagcagaagtcagct

SEQ ID NO: 457445 - DNA, 122 bp, Homo sapiens
aaacgacggcgaccctcaagcgctgtggattttcgggtacggctccctggtgtggaggcccgacttcgcctacagcgacagccgtgtgggcttcgtgcgcggctacagccgccgtttctggc

SEQ ID NO: 457446 - DNA, 122 bp, Homo sapiens
gatatccggaggacccggaaacggaccttcccctgggagagagactgaaacaccatgccccgccagtggcccaccccagccccacccagttggcaggaccacggttacctcgatctggggca

SEQ ID NO: 457447 - DNA, 122 bp, Homo sapiens
catccggcgtatatcggtcacccagcagggtgtcaggcagtgttgtaggtgctggagatacggcagagaacaaaacaaagtccctgttcccgtggagtttacgttctaggagcgggtatatg

SEQ ID NO: 457448 - DNA, 122 bp, Homo sapiens
agctctcagcaatatttacagcaccactcttaatacacaccagatggttcgcgactgtgccgcctcagccagctcactcctcgattttactcggcggcactttgttgcaattacgctccatg

SEQ ID NO: 457449 - DNA, 122 bp, Homo sapiens
tgacaccccgggcctcgatgatggcagacaggagctgctgctgctgctggcgcagggtgtcggcgatgagcagcggcagggagttgaagctggcggtgagatgctccagcttcgactccagg

SEQ ID NO: 457450 - DNA, 122 bp, Homo sapiens
cttccggaacggacccggaaggggcaggtcttgtgggcgggtccaatcggctgggagcctcgtggaggctgaggtgagtcctggaggtgcgtggttggggcggagagcattatctgcggctc

SEQ ID NO: 457451 - DNA, 122 bp, Homo sapiens
tgccttgccagtcctccccgccagcggggccgagagcccggcgactcttgcgtgaccgagcgggctccgctgcctacggcagcccacccccagcccctgctctgaggcaccgagaaacgagg

SEQ ID NO: 457452 - DNA, 122 bp, Homo sapiens
gtagcgtgcagggtgatgttgagctctattctgcagttcgatcaacatgcttctacctctcggccctcacatagcagcctgcctggctgccatctgccaagcttttgctttcctttctgttt

SEQ ID NO: 457453 - DNA, 122 bp, Homo sapiens
gtctcaaaaaaaaaaaagtcatatcactttataggactatgttatatgggactgtccacacgcattacaagatatatagcatcccttcttccataagtgccaggaaccacctttgccatcac

SEQ ID NO: 457454 - DNA, 122 bp, Homo sapiens
gtgcggcgcgggacagcgcgacggggtgggtgggggacctgctgccgggagatgcggcggcggccgcgcggctgactgcgactcgggagctccgggagcggcccgcgcaggtaagtttctcc

SEQ ID NO: 457455 - DNA, 122 bp, Homo sapiens
gtgaccggccaactttcgggctcactttcgagctctgtggtacaccaccattctcagattcgacgtctaactcaggagacgctgaccttcgaatcgaagggaattcggagagtcttggtata

SEQ ID NO: 457456 - DNA, 122 bp, Homo sapiens
cgacgacagcaacggggttggtgccggccagaagggccggggactgggagttggcagtcacggaggaattgtgcagcggcagagccggggcgccggggggattggaggaggccggagctgcc

SEQ ID NO: 457457 - DNA, 122 bp, Homo sapiens
cttgaacccgggcggcagaggtggcagtgagctgagattgtgcctctgcacttcagcctgcgtgacagagtgagactctgtctcaaacaaaaaaaccaaaaaagaaaaaaattaaaaaagca

SEQ ID NO: 457458 - DNA, 122 bp, Homo sapiens
cacggacactgcccctccctcagtaaaactctctgttaacactaggaaaacagtcactgacgcctgacgaccatggctgtactcaaccacctctgaggggtgacgtggctccctgggcccct

SEQ ID NO: 457459 - DNA, 122 bp, Homo sapiens
ccccaggcaggccaaaccccgaggggcaagtcccgtgaggcccagaggcctgagagctgccgctgtggctccatgctccacctctcgtccactggggaggccccgcgcccaccgctggcaga

SEQ ID NO: 457460 - DNA, 122 bp, Homo sapiens
ccaccaaatatagcagagagggccagaaggacaagaaccaaagacaccctctgggcctggcgctcccagagccagctgtgaccttgctgagcgcagtttcagaggagcgtggagggcaaggt

SEQ ID NO: 457461 - DNA, 122 bp, Homo sapiens
ggggagttcgcgctccaatgcaatccccactccccgctaagggactccacggtctgcacccgctcgccggtccgacctctaagcccaccctttggacgagcctgacccatttcctcccgcgc

SEQ ID NO: 457462 - DNA, 122 bp, Homo sapiens
gctggggcggggggctgctggccccgctcctgccctggatcctgcccgggttttcctcctcgccccaggagcgctcctcccagaacccgttcctggatccgctcccgggttttgtgcccccc

SEQ ID NO: 457463 - DNA, 122 bp, Homo sapiens
taggcattttcccagagctgtgaccttaggtagaaaacccacagtcactgtggaaagtggcgtggcagggaggcagctgggggatgaataccccaatctctctctctctctttttttgtttt

SEQ ID NO: 457464 - DNA, 122 bp, Homo sapiens
atgaaatgagagaagactacccgagggtgtaatcaaaggagcagtcctaatacgatgagccggtattctttgaatgaatgaatacatggttaaaggcaggtgataaaggcgatatggttggc

SEQ ID NO: 457465 - DNA, 122 bp, Homo sapiens
tttcccgttcctatttctaaaacgccattcggttagaaactctcacgtcacctctgacaccggtgcagtcttagaaaataagctcctctatactgtgtggggctactggggaagggaaggga

SEQ ID NO: 457466 - DNA, 122 bp, Homo sapiens
tgggagctccggcctccggtcaaggcctggccgggagcgccacgaattctcgcgtcgtctcgcgagagtccaagttaaagaacatggcgacgtctaatctgttaaaggtaagaccctcactc

SEQ ID NO: 457467 - DNA, 122 bp, Homo sapiens
ctgtttttgttttttgtttttttccccccaggcaagggcctctaaccctggggctacagacgggaatcataaagaaaaaagcggtgagtgggcgaactacaattcccaaaaggccacaaagg

SEQ ID NO: 457468 - DNA, 122 bp, Homo sapiens
gcgccgcggccgacggaaaatgtcccctccccgcccttcctcattgccattcactcagggcgacatttacaattcttctgccattatgtccgaccagggcctctgagcctctgtcacgacct

SEQ ID NO: 457469 - DNA, 122 bp, Homo sapiens
ctggtcgaggacccattaggatccccgatgctaaggtcatcacagagaggcaagagaacgcgttcacaagcaggactcgatgcaggcggccgaaactctggtctgcgtaccatttgggcatc

SEQ ID NO: 457470 - DNA, 122 bp, Homo sapiens
tctagtaaatgtctctggtaagattagggttaaactaaacagggtgttgcatgcaaatgtcgtgttcctgtggagcctttgaaaactcctagttgactcaaagttctctcgagtctgaaccc

SEQ ID NO: 457471 - DNA, 122 bp, Homo sapiens
gccgaggcactcgccaatcctggtgaagcggccccgtgagttggccctggttggtggagccggcactgagcccccctcctgctccggccgagcccccccgccgggagggggcgtggccgcgg

SEQ ID NO: 457472 - DNA, 122 bp, Homo sapiens
ccattgggatctctgatgatgacggggggagagcagcttcgttgcgggagagagcagcttcgttgggtaggagagcagccacgcagggtggaaagcacaatcacagcaaagtcagaacacag

SEQ ID NO: 457473 - DNA, 122 bp, Homo sapiens
acatgagtttgggcagggacaaatatccaaactatatcaggcttttccataaccactaaccgggtatcttgtaactctgcccacccaattccaggttccacccgcatcgtatcagtggctag

SEQ ID NO: 457474 - DNA, 122 bp, Homo sapiens
tcaaattcacccacccatcatcgctgtagtcatgatactgctggtatgggtatccataatcgccatactggccccaggccatggtgactaggggcagaagtacccagagaagactgaggtcc

SEQ ID NO: 457475 - DNA, 122 bp, Homo sapiens
caagtacgccatcgccatcccttgggcggctctagggctgcgggggctcgggggtggggccgggtctcgggggcggggcctagctcggtctgcgggggctcgggggtggggccgggtctcgg

SEQ ID NO: 457476 - DNA, 122 bp, Homo sapiens
tcctagttgccttgagaggtgccgcggggtagtgcacccgcatttcctcgtttcattgagcggtgcccgcggggtagtgcactcgcatttcctagttgccttgagaggtgccgcggggtagt

SEQ ID NO: 457477 - DNA, 122 bp, Homo sapiens
ttttagggcctcccttctggcagatagggcagggagaagggaaaggaaaggcctgggacacgtggtttggatcactggctgtggctcacagttctgatgtgtgtgcagtttagggaaggagg

SEQ ID NO: 457478 - DNA, 122 bp, Homo sapiens
atttcctggccgtgctgctgactcagcctccagcactccttggtggagctgcagggagcccgctgggaaagcgctgaatcctgtgcacaggaaaggcactgctggtgaagacaggtgagagg

SEQ ID NO: 457479 - DNA, 122 bp, Homo sapiens
gtacgcgcgtggcgtggcggtgggcgcgcagtgcgttctcggtgtggagggcagctgttccgcctgcgatgatttatactcacaggacaaggatgcggtttgtcaaacagtactgctacgga

SEQ ID NO: 457480 - DNA, 122 bp, Homo sapiens
gctattgtcctgcccgtaagttcccgttttgtgtgtggtgagtggaaactccatgttcttcgttggagacctctggtcctcccttcccttctttgtgccgtcgtctctgcggccagccctaa

SEQ ID NO: 457481 - DNA, 122 bp, Homo sapiens
cttcttggaagctacgacaaagcacaggcaccctggtgaatgtggcttttcagaagtactcgaaggatacttaatgtgagatgtaaaggagacgcacttggagggaccagaggctggtcttt

SEQ ID NO: 457482 - DNA, 122 bp, Homo sapiens
tgcaggtgagccacgaactgtcgcatgtacggctggaggtctgtcaaggtagagacctgccggcagaggagagggcatgagccacaaatgtggcctgccccggccagagctgggcacttgtt

SEQ ID NO: 457483 - DNA, 122 bp, Homo sapiens
gcgctcggagcccggaggcctgccccggagggggaaacgcggcggggcggccatgggccccggggtcctgccccaggtttgcttctcatttgtgctccatccaacaagagctcgtattccgt

SEQ ID NO: 457484 - DNA, 122 bp, Homo sapiens
tgcccccagaggggctgcttcacccatctggggggctaactacccaacggaggcagggaacgctagcctcccctagctccagcgaggactaaggacctgagtagctggaaacctgacttcac

SEQ ID NO: 457485 - DNA, 122 bp, Homo sapiens
tagggggtcatcagccagaggatgagcacccaaaagacccacaggacaaaaatctgccagcgcttcatgtctggcccaggcggtggctcccgtggtgggccgtagactggcttctctacctg

SEQ ID NO: 457486 - DNA, 122 bp, Homo sapiens
ataaaccctgaaaccacgacgctgagttaaagaagccggacaaaggaggccaggtagtgtcgtgcctgtctacaggacacgtccacagaagtggacaaatctacagagacaggaagaagatt

SEQ ID NO: 457487 - DNA, 122 bp, Homo sapiens
gggaatgtcagcaggggcacaaggagagcagtcgatgcgtctggactcataaattgctcacgttacatccaatatgcagtgtatgatatgacgtgtcatggaggtgtctgcaaaggcaccac

SEQ ID NO: 457488 - DNA, 122 bp, Homo sapiens
tcctgtcggagccgcaccttgggctgcgaggctgcggtgtcttcccgcttccgccagcctcgctccaaaggcagcatcaggtggctgggctcaagctcactgcggtccagggccctgccagt

SEQ ID NO: 457489 - DNA, 122 bp, Homo sapiens
gcttccctggcctccgctcctcctccgcccgggcccctttctccctgggcccctcgatctcgcgccgcagactgcgagcctctttttaatggcacggtaccttaaaaccagtgataaggttc

SEQ ID NO: 457490 - DNA, 122 bp, Homo sapiens
accatgcactgccacgccgagctgaggctgagctcgcccggccagctcaaagcagccaggcggcgctacaagactttcatgatcgacgagatcctctccaaggagacctgcgattactttga

SEQ ID NO: 457491 - DNA, 122 bp, Homo sapiens
gcgacgacgtgcggaacaacaggacgtcataaggtgtcgccgccgcctttgggagcgatgcgaaacgccgcgcttgccggagatagcattgagggcccttccgcggcccggcgtttcgtctc

SEQ ID NO: 457492 - DNA, 122 bp, Homo sapiens
gggcagcctcccctcagagttggggaaacgtggcccagttcccgccagtcaccaccctgccggctgccacggggacacgtggcctggttcctgctggtcaccaccccgccagccacatcttg

SEQ ID NO: 457493 - DNA, 122 bp, Homo sapiens
ctcaatggagtcacacctcggatcattctcccagtgttccagagaaggaaatgggtgatccgagacaggacgtgactgaccaagatcacaaagccagctctagggaactccagtgtctagag

SEQ ID NO: 457494 - DNA, 122 bp, Homo sapiens
gtcagtgggctgcagggccgggggtaaggggtctaactcctactgcttcccaaccctccgcgtcagacagcacccccttctccaaacaaccccggctttgtcccctggagccctaaataaca

SEQ ID NO: 457495 - DNA, 122 bp, Homo sapiens
tagtcgaatttgaaaacaggttgaggcaggaaacaacgaagacaaagccagagttggaaccggccctaggaatcctgcccgggacctcgcagccctgcctcccagcccgtgcgactgccctg

SEQ ID NO: 457496 - DNA, 122 bp, Homo sapiens
gctccggatccctgtgtggctccaggcgctgcaggaggcgtcggggctgggagcctggggcgccaggtgcggccgagatcccggctccgcccccgccgccggggccgcccccttaacccttt

SEQ ID NO: 457497 - DNA, 122 bp, Homo sapiens
gacgcgccttcgcgggctgtcggcttagctcgtgaccccctaggagaaaactgaggctcccgggaccagaacagatgagtttggagaggagggaacttgaacttgggtccaatgctcgatgg

SEQ ID NO: 457498 - DNA, 122 bp, Homo sapiens
ccaggctactaccgcaggtaccaagacagtggcaccgcccgcgcctccggaacaggaaaccgagggaattaaaaagcaaacctgagaaagctgggccaagggagggaaaactcttcagccca

SEQ ID NO: 457499 - DNA, 122 bp, Homo sapiens
ccatcccattttacagagggggaaactgagtctcagagaagtgcacacccaaggccacagcgtgactcagagacaagactgagagctaaattttgtcttggttcagaggcaagcttgggagc

SEQ ID NO: 457500 - DNA, 122 bp, Homo sapiens
aatatccaataaccagagtgcaggaaggagctcgcccttggaaaagctgtggtcagaatccgtctgtctggctctgcagggcccgatacccagggcttccgctgtcactcagacatgggggg

SEQ ID NO: 457501 - DNA, 122 bp, Homo sapiens
tccaagtggcgataccgcgccactctgggcgatctgattggttcgtttaggcatggaaggcgggaacaaccagaaaagctgcgctctggttggagttatgtcctaatattaaattcgaagaa

SEQ ID NO: 457502 - DNA, 122 bp, Homo sapiens
gcacctagagttccccttcctcttcactgagagctgcggcggaggctttagaccgaggagcgagatctaaggttaaagaaagggcctctgagcccagtgttggccagagaccccacaggcgg

SEQ ID NO: 457503 - DNA, 122 bp, Homo sapiens
tcggacgcctccacctacagcaacgaatgcgagctgcagcgggcgcagtgcagccagcagcgccgcatccgcctgctcagccgcgggccgtgcggtgagcggggcggggccggtgcctgggg

SEQ ID NO: 457504 - DNA, 122 bp, Homo sapiens
taaataatgaagagagaaaacagctctgtcataatccaggaccatttgcaaattcatcaccgatattcttggggaaggaaagacagaggagatgacaaatatcccaccttgctaatatatct

SEQ ID NO: 457505 - DNA, 122 bp, Homo sapiens
gagttgggagggaaagaggttgggcactctgttgccattgaatttcccctctgctttcttcgcccccatggggggcagccatggaacggggggcagagtccaggcgggaggatctttctcgc

SEQ ID NO: 457506 - DNA, 122 bp, Homo sapiens
ctcgggggtccccagctgcctgcatggatgtcttcagctttgtgaagattgcaaagctttcgaggtaggggctgcgcgggttccgtttgcacccagggccgctgccgcgggcaacttggtgc

SEQ ID NO: 457507 - DNA, 122 bp, Homo sapiens
ccactccttccagaagcctcacgtgtgctttccctgtcctcgcttttccttccgtctgtgcgttcctttcgctgtctggtcacagttgcaatgactgttcccagttgctttcagctcactcc

SEQ ID NO: 457508 - DNA, 122 bp, Homo sapiens
gtttgatttttaccaaatctgcagccatgtggtgcctctggagcagtggtgcttccgtggcggcatccccggcctacctcatgccctccgtggactggtggcggtggttgcggtaaagctgg

SEQ ID NO: 457509 - DNA, 122 bp, Homo sapiens
gcaacatctggctggctagaggcaggctggaaaatactcaatctaaatagatggaggtgacgttgtgcagaaggaaagaaacatcccgagggagtgtccagtgggttttaatggccgtgtct

SEQ ID NO: 457510 - DNA, 122 bp, Homo sapiens
caggaatgcgcggctttgtctagggccgggtgggctgagcacctcctgctgcccggcctacgctccccggccagccgcgccgctcacgccccaacttgggcccgcgccccccagcccccgcc

SEQ ID NO: 457511 - DNA, 122 bp, Homo sapiens
tgcctgcccctttgttatccagagtggggccctgacttgcctgaagtcacacagggactccggtattccaatcctcggccttaagatcgctgctatccggttacttctatctaaaagcccta

SEQ ID NO: 457512 - DNA, 122 bp, Homo sapiens
aatcattggagggaaaaatgtcttcggttctctgtagcacactttttggcatagtatagccgatgaaactttgtaagcaagatagcaaatattgttacactatagtggctttcagaaattga

SEQ ID NO: 457513 - DNA, 122 bp, Homo sapiens
caaaaattagccgggcttggtggctcacatctgtaattccagctattcaggccgctgaggcgttgagaatcgcttgaacctgggaggtgggagttgcagtgagtggagatcatgccacctca

SEQ ID NO: 457514 - DNA, 122 bp, Homo sapiens
ctctccaacgcccctaccggaacctccccggaggccccagccccaaagccagggcgattgcgcctccctaactatgggtgaagaaaaatcaggtcctccctggagacccggcccgccgaggg

SEQ ID NO: 457515 - DNA, 122 bp, Homo sapiens
gtttgggctgtgtgcgcatgtgcaggtgcgggtgtgcgcatgcacatcgctggctgtgcgcggtcttgcagcgtgcttaggcaaacctcgcccccacctgggtccggggcctcagcatggtg

SEQ ID NO: 457516 - DNA, 122 bp, Homo sapiens
agtggctgactaccctggcttgggtccgaggcccagccatctttttctttaccaaaatggcggcggtactgaggcgcaatgagtgcgcgccgccaggagctcagcgcgcaggccccatgatg

SEQ ID NO: 457517 - DNA, 122 bp, Homo sapiens
tcctgcatccagcctgggcccagaaccatcgcaccatgagtctggccaagagggtgatgacgggactctggattttcaccatagtccttaccttaccaaatttcatcttctggactacaata

SEQ ID NO: 457518 - DNA, 122 bp, Homo sapiens
ttgctccccgcgccgccgccgccgccgcctccgccgctgctgccgcacctgccaccatgtcgccgccgccgggtcatgtctgactctctctggaccgcgctttctaatttctcgatgccctc

SEQ ID NO: 457519 - DNA, 122 bp, Homo sapiens
agaagggatgataaggcttagcacagttaagcaaattccttgagggtcaagtgtaagtctcgctgactcagaagtgagtatttatttttaagttgacgctatctcatctatactcttctact

SEQ ID NO: 457520 - DNA, 122 bp, Homo sapiens
tcatgcttccccctcgggaaatggcaccacatttgccaaaacactccagcccaaagcaaacgtgtcctcttcaattcctcccttctcctcgccccacatctccaacccactagccagtcctg

SEQ ID NO: 457521 - DNA, 122 bp, Homo sapiens
cactcgcactaccccccccgtgccacagaagcagtgtcagcagcctcgccacggtcttcacgtcatgcagaaatggtcattccatgttctatggccaccagattctgctgagagtgtcggga

SEQ ID NO: 457522 - DNA, 122 bp, Homo sapiens
attctgctatgacagttgggctccccggagggttaacctgggtgtcctcggcaaagttgtcgccgagccgggagcccgtgtaggggccgcggcgccgcggctcggggggcggccgggcggcc

SEQ ID NO: 457523 - DNA, 122 bp, Homo sapiens
cggacccagtcccctgtgagcgacacctggcaaagtttcacaaggtgggagacagcccaccgccggctttcaggaagtgcactgggcggtgaggactcgaacgagctcgtcccggggctggc

SEQ ID NO: 457524 - DNA, 122 bp, Homo sapiens
cccactgtacactgaagcggctcctaactttcttttttgagacggagttttgctctcttgcgcaggctgcagtgaagtggcgcgatctcggctcactgcaatctctgcctcccgggtttaag

SEQ ID NO: 457525 - DNA, 122 bp, Homo sapiens
aacaggacagggctggtttagaatgatttgaatgtgtaattacgcaatatagaatattttcgaaggaaaaatcacctgtatatgcaaataatgtgatttgattctacgccttgtgtaccata

SEQ ID NO: 457526 - DNA, 122 bp, Homo sapiens
cattatcaccatgctcggcgggaaccgctggacgagggcggcttgcgcccaccccctccgcgccccagacccctgccttgctcctgcgaaagtgccttctaggtgcttggtggtcagagacg

SEQ ID NO: 457527 - DNA, 122 bp, Homo sapiens
aactggaaaaccagatttgggagtaatcctcccagcaatgagacatgaaagagtgctgagcgataaacaaggcggctaatgacttaactacatttaaagacagagtaggaaaagagaatgag

SEQ ID NO: 457528 - DNA, 122 bp, Homo sapiens
gggtctctgttctgcggtgttcggtgccttaactggatgcccccgcatcccagagccagccggccatcttctgcagtgatgctgttccccgggggaacggagcccagccctgaagctcagcc

SEQ ID NO: 457529 - DNA, 122 bp, Homo sapiens
ccgccgccgcggcccggggctcggcggtccagtcttctgcccgtggcgcggctggagcggcggcgtcggcaacaggcaagcttaaaggaaaaggagatgatcgtgtcaatcgcccgcccgcg

SEQ ID NO: 457530 - DNA, 122 bp, Homo sapiens
tcttggagggattcagctcgatggcatggatgccgcagccctggtgggcctgggccagcccggcctccttgtcccgcatgagggggatgcgcgtgatgtggcctgactgcacgtccaccaca

SEQ ID NO: 457531 - DNA, 122 bp, Homo sapiens
cgcggagcggagggcgcggagcggaggggtcgccctcagtcctcggtcccgcccccagcccgcccccccgggcccgcccgacgcccccagccacctgcagaccgcggccctgggaggagggc

SEQ ID NO: 457532 - DNA, 122 bp, Homo sapiens
tgtagtacacaatatatctaaaccatcgcaacgacaaaatcaaagcaaggtcctttgcaccgaagggcctggggagatgtgggcgaagaccccaggacctttcccctgctcagagaccaaag

SEQ ID NO: 457533 - DNA, 122 bp, Homo sapiens
acatagtgaattgcataggtctaatgagtctggtgagtcagttgtttaatgaaaatgaatcgaattgagtaaagctccaagtgtatccactggagtaaatgaatgttctaaattctgtagaa

SEQ ID NO: 457534 - DNA, 122 bp, Homo sapiens
tctccatgcgggcggagtgacggttaactttatgtgtcagctcccctggccgtggggtgccgggttgaacgttatttctggggatgtccgagggtgttctggatgagattagcatttgaatc

SEQ ID NO: 457535 - DNA, 122 bp, Homo sapiens
ctcccgcagccggcctcctcactgctcttgcctccgggcatgggaacgatgccgtctgctcgtctgcctgagacgctttctactccactccgagagtaggaggtcagccggggccaaatgac

SEQ ID NO: 457536 - DNA, 122 bp, Homo sapiens
cagttgatggtgcgcttattagctgtcctgagcgcggggacaaactttctgtacctgggccgctgctgccaccctgcggccaagacctttctctaggccccgatgacccagagcagcccgga

SEQ ID NO: 457537 - DNA, 122 bp, Homo sapiens
aaagaaactgaaggatagatacctaatagtcagccaggaccaccctaaaaggtattcttccgacataattacacttaatgtagtgactgtcaatattttccatataacctttgaaatttctt

SEQ ID NO: 457538 - DNA, 122 bp, Homo sapiens
gcagggccgccgccgccatgttggagaatcgtgtgaccttctcgcggcgcggcccggttgcgtcatccgccgcttcggcctagagccgcgcaagcctgagaaaagccgctccaggagcgggg

SEQ ID NO: 457539 - DNA, 122 bp, Homo sapiens
gggttggcaaggctccaaagtggccttctgatgtgattggccaggttgtagaaagtgggccgccttgggaggtgcaccctcaaagaagaaatggaggaccgccatgtgaataaccgactttc

SEQ ID NO: 457540 - DNA, 122 bp, Homo sapiens
tccaggctggagtgcagtggcgcgatctcagctcactgcaagctcagcttcccggtttcacgccattctcctgggaggctcggaatgtttgaaggaatttttatgactgctactcactgcct

SEQ ID NO: 457541 - DNA, 122 bp, Homo sapiens
agaagccgccgcccttgaacaaggccgcaaggtggaggagctgcggtggcaggaggtggacgagagacagaccatgccccggccctacacgttccaggtgtcctccggagggaagcagattc

SEQ ID NO: 457542 - DNA, 122 bp, Homo sapiens
gcaggaagaaataatagatgagaacaacaaagagccgtgaaggcatcgaaacaccagcttcgagggagccgcttgagagagcagccctcgggaaggctcccccaccatgtcgcctgttgctg

SEQ ID NO: 457543 - DNA, 122 bp, Homo sapiens
agcttctcggtgctctgggggcggactcccctggccggacgatgggtttgaatctcaccccgtcccttcgctgggaaacaacactggcctctcaccttttctggtagtgattgcatactttt

SEQ ID NO: 457544 - DNA, 122 bp, Homo sapiens
cggcaaggcggcggcggccggcagaataggcgcggaggaaggctcaggcggggcagactgcgtgggggaaggaggaggagagagcagacggcggaggagggcagagcagccggggggagggc

SEQ ID NO: 457545 - DNA, 122 bp, Homo sapiens
ctgcagccgtctccgctccggtctgctcccacgccgccccaggccgtcctccagcgacagcgagctggagtggacgattccctgctgccttcgcatcccctgcccaggtcccctcaaaccta

SEQ ID NO: 457546 - DNA, 122 bp, Homo sapiens
cagggagaatctgagagctgtgcattttggtaaaataagctggcaggaggagtcatgggacgagcctgcaaggccattcaaaaccactgctttgttctctggagactccaagtgaccagcga

SEQ ID NO: 457547 - DNA, 122 bp, Homo sapiens
aaacaagccagtcatcttgctgaaagagaggtgagagaatttgggagcaatcctggggcccgtggacctgaggtcccaaacaaccacggaatgtagaaactcagtttcgttttccccaaatg

SEQ ID NO: 457548 - DNA, 122 bp, Homo sapiens
agcagcagccacgccgctgagacggagcaacggccgagcatacgcagccgcactcaccaccgctggtacaggtagaccagaaacaccacgtcgtcccggaagcaggccagccggtgagacgt

SEQ ID NO: 457549 - DNA, 122 bp, Homo sapiens
taactgttgcagccagcggaggtgggaggcgacactgagtctccagtcccgagaggtgcccgagggaaaaggaggcggcagctaaactggtcctggagagaagccccttccgcccctctcct

SEQ ID NO: 457550 - DNA, 122 bp, Homo sapiens
ttctatttaaccaggacgccgattcgggctacaatgcgtggctttcgtatgaattgcagccggcggcggtaagttaaattctattaaatcaataggatattagttccaggcatattttataa

SEQ ID NO: 457551 - DNA, 122 bp, Homo sapiens
acctcgtgggccgccttgctttgaatgaagtttcagcttgcagggcgcatccccgcggcgcgtggacccgagagcttggcgagtaaacgattgggaaatagtaaaacctgccagctctcttg

SEQ ID NO: 457552 - DNA, 122 bp, Homo sapiens
cgtgctggtttcaaatggttggttgcaggtccctttcaaaaatgggcatttccaattctgcgtcaacatcattgtttacacagctgcagagagcacattcttccaggagcaccttcagggct

SEQ ID NO: 457553 - DNA, 122 bp, Homo sapiens
gcaccagaggccccgacaacttgggctgcaggacatgagcgcagggacgggctcctcgggcgagcccagggctgagccgccaaccaggacacacggcagcagaggcaatggcaagaagcggc

SEQ ID NO: 457554 - DNA, 122 bp, Homo sapiens
atgatgagaaaggatggaggcactggagagagctctaccaagattctgtcccaaggaagtcgttctttctctcatttccttccaagtttttggcacttcctccctattcatttctccaatcc

SEQ ID NO: 457555 - DNA, 122 bp, Homo sapiens
gagacttagactgatcagcagttctcaatctgaatgtgatgacagagtagcagaggtggccgaatatagaatcctcaaaattaacttacaaccaaaggctggtatctgtcagtagctttaca

SEQ ID NO: 457556 - DNA, 122 bp, Homo sapiens
gatctgccttcacctcacccagctctgggcctgtgcgctctttctctgccaggctcggcccgcccacaggagccgggagccctcaccaaggagaacaggacttgggtgactgctgtgactcc

SEQ ID NO: 457557 - DNA, 122 bp, Homo sapiens
ggtgcttcccgggcacttagcgcattgccctcgaggaacgcttatcgaattgaacataaccgacaggactccaggatttggagccattcctgagctcattgcaagtaggagatgggacagtg

SEQ ID NO: 457558 - DNA, 122 bp, Homo sapiens
ccataaggtgtggttgattgcagaaggacaatgatctcactaactaagtggccagaaacccgagacctggctcccaccggggccatgggaagtcacacatctctcctggctgtagtggcctc

SEQ ID NO: 457559 - DNA, 122 bp, Homo sapiens
cccatggccccgcccccccggctcaggcgactccttgagccctgccccctgtggaacgcacgtcagcatccgaacgcgggctggaccattctccccgccttggtcccggggcaatggccctc

SEQ ID NO: 457560 - DNA, 122 bp, Homo sapiens
ggacccaataacctttcaaaacgcaaactgctgcctgcggtgagggcccagggtcttccacggagaggacaggcatcttcctttcccaccaggaaggagtgagcccggagcctctgctatgt

SEQ ID NO: 457561 - DNA, 122 bp, Homo sapiens
cgtctaacgagagctgatggttttaaaagtggcagttttgctcatgctcacttccccttccgccatgattgtaagtttcctgaggtcccccgagtcatgtggaactgtgagtccattaaacc

SEQ ID NO: 457562 - DNA, 122 bp, Homo sapiens
ccaaaaacaaaggggggttaaggcaagaatgtagactaaatgctgtgaggattagggtaacgcgagccctcaagacgtctcggagaccgcctacagggctgcaaataccagggtccattttt

SEQ ID NO: 457563 - DNA, 122 bp, Homo sapiens
gatattactcccaataaagcagtgggcatacatcaccgctttgttattgtctctaatatccggggccgggggagggggggagaggataacattccctcaaatttagcaggtggtttgacgcc

SEQ ID NO: 457564 - DNA, 122 bp, Homo sapiens
ttcttttttctttttttttagacggagtcttgctctgttgctcagtccggagtcctgtggcgcgatctcggctcactgtaagctccgcctccctgggttcacgccattctcctgcctcaggc

SEQ ID NO: 457565 - DNA, 122 bp, Homo sapiens
ttggggaggtggtgctagaactgatgcgcaagcgcagagaggcggatgccaggctgtatgcgcaggcgcagtttgagggacccagcgccgcttggagctcgggcgtctggctcggagatact

SEQ ID NO: 457566 - DNA, 122 bp, Homo sapiens
tgggcctcctaacacacggagcacactcctcgcctctctggctggaccgacccacggctgcgtgtgtttaattgtccgaaacagaggtgaatcatccgctgtgagcgggacgcatgtgcgtc

SEQ ID NO: 457567 - DNA, 122 bp, Homo sapiens
tgccctcagcctgagtcggcggcggctgcgggaactttcccagcggatctaatggctgcgcgcgggccgctgtgaggcgcggcggcgagcgacgggcgcggggccgcggagcagcgagcgag

SEQ ID NO: 457568 - DNA, 122 bp, Homo sapiens
acgtcaaaccacagaaaggcaattatagctagcatttggccaaataccatagatctcttccgagcttttgagatagaagaggtggagctggccttacgaatcatttttctgactcaaagccc

SEQ ID NO: 457569 - DNA, 122 bp, Homo sapiens
gggaagtaccacacggggcaagaacagaggcccaggaagccgggcagggggacagctgggcgtggtggggcaggcaggcgggtgaccatggctgtggctgcgttctccccatgtttcctgtg

SEQ ID NO: 457570 - DNA, 122 bp, Homo sapiens
ccctccagcattcacatcaacacagatcttaagtctgataagaaacatttacaggccgggcgtggtggctcacgcctgtactcccagcactttgggaggccgaggtgggtggatgacgaagt

SEQ ID NO: 457571 - DNA, 122 bp, Homo sapiens
gcccgaccccgggacttcctgtacgtgggggtgatgaccgcgcagaagtacctgggcagccgcgcgctggccgcgcagcggacctgggcgcgtttcatcccgggccgcgtggagttcttttc

SEQ ID NO: 457572 - DNA, 122 bp, Homo sapiens
ttctgattgaactctgactaatataatacatgggatcatgttagaaagggattagtttatcgtatctttgatcttgaatttgtgctgaaagtgcctcagtcaagaccatcaaacctcacccc

SEQ ID NO: 457573 - DNA, 122 bp, Homo sapiens
gaccgcacttgcccggcaggagggcggacaatgacccgggttttccaccgactccagatgcgtccctcctcctacccctccaccttctctacctcggagaagccattgcgcttgcctccgcc

SEQ ID NO: 457574 - DNA, 122 bp, Homo sapiens
taaaaatgagaggagcctctaacataggcaaaaactttcctccaaacagacaaacaaaagcgtataatcaatgaagaaataaaaatcagaataacctcattttcttcacagtacaaaatact

SEQ ID NO: 457575 - DNA, 122 bp, Homo sapiens
tggaaatttccactgttcttttcatatccattgacataaatgactaagcagtttaagtggcgtatgcacagaacccactataaagtgagtcttttaccattagttttactaataaaatgttt

SEQ ID NO: 457576 - DNA, 122 bp, Homo sapiens
gacctctgcgaggtcacaatccagggtggctgcaagaccaacagtagcaccccccacccccgaccaatgaagtccagaggagcagagaaagtgctggcagacacagaggatggagcaactca

SEQ ID NO: 457577 - DNA, 122 bp, Homo sapiens
cagccagtcaggagcacaaggcgcaggcgcaaggcaacctttgccctttaactggcgcggcgccttctcaccccacccctccagcccaggcttcacctccagccactcagttgtcttctaag

SEQ ID NO: 457578 - DNA, 122 bp, Homo sapiens
cacccggacccaggcccatttaaagccccacagcgtcgggccacgatcaatatatcagcccgaagctagctgcctccttctggaagtctttgggtattggaaataactggtcctggcttggg

SEQ ID NO: 457579 - DNA, 122 bp, Homo sapiens
ctggaggaccaaactttgagtagcaacactggagacagttggatgataaactggttttgccggtagcaccaggtacctaatatactaacacaataatggcaatgttgctaacacctgttcag

SEQ ID NO: 457580 - DNA, 122 bp, Homo sapiens
caaattcaatagacccagttcttaacctgagtcatgttacccttagtcacacacatgacacgattgcattccttggcttactaaagcaggaaatggaccagtggcttggggtttcctgactg

SEQ ID NO: 457581 - DNA, 122 bp, Homo sapiens
tttcagattcttcgctgctgctgccttaccgccgagaaccaccacccgccaggcgtcttgcggccacacccctggcgggttcaggcaggctacgcccacgcgacccctcccgtttccctgct

SEQ ID NO: 457582 - DNA, 122 bp, Homo sapiens
gcttctttctttttgccctggcacccagcatagtgcctggtgcatgtgaatgataaatcacgcgtgtcgaatgcatgagtcagtgggggaatgaatggaaaagcactgcttggacagcacaa

SEQ ID NO: 457583 - DNA, 122 bp, Homo sapiens
gaggcccgagtcacgaagcggtagatcatcaccttcttgttctggccgatgcggtgggcgcggctgaaggcctggggagacctgcacctcagcacccgtggctcacccagggctccaggcaa

SEQ ID NO: 457584 - DNA, 122 bp, Homo sapiens
aggtggtgatgggagcccagctgtggtaagttcagagttctgggcgcctgtcccatgtagcgggagactttgtccaggcaacgggactcaggttgggcaactgccagccttccctcccagcc

SEQ ID NO: 457585 - DNA, 122 bp, Homo sapiens
cttcccttgccgcctagcatggctccccgcatgcctgcagccgcgcgcactcccctctaacgagcctgtcctgcccttcagtggaggctgggttttgggtcaggctgctctggagtccttcc

SEQ ID NO: 457586 - DNA, 122 bp, Homo sapiens
acaacccggtcctgtcgaccaatcacgaccgcacagcgggacggagtgacaggccacttacgacggtaggcggggcttagcgcttcaccctttaacaaaacccaaacaaaccaaacggcgac

SEQ ID NO: 457587 - DNA, 122 bp, Homo sapiens
tactaatttcacgagctttaataggattgaatgtgagcccagcgcttggcacagggcaagcgccccataaaatggcagttaggattaaaatcgaggttgccgggggacccccaggcaggagc

SEQ ID NO: 457588 - DNA, 122 bp, Homo sapiens
ttgttttatgcagataaaggaagggcccgaatggcctaggtacacacattcccacaggaacgcgcacaggcactacctcggacagctaaccagtagggtgggaccttgataccccatagcat

SEQ ID NO: 457589 - DNA, 122 bp, Homo sapiens
gctgcgaagcccggccccggactgcgcgcatgcgcccgtctttcatacctgcactccggacgcgcccttcgggtctgcactgacaatgacttgcttgcatcctttgtggacaccttatttcc

SEQ ID NO: 457590 - DNA, 122 bp, Homo sapiens
actccacctctgaaccttcctgtgtgttcttaatcctatcagcttcctctcagctgggatcgcgccgcgtcaacttccgggcggatgcccgccagcacggcctccgccgctccccttctttg

SEQ ID NO: 457591 - DNA, 122 bp, Homo sapiens
gctccccacatggggctgcacccccatcccacaggtgagctgagcctgctggctgggacccgggcctgccacctctgtcccacctgtgcccacacgcccgggagctgccccacctgcccccg

SEQ ID NO: 457592 - DNA, 122 bp, Homo sapiens
aacatcgtcaatctggcagtagctaatttaaatagcacctgatgttgcaacgcctcccttcgtttccccagccaatcagatccaggcttcggctgacagatggtcccataaatggatgtaaa

SEQ ID NO: 457593 - DNA, 122 bp, Homo sapiens
cctcctgtgggcaagcatgcctttcctttcttctctctccagttctaggctttgtctccccgcccaccgcccccctgcccccccacccccccactgcccccctgccccccacccccccaccg

SEQ ID NO: 457594 - DNA, 122 bp, Homo sapiens
actcagctgctgtagagaggctctccttactatcaaacacctgcttgctaaaagcatccacgaacatgcccatggctgatcttgcccagaccacaaaggcagagtagcagccgctgtcagtg

SEQ ID NO: 457595 - DNA, 122 bp, Homo sapiens
accgccgctctgattggcccggcgcttgtctcttctctccccgcagccaatcgcgccgggcgaggagctcctggtctggtacaatggggaagacaaccctgagatagcagctgcgattgagg

SEQ ID NO: 457596 - DNA, 122 bp, Homo sapiens
ggaaagctccccaagggcaaggcctgcctctgcgtcactcactgtcagatcctcatagcccggggctggtccagcacgtggccaccattccctaagtattggatttgcttcatcagtgctga

SEQ ID NO: 457597 - DNA, 122 bp, Homo sapiens
cccagcgcgcccagatgccgggcaggacccctccgcccgctgctggaacaccaatagcagcgttggagcctctgggccggaggaactggggcctccaccgacacctgcttcttccctcacct

SEQ ID NO: 457598 - DNA, 122 bp, Homo sapiens
ggcagacgtttcatcacaacacagagacagacaggagcccgccctgctttaatgcgcatgcgggggagccgagaggcggggctgctggcgggggagccgagaggcggggctgctggcggggg

SEQ ID NO: 457599 - DNA, 122 bp, Homo sapiens
cctttcctgcctccttcccgcccggcgctgggccttgcgcagggcccggacgcccccaagcggccacctctctgcagctgacgcttccggctacaggctggcgtcactagcgagcgccctgc

SEQ ID NO: 457600 - DNA, 122 bp, Homo sapiens
ttagaaatctggacttgactcagaagaaattccgtgtaactccattgtattctagtcatccgatgaaggaaaattcaaaccagccaccgccttcaacatgttttttatttgtgtgtgatgta

SEQ ID NO: 457601 - DNA, 122 bp, Homo sapiens
gatagtaacttgcagtttcagagcacatgcacactgtcagggctagcctgcctgcttacgcgcgctgcggattgttgctccgttgtacctgctggggaattcacctcgttactgcttgatat

SEQ ID NO: 457602 - DNA, 122 bp, Homo sapiens
ggtgtatatgctgtgcttcagtgtgtagtcaggacaccatggggaacatgttaacctccccgccccaactaccaccggccagcagatgggtctccccagctgaggccattttctccaccgct

SEQ ID NO: 457603 - DNA, 122 bp, Homo sapiens
ctggacccctctctgtggctccctccacatttacccttcagatcaataatgctctcggagcggctggagctcaactgcagcggcgagcggcgagccaatgggggcccaggattccctcctgt

SEQ ID NO: 457604 - DNA, 122 bp, Homo sapiens
atgtgctgcacctcctctggctgctggtatttatacctaattgaagtctcctgaggattacgtattttcacaagttttttaagatgagatggtgacagataggcagggatgatagtttgtat

SEQ ID NO: 457605 - DNA, 122 bp, Homo sapiens
gtgcggggtggggagtctggcatctctgggcccagcctggaagggtgctggactggctggcgggtgacacacctggggttcctgggcccctcctggccacactgtcagtgggcctcaagctc

SEQ ID NO: 457606 - DNA, 122 bp, Homo sapiens
atcctaagtgcagccaccatgtctctcctcgtggttccacgatggctacccctactccaccgatcttgtcacaccacagcgaccaaacaggaagcaagggggactgctgctctggccaaggg

SEQ ID NO: 457607 - DNA, 122 bp, Homo sapiens
aaggtgtccaagtacctgtatcacagccgcctacgcccacctagtggccagtcccagagccgcatggcagacagcttaaatgacttcaggagagccctgggcctgtgctggctgctccttcc

SEQ ID NO: 457608 - DNA, 122 bp, Homo sapiens
ctctgtttcccccaagtgaggtggggatggttagcagccatacctgcctcactcccagaccgtggtggcactgtggatggcatgaagtgggcaccacagtgcatggggttggcagttatatt

SEQ ID NO: 457609 - DNA, 122 bp, Homo sapiens
gagtgccctgcactggatctgacgcctgggttaggggcgcagcccccctcgggttaaccacggtctcctgttcctcagatgttaccaggaagagacagagaccactcctaggacattctggg

SEQ ID NO: 457610 - DNA, 122 bp, Homo sapiens
ttgaataaaattttaggcttatagaaaagttgtaaaaacagtccaaagaatccacatatacgctttcctcaggttccccaaatcaaacccaagttttagagtgtgataatttacttacattt

SEQ ID NO: 457611 - DNA, 122 bp, Homo sapiens
cagagccttcagcactgcccatgagggtctcacctgctttgttctgttgggatctcggggcggcggggatccagcaaagccttaggaagggaaagaattgctccagaaggtagtccaactac

SEQ ID NO: 457612 - DNA, 122 bp, Homo sapiens
ggtctttcgagcctcagcgggcgggcggggatccgtggcgaaagtgcagctcagtagcgccgcggcgccacgtttaccctgcgcagacgccgtcgccgccgctgctgccgccgccgctgcca

SEQ ID NO: 457613 - DNA, 122 bp, Homo sapiens
atagccaatgccaggcaacctgagatgaaacaaggaacgattcctatcagactgagttcccggaaggcaaagaaaagccaggcttctccaccccaagcgtcctagcctagctcggtctagaa

SEQ ID NO: 457614 - DNA, 122 bp, Homo sapiens
gtgttggtgtgtgcatgtgacgtgtgcacatgaatgtgcgcatgacctggtgtgtgtgcacgtgtgtgtgcatgcttgcagcccagtggctgtctcaggggacatgtcttcaagtgtgtggc

SEQ ID NO: 457615 - DNA, 122 bp, Homo sapiens
gaagacacggtctctcacgaaagggtctccagacagttccgctgctccgggagcagcccccggccccgcccccgcgtgcgcctggccccacccccaagcgctccatgaccagcctccacgtg

SEQ ID NO: 457616 - DNA, 122 bp, Homo sapiens
ggatccggcttcagcgccagccccacctcctcctccaccgcccgcgccacagttgggaaccgcggcccagacgtggcagcgccaacgcctccacctcgcctctgccccctcacgcagggccg

SEQ ID NO: 457617 - DNA, 122 bp, Homo sapiens
cgccgtgaagctctcgtgcgcggagtcggtgctgctctgggcggtgatggagatgcggggcggggcctggcttcccggcgggatggggggcggggcctttctgaagttgaaggctgtggccg

SEQ ID NO: 457618 - DNA, 122 bp, Homo sapiens
cagatggggtctctgactgaagccactccttagtgattcacggtgctagctttgcagcgtcgtgtggtgtttccagttgtcctaaaggaagttattaattttcattaactttaattctctca

SEQ ID NO: 457619 - DNA, 122 bp, Homo sapiens
ggtagattgcaaataacctgctttctttctgttcccgagctgccttcggacccgtcggatcgtaaatcccacgtaaggtacctgccgtcggaagatttgaactttctacttggacacctaat

SEQ ID NO: 457620 - DNA, 122 bp, Homo sapiens
ggcgggggcgcgggcgcggctggcggaggctgcggcggcggcggctggaggtgacatgctcgcgggcggcaggccgaggggctcacccgcggccggccccccggggctgggcccgcgcgcct

SEQ ID NO: 457621 - DNA, 122 bp, Homo sapiens
gcccaggctagccagccagccctccccggggaatgcaacgtccagaacagtctatagtcccgatagtatgcctcatgcgtgagacctgaccaaggacgtctgtgaacaaacccttcacagag

SEQ ID NO: 457622 - DNA, 122 bp, Homo sapiens
agctgtgacgtgctactgaggtaagagaaatgactttcaagcttttaagttgatgtcactcgcctattaaacatgagtgttaataacaatggcagctaccatcgcttgccaggcgttgtggt

SEQ ID NO: 457623 - DNA, 122 bp, Homo sapiens
ataatttgaagccaaaagttaaaatatcttatttcacaactgtaattgctggatgccctgcgcgcagttgtggagcagccctaactccaccaggccaagcctgaagcttcctgcggcgcgag

SEQ ID NO: 457624 - DNA, 122 bp, Homo sapiens
cgcagtgctatacataaaaggagcttagttcaaccatcctaggaaagaagtcgtcacaaacgctgtgctgtttagacaatcctgtggcccagaattgatattttccacttaaacttcccagt

SEQ ID NO: 457625 - DNA, 122 bp, Homo sapiens
tgacgatggagagctctctcctccgtacagttcacttcccagagctggggtcagggtcctcgccccgcacccgccacagaagacgcatctccctctgcgctgattcctggcggcgggtgggg

SEQ ID NO: 457626 - DNA, 122 bp, Homo sapiens
agcagcaatgaggaccatgaaagacacccattccacccctaggctctgtggtatgtggtgcgtgggagggaagaaacagccacctcttgagaaggctccagggaagcaggtttcagttttca

SEQ ID NO: 457627 - DNA, 122 bp, Homo sapiens
caaaaaagccgcgctcgctgatgacgtatctccgaagacctctgggaaatgcagttcgcgcggggctacccagaaagcactttcgaaaaagggtttccccttgagctaaactaatgcatggg

SEQ ID NO: 457628 - DNA, 122 bp, Homo sapiens
gcagccgctgcccctggaaggcatgccgacgtcagcttctcccgggaggcggaattcatgcgggccctagtctgagaaaggcacccgcagggtggacagcatgctgcccgccagcagtgtgg

SEQ ID NO: 457629 - DNA, 122 bp, Homo sapiens
atggagggcaacctgcagctgctgtacgtgctgctcacagactgctatgtctacctgctccggaaaggtgcccgccgcccccgggcagacagcgggttgtagacgaggctgactctcagccc

SEQ ID NO: 457630 - DNA, 122 bp, Homo sapiens
aggccactccccagaagcggcgcctgaccgccgcctccgctaccgcggaatccaagatggcggcttcagcagcccccagcatcccagcccctgcggcggggagaccccgcctatatagtagg

SEQ ID NO: 457631 - DNA, 122 bp, Homo sapiens
cggagaagcaagacagcaggacggcctgtctccaagtcatctttgcagaggtaggggctccgtccaggacccacaaggcagaccaggcgtcctgcaccctttgggtccccacttctgaggca

SEQ ID NO: 457632 - DNA, 122 bp, Homo sapiens
ccagaacttcacaacgatcaccgctagctccagggcgcgtcacagatgacgcagctctcccgcgcagcgcgctcagaagccgccatcccgtatcgctgagaatctactctgtgccaggcaca

SEQ ID NO: 457633 - DNA, 122 bp, Homo sapiens
ttcagaaataaaaactgttgctgacctctgcagactgtggatgctggcgatgcaagtactcgttgagcaggctgtcttgtgtgggtgacagtgtgtattcccacgagcagtcttggagaggc

SEQ ID NO: 457634 - DNA, 122 bp, Homo sapiens
cggggcggtgggcgattggcggtgcactgcagctcgggctgctctgcagcctggcggagacgggaggaggagcggagggagaagtaggttgcgagctcagcacaggctccggcgctggctcc

SEQ ID NO: 457635 - DNA, 122 bp, Homo sapiens
gtcctggtgcagacatccacctggagctgtggggcctggagtgcctgagaatgttccattcggggcccaagaggcccgccccccaccaccccattattcgctgcagagcacctgcttgggat

SEQ ID NO: 457636 - DNA, 122 bp, Homo sapiens
gttgcacacatgcccaaactctgaataaaaatagaactttcttagtctaagccttctttccgaagcatgctaggactgagatcactcccttccaggttctgaaatttattttttccagtttg

SEQ ID NO: 457637 - DNA, 122 bp, Homo sapiens
tgttttcctttactacaagggacttcagagaatgagttcatttctcttcagacatcctcacgttgctgtaaaacagcaccgggctgagtgaagagaaatgtcacaaggaatacaagaggacg

SEQ ID NO: 457638 - DNA, 122 bp, Homo sapiens
tcagagctgatgttcgggccacacgttctcttggggtgatccgttctgtgtcactggactcgccccccgcctcatttcctcactggcccagtagtaactgcagccactggaggcggataccc

SEQ ID NO: 457639 - DNA, 122 bp, Homo sapiens
gagcaaaagctcggttgtttgccacagtcctcccccatttttactgtcttacatctagatcgcctgcttttttctgttgcctgcttacaggctttgagttcgcagtttatgcacacatttgc

SEQ ID NO: 457640 - DNA, 122 bp, Homo sapiens
accttttataaattcagtctagaaggtagtaatttctaatatttagatgtcttagtagagcgtattatcatttaaagtgtattgttagccttaagaaagcagctgatagaagaactgaagtt

SEQ ID NO: 457641 - DNA, 122 bp, Homo sapiens
catcaggcatcagagtctcacgaggagcgcgtaacccggagccctcacacgcgcagttcacgacaggactcacactcccgtgagaatgtaacgccgcccctggtctgaccggagctctggcc

SEQ ID NO: 457642 - DNA, 122 bp, Homo sapiens
ttaagaagacctttacatttgtaaatattattattgacaggccacccatccaaactggaacggggaaaagcttttctaagaaaatggtgtcgaaacctgaatcacagaattaggcttgactg

SEQ ID NO: 457643 - DNA, 122 bp, Homo sapiens
tgaatgaatcctcactggcactgatacgattttaaaaatgtttaatttgcaggccaggcacggtggctcacacctgtaatcccagcactctgggaggccaaggctggcagatcacttgaacc

SEQ ID NO: 457644 - DNA, 122 bp, Homo sapiens
gggggtccagatggtccaggccctctccatggacctgtatgtgggggtggtctctggtttcggaggtctttgaacccctctgggggtggtcctggactgccgtcctcagtgagaggtcacag

SEQ ID NO: 457645 - DNA, 122 bp, Homo sapiens
ccttccaggctgtgggcctgttttccctgtgcaagatgagggtcctggctgtcctgaggacgctgtccgggcgccgccaggggtgaccgaattcagctctgctaggactgttgggaaatgag

SEQ ID NO: 457646 - DNA, 122 bp, Homo sapiens
ctgcctggtagatgagaaagataaaccatctagccatgtgacggaattagaacagcttctcgcagacagtaagcaccctctgggtttgggttttcctgaaactaagactaagacaagagctg

SEQ ID NO: 457647 - DNA, 122 bp, Homo sapiens
cgtatgggtttttatgtggatggggcctagggaattcctcccagcagccctgagggagcccgggcgtgatgttcccccacgtcccggaggagaaaacagggctaagagaggtcaggtgggat

SEQ ID NO: 457648 - DNA, 122 bp, Homo sapiens
aaatgataaagaagcagtcccttaagggaaacccaaatggaacatagtggccccagcccgcgcagagccccacaccaccgtgaggatgggcttggagttcctcttggacccggggcgcggtc

SEQ ID NO: 457649 - DNA, 122 bp, Homo sapiens
gcgtgagccaccgcaccctccaacacttttaagtttaaccagtaatatgaacattttctccgccactttcttaagtctagacgacttagcagttattaagcatttgctgatttgcgtggtgt

SEQ ID NO: 457650 - DNA, 122 bp, Homo sapiens
agggctggagctcgctgcccccatcccccacggcctgcggacgcccggccaaatctcagccgcagccgcagccgcagccacagccacaggcaccaccaccactgcagccgccaccgcccctg

SEQ ID NO: 457651 - DNA, 122 bp, Homo sapiens
ccaaagtggagcaagataacgtacacattcccattctttccatccatcattcattcttgccgtttgacagttgtgcatggcatgtgattgcttcagcctgaaacacaaagctttgtaagtca

SEQ ID NO: 457652 - DNA, 122 bp, Homo sapiens
tgcctattttgctgttatctgttttcccttcatcttttttgatccagcaacttaccatcacgcatcagctccattaccaattgtgaaagctctaatcatatagtcattcatataggttattt

SEQ ID NO: 457653 - DNA, 122 bp, Homo sapiens
tatcacccaggtggttgtggagtgatgcaatcatggctcattgcagcaaacttcctgcctcgttttaaatttttttaaattttttgatttttttttttttctagagacgaggtctcactatg

SEQ ID NO: 457654 - DNA, 122 bp, Homo sapiens
cggcagcaacatgtgtgcgccggctcccgttcagcatctgtcactgtctcctcctgcctccgcgcagccttgaatcggagctgcttatcagcagagtgtcagaaatccgcgctgccttctct

SEQ ID NO: 457655 - DNA, 122 bp, Homo sapiens
cgccatcttcccggaaatgccgttttgttccttctaggctgtcgaaaccatagagacgtccgcgggaaccaaaatcacggtttttccaggagaaaccattgcggagcccaatttgccggtat

SEQ ID NO: 457656 - DNA, 122 bp, Homo sapiens
gcctgtgtttttgaatatccagcagaacattagaaaatgttgcaggtcagttcactatgccggattgtctcacacattggaggagtgcttgcgtcattgtcaggaacttccccaaccatgga

SEQ ID NO: 457657 - DNA, 122 bp, Homo sapiens
tggggcggaggtgggggcgggggcgagtggggtgcaggtcgctcggggccacgcagcagtcggacgccggggacgcgccacgagccggttttgctgtgttgaacgtattccagaatacagtg

SEQ ID NO: 457658 - DNA, 122 bp, Homo sapiens
tacagtgagggacctaactattgtgggacaagtggtgccacactgtggcatccctagggacgtttcccttcccagatgctccctcctccagactctcggctgcttcaccaacacgacctctt

SEQ ID NO: 457659 - DNA, 122 bp, Homo sapiens
gactgaaggttcatttgtcttgtcagagttcaaaagggcacctgagttttatcccctgcccgccctcccttctttccctgcctttcaaaacaattctgcagcgccacttggatttcggcctc

SEQ ID NO: 457660 - DNA, 122 bp, Homo sapiens
ctttcaaaccctggggagccacagctgggtgccgactggactcactggcagagaggcaggcggtgaaggccaagcctcgccccccaggaaggccctgattggtggacgggctgctttgggca

SEQ ID NO: 457661 - DNA, 122 bp, Homo sapiens
tatctctcacctcggctgcaaagctccgactttatttaatcgcttccattgtctgctccacgcctggtaatctcagctgggaacacatgttaacaaatgggcaaagttttatcgggagctca

SEQ ID NO: 457662 - DNA, 122 bp, Homo sapiens
gagaagcttcaggacccggcttctccagggggcggggactgttcaaatagacaaaccacgcggccagtggcaggtgaaaacaggcttgggtccactcgggagaaccaatcggtcgtgagttc

SEQ ID NO: 457663 - DNA, 122 bp, Homo sapiens
gtgggcttaatgcatcccagaatctggcttagggctcccctgtgctggcctggcttggagcgctctgcattccaccccagccaacaaggcagagctcctggtttcacttaggcagagctgga

SEQ ID NO: 457664 - DNA, 122 bp, Homo sapiens
gcgggacgcacggagaccgcggtcagcgcgccgcctggccggcccagcgcgcccagcccgcgcccagccccgtccactcccgtccagccccgccgcccggccgcagtccccagggcgcaagc

SEQ ID NO: 457665 - DNA, 122 bp, Homo sapiens
taagatccacttgtatctttacaaatcatgttgtgtatgtttcgagtctccttctctagacggactgattcttatttatggtcctagaacacaacacagtgcctggtacagaatgtgggtta

SEQ ID NO: 457666 - DNA, 122 bp, Homo sapiens
attatcaagctgaggggtggagttcaaaggtaaagaattggcatggcactgagctgcagccgcctgcaagtttgttaatttgcagccctgggaggaatttttgaagcttgaagcacttttgt

SEQ ID NO: 457667 - DNA, 122 bp, Homo sapiens
cctgggttacagagcgagactccgtctccaaaaaagaaaaaaagaaaaaagaaaaaaaggcgcaaaggctccgttcaggccctagatcccgcgatacaaactttctcggcccgccccagccc

SEQ ID NO: 457668 - DNA, 122 bp, Homo sapiens
ctgcccaggccttaaattaaaaatggcaacaataagcttaatttttttttcctccttagccgcgccgccccggtccaagtctaccgcaagcgtggagccccgagcgccgcgcccccgccggc

SEQ ID NO: 457669 - DNA, 122 bp, Homo sapiens
gcctgcgatgccctccccaccccgtgaacccggccgtgtgtcagcagccacggcgtgaggcgcacaggccgctggcccggagcagggcccagcccaccgctcccaaacgcgccgcgggcagc

SEQ ID NO: 457670 - DNA, 122 bp, Homo sapiens
tggcaaggcctctgaagattacaaaatgaccctgaactcctcccatgtacagagccctgccggggccaaaatcccaccgaggttgcagggttggcaccttcaggaccccgaggacactcaga

SEQ ID NO: 457671 - DNA, 122 bp, Homo sapiens
tctgggactccgcaggcggcggctgtcacggggctggagctgtcaggtttccagcccctccgccccgcagggctgggcctccggcgcgaggagaggcgcagcaggttccccatcctcccctg

SEQ ID NO: 457672 - DNA, 122 bp, Homo sapiens
tcctgggggtgggaaaagcagggcctgaggtacaaccaggaaaaggcccggagctacaaccgggaaacacaggatgtaaggttccgtgggactgtagtcttggttaacgaggtttttctcat

SEQ ID NO: 457673 - DNA, 122 bp, Homo sapiens
gtggcaggacagacagacagcaggggcggacgcagagacagacagcggggacagggaggccgacacggacatcgacagcccatagattcctaacccagggagccccggcccctctcgccgct

SEQ ID NO: 457674 - DNA, 122 bp, Homo sapiens
gagtgactgcccagcttccctggtgccagagccacccccagcccaggcgcaagctcccttcgggaactcctcatgtctgggcttgaagcacaaggccaggatgttaagaggcctatcaagac

SEQ ID NO: 457675 - DNA, 122 bp, Homo sapiens
ggcggtgccagctcgcgggccgggctgctggggagccctagtccgctagagtccgcgcgccgggcaaccgcccggggctgaagtcctccccacaccatgatccttccgtcctttattttctt

SEQ ID NO: 457676 - DNA, 122 bp, Homo sapiens
ctccgcgccagcgcggtggtggccgcgtctccaatgtggaggggggggggaggggatgggcgggagcgcagatctcgtcaaacgaccaaggtccccaccgtgggaccttgttaatgctccta

SEQ ID NO: 457677 - DNA, 122 bp, Homo sapiens
ttcgtgcacgaaggagctgcagggactcatctccaatttgtctgcattcacagctgcaggcgggacttgattgctgtggatcacactctatctcctgtggtttaataacttttccctagttt

SEQ ID NO: 457678 - DNA, 122 bp, Homo sapiens
agtgaggctgactttacagaagtagcaactgaggccccgagagggggaacgattttacaccggcatgctgccactataattagaggcagggcaaaaccaggctaaacaaactacaattccca

SEQ ID NO: 457679 - DNA, 122 bp, Homo sapiens
aacggggactggagctgcctacaagacaggcaggtgctccagcgttctgcccggagtcagcggccacggaggtggccatcccagctgggagaaccttggagactcctgtgccaagccctgtt

SEQ ID NO: 457680 - DNA, 122 bp, Homo sapiens
cgaggagagcgagtgggcggggccaggctgaggctggccgggggcggggcgcagggataacgtgggagggtccgcccagcctttcttctacccaatagaaggccagaaagccaatccggacc

SEQ ID NO: 457681 - DNA, 122 bp, Homo sapiens
gaatttggccgtgagagaagcattgcaaaggtcatcgtaggcctgacttctagggcacatcgtcagatcgaggtcggagaaaaggcaaaactgcaagccccttcctcatgcttgcttcacag

SEQ ID NO: 457682 - DNA, 122 bp, Homo sapiens
cccttgcccgtaagatgctggaaaacactcccagatgctcctcatttccagggccaggcccgacacatgccctcgagttcttgtgtggcctcacgagtgactggctgctcaactggaaggaa

SEQ ID NO: 457683 - DNA, 122 bp, Homo sapiens
tccttatttgaatattgaaaacattcttgataaaatgtgttagtccatgttggaaacaaccgaaagaacagaattcaagttctagttctgatgtttattatatatgttggatcttgggcaac

SEQ ID NO: 457684 - DNA, 122 bp, Homo sapiens
gtgttacagctcttaaggtggtgcgtccggagtttgttccttctgatgctcagatgtgttcggagtttcttccttctggtggattcgtggtctcgctggctcaggagtgaagctgcagacct

SEQ ID NO: 457685 - DNA, 122 bp, Homo sapiens
gtgacccgaggttgtggtcagagaatgggtctcgggtcgtcttccgtgccgggtccctgtcgtgttccaggcccgggtctccgtccagcatcgagggccgaggtcacggccagggtctgagc

SEQ ID NO: 457686 - DNA, 122 bp, Homo sapiens
gatggtctcgggagtgtggagatcgaatgggtggcgcgggcacggggaagggcgtcccgtcggccctgaaaacctgtgagccccctataaccaggctatgtaggtttatgatgggagttaag

SEQ ID NO: 457687 - DNA, 122 bp, Homo sapiens
tgtgaatgtctctgctacccaaggtatgggactgaaccataccttctccaataagatctgcgccccagccttggggaggagtcacacttccgagttgctcttctttggatattctccttcca

SEQ ID NO: 457688 - DNA, 122 bp, Homo sapiens
cgcccgttcccagccctcttccgccctcttatggccacccctgaaccagcctttgctaggcggcttcccagggcctccagggcctgcgagcccagtctgggaaaactgggcttggcaatgac

SEQ ID NO: 457689 - DNA, 122 bp, Homo sapiens
acagacatctatccatttcacaggtgggaaccctgaggcacaaaggtatcactgtctgggcgctgctggtaaaggcagagcagatctaaagcccccatctccatgcaatgggatcgccgttg

SEQ ID NO: 457690 - DNA, 122 bp, Homo sapiens
atcccggtgctggtgagtgtgcccagacctcccagcatccatggccagccggggaggggacgggaacacacagacccacacagagactcaggagagcatggaggtcagaagcccaccttgaa

SEQ ID NO: 457691 - DNA, 122 bp, Homo sapiens
ggcatttaggtagtgcacgacggctgggcgccgggcctgtttggctgtgacgcccacccccggctttcatccgcctatgccctagggctagtggaagacttaagatggcggcgtttgcacgg

SEQ ID NO: 457692 - DNA, 122 bp, Homo sapiens
cccgggcagggtgaggagcagctttctcttaagggccaactaggggctcacgggttgtcccgggcttggcgggagccgggctcgcaaagggttcgggtgtgttggagggctcactttgtggg

SEQ ID NO: 457693 - DNA, 122 bp, Homo sapiens
ctgcgcggtccctgcggacactttcaggctcaggtaccaggtaccgaggggcctgtccagcgccacttcaagatcgtgatgagagggtcgctgctccccaggactggcatcttcgctgctct

SEQ ID NO: 457694 - DNA, 122 bp, Homo sapiens
ccggccgccggcaattgatctcagtcttgctgcagacacaatttgcagggcaagccagcacggagcccacatagtccagccagacgcttcccagcaagaaaatccgccagaaactacacttg

SEQ ID NO: 457695 - DNA, 122 bp, Homo sapiens
ctattgaaaagcctgagttccccgggcgctgtgggcatgccacgcctctccacttcctgacgtcatactatttttgtctttgaatagctcattgacacaattgcctcggagatcggagaact

SEQ ID NO: 457696 - DNA, 122 bp, Homo sapiens
ctgttccaagatctggggaaatccgacccgaaggaagctttgctctaagacctccttggccgtgttgggctcagacgtggactgaggtttcagaggaagcagtggagcggcaggagccaggt

SEQ ID NO: 457697 - DNA, 122 bp, Homo sapiens
atcctgccaaatccagcctctgggatgaggcctgcttcagcaatgagggctgtcacccaccgtcccttcctcctgctggctgtggggcccagcatcagggacacagcttcctggcctttctg

SEQ ID NO: 457698 - DNA, 122 bp, Homo sapiens
ctcttgcgcgcctgcagcctcctcctccccactgagcccgcccccgacctcccgccccgacgccggagttcctcgcgttcattggctagagggcgcatcactcagtgccaggtggcggcctc

SEQ ID NO: 457699 - DNA, 122 bp, Homo sapiens
aagtactgggattacaggcatgagccaccacgcccagcctactacacatattttaagttacgatgcctcccaccaaagagaaagatttagtttccaggtagtaaatatttttcttattttct

SEQ ID NO: 457700 - DNA, 122 bp, Homo sapiens
ctgtgagcaatgaatttctcatgctaacaaatccaagctctttggaaaacagatgctgagcgctgggactggcactggatctcccctggcaggaactgcaaagattcagagatggaagggta

SEQ ID NO: 457701 - DNA, 122 bp, Homo sapiens
cctctttctcaatgcttcctcccccatgaaaatgaggtgcacctgccgggcgggcgggtgcggtggctcacgcctgtaatcctagcactttgggaggccgaggcgggcggatcacgaggtca

SEQ ID NO: 457702 - DNA, 122 bp, Homo sapiens
aattcacccactcatcaattcccccacacactcactcattaattggtgctcccactaattcgcccactcttgctcacaggtgtcaccgaggccctccaacctgcccttccagccagcagtgg

SEQ ID NO: 457703 - DNA, 122 bp, Homo sapiens
tgcaagagagaacttctcatatgccagagcttcctcatgcttgaaatctccaatttcccccgtgtttgacctctagccccagatttaaggtctcatgtgattggtgaggcccatccaaagaa

SEQ ID NO: 457704 - DNA, 122 bp, Homo sapiens
gggtgattcgccgcctcggcctcccaaagtgctaggattacaggcgtgagtcaccgcgcccggcctggagtgtgtattatcccaattttatggggagtaattgtgctcactcggctcaccac

SEQ ID NO: 457705 - DNA, 122 bp, Homo sapiens
tcatccccatgactcagctcagagacttgctgaggtcttgggaggagatctggagctgggcgtcgagtcttctgagtgtcctgatgtttcatcacccctcagatcacgccaaggaggcagct

SEQ ID NO: 457706 - DNA, 122 bp, Homo sapiens
cctgaccgtgaccaggtaggcaaagaggaagagcacaaagacaactggctgcagccctggcgcctccagcaagcccagcaggatgaactcagcaatgactgttccattggccccagattctg

SEQ ID NO: 457707 - DNA, 122 bp, Homo sapiens
gagcagctgggactacatgccattgttaggcacttatttaagacaaataaaagtacatgtcggctgggcgcggtggctcacgcctgtaatcccagcactttgggaggctgaggcaggcggat

SEQ ID NO: 457708 - DNA, 122 bp, Homo sapiens
ataaaatgatttgtggaaatgcttaaaatagacctaactgaatacagtctcatcttgccgcgcctggcttacctatctgtggaaagctaggcttcccaggctgggctctgcctgtctggtgc

SEQ ID NO: 457709 - DNA, 122 bp, Homo sapiens
gcgaccaggcccgtcccaggatggctgcggaggcccctggatccacagtggggagggccccgagagccgggagacctgggttcccttcccgggcacgcctttggaactgcggcgtccagccg

SEQ ID NO: 457710 - DNA, 122 bp, Homo sapiens
tgcgcccccggcggccagccctcctgtgcctaggcaggttcacgccggagaaagtttgcacgcagggacctacaagttcccagcactctgcaagagggccagttctgggatgccagcactta

SEQ ID NO: 457711 - DNA, 122 bp, Homo sapiens
tccccccacctccccttcttggccttcgccagtgtgggagcctcgtctcactggagagtccgttcaggtaagcagtgagtccgggcagggtcgaatgcggtgggagtagagatggggttgtt

SEQ ID NO: 457712 - DNA, 122 bp, Homo sapiens
tgtggttaaaacataatcacagatgcaaaatccattctgcctgctgattttctgcacggccgggaaggagcactcctgggctttaagccaacggtttgcaaagcagcctgcaggagaaaatg

SEQ ID NO: 457713 - DNA, 122 bp, Homo sapiens
ccagaatctgtgttttgaatgcatttttcagacgcttttactgtaccttataaccaagatcgggtgaggtgtgcaaaccaagggccctgtcccctccaaaccagcagagcccggggcatgag

SEQ ID NO: 457714 - DNA, 122 bp, Homo sapiens
gtaggcatatggtgcacatcgctaccgctgctgcctgagtacatgaacaaatccccaccacgttcagccatttttggcagcaaggctgagcacatgcactcatttttgagaatcagccacta

SEQ ID NO: 457715 - DNA, 122 bp, Homo sapiens
tatcagttcctctttaaattcttaaaccagtaacaaaatgaaaaacagttgttagcactgcgtgaactcataattgtaactgtagaagccatgagcaatgtgtagaaatgttattaaaacat

SEQ ID NO: 457716 - DNA, 122 bp, Homo sapiens
agctgaggacacgtgaacccctgggcagcgaatgcaggaggcgggggctgtgcctctggacgctgcagctgggctggagccctctccctgccaccatggaaacagcaatatcagaaagcaca

SEQ ID NO: 457717 - DNA, 122 bp, Homo sapiens
tttagtatggacaagtgcaggaggcattaaggtagtagagataagtgatttgttgatgatcgaggaagggttttatagagttatgtgcttacctgagggcagaattcgctagctgaaacaca

SEQ ID NO: 457718 - DNA, 122 bp, Homo sapiens
tggccggtgcccatctatcccatatgattgtaaactcgttcaggaagtgtgtgacgtggccggagcccatccatcctgtatgatggtaaacttgatggagcatagttccgggagcagctctc

SEQ ID NO: 457719 - DNA, 122 bp, Homo sapiens
aagtatacacttaacagcaccaaggagaaattcaaagggaaaaggaagtgcgagtgagcgcgtgcacacacacacaaacacacatgcacgcgccttctaatgagaggtgaaaatggacacaa

SEQ ID NO: 457720 - DNA, 122 bp, Homo sapiens
aggccctccggcagcctggccgggcccgagtggccatggcagcactggtgtggctgctggcgggagccagcatgtcaagcctcaacaagtggatcttcacagtgcacggctttgggcggccc

SEQ ID NO: 457721 - DNA, 122 bp, Homo sapiens
tctgtgtcaatatgaggctgccttataaagcaccaagaggctgccagtgggacattttctcggccctgccagcccccaggaggaaggtgggtctgaatctagcaccatgacggaactagaga

SEQ ID NO: 457722 - DNA, 122 bp, Homo sapiens
taacaacaatggcgttctggtgtttactaacaaacacttcagagtggggcataagggagacgcctctgcctggggctcatcagggtcctcttgttagttgatctgctctggcatcattcatt

SEQ ID NO: 457723 - DNA, 122 bp, Homo sapiens
ggcttaggtggggaagaagcaccgtgcctcttggtgtccctttctcgtctcctgctggggcgatgtcgaagggagtgggctggtggatttgggaactgggtccccgaagagggcagggaatg

SEQ ID NO: 457724 - DNA, 122 bp, Homo sapiens
ggcccggtgggggcgtctcctgcctctgggatgtctgccccagtaacctggaggcagccgcgctaccccacactcgccgggagcagggtctcggacgcacctctccttctctcctagctcgc

SEQ ID NO: 457725 - DNA, 122 bp, Homo sapiens
gcgcctctggccaagaaaggcgagctgaaccgggtgcggttagctatgcgcatgcgtcagcgcttaccgcggacttgctactcctcgcgttctcctctttcttcctctcagtgcctggacgc

SEQ ID NO: 457726 - DNA, 122 bp, Homo sapiens
gggccgcgggctgttcgtggacccggcgcgggacaattttcgcaccatgactagcctctacggttccatccaccccgcggactcggtgtacctcagcacccgcacccacggcgccgtcttca

SEQ ID NO: 457727 - DNA, 122 bp, Homo sapiens
aatggttgtgtgtcattgtttactgtctgtctttccaccataatgcatgattcatgaagacggggattatgtctctcttactcatcactttattcacattaacgagctcaataccttgcaga

SEQ ID NO: 457728 - DNA, 122 bp, Homo sapiens
acaaaggaggtctaagttttggaaactctgggctaaatgagtgaatcagttttttttactcgtgattctcagcagttttaacgtgctcatgtgtatcacagcagagaaagaaagagaaaaag

SEQ ID NO: 457729 - DNA, 122 bp, Homo sapiens
tgggaaaaataaggcttttgaggaaaggtgtggcaagatacaataatatctaagaaacgccggtgtggtattggggatctggactgattggataaaagacaagaaacagagtggttagtttg

SEQ ID NO: 457730 - DNA, 122 bp, Homo sapiens
gaaaaaaggagagcgaacgagagcaggcagcggccagagactgcagctaccttagagagccgctctgaggagagctggcggctgcgccccgctatgcgctccgctccgtccccaaagagaaa

SEQ ID NO: 457731 - DNA, 122 bp, Homo sapiens
cccctggccacctctctgcccacttgcttcctcagtaccttggtccagctcttcctgcaacggcccaggagctcagagctccacatctgaccttctagtcatgaccaggaccagggcagcac

SEQ ID NO: 457732 - DNA, 122 bp, Homo sapiens
tcggacccgatgactaagcacacaggaacccataactgagcctgcggaagagccagaagccgccttgcctttaacgaggggtatcctggcgagcatgcgcagaccgtccgcgcacgtcgtcg

SEQ ID NO: 457733 - DNA, 122 bp, Homo sapiens
atccctggtcgtcaccagcctctgctgcctgagtctgagtcggcatggagagcatgggcccgggacacggcagagcctgctcgtccatgcttctccgattgtgggctcgggacacggcagag

SEQ ID NO: 457734 - DNA, 122 bp, Homo sapiens
aggcagggaggggctgaaaaacttgggtactatgctcagtatctgggtgaccagctcattcgaattcgaaacctcatagccaggtaacaaatacgcagtgtaccccctaaatctaaacgttg

SEQ ID NO: 457735 - DNA, 122 bp, Homo sapiens
ccttaaactccattggagcaactagaagttaactcaaagctccctgcactaccagggttacgccctgcagcactatcagccaagacaacagcatgggctgggcaccctccgcctctccccac

SEQ ID NO: 457736 - DNA, 122 bp, Homo sapiens
gtaggaggaggaaactgttctggaggaaactgtgttatcacttgacatcaagttaaaggacgcagaagcatcatggtattttgttaccttatgataagagttacatataggggaggaggaga

SEQ ID NO: 457737 - DNA, 122 bp, Homo sapiens
tcagtgactccctaaaggctttgcctgtgctcttgtttaagtcttccgtgaagaaggcaccgctgctcctttttatggatagggaaactgaggctcagaggcgataacttttccaggatcat

SEQ ID NO: 457738 - DNA, 122 bp, Homo sapiens
gggttttcttcttttctttcctttcttttttccttttttttttttttttaaatttttggtcgtgcacctggcttgtccccgagcgtaatattcttcaatggaaacggatctaataggtgtga

SEQ ID NO: 457739 - DNA, 122 bp, Homo sapiens
ctccccgggctcatttacacatccataggcctcatttctgctgttctaaagagtctttatcgcttcaaatcaggagcttctgtgcctgtcctcttttcctttgagctaaatctcctaaaact

SEQ ID NO: 457740 - DNA, 122 bp, Homo sapiens
cttgggaagggtaggtcatgcagtcagggggcaggtcattgtgcttctagaggaatcagccgggagaggattggagacgacttaagagctcgtgcctcggcatgatccaccactgcatcctg

SEQ ID NO: 457741 - DNA, 122 bp, Homo sapiens
ttaccccctccccacgctccagcccggggtagctgtgagaccggaggagacgatgcctgccgcgtggggagtctcagggtggctggcaatgaacagctcagccagagaagagtcgaacacgg

SEQ ID NO: 457742 - DNA, 122 bp, Homo sapiens
aggactacatggaatctcgactttgcagcttgaagtcattttgttggcggcgctggttaccggctacctccgcgcgggcacttgattgtaacagaaagtagttccggcccatgttgtttcgg

SEQ ID NO: 457743 - DNA, 122 bp, Homo sapiens
tgcctctgcggctgccgcctgggtgacggagggtggggcgggggtgggtcgctcgtagctcgagagccacgatctgatttcagggaccgtgcctatgtgctgagtcaaaccccgccgctggg

SEQ ID NO: 457744 - DNA, 122 bp, Homo sapiens
ttgaactcgggaagtggaggttgcagtgagcagagatcaccccactgcatgcagcttgggcgacagagcgagacttcatttaaaaaaaaaaaaagtgggaaaatatttataaactactatgt

SEQ ID NO: 457745 - DNA, 122 bp, Homo sapiens
tttgctgggccaataagctatttttaaatgactgattttttggccgggtgcggaggctcacgcctgtaatcccagcactttgggaggccaaggtgggcagatcacctgaggtcaggagttcg

SEQ ID NO: 457746 - DNA, 122 bp, Homo sapiens
gatctgggctgcaatgtgggccatctgaccctgagcattgcctgcaagtggggcccgtcccgcatggtgggcctggatatcgattcccggctcatccattctgcccgccaaaacatccgaca

SEQ ID NO: 457747 - DNA, 122 bp, Homo sapiens
agcccccagacctggctatggtgagaatggacatgagagttaagtttcgagtgaaggtatcggctgagccatcttgtagaatccagtcagtgaggcggcccgtaaagaatggaatggccatc

SEQ ID NO: 457748 - DNA, 122 bp, Homo sapiens
ggccgcggcgccactcccacggctctggacgcccaggctctggggggttagcacgggggtcgtccccctgcccgcccaccgccccggctgtcggaacttgagcgcacctccgacctcgggcg

SEQ ID NO: 457749 - DNA, 122 bp, Homo sapiens
cttctgacagaaagaagggcttgtgtaaaccaatagtctgattagtcagttgtctgcaaacgctcaggcttaaatgagcactgaggattaactggatattgcagaagttgcaaggatttttt

SEQ ID NO: 457750 - DNA, 122 bp, Homo sapiens
atctgcgtgtgggactacgggcacagtgtggagcagtatggtgccctgggcggcactgcgcgctccagcgtcgactggcagatccgccaggtgcgggcgctactgcaggcacagcaggccta

SEQ ID NO: 457751 - DNA, 122 bp, Homo sapiens
atgtccagcacccccctggtgaagcacactgctggggctgggctcaaggccaacagaccccgcgtcatgtccaagagtgggcacagcaacgtgagaattgacaaagtggatggcatatacct

SEQ ID NO: 457752 - DNA, 122 bp, Homo sapiens
accgcggccgccgcagccggcgaaagaggcaaagtcccgcacgccggaggacatgcgcctcggctagcggccccgggccccaccaccgtgcggctttctccagattattcctctctcgctgt

SEQ ID NO: 457753 - DNA, 122 bp, Homo sapiens
atgcaggcacgtgcacacgcatagatgtgtcagccagaaacaaaacctggtagccgcagccggacagggcctcccgcttaggcctgagaggcaggtgtaatggaggaggctaaaaccaggca

SEQ ID NO: 457754 - DNA, 122 bp, Homo sapiens
gttcgcagtcgcatattacaaccatgtttcacacagccctgctcggtttgattttctccacgtggttgataattgtcttcagttgctgctaagtgattttgcaaatttcatttataatcctc

SEQ ID NO: 457755 - DNA, 122 bp, Homo sapiens
gcggttctcaacgcggcggacactcgcttgctggagggtggtttcagtcctctgctcttccgcctggatagctgcggtcacacttactgccaggcaagcctactgtgccctttgtcgccctg

SEQ ID NO: 457756 - DNA, 122 bp, Homo sapiens
tccttggcagccccttcccaaagggaaatacagtgaaatttagagggagccctccttccccgaaaggaggaagcaaacactctgggtgctgttgctttggcttggttcctttggagtgaggt

SEQ ID NO: 457757 - DNA, 122 bp, Homo sapiens
cggcggcgagaggaggccaaggcctgggctgcccggtctctgcgcgtcccgactccgccgcgcccgccagccccacctgctacttctttttggggaagaagctgaatctcttctccttgtct

SEQ ID NO: 457758 - DNA, 122 bp, Homo sapiens
ctgcttggtgataggtgatggtctcatcgctcagcaataggcaatggtctcactgcttggcgattgtctcaccacatggcggtaggcgaaagtcccttcgtggtcaccaacatgtgtccgga

SEQ ID NO: 457759 - DNA, 122 bp, Homo sapiens
tggaaaggcaacgggattcaacgaggtgggcatggggccaggaggcagatctgggtcccgcgtccagacctaatctctaggtgccgccacttccttatctgtaaaatgggcaagacacagct

SEQ ID NO: 457760 - DNA, 122 bp, Homo sapiens
cctcccgcccgcccgcccgcccgcagcgtcagccctccacttccttcttccagcccggcgcgcccgcccaattcaaacgaaaacgaagattcaaattctggcgctaagcgctgcgattgaac

SEQ ID NO: 457761 - DNA, 122 bp, Homo sapiens
gcctccctccctcccctctttcggccccgcctccggccgccccgcatgccaaggcgcaggcgcgcccagggccagtcggccccaatgcccttaccgccagggtttcattcccacctacccca

SEQ ID NO: 457762 - DNA, 122 bp, Homo sapiens
tgatcccctgtggagacagtaaagattaagaggatcataaactgcgtccagcggctgccccgggagaaatctcctcaagccagagcctgtgctgtgaggggcttcgggaccttggggcagct

SEQ ID NO: 457763 - DNA, 122 bp, Homo sapiens
agcctcgctgcagacaccgtgccattttcaagtgaaatctgattagtcaccaccttccggcgttaaactcctcaatggcttccccaccgccgggacaacccctaaggcggtagccgcggggc

SEQ ID NO: 457764 - DNA, 122 bp, Homo sapiens
gcccctccggcctgtcattaccggcagcagctgcagggtatttactggggccaaggtttgcgaacaggaacccgccctccaaaactggccataaaaagggaaaatggccccgaatcccactg

SEQ ID NO: 457765 - DNA, 122 bp, Homo sapiens
ctgaccatttcctcttttctttcctgcaacagattgcagattgagcttaaccaagaagttcgtaggctaatcaaggctggcttgacctacaaaagaagaagagagttctgcctgcccacttg

SEQ ID NO: 457766 - DNA, 122 bp, Homo sapiens
gggggaaagcctgtaatccggatttccccagcaagaaggcgcccccacatcccgcccgcccgccagctcttacccgagggtagcagccatgagccccacggccccggtgcccgaacccagct

SEQ ID NO: 457767 - DNA, 122 bp, Homo sapiens
taggaacgaagattaagtaatgtggggtagaattctttattcctgagctaggccaatttccgttcactgcagttccttgctggcatcaactccttgctgacccaatccctaaaacacttctc

SEQ ID NO: 457768 - DNA, 122 bp, Homo sapiens
agcacggtgccagcagagcccccagcaatgggcaagacgccgggtcccttggagttgacacggcagagtgggcaccagccggcagcgtccggggccaaagctcctccagcttcgccctgccc

SEQ ID NO: 457769 - DNA, 122 bp, Homo sapiens
aacaagtttacaagcagtaatcacgggggcttttacaggaccagcgctcttgctcctcgccggatctgcagacatttccaagattcaccaactaagggagcaggaagtgggccggggcgccc

SEQ ID NO: 457770 - DNA, 122 bp, Homo sapiens
cccgccccatttgcctttagtgagcatttattgcccaaaaaacacaacttgtatctgcctcgtggggaataccaggcccattttatacaacgcttttgaggcctgctgctatcgcttacctt

SEQ ID NO: 457771 - DNA, 122 bp, Homo sapiens
cccggggcctccaagcccgggagcgcccggcggagccagggggcagtggccaagtctgtgcggaccctgaccgcctcagagaacgagagcatgcgcaaggtcatgcccatcaccaagtccag

SEQ ID NO: 457772 - DNA, 122 bp, Homo sapiens
cattgtgacccgttcactcccaagaccctcagggacaggcaggcagtcagtggacactgtcggcacggtgggctgggggcgtaagggccccggtggtcctagggaccccatggccatggttg

SEQ ID NO: 457773 - DNA, 122 bp, Homo sapiens
gctgcaatgttcctccagatgctgcacgggagagggcagaaaaggcctatatggtgagtccgccctgggagcctctgcttggaagctgaagtggcctgagagtgactcagaaaccacggaag

SEQ ID NO: 457774 - DNA, 122 bp, Homo sapiens
aactcagcggcgcattctctttggacccgaggcaccaccatactttccattgcttacttccgttaaaccccgagcgctgccatggcaagccggaaatagggatgaagcaatttagccagaag

SEQ ID NO: 457775 - DNA, 122 bp, Homo sapiens
ggccgcctcctcctcttcttcctgcttggtcgagggtcttctgcctggactgtggagcctcgccgaccgttcgtcctcacagccacctcacggacaaccggcgcgtcgccggctcattgtgt

SEQ ID NO: 457776 - DNA, 122 bp, Homo sapiens
caagctacaaaattgatgaattccttcacaaaccatttctaacacataatgcaggacaagcggaaatcagaccatgtgttacaccacaaactcccttagctgtgcaaatcattagaatttga

SEQ ID NO: 457777 - DNA, 122 bp, Homo sapiens
actacccaatttcagcagccgttttacccccatgagattgcaacacagcaagatcccacacgtgtgcctatctgggctgcgtgtgtgaaactctccagccccatttctgaactgagaggagg

SEQ ID NO: 457778 - DNA, 122 bp, Homo sapiens
ctgccataaaagaacagaaccttcccgcgttcctctatccatggagtgtctgtggatctacgcgagtgcttagatagaaattaaccctgcagccggagattagcggccctaacttaattttc

SEQ ID NO: 457779 - DNA, 122 bp, Homo sapiens
gcacctggtgcacacagccacctgcctgctcaccttcgcagtaggggaagttgtaggcaccgggcacacatgtgtcacaccgcagccccgtcacacggggccggcagctgcactgcccactc

SEQ ID NO: 457780 - DNA, 122 bp, Homo sapiens
ggctctaaaagtggcccatagcatctgtggaagctcatagggttggcaattccagaatcacgtctaaggaccttccctgcactaagtttgcaaattagtcacaacctggtttacgctggtgc

SEQ ID NO: 457781 - DNA, 122 bp, Homo sapiens
tgaagataattggattctaattgttcctcatctactaataagttgtataacctcaggcaacgtacttaactttgctgtaaataacaagtcagactagatgacctccaaagtcatgccatgct

SEQ ID NO: 457782 - DNA, 122 bp, Homo sapiens
gtgagggaagaggtaggtagctgacttccaaggtcggtttgttagataacaaatgttagacgaccctagacagcccatgccttagtatccaagggccagatgttaatggggaaggggttcaa

SEQ ID NO: 457783 - DNA, 122 bp, Homo sapiens
ttcgtgtgcaaagagaaggtctccacctttctgctccatgaaccagtctccatgagcacccgaggcgacgctcgcggcgcggcccgagcgctgggcccgggctcgaggtttggaccggggtt

SEQ ID NO: 457784 - DNA, 122 bp, Homo sapiens
ctacgatcagggaagccgggacctgggttgggaggaggcgcttgggggcgcctctgatcgcgtgatatgggtgccctgcatctggccgtgttcactcgggaaatgctgtgagctgcactttt

SEQ ID NO: 457785 - DNA, 122 bp, Homo sapiens
attgataagaaagtcttaattgctatcttcaattctaagggctttatacaaagaaattcacgtacaccacatggtagctctgtggagaggtactgccatttcgtctattaaagatgagagtg

SEQ ID NO: 457786 - DNA, 122 bp, Homo sapiens
gattgcaggacgccccgacacaaggaagggcgatcttgactcagtcagtccacggatgcacgctaaccccttccagaaacaccctcacagacacacctagaaataatgtggggtttttggtg

SEQ ID NO: 457787 - DNA, 122 bp, Homo sapiens
cagcaaatagctggacttaggatccgtttaacaaagctcctttaaaagtcctttggagtgcgccggccggtgacacccaagaggcgacccctccgcccttccgcttttggagggtgggcggc

SEQ ID NO: 457788 - DNA, 122 bp, Homo sapiens
cttacagaccaaaagaaggtaaaagtacatgtgcacctcaaagacaagtcggaattttgacgaaggtctaaataggcattctaggttggaaagaactagaagagaagagagacttcttgggt

SEQ ID NO: 457789 - DNA, 122 bp, Homo sapiens
ttccgtcttgccccgtcaggttctgagccaattagcaattcatcaggccaagaagccacccggcccagcaggtaagcttagggcagaagactgggagttctgcttcctacctgtgcctttaa

SEQ ID NO: 457790 - DNA, 122 bp, Homo sapiens
ccaaccatcacccaactccaatcctctcccttgagcccaagaccctggaccttccctgggcgggaccacagcagagccagcactgaccctcaggttttggcaaaatgtctagtgagggaaca

SEQ ID NO: 457791 - DNA, 122 bp, Homo sapiens
tagttacttgcacgcgcttcttgagtctcaaaacacagagctctagtaaacttcagggggcggattcgtcaattacagttgcggaagaagactcgactcgaagagcggtccgccaccagggc

SEQ ID NO: 457792 - DNA, 122 bp, Homo sapiens
cgcggagacactcctacaggaatgcggtggtgctgaacctgggcacacatcaggatgccccgaggagctcccacagatggcagtgcccaggaccttgcctagagattctcattcagggtccg

SEQ ID NO: 457793 - DNA, 122 bp, Homo sapiens
acgggagggtcatgtgggtgatcccgactcgggtgtggggttcgtgcttgggaggagcagcggtctgtggggcccccagtgtccactttttctcctgttaaaaattaaactgaggaacgtta

SEQ ID NO: 457794 - DNA, 122 bp, Homo sapiens
gggaggcgttgggcagcgcgctgccgttgccctgcatggtccctgtgcgcgtcccggccgcggggccatcgcccgcctcgtccgcccgcccgaccacttgttaaggctccgcccggcgctcc

SEQ ID NO: 457795 - DNA, 122 bp, Homo sapiens
tacaggcatgagccactgcacccggctaagcctggctaatttttaaattttttgtagagacggggtttcaccatgttgcccaggctggtcttgaactcctgggctcaagcgatcctccagcc

SEQ ID NO: 457796 - DNA, 122 bp, Homo sapiens
tgtccctcttacagcaaattgtacggtgggagcatgctgggcccataaccctaaggctaacgggtcaggagcatcctcgcaggcagttcaggcagtggtcatgtccacagaccctggggcca

SEQ ID NO: 457797 - DNA, 122 bp, Homo sapiens
acctcttagagcctaagtgccatcgctgtgggacctctcggggcctttaccaagctccgtcgctgcaggacctctcagagcctttactaagctccatcgctgtgggacttctcagagtcttt

SEQ ID NO: 457798 - DNA, 122 bp, Homo sapiens
aatggaagcatgtgggatgggaccacagcgagcaactgaccaatgagagtgagcgaggcccgccctctacaaacttttggccaatgggagcactgagggccagccttcccccacacctagga

SEQ ID NO: 457799 - DNA, 122 bp, Homo sapiens
caccatttcaacacctctccaaatcaaccatccctacaacaggatttattttccaatgagcgaaatccccgcccgccaactccaaggcgcttggatgcgagctctgtgggaaacagcagcga

SEQ ID NO: 457800 - DNA, 122 bp, Homo sapiens
tttatgaaaggataaatacacgccctctattggggtcaggttttgtgcctgtacttcttccgcctactgtatcatagcagcttagaatcccagctgctggctcgggctgcagttctctcatg

SEQ ID NO: 457801 - DNA, 122 bp, Homo sapiens
acagtgagcgggaaggactggacttccagggctgctggtcggcctggccccacttccagtcgggcagtggcaccccctgaccggagagggacgcggtggagagggagctgtagaacgtgccc

SEQ ID NO: 457802 - DNA, 122 bp, Homo sapiens
tctcggcgggaccagggattcacgggctgcaggaccctcacccggaagagcctggcgaaccggaagggcgtccaggtaaaaaacaggaacagcacatgcgcagaaaggcccccgggccgcct

SEQ ID NO: 457803 - DNA, 122 bp, Homo sapiens
gggtccgctggagggggcctgcgttccacagcgaggttggagctaacagcttctgtcttgcggcccctcctctagccggccgctgtggaagagtgcccaggcagcttccggcggcctctgca

SEQ ID NO: 457804 - DNA, 122 bp, Homo sapiens
gaaggggactccttgtctgtcttgtctctgcttttctgtggtacttgaagagaagttgttcgtggtggattcgctttacttatgacgaatcattcacggacaacacttttttcagtaccaaa

SEQ ID NO: 457805 - DNA, 122 bp, Homo sapiens
gcggggccggggctcggggtccgggctggggtcttctggtatcgcctgggtgacagggaccgcggacgagccaccgcctgtctccgctggggggcaggggtctgggctccgtgcgtgaggag

SEQ ID NO: 457806 - DNA, 122 bp, Homo sapiens
aggcctgtgagtgaagtgcctctcagagcagtcacccagggaagggaggagggcagggaacggggccaggggagatgcagggacagaaatcagcagaaacactccatgctggttctgactcg

SEQ ID NO: 457807 - DNA, 122 bp, Homo sapiens
aaggtggcagatattggcagctggcaccagtgcggttccattgtgatcatcatttctgaacgtcagactgttgaaggttcccccaacagactttctgtgcaactttctgtcttcaccaaatt

SEQ ID NO: 457808 - DNA, 122 bp, Homo sapiens
cccagctgccggggggaagatgccaaggggaaggactgttgctggtatgaagcagcccttcgtgatgggaacccaattattgtttatcttcatggcagtgcagaacacaggtcagtggctct

SEQ ID NO: 457809 - DNA, 122 bp, Homo sapiens
gccagccctcggaagaagcagaccctggccggtccatggcagtggcccgaggggcaccagcgcggagcaccagcgacccccaaggagtaaggggaggttaggcccccgcgtcggaagcgcgg

SEQ ID NO: 457810 - DNA, 122 bp, Homo sapiens
gtatcccggcatcatttatcttctccctaccttgttgccaaggcacgtgtgggtccctaacggctggaaacaccaattattcaagacaccctaagggagaccagaaggaaagcgatatttaa

SEQ ID NO: 457811 - DNA, 122 bp, Homo sapiens
acttcaaagcaaggaacataatgtacaattttttaatggctctagacccaggcactcagccgctctgctctgcgccttacctcagtgtaaacacctcatcaagattgcctgcgcttcaacaa

SEQ ID NO: 457812 - DNA, 122 bp, Homo sapiens
gctgccccaccggactcaggggctggggtcgtagcccggcgggcagcggtgttcaccttccgcataaacctgggcttcctcgcggggcagcccccgggccctgtgctgggtcgcagcctcgg

SEQ ID NO: 457813 - DNA, 122 bp, Homo sapiens
agaaagggtgggcgggggaaaaagaaaagtgctttgcaagttcattttcgttgtcaggagcgctggtggtttaggttctccacagacgcaggaaaacatcagtcacgaggcgaatgtcccag

SEQ ID NO: 457814 - DNA, 122 bp, Homo sapiens
gttcttccccaggcccactgagatgttcctctgtctgccatgcctcacggcctgactgaccgtaccagtgaacccagcgtacccctggccctggcagccggacggctgatgcatgcaaagcg

SEQ ID NO: 457815 - DNA, 122 bp, Homo sapiens
agtcctcttctaaccggctctgtggccttaggcaagtaactcagtgtctctgagcctcagcgtgttcatctgccaaatggaaagaagaaaatcatgatgatgcatagggtacctggggggtt

SEQ ID NO: 457816 - DNA, 122 bp, Homo sapiens
ggaggagtaataaaatgaatgaatgcactcaaaacactaaacagtaattctgtaatccaacgggaggtacagcgaataccaaaagcctacatatactattctctgcatgctatagcaagaaa

SEQ ID NO: 457817 - DNA, 122 bp, Homo sapiens
gaagccaggagttgtcggggaggggacgcggggttcccatggaggtcgcaggagctcggccgcagagcctggccctctgcccctacccctgcttcctggggtcctgcagcctgggcctcccc

SEQ ID NO: 457818 - DNA, 122 bp, Homo sapiens
ggtgtgcgcgagagccaatcaaaagcggatgtcgaaaagaggcgccgctccagccagtcacgtcgcgaggtgcggtcggggccggctgacgcgactgcgggcctcagccaatgggcgtgcca

SEQ ID NO: 457819 - DNA, 122 bp, Homo sapiens
aagcagaggggggctgctctccttggcgggccctgtgggcagctttgcacctatctgctgcggactccacgaatctcacggcccaaacgcacgggtgtgctgacttgtcaactgggggttcc

SEQ ID NO: 457820 - DNA, 122 bp, Homo sapiens
tcctcccacggctgggtggcctggctggtaggcgctcataattacctctggaaacgagtccgtgcatggctgagacttcccagccaatgacctggcccggccatttttctttatgcgttgtt

SEQ ID NO: 457821 - DNA, 122 bp, Homo sapiens
gtcgacgctgcagcgcaggtgcaggtgcttggtccggcagacggaagccggagaggccaacgaacaggtatccactatctcgggcatggctctgggggatcacacagcacagcgacctacag

SEQ ID NO: 457822 - DNA, 122 bp, Homo sapiens
gagagactttgtcagctcccgcacagtaacgtaagttttcttgtattcttagtgtagtttcgttaccggaaaggggtctcgatccagaccccaagagagggttcttggatcttgcacaggaa

SEQ ID NO: 457823 - DNA, 122 bp, Homo sapiens
gaagtaatgtttaatccacgtagactgaaacacacacacagcgataaggcctttccctggcgcaatctgcttccgggagtgacggaaactgctagcggagagaaaaaactgggaggccaggg

SEQ ID NO: 457824 - DNA, 122 bp, Homo sapiens
gagaggttggtcggggcctcagtgagccgaaatcacgccactgcactccagcctgggcgacggagcgagaccctgtctcagaaagaaaaagaaaaaccaccgtccaggggcggagaaggaag

SEQ ID NO: 457825 - DNA, 122 bp, Homo sapiens
acccgggaggtggaggttgcagtgagccaagatcgcgccacttcactccagcctgggcaacggagtgagactccgtcttaagaaaaaagaaaaggccctcagtcacagtggaaatggagaga

SEQ ID NO: 457826 - DNA, 122 bp, Homo sapiens
gcttatttgtggaaagaatgtagcttaatattcttaatttgcttttggattttctgcttgcgtgtctgtacattaagagttggtcatgcttctcaatttaagaaggaaaagtgttttcctaa

SEQ ID NO: 457827 - DNA, 122 bp, Homo sapiens
gttctcgcgaggtttcgtcttcccggaagcgttggaggacattccctgttgactgcgtcgcgatgtgtggcgactgtgtggagaaggaatatcccaaccgggtgagcgactgggcgctccct

SEQ ID NO: 457828 - DNA, 122 bp, Homo sapiens
cccctctagagctgccaacctgccagcgggcagaaggagcccctggctcaggacagcagccgtccccaagatggagcccagagcatgggtcctgtccccgacctccctgcatcacctctgcg

SEQ ID NO: 457829 - DNA, 122 bp, Homo sapiens
actgtcaccacaaccacacagagcaagttgaactcatactgggaacagcttagagaagcacgcacatctcaacaacagcctttgttatttaattcatgacactaaccacgcgcaagctcaaa

SEQ ID NO: 457830 - DNA, 122 bp, Homo sapiens
ctacggccaccatctttcttgggtttggtcctgttctgtaattttgtgctgtgaaagggtcgtggtggagcttttggcttaagaattctttgtccggatttaattgctcctccggtgggtat

SEQ ID NO: 457831 - DNA, 122 bp, Homo sapiens
cacacaggcccctgtgtcagagcccagggatggatccgcaggcccgaggttgaaggtgcccgtgccagtgggcaacgccggggttggcaatcatgatgagtcaggagcaggaggggaacgcc

SEQ ID NO: 457832 - DNA, 122 bp, Homo sapiens
ttgagggtagagatcgggagatattggaaagaagagctttggggatggtggtcccactcacgatatactccctagaaaaattaagtgaggaggaaaccgggcagggaagtgggaaggggctc

SEQ ID NO: 457833 - DNA, 122 bp, Homo sapiens
gccttaaactcctgggctcaggggatccttccacttcagcctcctgagtagctaggaccacgggcacatgccacgcccagctaagtgttttattttttgtagaaacagggtcttgctatgtt

SEQ ID NO: 457834 - DNA, 122 bp, Homo sapiens
ctgagggtgggggtctgtgggcaggaccgagagttggggtggcttccgtcctcaggagttcggtacgtgaaagttagctctcccggaggtgccggtgaactcaaaatagtgctgtgcccggc

SEQ ID NO: 457835 - DNA, 122 bp, Homo sapiens
cttatcaaccccaagtacgccttggtgtcaggctgccgccacccgcctggggagatgatgcgctgggctgcccggcaacagcgggaggcgggcggcaacccggaggggcaggaggagggcgc

SEQ ID NO: 457836 - DNA, 122 bp, Homo sapiens
cccatcctgcccatcgtgaacgtgcagagcttggacgaggccatcgagttcatcaaccggcgggagaagcccctggccctgtacgccttctccaacagcagccaggtgggggtgcggccggg

SEQ ID NO: 457837 - DNA, 122 bp, Homo sapiens
cctgattgacagttcccacgaacccgccccacggcccttactggatacggcgtcaggtgccgcccctcgtggactgattgacagaagaagcgatcttgcacagctgagtggagccagatgag

SEQ ID NO: 457838 - DNA, 122 bp, Homo sapiens
caagtcagggtattgagagtgtttgcctgagtacaatagatttctgttgagtacagccaccgtactctactatccaacactgaatttattccttccatcttagtgtgtgtttgtacccttta

SEQ ID NO: 457839 - DNA, 122 bp, Homo sapiens
ttgcacaaccggcccaaaagaggaagcccagaaagtgctgaagtaaacactttgggagaccgttgcaacataaagcggcctctcagtctttggtggaaccatcactaggccccaatccctta

SEQ ID NO: 457840 - DNA, 122 bp, Homo sapiens
gcctgaagccgcccgcctcgacccggggcgtccagcgtggtgaagtgcgggcgtggagctcgccctctatccggctggaagggtctgcgttttgatttgtgaggatctctgcatgtgtcgcg

SEQ ID NO: 457841 - DNA, 122 bp, Homo sapiens
tggcatcagcagcagccttgggcgtcccagctaagacctggagagctgacggagcagcctcgtgctgcaaacaagcaggaccctccacccatcagaaagagcccagacctcaccagcacgca

SEQ ID NO: 457842 - DNA, 122 bp, Homo sapiens
gggtctgatagagattaggtcccggggactaaagcatccccaaaccacccagagtgccctcgttgaataaatccgttctcctactcactccactaaaaagaggagggattgagggtgcagaa

SEQ ID NO: 457843 - DNA, 122 bp, Homo sapiens
atttggagcttcaggcctctagcagggtgggaaaggggagtctcttgctaagtcagtaggcgcctgggtgtcctccaaaccccatagggcttgtgggacctgtgccacccctcctacaacag

SEQ ID NO: 457844 - DNA, 122 bp, Homo sapiens
gggccgtcctcttatatcaccccccgccccatgcccggccccagcgccctggggtgcaggcggagccgactctgggacacccccgcctgcatttgcggttctggttatctggaaccctgacg

SEQ ID NO: 457845 - DNA, 122 bp, Homo sapiens
ttgggaaagaaaggtctgctgtttgccaaaatgtaacagctcctctccctcactgaagcccgggagagcagagagccgtgccaacctctccagcctattcctgagggcacctgcccccatgc

SEQ ID NO: 457846 - DNA, 122 bp, Homo sapiens
aggtctcacctccactacttactagtggtgtggcttttagcaagttctttttatctctagcgtcagtttcttcttctgtagaataggctaactgggctgttctgtgacgggaatcaactgag

SEQ ID NO: 457847 - DNA, 122 bp, Homo sapiens
tagcttctccagtgcatggtgcatcgtcctcaccgagatcagctattgtcactgagctcccgaaatgttactgtcactttggatctgcacttaggtgggaaggtcactaaaaaggtgatctg

SEQ ID NO: 457848 - DNA, 122 bp, Homo sapiens
ggctctggcactttgcgcagccaccgggaagtatctggcatcacccccactcacattccacgaggcatagcaagcctagtagaataaacgtctccttgcaaagatgactttcatctcccgtt

SEQ ID NO: 457849 - DNA, 122 bp, Homo sapiens
attgttgaggagaagccaggcacggtggctcacacctgtaatcccagcactttgggaggccgaggtgggcagatcacgaaatcaggagtttgagaccagcctgaccaacatggtgaaacccc

SEQ ID NO: 457850 - DNA, 122 bp, Homo sapiens
tgaattcaacagccaggtcccccacttcaggccaagtgactttgcccggagagtgggcatcggggatggcaccaagagggagcagagggcctgcctggtggggtgatgagcccgttgggcag

SEQ ID NO: 457851 - DNA, 122 bp, Homo sapiens
agtttatattagggttcaccattggtgctgtgtactctgtgggtttggacaagtgcataacgacatgcgttcattactataatgccatacagagtagtttcactgtgggggtatagttcaag

SEQ ID NO: 457852 - DNA, 122 bp, Homo sapiens
gtgttcgccggcccagggttgggctggaacggtgccatgcgtgtgggagcagctttcccacggaggggccgagccctgtcagctgcttgtcggtgccagcacagcccgtctgtccttggtgg

SEQ ID NO: 457853 - DNA, 122 bp, Homo sapiens
ctgccgagtacgcaagttcaattatcggcagattaggtttctactctccgtgccccgccccgcgccatcctggggagcagcgggaataaatgatccgcccctggccagtgctcacccgactg

SEQ ID NO: 457854 - DNA, 122 bp, Homo sapiens
agtttctttcttcattaatggccttttttccctatccgagagcctgggcgcgggagggagcgaagacggccgggggcagggcaggccctccgcaagtgacacttaattcccggtctggactg

SEQ ID NO: 457855 - DNA, 122 bp, Homo sapiens
tggctgtgttttcagaagtctatttcactgatgtcttattgttatcttctaccttcttcccgtttccttggttatctattgttcctttagcttcttaagttgaaagttaatctcattacttt

SEQ ID NO: 457856 - DNA, 122 bp, Homo sapiens
gaaaccagctctggcctttaagaaatctcatgtttagattcagtgttgcaggataagccacgtagcaaagtgcagagtgatacatgtttgtacactttaccaagaatgccagacatcgctgt

SEQ ID NO: 457857 - DNA, 122 bp, Homo sapiens
ctgcctaacttttgtattttttgtatagatgaggtttcaccatgttgcccaggctggtctcggacccttgagctcaattgctcctcccgcctgggcctccaaaactgctgtgattaatggtg

SEQ ID NO: 457858 - DNA, 122 bp, Homo sapiens
acgcttcaggcctttggttagcttcgctgactgtccctacagcgggagggcaggtggcaccgccaagagcctgcccacctcggaagctgactccttgtgccaccaggcaggcaggacggcct

SEQ ID NO: 457859 - DNA, 122 bp, Homo sapiens
agctcccctcgctgccctcgctgccctcctggctccccttggtggcaaactcatagtggtcgtcggctgaggaggaggaggaggagatggagtcgctggtgggcgaggtgctccgggcgttg

SEQ ID NO: 457860 - DNA, 122 bp, Homo sapiens
gctgtgccgtgcagcggggccctgggctggaaagccttttttttctcgtgtttaagttggcgtggaagatgaaatagtcacagagacacagtggcccctccaagctgttattgccagctgtg

SEQ ID NO: 457861 - DNA, 122 bp, Homo sapiens
caggtaccacacgtgctccacaaacacggtgcacctgcatcaggtaccacacatgctccgcgaacatggtgtggctgtatcaggtaccacacatgctccacaaacacggcgtgcctgtatca

SEQ ID NO: 457862 - DNA, 122 bp, Homo sapiens
ggcggaggcgcgggacgggggcgggaggctctcgggacggcagcgtccagggtccggggtcgcgtagccgcagccgcgggcgtacagggcccgctcgccggccggcctcgggcgtcgcgtgg

SEQ ID NO: 457863 - DNA, 122 bp, Homo sapiens
ccaggccccgcgccctcagtgctgagacagcctccagccctcggtgccttaggggttgcgcgtcaccttggagaccgcgtgagaggagggcgtgcctctgcaaaggcggaagtcggctgtgg

SEQ ID NO: 457864 - DNA, 122 bp, Homo sapiens
aacaactccatgaagtaaccctgctgcgctttaggtgtgaagataacacagaagagctcccgggcgcagcactgtgcgacaggcaacagaaatgtcccgtttggtgttcacgatggtggccg

SEQ ID NO: 457865 - DNA, 122 bp, Homo sapiens
agagagggtggagggcgaggcctctgcaaggctctggctgtgtctagttccaagactccccgccgcaccttgggcactggcaggaagtgtttgatgagtgactgatgggggtggcgggacgt

SEQ ID NO: 457866 - DNA, 122 bp, Homo sapiens
ggccgcggccccttcccgttgcctgcggccaccggccggcattcagagcccctcgcctggcgctaaatttaaaaacgtaacacgagcagcaggctggtctcggaaacgaaacgaaattcggt

SEQ ID NO: 457867 - DNA, 122 bp, Homo sapiens
attgacatgtttcggcgccattttttttgtgggcaaaaccatctctactctggtcaacaccgggcaactgaaccattcctgcacgttactttttaacgtagctggcgccattcccgacccat

SEQ ID NO: 457868 - DNA, 122 bp, Homo sapiens
ccttcccctcatcctgtcttcatccttcccacgccacaaaccccttgctctgtgggaatgcggccgctcacccgcgcacccctaacgcagtgccttctgcttgctccatggcccgtgcctgt

SEQ ID NO: 457869 - DNA, 122 bp, Homo sapiens
acgcatacactcgcacgctcctgcgggaattcaccccacgcatacactcgcacgctcctgcgggaattcaccccacgcatacactcacacgctcctgcgggaattcaccccacgcatacact

SEQ ID NO: 457870 - DNA, 122 bp, Homo sapiens
gggtgacggacgcacctggaaaatcgggtcactcccacccgaatattgcgcttttcagaccggcttaaaaaacggcgcaccactagactatatcccacacctggctcagagggtcctacgcc

SEQ ID NO: 457871 - DNA, 122 bp, Homo sapiens
ttcaccgagtggtggacacatttcaggttcgtgaatgtgggaaagttcatatatgtaaaccgtaaagtgtctttgtagtcctgtttccattgtgtaaagcctccattaagaaacttaaaaaa

SEQ ID NO: 457872 - DNA, 122 bp, Homo sapiens
tttgcacagtgctaggccatgctcctgggcagtatgcataatatgtgagattttcatttacgaatttttgggaaaaaaatttttaccacccacatttttattctcttgggctgggcccggtg

SEQ ID NO: 457873 - DNA, 122 bp, Homo sapiens
ccgtctgcatcccccaaccaaagccgggagcgtggcgtttcgggaagttagaggctgaggcggtaataggggaagggtttgtggggcctgcccctcccccgcagcgtcgccgggttcccgga

SEQ ID NO: 457874 - DNA, 122 bp, Homo sapiens
cctgtttgagtacaagagtaatgaaacccatcatttactgtggtctataaagtgccctcacgtttgtatctcacacacttggtacagctcttgagatgagtgttatcgtcatcatcttcgtc

SEQ ID NO: 457875 - DNA, 122 bp, Homo sapiens
atgatcaccccagtgcgcagggtttcaaacacaggatcattgcgattggcagcagctaatcgaatgggaggagaaagaagacattattgggaaggcagagaaaggcttggaggaaaggaagg

SEQ ID NO: 457876 - DNA, 122 bp, Homo sapiens
ggtggatcaggtattgtctggagtctttcagggtcttttatttttgcatggcctcatttccgtcttcctgttgctaggaaggagagtgaagcatgagaaacttgtgttgacaatactggacc

SEQ ID NO: 457877 - DNA, 122 bp, Homo sapiens
aaaactgcacgcagcacttcctgtgggtgtggccttgcattcttaggactgcagggtacccgctgcatgccaaatgatcccaggctccagccactcacagattcacaacgcttttaaaaata

SEQ ID NO: 457878 - DNA, 122 bp, Homo sapiens
gggctgggaccagctggagccggaagcggaggtgcagtgtggctagccggagaccggaagcggaagcgcgcttgtgtcttgtgagaagagccgcgcttgcagcgtctgggagaatctttcgg

SEQ ID NO: 457879 - DNA, 122 bp, Homo sapiens
gcacgctcaggggcgtggcatgggtgggtcgtgagttgggcggggcccacagggcgtgcgcgacgcagcggcgcggcgcgtggcgtaaggggcgtggcgccagtgggcgtggcgtggcgcag

SEQ ID NO: 457880 - DNA, 122 bp, Homo sapiens
catatctagggaccatgggggtccatatgtcgggaccgtggggggtctatatctcgggaccgtgggggtccatatctaaggaccatatgtcgggaccgtggggttctgtatctcaggaccgt

SEQ ID NO: 457881 - DNA, 122 bp, Homo sapiens
cctcccctcgatagccaggtgacagctgcagtgaggtttctttgaagtgtgacattccttcggcacttcaaaggacccaggcctctgaggcaggtatgtttgctggccacacctggtacctg

SEQ ID NO: 457882 - DNA, 122 bp, Homo sapiens
ttagcatacaaatactgctccagcatctctgttttctgtggcgccaggaagactgagtcccgtgactgcaggggctggtaggatgagcactgcaggctgcacgaggtcggccagggcccatt

SEQ ID NO: 457883 - DNA, 122 bp, Homo sapiens
cagccctcctaatgactctacagttcctggcttcctcttgccactgactttcccctccaccgctgcctgggacaaccttacagctacagtgactttgagtcttgccaagacaagcccaatag

SEQ ID NO: 457884 - DNA, 122 bp, Homo sapiens
gcttctgctctggctattttgggaggtggcactccccgtagccccggccccctccccttccggtgtcaggtactccccaaccgtggtgctgggtgtctgtatcacattcagcctccctgggc

SEQ ID NO: 457885 - DNA, 122 bp, Homo sapiens
aagtgctcccgctaggtgctcccgccagatgctccagctgctaggggactggctcagggccggcaaggaggatcccccaccccaacatactcccttcctgtaacgaacgtttcctttttgga

SEQ ID NO: 457886 - DNA, 122 bp, Homo sapiens
ttgtgaggacactggtcctgctgggttggggccaccctggtggcctcatttgaacttgatcgctctgtaaagaccctctctccagacacagccccacgctgggcaggactccattatgtgag

SEQ ID NO: 457887 - DNA, 122 bp, Homo sapiens
tcacgggactcctcgccgcacctctgtgggctgaagatcaggatgtgatcaagtggattccgaagggcagctgcgtgcccgttacagcctggcagtggctgggcaccgggccctttctgtgg

SEQ ID NO: 457888 - DNA, 122 bp, Homo sapiens
gcgcaacccgtcccgctccgcccccaacttttctccccggaggatttatgttagaggttgcgtggcgggcgagtggactctggcacccagaagcacttcaggaaaaactgagccgggcaaaa

SEQ ID NO: 457889 - DNA, 122 bp, Homo sapiens
cctataatgtactcctgaaaggcttgtgaaaacacaggtgtgctcctcttacccgtcccccgagtttctgatgcagcaggtctagggtaatgcccaagaatttgcatgtgtaacatgtttgt

SEQ ID NO: 457890 - DNA, 122 bp, Homo sapiens
gggagttcttaaattagtcatagcaaatctgtctgcttttaaattgacttttttttaaggcggtacatattgacagaagagaaaggaagaaaagtggatttctaattagagaacttgagggg

SEQ ID NO: 457891 - DNA, 122 bp, Homo sapiens
ctaagagcccacaaaagcagggaaaggcggcggcaggcttagagctgcaaactcccggggcgccgctcatgaggcccgctctgtgccaccaggggacgccatgtgcacagcctgtgctgggc

SEQ ID NO: 457892 - DNA, 122 bp, Homo sapiens
ccacagccaggaggccaggcagccatgggtaatctcgccctgcccggtgcactggccatacggggtaagaggcctggcctcaggtcccctgcagccagcttgacagcgtcacctcgggcccc

SEQ ID NO: 457893 - DNA, 122 bp, Homo sapiens
ctggtatttcccggtctgtcacgaaggtccttttcctttaagtgccggccagagcctgagcgctccgagggagccccgtctggccgccttgccttcagcaaaccgagtggttttatctggat

SEQ ID NO: 457894 - DNA, 122 bp, Homo sapiens
ccgtcgaggcggtcttcatgagaacgctcagagcaggggcgggcaggcgagggcttcgaacgcacacactggggccccggacccgcgtcgctgagctggggagcccggcggcgcgggccggg

SEQ ID NO: 457895 - DNA, 122 bp, Homo sapiens
cgggcccgccccaaccgcctgctgactggcaccctaggggaatgcggcggagagtggagccggtggaaacgcagggcaacgccgcgggggcttgtggggctggccccacggggcgggctctt

SEQ ID NO: 457896 - DNA, 122 bp, Homo sapiens
ccgcgcctctcctccaccgcgccacaccacggcccgtggctctcgtccaccacagcacaccgcagcccatgcttcttgtccaccgtgccacaccgcggtccactgcgccacactgcagcctg

SEQ ID NO: 457897 - DNA, 122 bp, Homo sapiens
acagtttcagcctttaaactcacatgaggaactgctacagtttactaggcatcagcaagccgctccactagggggcagcaggtgaattgcactgaaattctcaaatgaaataataaaccatc

SEQ ID NO: 457898 - DNA, 122 bp, Homo sapiens
atcccggacgggcgcggctcctgggggggctgaggtgccaagtttctgtgaaagccgacacgttgtgcccctaatggatcctatttaccaaaaacagttcagaaagaaaagagtccattctt

SEQ ID NO: 457899 - DNA, 122 bp, Homo sapiens
ggccacagcccctggcctcgcaggaggggtctgacctggcgccggcagctgacaggaaaacgtccggcccactgtcagaccgcagcccggggtggggaggggacatttctgcaacacttccc

SEQ ID NO: 457900 - DNA, 122 bp, Homo sapiens
tcatttgggattttagtctaagtgatatggggagccatttgagaactatggtgaagaagacggcagagtctactacagtgctaataggctaactctggcttccatggggagagttgtcagta

SEQ ID NO: 457901 - DNA, 122 bp, Homo sapiens
tcaggggaatctgaggcaccaagggagccccgggcatgggttgcctgcagggcaggctagcgtctgtgtgtgctcagggtctagcacagcccctgacacaggggcgcctcaggaggaattta

SEQ ID NO: 457902 - DNA, 122 bp, Homo sapiens
ttgggaagtaactgcctctgacttcaactcaagaaaacacttttttgttgctaatgtaatcggtttttgtaatggcgtcagcaaataaaaggatgcttattattcaaacttgacttgttcta

SEQ ID NO: 457903 - DNA, 122 bp, Homo sapiens
aagagatgatttgcatggcgcctggtgattggctgatggccgggggctgggtctgagaggcggcccctgaatggtttaacggaggaaattacaagattcattcgactaaagaaagccggggc

SEQ ID NO: 457904 - DNA, 122 bp, Homo sapiens
gcccgggcctcggctcccgccccctcttccccgttcccggctcagactgtcgcttccgagcgacctgggttctcgcccggcctgctgctgccgctgcctccaggaagttcgccctgaccacc

SEQ ID NO: 457905 - DNA, 122 bp, Homo sapiens
gaagccgaactgagatgggacataggcgggatcgtaagggggcgttcctcgcacgggacgcgcgctgatggcttctacccgcccgcccacggacaacggtcggggtccgggacacacctccg

SEQ ID NO: 457906 - DNA, 122 bp, Homo sapiens
ggggagctagggcttcgtggggcaggaagaagacagtggccgtttccaccgaagacaccacgtgcagtgtcttcacaggcaaagcaatcccagctgtgaatcccacggagcacctacctgct

SEQ ID NO: 457907 - DNA, 122 bp, Homo sapiens
aaaaaatacttcccgtctctccttttcgcctagtggctctgtcaaaggtcgagtccgtgacgtcaaagagcctggaccaatcagagcacaccggactgcgttttttccgaacgccagcagca

SEQ ID NO: 457908 - DNA, 122 bp, Homo sapiens
acgagcggctgtaaggaccgatggaaatggatccaaagcaccaaacagagcttcaagactcgctgcttgctctctccctttataaactggcacgcccggcgtgcgtgtggcgggggcgcgcg

SEQ ID NO: 457909 - DNA, 122 bp, Homo sapiens
ggagtttgaaaaataaatggtatggggagttattttgtcatgtgtgctgcatagcctcaacgtgagggtctcactgttctgtacagttgtaaattggagctatatcacttggtggctgggta

SEQ ID NO: 457910 - DNA, 122 bp, Homo sapiens
ggaacccagtctctctccctgtcttccccggtcagtaaatggtccctgagtcaccgtcttcgtcgtcacatcccgccacctccccgcctgcgccgggttgctgtatcagggtcagcggggcg

SEQ ID NO: 457911 - DNA, 122 bp, Homo sapiens
gggaggcagcggtggcaggagcgggtgggcgggggcgctgacgtcagacccgggcccgggcgccggcggccgctcccctgccacatcctggtggccgcgctcgcagccgggccgggccgtgc

SEQ ID NO: 457912 - DNA, 122 bp, Homo sapiens
cgggagttttcccttccgcccccggtctgctaagacactgttagaggttacaagtaaccccgcctcttcttctccctcctagacgttattctccttcaaaagctccttcctcaccaccatct

SEQ ID NO: 457913 - DNA, 122 bp, Homo sapiens
agtagccgttctctctctctctgtgtctctgctcccccctctcctgtgtgtgtgcatatgcgtgcatgtgcatgtgtgtgcatgtgtgtgtgcgcgtgtatgtgtgtgcgtgtatgtgtgtg

SEQ ID NO: 457914 - DNA, 122 bp, Homo sapiens
agtccagaaacatccctggaaccaggggaccaggaaccacgggatcatggatgtggagaccgtcctgaccaggaccgttgtgggatgttctcgttctcattcactccctgtgaacctcctgc

SEQ ID NO: 457915 - DNA, 122 bp, Homo sapiens
tgtgaagcttgacttcaggtgtccaccagagtgtcctgttcttttgtcaaacaccagcctcggtgtcactgggaaggtatttttcagatgagattcacatttacgatcacttcaatcaagta

SEQ ID NO: 457916 - DNA, 122 bp, Homo sapiens
cccccagcccgttcgggaagggaggggctgggggctacgccccctcccccagcacggcttcgttttctgggggggggttgacaccccggattacataccccgtaccaagccgagggcaactt

SEQ ID NO: 457917 - DNA, 122 bp, Homo sapiens
cgctgtggaggcagcagcaaagaggcagcgagggtgggaggacagtgagccttggggtcacggggcctgggcttgggtcatcgctgctgcaggcctgaggcagtttctttgcctctctgagc

SEQ ID NO: 457918 - DNA, 122 bp, Homo sapiens
ccccgagcctgaggggctgcagctggggatagggggcccatgccttctgatgtctacaggcgctgacggccacccctccaggtaggccaccttgctcttggcccagccaggccagcctagag

SEQ ID NO: 457919 - DNA, 122 bp, Homo sapiens
agtgccagctgacccactcacacccggcctgcccgctggagttcgcctactacttccgcccgggccacctgctggccaacgcctgcctgccggtgcgcaccaccaacaagatctccaagcag

SEQ ID NO: 457920 - DNA, 122 bp, Homo sapiens
tctctgcgggtatgttaaggaacctgcaattttactatgttccaaggtgtttattttgcacgaggtttcagaaccactgctatagaaaaacttggcttgccacttcacttgtatacaagatg

SEQ ID NO: 457921 - DNA, 122 bp, Homo sapiens
aggggaggggtcctcccgctgaacagtgggggttctaagggtcggcggcggcggggttgacggctttgcctaggtccctccgcccgtagctgtcgggtcccggccccgctctgcccacagac

SEQ ID NO: 457922 - DNA, 122 bp, Homo sapiens
taagacttattgtgggccagaggtagccagagtagccttctcaaacacctgcctgactctcgtcactcccttcaatgcctcactgtccccaagagaatatccaaatgtcttactgacttgca

SEQ ID NO: 457923 - DNA, 122 bp, Homo sapiens
gccacatcctgcttgcagatctgctgctgggttaacacaacatcatctgccagttggtgtcgtttatttgacatcttggggttttagtactctgaaggacacccactgcccttaacagaaaa

SEQ ID NO: 457924 - DNA, 122 bp, Homo sapiens
agcggtttttcccgggcggggctgaggctgcagggaggcgggcgttccggcggagggtcacggcctcgccgccgggactttcctggggtggaggtgtgagcacgtaggagccctggcctttc

SEQ ID NO: 457925 - DNA, 122 bp, Homo sapiens
cccagctacgccaagctgggggacttcgtggcggcgctgcaccgacggctgggctgggagcgccaagcgctcatgctctacgcctaccggccgggtgacgaagagcactgcttcttcctcgt

SEQ ID NO: 457926 - DNA, 122 bp, Homo sapiens
tccttgggaatttggagccggcagcacgtggctcttcaagcccatctctgttctccttctcggtaatgcttcaagggtaaggccatgatcctattgtcacagaggtgggaactggggctccc

SEQ ID NO: 457927 - DNA, 122 bp, Homo sapiens
aggaggatgtagaatcaaaggagtaacagcccctgtggcaaaccaggaaggccaaggctgcggggcagggaagcctggcaagaggaaggcgcctggggtcaagctcagagccactccacttg

SEQ ID NO: 457928 - DNA, 122 bp, Homo sapiens
gtaaggatttgtttaaaatatgtaaaatgactcatttctttatccttaatgacacatatccgagaatttgagagtgtccttatgtgttataccaatacaggaaacatttgccttgtgctaag

SEQ ID NO: 457929 - DNA, 122 bp, Homo sapiens
cagatgatctcaaccctggacacagctgggtcaatgtttccagggccttcagcctgactgcgctgatactatctgccagggtcagagagaggatgcaggcccctcttctcggccttgggtcc

SEQ ID NO: 457930 - DNA, 122 bp, Homo sapiens
tcgatacaatctgagacgtgttccatagtgcgaagggccctgcggaatcacccaggaccccgtttcaggaagcgctgagccgccaaatgcgaggcacacacggggcacgggaggagccggga

SEQ ID NO: 457931 - DNA, 122 bp, Homo sapiens
ggtctggtgggcaggctagcatcggggaggagtggatggtcactccactgtctgactcaccggccaccacctcctagagcagacacactcccagcagccacacgaaaaaacaacacagaggc

SEQ ID NO: 457932 - DNA, 122 bp, Homo sapiens
ccactgaattgaatgtatttactacacagccagggacagggcagccagtgataacacagacgacaaaggtccaacctctgcagaggactgttgtggtggaaacaccactgtcacccctcggc

SEQ ID NO: 457933 - DNA, 122 bp, Homo sapiens
gggggcgccaggaggctgtggcccggggtggagagccccaacggctggagcagcacaggacgtgctccgcggaggaaactggctgtacgccatgagttttgtccctattcggctgccgtccg

SEQ ID NO: 457934 - DNA, 122 bp, Homo sapiens
gcagagccagagccggggctggggccgcgagggggcggggcctcgggcaatgacttcaggcgtgcgcggcgccgcgcggggcggggactgcggggggcggggactgcggggggcgggtgagc

SEQ ID NO: 457935 - DNA, 122 bp, Homo sapiens
caaagtatgtgtgttatatttcaataaagtttacgtaaaacagtgaacatccccacgaagcgtcaagagccggctgccttcccagtgtcccgcagcccgcgccgccttgtggcccacactgc

SEQ ID NO: 457936 - DNA, 122 bp, Homo sapiens
aagctgggcactgaggctaccaaaatgacagttagaacccagagagctcacacccagaggcgattacagcaccccagggcaaaggtcacaagacgggtgtgttcagaggcgccttcctgtgg

SEQ ID NO: 457937 - DNA, 122 bp, Homo sapiens
ctgccgccgccttgcagtgaaagagagagagaaaagccccccgccggaaccggaaatacccgctcgaccatgcaaaatggcgagccccatgatacatttctgctcaagatggcggcgccatg

SEQ ID NO: 457938 - DNA, 122 bp, Homo sapiens
gggagggggggttgaataaggaaatcaatttcagcttgaaagctctgaaaggagaggggacgtgtgaatggctttttaagtggcatcattaaacctgggcagaaaggtcgattgggcacagc

SEQ ID NO: 457939 - DNA, 122 bp, Homo sapiens
ggaggttggggcagagctgtgacttggctgcaggtggctgctgccaaagctggggccttccgggctgggctgcgctggcagctgcatcactaactggtgaaatgacaagccaccttgccagc

SEQ ID NO: 457940 - DNA, 122 bp, Homo sapiens
aacgcaggaatcatctgggaaaagtcgctaatctttctttctcatagatgagatgtcatgcgatgaatgttttctcagaagctgccatccatcagtggcctttcagcattgacaaaagataa

SEQ ID NO: 457941 - DNA, 122 bp, Homo sapiens
cgccgcaatcttggcgggaaggcgccggccgctaagaagccgaaagatgtccaggtcgggcgcggcggctgagaaggcggactccagacagcgaccccagatgaaggtgagaaacggactgg

SEQ ID NO: 457942 - DNA, 122 bp, Homo sapiens
ggagaacttgcaaaagaagaacgtgtttcccagctgatgaatggggatccagcttttagacgtggacgtctgcgctggatgaggcaagagcaaattcggtttaagaacttgcaacagcagga

SEQ ID NO: 457943 - DNA, 122 bp, Homo sapiens
gagaaaaattttcctcctgcttcgctgttttactggccttcaccaccaggtgactgacttcgcttctctcttcccacagccaacactaaggggatttctctcatctgtcaaaaagcaacatt

SEQ ID NO: 457944 - DNA, 122 bp, Homo sapiens
tttttttttttgagatggagtctgctctgtcggccaggctggagtgcagtggcacgatctcggctcactgcaagctctgcaacccggattcacgacattctcacgcctcagcctcccgagta

SEQ ID NO: 457945 - DNA, 122 bp, Homo sapiens
agaccggacagctaagtgctctccttgcacagacgcgcctccattgtacactctgggtctcggttccttgctctttgtgaccaatggagggggcagaaccaaacgcagtgtgaaaccaaagt

SEQ ID NO: 457946 - DNA, 122 bp, Homo sapiens
tttcctcttttatccagtgaagacgctggactagacatggtctctgggcaccaggccagccggaaaacgagatgggcctaagcctccccttgccctcttgctcccagactcctagaaagcca

SEQ ID NO: 457947 - DNA, 122 bp, Homo sapiens
aagccctctcaaatctgaatatgtgtttcacgaggagagagagagcagcagaggggaccacgaggaaggcagagattccctgaccacctcatgcctttgtacaccactcgcctttactctct

SEQ ID NO: 457948 - DNA, 122 bp, Homo sapiens
aacaatgatgcctgggaaccatcgccaggctacactgttgactaacaaagccacgggccccgcaagaaacaattcagtaatttccacagggttggagatgactcagcagttccactcctgca

SEQ ID NO: 457949 - DNA, 122 bp, Homo sapiens
agagacgacaggcaaattcccaaaggaactgattgtcccgtggtattgcatcgagccctccggtcacccttctagggatgatacaggggtggccagatgtcttcaccattagcaaagggagg

SEQ ID NO: 457950 - DNA, 122 bp, Homo sapiens
ccgcatgtgctgtggggtgcttaatacatgctaaataatgacagcagtaccccgtatgcccgagaaatcagccttcctcctgagggccatatcccattatgttacacttgtttttaagacgg

SEQ ID NO: 457951 - DNA, 122 bp, Homo sapiens
tctccacgtcggtggggaggggtctgccctgctcatgggccctgggagcggaatggccgacggccggtctctgctcacccaggctcgctccgccccacggaggattccccagtttcctcgaa

SEQ ID NO: 457952 - DNA, 122 bp, Homo sapiens
gtctgtgaagcaactccccctcctcctccagcctggcaagctgggccaagagttcagctccgggtagtacagccccagcacttctcattaaggcacacagaaaatgtcacagctggccccat

SEQ ID NO: 457953 - DNA, 122 bp, Homo sapiens
ggtgcgggcggacaggtggggcgcacctgagtatatgtagggcgtcgggggcgcggcccgcgcgccccgggagcgcgggagggggaggcgggaccggaggggcggccgaggatgacctgacg

SEQ ID NO: 457954 - DNA, 122 bp, Homo sapiens
tttggggtcgggatgggcgggcggcacggtgctgctcttagcactaaagcggctgttgtccgagaaacgaagcgagaatgcagagctggccccggcgcgagcgaaatgtctctgcagcagca

SEQ ID NO: 457955 - DNA, 122 bp, Homo sapiens
tcctgcggcggcgacggcggcggccgtcctcatcccggcgcttgagaggacgcggggctgcgcaaatggcttgtcccgctctcggtctggaagctcttcagcccctgcagcccgagccgccc

SEQ ID NO: 457956 - DNA, 122 bp, Homo sapiens
tccagtgacggccgcgacgcaggggacgtgggttccagcattggaggcagccgtgacggccgcgatgcagggggcgtgggttccagtgacggccgcgacgcaggggacgtgggttccagtga

SEQ ID NO: 457957 - DNA, 122 bp, Homo sapiens
tacaacagcacacaacacagctgggtccttcttgagctctgtgtctgcgattccctgacacgaacaactcacataccctcccaccccatggccatgcccggttgacgacagaatgatggtcc

SEQ ID NO: 457958 - DNA, 122 bp, Homo sapiens
caaattccatttccagagcactttacctttcccatctactaaatcagttacaataaagcacgtcttaaatccatatactcctgctggaaatctcaacccaagccatcaatgcctgttcgggt

SEQ ID NO: 457959 - DNA, 122 bp, Homo sapiens
ctgtccgcctggtggaaaagccctgcagctttgccaggtggggtgagctggcccgttgtacgcgaaggcagaaaaaacagactaggatttccagcagctgtgcctggagcggcaaccctaag

SEQ ID NO: 457960 - DNA, 122 bp, Homo sapiens
gggactcataaaggagcatctttgagctccagacccaagtgtctggtggcctagaggctgcgaaggccctcaagctcagcatatcccaaagcaaacctatggcattcactccagcacacacc

SEQ ID NO: 457961 - DNA, 122 bp, Homo sapiens
aacattttataaatcactgaattctaattacatagtagtttatacgccagatacaacatacgtcaaaagcctatcttgttctaagcgggcagccatccaccggcgtctacctaccgaagcca

SEQ ID NO: 457962 - DNA, 122 bp, Homo sapiens
gctcaattccttgtgtccccactaaacctcagatcccacaggagcagtggcggtgtctgccgggttctcgctctgtcttctgctctgctaaggtgcctggcacaccatgctctcgatcccag

SEQ ID NO: 457963 - DNA, 122 bp, Homo sapiens
ataatttccattgacagttcctataagagcctcagcagcagcagcaaacagggccttggccggagtccatcctgcgagatggcagggggagaaattgaacctgcgccagggaaaacactcct

SEQ ID NO: 457964 - DNA, 122 bp, Homo sapiens
agaatgcttattggctattgcacgggacgaccctctgggtggaaactcgcctttgtatcgcgcaccgtctcacatccgggtatctgggaggcctgattggcggccgcggcgtcctatcgctg

SEQ ID NO: 457965 - DNA, 122 bp, Homo sapiens
acttagggaaacgggcgtattaacttgtttcctaggggacccgggggtgaaattaattagcgtgtttaaaatgctctgagatccaaagatgaaaggaaatgtgaaagacgcgcagagatgat

SEQ ID NO: 457966 - DNA, 122 bp, Homo sapiens
ttttttttttccttccaccggtgccttgacctcccatttcaagcctccctccgctttgggcggcaccccccggggcccagccgctctgggggcactcatccgggagcccaggatccccagta

SEQ ID NO: 457967 - DNA, 122 bp, Homo sapiens
cactcaggacgccacagcggatcctaactacaaacggtccccggagccctgggctggactcgctcagccccgcccccacgcccctggtaccagccctgagagaccccgcggagcacgccgcg

SEQ ID NO: 457968 - DNA, 122 bp, Homo sapiens
ccacgcggcggggcatgggcggcggctcggggcgggggctgggacggtcccagacgagggcgcagcggagaggatctgggggccggacgcctgggtccctagggacagccatccggggccgc

SEQ ID NO: 457969 - DNA, 122 bp, Homo sapiens
ggttcatctcaccagggagtgcaagacagtgggcgcaggccagtgggtgcgcacaccgtgcgcgagccaaagcagggcgaggcattgcctcacctgggaagcgcaaggggtcagggagttcc

SEQ ID NO: 457970 - DNA, 122 bp, Homo sapiens
aggctccgccacccctagagcacaggggccaggtctgtagggatggcgctttcctgacggcgaccggggtcctcgtactgaccgcccagactagctaaactggcttttctgtggttggtgct

SEQ ID NO: 457971 - DNA, 122 bp, Homo sapiens
tagtaaaaatattgggggattatttcttcatagaaaccttcagggccggctccaggcaggcgggagaggaggagctggggacacaatttgctgtgcaaagtcccactcgtgcgctcccctcc

SEQ ID NO: 457972 - DNA, 122 bp, Homo sapiens
cgcaggtgagaaagtgagtttcgcgggagcatctgccgggaccgcagacaggtggagaaacgcagtcccaccgcggcccaccgcggctcccgggcggcctgggctgtacctgtgcgcggcgt

SEQ ID NO: 457973 - DNA, 122 bp, Homo sapiens
cgaacaaccaaacagaaaagtttaataaacagcggacggaggggccggcggtggcggagccggagcaagcaggggttcggcggcattacctgtacccattcaccggcggctaccggcggcgg

SEQ ID NO: 457974 - DNA, 122 bp, Homo sapiens
ggagaggctcctcggggggccctggggcctctgtgcctggttctgtagggctgggggtctcgtccacatcctcttgtggggctgaaaggtaatatagggggatacagagtttaagggtttaa

SEQ ID NO: 457975 - DNA, 122 bp, Homo sapiens
gtcagaacgcagccagcagctgtcaggtgtgacatgcagaaggggtttctgccttgggctcgaggtggggctagctgatgattctaccagtctaaaattctaactgtgccaccaagagcaac

SEQ ID NO: 457976 - DNA, 122 bp, Homo sapiens
tggctcctgggtcactgaagtcctgcctggcaatgcgtgcttgggtctgggtcccttccccgacatctctcaccctcctgcagggcaggaaagtcacagtttggatgctttgttataaagat

SEQ ID NO: 457977 - DNA, 122 bp, Homo sapiens
tcacctagccgtggcctaagtacacttccccagggtaaggagtcaccatactgatattcccgcggctaatggtacttcacagagcgaagtgccggagcccgtcgccggcgattgcgcattcc

SEQ ID NO: 457978 - DNA, 122 bp, Homo sapiens
cgctagcctgggaggcgtgggtcctgcacacagcctccagccggcggacagtccctctggcgacctggccttggctcccactggggcagagccgggattctgcaggatctgaggatctaagg

SEQ ID NO: 457979 - DNA, 122 bp, Homo sapiens
tgcactcaggcagagggtctgaaactctctgcaccctgacctggctggtctgggatcccacggagggagaaccgtgcctggcttccccgccccttcccccgcccccaccggacatttgtgga

SEQ ID NO: 457980 - DNA, 122 bp, Homo sapiens
aaaattgaaaagtcgtttgtcccaggcaagagtacacattcaaatgagcttccattaacccgggaatcatgggattcataaacccatgtcataacctcaggttagagaaaaagtcccagttt

SEQ ID NO: 457981 - DNA, 122 bp, Homo sapiens
agcaaccctcctgcctgggcctcccgaagtgctgggattacaggtgtgagccaccgtgcccggcctaagcctctcataaggccgtgctccctgccagaggccacccttgaagaagattccct

SEQ ID NO: 457982 - DNA, 122 bp, Homo sapiens
gttttacgggcgcacgtagctcaggcctcaagaccttgggctgggactggctgagcctggcgggaggcggggtccgagtcaccgcctgccgccgcgcccccggtttctataaattgagcccg

SEQ ID NO: 457983 - DNA, 122 bp, Homo sapiens
agagtagagacccgggctgagggacaccccacgcgggcgcgggtgcttgggggcaagaagcgccccacgcccgtcagcttccggcgctcggcgaaagccattcattctctcggaccagtttc

SEQ ID NO: 457984 - DNA, 122 bp, Homo sapiens
cgcccaatccctgaggtgggattccctccagcagccaatggatctgaggatctgagtcagcgcccccttcctcccttctctttctcttaaagctgcaccgttgtttccccctgaaaggggat

SEQ ID NO: 457985 - DNA, 122 bp, Homo sapiens
gcccctccatgtcgcccaatccactctagcaaagcccccgccggtcctatctaggccttgcgctcacccgaaatcctgatccatagacttgaaaaagtacttggcgcccgcgggccgctgca

SEQ ID NO: 457986 - DNA, 122 bp, Homo sapiens
ggtgttgggcggcggcttcccaggccctctaggctactgggttgcagagagtactggagccgctgtggatcccagctgtgactcatccgcctccctgagtttgctctcagaatgtgctctct

SEQ ID NO: 457987 - DNA, 122 bp, Homo sapiens
taaatggcaaattctctttcgtattagtgtacatgcctcgataaaagtccagaagggcggcgggggcctcggcggttgaaggcccgcgtgccctggctcctgcgaggggagggcgcccccga

SEQ ID NO: 457988 - DNA, 122 bp, Homo sapiens
gtggggcctcgctaaggaattcccggcccctcagggccacggctttagcggtgtcttttgcggtaagtgtctgctttttcccgccccagactacggagggggagcgaggggcagccccagcg

SEQ ID NO: 457989 - DNA, 122 bp, Homo sapiens
aagtcaaaagccgacactgggctaacgggtaaacactagaagccatcccagagtcagtgacgcgccagccactcacaccagcagcgccgtggccacaggtgtgtgacgccacacacgggcaa

SEQ ID NO: 457990 - DNA, 122 bp, Homo sapiens
aaccgaactgtacgcacaagcgcgctcctgactccaggtgcacaccgtggaggcctgaaacgagagccatgaccgcgacgcgctgaacaaaccaagccgccagttttccgtcccgtcccggc

SEQ ID NO: 457991 - DNA, 122 bp, Homo sapiens
agagaacaggcctggcctggactggaaacctgccatctggcctctcgaacctggggactccgggtgtcctcgaagaagggcctgagcagcagcagaggaccccaggcgaccgtgcctgagcc

SEQ ID NO: 457992 - DNA, 122 bp, Homo sapiens
ccaagtatccataacaattaatgtgctataacagtaatgtctgcaagggtcactggaatgcgaggacttggcatgatgcaaatagccctgaacttccacatgtttacaaattctatttgcct

SEQ ID NO: 457993 - DNA, 122 bp, Homo sapiens
gcattctccaaacatcgttggtctccagagtttcttggtctctcttcctggaatcactctcgttttgccccacttctgggtcagtacttgcccgtagctccacagaatagtggcccccacag

SEQ ID NO: 457994 - DNA, 122 bp, Homo sapiens
aaactttaagcatgcagggcttgctaaacgctgattggtgggccccacccccagagtttccgactcaggacatctgaaatggggtcccagaatttacatttctagcagatttctaggtgatg

SEQ ID NO: 457995 - DNA, 122 bp, Homo sapiens
actcctgccaggggctgagcgcagtgggctgagtaggtggggtgttccctgctgcaggtccggcaaatggggcaagaaaagtcctgtgtcacctttatgctgttcttgtttaatgaatgcaa

SEQ ID NO: 457996 - DNA, 122 bp, Homo sapiens
ccataaccggttgatctcattctcctcaaaaccagtgtctatgcaattagctaataagatcgctttaacttcaataaagatgaaatagattgtttccaacatttaagtgagtggctgtcttc

SEQ ID NO: 457997 - DNA, 122 bp, Homo sapiens
tgctgctcctgcggttggtgagattacctgggtctagagtgcggagctgctccgtggccacgaggacgtcaccatggtgggccccctcctgctcccccgaaccgctcggttggttccccgga

SEQ ID NO: 457998 - DNA, 122 bp, Homo sapiens
agccaactaatatttgtgagagttcaggagtcatggagccttatgtgtgaattgccacttcgagacatacaagtttcctgttgttaggcaagtctgttcttgaagcttcagttttctaatct

SEQ ID NO: 457999 - DNA, 122 bp, Homo sapiens
gccgtgactcagcactggggcggagcggggcgggaccacccttataaggctcggaggccgcgaggccttcgctggagtttcgccgccgcagtcttcgccaccagtgagtacgcgcggcccgc

SEQ ID NO: 458000 - DNA, 122 bp, Homo sapiens
gaacctcgaagaatgtgaacttcaaatcaatggggggcggccgtcgggtcgcggaaaggccgcggcggggggctgctcgcgccggcaggaagcagggagaaaggggctgcaaactgcggagg

SEQ ID NO: 458001 - DNA, 122 bp, Homo sapiens
caatgaggcgacaggggcagcttcaggatgcaggtattttcccatcacaagactgactcccgctaaatgcaggcaaaaggaacagagagcacgacactggattctgagcctcatgaatattc

SEQ ID NO: 458002 - DNA, 122 bp, Homo sapiens
ggaagaggcggagcgcgggacggccgcgggaaaaggcgcgcggaaggggtcctgccaccgcgccacttggcctgcctccgtcccgccgcgccacttggcctgcctccgtcccgccgcgccac

SEQ ID NO: 458003 - DNA, 122 bp, Homo sapiens
tggtaatttccaccagctggcccttcagagaagcgtgtgtgtgtccagaagcatggaggccgcaggtgtactagctgatcctgtcctccccatgcaggactggagaggccttggaagcccag

SEQ ID NO: 458004 - DNA, 122 bp, Homo sapiens
gttcaatgctgcattcttggccagtgaacaggacctggccagatgggtgtgttccggcatcgccaggcagaggggcaggggttgccgcctcgagcacaggccaagtttcagagcactagtgt

SEQ ID NO: 458005 - DNA, 122 bp, Homo sapiens
gcgccggggcgcagatactgacaccaagggaatccgggtgccccccccccccacgccatgcgggcccccaggaaactggctccgccacctcggctgccccgtggccacggccccaatcctgg

SEQ ID NO: 458006 - DNA, 122 bp, Homo sapiens
gttgggcatggtagctcactcctataatctcagcattttgtgaggctgaggtgggtggatcgtttgatgcaggagttcaaactcctggagttcgagaccagcctgggcaacatggtgaagcc

SEQ ID NO: 458007 - DNA, 122 bp, Homo sapiens
aagaaagcaggtgtcatgtcgcacccataaacagcttgttagctaagactaacgaaggggcggccggcctcttggcactgcatgggctccccctacaccctccccaattacagaaggagaca

SEQ ID NO: 458008 - DNA, 122 bp, Homo sapiens
tttgcctccctgtccctgccaagtcgctgtttcctgggacaagagggagcctcactgaaacgaactccggtctcaggggacagaatcctgaaaccctggctctggggtccggggcaggggtg

SEQ ID NO: 458009 - DNA, 122 bp, Homo sapiens
tttaccaccttcacgaccacgaaatctgaactagtctgatttgggagtgggggacacccccgctgttatttaactgccaggagactgcacttgcctgaaatgagatcatccaccgtgtctct

SEQ ID NO: 458010 - DNA, 122 bp, Homo sapiens
cctgattggacagttctttcgggttctggccactaggaagctttgtttaggtccggaaggcgggctttcctgggagtgggtggggagggggcgttgattcttgaccaatcctttcagtccgt

SEQ ID NO: 458011 - DNA, 122 bp, Homo sapiens
cctgtcaaattcgattataaatattctttatgttatctgtcatgttgagttctccgtggacgtgttagccttgattgggctttgacggaacctgactgtactatgatttcctaccatcagtc

SEQ ID NO: 458012 - DNA, 122 bp, Homo sapiens
tgcgtgcagtgttgcctcgcccaaagaagactacaatctccagggaaacctggggcgtctcgcgcaaacgtccataactgaaagtagctaaggcaccccagccggaggaagtgagctctcct

SEQ ID NO: 458013 - DNA, 122 bp, Homo sapiens
acctgactgcccgaaatcaccccgcccaccaagtgtcccctcttcttcctggaatagtctcggtgcacagcctcacgtaacagggccctcctgatatggcgagactccgcgctcctcgtcac

SEQ ID NO: 458014 - DNA, 122 bp, Homo sapiens
ggcctgagatgggacaccccactgtggggcagtggttcttatgtccaagacctaagtgctcgggagcggcagtttagggtacaggtccctcctgagggacaggagtggggctggttcacagg

SEQ ID NO: 458015 - DNA, 122 bp, Homo sapiens
tccccacgttcggacttctccagaggttgcagagttcgagctgtggagcctagttctgaccgtatttcctatttaaaaagagataaagtgggggagagagagaacaatagctgggggtgggg

SEQ ID NO: 458016 - DNA, 122 bp, Homo sapiens
aagccaaatgtcttacataagcagccagttctgtttcaaatgactctcttcccagagtctcgtggatgagcccctactggctgttgaaatatagaagctttgtgtgatttgaaactctcagc

SEQ ID NO: 458017 - DNA, 122 bp, Homo sapiens
cctgcccagactccctggccacatgcagccgcacatgttggagtgtgccgtggatacctacgtggcgtcacaggtgcctagagcgggcggcgctggggagctggatgccagcaggctctgga

SEQ ID NO: 458018 - DNA, 122 bp, Homo sapiens
gggaggtggaggttggagtgagcggacattgcaccattgcattccagcctggacaaccagcgaaactccacctcaaaaaaaaaaaaaaatgctttctaaggcaattatttagttgcctgagt

SEQ ID NO: 458019 - DNA, 122 bp, Homo sapiens
cccagctcttggtctaactcagtgtgtgcggccaggatccgtaatgatgtgttatggagacgagtaacgttgttggatactgagcagtgcgttcaggccgcattcctgtgggcacgcgctca

SEQ ID NO: 458020 - DNA, 122 bp, Homo sapiens
attgcaccaggtctggctgaccaataagctgctgcttgctatgataatgggtcctagcaacggtgtctgaccttggctaagagggaaggagatcctatcagtggggagagtgtgaggggaga

SEQ ID NO: 458021 - DNA, 122 bp, Homo sapiens
acttccagcgagctagcgagctagcgggtcgcgctgcgcgggggaggaggactcgccccccgcccgaccctagcggagccttttgttcccagccagaagtttgcatgccgggaccgtgacag

SEQ ID NO: 458022 - DNA, 122 bp, Homo sapiens
ctcccctcctgccccctttctgtcccaggatcccgtccagggccccacgtggcacttggccgtcacgtctccttaggtccctctcactgtggcaggtctctcagacttgcctcattttcaac

SEQ ID NO: 458023 - DNA, 122 bp, Homo sapiens
tgtgatccgcctgccttagccacccaaagtgctgggattacaggcgtgagccaccgtgcccggccgagattattgtgtttattaatttgcttacttgctcagtatctggtgcccctactccc

SEQ ID NO: 458024 - DNA, 122 bp, Homo sapiens
catcttgtttcaaaacaagtagctgtcaccattcttaaccctgtcgtccaaaccagaaaccgggcatcatctttgactggtcccctttactcagggggaaaaaaaaccatgtcttttaaagt

SEQ ID NO: 458025 - DNA, 122 bp, Homo sapiens
agcgagtgttacagttcttaaggcggcgcgtctggagctgttcgttcctcccggtgggttcgtggtcttgctggctcaggagtgaagctgcagaccttcatggtgttacagctcttaaagtg

SEQ ID NO: 458026 - DNA, 122 bp, Homo sapiens
aggctgaggtgggaggaccacctgagtctgggaagttgaggcagcagtgagctgtgatctcgctactgcattccagcctgggcaacaggtgggaccctgtttcaaaaaaaattttttttaat

SEQ ID NO: 458027 - DNA, 122 bp, Homo sapiens
actcctgctgccagcggtgaatccgtgggacgtgctcctgtgcgtgtcggggacagtgatcgctggagaaaacgcgctggtggtggcgctcatcgcgtccactccggcgctgcgcacgccca

SEQ ID NO: 458028 - DNA, 122 bp, Homo sapiens
ctcctcagcgatcggggttcttccgcctcgcgagaaagggactctggtagcggctgtacccgaaacgtcacttcctgcgacacgcaggaaacaaaggctcccagttcacgcgataataagac

SEQ ID NO: 458029 - DNA, 122 bp, Homo sapiens
gaacgactgatccctcagaaaacaatccttccctcggttgctagggacattgcggagttgcgggactacgtttcccacgtcgccccacgccacgcccccttggcctcgccggaaagacgtcc

SEQ ID NO: 458030 - DNA, 122 bp, Homo sapiens
cccgggccgcgagcactggcgggttctgggtcctgtgaccggtcaggcggcgtcagcgggcgcggcggagggctggccggcctcgggggagtttccgcggccgccgggggcgcggcggcaga

SEQ ID NO: 458031 - DNA, 122 bp, Homo sapiens
cgaccccgacgctccgccggggctccgcgagggggcggcacatctatttaatacctggggcgctgccgcggggccgcaactcatctccccgcccccggccggctcagcgaggcgggctcgcg

SEQ ID NO: 458032 - DNA, 122 bp, Homo sapiens
aggagggcagctgcctgcaggaatgggtataaaggacaaggaggaccatggagactttaacgctgggcctggatggaggaggagaccagtgctgcaaagtcacaattcccttcccagtccat

SEQ ID NO: 458033 - DNA, 122 bp, Homo sapiens
ttggagaggagaccgtgcttccagtctgttgctggtttacaaggtaaatctattcctggacgaaaggggtacaggaacagcacccgaaaaccggcgacaggctgtggcaggcccgacgtctt

SEQ ID NO: 458034 - DNA, 122 bp, Homo sapiens
aagctttctctgtcgggtttgtctttttttaaccccagaaaggcgtgacgtgctaactgccgtcgcgggttagagtccgcggccaagcccgcgcccgcccacaaagtccccgccctccctcc

SEQ ID NO: 458035 - DNA, 122 bp, Homo sapiens
tccttttttgtgcctttcacaaataggttttcaaaacaggcttcaagaaaaagtgccaaacggtggcttgatagctcctagatttcagagaacagacacaggatggttgagtggatttttca

SEQ ID NO: 458036 - DNA, 122 bp, Homo sapiens
tatgttactaaattcaggcatatctagaattttacaccaagcagccctatctgcccagaccgggcaccatcatctacagcagatggaagttattgatcagatatttttaactaggacaagaa

SEQ ID NO: 458037 - DNA, 122 bp, Homo sapiens
cttaacgtttgtagcacctttacataaagccagagtgctcaagccatcctggacctcacccgatgggagggagaatgatgctctgccaggtggaggccttaggtcttgtcagtctcctttta

SEQ ID NO: 458038 - DNA, 122 bp, Homo sapiens
cccagctgctgaatcaccaacaggctctaccagggccgagttctgaggttgcagagaagccgtgccaagctgaggcactctgaaaacctgttccagctgactggcactgtgacacgaggcct

SEQ ID NO: 458039 - DNA, 122 bp, Homo sapiens
ctgtaggaaacctcactttttctagctgagcacagccctttctgattcaagaaatcactgcgtatgcctgtctacactaatgctaagacttagtaaaatgtagtttccttatttttaggtta

SEQ ID NO: 458040 - DNA, 122 bp, Homo sapiens
cgtggcggtgcgtggcggcgcgaggccccggatgtggctgcggcggcccctcctcccccgcgctcctctcagagccccagtcgcgcgccccttcttggttcgctcggtgcccgcgcaggccc

SEQ ID NO: 458041 - DNA, 122 bp, Homo sapiens
gattaggggtcgatgttggtgggctcggggacggcttctccgtgaggtcgttatttagcgcgcaccgggtcgcctgagcccggggtcgcggccaaaggggtaatcggctcccgcagtctcag

SEQ ID NO: 458042 - DNA, 122 bp, Homo sapiens
gaaggctacatgtgacataatgtgaggttagccctgggactcactgttcaagaaagctggcgggactccccctactccaaggcccctcagagatgcctaatggaggtgtgttttggcctgga

SEQ ID NO: 458043 - DNA, 122 bp, Homo sapiens
tggagatggatcaggggagggcctactctcctgggcttgcagctgggctgtctgagtagccgacctggactgaggctccagagccatctgaggacaatttctcctgcttaattcagccctgt

SEQ ID NO: 458044 - DNA, 122 bp, Homo sapiens
ggagcgtcccaggcccaccctacggagggtggaggcgcccccgcagcccgacgctcacgccgcaaccctgtgtggcttagggttgtaacctcgttggaaaataaaatacaaaaaatattaaa

SEQ ID NO: 458045 - DNA, 122 bp, Homo sapiens
agcttccaattgcaacaggaagcaatcaggaaaaataattagctgcccacttactggcttcgctgaagtccgaggcatgtatctcacacagaaaatcagggacataacatcaaaaccgttcc

SEQ ID NO: 458046 - DNA, 122 bp, Homo sapiens
gggactagggtgagaagtgtagcacctagggcacagaatctaaggatgtgggccaggcgccgtggctcatgcctataatcccagccctttgggaggctgaggtgggtggatcacttgggatc

SEQ ID NO: 458047 - DNA, 122 bp, Homo sapiens
ctttcttcctatgatttactaggcataggcataggcataatgacatttcagaattatgctcgttaccatgatggcaacaaggctggatgatgtagcatttaatcaggcatagttctggcctt

SEQ ID NO: 458048 - DNA, 122 bp, Homo sapiens
ttatactgcatttcaaccatcttaaagcagcctcaggctacaacttggcataccagctgtcggttcagatgtattattcatttatattttaaatagtgtaacttggtctagactttgtaatt

SEQ ID NO: 458049 - DNA, 122 bp, Homo sapiens
gatccccaggccgatccctagctccggcctgggctgcccgacccatgctcaggccccaggcgaggcagagccctgccgccctggacccccgggcgccctggaatccctgctctccttgccta

SEQ ID NO: 458050 - DNA, 122 bp, Homo sapiens
cacggcacacaaacgtctatctccccgcagcctgcaccgatccctcgtgaaccacgggaccgcgtgcggttattctcagctcagagataggccctagactggagcccagctgcacacacctc

SEQ ID NO: 458051 - DNA, 122 bp, Homo sapiens
agggtctcaccgacaaggacagcgatgctggggcgagaaataaagttcgtcctgggcctgcgtacggtacagcgcccttgggaagcccttgtggagttaagggtgatgcccacttctttgtc

SEQ ID NO: 458052 - DNA, 122 bp, Homo sapiens
acttctcggacccgtgcgcctgcgagccgggccacccgcgccccgccgcgcgctgggccgcgctggccgcgctctccctggcagtgccctgcctctgctgctacgcgcccctgcgcgcgtgc

SEQ ID NO: 458053 - DNA, 122 bp, Homo sapiens
cttcggcctttggactctgggaagcaccagtggtttccccagggctccctggtcttccaccgcagactgaaggctgaaatgtcagtttccctagtttttaggctttcagacttggtctgaga

SEQ ID NO: 458054 - DNA, 122 bp, Homo sapiens
ggcggccagcttcggccggggaaggaatggcctggataactggggcatcgcggcgctcctcggcctcctgcagctgcgtttcaaagcagagccgacccttggtgggtagtccggggaccctg

SEQ ID NO: 458055 - DNA, 122 bp, Homo sapiens
tctacccaaaattcagtcctggagttaggaaggtgaggcaaaggggctggctttgaaaggcgggagagatgcagactcaaggttaccattaatagactatatagagagaaaggagatggaac

SEQ ID NO: 458056 - DNA, 122 bp, Homo sapiens
ctcgagcacatccccactcactcaccgagtcagggctcgcctgtgatggctgatgtacaccgacggggtttcccagcccacttctgcctggtatgctctgccaaccttgctgcaggccagac

SEQ ID NO: 458057 - DNA, 122 bp, Homo sapiens
cacaggtctttaaaatgggattagcctaaagcaatcaagttggagagactaaccagcaaacgctaaaagtactcccacctgcctactcaatggaactgtttgccaggggaaaaaaaaaaaag

SEQ ID NO: 458058 - DNA, 122 bp, Homo sapiens
tggtgcagttgggagcgtcagtttccttttctgtgaaatgaggataaatcactggaagctcgtgagagcgcacacgaaacacccggcactccgccctggacactagggacgcgcaatcaagt

SEQ ID NO: 458059 - DNA, 122 bp, Homo sapiens
tatgttgtccaggctggtcttgaactcccggactcacatggtcctcccaccttggccttccgaggtgtgagcctctgcacccagccactaagtggattttgataggaattgaattgaatttg

SEQ ID NO: 458060 - DNA, 122 bp, Homo sapiens
cgcttgaggcggcgcatggtcacctctgccccctacagaattgaatcctctgcctttcctcgtgccgcctgaggcacggacaagcctagtttagtacgccccttctaacccccttgcccact

SEQ ID NO: 458061 - DNA, 122 bp, Homo sapiens
tccattaaactctttgttgcaatgctgtggtctcagtgaactggttttgcgtgtacaatgcgcaagaagaacccattgggtggttacaccttgacacacagtagatgctatttggcacacaa

SEQ ID NO: 458062 - DNA, 122 bp, Homo sapiens
cttcactcctgaagccagcgagaccacgaacccaccgggaggaacgaacaactccagacgcgccaccttaagagctgtaacactcactgcggaggtcccagcttcacacctgagccagcgag

SEQ ID NO: 458063 - DNA, 122 bp, Homo sapiens
tcttgaggagtctcctcccttcccgattccttcaggtcagtgtgagcctcttgttcttctcgggctcccgatgggttgactgatgcttctttcatcctatcagatgctccactgagtggatc

SEQ ID NO: 458064 - DNA, 122 bp, Homo sapiens
acctcagcctcctaaagtgctaggattacaggtgtgagccaccgtgcccacccaactgcccggttttatagaggagaaaactgaggtccagaaacccaatgtgccaggaggcagagccaaca

SEQ ID NO: 458065 - DNA, 122 bp, Homo sapiens
cgccgctcctcaggcttccgcagcatccggggctcccccagcctccacgctgtgctggagcgtgatgaaggccacctcttctacattgaccctgccatccccgaggaaaacccatccctgag

SEQ ID NO: 458066 - DNA, 122 bp, Homo sapiens
cggtaggatctatttctgaagacaatgtggaagcagagtgtgggccctccacaggtgtagcgaggcggcgtgctaccgcgaagaaggagggaagacgcctgagcccagccggtgccctgctg

SEQ ID NO: 458067 - DNA, 122 bp, Homo sapiens
aaaggggaggcagggagctgtgtccagttgtggctaacctatggctcagcagaaacatagcggctaaaatctgtgaaaggttctgatttcagatgcataatcaaaccaccccaggtggaact

SEQ ID NO: 458068 - DNA, 122 bp, Homo sapiens
gaggtttctcacatgtgcgtgaaaacgcttcgagaggggtgcagccgcggacacaaaaaccgtggcttgagtccccgcgcccctcccctcccctcccctccctccctccagtccagcagctc

SEQ ID NO: 458069 - DNA, 122 bp, Homo sapiens
ctccagctgccgccggggccggaccagatgctcttgccatgtgttggccttggccagggtcgcgggccctctccccgtggcctcgtgtattggtaccactcgacccccaggggggcaagggt

SEQ ID NO: 458070 - DNA, 122 bp, Homo sapiens
caaggcagccggtgaggggaaggtgacatgcacggtgtccacgccggatggggcagagctcgatgtggatgtggttgagaaccatgacggtacctttgacatctactacacagcgcccgagc

SEQ ID NO: 458071 - DNA, 122 bp, Homo sapiens
ccggttgtggtccaagcctgggtgcgagctgggctcccggttgtggtccaagcctgggtgcgagctgggctcccggttgtcgtccaagcctgggtgcgagctgggctcccggttgtcgtcca

SEQ ID NO: 458072 - DNA, 122 bp, Homo sapiens
atccacccgcctcagccccgcaaagtgctgggattacaggcgtgagccaccgtgcccggccgctgccatctctttatagggaaatccagctaggtgggctgggctaggctgtccctaccccc

SEQ ID NO: 458073 - DNA, 122 bp, Homo sapiens
gtgaggaggaggactcaaccatcaaaagtgaatggcaactttgccctacaagatattaagcgaaaactagtgtttaagagaaaaatgacagggaatagaaacaccaaagatctaatgtgagg

SEQ ID NO: 458074 - DNA, 122 bp, Homo sapiens
gaggaagttgacagttcaacttcaaacatgggtgacgcaggccccacactgcctgctccccgtcccacccctccctgagcacgccaccccgccctctccctctctgagagcgagatacccgg

SEQ ID NO: 458075 - DNA, 122 bp, Homo sapiens
acctatatcccctgtcagctatggcaaaacatacttacagctcgctgctctgcataagctcgatgagatccataaaaagcacatcccggttcctttcacaaaagccatccatgtcataggat

SEQ ID NO: 458076 - DNA, 122 bp, Homo sapiens
tctaccccttgcccaccagttcggggctcagagctctggcgggtgctggcgcctggctcccgagtctggcctgcaacctgtctctccaaggtctgatgccatttaggggttgctgttgatgt

SEQ ID NO: 458077 - DNA, 122 bp, Homo sapiens
aaaaagattggggggtgagaaagctcggggggtggggaagggtctactccccttgcaaagcggtggtgtggccagagcctctctgtgactcggcatggtcccctgggtgtctgtgtgccttc

SEQ ID NO: 458078 - DNA, 122 bp, Homo sapiens
tgacctcgtgatctgcccgcctcagcctcccaaagtgctgggattacaggcatgagccaccgtgcctggccacatttctgtatatcttgcaagcagacacactgtctgtcttttatttgatc

SEQ ID NO: 458079 - DNA, 122 bp, Homo sapiens
aggcaccaaccaaataacgcagcgctggcaccatcccctacgcacgctcccctccctcagcgctcagaagaagccacttgaccctccacggccgaggacccgcgctctttagccccgcccct

SEQ ID NO: 458080 - DNA, 122 bp, Homo sapiens
gcatcagcagtctcagagtctgtttatatagtatccattcacactagtcaatctaggagtcgagatgaaggatcagaggatggtttcctttccccctctcccccgctacttctttgccctcc

SEQ ID NO: 458081 - DNA, 122 bp, Homo sapiens
cggtttctcccgcgagccagcctcatagacattccttggtgctgattggctggcggccagcgcagtcctccttcctctggctctctcgcggccccttgcgggaaggcctcccagaggccgtg

SEQ ID NO: 458082 - DNA, 122 bp, Homo sapiens
gcacccaacagcagcctcccccatctcccctccaagatcccatcctgggcaacctacagccgcttcctgaactccctaagaaagcaaagctggagcagggactagagctatctgggtggtgt

SEQ ID NO: 458083 - DNA, 122 bp, Homo sapiens
gggggtagttgttggaaggaagggaaagcaaagtaggtgttgcctagatgcactgggaggcgaggacctcaagctggttaacagaagggaggggagggccacaaatgctaaagaaaagggac

SEQ ID NO: 458084 - DNA, 122 bp, Homo sapiens
cagcggtgtttgggccacaatcccagctaacaatcataactaaagggtactttggttctccgtttactactgtccctcgtgtgtttcaacccctcagaagcagagttttgtccatgaggcaa

SEQ ID NO: 458085 - DNA, 122 bp, Homo sapiens
cccagccctctccacgcccggctctgagaggaaactacggaggtggttcccgctcgcaggcgggtggaaaagcccatggtgaatgcctcggggtgtccccccagttgctgtgggaagtggga

SEQ ID NO: 458086 - DNA, 122 bp, Homo sapiens
cactagaactgcagaagggtagtattttaacttctgctggccccgccttccctttctgtccgacatcaaggaccctcggaagatgagatttctccgatccacacaccccacaccagagcatg

SEQ ID NO: 458087 - DNA, 122 bp, Homo sapiens
acctgtgcagatggcatgttaaataagagacaggattcagacagatctgggtccaaatcccgctttgccacatgtcagcttgcatgacaagttacttcgctgtctgagcctcagctttccct

SEQ ID NO: 458088 - DNA, 122 bp, Homo sapiens
ttagaaacaaatcacccggaaactctggtttcaacccgagtatgtatttagctcacaagccgcaggtcaggggtcaggctgggctcagcaggtggctcttctgtcctcgccggggtcactcg

SEQ ID NO: 458089 - DNA, 122 bp, Homo sapiens
caaaggtacaagctaccagtgtgtctacattactagggagagtcttggatcagctcccatcgaaaggtcattttgtaaagatactagagggtagagtcatgcatggaatgctactcctgtcc

SEQ ID NO: 458090 - DNA, 122 bp, Homo sapiens
gagcaacccggaagctcccctccgttccctttctagcaactatgcaaaccccaaagcaagcgcaggaccccccctaacccgtccacccaccgcgggaaacaagttaccttatctgcacccct

SEQ ID NO: 458091 - DNA, 122 bp, Homo sapiens
aaacaacagccttagcatggtgcagctgctgctgcaggtgcgtacagcccccctgagcctcgcgcccaccctatcctctgaccccaacccggctctggcctcagcccctagctctgaccccg

SEQ ID NO: 458092 - DNA, 122 bp, Homo sapiens
gccaaattaaactcggcctctggtcaggtctgcaactgttccccctctgtgggatggggccgggaggggaggggaggggagggggacaggacaggccgcggcccttaccccggggtacacgg

SEQ ID NO: 458093 - DNA, 122 bp, Homo sapiens
aggtgcaaaacaatgaattccaagcctcggaagcaaagaagcttaggatccgacggtggccgcaagatctcatcatggatctgacccctgctcagcgcgcgccatttcgtcgttgccaaacg

SEQ ID NO: 458094 - DNA, 122 bp, Homo sapiens
taaaggagaaagggcaggcagagactcttgctggtgccagcaggcacggaaggatgtggccgcggggacttggagtttagagggcaacgctgggtgtcataatgccggagatgaccccgggt

SEQ ID NO: 458095 - DNA, 122 bp, Homo sapiens
tacagctcccagcgtgagcgacgcggaagacagtgatttttgcatttccatctgaggtaccgggtttatctcactagggagtgccagacagtgggcgcaggtcagtgggtgcgcgcaccgtg

SEQ ID NO: 458096 - DNA, 122 bp, Homo sapiens
gaacatctacttgcaggtgaccctgtgttgggtgcatcgcacattaggaaatttcctgcacgttgtttttctgtcaggactttcacacagtaggcccttgataaggatttgctgtaccttgc

SEQ ID NO: 458097 - DNA, 122 bp, Homo sapiens
gggtggcaccaggctgtgaaggatccacagactggcatatgcaggaggaaatggggcgggcgaggagtaaggaccccaaaaagcaggggtagggaagggccctcccagcgccccactgtaat

SEQ ID NO: 458098 - DNA, 122 bp, Homo sapiens
ggcgccgtggggagcagtgaccgttctcaggagagtgtgggcgccgtgggtagcagtgaccgctctcaggagagtgtgggcgccgtgggtagcagtgactgctctcaggagagtgtgggtgc

SEQ ID NO: 458099 - DNA, 122 bp, Homo sapiens
acccagagggagctgattatgagataggagaggtggagaaaccggcgtgcaggtcccctgcgaggggctgcagcggcatcagggcctttggctcaatcccaagagactcatccagggcagaa

SEQ ID NO: 458100 - DNA, 122 bp, Homo sapiens
acgttcagtcgcagtttattaaagttagaagtgtctccatccaccccctacagaggcttgcgtggtggttccagtctgctaaatatttcagaatggggacctcattctatctactgatttat

SEQ ID NO: 458101 - DNA, 122 bp, Homo sapiens
gcggagctggtgcctgtgggtgcacgggtgtggtgcgttttaattctcggcagctctgtgcggcctggagggacgttctgtcctgagcaggggatggagctaccacacccgagtcctccctg

SEQ ID NO: 458102 - DNA, 122 bp, Homo sapiens
acacggagttttcaaggagcttctgtattcaataaaaacagctacttgtctacttgcacccgtctgttagcctctcgctggtcggcgggagaggggaggaggccagcgcctgatcggccaca

SEQ ID NO: 458103 - DNA, 122 bp, Homo sapiens
tttggttcactgaaacatctcacacctaaaacacctgaggtacaaaggcaccttgctaggcgctagacagctaactctgctgcagccactttgatcctagccttggggccagggatggcaca

SEQ ID NO: 458104 - DNA, 122 bp, Homo sapiens
cagccaccaagcccggctaatttttgtatttttagtagagatggggtttcaccctggtctcgaactcctggcctcaggtgatccgcccacctggactcccaaagtgttgggattacaggcgt

SEQ ID NO: 458105 - DNA, 122 bp, Homo sapiens
gaacatgggctttggagcctgacagctggttccagatccggccttgtccctgacacctttcgtctattgtcacccttttgacctcagttttcctttctgtagagtgggtatatctaccttct

SEQ ID NO: 458106 - DNA, 122 bp, Homo sapiens
actaatctgaattgtttgcaatggtaggaacttgttatataaaatgttaattaggtggcccgtgctcgaaaactgctctcaggatatgaccaatgggagagtagacctaagctccttcattt

SEQ ID NO: 458107 - DNA, 122 bp, Homo sapiens
ttcagggatgagggatcatgcatgatcagttaagtcactctgccactttttaaaataatacgattcacatttgcttcaatcacataaacattcattgcaggagttacacggctaatcattga

SEQ ID NO: 458108 - DNA, 122 bp, Homo sapiens
gctcgggccggggcgtggcctggcccgggggcgtggcatggaaggccggccgaggtgcagcgagccctctggtgccggacgttgcgcggccgcgacgcccgacgccaacgcaggcgcagcgc

SEQ ID NO: 458109 - DNA, 122 bp, Homo sapiens
ttaaaggtagtccctaccttttcacaggtaagcaactgctaaaagatgtcaactctctgtcgatgaagtaatgtcccagaaatgagtaggaaaactatgtgcttaataaatgtctgatgaac

SEQ ID NO: 458110 - DNA, 122 bp, Homo sapiens
ggtgcagaatccctgttttcatgccggagaggaaggtagaaagtgcttcataaagtcactcggaactcagccacttgtgctcagacatcccttgctcctgtggaagctgtactatctgcagt

SEQ ID NO: 458111 - DNA, 122 bp, Homo sapiens
ctgcatcacccaccagcttgccagggaggtgcttgcaagcagggacccacctcctcaccccgtcccggtccccccgcactcgccagagcactggggttgcagtagttgctcgatacatgcca

SEQ ID NO: 458112 - DNA, 122 bp, Homo sapiens
ccttccataaacggccagtaaatcttcccagagggtggtgggcatttccaactggccaaacgtggcctgtcattctaccatttctctcttccgacagcaaagtctggtagaatgaagaccaa

SEQ ID NO: 458113 - DNA, 122 bp, Homo sapiens
tcggcggcgggcgaggagcgcagggcgctcgggccgggggccgccggcgccatgggcaaccgcgggatggaagagctgatcccgctggtcaacaaactgcaggacgccttcagctccatcgg

SEQ ID NO: 458114 - DNA, 122 bp, Homo sapiens
ggtgcccgagagcgccgccggcagcaccatggacagcgccgggttgggccaggaggcgcccgcgctgttccgcccttgcacccctgccgtctgggctcctgctccggccgccggcggcccgc

SEQ ID NO: 458115 - DNA, 122 bp, Homo sapiens
ctgagagctctgtgcgcgcggcgtgcgggtctggagcctctcctcaacccacgcccttcccggcccagccttgcccaagccttactcagacagcttccgcgcctgccccgcccctccccgcc

SEQ ID NO: 458116 - DNA, 122 bp, Homo sapiens
agcctggcccctcctcttcctgtgtggaaactgggatttgaacggcgggcaggaagtactcgagtagggagtctggcctagtgaaagtctctgtttcctccttttcttacttttcactcaat

SEQ ID NO: 458117 - DNA, 122 bp, Homo sapiens
ttcttgtaggccttgcaggatcaggcttggttttggatcagggaaggccactcaggcatacgggctggctcacagtgaggcctgtcatagcagggactgtcattagaggttcatatccccag

SEQ ID NO: 458118 - DNA, 122 bp, Homo sapiens
accctcccagtctgggcccatcctccggcctcggccagccccttccctccctctctttggcgttcgcgttccctcggcctagcagacctcttagaatgtttgttttccttctgagaaagagc

SEQ ID NO: 458119 - DNA, 122 bp, Homo sapiens
gtcacaagaaatgacacagcaagctacaaatgtgaaacccagaacccagtgagtgccaggcgcagtgattcagtcatcctgaatgtcctctgtgagtatatctgctcctctctggcccaggc

SEQ ID NO: 458120 - DNA, 122 bp, Homo sapiens
cgggggcacacatgagcgcacacgcacgcccgggacggagactggggttcccagccccggcgggggaaattaactgtgtgcagcgtgcctcggagctgggctaacctatcccttgtccctaa

SEQ ID NO: 458121 - DNA, 122 bp, Homo sapiens
gattatttctctaaggagcctgtaatcaatgaattaggagccaaaatatggatctacttccgagaggacttaatattactattactccataacaaagagggcgccacagaaagtcacgccac

SEQ ID NO: 458122 - DNA, 122 bp, Homo sapiens
tcaagaatgatactcagtgtaaggattctcaaaacgagcatcagcaggttccgcccacgccggcctcctgggttcagttctctaataaccacctcccttccccgcctactccagccaatcct

SEQ ID NO: 458123 - DNA, 122 bp, Homo sapiens
taaacagcctctctcaaaaccaaaacaaccaccataacacaagcgaggacaggagacggccgcggagtccagaacatcagaacatcggctcctctgtccccggggaataaacatttggaaaa

SEQ ID NO: 458124 - DNA, 122 bp, Homo sapiens
acacggccagagcggagtctcgccacgggacaacctgccacatcccggctgcccaaagcccggcctaccaaggtgaaggctgaaccgccccctaagaagaggaagaaatggctgaaggaggc

SEQ ID NO: 458125 - DNA, 122 bp, Homo sapiens
gatgagatggaaaaaaacacagtatgttcaaagaataatgattagaccagtatcctcaggcgatgtgaaatctagattgtttcagtacagttgaatgcgtcatctaaatttcccaggtgtgg

SEQ ID NO: 458126 - DNA, 122 bp, Homo sapiens
gatggcggccgcgggtgctgaagatcccggagcacgtacacccgaaggccagcgagagctcgagactgaggcgaaagactgagcctgcccagtaatcgcctgtggaaaggcgacgacggcgc

SEQ ID NO: 458127 - DNA, 122 bp, Homo sapiens
ggggctcgcaggacctgggcggggctcgcaggggctgggcggcctgggggcggggctgggcggagcgcgcagccgcgcagcggtgggaggactgcggggctcttgaggccagctgcagagct

SEQ ID NO: 458128 - DNA, 122 bp, Homo sapiens
cctcatcatgttggtatcattgggaccagcgcacgccactgcaagatggcatttccaccgcgcatcaacagatcatttcaccactgctcaaggcatcgtaaattggacttatagctcagctg

SEQ ID NO: 458129 - DNA, 122 bp, Homo sapiens
ctgacacttcctcctccagacactagaggccgctgttggccccatcgcctccaccgccgccgcagaaatgaattcctaaaccagccttgctattccgtgacttgctccagattcaaagtccc

SEQ ID NO: 458130 - DNA, 122 bp, Homo sapiens
cagcagcttcgaaatcaagatgaatcagctgatggctcgtcatctgggggaggtgctgaccgagccccggtggctccagaactcacacaaccgcgctgtcctaatcctttcttccgaggaac

SEQ ID NO: 458131 - DNA, 122 bp, Homo sapiens
gaaaggaaatgagaagctcctacagggaacatatgaatacaaatgacgagaaggtggagccgcctcagtgccggtatgaaaaagtttccgtggtctgcgccgaagatcaaaccagtcacaat

SEQ ID NO: 458132 - DNA, 122 bp, Homo sapiens
cctatggggcaggtttgaggctctgagtcactgaggaaaaccagagcggcactacatccccgcccctcgatctcaattctcatctcctaatacatccagttgttttttttcctctcacctca

SEQ ID NO: 458133 - DNA, 122 bp, Homo sapiens
cccgcccctctagggcggagacttccggagctgcggactcactggagccgagaactggggcggcgcggcgcggcgcggtgcatttccaggcgctgctctccgtcgcagagaaccctgagctc

SEQ ID NO: 458134 - DNA, 122 bp, Homo sapiens
aaaggagtgcagaggacctggcctggcactggcttatttacctgagctcaaggagatccccgctggagcagcctctgcaaaagggagcccatgtaggccaggggctgtccaaactccagctt

SEQ ID NO: 458135 - DNA, 122 bp, Homo sapiens
aaatgaacactgcaaggtacgttttcaggaattgcatggcttccttccaaggagaccacacgtcatttcaaaagctcacggccaaaaaaaacccgcaccaaccgatctcactgcagccccag

SEQ ID NO: 458136 - DNA, 122 bp, Homo sapiens
gagtttgagaccagcctgtccaacatggtgaaaccacatctctactacaaaaattagcttcgtgtggtggggggcacttgtaatcctagctactcagtaggctgaggcaggagaatcgcttg

SEQ ID NO: 458137 - DNA, 122 bp, Homo sapiens
cgggtgttaaaaagggttgtgaccacgtgaaaatgtcctcagtgctcgaacgttgcaatacggtgcagtggaaattttttaaaggaatatggcttttatgtcttcatttttaaaaggattgg

SEQ ID NO: 458138 - DNA, 122 bp, Homo sapiens
gcagggagcactggctggcctgtgagtcctggggaacagatgctccttctgtggggtccccgggccggccgaccgacggcaccgcaggccagcactgggcaccccgggagcggcctggcctg

SEQ ID NO: 458139 - DNA, 122 bp, Homo sapiens
cagatccaaacatgcattccctttccagatcctctgtcctaggcggtgggcgggggcagccgggggagggcgggcgcctagcttcagatccttgatccatcttatctttgcacagctgtccc

SEQ ID NO: 458140 - DNA, 122 bp, Homo sapiens
ggcggtgcggccactagtggataccggggccatggtctttgtggtcttcggcattattggcgtcaaccgcactcggcaggtggacaaccacgtcattggagacccggtacggggcatgcgtc

SEQ ID NO: 458141 - DNA, 122 bp, Homo sapiens
aaccttttcccagcaggtttgccgcgctgcccacgactggcaaacaatgaccttacagaccgtgaagaggctgttggctctgccctcgccggtgcctccgaagacggcgacccgcagcggcc

SEQ ID NO: 458142 - DNA, 122 bp, Homo sapiens
ggctccagctccggctgcagatgggtggaaaagtcagaggtgcagcagctgctccccagccgcgaacggctggtgaaatgggaatctgatggaaagaggctgcacggtgctcacctgagtgg

SEQ ID NO: 458143 - DNA, 122 bp, Homo sapiens
ctgctgcatcactctgctgctttacccccttccccgccccccaacaaagcatgcgcagtgcgttccgggccaggcaacagcagcagcacagcatccagcaacagcatcagcacccgaagccc

SEQ ID NO: 458144 - DNA, 122 bp, Homo sapiens
cacgccccaactccccacaccgcgcggcaacccctacgtattccccagccccggacaccccgaaccctcccgtccggtggaaatgcccgctcccggtggaacccaggacacgtcagctctgt

SEQ ID NO: 458145 - DNA, 122 bp, Homo sapiens
ttggggcggagtaggcctgggctccctgagccacaggactgtatctttgggcacaattcccgtgttgttcaccgtctcctaagtccccggtgcggtgctgggtgagagacgcgcagcacacg

SEQ ID NO: 458146 - DNA, 122 bp, Homo sapiens
tgttgcttattctgggagcccaatccgaggctgggggaggtgggcgcggggctatttcagcgttggtggagcgcgggccctgtcattgcgcgtctgtctgctcctccttctcgcttttctcc

SEQ ID NO: 458147 - DNA, 122 bp, Homo sapiens
acaactgagtggggcagtccccacttacccgagctgcttgcaggtggcagatccacagtccgcttttcgtggccggagcgcaccctccgcaaaggcaggccacatccggccgcccctggaac

SEQ ID NO: 458148 - DNA, 122 bp, Homo sapiens
cgccaacgctccctggcggcgcgcgcaccccctcagccagtcctggagcgccgatcggcgcgcgcccagactcctcggaccaatcagcggagctccctctccgcagcgtgtgaggagggcga

SEQ ID NO: 458149 - DNA, 122 bp, Homo sapiens
gggagatggttgggttgacatgcggctcctgacaaaacacaaacccctggtgtgtgtgggcgtgggtggtgtgagtagggggatgaatcagggagggggcgggggacccagggggcaggagc

SEQ ID NO: 458150 - DNA, 122 bp, Homo sapiens
tccacgagtctgagacaaaggcgttggcagagctagttcgttctggaggctcagcgggaacgtccacccctgcctgtctcctagtagtcctggcctgcggcagccaactccagtctctgccc

SEQ ID NO: 458151 - DNA, 122 bp, Homo sapiens
gtgctgcccgcgaagggctgcctcgcccgccgccgccgccgcctccgccgctgccgccgccgccaaggagagaaccctgccatcgcgcctggcccggcccagcccagcccctaggcaacctg

SEQ ID NO: 458152 - DNA, 122 bp, Homo sapiens
cccgcgggcgccggagccgggcgacgcaggacttggacgtggccacgcccggccaccgctcgacaccccagctccccatgcacggcctaggtctacagggaggctagaaagaggagagcgga

SEQ ID NO: 458153 - DNA, 122 bp, Homo sapiens
tgtcgaacctcacgaactgggtgtcgtccacgtagcccactgagatgaagcggggctccccgcggccgggccgggacacggaggtgtagaaatacctcatggagtgggagcctgggggtgag

SEQ ID NO: 458154 - DNA, 122 bp, Homo sapiens
cacttcattttgcagcatggacaacaataggggactacaactcccaaagaggactgcgctcgtccactggctcagaggccaatggacgcctggtacatgaccggcatcgactaatcagggcc

SEQ ID NO: 458155 - DNA, 122 bp, Homo sapiens
ataaattccagaacccctagacccggagaagcgcatcctagatccggctttctaggccggcgaggacccagagcttccgaaactcctcagaccactgacggagtgactctgggacaccacag

SEQ ID NO: 458156 - DNA, 122 bp, Homo sapiens
agagagagtcgagagagggaggcggcggtggggaggaggaggaggaggaggagcaggcgccgccatggccgccgctatcaccgacatggccgacctggaggagctctcccgcctgagccctc

SEQ ID NO: 458157 - DNA, 122 bp, Homo sapiens
aagagtccaggggaatgaggaggggctgggccgggcagcctcaggcccagcgcaggttagcgcttctcacgcctgagcagagatcagctactgccactgcggggaggacagaaggacccagg

SEQ ID NO: 458158 - DNA, 122 bp, Homo sapiens
aaatgatgatgtgctcactaagtaattgatttaatgaagttcctatgaaactattaaacccgggtggaggtcaggctggaggcgccccagagcgcccattgtgggctgtttaactccaccag

SEQ ID NO: 458159 - DNA, 122 bp, Homo sapiens
tctctgtcacccattaagttttgtttcttctgctgaggatgtctttccatgtatttggatcgctcctgatatcttagtgccttgtttttgtgttcaagaaatgattgatgaattgaagggaa

SEQ ID NO: 458160 - DNA, 122 bp, Homo sapiens
cggcacaaccagacgcccagtcacaggcgaggtaaggtgcttggctccatgggtggggcccggcaaggtcacactggcccttgctttggagtcaggaggcctctcttcttcccacagagccc

SEQ ID NO: 458161 - DNA, 122 bp, Homo sapiens
gcagcgcaagcagttgggcgccatcaccatggccaggttgctgacatccatcttggtgaccgcgacgttggccggctgcacgaagacctggtggaggagcgagggtgggcgcggaggggcgg

SEQ ID NO: 458162 - DNA, 122 bp, Homo sapiens
acaggacatgggtcctacagacaccatctagcaggtgaggcagagatgacccagagaagacggagaaatacacaaccaccaaagctggggatgaaattaaatctgacctcagcccaagaagt

SEQ ID NO: 458163 - DNA, 122 bp, Homo sapiens
ggaggggagaggtgcattttggaggaacttgataggaggtgccttgggacaccctggaggcgacgaagctgcgtctctcagactgccactcttactcctcgccctgtagcagaaccccaacc

SEQ ID NO: 458164 - DNA, 122 bp, Homo sapiens
acttaaagatcgcgaaacccgagccctggacgcactctgattggaccggctgagctgcttcgccacgtagccctggggcgcccaccagcacctggacagcatccatttcctgtagaggtgcc

SEQ ID NO: 458165 - DNA, 122 bp, Homo sapiens
gtgcccctttgtcgccagagacagcgcctgcagtgcgtgagctgccccctgaactcctggcgcctggttgcctgggcaaccctcttctggggcgcctccgcgacctcttaccattggtttag

SEQ ID NO: 458166 - DNA, 122 bp, Homo sapiens
gttttcccatttgtacaacgacaagactaacccagagaagcgggttcactgttgcgataacgcgtcctaccctttgtttgacctctcccactttccaacacacccctccttcgagaatcagc

SEQ ID NO: 458167 - DNA, 122 bp, Homo sapiens
tgagtctccccctcactgctctggctctgatgctcacctctaaggggccacacgcagcttcggaggccgtgccctaggtttcatttagtcttgccattaatatagcaacggagatagcccca

SEQ ID NO: 458168 - DNA, 122 bp, Homo sapiens
gtcactcagcccgcgcggggcccccgattggcggcctagccccgttacgcactcgcctcgcgttcacatacccggggagggcagtagaaaggtgatcaatcttcatcaggctacatttccaa

SEQ ID NO: 458169 - DNA, 122 bp, Homo sapiens
gcgtctcgtcccggggtcgcgcgttgctccgggtgccaggttcagcccgcgcggcgacagcgggcttcggcccgatttgatgtatgtttgcgtctagacgtcgtcctcactgtcatcgcgct

SEQ ID NO: 458170 - DNA, 122 bp, Homo sapiens
gctccctccctcgctgattgacagttccctgtccctttccagaagtaaggctccttaaaacgaaaggcgctccggggccgcgcgtattccgcgtcccagccaacccgcctccggcccgtcag

SEQ ID NO: 458171 - DNA, 122 bp, Homo sapiens
tatttttgcttcaaatgtcacattttacgggggtctaaaggtcttaggctggagtctttgcggatgattgccaactgtagctgaatctatgagctgggatgtacccaagccagtgcaatcgc

SEQ ID NO: 458172 - DNA, 122 bp, Homo sapiens
gtcgtggaagtcttcaaacctcacagaaagcaaggaggcgctggccgtggcggcctctcccgtctcccaggcccgcgtccaccctccccgcgccggtgccctccggacagaggtggaagccg

SEQ ID NO: 458173 - DNA, 122 bp, Homo sapiens
ctcgcctcagcctccctggacagcgacggcggccggaaacaccgcctcctcccacctccccgggaccgacccggaaacacactctccatgctaaccaagccctcccgcccctcccccgggaa

SEQ ID NO: 458174 - DNA, 122 bp, Homo sapiens
cccctcaccctccagtctcttctcaaagcagcaggagaaatccagctaagttctccttctcgcccattgcagcctcgagcttctgggctcaaacgatccttccgcctcggtctcccgaagtg

SEQ ID NO: 458175 - DNA, 122 bp, Homo sapiens
cgtccaccagcagcagggaggtccagggtctcaggtcagggagccgcatggctctgtcaacggatacgagatgagaaatcatgggggtggagtcccaatccttgtccctgccctcctacccg

SEQ ID NO: 458176 - DNA, 122 bp, Homo sapiens
tccacgtcgcctaccggggcggagcgggggtggctggagcagtctggacagtcatggcggcgactgtggcgacggcggcagctgtggccccggcgccagcgcccggcacggacagcgcctct

SEQ ID NO: 458177 - DNA, 122 bp, Homo sapiens
tagataacgcgtgtagctccatcttggacgccaccatccgtgtggtcatctcggcgtccgcggctactccagccccacagcagctgaggcaaaagggaggatcggtgtgggcagggctggga

SEQ ID NO: 458178 - DNA, 122 bp, Homo sapiens
ctctgggctgacgacagaggcggtcctgtgctgggaagccagagacttagaggaacctcccgggtggatcccaggcccttggggaatcctctcctactcctggcccctaagtcaggtgttca

SEQ ID NO: 458179 - DNA, 122 bp, Homo sapiens
ctaattagcccggaagctgaatagcggcgggtacataccgcaagcggagtacggaaagcacgcagggctgccgctacctggcgcacgcgcactgagctgcggctgccgagcccgcgccccgg

SEQ ID NO: 458180 - DNA, 122 bp, Homo sapiens
catggaacacggaattttcgcattgcactgttactagtcacagctgcctgttgttacctccgataatctgtcttcctgggagtccaggcttctgtggttggtctgggctgtcacacgtaagg

SEQ ID NO: 458181 - DNA, 122 bp, Homo sapiens
ttgacaaactgaggcggttctgcaggaggaaggaccaggggagggggtcagagccatgctcgctttgatccagccactgtagggggtcacccttaaggaggaccctcgccgtgctgccccta

SEQ ID NO: 458182 - DNA, 122 bp, Homo sapiens
aatctctgggcacagaactggcacaggaagtccttgcatcctgtgtggaccaccaggtggcgtcgcacatccttccgggtgtagaagcatctttcacagtggtcgcactggtgcttcttttc

SEQ ID NO: 458183 - DNA, 122 bp, Homo sapiens
tagagtatggttccgggtctgctggctagagcgtcacttcttccgcaggaagcggaagagcgatcgggtaggcggctctttgtcgaagctagaggaccggcaggcggcagcagcaactacgg

SEQ ID NO: 458184 - DNA, 122 bp, Homo sapiens
ccgcccacggggcttattatccttgattgcctgttttctgctttctgtcaccatggaaaccggcaaaaaacgtgactctgctcagatttacgcagtttgctcgctgaaggcctagtccccac

SEQ ID NO: 458185 - DNA, 122 bp, Homo sapiens
aggcgtctgtctccgcggtggcagcgttttcctgtcctctccaggactgggagagtgcagcgctcctcgttccctttcctggtgcaggaaagtgagaccgccttcagccttctctctgcgcc

SEQ ID NO: 458186 - DNA, 122 bp, Homo sapiens
gctgaaggctgaagctctctccaaacgctcacatctgtgttgaatgtgtcgtgattatgacgtcaattttattataggtttatgaggccttgaaacactgtaaagacaaatgcgtagcttaa

SEQ ID NO: 458187 - DNA, 122 bp, Homo sapiens
gagggagcgaacattgggcagagggtaatttcaacaaaggacggcaggctccggggatcccggcttttccctgagttctctgggttggaaggagagggtccgggctctgtcggaggagtggg

SEQ ID NO: 458188 - DNA, 122 bp, Homo sapiens
ccctcacggaaatggaattgctgcctgtgaggacaacaaggagcacttcagtgatgggaacgacaggaagccacggagctgctccgccccatccatgaccaactgccgtgaccccagcaaca

SEQ ID NO: 458189 - DNA, 122 bp, Homo sapiens
gggaggccaaggcaggtagataacttgaggtcaggaatttgagaccagcctagccaaccccgtctccactaaaagtccaaaaattagcccagtgtggtagtgtactcctgtagccccagcta

SEQ ID NO: 458190 - DNA, 122 bp, Homo sapiens
cagggcaactgcatcgtctttcagctgttggaaaacaaagcccagacacttggcacctcccgggaatttccatggtgaccaaagcataacagccccgtgtgtggttgccaggacccactagc

SEQ ID NO: 458191 - DNA, 122 bp, Homo sapiens
tccagaccagcctgggcaacatgttgaaaccccatctctacaaaaaagacaaaaattagtcgtgtgtgatctcagctactcaggatgaagtgggaggattgcttgaacccaggaagtggagg

SEQ ID NO: 458192 - DNA, 122 bp, Homo sapiens
atctggccgcagctgggctgcagtgcgtgcgcgcctggcctggtggtccgatgggaagcccggggcggggcagccgcggggcgggggcggggcgtcgcggagataggccacgcccctgcccg

SEQ ID NO: 458193 - DNA, 122 bp, Homo sapiens
aaagttggtttattcttatcagactcgaaagattcagaagggttccaaacaatcctctttcgcagctatactaatgatgagaataagagacaagagatactacctttatattgcaccaaatg

SEQ ID NO: 458194 - DNA, 122 bp, Homo sapiens
gtgaagcaccgcgctggggttggatccgcctgcctcagcctggctgagctgcaggaagatcggtattcaggcagacagcatacgcagtttggaagaaagcaaagtgctttgcaagtgaaggg

SEQ ID NO: 458195 - DNA, 122 bp, Homo sapiens
ggggtgcccagccactgcttcccactttcttaattgcagcttatccctctggcaggggtgcgggaggggcagcatgagccaaatgtccaccttcagccaggggtgacagcgtgtggagggtg

SEQ ID NO: 458196 - DNA, 122 bp, Homo sapiens
aattttgaaataaatttgattcaattctgcagcctcccagctggttttgtgtatctaagtcgtacatttaaagaatataaacaatccttacaggaatgtaaaatttccaactaccttctccc

SEQ ID NO: 458197 - DNA, 122 bp, Homo sapiens
aagcaatttcagccttttcagatgagaaaagagcagccccggccgtcattcattcgggtgcgggaatcacatttgggaccaggaagccctgattttataggaaacctcgaggcaggctcgga

SEQ ID NO: 458198 - DNA, 122 bp, Homo sapiens
taaacctgaattccgcgggagagaacggcgtccgtttctctcgcgacacttcatggataacgtagatgcttcaagtccagttcggctctcattggctaccgcacgcagtgagggggcgggga

SEQ ID NO: 458199 - DNA, 122 bp, Homo sapiens
gttttggtctcttatattcctccaagatgttttccctgcctaggggctaaggcctctctgcgttaggcctcttcctaggcttcacctacccagccatatacagcaagtaaaggcgccctggt

SEQ ID NO: 458200 - DNA, 122 bp, Homo sapiens
aaaccaccggtgtccgggacagatactctgacgcattctcccggaacaccctggggactgcgagaaagcccctgctggctcactcgtttgctgggatcagttcccatcaggcatgcggctgt

SEQ ID NO: 458201 - DNA, 122 bp, Homo sapiens
ctctcaaactcctggagttttcagtatccccgctttagagatgaaaaacctgagacagagcgatttaaataaactgcctgatgtcattcagctaagtggccaagctgatgcttgaacccggt

SEQ ID NO: 458202 - DNA, 122 bp, Homo sapiens
tcattttgtctaaaccaatcagagaagcgtagggtttaacatcatcagtcactggggagacgcctggggccagtaacctcctgaagacttggctgtttgaccagggcagagtatggcatgta

SEQ ID NO: 458203 - DNA, 122 bp, Homo sapiens
aatcaggcatccagtacactggctgtggccccgccccgccaggcactcgctccgcctcttcgcccccattggttctaagcgccgcccggcatccctgcgattggctaggccgggcccgtcgc

SEQ ID NO: 458204 - DNA, 122 bp, Homo sapiens
agtttaccgggccgcgagggtgcaggctgcgcagatggtgtggtcctgcgccccgagggccgcagcagctcatccggcagctcccaccccaacaacctggaagggggcgggacttccgtttg

SEQ ID NO: 458205 - DNA, 122 bp, Homo sapiens
cgactctaatcctgctgggggactctttttgttgctttccgcatatcctgctgtagtttgcgtgctgtctgctgtatgatttttgtttcgtgtgtgcctttttgggtcgaagaaaaagggag

SEQ ID NO: 458206 - DNA, 122 bp, Homo sapiens
tgagctccgcgggtccggaaacaaacacccagccaggtggtggaaggccgccccttcctccgaggctggcacctgattggacagttccacacaagcgcctctgattggctagggatcctgac

SEQ ID NO: 458207 - DNA, 122 bp, Homo sapiens
accaaccaaaaggctgcactgagcttcaaaatctagagtagttttatttgggtttcattacgtaggcatgactcattggtcatatgactgaactcagctccagatcccctcctctcccagac

SEQ ID NO: 458208 - DNA, 122 bp, Homo sapiens
ctgccgcagctggagacgcagaccggggcatccccccaggactgggctcagcttcgaacgcggacagggcgccccactgctgaactcggtgccccccttaccacgctccagttcgcctctaa

SEQ ID NO: 458209 - DNA, 122 bp, Homo sapiens
ctcttttttaaattaattaattcttaatttatttatttttgagacaaggtctcactctttcgcccagactggagtacagtggcacaatctcagcgcaccgcaacctctgccacccaggctca

SEQ ID NO: 458210 - DNA, 122 bp, Homo sapiens
gccacgttcatcccggggctggagctgctgcttcacactgacttacacggtgagcagcggcggcaggggaggaggtggaacccgcggcgagctgctgcttcacactgacttacaccgtgagc

SEQ ID NO: 458211 - DNA, 122 bp, Homo sapiens
aaggtgaagtccaccatggcctggaacaatgagatggccttctcagagtggccagcctgccgcagaaagtggcactgctgaagaaagagtgctgcgaacaggagggcaaaggggaagaagcc

SEQ ID NO: 458212 - DNA, 122 bp, Homo sapiens
agatacacctaaaactaaatgacacactgtctcatgggaaataataatttttctggaatacggttctgaatatttgcaattacacaaaagaaagaaataagaggaagacttacaggatttta

SEQ ID NO: 458213 - DNA, 122 bp, Homo sapiens
aagacaaacacatacagggtgctctgtaagctgaaaagctccccagatgttagcaggtaccgttggaggcaggcctgttttcagctttgggaactatggatgtgtaaggctgacctcaatct

SEQ ID NO: 458214 - DNA, 122 bp, Homo sapiens
ggcacagcccaggtgtcggcccccaagaacattctggatcacaattcacagtagtgattgcgatcagggtcacatgtggctgaatgtatttacggaggacgccacagccgatctggctggac

SEQ ID NO: 458215 - DNA, 122 bp, Homo sapiens
ggtccaaagtggttggaggagagcgcaggagcggaggctgcggtgggagccactttcccccgcccctccacaaatcgcacctgggcggagcgagggagtggggggagccctgtgctgcgccc

SEQ ID NO: 458216 - DNA, 122 bp, Homo sapiens
tgtgagtggcgtccactgggatgccttctctgcagtggtcacagggagacaccatggaaccgagcccctatgtcctgtgcaccacaacagccagccgtgacccactccctcgtccacgacca

SEQ ID NO: 458217 - DNA, 122 bp, Homo sapiens
gtagcagagtctagtgggaaaggagagctgtcagaggcctggtgggagccaggagcccagcgcaggagctctgggcacctaatgcgcgtgagtccataaatatcaccacaatagatactata

SEQ ID NO: 458218 - DNA, 122 bp, Homo sapiens
gtcactcagcattgtttgagtaagctcactctctctgcaccgcagctcacactcaccgcacggcagctcactctcaccgcacggcagctcacactcaccacacggcagctcactctcaccac

SEQ ID NO: 458219 - DNA, 122 bp, Homo sapiens
tgaggcaaggtcctctgtagagactaagaagggcagagctggggcaaatggctttggaggcgtgctgaatgttgggagaggaagcagcccaggaaataggcaaaagggaaactcagaggtgc

SEQ ID NO: 458220 - DNA, 122 bp, Homo sapiens
acctctcatctttctattatgacatatgacacaaatacagactaggacacaccatataaacgtatcttaggtgatgactgtgacgcaaacctcacaatacccctgcagttcaagaaaggtca

SEQ ID NO: 458221 - DNA, 122 bp, Homo sapiens
agctgcggtattgcagccggttatacaacgtggggaggcagcctggctccccaaagacagcgcagcctcgttcccggagggcggcctgcctgggacctgccgggcactccgccaccctacgg

SEQ ID NO: 458222 - DNA, 122 bp, Homo sapiens
ttggtatgcacgcaaatcacctgggaatcttattaaaatgcagagtctgatttagtaggtcggggtgggcaataggctgagactctgcatatctaaaactccagggtgacgttgatgcaggc

SEQ ID NO: 458223 - DNA, 122 bp, Homo sapiens
ggggggtgggtgcggaggggaggcgggctgcagggatgcccacccgcttgctgaccacctcgacaatgcccggggggaagtagcctatgcggtctgtgcccctctggctctcgtggatgtgg

SEQ ID NO: 458224 - DNA, 122 bp, Homo sapiens
gagagtcacaagggcatttgccagtgtaaataagtttcctgtgagaagaacaattggacacgggtcagacactttagcaagttaagtattctgacaaaagataaaggtcaggataaaaatga

SEQ ID NO: 458225 - DNA, 122 bp, Homo sapiens
atgggaagtggacaggaaacatgaggtcatgacctgcaggcatctttactgcagctctgccggcctggagggggagagggggaggaagaagtatgcgctgcacatttctgaggctactgcat

SEQ ID NO: 458226 - DNA, 122 bp, Homo sapiens
ccacagaaagccaaataggctcgactgagcgatcacctaggacgaatcgcctccagttagcgtgcttccaccttccactcggaatgctccaagcagggcactcccggggctttgtttctatc

SEQ ID NO: 458227 - DNA, 122 bp, Homo sapiens
ggccctgccctcagatccggaatcccctcgagccgctgtgcaggcttcctgtccctaccgcggttcctgagaggtgacactaaggactcctgggtgcttaaaaaaaaaagggaggggctgag

SEQ ID NO: 458228 - DNA, 122 bp, Homo sapiens
atagcaaggccacatctagcccaggatcacataaaaagggctgtttcctcccctgaggaccgactgtgtggaagcaccaggcatcagagatagagtcttccctggcattgcaggagagaatc

SEQ ID NO: 458229 - DNA, 122 bp, Homo sapiens
atgtgcttatctacccacagaccctgaagttccctgtggccttggaaaagtgcagaaacccgccaaaggcccatgctcctacactctttgggaacacagaagcatgtgcctttggcaggctc

SEQ ID NO: 458230 - DNA, 122 bp, Homo sapiens
gcagccctggctaagaagaaacttcctgtgcccatgcacatgccagaagcatgcccgggccgcagtcacaaatgccagacaagagacacaggcctgccctcatgggatccaggcgctacttg

SEQ ID NO: 458231 - DNA, 122 bp, Homo sapiens
agaaagcgtttgatttatgagcgtaggacgaatcgcatccaggagctgcgcagccctggccgctgccgggacgccctgctccgcgctgagcttggggccagaaaccagccatagtccccaca

SEQ ID NO: 458232 - DNA, 122 bp, Homo sapiens
caggtagctttagagcaggtggtgttcagggttcccatgcatgctctgtgccagcccttccgaccggctcacttgttgcttcactgaaacctcacagtaacccttgaagaggcaggtactct

SEQ ID NO: 458233 - DNA, 122 bp, Homo sapiens
agagccccacaatggcttcggtgcctgctttgcaacttacccctgccaacccaccacccccggaggtgtccaatcccaaaaagccaggacgagttaccaaccagctgcaatacctacacaag

SEQ ID NO: 458234 - DNA, 122 bp, Homo sapiens
cctaggggtgagcccaccagcaaagccagtgacaggcctgggtgaagggtcaccctcctccgggagctgaaatgggaactgaggaaggaagagaagccactggaatattttaagcaacgaaa

SEQ ID NO: 458235 - DNA, 122 bp, Homo sapiens
agctgctccacggtccacgcccgctgtggaacggccgccgccatcttcccccgctgcctccgctttactgagccagcccgccgcagttcggcatcgccccgccccctagggcggggcggggc

SEQ ID NO: 458236 - DNA, 122 bp, Homo sapiens
ggcggcctgcctgggacctgccgggcactccgccaccctacggtgatgcagcaagagccgcgcggtccctttaagaaacccggctaggcgaggcccttctgtgatcccgtctcctcccttgg

SEQ ID NO: 458237 - DNA, 122 bp, Homo sapiens
agtttgtaacagtaaattaaagttgttagaaacagttatttaaaaagttgtttgaaaagacgaatgatagtaggtccttgataaatataaagaatatatgagtgaatcttaggttattctga

SEQ ID NO: 458238 - DNA, 122 bp, Homo sapiens
aaagcatgttagccttagtccacactgtcatcgccccggggtggggaggacggtggggcccgtgtggttcgcaatgccccacatcctgcacctcaggggtctgaggacagctgctccccggc

SEQ ID NO: 458239 - DNA, 122 bp, Homo sapiens
tggtggcagccatcccctccataagcccgtggcccctgtacagagacgaattggcgctcacggactcaccctgcgaggcagcatctgcgtctgcaggacttcccggcccttggccgcacatt

SEQ ID NO: 458240 - DNA, 122 bp, Homo sapiens
cactctggacttctacatggcccggcttcacggagccatcgagcgcgaccccgcccagcacgagaagctcatcgtccgcatcaaggaaatcctggcccaggtcgccaggtgtgtgccgggcg

SEQ ID NO: 458241 - DNA, 122 bp, Homo sapiens
ctacagacatgacagcatgactacagacatgacagcacaactacagacatgacagaacttcggaagcactaagataagtgtatccaccacaggagcatctttattttgaacaaaccgggtca

SEQ ID NO: 458242 - DNA, 122 bp, Homo sapiens
tggcgggacaccagggccaacctggagcagcgtgagggccacaagccctgaggcagaaggcgtgggtttgagttctgaccacttcagtttgtgagtttgaaactaaaagaggaaaggatccg

SEQ ID NO: 458243 - DNA, 122 bp, Homo sapiens
ccacttagctggagcttttcagaaacacaagttctggttgtgctctggacatcctggggtcggcacccacatcttcacacgctcaagttgagggggaaacttgttgattttaagagtttgtt

SEQ ID NO: 458244 - DNA, 122 bp, Homo sapiens
cgccccgccccttcctctcagttcagcagcgccggcggggcgctagtgcgcaggctcggccggtccctccagcccgcagactgcgcgcagggagaccttccccaggttggtcttcccaggtg

SEQ ID NO: 458245 - DNA, 122 bp, Homo sapiens
cagacccatgagagttacagatccctaataacctgggctaaataatccatgtctgccgggcgcagtggctcacgcctgtaatcccagcactttgggaggccgaggtgggcggatcacctgag

SEQ ID NO: 458246 - DNA, 122 bp, Homo sapiens
gcgctgcctggagacggtggagaaagccaaccttctccttctcttttgcctgcgctgggccggcgttagaattatatcccatcctcaccttactctggtttatccttgtcagtgcttgccac

SEQ ID NO: 458247 - DNA, 122 bp, Homo sapiens
tgctctacaccagggatcccctcggtctttggtctttgcatatcatagatactcagtaagcgctctcccaaaggattactgacttaacaggtagggtaatgtttatagccaaggggaggtga

SEQ ID NO: 458248 - DNA, 122 bp, Homo sapiens
atcattatcagagacagaaaaatataactgtagtgaagtggggcccagggtaactgaaatcgcaagcagatctccctgaaggaagtccttgaatctggcctcccatccaagccaaagaaatg

SEQ ID NO: 458249 - DNA, 122 bp, Homo sapiens
gggcggtaaatcccaagccgcttctccaacattccttttggaaaagggagctgtgtcttccgttcccttgtctactctgagctctgcccacaggatgctgggcagggctgcgccattgcagc

SEQ ID NO: 458250 - DNA, 122 bp, Homo sapiens
ggcaggggcataggcaaggccagcccggtcccgcgctcccgtcccgcggattgcagcccccgttctggtgcctcagccctgaacccaggggagatggcccagttcaggaggcacgtttagac

SEQ ID NO: 458251 - DNA, 122 bp, Homo sapiens
cccttcccggccaggcgcggtggctcctgcctgtaatttcagcactttggggcgccgaggcgggcggatcacgtggtcaaatttctagaccagcctatccaacgtggtgaaacctctctcta

SEQ ID NO: 458252 - DNA, 122 bp, Homo sapiens
aaggatccggcagctgcacctagactgatccaagcaacggaaacgccagcggccccaccccggccctgcccggcttggcccgtcccacccccgccagggccccaaccgcaggccggccgcgc

SEQ ID NO: 458253 - DNA, 122 bp, Homo sapiens
ccctagcggtcagggtagcagcttggacatcccgccagacgtgaattcaaatccccactccgcaagtcgtgcccatttgctgagaagcctacagccagagcgtttcacatacattatctcat

SEQ ID NO: 458254 - DNA, 122 bp, Homo sapiens
gcgcatctactgtgcactctctggttcagctgctgatgcccaagccgtggccgacatggccgcctaccagctggagctccatgggtatgaagctctggagttctgactccccacccactaga

SEQ ID NO: 458255 - DNA, 122 bp, Homo sapiens
ccagcgagagcaggtggctgcagccaaggtgacagcaaaagacccccaagatccgccacccgagcacgtgcgcccgtcaagctccaccatccgagcacgtgcgcccgtcaagctccaccatc

SEQ ID NO: 458256 - DNA, 122 bp, Homo sapiens
taatatagagaagatcctggcgcatttgaagtggtcagtaaatacgaaatctcccagtaacgaactacctcccccaaagctactgagtaacccagggtttctgtaactttctgtgaatagga

SEQ ID NO: 458257 - DNA, 122 bp, Homo sapiens
aagtcaccgtgccgctgtgagagccacaagagcgtgtgccccagaagtggtccagacagacgctcgagacccggagcccgtttccatggtgagacaagcgcccccttggaaaacatgtttac

SEQ ID NO: 458258 - DNA, 122 bp, Homo sapiens
ggcactgggtcggctgctggtggagtgcggggcagaccactcccctccctgggtggggggcgcggcctgagccgccccgccccgccccgctccaccaggtcgggccaggcgggcgccgggag

SEQ ID NO: 458259 - DNA, 122 bp, Homo sapiens
tgcttccctctcagagagacacagaggcgcctaacagaaaaccaggactccgtcctccagcgtcctggaatgcgagcagagtcaaaaagggacggccttcatcagagccacttccctcccag

SEQ ID NO: 458260 - DNA, 122 bp, Homo sapiens
ggttctgataaagaagtccttttccagtttcaagttcttaactctgtgccagcactgagccgagtgctcagcaagcgcctctccccgcgagtcctcagcaagcgcctctccccgcgagtcct

SEQ ID NO: 458261 - DNA, 122 bp, Homo sapiens
tgataagaaccaaggccagacaccagatcaatgtaattcccattggatcaatcaaaagcccgctgcataatctctctcttctactagggagcaaggaaaacttcttaggagtctgataaata

SEQ ID NO: 458262 - DNA, 122 bp, Homo sapiens
tgctgcagtcctcactcacgtagccttcccaacagatgcacacaccgtcctggcacacgccgtgctggctgcagtcattcgggcactgcctcacaccgcaatcctcgccagagtagccgtcc

SEQ ID NO: 458263 - DNA, 122 bp, Homo sapiens
aaggacctggccctttaagatgtctgacagtgccctaagggcacgtgctccacaaacaaacgggctataaagttacttttaaaaaggtacgttctggcattctggcattctggccaggtgcg

SEQ ID NO: 458264 - DNA, 122 bp, Homo sapiens
agggcctcccgtgaacacggcaccctacgttgccatagcgacgccatcccagctctgagccgcaacaaagcggcagtgtctgtgtctcacctttggccatcttgttgagaaccatgtcgatc

SEQ ID NO: 458265 - DNA, 122 bp, Homo sapiens
ataaaggaggggagactctttgcctctgtggtatcagggaatgcttctcagagcgggtggcgtttgccctgagacttgaagtaggaatttaaaaacatagaaatgcagtggaacgggaagaa

SEQ ID NO: 458266 - DNA, 122 bp, Homo sapiens
tgatagcctcaccagatcctgtgctgtgtgtgagtgaagcgtcaggagtgagcaggtatacgtgactataagtattcattttggctgtccaaaccattcttggagactttttctttcttttc

SEQ ID NO: 458267 - DNA, 122 bp, Homo sapiens
gacccccacagcgctccctgactctcacggagcatccagggcccagggcgcggctgagtccggtgccacctcacctgcgtccagccccaccgccggctccccgacagcggcttccggccggg

SEQ ID NO: 458268 - DNA, 122 bp, Homo sapiens
tgcgtgtgtgtaggggtacgcttgtgtccctaacgagaagttgtcagttgtgtgtggttccgtctgccgggatagtgtttttctgtatcagtgcggaactgtgtgctgggaacaaggctgtg

SEQ ID NO: 458269 - DNA, 122 bp, Homo sapiens
ctgtggtaggcctagagcctgggtctgttggggctggcctggtgcttgggtccatgggggcggatatggcatcagggttcactagagcaggtctggttcatgacaaagttggatattcacct

SEQ ID NO: 458270 - DNA, 122 bp, Homo sapiens
cagtagagatggagcttccagaaactcttccgaggcaccagctgagaggtttaagaaacccgcacaacgcctgggaaaatggtgcgtggacgcgtcttccgagcgcaaagcccaccaaggcg

SEQ ID NO: 458271 - DNA, 122 bp, Homo sapiens
tgttccagggcactctcgcagggaaaacgccgcctctgactacacttggggtggttaagacgagatcttcaaatgaaaattctcaacgctaccgtccactctctcatacgcttgaattccga

SEQ ID NO: 458272 - DNA, 122 bp, Homo sapiens
aaacccaaaacacagcttacttctgcttactgcccatttccaagaaggccaaaaattctgcgttgtttcctgctgcatccccagcaactatgcctggcacatattagacacttaataaatat

SEQ ID NO: 458273 - DNA, 122 bp, Homo sapiens
gcgcccaccaccatcttggcggtctcacagggcacgcgcaaccttgctgactgggcggggcgcctcaacctcttcactcctcccccgccctctcgtggccatgcgtgcgtcagtacgtatgt

SEQ ID NO: 458274 - DNA, 122 bp, Homo sapiens
gcataatttcagtatctcccctaatttccctctttctcaaaaggggtttcttatttcatgcgcctctgcttacgaaccggactgggatgtgaatctctgcctctcatacctttgttgtggaa

SEQ ID NO: 458275 - DNA, 122 bp, Homo sapiens
tgcttgtcactaggtgagttagtcgcaaagatggaagagaaccttctgctccttctctcacgctataacaccttgtgtagcacatcttagtcctgaattgtgcagttccttaatgcaaagct

SEQ ID NO: 458276 - DNA, 122 bp, Homo sapiens
gcagtttgaatatgctgtgacattctcttagcaacaaccaattataaatacttttagatacggaaaagaaacacacactatagaatggttagccaactggtaaattctggagtttgggcttg

SEQ ID NO: 458277 - DNA, 122 bp, Homo sapiens
gagccccgaaatgctaggggggtgctggatggcaggcacctgcccggcagggccgggaaccggaacgggggcctggcttacctagcattagcagcagcagcagcggcagcgaaggcggcagc

SEQ ID NO: 458278 - DNA, 122 bp, Homo sapiens
gagctgtcggagacctgctgagcagcctgggctgactgctcgtaggctgtgctcagcatccggaaggctcctgtggcgagaagcatgaggaatggagatggaggaggagcaggagggagagg

SEQ ID NO: 458279 - DNA, 122 bp, Homo sapiens
gcaagggaccccacctgagagcagctcgggctgctgagttcgttttgtgtctgagctctgcgctctgcacggaaccgaccccgtacccatggctctgataatggaaccggtgagcaaatggt

SEQ ID NO: 458280 - DNA, 122 bp, Homo sapiens
aaatgtttgctgatggcaattctatgggctttgtccacctctttctccatcatgacgactcgatttaagtccctaactgtttgactacaaatgcaaggggaccgtgcaacgccaaccttttg

SEQ ID NO: 458281 - DNA, 122 bp, Homo sapiens
gacgcctgatacttacttgaagtcgtccagccagaaaataaatgaagtgctcgcaggtcacgctaatacggccaacactgggcggctggccagcgtgggtggtgggtgtgcaggcgatgcca

SEQ ID NO: 458282 - DNA, 122 bp, Homo sapiens
cctccagctttcaggtgatcacagagctatctcttacccggtcttcctcagctgcctcttcgatgggatagtgtttgtgagccccgtgctcctgagagttggagcacagcaagcagaggaga

SEQ ID NO: 458283 - DNA, 122 bp, Homo sapiens
gcgcttcccacaatgccccgcttcttccctgcgccgcggccgcgcgtgcggctgcctaagcgttcccggccctgtctggtgcattccccctgctgctgcccggtcggccgagaaagttccgg

SEQ ID NO: 458284 - DNA, 122 bp, Homo sapiens
gcttttgggcggattagaagctggattgtagcagagtgactcgcagaggccatgccccctcgtcttgtggcaggaccggaggggcgatcccggcatcccacgcgggcccccagggggtggga

SEQ ID NO: 458285 - DNA, 122 bp, Homo sapiens
agcggcggcagcagggggcactcgacaggaaggcggcggcggcggcgggcgaggcaggggcgtggggcggcgatcgcgagccgccagccgcgggcccacgggcgctggggccgcccgccgag

SEQ ID NO: 458286 - DNA, 122 bp, Homo sapiens
gccctttctcaaggaccaccgcatctctacattcaagaactggcccttcttggagggctgcgcctgcaccccggagcgggtgagactgcccggcctcctggggtcccccacgcccgccttgc

SEQ ID NO: 458287 - DNA, 122 bp, Homo sapiens
cccgagcctctccaaggccaccctgcaggcagcagcgacttcttcctggggcaaaagtcgcgcactacctgcgggaacgtccgctgccagggcgccgcccgggaccccagagcatacctggt

SEQ ID NO: 458288 - DNA, 122 bp, Homo sapiens
ctgtcagggcgttgaacatgatttatgacgtctgcctattaggggatcgattgtgaatatcgccactatcatctatcaatattctcaagccgggggtatttctcgctccacggtagttattt

SEQ ID NO: 458289 - DNA, 122 bp, Homo sapiens
aaatggatgcacaaagccgaattgggaagctattgttcctggaaagtataaccctgaaggcggagagttgtagagaacagaactgatgtttaaaaagaaaaatccacaaaacgtggtggtgg

SEQ ID NO: 458290 - DNA, 122 bp, Homo sapiens
tcttaaatgttctactatggtcattattttgctgcattgccagttcactatggtgttttccggatctaatgcacagaaggattagaatgctttgtttccttaaaaggcttctccttcccatt

SEQ ID NO: 458291 - DNA, 122 bp, Homo sapiens
acccacggcgaccctctgtgaccaatcatactaccaacctcttaaacagagctccaccgacgcaatgcccaggcataaaaaggccaggccggagagaccgccaccagtcacggaccctggac

SEQ ID NO: 458292 - DNA, 122 bp, Homo sapiens
gatcatgactgagtctattacttgtcatggcttttgtacgcaactgtgttttaaaaataccggttttgcctctttggttacatgtggtgagcatggatgtcaagattatttttcaactagat

SEQ ID NO: 458293 - DNA, 122 bp, Homo sapiens
ctcagtccatcctgtttgcccagaatgaattcttttctcatcacacttcaaggtacgctccgtagctgtcctacccagggagtggttggaggtgactgccaacctctgaacccctagatagt

SEQ ID NO: 458294 - DNA, 122 bp, Homo sapiens
gacgtcaggctggaattcctattgtgtttagaaaaggctcgggcaaagccagcccaagttcgctctctgcacacctcgagcacctcgcggacggcgtgggtccgccagctccgggacctgcc

SEQ ID NO: 458295 - DNA, 122 bp, Homo sapiens
ccgctgtgaagcaggtcccgttagcagcaccgatggttgaaaatgccacaaaaagtggaacgatccaagaagcaggatagagaacacggtcaccaaatgtctggtgagagaagcgagatgag

SEQ ID NO: 458296 - DNA, 122 bp, Homo sapiens
gtgaggtgtgagttgccctggagggtggcgggttttccaggcgcatgcatttgccgcggacgggacgagaggatgaagccgttctgggcgccggaactcgcttgtgggaaccgcccctcgga

SEQ ID NO: 458297 - DNA, 122 bp, Homo sapiens
gtttgagccatgcccagaaaacaagagtaaggggctgctgggcattgatggtgagtggggcgctgccctcagcccagctgtcctgggatgctggaggggcaacgagggcccaacctgtgggc

SEQ ID NO: 458298 - DNA, 122 bp, Homo sapiens
gacgccgagcgggcaatgcggctgacggagagtgaaagtgcggcggtgggaggcgcgcgccgggcgctttagaggggagagccaggcggggcggggcggggcgcgcggtgaggggcgggccc

SEQ ID NO: 458299 - DNA, 122 bp, Homo sapiens
actggacagcttttccaacaagtgaaatttcagaacaaaaacagatcatctcctaaggcacgtatacttggattttaaagaaagatgccgtggcattttctatcaagaaggttaaactcata

SEQ ID NO: 458300 - DNA, 122 bp, Homo sapiens
tacagctcggctttctgatgtcttccatcattttcatcccctacactttataatctgttgcgatgcggccagggtgctctgcttgaacctccgctgcaccttgtcacatgtaggttcccttt

SEQ ID NO: 458301 - DNA, 122 bp, Homo sapiens
agtgatccgcccaccttggccttccaaagtgctgggattacaggtgtgagccaccgtgcccggccatcctggaccttctaacgctgatgtcacacaatgtccggggagttgattacagaacc

SEQ ID NO: 458302 - DNA, 122 bp, Homo sapiens
gaagcggttggtgcaacgtgaagtaaggtaaaccgaatccatgccgtgaagacttttaaacgccaaactgaggcgtcggaactttgctccgcgggcatcgaggagccatcgaaggttctcag

SEQ ID NO: 458303 - DNA, 122 bp, Homo sapiens
ttccctgtaacaagcctcccaccccccacccaccatgagttttacatgctttttgtaattcgctactgaagaaagccttcaacattctaggatctgggaggtttttgttttgcaggggataa

SEQ ID NO: 458304 - DNA, 122 bp, Homo sapiens
gctcgctgcgcttgctgcagcgggattcctgcctttgctcccgccgttccctctgcctgccgggcccagggaccccgccgccgtcccaaacacctcatccctggactctaccttcctgaggg

SEQ ID NO: 458305 - DNA, 122 bp, Homo sapiens
tttgggggcagttgatttaggattctggtttctttaaatgttcaaacacatgaagagaatcggatatcacttctaaaatgctggttatagcagatctacaacccagttaataggggtgactc

SEQ ID NO: 458306 - DNA, 122 bp, Homo sapiens
gaaaccgagacgctcctaaatagcctatgtggggaacaaagttccaataagtgtctcagccggggcttcacagagcgctccccaaaccgctatgtgggaggcgctttaggaagcggggaact

SEQ ID NO: 458307 - DNA, 122 bp, Homo sapiens
aaaaagtcagtaactttttctccaggtgaaaataacttcattttgctatactgaattatacgtatttgaccattgtattctgaataatcaaacacatacatacaaaccgaatagcaccagaa

SEQ ID NO: 458308 - DNA, 122 bp, Homo sapiens
gccttactggtcctgtgcatcttaatctttgctccatccccttcctcccccgcattacaacgccccgtggagctcaggggaaaatacccagttgctgccttgagcagtagacttgcctcaga

SEQ ID NO: 458309 - DNA, 122 bp, Homo sapiens
ataccccagccaagcaatttccatgtcaaacatcatccgcgcggctgctccatctgtgaacgtgagtggtcgcctggctccctcttccgcggcggccgcttcctcataccttcacacggcgc

SEQ ID NO: 458310 - DNA, 122 bp, Homo sapiens
ctgcaagaaaccagtgacttaacgcgtgtaaaagcaggagagcgtcagaggttctgaccccgggggaggagcagacccgcggcagcgtgcggagacttagcgggcggaatctgccaccaacg

SEQ ID NO: 458311 - DNA, 122 bp, Homo sapiens
cgcgccgctactaccaccagagctaggccggtgaatgaccccggcctggggcgaaggtcacgacccctcctcatcccccacggacgtcccgggtcccccccgcgagtctccggctccaagat

SEQ ID NO: 458312 - DNA, 122 bp, Homo sapiens
aatataccaattacgaataaggtctttgacatgcattttccatactcggtcattaaaatccgaggtgtattttatcttcatagcacacttcaacttgggccaggcacatttcaagtcctcaa

SEQ ID NO: 458313 - DNA, 122 bp, Homo sapiens
agcccagcatggtggcgtgcctgtagtcccagctactcggaaggctgggggcgggcggatcgcttgagcaggagttcaagttcgcagtgagctatgatcacgtcgctgcactccagcctggg

SEQ ID NO: 458314 - DNA, 122 bp, Homo sapiens
ctgggcctctaggagcagaagacacagagcagtgaagactacaccagaagctccggctgccgccagagacaaaggccccaccaaacccggaagccgtcctgtctgctccagctgagtgcctg

SEQ ID NO: 458315 - DNA, 122 bp, Homo sapiens
aggatgtatctgccacctacctatgtatgaatatggctctgtttgcgtccctatcacaaacgctatgtgactgacgtgcctgtgtgattgtctgcgtctccatccacgtgtgtccgtgttcg

SEQ ID NO: 458316 - DNA, 122 bp, Homo sapiens
tcctgcaccaggaatgttgaacttcatgatgcatgaccagcgcaccggcccggcatggaacgtgctgatgtggaccatgctgtttctaggccagggaatccaggtcagcctgtactgccagg

SEQ ID NO: 458317 - DNA, 122 bp, Homo sapiens
ggagaaagcaggggctgaccagcttccagcacagccgccagtacaggctgggccgctgcccggtcatctgctggatgtcgtcgctgaactgcccaacacctgagggagaagaggtggcatca

SEQ ID NO: 458318 - DNA, 122 bp, Homo sapiens
catagcagattacagtattccaacactctgaattacccttctttatctccattttaaaagcgaaagtctttttctataaccggttaattcctgagcttctgtcttgtcttcttcctcactat

SEQ ID NO: 458319 - DNA, 122 bp, Homo sapiens
tgtacgcgcggactagcggagctaggggaaggtgccagggtggccgccgcctcagtagcacgcggacggctggaaagtcagcccccgtttccgcctcacccaggattgctccactcggggcc

SEQ ID NO: 458320 - DNA, 122 bp, Homo sapiens
gcctgagaccaccgccaccgagccccagcccgacgacgagcccgccgctggggtgcagaacggggcccccagccccgcacccagcccggactcagactcagactcggactcggatggggagg

SEQ ID NO: 458321 - DNA, 122 bp, Homo sapiens
tcctcccccagctacttctctggccaatggggactgttctgaacttcccatacactttctcgcagcttctgcctgaggctgaaaccctttctggggtgttttcccaactgtcatcaggatgg

SEQ ID NO: 458322 - DNA, 122 bp, Homo sapiens
gtgcgtcgagggggcagggcggagcacatgatgccccttggactatggggcaggtaaggacgttttgggtctcctggaggaaggtggccccggggcgcgcactggggctgtgcccgccaggc

SEQ ID NO: 458323 - DNA, 122 bp, Homo sapiens
agcagcccctcacccagctgtgaccatcaaaaatgcctccagacactgccaaaggtccaccggttcggggaagaaccacctctgattgagaccccttccaccatcccgctctaaataataat

SEQ ID NO: 458324 - DNA, 122 bp, Homo sapiens
cagagcgggtggttaaagacatagaagagagggagaataactgatgaatctctgtcctagcggaaatgagaaaagatgagatggagagaattgctggatggagtgctactataaagggcttc

SEQ ID NO: 458325 - DNA, 122 bp, Homo sapiens
ataacttggcttttataagaagtcagtttagaaactggaaaacctattttttattgaaagcgctacaatattttaggatgctgtgtcagtcagagtccagccaaaaagttaaaaccatacca

SEQ ID NO: 458326 - DNA, 122 bp, Homo sapiens
ccacttcctaactgctcccgtcccaaactcattgtgggccggtgcagatgtctgtgcgtgcgcgtctatccctacctttgcaaaatcaaattatcgccctcttctttgcttgcacacgtctt

SEQ ID NO: 458327 - DNA, 122 bp, Homo sapiens
cacgcctgtaatccctgcactttgggaggcccaggatggcggatcacgaggtcaggagatcgagaccatcctggctaacacggtgaaaccccatctctactaaaaatacaaaaatttagcct

SEQ ID NO: 458328 - DNA, 122 bp, Homo sapiens
ccactgattcgttgaattccttcccggtaatcttgggcactagcgggcggagttgaagggcgcttggaccccagcggcgatctgtgtttgggttcgcgctctgggagaattttggctttgct

SEQ ID NO: 458329 - DNA, 122 bp, Homo sapiens
gggaaaatcaaggaagacgaatgccagcccccacgtgcagggacacaggctggaagggagcgctcctcagccccgcacaggacggcagctgcccgggtggcggaggcggccaagccggtgca

SEQ ID NO: 458330 - DNA, 122 bp, Homo sapiens
cgagtccatgaaccaggaaatggattcacattaaccataaagacagaccccaacctctttcgtaagtgttctcagtcaaaaggcagaacttcggatatagacccgctttttgaaagtagtat

SEQ ID NO: 458331 - DNA, 122 bp, Homo sapiens
cgcgcggcccgacgtggcgctggcccgggaggcagcccgtgggccgccggcgcgccctgccgggcacccagcagcgcgctcccgttctcatcagacgggagaaaaaacgcccaggcagagga

SEQ ID NO: 458332 - DNA, 122 bp, Homo sapiens
ggagtggggaatcatccttaaaccccacaatgtgcctagtgacctcccctgcactgtttccgaggtcttaaggagtgggagggtctgagaaggacccttcaccccaaactcaggggttaaga

SEQ ID NO: 458333 - DNA, 122 bp, Homo sapiens
tggcctttttgataatccactgcggggccctcccgttgcggaaggcgctctccccgggcgcggttctggtgggcatgtcttccaagagcgatgcgagtgtcagtggttcccgaatcactttg

SEQ ID NO: 458334 - DNA, 122 bp, Homo sapiens
tcagggggatcttgggggtggcttgggcatggccctgcttctgcccgttcaccggactcccggctttagttcctcttacaacagccccttctcacttcctttggcgggaggggccgaggcca

SEQ ID NO: 458335 - DNA, 122 bp, Homo sapiens
aaggatgggacccacaacctcggtgtggcctttacttccccaaggggcgaggcagagcaccgccaacgaagctgtgtcccaaaatgaaccacccagggtacgcacaaaatgcttgtgccatc

SEQ ID NO: 458336 - DNA, 122 bp, Homo sapiens
gactccaggtgcccctgattagcaggctccgccttcggcagggaccctctgattggctggcgcggccagacagggtctcccggattggctggctgtgcctccgcaccgggttcgagaagccc

SEQ ID NO: 458337 - DNA, 122 bp, Homo sapiens
gagagcccgtgggctcaacatctgatgtaataaacattactgcaacaaattgcttatgcacgttcattgggggagatgcagttttatctttcctaaaaggtcagacttttcatttgaaatgc

SEQ ID NO: 458338 - DNA, 122 bp, Homo sapiens
cttcctatccagtcctcacaagtctatacttccttcttttaaggtcaactgtttttactgcgcacaaaatgaattctgagcatttcagcaaagaatacctactttctcgggctttgtatatt

SEQ ID NO: 458339 - DNA, 122 bp, Homo sapiens
tggggacacctattccaatgaactgtgctttgggagatgtcttcagagtctggcatctgccgttttaaatgcctagtataaaacatctgccttgcctttgtaacagggaaaatgacccttgt

SEQ ID NO: 458340 - DNA, 122 bp, Homo sapiens
gtccttattctcgtatggcttatagtctaataagttaaagatatacacatacaattaaaacgtaatgtttcaggtgctataagggagggctgtaggagggactaaccatattttggaataac

SEQ ID NO: 458341 - DNA, 122 bp, Homo sapiens
accccctgacaggtcttggtggagtgatggcacaggtaggtggctctccacttcatcccccgcgtgtttccgtcgctgcactctctgcttctgtggctcagcatcctggagggaatcctgcc

SEQ ID NO: 458342 - DNA, 122 bp, Homo sapiens
gcttatactcacattcccttctttgtgggtgtcctcaagcaccctaggccctcaaggccccgctccccatcctccaatgctgccatctctcagaggctgtaggtgtcaggtcttcagcaggc

SEQ ID NO: 458343 - DNA, 122 bp, Homo sapiens
cccgggtgtggcgctgcttcttgccgcggcccgcctcgccgctgcctccgaactcacggacgacaacttcgagagtcgcatctcctacacgggatctgcgggcctcatgctcgtcgggtttt

SEQ ID NO: 458344 - DNA, 122 bp, Homo sapiens
gtactcactgcttggcgattgggaaaggtctcaccgctcggctattgtctcaccgcttggcgatatgcgaaagtcccttcgtggtcgccaaaatgtgtccggaattggtgggttcttggtct

SEQ ID NO: 458345 - DNA, 122 bp, Homo sapiens
ggcccgggggctcagggtacagacgctattcttgctgggagagccgaacgcacagcaccccgtgtggggttcccaggggagtgacctggcctcggagtcagcagcccagggggatatcttgc

SEQ ID NO: 458346 - DNA, 122 bp, Homo sapiens
gaaggaagcacagagacaccagtgctgggcccagctggacacagtgagctgcagggacctcgtctcctctatcgtctcttgttcagggtggtggtagagatgatcttgctgctggaactgcc

SEQ ID NO: 458347 - DNA, 122 bp, Homo sapiens
agctcaatttcattattttaagagttcaggccctctaataatatctcctccacacaaccacgcagagcatttattcaaaaggctgcataaagctgttttgtgaaagctttagctgacaaata

SEQ ID NO: 458348 - DNA, 122 bp, Homo sapiens
gggggaaggggatggacggtcctccccgcggcggggttttcagccctcgcgggtgggcagcgtcttgtcctcaggtgtagatgctccagtctcggctcagccaaacactgtcagggccccct

SEQ ID NO: 458349 - DNA, 122 bp, Homo sapiens
cgctcggaggaccgcggccagggagaaagggagggaatccccggagaccgagggcgctcccggcaccccctcctgggcagccggtccccaaagggatcagagatgctcccgtttgatgtgta

SEQ ID NO: 458350 - DNA, 122 bp, Homo sapiens
cccgtgcctcgcttgcccaatgagaacacggtttggggcggggcgcggccaggaccggagcggaagtggcgatcggagcggaagtggagctaccgccaccgccgccgccgattccggagccg

SEQ ID NO: 458351 - DNA, 122 bp, Homo sapiens
atgtcatagttctgagctgccagtggaccgcccttttcccctaccaatattaggtgatcccgttttccccatgacaatgttgtagtgtcccccacccccaccccccaggccttggtgcctct

SEQ ID NO: 458352 - DNA, 122 bp, Homo sapiens
ttcaaatgaaaacatctgctaaccccctttctagccactcctgaaattggtagccatggccgcttcccgcgacagtccacttgagggcgctgtggcaacagctagcgccgggaggcaggaag

SEQ ID NO: 458353 - DNA, 122 bp, Homo sapiens
ttgacaagaatagagtacattatgcagttcatttagttaacaagtgaaataatgaggaagcgtgcagagtgaatgccaagagaaaaggcacaaaaaccctattgagaggccccggccgctcc

SEQ ID NO: 458354 - DNA, 122 bp, Homo sapiens
gggacagttgcccttacatcaatctcaagagattaaaaacctccaaaatgttccgttttccgtggataacctgtaatgggtcaatggagtatatggggttgaaccttacaaaattgccaata

SEQ ID NO: 458355 - DNA, 122 bp, Homo sapiens
gaatgtgtaggatgctgatgtctgcgaatctgagaatccatttatgatatctgtcatggacggaatgtttgtgtccccccaagttcagtgttgaaggcctcacccccggtatggttgaattt

SEQ ID NO: 458356 - DNA, 122 bp, Homo sapiens
gggccacccgcagccgcctgtcatctatctttccacagcctttcaaaggctcgatggtctcgcagcagcccccaggtgccctgggttactccacagcacagcaggccccaaaggcaagccca

SEQ ID NO: 458357 - DNA, 122 bp, Homo sapiens
aaaatgttgatttgtttgtaagtggctactgtccattcacgagacagcgctgtggagctgcgtgagagggacttcatttggtggagctgctgttcttaggtgtggacgccgcccagctctca

SEQ ID NO: 458358 - DNA, 122 bp, Homo sapiens
agcaggaacaggtgtaggaggagcctcctgtgtagatacactgggcccgctggggtatgtcgcagttatgaaggccagtttcacagtagttgatggggcgctggtccacgacagcttcagaa

SEQ ID NO: 458359 - DNA, 122 bp, Homo sapiens
ggtgaggagccagtctctgtgccccaatgcacaggggcctatggtgaagtaaaagtcaagcgtggcttcccttatttttgtgttagaagactgtgccttcatctcagtcatagattgagccc

SEQ ID NO: 458360 - DNA, 122 bp, Homo sapiens
caccagctgctgtctgtgccacagcaccggttctaaccagccccgccgaggggccccgggcgcccaggaagccacacaccaacactcccaccaagggctgtgggttgcacagaccaagccca

SEQ ID NO: 458361 - DNA, 122 bp, Homo sapiens
tctggtggcagatgtcaacctaagcagtacattagaaccacttgggggctttaaaaaatccgaatgccaggaccacacttagggcaattaattcagaatctctgaagctgggacccaggtac

SEQ ID NO: 458362 - DNA, 122 bp, Homo sapiens
cagattctgtcagatggttgagcctggctgctgttaggatgaatggcaggggatcaagcccgccagtgacaatgcagagagtgagtgcagagggagggatgattcttccctttgtgctcctt

SEQ ID NO: 458363 - DNA, 122 bp, Homo sapiens
cagagcctagctctcaccccggcgagggacttccaccccgactcaccgcggaatggggagcgccaggctgaaccaaatcctgtgctcacccctccgtgcaaacccctcaaggcaactcaggc

SEQ ID NO: 458364 - DNA, 122 bp, Homo sapiens
gcgtggcctgccgggagccagcctctgtcttctcaaactctactcacgtgcgtccgaggccggcacactgagtaactgcactgccctcgctcgtaaacttcagcggcccggaagcctcaagg

SEQ ID NO: 458365 - DNA, 122 bp, Homo sapiens
gggagggcgctggcgccggggacacgaaaccgcagagcccggacgagtcagggagtgaggcgcgagccgggcgcccggggctctgcaggcgcaggcggcgcggggacaggagcaggttaccg

SEQ ID NO: 458366 - DNA, 122 bp, Homo sapiens
gggctcggcccgcagagtagacacagctccaggctcggcagcagagtcagggtcaggagccggtgtgggacctgaagcagggcacaggctggggctcatcgcggcccggcccctttccatcg

SEQ ID NO: 458367 - DNA, 122 bp, Homo sapiens
cagggtggagcactggatccagtcaaggcatttgaggccccggcttggggatggtaagcacgtgacctaagcccatccaattagagtgaatctcagaactctgctggggtgcggagtcagag

SEQ ID NO: 458368 - DNA, 122 bp, Homo sapiens
cgccagggtacgtggcaggacccgctgtgcacactcgggactgaggagacccctgggacgcggagagccgctccagggcagaaccagtccgtcagcatttagccttccacgggcctgagggt

SEQ ID NO: 458369 - DNA, 122 bp, Homo sapiens
ctcaccctccttctccgtgcagcttgggggtaagtacacacagttcctgccacggttccccgaacgggccagggggaccaggcagagagtgaaggaatgcggctgtcttctgtgctctgcca

SEQ ID NO: 458370 - DNA, 122 bp, Homo sapiens
tccttgaaatatgagaacgatcctttctctctctctctctcttttgtttctgaggggtttcgtttgtttgtttgtttgtttgtttgtttgttttgaaatagggtcttgctctgtcacccagg

SEQ ID NO: 458371 - DNA, 122 bp, Homo sapiens
ctgcagtcaaataaaacagatactatacacactcgtcggggcagccgtactgcagaagcacgttgatgcactcctggctggaggcctgccgggcgtaggtcagcgctgtgttcccgtgggca

SEQ ID NO: 458372 - DNA, 122 bp, Homo sapiens
ctcaaaaaaaaaaaaaaacaaaaaacaaaaaacagtcctgcctttctaaattgaatccaccgaggcctctgtgtcttccttaaaaggaccacagtgggtaccattgatggattgtattcact

SEQ ID NO: 458373 - DNA, 122 bp, Homo sapiens
cccttcccaccgaccccccgtgcgcccccggcatcctccccatcgtgcgacaccctcccccgcacagcatccttcaccatggttgatccagtagttgaagttggagggtcgctgactgcaga

SEQ ID NO: 458374 - DNA, 122 bp, Homo sapiens
aattatacaccatatgaagaatgtttagagagggggatgagcatcaaataggaagccaatcgtcgtcctggctaggatctagcatctcagtgcaaaatgggctatgtaagtgtgcctctggg

SEQ ID NO: 458375 - DNA, 122 bp, Homo sapiens
tcttttaaaaaggcagtcgctgccttcaggtggtgctgccccagaaacttaaaatttagtcgaggcagtttcaattgttactgtggaccgaattaggatcacaataaacgataatgcaggtt

SEQ ID NO: 458376 - DNA, 122 bp, Homo sapiens
tccagcagaaaagaggatgcttttctgcttaccatggcccggatatatcagtctcactggcgtgattgatcatgacttggatcatgtgcttctcccgctggtgttggagaatctcatgtgct

SEQ ID NO: 458377 - DNA, 122 bp, Homo sapiens
cccgcccccctggcctggccgaggaccccggggtttggacgtgccaacgccactctcgcgcgccgaagctgtgacggtttactaagcagagacttgcgaggcacacagagagggaatgaggc

SEQ ID NO: 458378 - DNA, 122 bp, Homo sapiens
agaattagcaggagttgttaatatggatgttgagggaaagagaaatcaaagagtactcttcgatgtggagtttaagcaaattgtagtgccctttactagagggaggaccagatttaggaagg

SEQ ID NO: 458379 - DNA, 122 bp, Homo sapiens
tcctcctctccctccacccccgcgcggagctcagcctcctggcccaggttctgagaaggccgggtggccaggacccaatgagcaccttcaaaaccccagggaactgaaagtttggggcgtcc

SEQ ID NO: 458380 - DNA, 122 bp, Homo sapiens
caggcaagaggaaatcaacattttacagcaataaaaggctgctcctggttaggcatcaaacgaatcaatcttctctgacagttaattttcattttgcaactttccccagcaacaacagcaag

SEQ ID NO: 458381 - DNA, 122 bp, Homo sapiens
ttccggtcccgcccgctagcgcgtgatcgttgtcaaccaatgggaaggcgtaaccgtacacgcaagcacgtgatgcggggaaagggcggggcggatcacatgacttcatctttccagtctct

SEQ ID NO: 458382 - DNA, 122 bp, Homo sapiens
gacccccatagccctgcttaccacaatgaggttccacatcctagcagcctcagccaccagcgtggagacagagctgcagccaggcataaggatgatcttgatagggtcgttgtagagcagct

SEQ ID NO: 458383 - DNA, 122 bp, Homo sapiens
gtgtgaggagggatgtggaccaagactcgtccagtggatttagcaacaaggtgggcccagcgagagccatttcaggggcatggtgggggcggaagcagattgcagtgggttgaagaaggaat

SEQ ID NO: 458384 - DNA, 122 bp, Homo sapiens
gaagtgagagcacgggaggagcatgggcggttcgttttgttagaaagaaacccggattcacgagatggtttttattgattagtttacaggatttgcactattgatagagtttttgccttggc

SEQ ID NO: 458385 - DNA, 122 bp, Homo sapiens
gaagagccgcgcctgaagctcaacttccgaggctctcatcaatctacgcttcctttggagcgtgcagccaccaggtggcagccgaggccacgggcagacagaaaagctcccgaaactgaagg

SEQ ID NO: 458386 - DNA, 122 bp, Homo sapiens
ttggttccagatttttttctcctcaccccaaaaggcagggttgggcctgctgttgtggaccgggggtcggggctggcaggatggaaggactgaggaccagcatgaagtgggggtttgttgtc

SEQ ID NO: 458387 - DNA, 122 bp, Homo sapiens
gcaatccacaccgcagctgtgggcaccacgaccaggcctttgagaatgcagacgtgaaaacggtcgccgccgcatcatcctgactgtgttccggggtctcggtgtcagagcgtgttgccagg

SEQ ID NO: 458388 - DNA, 122 bp, Homo sapiens
aacatttagctcactgtccaatcgactaaaacaagctctcccagggctcgggccagctgtcggcacgcggcaggtgttgagtgtttgatggggaggagggagatgccccttcaaggcttttg

SEQ ID NO: 458389 - DNA, 122 bp, Homo sapiens
tcccttccctcaggccccaggaagttgcaagagtaccatttgtcgcacactcggggaccgcgggtggccggaggagatgaaaccgtcttggctgcagtgtcgtaaagtcaccagcgccgggg

SEQ ID NO: 458390 - DNA, 122 bp, Homo sapiens
cggccgcagctagaacgagaacgcacaccatgcagagaaacggcgcatgcgtccaacttccggggaccagccgctgtcaaagttcacaactacgggtgccgaagcgactcaaacgcggagga

SEQ ID NO: 458391 - DNA, 122 bp, Homo sapiens
gcgggaggagcgtttacagtgcaagcttctgttgccgggccctggcctgttagcgaagcacgtgtgcatcccagcacagcccacgtcagcacgctaatacacagtgtccaccccagaacaca

SEQ ID NO: 458392 - DNA, 122 bp, Homo sapiens
cggagccgtcgcaggtcctgccctttttgaccagcagccaacagtggcaaagcctgaccccgcgcgcccgcgcccgccggctgtggctgcttctgcgcaccagcctccacgaagtcgtggaa

SEQ ID NO: 458393 - DNA, 122 bp, Homo sapiens
ttctctcagctgcccatcccactgaggggtgcccggccgtcagtgtcttgtctgcacttacgtcccagaacctctagagcttgccccccagggcgggcactgctgggagggtgcgagcaccg

SEQ ID NO: 458394 - DNA, 122 bp, Homo sapiens
tcccgggagaggcacatggagagacatgaatcaggggagtggactggacctgctgaagatcgtgagtccgggtgggcgggagggggcccgcttcccgcagcgctttctacgatgccgactct

SEQ ID NO: 458395 - DNA, 122 bp, Homo sapiens
ctgtaaagtggctaaattcgtgcctggcccattgtaagttataggtattattagagttaccgttcatcaacacagaattttacttagaatgatataataaaaatccttttatgaaagtttat

SEQ ID NO: 458396 - DNA, 122 bp, Homo sapiens
gaactaagcctttagcctggtacaccatatacaaagtatagccctgaaacaaagtacagccgttggatcctgacacaaaccctagctgccatcctcaaaaattctggcttagacacaaaact

SEQ ID NO: 458397 - DNA, 122 bp, Homo sapiens
ctcggtgtcccttccctgcagtcttctgagcggacgcatctcgacgctgaaagatgagaccggagcagtgagtcggacaagaactgaaatgggatgggggggaggggttggtaggaagaggg

SEQ ID NO: 458398 - DNA, 122 bp, Homo sapiens
ccccgagtccgagcgggcagggtgctcagcagggccaggtgatgggaatcatggggccatcgagcacggaccctggctcccccggtggcctctgtgagctctggggtcaggcggggactgga

SEQ ID NO: 458399 - DNA, 122 bp, Homo sapiens
aaccttccctggacccctagggccagcagggaatcatagcctccctttgtttctagagcccggaaatcactgggttttccctctgtctggagcagagctgggtgcgaatttgaccaacgggt

SEQ ID NO: 458400 - DNA, 122 bp, Homo sapiens
cctgctcttcaatagaaggcacgcgaatggactctaagggtcccggagccggagcagctgcggagccgcagcagctgcaaccccgaagcccacctagctgctctacgtgcgctcccgccctg

SEQ ID NO: 458401 - DNA, 122 bp, Homo sapiens
cctgctggaggcgggactcccggttgctaggcggtaccttttccggaagtgtttgttgcgcgctgcagggcaacaccccggcgtccctggaagctgggggagcgggtgggtgttgggtggcg

SEQ ID NO: 458402 - DNA, 122 bp, Homo sapiens
ggtgccggcgggaacctgggctgcattcggcgctcgagttccgggtgggcctgggctctgcggcccctcactcagagtggctggccggtgccgctggccccgggcagtggagggcttagcac

SEQ ID NO: 458403 - DNA, 122 bp, Homo sapiens
aacctgaaagtttaggttagggggcccacagcctgttaagatttcttgttgttgttttcgcgaggcccgggagaatcagctctcccaccttgcggcaagaaaagatgacttgtcaggcctct

SEQ ID NO: 458404 - DNA, 122 bp, Homo sapiens
gagggtgaagccgctgtggtttgagggtgaagccactgtcgtttgagccctcggcccggacgcagctgatgcaccagccacagaagcacggaggagtcaagaatgggaaggacagaaacggt

SEQ ID NO: 458405 - DNA, 122 bp, Homo sapiens
gacaggagcaaagaccacagaactttcgaggcagcagattcatttgggcttcaggaaacgcggtgcatgagctgtttcaggtgctggggaaaggctctgcgttagaacccacaccttccgtc

SEQ ID NO: 458406 - DNA, 122 bp, Homo sapiens
gcggcgctggggagaggggccaagcggggcgcggggcggcttcagaggctgcggggcctgcgctgccgcgctgggccgcgccgaatcagctcggccgggctcgtcggacggagaaggccgta

SEQ ID NO: 458407 - DNA, 122 bp, Homo sapiens
caggccactgcagccagcagcgcccacacaaggcacacctgtttcagatggccaggcctccgccacttcccgccacacacagtctgcggccccgacggcccactcccacaagaaagcgccag

SEQ ID NO: 458408 - DNA, 122 bp, Homo sapiens
ttccgcaaaggtactgaacgactgggtgtaggtgccagggcatggacgtgaagctggaaccgcgaaatgagttagttgtgggccgctggcctcaaggagcgaacgtcagcgcgaagaggaga

SEQ ID NO: 458409 - DNA, 122 bp, Homo sapiens
tgagaagctttgcagcgagctgcgactggacctgagtgcttatgagaggcccgaggaggacgagaatgaggaggcccctgtggcaagggatgaggcgggcattgtgtctcaagaggagcagg

SEQ ID NO: 458410 - DNA, 122 bp, Homo sapiens
ctatagcaacctaaaatctcacgaacacatgtgaatgactgaagcacttctgctgtaatacgtatggcaagtttattagtaattttctaacaaagtcttctagtgcaaagtgcacataatta

SEQ ID NO: 458411 - DNA, 122 bp, Homo sapiens
gactcagtccagaggaagttgagaaaaccaacttaaattacggtctcgatcgccatctggcggtggaagtccacattacatccgcggagcaatggctgggaacgttgcataatagagcgggg

SEQ ID NO: 458412 - DNA, 122 bp, Homo sapiens
ggaggctgaggcaggagaatggcgtgaacctgggtggccgagcttgcagtgagccgagatcgcgccactgcactccagcctgggtgacagagcgagactccgtctcaaaaaaaaaaaaaaaa

SEQ ID NO: 458413 - DNA, 122 bp, Homo sapiens
tagtttctgccatcactttgccatcccagaatgactcaggtagagtccagtccagcccagcgcccagagcgactgtcctctcctctgcagcatttcagatcctcctcaatgacctggtttag

SEQ ID NO: 458414 - DNA, 122 bp, Homo sapiens
cgggaagccagcgggcggcgagcgggcggcgagggggattaacccgtgcggagcagggggcggcgcggggctgacccaggcgctggtcgggcagatggcgcctgccacgaccgggacactgg

SEQ ID NO: 458415 - DNA, 122 bp, Homo sapiens
ggcctgggtaggacatttcccagcaagggctggaggagttgccgtgccttcagcctgaatcgaatgtcagaaccagccagcggtgcttcaccctcttggggataacttgcttagttttttaa

SEQ ID NO: 458416 - DNA, 122 bp, Homo sapiens
ctgcggccctgctgtgtgtgtgtgtgtgtgtgtgtgtgtgtgtgcgcgcgcatgaggctccgtgcctgtttccgaagtgactctaggtgccacagtgtgtgatgctgtgactgtgtctctgt

SEQ ID NO: 458417 - DNA, 122 bp, Homo sapiens
gggagggggacggcaggcccgcaggccgctaggtccacagatgcgtggtgtgctgggctccgtgtggactgggacccgggaactcgatactcccagggtgtcgctgttgctcttccctcccc

SEQ ID NO: 458418 - DNA, 122 bp, Homo sapiens
aaaaagggaagtggccaattctccaggtcagcggtgagcgtttatgtggtattgctcttccgcctcctttgagaaagggagtttcatgcaaaccttcaaagggcctgccttctaaagaagag

SEQ ID NO: 458419 - DNA, 122 bp, Homo sapiens
gtgtctcaggctctgcgggttcccctgcctcctgggtgatgatgtggttcccaaactctccgcatcttccagggaggatgcctgcgctgccgtggccacctgcccagcccagatggagccgt

SEQ ID NO: 458420 - DNA, 122 bp, Homo sapiens
gtcattacatttcctggaatcgtatttcagcaggggaagtggaaaagttaaaactccaagcgagctgcacattgacgtcagctccgagtcatgttgtgatttagtcagttcctttccgcttt

SEQ ID NO: 458421 - DNA, 122 bp, Homo sapiens
tgaagaagtggaccaagaaaaatactctaatttagttcagtctgtcttgtcatccagaggcgtcgcccagaccccgggatcggtggaggaagatgctttgctctgtggacccgtgagcaagc

SEQ ID NO: 458422 - DNA, 122 bp, Homo sapiens
ttcctgagtgcagacgagggccctgcagagccagaggagcccgcggactggcagacataccgcgaagatgagcatttcatctgcatccgttttgaggcgctcactgaggcccgccaggcggt

SEQ ID NO: 458423 - DNA, 122 bp, Homo sapiens
cacgctgcagctggccccgctctgtttttctgggactcagcgctgacttcaccgacactccgcggacaaccaatgggctgcggtgcccgccccctcattagcatgcctctggaaccgtccac

SEQ ID NO: 458424 - DNA, 122 bp, Homo sapiens
gcaaacatctatggttgtgacagagtttctttctgacacctgagtctttctcctgctgcacggaaagcttgctgggaggggcttggaatctggcatgaagccaaagggcatctctgagttgc

SEQ ID NO: 458425 - DNA, 122 bp, Homo sapiens
ggcgctgtgggggctcaccggcttctccagcttggtggccttggcttcgggcgtcagcgacgggatccagaagctgggcagcactttgtccttgtccttacttggaggacccacactgggcc

SEQ ID NO: 458426 - DNA, 122 bp, Homo sapiens
tcctaaagtagtcttttaaaaaaataattctgaaaatctggccaatgataatacaggactcggaagaaaatactacccattgaaattggaaagcctgttttcaatttggggtctgctttttt

SEQ ID NO: 458427 - DNA, 122 bp, Homo sapiens
aatattatgctctgattcaagaaatggaagatatccaatacagaatgcttatggaaagctcgtgtgtttcttcaaattcaagacagcatcttgagaacatgtaattatttcctctcttccct

SEQ ID NO: 458428 - DNA, 122 bp, Homo sapiens
taaatcacaaaggaaagccgtcagggatgcatgttacatgccccatgtttgcatacttaccggagcagcccctgacagcgcatcctgcggccctcttcagtctcacccatggccgaggacct

SEQ ID NO: 458429 - DNA, 122 bp, Homo sapiens
cgagggggcggagcgcgaagtttccagagggaggatttgagctgctgagaccgggggcggcgcctggggacgccggagatccgctgctccccgggacactcacctgctgcccggcgctgcgg

SEQ ID NO: 458430 - DNA, 122 bp, Homo sapiens
gacagcgtaggctctgggagcgcaggggggagtctttccccctctctatgcagatctggacgggttttttttttgttttttgtttttttctggacggacggaaggtgtgtccagcccatcca

SEQ ID NO: 458431 - DNA, 122 bp, Homo sapiens
cctttaatggtttatttcaatctcaacaatattagattaaaaaaaattcctacctgtgcacggaaagctgagaaagggtaaaaaaggtacatggtgcttatgttggtgggattgtataatgg

SEQ ID NO: 458432 - DNA, 122 bp, Homo sapiens
ctaccgtctacttcctgcaactggcctgctgccaactccccagatctcttgtggagctgccggaagagacagcctgccacagaagaaagcagccctcctctttcatggcctcccacatcttg

SEQ ID NO: 458433 - DNA, 122 bp, Homo sapiens
atcgtagagagaagtgggcaatagcttctgcttctacctttaactgcttcttcttagtctcgttagaagacttttctctgctgtcctagtaaatgttaacgttgcccaagactctgtccttg

SEQ ID NO: 458434 - DNA, 122 bp, Homo sapiens
gggcggggcgaggccctcagccggctcccagggcactcaccctccctccccgccccgcgtcgcctgcgcagcaccgagcgctgtttggaggctgtttatgagaagttttttttttttttttt

SEQ ID NO: 458435 - DNA, 122 bp, Homo sapiens
gctggacgcaccaacatccaatgagctgctcagaccaggagggctggggctgctgcagcacggcctggccacgtcgccccggggcctcgccgtgtgtgccacatgcaccaggaccgagcctc

SEQ ID NO: 458436 - DNA, 122 bp, Homo sapiens
ccgcccgtgccccgaccggtccccgcctttttgtaaaacttaaagcgggcgcagcattaacgcttcccgccccggtgacctctcaggggtctccccgccaaaggtgctccgccgctaaggaa

SEQ ID NO: 458437 - DNA, 122 bp, Homo sapiens
ccactccctactctgaccctaggagactcctgtcccctttctacccagttcagccaaaagcgctgctggatggggagggtgcaggcggggcttttcttgcaccatcctggcgcctgactggg

SEQ ID NO: 458438 - DNA, 122 bp, Homo sapiens
agcgagagaacctgcggaaagcgaatatgtggggcgcgcagacggggaaactgagtcccgcgagagggccggcctgtgcgctgccccgcccgcgccccgccagcaccgccgtgcccgggcgc

SEQ ID NO: 458439 - DNA, 122 bp, Homo sapiens
ccttacctcacctcttcagagacagaagcaaataaacctgcagctgtggagggaagaaggcggtggcacctgggctggatggctaaacaagcaggctgtgactcattgttctagaacgaggc

SEQ ID NO: 458440 - DNA, 122 bp, Homo sapiens
tgtagttactatagagatgcgaggttttctgcaggggaaggagccctggcggcttgaccccgaatccttcacacagcccacaaagtagccagatgctccgaaagaaatgatgggagctggac

SEQ ID NO: 458441 - DNA, 122 bp, Homo sapiens
tgcaagagatcccctggcgttgttgaactcccagaaggcaagtacctgcccacatatccacgtcctcaggggcccctctccaggccccgtgtgcttctctcctgtgacaggtttgggaggaa

SEQ ID NO: 458442 - DNA, 122 bp, Homo sapiens
ggcgggcgcggcccgcgccgactgcggcgccggccaggcagaggcagggccagctccgcccgctccccaccgcccgttcccggccgcctgaacagcggcagccagcaccacgagtccacaac

SEQ ID NO: 458443 - DNA, 122 bp, Homo sapiens
atgcagcagggtccctggatgtgcctagcagtgtagccgctgtggtcacgctctcctcaccgtcagagtgcggggcggccaggagccccgaagcctcagactgagcttccattgtgtgtgca

SEQ ID NO: 458444 - DNA, 122 bp, Homo sapiens
aaagcaatgtgcctgtgttatctctctcactctttcttcctgtctacatgttggtgctctcgtatcttccatttctatacagaggatgaggctgatgctaccatttttgtttacatggagag

SEQ ID NO: 458445 - DNA, 122 bp, Homo sapiens
gagagctgccaaaacaactaaaataacagcctaacctttcattttcattttctccttgagcgggaatgtgaaacattgcagcttttatctgggttgtgtgttcaagtttatttgcttgcttg

SEQ ID NO: 458446 - DNA, 122 bp, Homo sapiens
tccgaggagaacgggggtcgcggctcccgcggcacaatggcccgcccggcccccgccccgcgcgcccctcacctcatggtgccggcggcgcagaggcttccccaccagccgggagacgcaga

SEQ ID NO: 458447 - DNA, 122 bp, Homo sapiens
ctacaattggccttttccctgcagcatgggagcacaagccttaggacagctttctctgggcgttcaacatcctttctggtgaatcctggcagcagcagcaacagcagtagtttggggatatt

SEQ ID NO: 458448 - DNA, 122 bp, Homo sapiens
tagacacggttcattacctgtcaggtaagtccctactgcaagggccttactcacattttgcgtgtccatggccttgatccttagggtccacttatctgtcacttaggccacccttgtcttta

SEQ ID NO: 458449 - DNA, 122 bp, Homo sapiens
atccacgtgacagtgttggatacaaatgacaatgccccggtttttcctcacccgatttaccgagtgaaagtccttgagaacatgcccccaggcacgcggctgcttactgtaacagccagcga

SEQ ID NO: 458450 - DNA, 122 bp, Homo sapiens
ataaagctgttgagagttccacccgtgctgcaaagccttccgcagaaggcgaattctttgcgctgctgcaaatggatggtgctactgggccagatccgaatctccgtagttcagtgcagtgg

SEQ ID NO: 458451 - DNA, 122 bp, Homo sapiens
agggttttactgaacttacaaccgacttgcccgctcagtatgcagttcagatgtgagaggcgcttctctgtacagcagcctgtactgtcttcaatcctatgcgtgcaggtgtctaccacagg

SEQ ID NO: 458452 - DNA, 122 bp, Homo sapiens
cctcaaattcttgtactcattcaagcagtatttattaggggccagctttgtggccggcaccgtggcgggctctggggctacaaaaggtgaataatacttgggctctgcctctgagggcctta

SEQ ID NO: 458453 - DNA, 122 bp, Homo sapiens
agtatctaggaagaggaaagccttcacccagtcagacttctgcacagagtcctgttataccgccactgggcaggtgatagtcgtagcagctaaagaatggggaacaactgggggtgctctgt

SEQ ID NO: 458454 - DNA, 122 bp, Homo sapiens
cagactggcctcagagctggggatggggccaggctcaggtcacctctgacctcagggctccgtccgagtgccctcccagccaccctgcggtgctgcgacggtggccgaccccatcttacccg

SEQ ID NO: 458455 - DNA, 122 bp, Homo sapiens
gggtgctctctggtggcccagcagttctgccccaggggagaggtttctcttttactaccgcgaaaacccacaggacgctgcttcatcccagagccaaggataccaggaaggaaggtcagagt

SEQ ID NO: 458456 - DNA, 122 bp, Homo sapiens
ctgtggccgctcccttgagaatagcccaaaaggtggaggacatggtcttacgatatcaaccgcgaccatctgattcagcaaagacgtcgctcagaggggtgccccgaattccagcatgggtc

SEQ ID NO: 458457 - DNA, 122 bp, Homo sapiens
ttctggaacggcccagtaagtaaatattctaggtttttcagaccatatggaccaattactcgattctgctgttgtagtgcaagagccgccgtatgtaatatgtaaatgaatgggtgtgcctg

SEQ ID NO: 458458 - DNA, 122 bp, Homo sapiens
gcatactccaaccctgtcgctgaccccagtgcatgtgctaggagcagggatagggagtggcgaaggggtgtgttggccttgctgacaaaatccatttggaatttgtcaaggttgtggtttgg

SEQ ID NO: 458459 - DNA, 122 bp, Homo sapiens
gaagaggcctctccaaggcctacgctggggctctcctctgtatcctgaattctggccattcggtagtggcgacgccaacccaggaggccctctgagttggagtgttgaaggaggcgcaaatg

SEQ ID NO: 458460 - DNA, 122 bp, Homo sapiens
agagggactgaatgaagccaagcaacaagacataacctgacagctccgctcccggccacgcggccaccgtcagccaccctggcctggcgtcgcccgccattcctggcccctccgagcagctg

SEQ ID NO: 458461 - DNA, 122 bp, Homo sapiens
taccagcttgcgtatgctggtggccagcctcggactgcgtgagtgctgcctggtctccaccggcggtcatcgtactccggatgttcacggcactccggatgttctgctgtgcccggttgcat

SEQ ID NO: 458462 - DNA, 122 bp, Homo sapiens
gtacccgcaggcagttctcaaacccagaatctgcctcatcagtctcagttcaggttacttcgtttcagggaaggcattccagcttcttgcactaggcatttcaagaaagaaaagcattcctg

SEQ ID NO: 458463 - DNA, 122 bp, Homo sapiens
ctcttgatgagtggccttggcctttgaggtgggctgggtccagaacagccggttgttcaacggtatttcctcgtgtttggtccctgaaggaagaaaattggaagggtgtgatggagctcatg

SEQ ID NO: 458464 - DNA, 122 bp, Homo sapiens
tccagaatgtacaaagaatttgtactttttactttttatcatccctgtgggacctatggacggctgtggaatccattcccactttccacactgcgctatacacccttccagctggatatatg

SEQ ID NO: 458465 - DNA, 122 bp, Homo sapiens
attttagaagggaagcagggttgctccctggagaatgctgagtctgtgaggtgcctatgccgagaatagctcgaggaaattggagccccagctgttaaaagagcagagggcagggtgagggc

SEQ ID NO: 458466 - DNA, 122 bp, Homo sapiens
tacaattcccatccagccccaggagtctggggcaagtagtcttgtaaggtcagtggcctgcggggacgcagtgagcgccgaatttgcctggggcaggggaaatgcgctctggcccatgtctg

SEQ ID NO: 458467 - DNA, 122 bp, Homo sapiens
cagccaggtgatcctccaattcatttctgaaactatctagatcccacagattgaaggctccgtcctgcaagatggtccacccacttctgatgccaattgcaaactgtaggttgtgatctgtg

SEQ ID NO: 458468 - DNA, 122 bp, Homo sapiens
ggccccgacttctcagcagcgccgcggccacgccccgcctcgttcccaccgcgcggggagcgggtccccgctcgggatgattcacttcgctccttacctggaggctcgcgcgtccccacccc

SEQ ID NO: 458469 - DNA, 122 bp, Homo sapiens
aacctttttctgtaaagtattggatattctatattttcagattttgcaagccatctctgtcgaaactacttaactctgcggttgcagagaggcatgggtgatatgtaaacgagtcggcgtgg

SEQ ID NO: 458470 - DNA, 122 bp, Homo sapiens
ttgggaggtggggttgagtctcgcaagctcctctccgccaggctgggccgcagcggacgccggctccccgatcacccgctcagcagctttggcccaggaagacctgcagccctggctccctt

SEQ ID NO: 458471 - DNA, 122 bp, Homo sapiens
gacagaccacgtgacaaaaagtaccacggaacaaaaggtgccatggaatgaaacgtgtcacggaacaaaacgtgccaaggaacgaaatgccaggacacggcagggggataaacctggtctcc

SEQ ID NO: 458472 - DNA, 122 bp, Homo sapiens
tgcatctaccactctgctctaatcaacatgacaacagggactgactcttttgtttgccaccgtatccccaaggctatcacaatatccagcatgagtgtgtcagcgctttgttgaattaattc

SEQ ID NO: 458473 - DNA, 122 bp, Homo sapiens
ttctttctttctttcctttctttcccttcttttctttctttctttcaagtcttgctccgtcgcccaggctggagtgcagtggtggggtctcggctcactgcaacctctgcctcttgggttca

SEQ ID NO: 458474 - DNA, 122 bp, Homo sapiens
cctgcgtgcggccctggattcaggggccttccagaggtgcgcatgtgcgagagtgggcggcgcggcctgggcgggggtcgggagagggagtcgggctgctggaggggctggggcctccgggg

SEQ ID NO: 458475 - DNA, 122 bp, Homo sapiens
atgatggagaactgtaccatgagtcagctaaaaagaatgcagggaagtcagaggttctgccgtgggtttggatgctctaatgcatgatcttagagctgaaaaaataaagacaagctattctc

SEQ ID NO: 458476 - DNA, 122 bp, Homo sapiens
cgtcctgggggcacagcagtaggtggccaggccagtgcccctgaccacacacactgaggacgctttccaccctatcggcttcctttcttggcgtggtggctcctgcccagtgactcacgcac

SEQ ID NO: 458477 - DNA, 122 bp, Homo sapiens
ctcggcacaggtcgtgtcttcccatttgttccaaggttacctccttccgctctgcgtcagcgtggatcttggcctggtttgtggcagcttctcggtaggtgctggcatgcttggcttgctca

SEQ ID NO: 458478 - DNA, 122 bp, Homo sapiens
agaaaaaaaaaggtgccctggacagcgggctagatgtctcctgcaggctcgaggacttcccggagggggcggcgttttctcggggcctgggaagaatgggcgggtttcagcgggcgccttct

SEQ ID NO: 458479 - DNA, 122 bp, Homo sapiens
cagaaatgtctgaggtagaacaagcagagctacacacagagaattttctggttctatccacgagaaagccctaaaggaactgtaaggggcaatcagagaataaatctttggcctgtcactat

SEQ ID NO: 458480 - DNA, 122 bp, Homo sapiens
ctccaatgcacatgcccatctctgaagcgcagccccttactggtttggtcaggatcctgccggccatgggatactgctcgcttttttttttttttttgagacggagtctcactcttgtcatc

SEQ ID NO: 458481 - DNA, 122 bp, Homo sapiens
ggcggccccggccaatcgtgcggcggcacggcccgggctcaccgcccctcggagtcttggcgctccgagccgcgcgttttgccctcacccgcccaattgttgccgcctcggccccctccccc

SEQ ID NO: 458482 - DNA, 122 bp, Homo sapiens
catgtcactctggtacttgagaccgagaccggactggtaacataagccttctgggccttccggggccctgaagcatggatcacggggaccactggttggcgccacagatgctcaaccagcaa

SEQ ID NO: 458483 - DNA, 122 bp, Homo sapiens
cttggagagggcagagtaggagcctccatgaaccaagtcaggctggaaggggtcagccctcgtggtccgtcagcgtgcggcggagtccctgtgcctaagtagcagagcggtagtcattgaaa

SEQ ID NO: 458484 - DNA, 122 bp, Homo sapiens
ttctgtgtccaggtcgtgtcctctgcctggggtgtcctcccttctcccatcactacctttcgcacccgaggtctggaggctcccagccatggactgtgctccaggatcctctccgcaggaaa

SEQ ID NO: 458485 - DNA, 122 bp, Homo sapiens
agaatgcttctgtctcgtttttatgggaagatatttcctttttcaccaaagtcgtcaaagcgctccaaatgtccacttccagatactacaaaaagaatgtttcaaacctgctccatgaaagg

SEQ ID NO: 458486 - DNA, 122 bp, Homo sapiens
tggagaggaaggggaagcagctctgccttccctccaatctaactacacaacccctgctgccgtaacttatttttagacatttaatctaaaattcccagaaaggaagcggatctacaacctct

SEQ ID NO: 458487 - DNA, 122 bp, Homo sapiens
gtatcatataataaaataaaaaataataataataattaaaaatatttttctttccattatcgtgttaaagatcaaaactatgaggaattctttaggggttctataatgagagaatctgacaa

SEQ ID NO: 458488 - DNA, 122 bp, Homo sapiens
taaagagacaccgggaaacccaactaatacaaacgcccagtttaagactcgaggcgcacgcgtttcgcactactcctctgggaatggggaacgtctcccgagaactgtgtgttcgcactggg

SEQ ID NO: 458489 - DNA, 122 bp, Homo sapiens
aaggcattacggttagaaactggccaggtgtcatttttgagagattagataactgttttccggtagagtgaattgcctgtttgttgcaagttgggactttgctgggctggtttacagggcca

SEQ ID NO: 458490 - DNA, 122 bp, Homo sapiens
ggagcgcgcgggaggaggagacaaaggccgcgcccgcccgcgccggcctcggtcctcgctcgcccgagcgctgcttctcgtccccgcccgagccgaacctcgattctccttcccggcccgat

SEQ ID NO: 458491 - DNA, 122 bp, Homo sapiens
ttcctttcccagccctggaggttgaagaagccaggcccgcgccatcttgggtgagggcagcgggaaggggcggggcttagggacacccacggcgccatacagactaagggcaaggagctgag

SEQ ID NO: 458492 - DNA, 122 bp, Homo sapiens
cctcccccacccgacccccaactcatgggaaaaaaataaagactgcagtagtagcatccgcgtgcgctgccagttcccctggggccttaattgttgccttcgccgccatcgtcgtcctgctg

SEQ ID NO: 458493 - DNA, 122 bp, Homo sapiens
gtagtctgcgctgactgggcggcgagggaccgggaggagccaatcagaagtcaggactcgcggggcttggaggaggggcgcgggcgctgcggcccctgctctacctcctagcgccggtgcgc

SEQ ID NO: 458494 - DNA, 122 bp, Homo sapiens
ggggaggtcttcttttagtctttgcttctgaagtttggtgcttcaggatgcttgctgcatcgtgaggtgaccctcacccaagcctttcatgtgtttggcatgcttaatttaatcaatcagat

SEQ ID NO: 458495 - DNA, 122 bp, Homo sapiens
taaattgagccattgcaaaatgtgtttctctacctttcatttgatagattcctacttaagcgtcaaaatgcagtgcatacagcatcgcctttggaaatccatctttgacctcccttctgtaa

SEQ ID NO: 458496 - DNA, 122 bp, Homo sapiens
agactgctgtcctaattcactgctatgaatcaacatgtcaatatgcttagcagaaagctgcgagttacagaatcataaaatcactcagctgctatggttctgaggacagggaaacctggcct

SEQ ID NO: 458497 - DNA, 122 bp, Homo sapiens
cctctcatcctaagggggcgggcctagcggaaggcgggtcaggcagaatgcggccccgggcgcgtgtggatgacgtcacccggcgcgtgccggggtagcccgtagtaaccccgagtctgcgg

SEQ ID NO: 458498 - DNA, 122 bp, Homo sapiens
gggccttcctggaccaatgatgacaactgccggcgtatgagtgttgggtgatgaataatacgtgtctagaactctgaggtccaacatacaaaacacctcaataagcaaggatcagtggagga

SEQ ID NO: 458499 - DNA, 122 bp, Homo sapiens
ccctttctagccgtgtatgagagtgtgtacacgcgcctacacacacacacgttgtgttaccggcgctcggccgccgggggaagacccaggccaatgccgccccccaccgcccccagcagtgg

SEQ ID NO: 458500 - DNA, 122 bp, Homo sapiens
ctaagactgcaagtttcatcttccgaaaggctgcatttataagcaggctgccagaggctgcgctttctttctcactctttgcatccaggagcctggaggatcttgctgcctaccccccgccc

SEQ ID NO: 458501 - DNA, 122 bp, Homo sapiens
gagctgaaagaaatctccataaagcccggaatgctggtccttgaggtccacacctgccaccgatcctgcgacgcccaggccgcccctcccctctcggctcctactcactcttggtggcatcg

SEQ ID NO: 458502 - DNA, 122 bp, Homo sapiens
attccggctcctgtcacagacgcttaagtgtgagcgcaacccagcccgcctcctcctccacgcccctcacactcacgtgtcgtgggaaactggagtagccaaagctcagaatccccagtgaa

SEQ ID NO: 458503 - DNA, 122 bp, Homo sapiens
aatagacacacttttggtcttccatggaaccaaatccagccctcgccctaaaagcagccccgtcttccaattaaaatgaagagttttttttaaagttctgccatcagcatctcttctgagga

SEQ ID NO: 458504 - DNA, 122 bp, Homo sapiens
tcaccgccaggttgccaatgatgccggtcccgaagatcaccacggacagacacatgaccgcgtaggctccataggactcctgggtcagcgggtagaaggggttcttcagtctcacacgccgg

SEQ ID NO: 458505 - DNA, 122 bp, Homo sapiens
tcttcatagtttgtcatggtcacaaagccaaaccctttgcacttgttggtgttgaagtcgcggatcactttcacattggtgacggcaccaaacggcccaaacatctgccagaggatcccctc

SEQ ID NO: 458506 - DNA, 122 bp, Homo sapiens
attctcccacctcggcctcagcacaaacccagctaatttttgtatttaatgtggagatggcgtcttgctatgttgcccaggctggtctccaactcctgggctcaagcaatctgcccaccttg

SEQ ID NO: 458507 - DNA, 122 bp, Homo sapiens
ctgcagacagccatgactgcgccactgcactccagcctgggtgaaactctggcctgcctccggctcctagatgccacccagagaggtgccctggtagacagtgaatcccaaatgtggactct

SEQ ID NO: 458508 - DNA, 122 bp, Homo sapiens
caatattcctctctgccaatttggagttcagcagggaatctaggaaaagggaaccacatccgtggatattgggtgcttgtagtgtgctgatgagattatcattttgcccttaacaaaaactg

SEQ ID NO: 458509 - DNA, 122 bp, Homo sapiens
attgcaagacattaacacagagcgtcctaagtgacaggatggtctggcgaccacatttcccggcagccctcgcacagccaggccgcttcgaggattggacttctccgcaggaggcgggtgac

SEQ ID NO: 458510 - DNA, 122 bp, Homo sapiens
cctcaatctccccatcttaagtgaggttgagactcgtctggaggagcgaaggacccagggcgccaggcaccaggcagatgcccccagagccgccgcccccggtcctccggcccccggtctgc

SEQ ID NO: 458511 - DNA, 122 bp, Homo sapiens
tcgtcatcacagacgctgccccaggagccaccgtgcatgacttccaggcggccccggcagcggctggggccccccaccagcctcagctctgtgaagagggtggagctggcaccagggggtca

SEQ ID NO: 458512 - DNA, 122 bp, Homo sapiens
catgtaaaagatacaaactggaatacatggaaaggtctccctttccccttctggttaccccgttcccctggctcttcgcagctactctatggatattcttctcccacccttttgtatgtaat

SEQ ID NO: 458513 - DNA, 122 bp, Homo sapiens
ttacttcaaaataataaatcccacaggctgctggtattggatgcgtggctcgaactgacgcggcatcttttggggttttgccatgacctgcatagaaacaggaaggaaaaaagaagtcacat

SEQ ID NO: 458514 - DNA, 122 bp, Homo sapiens
gcggtttctgccattaaaaggaacgtaggaatgagtattaggtaggtacaaatgtaattgcggtttttgccatcttaaaaggaatggcaaaaaacgcaattactttcgtacctacctaatat

SEQ ID NO: 458515 - DNA, 122 bp, Homo sapiens
cagaactgacccaaaactgtaaatgaaaccagactcctccactctgtttcttctggcccccgctcaggctgatgtcaccctctgaattctgtcttcaccctacaagcgtttagctggactcc

SEQ ID NO: 458516 - DNA, 122 bp, Homo sapiens
tccgcggcttcttcgtgattttgtcctagtcaccgggcctatcccacctgctggggatgccgccccctcggaagtgcctgaaatctccccacttacccaactagcctcagcgcctcctgtgt

SEQ ID NO: 458517 - DNA, 122 bp, Homo sapiens
aggaaatatcttcccctgaaaactagacagaagcataatcagaaacttatttgtgatgtgcgccctcaactaacagtgttgaaactttctgttgatagagcagttttgaaacactctttttg

SEQ ID NO: 458518 - DNA, 122 bp, Homo sapiens
tttgctctatgcactaagagggtgaccctcctctgctttcgactctggcccagacactcacgggttacccggccaggcctggagaacccaggtctaaacagatgggactcgtgggggaacaa

SEQ ID NO: 458519 - DNA, 122 bp, Homo sapiens
ggacggtcacgaatgtacgaaccttcccatggaaacattgcaaggggccgagcaaaattccgaccgtcgccagaagcgcagtcggagcgccgtcgccagtgcggattctgtccctaacacag

SEQ ID NO: 458520 - DNA, 122 bp, Homo sapiens
accttgtgatctgcccacctcggcctcccaaagtgctgggattacaggcgtgagccaccacgcctggcctgtgagaccccatgtctacaaaaaatgttcttaattcactgggcgtggtagct

SEQ ID NO: 458521 - DNA, 122 bp, Homo sapiens
cacttgcgtgcgtgctgatttactcacaggagtatctctcccattgtcctgtgaggtccccggcgccaggatcaacattgacttgtctcttctccttcatgccacattgcctggcatccagt

SEQ ID NO: 458522 - DNA, 122 bp, Homo sapiens
tctgagaccccccccgccccagcccccactatctagggcatccagtggacaattaggcttcgtgagccccaattccaaatgcttggatacgctaacattttaagcatttctgtctgtaagtt

SEQ ID NO: 458523 - DNA, 122 bp, Homo sapiens
tccacgggccggagcagacactcaggctcaagcgctggggcccgactgtgggtgggggtccggctggaccaggactagcagagagagatggggaggcaggaggacggaaaggcagagaaagg

SEQ ID NO: 458524 - DNA, 122 bp, Homo sapiens
ccggccccggtcgctgcgcctgcccgctgcccccgccactgggcgcccgcgccctctccccggcctggtctccccaggagaggatccgccggatcataagcatctttttttttttttttttt

SEQ ID NO: 458525 - DNA, 122 bp, Homo sapiens
gaagagaatcaggactacacccttagatctcagcacttggcaaacttcctctcatgagagcgtcacggctgcctctgtgagctgaggtatcaggcccctcttccctatgaatgttgaagatt

SEQ ID NO: 458526 - DNA, 122 bp, Homo sapiens
agaatataatgtggagaagtaaaaaaatatataaaggtctcattaacaggactagaattgcgctatagtcactaagccacaactgagtaatagctctgatctagtagtataacttatcccct

SEQ ID NO: 458527 - DNA, 122 bp, Homo sapiens
ctcacgaccagtgatacgtctggtccgacttaagcttcctttccaaatgtacatccaattcgttttttatggcacgatttttgccttgaagaattctcaccccaaaacgctgcccgcccctg

SEQ ID NO: 458528 - DNA, 122 bp, Homo sapiens
ggggtggaaggaaaggctggccccacaggagtgtgtgtgcagggaaggtaccccagaggccgatttcagcccattctaggaaaggatgttgtagtaacaaatgtttcatgctggaaaggtgt

SEQ ID NO: 458529 - DNA, 122 bp, Homo sapiens
ggagcccctgatgcagtgcacagcctggctgaatgcctatttccaccagcccgaggctatcgaagagttccccgtgccggctcttcaccatcccgttttccagcaaggtcggtaactaagcc

SEQ ID NO: 458530 - DNA, 122 bp, Homo sapiens
actttaccttaggaaaagattaacaaagcttagttagaacactgatcatttgactgcctgcgtttctatttatttctcacaggaggtctggcaacagtgaattttcctccctggggtgctct

SEQ ID NO: 458531 - DNA, 122 bp, Homo sapiens
ggggtctgggccctggtcctggcccagccttgggtctggggtccggggttcagagttctccgagagtcctgggatcacggagtgggggtgtcacagtgtcacactgcttacatcacccctct

SEQ ID NO: 458532 - DNA, 122 bp, Homo sapiens
ctgcactgttggcttccctacttttgaggttttgggacttggactggcttccttgctcctcggcttgcaaatggcctgttgtgggacttcacattgttatcatgtgggtcagtactccttag

SEQ ID NO: 458533 - DNA, 122 bp, Homo sapiens
caatgataaatccaggccgttaatccgtaatgacgtagatcgatccatagtccacattaacggctcctcactttcgagtccggctaatggacatcagttgggacttaaggccaacaaataat

SEQ ID NO: 458534 - DNA, 122 bp, Homo sapiens
agaggcttgccacctagctagcgtctgtgcaagcttgctagctctgtgctcaccaccctgcgttctacctgcgaaaagtgctttcttgacactgtgctggactccttaaacatgccactgac

SEQ ID NO: 458535 - DNA, 122 bp, Homo sapiens
agaggggacagcagaggaagcaagctctgctctccaggggctaatgaggaaaaccccctccgcccccctccggtcctgggaggccaccctcagcagaatggccacggtagtcataacaataa

SEQ ID NO: 458536 - DNA, 122 bp, Homo sapiens
acctggtcccccgactctccccaggcccccggtgggcatggagcagcccggggaggggtccgtgctggttctgaataaagcaggacccgcctagtggctgcctgtgtgcatggctggaaggc

SEQ ID NO: 458537 - DNA, 122 bp, Homo sapiens
tcctgggagctctgagctctgggctttctccagttcgcactctgcttgtctcggcagctccgtccccaccgcagaggtgtgaaggggcgcaaagccagcgaagggagaacccgggtcgggta

SEQ ID NO: 458538 - DNA, 122 bp, Homo sapiens
aaagcaaaagttttaagcaaaagagtaacatgagctgatactaaaagccatctcttggcccggtgcaatggctcatgcttgtaatcccagcactttgggaggctgaggcaggcggatcacct

SEQ ID NO: 458539 - DNA, 122 bp, Homo sapiens
tggaaggcgaggatcaatactatttcagctcattaatccccaggtgttaggggaaggaagcgtgcggtctggagtcatctggcagatgcataaacaacctcggaaattttcagagaaggcaa

SEQ ID NO: 458540 - DNA, 122 bp, Homo sapiens
agcagccctttcccttattcattcagtaaacatggtttgcgcccattctcagtcaggccccggcagcatgagtcaggtgcactggctgcccccgatccggccagcggcgggctgggcataag

SEQ ID NO: 458541 - DNA, 122 bp, Homo sapiens
gccgaaggcccaagtggggctattcaaggcctggtgagggatcgaagcccgggccgtccccgctgccccgcctgccgcccctctcacctggtcccaggcgctcaccacgcccccggtgaaca

SEQ ID NO: 458542 - DNA, 122 bp, Homo sapiens
gaccccagtgcccacacccccagaggacccaggcacagaaccctcatcccatcaccttctcgcccatgagccctgggggcccagggtctccagtcggtccagtgcgtccctttggcccctca

SEQ ID NO: 458543 - DNA, 122 bp, Homo sapiens
actcctgataaagtcagctactttcagattatgtaccattgaggtttggtaagttaagtgcgtttatcacaaatcccttgttagctcatttgaaaagtcaatacaggaagaagcagatattg

SEQ ID NO: 458544 - DNA, 122 bp, Homo sapiens
caataaagctttgctcaaacggggagctccgggagctcatcgcgagactcaggtgaaacgcgtttctagtttgggacctgatctcgcgttgtttgataagcaggggaatgaggtgaaagcga

SEQ ID NO: 458545 - DNA, 122 bp, Homo sapiens
tccctacagcacacctcgcaccccagcccacggaaacattgtcttccacgaaaccagtcccgggtgccaaaaaagctggagagtgctgatgttttcgaggtcattaccgttgcatgtatcag

SEQ ID NO: 458546 - DNA, 122 bp, Homo sapiens
tggcccgctccagtcccctctccccccacccctccccccaggagggggccttcgcaccgtcgccagccagtccaagcttcagtgcctgcacctgcggcttccccagcccggggcactctccc

SEQ ID NO: 458547 - DNA, 122 bp, Homo sapiens
cttatcagaccaatggggaagtcagcccagaaatgttctgaggaaaggggaggcgggggccgctgggtcatccctcccacaggcccatcattgggatgcgtcctgaacgcccatcaagccca

SEQ ID NO: 458548 - DNA, 122 bp, Homo sapiens
ttgactgaccactcagggcttcccttctcctaccccaggaacaaggagtgtcctacctgccgaaagaagctggtgtccaagcgatccctacggccagaccccaactttgatgccctgatctc

SEQ ID NO: 458549 - DNA, 122 bp, Homo sapiens
cgcacccggctgttggaaaatcacaggttgtcttgatgggtgctgcatccagatgcttctcgacagacgagggagtcatatgtctggataaatccaccgtatgttcaagcgatcaaaaatgc

SEQ ID NO: 458550 - DNA, 122 bp, Homo sapiens
ggcttcccctcccttccacaaccttccccttttggaggccacaacgaagttttgggccatcggtatctgcagagccagaatatacaggaggaggctgatggattacaatcttctgaccataa

SEQ ID NO: 458551 - DNA, 122 bp, Homo sapiens
gaaaaggacagcgaggtggagcaggaggaacaggacactgaggaggggccggagatgcagcgagtacagagcaaacaagtggctgtaaaggggaggagagcgcagaatctggggaggccaat

SEQ ID NO: 458552 - DNA, 122 bp, Homo sapiens
agctaaggaaatgaaagttgggtgtacaccaaacagatttaaagagccatacggaaagcccgtgtttgtgtgtatgtgtctagggggcggtgcacgaaagggctcgcccgatggcgtggagc

SEQ ID NO: 458553 - DNA, 122 bp, Homo sapiens
atcctaagtcggggacatgggagttcctgtggtgtatgggtatcatcaagggcaggcagtcgtgaggagggtggcaatactgatttgctttctgcagagaagcccagagagggtatccacgt

SEQ ID NO: 458554 - DNA, 122 bp, Homo sapiens
gggtggccccagttcgtgggatcccgatggggagagccttgggactgaggggccgcccggcggaagggcggagggtaacgcccccttccccaggctgagagggaaggaactagaggtgtgga

SEQ ID NO: 458555 - DNA, 122 bp, Homo sapiens
tggagggggaccttcctgcaagaattggtgggggccgcggtctccgccttctagaggtggcggcctactgcccttcgggtgttgtgtgcaaagccccgtttcctgctccctgcgcttgtatc

SEQ ID NO: 458556 - DNA, 122 bp, Homo sapiens
gggcttgccgattcaaacctgcccgactcagctggattaagttgggcaagggagatttgccgtcagtctgcaacctggtggcagatggagatggaaccaagatttaccctggaagtaggata

SEQ ID NO: 458557 - DNA, 122 bp, Homo sapiens
agccaaggatacaggcagcttgtagaagcaagaaaagacagattctcttctggagcttcccgaaggaactcaaccctgcagacccagtttgaatttctgaccaccagaactgtaagataatg

SEQ ID NO: 458558 - DNA, 122 bp, Homo sapiens
cagtctaattccagctcacactggaaggcttcctataggtttggttgccctgatcacagccgagctgccccaccaggaattaaccctggtgggcaaagggtccatcttctcaagctttctga

SEQ ID NO: 458559 - DNA, 122 bp, Homo sapiens
gagtcagaaaggcgcaggctctgctggagcgagagaccggccctgcagtgcaggatgctccggtggacgtggccgagcggctcccgggcagcgcggctttatatgccgcttctcctgtgcag

SEQ ID NO: 458560 - DNA, 122 bp, Homo sapiens
cgcttccggggccgccgccgggggccgtccccgtgcccactggggctcggcccccactcccgaggtccagcctcccagcccctggggctctcggcgcccccccagtctcgggggctctcctc

SEQ ID NO: 458561 - DNA, 122 bp, Homo sapiens
ctggcctcctgggctagggggcttagaaaattgcaaatgcaagatggcatggtgtggctccggggtgctgtcaaaataagcacattgcaagcacaaactgatgaaagtcaaaaactatcaaa

SEQ ID NO: 458562 - DNA, 122 bp, Homo sapiens
catgtgctgttcctccacccaacccaacaagtaagtccctttgccttccctggggggcagcgagtgtgacaagaagcaaagaggaatctcaaccaagtaggacaaaatcaatccaaataaac

SEQ ID NO: 458563 - DNA, 122 bp, Homo sapiens
ctttgcacattgagaaaccaggcccagagaattgagtgacccgtgcgggctcacacagctcgagacagacaggctgggcactccattcctggaattctgaagcccagcccagtttctctcca

SEQ ID NO: 458564 - DNA, 122 bp, Homo sapiens
tcatccttcctgccctttttgctgacattgggtgtggtgatggggaagcccaggagccctcgccacagctctgccatgtctctgtgccatctaaagccctgccccttcctccctgtcagcgc

SEQ ID NO: 458565 - DNA, 122 bp, Homo sapiens
aaacattttttgtttgttccactaggatggtgctgctattggttatctagtgagtaaaagcgagggtgctgctaaacatcctacagcgcacgggaaagcttcccacaacaaagaatttcacc

SEQ ID NO: 458566 - DNA, 122 bp, Homo sapiens
cacctggggctggctgcaacctaagatcactgtccttcttacaagttggacttctctccacggactctctcttcagcaaccccatgagtactccctcccctccctcagattcaggtgtagtg

SEQ ID NO: 458567 - DNA, 122 bp, Homo sapiens
gggtggctgggcctggctgggaaacaggcagaccccgacccggctccagcaaggctgcggcggagacctcctcagcctggaggtttcctcagacacgagtcaactgcgcaaggcggcaggca

SEQ ID NO: 458568 - DNA, 122 bp, Homo sapiens
catagaggtgttcaagaaagggtgttttcaaacagagtcagaaaaaacacaactatactgcgagcagcatacaaacctgctttggctgcacttcactgctcatggcataaggccacgaagag

SEQ ID NO: 458569 - DNA, 122 bp, Homo sapiens
ttgtgtctgggaagaagacccttttctatgcaggctggaagggggatttgctggcattcccgagtggttacaactttgtggagttaatatttaatgtgccattttatagcatatacagattt

SEQ ID NO: 458570 - DNA, 122 bp, Homo sapiens
gaggaaggtttaaattggggagtttatgcaattgcagattgcagagtggagtggagattgcgggactttaaaagatgatctaatccaggtttttagatgttatatcagtcatgcttccttag

SEQ ID NO: 458571 - DNA, 122 bp, Homo sapiens
ccccaggcctcagcagaggaggttcaggtgagctgatcctaccccacttccatcctcctccgtgccaccagcctggctaacccgtagttcccatcccttagtgacgaggaccagttcagagt

SEQ ID NO: 458572 - DNA, 122 bp, Homo sapiens
gtgggggggagccggagagcttcataaagccacagcaaagcgctgcgactctagtgacagcggcccgctggagaggaagcccgagagctgccgcgcgcctgccggacgagggcgtagaagcc

SEQ ID NO: 458573 - DNA, 122 bp, Homo sapiens
atgatgggtggtactgaggactcagcacaggggaggcgcccagggccgtgaggctgggggcggggtggggggctgaccagcaaggtccgaggctggggtctccctcttgctccagctgcaaa

SEQ ID NO: 458574 - DNA, 122 bp, Homo sapiens
ttagcataaactcagctgtgtttgaaggggctccttatgaataacaaaagacattcctatcgctcatgaaattctagggttttaggagatctatgctaggaaccaaggctgaagaacaaata

SEQ ID NO: 458575 - DNA, 122 bp, Homo sapiens
taaaagcctggaaaggggcgatgcctggcctgaggagttgaccaatcccaggcctgggggcggagtctgactcggagcgcgttcccggactcgcggggggcgcagagccgaggcctgggggc

SEQ ID NO: 458576 - DNA, 122 bp, Homo sapiens
actacctcccaaacctctgcctagatccccctaggaatgggcccacccaccaagagaaaccgaagggattcccacacctgttaactcaactctgtgcatgccaccctcatcctcatacccgc

SEQ ID NO: 458577 - DNA, 122 bp, Homo sapiens
ttggcagcgcccaaggttgcatggcatggcccgcttaagtgccactcagccggccccaggcgggatcagtgcgccggaagtggcgtgccggaaacaggcgcgtcggaagttgcgtctccgga

SEQ ID NO: 458578 - DNA, 122 bp, Homo sapiens
cgagactgccgtgcccattgctcgcctcggtcgccgccgctttagccgcctccgggggagcggccgcctattgtctttctccgcggcgaaggtgaagagttgtcccagctcggcccgcgggg

SEQ ID NO: 458579 - DNA, 122 bp, Homo sapiens
acgagacagtcacacacagccgtactcataccacacggtctgcggatccccgccgggctccggggaggccggactgctctttgagacgctccctcgactgcagtcctccagggcccggccga

SEQ ID NO: 458580 - DNA, 122 bp, Homo sapiens
ttcacaatgatctcctcatcttcatccactctgcaagacgagggtcaaaatgcaattgttcgttactcatacggccagactgtgagaataagcgttccaaaccaagaacaggaaatggaacg

SEQ ID NO: 458581 - DNA, 122 bp, Homo sapiens
cgcggtgcttgcgggccaacgcgagttccgggtgggtgtgggctcagcggaccctggactcggagctgcggggaggccccaccggcccgggcagtgaggggcttagcacctgggccagtagc

SEQ ID NO: 458582 - DNA, 122 bp, Homo sapiens
gactcaagcaatccacccttctcggcctcgcaaagtgtgggcattacaggtgtgagccaccgtgcccggccaattttctttttcctttctttttttgttttgttttgttttgtttttgagac

SEQ ID NO: 458583 - DNA, 122 bp, Homo sapiens
ggcttttatacaaagtatctatatgagattcttctatattgtacagagtggggcaaaacacgcccccatctgctgccttttctattgccctgcaacgtcccatctatacgaggtgttggaga

SEQ ID NO: 458584 - DNA, 122 bp, Homo sapiens
gacagggagggttaaggagcagccttgcttgatgtttgtgctcactaaaaaatgtgatgacggatacataaaactgcaggtgtgcctctcatcagggagccatgcacttcagctatgcctgg

SEQ ID NO: 458585 - DNA, 122 bp, Homo sapiens
cccactaacttttgtatttttagtagagacggggtttcaccatgttgctcaggctggtctcgatctcctgacctcgttatctgccagcctcggcctcccgaagtgcttatcaccgagcctgg

SEQ ID NO: 458586 - DNA, 122 bp, Homo sapiens
ctggagggcgtgccgggcgtggggcggggtgttggggttcctagctgaggccccagagggcgtgatgaggggggtggggttttggggttgcgggaattaggctgtagagggtgtgactccgg

SEQ ID NO: 458587 - DNA, 122 bp, Homo sapiens
ccaaacagacaggctatgagccccagcccagatcctctgcgcctcccacagtcctggcaccgataccatgcccaggacagggtcatgcactcagccaccccagagttgctctgaagatgaaa

SEQ ID NO: 458588 - DNA, 122 bp, Homo sapiens
gcggctgctgggaggacacgcacggctggctggctctggaggcctgagtggaggcagccccgtgacacaggaggggccgcagaggaaaggaggggacttaggccgcataccgggagctgcag

SEQ ID NO: 458589 - DNA, 122 bp, Homo sapiens
gtttgggggctgatttttatttctttgggggctttttttcttggcaaatactaaaaatctcgtcaatgtaatttctgtggtttctattcagcttgggtttcatgttttaaaataaattttaa

SEQ ID NO: 458590 - DNA, 122 bp, Homo sapiens
actcatgatggaaggtctcagactgtacggaattaaataatacccgaagatgtcatagtccgaggcaggagctgaagaggcgttggccgcggccagttggctttcaccgcagcccggtgtag

SEQ ID NO: 458591 - DNA, 122 bp, Homo sapiens
ctccatcccagtgcacgagggtgggtgaggctgtaccctaaggtggagcacctgccctcacggggctgtaccccgaggactggtcttgaacgttgggaacagagatcagctctggaaaggag

SEQ ID NO: 458592 - DNA, 122 bp, Homo sapiens
attgcactggttaacttgaagcagcagaggctgtagtttcctagtgctgactctgggcgccgctgttggccaaagtggagagcttggcgctccagatctcctcgcgcagccgcagcgcgctt

SEQ ID NO: 458593 - DNA, 122 bp, Homo sapiens
gggtctgccccgagggcttacagggggtttttccggacatcaatcatccccgggctggctcgtcgcagttcccgccggggcttggacaaaggcccaaagttccagggcaggcctgcctcacc

SEQ ID NO: 458594 - DNA, 122 bp, Homo sapiens
tacagtagagtgtgtgggggtttccacaattgctacttacggtttggagccacatgatgtcgctctttaccacaaaatacatgagagaaggaggaagaagggaaaattccttctattcttac

SEQ ID NO: 458595 - DNA, 122 bp, Homo sapiens
ccccgttccctccgcacccgccaccccgcgtaggctgactccccgcttgccgccccaaaccgaagtcccaatttttagcttcagtggcctcagagacctgacttttccaagcttccatagga

SEQ ID NO: 458596 - DNA, 122 bp, Homo sapiens
cgcgtggagtgttttttgtcattggattgtcagacttgagtttttcttatgttgtaaatacgtaggtgctgtgaagaaattttcaccctgtggggaaaaagttttgaatagatgtaatctct

SEQ ID NO: 458597 - DNA, 122 bp, Homo sapiens
cggagctgtttctggagaactctgtgcaggcaaaagatctctgatgccgacctggatgggcgccattggccagagccgggggcgcctggaacagtgtgtcctcagccctgcacttggggcac

SEQ ID NO: 458598 - DNA, 122 bp, Homo sapiens
tgtaaatgatggcggatgccaagtatgtcctctgccgatgggaaaagcgattatggcctgcgaaggtgacagccattattctgtaacttcaggacttagaaatgactttcgggtgacaagta

SEQ ID NO: 458599 - DNA, 122 bp, Homo sapiens
cgctgccagggtgctaacactgcctgaggcacctctgcttttgaagtcgccggggattagcgggagcgtaggtgagggacaggtggagctgctctgcgcggggcagcccggctcgccaggag

SEQ ID NO: 458600 - DNA, 122 bp, Homo sapiens
agcttgagcttgctgagcagctgggggcgtgggtctggccggctccgcacctctacaccgcggctttccctccatggccacggatggccaggcactccagccttggagccaggccttctgct

SEQ ID NO: 458601 - DNA, 122 bp, Homo sapiens
aagtgcccgcaaactggacggtggtaaagcaccaggaagcaactggctacaaaagccgctcgcaagactgcgccctctactggaggggtgaagaaacctcatcgtaataggcctggtactgt

SEQ ID NO: 458602 - DNA, 122 bp, Homo sapiens
tcggtcccagacaccagagcaagctcaagacccagcagtgggacagccagacagacggcacgatggcactgagctcccagatctgggccgcttgcctcctgctcctcctcctcctcgccagc

SEQ ID NO: 458603 - DNA, 122 bp, Homo sapiens
aaccacaggctcaaaatcctcatctgtgaacagctccactcactacctggtcagcctctccggcctgccctgggggccctcactgccctgccagtcaattccaaaaagccctcgtgggctgg

SEQ ID NO: 458604 - DNA, 122 bp, Homo sapiens
ggggacattctgcagatcaaggtgacgggccgggtctccctccccttgctgcccaacccccgcccctgtccagccatcacccctgcttagggtctgcctgcccgggttcaggctcgaactgg

SEQ ID NO: 458605 - DNA, 122 bp, Homo sapiens
gcctggaggggctctcagctacgtgaaggacacagatgcgcatgtaaataaggcaaaggccggatggaggtggctctcgaatcccataccagatgcctggggaatgacatcgagccctgcct

SEQ ID NO: 458606 - DNA, 122 bp, Homo sapiens
gtgatccctgaaaagttccagcatattttgcgagtactcaacaccaacatcgatgggcggcggaaaatagcctttgccatcactgccattaaggtaagtgaagtagggtaaggaatagggaa

SEQ ID NO: 458607 - DNA, 122 bp, Homo sapiens
ccctgctcccgagtgtgcccagagtcctgccgtttccttctagcgcgcgttctttactggcgccattcctgctgctaagagccctgagacggccgggggtgacccgggcccagagcagctcc

SEQ ID NO: 458608 - DNA, 122 bp, Homo sapiens
aaaacaacttttttagtctgctccaaagttaaaataattaactagctaagcattattattcgactggtctaaaaactattgttatcttttttttttccttttcactgttatggccttttcac

SEQ ID NO: 458609 - DNA, 122 bp, Homo sapiens
tgtgtttccattttcttccatgcctcagtcagcccaggtttgccctaatgtcttattcttcgttttcagctgagcgtagtcagtagtgaaaacaagtcacagcttttgagttttacttagtt

SEQ ID NO: 458610 - DNA, 122 bp, Homo sapiens
agatttcagaaatcaactccatggacccggcaacacaggactcatttgctccatctattgcgagacagctgtggcttgcggtcccagcgtgagaagcctattggccgggcacagtggctcac

SEQ ID NO: 458611 - DNA, 122 bp, Homo sapiens
atcactcggtgcttcacggaacaaacgcttgaggcaaaacctaagacagctgggtcccaacgcggggcctcaccccggcccgtcccgccccagcgctcggaggctgagagcagcattctcag

SEQ ID NO: 458612 - DNA, 122 bp, Homo sapiens
agccagacaattagacaactatggaggaatgaaaggcaattcaaacatctgcttgattcccgccccgccacccctaatttctgagagaataatggttagagaacattgcatctcacttgaaa

SEQ ID NO: 458613 - DNA, 122 bp, Homo sapiens
gtgtatgagtagctgaagtaccactgctgggatgggccaagactcagctactgttacaggcgcaaactcctagttaggttttcaattttgtctacctattaagttaggttgcagttcatcca

SEQ ID NO: 458614 - DNA, 122 bp, Homo sapiens
actgaccacacagttgagaggaagttgaggcctagaagagcgcgcaacagtaagccgtgtcggcaccagactctgttggtcctactgacacctccagcgttagaatgactaaggctccactc

SEQ ID NO: 458615 - DNA, 122 bp, Homo sapiens
ctccaccccatacctttggtctcaaaggggtggtggggaggccgccctccgttctccgcccggttcatggtcttgttgttctccagctccggtggaggctcggggtactctccgagctcggg

SEQ ID NO: 458616 - DNA, 122 bp, Homo sapiens
tgtccaagacggagacgagccaggtggccccggcctaagacctgcctaggactctgtggccgactataggcgtctcccatcccctacaccttcccccagccacagccatcccaccaggagca

SEQ ID NO: 458617 - DNA, 122 bp, Homo sapiens
tgaggcactgatgacctgctacactcatgcaggactcacatagcttcagatgactcattacgtgaaagctggcttgtggttataaactctatagatatttctctttgctcttgacctgattt

SEQ ID NO: 458618 - DNA, 122 bp, Homo sapiens
ggaatgcctctcttgccaagaagggcacaatcaccctctatgtcttcatgtatctgtggccgctgaggccagctgtacccaaagctctacttgtggaagctttgaatggcctcatggagggg

SEQ ID NO: 458619 - DNA, 122 bp, Homo sapiens
ggccggcgtccccttagcctggactcacgctcggagttgcagctgggctgggaactgccacgtcaaaccctttctcggctgcgcgcccccagcgccgggcttggaccagccgccgcgctccc

SEQ ID NO: 458620 - DNA, 122 bp, Homo sapiens
acgaatctccccggggagacgattaaataccatgccgcagaggcccacgggatttgggggcggggctacggcgagcgcacgcgcatacgttgaccgcatgcgaccccggggagttgtgggta

SEQ ID NO: 458621 - DNA, 122 bp, Homo sapiens
catttccactcgtgaacttttcttctgaatttgaatgttgcatagatcaattatctaagtcgcctatacgactgttcagcagaggttcttaacctctttggggtcacagaccattttggcat

SEQ ID NO: 458622 - DNA, 122 bp, Homo sapiens
gatcatcaacagattgtcagtttcccaagcacctgacactgaggcgcttagatgggaatccgcgttaaggttttatttagcatccttcctcatcagaattttagcgtcttatcagccactgc

SEQ ID NO: 458623 - DNA, 122 bp, Homo sapiens
agaaagaagaagaaacaatttagcaaatagtcagtcttcatatcctctcactcatcatagcgaaagctaaagtccttgcaatagcctaaaggccctacatggtgtccctctctccctccctc

SEQ ID NO: 458624 - DNA, 122 bp, Homo sapiens
cagtgggtgcaggacagtgggtgcagcgcaccgtgcatgagcggaagcagggcgaggcatcgcctcacccgggaagcgcaagaggtcagggaattccctttcctagtcaaagaaaggggtga

SEQ ID NO: 458625 - DNA, 122 bp, Homo sapiens
acagctgctgagtacccagcaatacatggtagaggaaagcaagaaccacatgaaagtaaacggaagcagtggctaattgctgtcacttacatacaatacaaaatggggcactagagagatgc

SEQ ID NO: 458626 - DNA, 122 bp, Homo sapiens
agaagaaaggagatgctggtatctgctgagataagtaaggctacacacttggaacatggtcgatttttggattctccaagaggagccaacattgggttgctggctgctgctacctccaccac

SEQ ID NO: 458627 - DNA, 122 bp, Homo sapiens
cctcgaggggagggaaccccaggagacctggccggggcatcacgtgcgcagagcgggtcacgtgggcgcgggaggggtgctgagaggtggagagcgggagccggcggatttcttaatgaagt

SEQ ID NO: 458628 - DNA, 122 bp, Homo sapiens
gaaggcggcggagcgcggggcgtcgtctccgcgtttccaacctgttgaggctcctcgccgcgggccgggccttgtgcgcctctgtccccgccgccctcaggcctctgtccccgcgcccgccg

SEQ ID NO: 458629 - DNA, 122 bp, Homo sapiens
atgctttctccccgtaccagccggtctgtggcacgttctttcgtgtgggtccaggctcaccgtcgctgtctcagaactgctttcctgttacgctgccgtaactgtgatgtttgtgtatccat

SEQ ID NO: 458630 - DNA, 122 bp, Homo sapiens
ggtgcagtgtgtttactggagttgtacccatgctcacttgaggtgcttttcccttaccagcggagtgtttctagaggaaggtcatataccagttaaatgccaccattttgcctcttagtgcg

SEQ ID NO: 458631 - DNA, 122 bp, Homo sapiens
atttaatacaagggaggctgaactgccggggagctcagaaatgcacgagcaagacatgagcgtaggggaggttcccggggtgcctcgactgtccaggcttgcagctgcaggtggagaggagg

SEQ ID NO: 458632 - DNA, 122 bp, Homo sapiens
aaactgcgaggatccgagcgtactgtttgtgcaccacaaggtcaagtcgggaagtggagccggaggaggaggggcgaggaggcgaagggtggggagaggggcgccccgcttcctcgccatgt

SEQ ID NO: 458633 - DNA, 122 bp, Homo sapiens
tctgactgtgctgccctgtgcccagggaggagaatgaggaccacatggactctgcccacacggagctggctgctacgcccaccctcagaggcgtcaggagacacagcctggccccctcaggg

SEQ ID NO: 458634 - DNA, 122 bp, Homo sapiens
aagcaaagtgagatggcatgatctactttatttttgaaataattcctaattgggatcagtcgaatcagggaacttatgatgacaaaagagaataaggtcctgctctgagggaagcgaagaag

SEQ ID NO: 458635 - DNA, 122 bp, Homo sapiens
agagaatagtgggagtgtggcaggctgggcccgccttgcccctttcaaggaagcagctgccgcgtcacacgctgcagcgcagtgctgcccatggtttgtcggcccatattgtgggatctttc

SEQ ID NO: 458636 - DNA, 122 bp, Homo sapiens
atccacaaatctaggcctcgctgccccctccctgcctcctctggccctcctcagtgcccacgcaacccggttcgaaagagaggatgaccgtattctgcattttagaaaacaggctcttagct

SEQ ID NO: 458637 - DNA, 122 bp, Homo sapiens
tgtctgggtttaataattcagttccactccctgtagttagtgacaacctctggtcactgccgcccaaggagaagtcagacctctcacctaaaccactgccacggcctcctaaccaccttccc

SEQ ID NO: 458638 - DNA, 122 bp, Homo sapiens
cctaaaaaccagggggggaagaggggctggctcttactccccacatcgcggggggcgcctcgcccccctgccatgtgaatcgtcatatccagggtgtgagagggggttgatatgactccccg

SEQ ID NO: 458639 - DNA, 122 bp, Homo sapiens
aacatggtccggagatacacccagctaccaattcgggaccaggaccaacaggaccggacccgcctccctggacctcggacctgatgaggccacgacccctgcgcttctctcctccccctgtc

SEQ ID NO: 458640 - DNA, 122 bp, Homo sapiens
agggggagggggcagggatccgggatgcaggaagctgtgagcgaggccaactagagggggcgggagcagcgcacttttgagacgctccctagagtggaacccgggctcggctcaggctccgc

SEQ ID NO: 458641 - DNA, 122 bp, Homo sapiens
aagtaatttccctttcattatgccacagtgtgtttattatatacactgagtgtagctaatcgccactggagacgcctttggaaaaaatagtaaagcgaaactgctgaaggttgcgaactatt

SEQ ID NO: 458642 - DNA, 122 bp, Homo sapiens
tgtcttcctccacccgtgagtgcacccacagcaataaaagccagcggtgtgggtctcacacgcatctccagccccgtctcacacgcaccacctccgggcctggacttggcctcccgtccatt

SEQ ID NO: 458643 - DNA, 122 bp, Homo sapiens
atagacttccagctgagccagctggtgacctggccgcccctgagtggagaaaatgggagacgtgggagttggaaggcacaccacgcagacggtcacctcatggtgacgtcacctgccaaacc

SEQ ID NO: 458644 - DNA, 122 bp, Homo sapiens
ggacaaaaaggcggctgagtcagctgggactttggggggcctctgtaggggttggaagtccgtggctttcttaaagtcactttcagcccaggagggtaccaggcaatccagctgtccactca

SEQ ID NO: 458645 - DNA, 122 bp, Homo sapiens
cgccagtgagtaagaaaacgggttcgcgccgttggtggactccgcccacttgtgacgtcacgagccgctcccccaggatcccgacccaggcgtctcccttgggatgggggcggagaggaacc

SEQ ID NO: 458646 - DNA, 122 bp, Homo sapiens
cccccgccgctcggataggagcctccggtcctcacacccgcgcctcctcaaacccgcagccggtacctcctctcggacccgcagcccctcagacgcccactcggcccccttccccgagctcc

SEQ ID NO: 458647 - DNA, 122 bp, Homo sapiens
caggtgcccaccaccacacccggcccggttttttgtattttagtagagacggggtttcaccgggttgtccaggctggttgcgaactcctgagctcaggcagtccgcccacctcggcctccca

SEQ ID NO: 458648 - DNA, 122 bp, Homo sapiens
tgccagacaagggcttggcgcccaccaagagtaggtacccagaaaggctgtcacaccagccgtttgctctcactgacagagggcaactgccccacatgattgaggcaaggggtcaattgagc

SEQ ID NO: 458649 - DNA, 122 bp, Homo sapiens
ccgctccgctcggggtggtcggtgggcggagcgtcgggctcggtcaggtgaccgcgggggcggggccgcgcggcgcgggatcctgggaaggctgcagagctagagcagcgccgcccgagggg

SEQ ID NO: 458650 - DNA, 122 bp, Homo sapiens
tgtaagagattagcatcatcttcagccagctctggaccttgggccagcttctgccattctcgccgcctgtcatgaggtgctcttggcactttttctggttcatgaggacgatctagattttt

SEQ ID NO: 458651 - DNA, 122 bp, Homo sapiens
gctgggattatgggtgtgcactaccacgcccagccaaggcttagacattttagaatgaggcgatcctgatttcagttctaccagagtcatgaccccactatgctgctgatgaagactgggga

SEQ ID NO: 458652 - DNA, 122 bp, Homo sapiens
tagggcttcctcaacacaagccaaattatgtttacagcgaccctagtgagttttcctgctcggaccatgacagacttggtagagtgaagacatggtttctcggcaggccagtccacgctccg

SEQ ID NO: 458653 - DNA, 122 bp, Homo sapiens
ctaccccgccgtgcgaggcagtggctccggcccttccagctcgggatggagtcagggagccgcccgcgcccgaatgcagaggctcctgcgatggccccggagtgagtcccccagaggagccg

SEQ ID NO: 458654 - DNA, 122 bp, Homo sapiens
ttcctggtgctggactaagaggtgcaggcttggagggtgcagggcggtccgcctctcagacgtagaggcccggcctcggatgaaggcggaagggagggcaccgcctgttgctgggcaactgt

SEQ ID NO: 458655 - DNA, 122 bp, Homo sapiens
atcttgcggcgagtgttccggatggcgtggatggagaccagccactgccgctgtgaggcccgggcagccaatggcacctgcttctgccactggccggcgacttcccaaaggcggttaaagaa

SEQ ID NO: 458656 - DNA, 122 bp, Homo sapiens
cgcggtccgatctgagggcgtcgttaatgtgagagcccggttgggaggctccaaaccgggcgccttcggggaaggcccgagcgccggagcccctgcccggagcccgcgccgcggaaccgccc

SEQ ID NO: 458657 - DNA, 122 bp, Homo sapiens
cttccggctccctcactctgacagagctaggacaagaacgcaccaatgactatggacccacgtgtggggtctccctctgggtggagtcgggtggggggtacccactgtcccatgtggaacac

SEQ ID NO: 458658 - DNA, 122 bp, Homo sapiens
agactgggaatggggaggggaaatggggaaaatgaatgaatgaaatcagaaaaaagtcagcggctcagtaaatacagtttaaagagagaataattacttcagagctacccttttaagagaaa

SEQ ID NO: 458659 - DNA, 122 bp, Homo sapiens
atcccacccgcagcggaggcggcccggggcagggagggcgggtccggggcgggtcctgaacggcgggggccggcgctggcctcgccccggatgcgtgctgacgccacggcgacggacgccgg

SEQ ID NO: 458660 - DNA, 122 bp, Homo sapiens
aatgtgcaaaagcatccacttctggaaacgccgagaagatcaagcgtgtgagcaccgcagcggacccaggacggtacctggcaggggcggccccaggcaggtgtgagaacctcagcgggccc

SEQ ID NO: 458661 - DNA, 122 bp, Homo sapiens
cccctgccttccaagttttgtccagacctctctgagactgttttctcccagtttctcagtcgtttttttgcccagttatatttttcatttatttgacaaacatttattgagcacccgctgtg

SEQ ID NO: 458662 - DNA, 122 bp, Homo sapiens
ggataggattatttgagaaatttgtggttttaaattcttttatgatggcgtaattttatgcgtatactcaaggccatagaatgttatgtatgtgtataaaagttgaaagtttggaatcattg

SEQ ID NO: 458663 - DNA, 122 bp, Homo sapiens
ggtggagaagcagacctctgtcgccgacctgctggcctccttcaatgaccagagcacctccgactaccttgtggtctacctgcggctgctcacctcgggctacctgcagcgcgagagcaagt

SEQ ID NO: 458664 - DNA, 122 bp, Homo sapiens
taggcctctctgccatggcacgtcacaccttgtgcggtctctgcctgtctcccggcctggcggggtctgagtcatcaccttccccgatcctgggcacagggataggcccagcagggctgagg

SEQ ID NO: 458665 - DNA, 122 bp, Homo sapiens
tgcagcaccgacctcttcgtcgagctcgctgaccacctactggaccggctgcccggcccgcgggtgcccaccagcccgactgccatccgcaccctgatccaatgtttgggcagcgtcggccg

SEQ ID NO: 458666 - DNA, 122 bp, Homo sapiens
ccgccccgccgcgccagcagctttcaacgcgcacgaaagtttggggcccgccccctcgggcggtgccgtccccgctgcactcccaccgcgtcccggcccctgccccaggccggagggcagag

SEQ ID NO: 458667 - DNA, 122 bp, Homo sapiens
tattgcagacaccatccctgaggacttccaagagtttcaaacccagaatttcgaccgcttcgataattaaaccaaggaagcaatctgtaactgcttttcggaacactaaaaccatatatatt

SEQ ID NO: 458668 - DNA, 122 bp, Homo sapiens
gagcaagacacttaatttcacagcgtctgagtttccgtacctataaagtggcgatgataacgatacctgccctggtttcttcacagagctgttgtgaaggtgcaattaggaaatggaatatt

SEQ ID NO: 458669 - DNA, 122 bp, Homo sapiens
aatccagttcatggcgggtcaggggccttattgttccgaagtcggtggcaaggatcctcccgggccatagtctagggggcgacggggcagggttctctagtgcaggtgtccagggtgcggtg

SEQ ID NO: 458670 - DNA, 122 bp, Homo sapiens
caggggctcgggagagcaattcggcggcccctgcagggcagctgaagccatggaagcctccgcaggtgatgacaaggaccccggggatctccgggcccaccgcccagctgcacccgccgcag

SEQ ID NO: 458671 - DNA, 122 bp, Homo sapiens
agacctgccctgcccctgcctggagattgcgccttgcagggagtgacaacgggccccagccgtcccttccttttaggaatatcaatggaggaaaccgatgtgtcaactagataaaagcagaa

SEQ ID NO: 458672 - DNA, 122 bp, Homo sapiens
ctcccatctggagagaggcaaggagacctaggcccaaaagagagagagtggagagagaggcgcataggcctggcccatcctcagagcagagtgggcccagctgggccaggcaggagcaggcc

SEQ ID NO: 458673 - DNA, 122 bp, Homo sapiens
tctaaaaccacagaactatgcacacacaaacacagacacgcgtgctcgcacacacagagtcgggatcaaagaatcttatctgatacatagttgggggagcacgggaaaaagctggcaagaga

SEQ ID NO: 458674 - DNA, 122 bp, Homo sapiens
ggccagacctccccgcggattgacacatcaataccgccaaagaaaatggcctggaggaagcggcaaaagttggggaggggataaaatggggcagctcaaagaacccccaaatccccagagat

SEQ ID NO: 458675 - DNA, 122 bp, Homo sapiens
tttgctgaatggagttcgtggcgctcagggaagcagtgatatctctcactccctttgtagcgcagtcacagctgaagttagtgtgcttactatgtgccaaccaggcttctcagggcagtatc

SEQ ID NO: 458676 - DNA, 122 bp, Homo sapiens
gtattgggcaaagccaagctgtctggagccttgggaaagcccaggccctgccaaaggatgcgaagaggctgagcgtggaggggcatgggagaagaggcccatgtgggaggggagctagtccc

SEQ ID NO: 458677 - DNA, 122 bp, Homo sapiens
ccgcccgcggccccgccccgcgcacattcttctgccttgtaaggcccggccgccacgccccgcccccgcctggagtccagacccgacggccggcccagttccacgcacccagcgagcccaag

SEQ ID NO: 458678 - DNA, 122 bp, Homo sapiens
cccagcctctggatactatctttctgctgtttacctcgattagatcaaccttttaaagctcgcacatgagtgagaacatgcaatatttgtctttctgtgcctggcttatttcatttaatatc

SEQ ID NO: 458679 - DNA, 122 bp, Homo sapiens
caggcgtgagccactgcacccagcttcaaaacttctctatctcaacaaatggttccaccacgtacccagttattgaaaccagaactcatgtgttattaattcctcctactcctatgataccc

SEQ ID NO: 458680 - DNA, 122 bp, Homo sapiens
ccccgcggccagtttgcgcgtgcgtgccaagtgccgcgcggaggcccgctcactcgggcccgccccccaatcccggctgcccatggcgctactcgctccgcgtccccgcgccccgcccgcgc

SEQ ID NO: 458681 - DNA, 122 bp, Homo sapiens
agatcagcccaagggcgagcccatttgtttgtgcttctctctcagcattttccaccacagcggatgcagctcttcacgtgatcaacaacacaaaaaagaaatcactcaattcagtttaacct

SEQ ID NO: 458682 - DNA, 122 bp, Homo sapiens
cctccgtttgtgaagtctggcgggtcgcgtgtatactcagccgttctctcttcacaggcacgtggacacagtgtcacctcctcaagccaagtctaaagcacagggctgccccattgccctct

SEQ ID NO: 458683 - DNA, 122 bp, Homo sapiens
acactaacaggcggcgggtttcatgagcaatgtgaagggagatgactggactgaggttcgcgttctgagcccaggcatctacctgcacagtgaccagacttgcccaaattagaggatggaga

SEQ ID NO: 458684 - DNA, 122 bp, Homo sapiens
aagtagacagaatgatttggtaaggtgacactgcctagcctttgtcattgacaacctcaacgcagacacaatgggaacataaatggagcaatcaaggtggcaggaatgaaggctatgcacgg

SEQ ID NO: 458685 - DNA, 122 bp, Homo sapiens
gggagataccagagaccctaaactggcgtgaggcctgctcggcatgcacatggggttacgcgcatggtttctggactacatgttctgattgggtgagagaaaatctctaggccttctctgat

SEQ ID NO: 458686 - DNA, 122 bp, Homo sapiens
actgtttccataaaaacgcacataccaaggaaaattacattttcattcaattttagatgccgtacccttgtgtaagatctcactatccatggtttatatgctctgaactggattttagtaat

SEQ ID NO: 458687 - DNA, 122 bp, Homo sapiens
ggggttccccctggttcccatggaaggatgggattggcctgtttgaatcattccgtgggccggcagagaactgcagcgtgatgcttaggcataaccggcactgtgcctggtctcggtgatgt

SEQ ID NO: 458688 - DNA, 122 bp, Homo sapiens
aggatagcaccagcagagagcttcccagtgcgactcccaatacagcggggagttccagcacgaggtttatagccaatagtcaggagcctgaaatcaggctgacttcaagcctgccgcgctcc

SEQ ID NO: 458689 - DNA, 122 bp, Homo sapiens
aggaggcggggaaggggcgggccccaggagcaggcgggcggggctccccgccctccagcgcgcccggaggctaccactccctgcagatgcgctggccccagcccggggctgccgctcgcctt

SEQ ID NO: 458690 - DNA, 122 bp, Homo sapiens
ctctcttagagtacctactattttggataatagttgattgtgtgcacaggtaggctcttacgggcagtgtaattgacaaatatgttgggtgcaagagacaaaaaagctagtttaagctgagc

SEQ ID NO: 458691 - DNA, 122 bp, Homo sapiens
tcccagccctggcggaaaaagagggaggggcggggaagaagacccagccccgaggcctgccgggagttgtagtttctcattttgatgaacccttccgattccacagacctttaggttcaagt

SEQ ID NO: 458692 - DNA, 122 bp, Homo sapiens
aacctgggctcagacctccagacctcacctcctccaaggccctcctgaccctccggccgccggctgtggtcagtgcccggcacttagggctcatgccagcagaggcctgcctaggagcaaga

SEQ ID NO: 458693 - DNA, 122 bp, Homo sapiens
ccaggcctgcgggttgcagccccctccctggcaatcagcacccctcctcttttcccacctcgggcctctgagaaagacgccccaggcagatgttcataggcccaggagtggttcccacagaa

SEQ ID NO: 458694 - DNA, 122 bp, Homo sapiens
gggctagctgccgaggagaccacgctgctgcatgggccacgtgagctcaggctgtgggagcggatggagctgctacagtcagcgcttggggctggcctcagcttgtagacccgagccctgca

SEQ ID NO: 458695 - DNA, 122 bp, Homo sapiens
cccccggctgcctgactgcagggctcatggggctgcccttgttcctggccttttctctatcgctcagaccctcgcttccccgccagggcaggtttctgccacctcagtgcttttgcaggtgg

SEQ ID NO: 458696 - DNA, 122 bp, Homo sapiens
gtctaatagtaacagcaggttcagacatgcaggggaataggaaggtgccaggtccttggccgtgtctgtggatacccataacagcagaaccagtttacaatactagagcaacagaatgcagc

SEQ ID NO: 458697 - DNA, 122 bp, Homo sapiens
ttccagtcctggtaacatctaatatcccctcagctgtccattattgacggcttcttaaggcggacctcttcacacacacaaaacaactatgggttctattgcaaccaccagtgtagttaatt

SEQ ID NO: 458698 - DNA, 122 bp, Homo sapiens
cgggacgggggggaggttgcggtgcccctcagggctacctctcaagagtgctatcatttccgcaggccagatcagaaaagggagctcaggtaccttccagagagtgagacccagcgcccttg

SEQ ID NO: 458699 - DNA, 122 bp, Homo sapiens
cgcctggctaattcttttgtattttcagtagagatggggtttcacccatcaggctggtctcgaacttttgacgacctcagatgatccactcacgtcagcctcccaaagtgctgggattatag

SEQ ID NO: 458700 - DNA, 122 bp, Homo sapiens
gccaagggcaacccggatcccggatctgggtagacaacagtgggactagttttgggaattcgtttttttttttttgagacagagtctggctctgtcacccaagctggggtgcagtggcgcga

SEQ ID NO: 458701 - DNA, 122 bp, Homo sapiens
actcaggtgatccgcccgcctcggcctcccatttgctgggattacaggcatgagccactgcgcctggctagatgtttttttaaaggctaatttactgctgcataaaagcattagggtatagg

SEQ ID NO: 458702 - DNA, 122 bp, Homo sapiens
ggagtcagtggggcagaagggaggtgggggagggaatcaagttcacctttagacatgctacgatggaggtgcctatcaggcattcaagtgaagatgtcaaggagccacctagagattcaagt

SEQ ID NO: 458703 - DNA, 122 bp, Homo sapiens
caccctatcccagttccccacgcgcccacgtgcctttggggtggatgaaaagatctcaaacgaccagctcctcattggggtaaaggagtgaagagattatctctgatagaggtcaaactcca

SEQ ID NO: 458704 - DNA, 122 bp, Homo sapiens
ccccacgagtcaggtggcggaggtcaggtgacagcggacccgcctctcccaaagtctagccgggcaggggaacgcggtgcattcctgaccggcacctggcgaggctcatgcgtcccgtgagg

SEQ ID NO: 458705 - DNA, 122 bp, Homo sapiens
tgctgcagccgctccactttctccacataggcctgcttcttgcgcagctcctcttcggctcgagctgcccggccctgcgcattgcccagagcctgctccagcagctcggcacgccgccgctg

SEQ ID NO: 458706 - DNA, 122 bp, Homo sapiens
tggcagaggtcacctgagccaggtatcagatgtgggcggggccgggtaggctggatgccgcgcttcggaggccccagtggctgccaggcagctttggtcagcctcctggtttgaatctgagg

SEQ ID NO: 458707 - DNA, 122 bp, Homo sapiens
atcctggattctcctttgaaagtctcccaatcctagtctccagttagctactccgggtcacgagccttagctcaactgtatgcttgactccatcccccatcaacaccttcacctaattaatc

SEQ ID NO: 458708 - DNA, 122 bp, Homo sapiens
cagtgtatgtttatatagtagtcaagtctctttttgataagaattgcactttttctttttcggtcaaaggacgtcaatctgttgaacaagatgataacttgaccaattctgcattgcaacta

SEQ ID NO: 458709 - DNA, 122 bp, Homo sapiens
atgatgagcttggggaggggggcagcagtatgccttgtagtggtaccagtgatctacagtcgcattgtgaatgaatccatacttgtgtgggctgctttgtaaatacatctaccagttatatt

SEQ ID NO: 458710 - DNA, 122 bp, Homo sapiens
ggagagttgatgagaaagtcttcaacatcttaggtggggtatgtttcgtatgtttcccttcgtactgcttaatgctgacaagaagatggtaggagccaactccaaattcttatttcagaaag

SEQ ID NO: 458711 - DNA, 122 bp, Homo sapiens
cgggggcgttggggtaaggtgctgaggcctgggattccgtgcagtgcttatcctgggtcccgccgcaccggaacaggacgatggctgagccacatcccactctgtgtgtggtagaggagaga

SEQ ID NO: 458712 - DNA, 122 bp, Homo sapiens
tcgcctggtctcccagtacccagaccctggcgtggcttcgccatctacctcgagagactccgcccccgcccccgccccgaccagaggttgtcaggcccctagtcccaagaccctagcgagac

SEQ ID NO: 458713 - DNA, 122 bp, Homo sapiens
ttcaatctgaagttcattcacattctccttgcaaagaatggcggatgcagtgagagttgccgtaaaagcgatgaaaaagtcatcggcaatccttaccacatccgtacatcggcagctcggag

SEQ ID NO: 458714 - DNA, 122 bp, Homo sapiens
ggaaagccccctggctggacttccgcggcctaggagtggggctgtgttggcggctgggggcgtctgtcacctgggtcctgaatcagggatctaagcgatgtggactcaggccgctggaatgc

SEQ ID NO: 458715 - DNA, 122 bp, Homo sapiens
gaatacagtatcagaagaggcagggctcgtcctaactttaaatttttcagtgtgagcatacgaggctgatgactgccctgtgctggccaaaagatttttattttaaatgaatagtgagtcag

SEQ ID NO: 458716 - DNA, 122 bp, Homo sapiens
cggtgtgtgcggtgaggggtctgcaccaaaaatgctccatcaatgagggagagtcctccccgggaggggcttccgtgcctcccattctgggcacttcgagattttcagcaggaagtgctgtc

SEQ ID NO: 458717 - DNA, 122 bp, Homo sapiens
aaaggctgttgtgggcacccggggagaggggcacaagtgtgaattgggtggtgccagggtcgacatggcaaagacaggagatttgcccaaggtcccactgtgatcagaagtgaagccagaac

SEQ ID NO: 458718 - DNA, 122 bp, Homo sapiens
ccgctttcagtgtatggttttccctgccaaacggttctgcttggtgccatccatggagggcgtgcgctgggccttttcctgcggcacttggctgccgagccgagccgaatggctgctggcag

SEQ ID NO: 458719 - DNA, 122 bp, Homo sapiens
ggtggcacagggacttggggcggggtctggtgggcggggcatgaagtctggccccgcccccgcctccgaggccaaagggcgccctgggcggggatcggagcaggggcggggtctttccaggg

SEQ ID NO: 458720 - DNA, 122 bp, Homo sapiens
ggcctctagtgcgcatgcgcgccgtgcggccttggccaagcgtgatagtcactgcgcctgcgtcaggttttccagcctgaagaaattgatgatgcagacctgtttgcttgtcttcctaagga

SEQ ID NO: 458721 - DNA, 122 bp, Homo sapiens
aggaggcccgtattcagccacgcctatacaccgccaaatcgctaggaagccacgtattcacgaagccacgcagtgacgtcgccacgcacgtacgcacgcacttgccacaaggagacgctgtt

SEQ ID NO: 458722 - DNA, 122 bp, Homo sapiens
gaaagaggggaggagccgcccggctttgcaggtgtgtgcttggggaacgatgccctgagccgcctctgcaagataaccaaggggtttggggtactctcgtacagctcccagggtttcaaacg

SEQ ID NO: 458723 - DNA, 122 bp, Homo sapiens
acccctgaaggagacaaagaaaatggtcatccaggaacgaggagggcctggagtatatgacgttgaggaggtcaaaggagtaaggtttcaaagtaagaggaattggcaatatcagatatatt

SEQ ID NO: 458724 - DNA, 122 bp, Homo sapiens
tggttggcagcactgtgtaattaaataggcttttgtggattggcctggggacttagccgccgtatataaatgttattcgagtgactgtacagcattgtttccatgcagaaaagccctcggaa

SEQ ID NO: 458725 - DNA, 122 bp, Homo sapiens
tttaactcaagacaccagcggtcttgctctagaaagaaaaaaaacactgcaatgggcaggcgagaggcttatgtttacgtgctggatttgaaggagctcacccattttcttgaggctgtcgc

SEQ ID NO: 458726 - DNA, 122 bp, Homo sapiens
acaatcaggccccgctgttggcccctttccctcacctcctccccagcctccccaggcccacgcccacctgcttcagcttgtcctcaatctcccgccgtcgagcggatgcctcctgtggggga

SEQ ID NO: 458727 - DNA, 122 bp, Homo sapiens
gggatgaaaatcctcccaggaacccgattattaatgggttgagggaagtggcaggtgcagcggttgcgcaaagacaatgatgcttagtagccaggacttcatggccacaaaatttgtgtgta

SEQ ID NO: 458728 - DNA, 122 bp, Homo sapiens
aaagaatgggaaggggcatggaaacgggtcttgaaacagttaaaaagagaagataatcaccgtcagcgtcgaaatggagccagatctcgaaaaactgtgaggctgtgatgagggatgactgc

SEQ ID NO: 458729 - DNA, 122 bp, Homo sapiens
cgccactgtcactagttgactcatcagccctgcccgacgctaagaagatgccctggcaaccgccgcgcccctcacccgctcctttctgacgctgtggtggttttcgttcgcagcccagaaca

SEQ ID NO: 458730 - DNA, 122 bp, Homo sapiens
cactttggcgtttagggtatgtccataaagtgagctgtgtttccaaccttcattcacgcccgcatcactcgattcccacaacactcatcacccacaagtgcagctttcaatcggagctgaac

SEQ ID NO: 458731 - DNA, 122 bp, Homo sapiens
tggcccggcagccgcggcgactgtgtttgcacccggcggaccatgccaggactacggacccggacaggactgatggcctcagagaggcaagtattcaaggggcacttcacaaacagcttcct

SEQ ID NO: 458732 - DNA, 122 bp, Homo sapiens
ccctgccccctgccaggcgggcaaccgagcagcatggactcggcaccagcagctggggttcgggagccatgatggcatgctgggtgactgaggacaccccgggccctggtggcacctgggag

SEQ ID NO: 458733 - DNA, 122 bp, Homo sapiens
gagcaccggcctggctctgctcctctccccactggcggcttcaatcagtgtcgcggtggtcgcgcatcgcctttatataggcatgggtcagagtgggtggggcttcttcttgattacgttgg

SEQ ID NO: 458734 - DNA, 122 bp, Homo sapiens
ttctctgagcacaaagttttaggctgtacacagccagccttgggaatctcgttgagcgttcggcgtggatccacggggccaggccaccctgcgggagcgccacacgcatccacttcggattc

SEQ ID NO: 458735 - DNA, 122 bp, Homo sapiens
aaatctgtactaaataaatacaagcagctccagcttattggggctgcgttctctcttcggcgtctctaaggccgagcagtttcctagctgcgctcacgcaaaatacctgtgtctgcgtactt

SEQ ID NO: 458736 - DNA, 122 bp, Homo sapiens
actaggtgggtaagtttgcttttgaaaaacatacaacttctgtattttccagtccctccccgccccgcagtgtcgagtcgaatacattttcagatctttttccccaaccggatcttttttct

SEQ ID NO: 458737 - DNA, 122 bp, Homo sapiens
tcatcgggaacgttgtgcttgtggctgatctgactgtagctgtagtagaccttctgctcccggcctgtcatgtctatgaccttggaaaacatagagggatgaaggttaacaccgctgcagcc

SEQ ID NO: 458738 - DNA, 122 bp, Homo sapiens
gacccctgtcctggctctgactggggttgagttcgccagttttgacttatgtgtagagtccggcagcatcattttttggcatttaactcgtcacatctatttcacctaacctctttcttctt

SEQ ID NO: 458739 - DNA, 122 bp, Homo sapiens
ccccatcctactcaggcctccacaactcacttgttggcaactatttcctgagcacatcctcgaagctgggccctcagatgcagtggcacggagcctgagagactgcgctgaccgggtctgag

SEQ ID NO: 458740 - DNA, 122 bp, Homo sapiens
cagcatctccctaagtcccagcctttaagtcctcctgttgcagttcgtcgcctgcagcttcgagaggagttggatcgatcttcttgtggaaacgtcctcttcaatggttacctgccgccacc

SEQ ID NO: 458741 - DNA, 122 bp, Homo sapiens
taagcactgcataggcgcttgttcactagttgcgttccaaggtttaaatggcacaggtcccgctcagggcagcaaagtggggattaccacccatgattccagctttccttctcacacatggg

SEQ ID NO: 458742 - DNA, 122 bp, Homo sapiens
gtgtcccacctccccaacccgaggccccgcccccatggccccgcctcagatgacgcgacacgccaagtgcgtggggattcccgcggccctggccactacccggcctgccccgcggcaagatg

SEQ ID NO: 458743 - DNA, 122 bp, Homo sapiens
ggcggaggcgccgcggcggctgttattgttcggctgggctcggtcgggcgctgtctccctcggctctgcgggtgtcagttcgtccggcttcctcacagcccctcactcccggcggctgacag

SEQ ID NO: 458744 - DNA, 122 bp, Homo sapiens
ggtcaggaaacagacacccacaagagcgtccacgacccgtatgggaagatgtctgaaccccgagacggcgtgttctgtgctggagaacaacttccagggctttatccaggtgttctaaagcc

SEQ ID NO: 458745 - DNA, 122 bp, Homo sapiens
cttggggaagtgatatcaatgtagccataggttaaggttattcagctgtgcctgagcacgcgcgtacacacatcttagtaatattcgtctttgtattgtaaagatctccaagactggaaagc

SEQ ID NO: 458746 - DNA, 122 bp, Homo sapiens
gtggagcgttccagtccccaaatgctgggaaacaaaggctgctgctccgtgcccagggctcgcgccgccatccgtatcctcgcccagagcgctggggatgggtcttcagggacgacgtgacc

SEQ ID NO: 458747 - DNA, 122 bp, Homo sapiens
ggtgggtgtaagagtgggtcctgagtgtcagtcctcctcatccaccatttcacctataagcgggggtcatgctagtcccatgctttgaaatgttcaagataattgcaggtagacctgcagag

SEQ ID NO: 458748 - DNA, 122 bp, Homo sapiens
agctcacggacagtgcctggatcagcagcaggagggacagcggcaccaggaggcccgcggcggacacggccaccacgatgctgcgcgggttaaggaaccgggctgcgggacccccacgcctg

SEQ ID NO: 458749 - DNA, 122 bp, Homo sapiens
caggagtgaagcttctgccaggtcagggctgtgaggacgaatcaggacagcgccagggaccggagagtgagcagccaaggctcaggacactaccggattgctccattaacagcacgcgtttt

SEQ ID NO: 458750 - DNA, 122 bp, Homo sapiens
gaggaaactgaggccaagagaggtttgtgaagttgctcaaggacacacagagacaggattcgaacctccacttgttttttttgtttgttttttgagacggagtctcgctctgtcgcccaggc

SEQ ID NO: 458751 - DNA, 122 bp, Homo sapiens
gcctgcgtcttgacccccaccgaaggccaagtagagaaccctcaccagggtcctgggacccgtccacccctacacctagctagcccggagcctctcagctccgcgtccccacatcctccgga

SEQ ID NO: 458752 - DNA, 122 bp, Homo sapiens
ggagtggggctgcttggaattcgatggaacagctccagaatggctgggtcagacattcctcgatcatggagtcttagcctctctgagtgccagccctggaaggaaagcccatcatttcctag

SEQ ID NO: 458753 - DNA, 122 bp, Homo sapiens
cacacagtgaggaagcagggaagctgggattggatgccaagtccttgggcttagctgagccgtatgctctctgagacattcttggtccctgtcctttagggagagatgacttcataagcagc

SEQ ID NO: 458754 - DNA, 122 bp, Homo sapiens
aaaagttgggtccctagagtgaagaccgagttctttctgtccgtctacactgagcgtactcggggaatgagttagagccagtctcttcctcccctccccccttctcatccctcactgttgcc

SEQ ID NO: 458755 - DNA, 122 bp, Homo sapiens
tgactcggctggcgggcacggtcacctgggtgaggggcagcggaaggggcggcggagcaccgatctcatggatgggctccgaggggcttgcgggaggggggcgccagtgttcggggccgttt

SEQ ID NO: 458756 - DNA, 122 bp, Homo sapiens
cagtggccaccacagtgtcagtttctgctgtttgcctttcttctgttggtcagcacactccgtccctcaaagctgcgcagagaaaatgcagcgatcacagggcccagggctgcatttcggaa

SEQ ID NO: 458757 - DNA, 122 bp, Homo sapiens
gattcccgattcagaggcaggtggcaaatgcttttcccacagtgagggaagggctgtcaccgcgatggtgctctcagggaaccaaggttcacacattcagggaattcggggcactgagtcag

SEQ ID NO: 458758 - DNA, 122 bp, Homo sapiens
gcgggccggcgcagccatggtgaagattagcttccagcccgccgtggctggcatcaagggcgacaaggctgacaaggcgtcggcgtcggcccctgcgccggcctcggccaccgagatcctgc

SEQ ID NO: 458759 - DNA, 122 bp, Homo sapiens
cttgagaagtgaatctgtttgcaaaagctttagcacaaggagagcgatctgcctgaattgcggtagagagtgttgtttgcgcatttgtaaaacgaggcgaatgacccagctgttggccgtag

SEQ ID NO: 458760 - DNA, 122 bp, Homo sapiens
atggccctgaaggctgggctcatcctccgggcgcagatggcggggagatgggggaggcagcggagtccagcggccagtacgtcttctgtctgttgtttgtccgtgtgtccctctcgtcttgg

SEQ ID NO: 458761 - DNA, 122 bp, Homo sapiens
ggctttctttcagagagctaggcgaggctgggctggtgtgctgcaacacccacagatgctcggcgcctttagctggtctaggagccccacccagtgcttggggagggacagatgctgcttgg

SEQ ID NO: 458762 - DNA, 122 bp, Homo sapiens
cttccacaagagccactaggataaccccactgaagcgcttatggagtaaagtgatgtaagcgaccagcaagcagtccactgctcctatagattgggtcctcccttccttctttccttccttc

SEQ ID NO: 458763 - DNA, 122 bp, Homo sapiens
tgccgagcctgtacccgaggagagggagatgggacggccgcccagtgcggcccccacccgcgttctctgggagcagggtgcccgcatcggctccctgctcaagcttggagaggtcggggtac

SEQ ID NO: 458764 - DNA, 122 bp, Homo sapiens
acctcctgcagccccggagactcctgagcgcggggcgagggtggggtgggcaaggtccagcgagagaatgggaggagaggggaggggagcggtcgcagccctaccccttcccgcacgccccc

SEQ ID NO: 458765 - DNA, 122 bp, Homo sapiens
gttaatctttgttctgtggagcctcctctcaatctcctgtcaaaggatctgagcctgttacggattttccaactgaagaagagagtctttgatgcctagagactgagagctcacctactccc

SEQ ID NO: 458766 - DNA, 122 bp, Homo sapiens
tacaaatatctgtaggctctcctgtgtaacctccttctcttcctagccagggccattcaccggtaggctctcaggcgccacttctagagcatcctctgatgttggtcctgaactgggagagt

SEQ ID NO: 458767 - DNA, 122 bp, Homo sapiens
ccctagagactcaccgtgtacactgagatagagctcagggtcgaggtccggccggggcggcggttcccccggtccctggcgcaacagcagtgcaccgggtctcttggccaggccctttccgc

SEQ ID NO: 458768 - DNA, 122 bp, Homo sapiens
ttaatccattccacacaaaataagtatcattagtgcttctgaaagagctgcactataattcggtggcaactgagcattaattttaggtcgtgtgggaaatatattcttattcaccagtctaa

SEQ ID NO: 458769 - DNA, 122 bp, Homo sapiens
catcagccccttccgggccggcgggtgcctcactagcgacagtccgcaggaccgcgtcgccgagcgccctaggttccgcctcctggcagtcttgccgccaattccccagttgagcgaggctg

SEQ ID NO: 458770 - DNA, 122 bp, Homo sapiens
atatatctaaatttgagttctacaaattaaataatgaggcaacaataaggtttccaaagacgctttcaaaaggagaactaagaaaagactataattatttaaattaatttccatttattttt

SEQ ID NO: 458771 - DNA, 122 bp, Homo sapiens
gtgcagagaatggacagcagagggagcccttgatgagttttgaccatcaaggtaagaagacggagggagtgacattttccctggtgctctcagaccatgagcttatttctccccactctatc

SEQ ID NO: 458772 - DNA, 122 bp, Homo sapiens
gggaggctgtgaaaatccaggagacaacatcaaagcgttgttttccaacacactggcctgcgcgccctacgctttatgcagatgagggatggcgcaagcacaggcctgcgcgcagggcttta

SEQ ID NO: 458773 - DNA, 122 bp, Homo sapiens
gcaatgggcattgtctgtgcacaatgttcctttattctgctgctgtccataataagggctcgtccacctcccttcctcttctgcccattgagcagtcaaagaactgaaagtccttataagcc

SEQ ID NO: 458774 - DNA, 122 bp, Homo sapiens
cgcggcgcccctcttccgagctcctggacccagggctgggtcaagttgagtagggtaaggcggcaccgggaggctcggggggtcgcgtggcggtgggattgggacaccagcacgaggaggac

SEQ ID NO: 458775 - DNA, 122 bp, Homo sapiens
ctctgcccctccccatgtcctgctgttgttgatttactcagactacagggttagaggcgtcgccgttccccaggagttggggaagatgtgtagatcacgtggggtctctgcctctgggaagg

SEQ ID NO: 458776 - DNA, 122 bp, Homo sapiens
aaattagcgttaaagtgatgaaagtaaagtgcaaataaaagactttaagaattaagtagtcgactccatgtgttaggaaggaattatttggttaaaataaatcaaatacaaaattcaagtgc

SEQ ID NO: 458777 - DNA, 122 bp, Homo sapiens
cgtggcctggcctcattcccgctcacctccagccttggccgcctctcgcgggctcttccccgccccgaacctcccacctgcgggcccactggcacccgcggcgctcagaggctctaggtggc

SEQ ID NO: 458778 - DNA, 122 bp, Homo sapiens
gttttcccttctccctttttcttttcttttctttttttttttttttttgagatggagtctcgcactgttgcaggggctggtgtgcagtggcacagtctcggctcactgcaacctccgcctct

SEQ ID NO: 458779 - DNA, 122 bp, Homo sapiens
tttaggcttaatttgctcatctataaaacaaatagaacaactctcagcctttttctgagacgctgaatattcccgtaggtgttaatgcagcttgtgctgcattgcggtgtgaaaagtaatct

SEQ ID NO: 458780 - DNA, 122 bp, Homo sapiens
ttatttctagggaaatggcaggaatgcctctccaggtgggagggcatgacatttctgccacgcgccacctcagcccctccttacctcccccacaaaggagtattttaatagaaggttaatgg

SEQ ID NO: 458781 - DNA, 122 bp, Homo sapiens
caaagctacacttgtccagcatcagagaatccatactggagaaaggccttatgaatgcagcgaatgtggaaaaaccttcagtcgaaaagacaaccttactcagcacaagagaatccacactg

SEQ ID NO: 458782 - DNA, 122 bp, Homo sapiens
ggcaatgcgtgtggctgcaggaggcggggggcgagtgcagggagcccccgaggtgcagctcgaccagcctcctcctgaccgtgcttcccaccgggggcaggaggcgcgtggacacaggaagg

SEQ ID NO: 458783 - DNA, 122 bp, Homo sapiens
acccacaaagaaaccttacttctgcggaaacacatttcgcactcgggaaacagcaggggccggtaaatcgacagcctcctacagaggacggaaataccgacaacgccaaggaccgccaagga

SEQ ID NO: 458784 - DNA, 122 bp, Homo sapiens
aagccagggcggcagaggcagcggcctgatgccttgtcgcagcccgggccctctgttccccggaaatcacagtcacaggctagggccaagaaaaatgacagtcagagacaggggtcagggag

SEQ ID NO: 458785 - DNA, 122 bp, Homo sapiens
ttagatggtgagtgagggtctgccttccccagcaccagccacctagtcaggcttgtggctcgtctaacaaactggagcctgagattctgagaaaacgaaaccaaacagttgtactccggggt

SEQ ID NO: 458786 - DNA, 122 bp, Homo sapiens
aaatactttgaggaatgggaacatctcttcactgtgtttttggatcagccttctctcaaccgccaagaaatgcatgatttccctgccaactctaggaagtagtgctgcatgattgaatcatt

SEQ ID NO: 458787 - DNA, 122 bp, Homo sapiens
cgcacttaatttctcatttggaccaaaacaaactcctccaaactgctactgactgctaaccgcgagaggggagacgcgcaatatgtatttagttgggaacacacagccacacacatacatag

SEQ ID NO: 458788 - DNA, 122 bp, Homo sapiens
ggtaaaaaaaatacgtttattgaatcaacatttatgatgttcccaccatgtaaagcactgcgctacaagctggggatgccaaaggtgaataagatatcttctgacagaagctcaaggtctat

SEQ ID NO: 458789 - DNA, 122 bp, Homo sapiens
ctcaggcaatccgcccgcctcggcctcccaaactgctgggattacaggcatgagccaccacgcccggccgctcacatgttcagtttaactggggaaagtcaaactgctctccaaagtggttg

SEQ ID NO: 458790 - DNA, 122 bp, Homo sapiens
actccccgcccggctgctcgccccacggccagtccctccctccccggcgacgcaccccgccgagccagctcacaggaagcgccaggagccggagacctggctcgcctttccgggcgctgcgt

SEQ ID NO: 458791 - DNA, 122 bp, Homo sapiens
tcagggacacgcgctctcggccacagcaactggctccaagttccctccctcactctccggcgaagcctgcctgagccctcccactcggtgcagaccgaaccatcgcggccgccgccagccgg

SEQ ID NO: 458792 - DNA, 122 bp, Homo sapiens
ccagtaaaaccaggataagccctaaaataattaagaagccatcgcatgcacacacgtgaacgtttgacttcagctaaaatgctttcaagtgtactattttatctttacacaaggttataata

SEQ ID NO: 458793 - DNA, 122 bp, Homo sapiens
gtttgtgtgtgagttttgaactgagtcacctacggctgcgtctctataacagggaaacctcgagcaaacctgtgcctttaagactcagttgctatccaaacagaagtaaacagagtggacca

SEQ ID NO: 458794 - DNA, 122 bp, Homo sapiens
gccaacatggcgaaaccccatctctactaaaaatacaaaaattagctgggcgtggtggcacgcaccagctattcataaggctgaggcagagaatccaggagaatcacttgaaaccaggaggt

SEQ ID NO: 458795 - DNA, 122 bp, Homo sapiens
tattatcacttgttgatctgatgatctgactcctccacaagaatgtaaacttcctaaactcggggtcttgtttttttttatttaacactgtgttaccagcagactgccaggtatacacagta

SEQ ID NO: 458796 - DNA, 122 bp, Homo sapiens
actgaagggaagcggaaggcgcagaaacgcggacgaagaggaagcgggcgcttgttaaaccgtgcgatgcacaatgcgggaaagtccaaccagctccgtgtttcaaagctggatgcccagat

SEQ ID NO: 458797 - DNA, 122 bp, Homo sapiens
gccactgagcttgctttcactgtgctttgtggtctctgtctcccctactgtgacttgagccgcccctataaaagtcatcttcaccactttgaaaagtgctgccggcctgggcaaacataagc

SEQ ID NO: 458798 - DNA, 122 bp, Homo sapiens
tgtccatcccctcttgccctctgcccctcctccctcgtgctccattggataatctatcctcgctctaccaaactaccagcagtcagtaggaggggtcggtgagcccatacttaaccctgctc

SEQ ID NO: 458799 - DNA, 122 bp, Homo sapiens
aaagtctccagcgcagcgctaggaggcgctactccggcgcggggcggggctcctggccgccgttgccagggaaaccgtctgggcgtccctagtatctgagccctcgcgcctgggccactcag

SEQ ID NO: 458800 - DNA, 122 bp, Homo sapiens
cgcgctggaggcggcggccaagactcccgccgccgccgccgccaacagggcgagggctgccggcaactctcccgccgggcccccgcacccccagaagccgaggtccgagcagccgccgctgc

SEQ ID NO: 458801 - DNA, 122 bp, Homo sapiens
gctgtacagggcagcccctgtggacaggcacagtggtcagcccctgcctgggatggcccacggggcggtagacaccaccgggaaaggcggctgggccggcaggggcccacgaagcaccgtgt

SEQ ID NO: 458802 - DNA, 122 bp, Homo sapiens
ccataggttcacttgttgcgcagccgctcttccacccgacgcgagggacgcctcagactgcgcaggcgcaagtattaactacttcacgatttgcgtgaacttttttgtcttctggctgcgga

SEQ ID NO: 458803 - DNA, 122 bp, Homo sapiens
tggactgcgtctccagccacggcagcagctggtggatggggtgatgccttggatatttatcgtgtgtttcttgcctggcctgcccttggacagtgcgcctcaggaatgttagaatgtgttcc

SEQ ID NO: 458804 - DNA, 122 bp, Homo sapiens
ccagccgaggcctgggcttctgcctgcaggtgtctgcggcgaggcccctagggtacagcccgatttggccccatggtgggtttcggggccaaccggcgggctggccgcctgccctctctcgt

SEQ ID NO: 458805 - DNA, 122 bp, Homo sapiens
cgcaggcaccgacactgccctggacactgtgagggggtgctccgtggggggatggatgaccggcagggcggactggagggcgggacggggagggctcggtccccccgcgggtgtagccaaca

SEQ ID NO: 458806 - DNA, 122 bp, Homo sapiens
ccaaaggatcccagagctcgcgggacgccccttaatccagagccaaaggatcctagagcccgcgggacgccccttaatcccgcgccaggcaccccgcggctctgcaaagatcctttgcttct

SEQ ID NO: 458807 - DNA, 122 bp, Homo sapiens
actaccagtatggagttcataggacaatgtggtacacctggtattacagcctttgcctttcgagactatccactggattaatgggttattttcagtgggcagggttgcacagtgtaatccta

SEQ ID NO: 458808 - DNA, 122 bp, Homo sapiens
ttccttgttcccgccacctcctggtccctggcccaacatgatactgaccaaagctcagtacgacgagatagcccagtgcctagtgtctgtgccgcctaccaggcagagcctgaggaagctga

SEQ ID NO: 458809 - DNA, 122 bp, Homo sapiens
cagggagttacacagtgagcctcaacaaaggtctcagagcagctgggcactagcgagggccgccaattctttcttacaacttgaaggtaataacagaggagaggtgatggttactgagcatt

SEQ ID NO: 458810 - DNA, 122 bp, Homo sapiens
ccttctgtggtctgctgggcaaggacagcctgggtcacagccgccccattctatttctaccgagtttcaaaccagccacgaacactctgtttcctctgcctttaaaaacagctgtaacatcc

SEQ ID NO: 458811 - DNA, 122 bp, Homo sapiens
caccaggcattcacaggtgaggaagcccctcccacagcggccggagtttcggactcggagcgcgagaaacgtcgggatagcgcctgcctcgcagagcttccgcttccggcccttcaggctct

SEQ ID NO: 458812 - DNA, 122 bp, Homo sapiens
agtggctttaaaggttatgaaatgaaactggaaataagacctcaaggtctctggatgaaacggatttcttgtggctgataaagaaacccaaattatgacactaagagctcagtgtccataat

SEQ ID NO: 458813 - DNA, 122 bp, Homo sapiens
ttgctaatattctcaggttgtactaaagttgagctagcagaaaagggttaggagtaaattcggttggggaaattgttagtatttgacacaatacttcttaaaccagttgaacttgatttgtg

SEQ ID NO: 458814 - DNA, 122 bp, Homo sapiens
gggtgttcccgtgggggtctccggaaacaatggtgagcctgtgctctgctggctggggggcgtcgtccccgcagctggcgcgtccctccaggctgagcgcccagcgccccccgcggccctaa

SEQ ID NO: 458815 - DNA, 122 bp, Homo sapiens
gccgccccgcagaccgcgcgccctgcacaatgactcggggagtgaatgggggagcacgcccggccttggtcctggctgctacaagatgagaacaattagcaaacccctttccaccacctaat

SEQ ID NO: 458816 - DNA, 122 bp, Homo sapiens
cgcggggctaccggggcagtgtgtgtgcctatgttctaggtctccgtccctccagaggcccgtctgtccatctcccgggccccgcgtcgtcggtgcgtgtggccaagggcgaggcgacaagc

SEQ ID NO: 458817 - DNA, 122 bp, Homo sapiens
aggtggaggttgtagtgagccgagatcacgccactgcaccccagcctgggcaccattgagcgctgagtgaacgagactccatctgccatcccggcaccttgggaggccgaggctggcggatc

SEQ ID NO: 458818 - DNA, 122 bp, Homo sapiens
taagggggagagaaacatagtctcggagtagggtgggggataaattaaacgcaaacccagcggtgcggcaaaggccttattctgcctctgatctggggaagtttcatattctaatggagaga

SEQ ID NO: 458819 - DNA, 122 bp, Homo sapiens
gctcagcgcctttaggaacaataataacgaccacagccatagtagccaccatttattgagcgcttactctgtgccaggtgctgtgttaagcgctttgcaggcaacaaccctcggaggtaagt

SEQ ID NO: 458820 - DNA, 122 bp, Homo sapiens
taaaagggcttatgtcaagaaatttggagcagagtctgattacttgagcatgaacatacccgaccaaggtatgttctggagtcatattctagcctctgagctcattttttcatgcgagttca

SEQ ID NO: 458821 - DNA, 122 bp, Homo sapiens
agggcgggctgcgagttggagaccctgcaggcccgcgcctgcacagccctcagccccgcccgcttgtccagctgcctcgcaattggctgcaccctctgggtccgagcccccgggagggtaat

SEQ ID NO: 458822 - DNA, 122 bp, Homo sapiens
cacagacgtgcagcgagggtcttctcgtcttaggagggtggccagtgtgctcagctcttgcgaaggtcgctgatgcccagcgaaggacattcccacatgtgcacgcacgcagagtaacccgc

SEQ ID NO: 458823 - DNA, 122 bp, Homo sapiens
tcctagtgttctgtcagatttagtcccaccctcggtgacagtttcccttggctgggaagtcgtactctaggatgtgcttctttgactaggaaatgtagctcagagcttgcctgggagcccca

SEQ ID NO: 458824 - DNA, 122 bp, Homo sapiens
ggacgcggcaaacgtaaatgcaaaggacatggccggccggaagtcttctcccctgcacttcgctgcaggtcagagacttttgaattgtttattaagggttatgggtttgggtgcagggtccg

SEQ ID NO: 458825 - DNA, 122 bp, Homo sapiens
aaaagtcagctcctccacagaaaatttttattaacctaagatattccatttgagagtcatcgctctatagagcagtttttttaaatggtattgggcagataccaatatacttgaggaatagt

SEQ ID NO: 458826 - DNA, 122 bp, Homo sapiens
tacactctggcgcgctgagggcggtgagcgagggcgccaaggcacaggtggggcgggagtcgagcgcggaggctcggggggcgggacgcggggcctgggagcggccagggaccgcggcagcg

SEQ ID NO: 458827 - DNA, 122 bp, Homo sapiens
tcactaagcttttttattctattctgcaaatagaggttctatagcttcaagacagagtgtcggccctggagtcaggaagatccaggttcaaattttagctccaccttggactagttacgggg

SEQ ID NO: 458828 - DNA, 122 bp, Homo sapiens
ggaagggtgccacacgggctgccgcccgcagcagccagggtgccaggcgcccggcaatgacgtagccacccccgcttgcataggctgggtagccaccttcgaagaaggactcgggcacatag

SEQ ID NO: 458829 - DNA, 122 bp, Homo sapiens
gaggaattgtttggctttcaggtaaaaaggacttcttgcttgtgaattgaagtcactaggcgagaagtgagtaaagaacatgttcctggataggagtggtcaagcgttggtaagttagactt

SEQ ID NO: 458830 - DNA, 122 bp, Homo sapiens
ttgctacccaataaggatttctgtggaggtgagaagaatatggacacagtgttaggaaggcgataggtgagagctgtaaagagatacagcattaggacaatgcaggtatgcaaaaataaaca

SEQ ID NO: 458831 - DNA, 122 bp, Homo sapiens
caccctcctgctcctcctcatggccgctgttatcaggtgcctggagcaggcctagaccaccgactggagggccaccctgaagaccatccggaacggcgttcataagatagacacgtacctga

SEQ ID NO: 458832 - DNA, 122 bp, Homo sapiens
ttgtggtgagcagaggcagctgtgcaaacaacctgctgttccggatgtgactgtggtggccgtggggtgcagagtccagggctcatggcgttggtcatgcaaattgtggttcctgggcctta

SEQ ID NO: 458833 - DNA, 122 bp, Homo sapiens
ggcagagtctgcaaattcacattgtacatgatctgttggcccttcaaacctacaggggaacgccagaagcgcagagctattttagatggctaacaaagcagtcaactttttagaagccaagg

SEQ ID NO: 458834 - DNA, 122 bp, Homo sapiens
ggtcatttccacaaaataaatatccccccggctgataaatccccccattcttccttgatacggggtctctccggaaacacaacagcctaggtttcttcctctttcccacccaacctgctcac

SEQ ID NO: 458835 - DNA, 122 bp, Homo sapiens
gaagggggcgaatcacgaggtcaggagttccagaccagcctggccaacatagtgaaaccccgtgtctactaaagatacaaatattagccgggcgtaatggcgggcgcctgtattcccagcta

SEQ ID NO: 458836 - DNA, 122 bp, Homo sapiens
aatttgcataaaattggttattcaaaattttattgcacaaaattgatactgctgctactacgcacgcgtgcgcgcaacacatgcgcacacacgcacccactcccgagacagggtcttgctat

SEQ ID NO: 458837 - DNA, 122 bp, Homo sapiens
gaatccaactccaaactcctccgaagttaaatattgaccagaacctctttcaacaggccgcggttgccaggaaccgtggagggccaactcctcccaaccgccctggtgcaaagtcccacgcg

SEQ ID NO: 458838 - DNA, 122 bp, Homo sapiens
aaaatcttcactaatggaatgtttacttataaaattattcttaactcaaattttctttcccgcttaacatttattctacctcactcataatgcactagcagctagtgttagaatatttggtc

SEQ ID NO: 458839 - DNA, 122 bp, Homo sapiens
tgatgttggctgtgggtctgtcatagatgtctctcattattttgagttatgttacctcaacgcctagtttgttgagggtttttaacataacagaatgctgaatttggtcagaaggtttttct

SEQ ID NO: 458840 - DNA, 122 bp, Homo sapiens
ctttactccttggcagccagaaggactgactgggtccgtcttcctggggcaaggctgggccgggcgctctcgctcagaggggacgttctggaagcagcggcgaaagaggtggggtcaggagg

SEQ ID NO: 458841 - DNA, 122 bp, Homo sapiens
tatgcgtgtacctcgtggggagagccctgaaagcccatgaagcgggactccggattctggcgtttcatcgtggtagtctgtgaggtgtggttgaagactgggagcctgcctagagctgcagg

SEQ ID NO: 458842 - DNA, 122 bp, Homo sapiens
cagcccccacccccaccttcgcaggacaataggatcagggtcctaactgcaaactttaaacgtgtaaaccagaagcagttttaccgcagctgtaactgcaaatctcctcatcccgaacctag

SEQ ID NO: 458843 - DNA, 122 bp, Homo sapiens
tcctgcaagcactcactatgaggccagccgtccaggggttgaggagcagcagagcacagacgaggaaagtgcacaccagcaggatgcagacggccagcaggaagcagcgccgcaggcccaga

SEQ ID NO: 458844 - DNA, 122 bp, Homo sapiens
ttcccgacccttgtcgtgctttgtcattctccggttcaggcgggtgcattgatctgctttcgctgagggctgacgtggaagtttcagctcatttcagttcctctcagcaaattggtagtgac

SEQ ID NO: 458845 - DNA, 122 bp, Homo sapiens
ttctgggacaaacaaatgaacaacaatcttacataaagattctaagctccattagaaaatcgaaaacaaatcctgaagaaaacagaactaaattacaggataaaatctctcttcaaaattat

SEQ ID NO: 458846 - DNA, 122 bp, Homo sapiens
ccggctgtgagaccgggacctgccagtggtgccccgaccccccgaccccacaggaccctgcgcggccaaaggctgaggctgccccagccccaggctgtgctgatgcccctgaccagaacccg

SEQ ID NO: 458847 - DNA, 122 bp, Homo sapiens
aggccgcgaggtgaggccgggcctgcccgggacgcccgctccttggcctgtctgccaccgcggaccccgtgagcggttctgatgccgattccctgtgatctgcaggctggcccaagaggagg

SEQ ID NO: 458848 - DNA, 122 bp, Homo sapiens
caccggctgggggagcgtgtgcacgggtgtgcgcggtgagggtgtgtgcgcgtggcccggcgagacgagttgggagtccctgataaggatgcgtctcaggccgggcgcgggtgctccagcct

SEQ ID NO: 458849 - DNA, 122 bp, Homo sapiens
ataagccacgtctctcctcacccctagcacttaatcacaaaggcctgtagagagtcccgacgagaacttctgagcaggccccgctgtcagtccctgaggacagcatgcaagggaggttgacg

SEQ ID NO: 458850 - DNA, 122 bp, Homo sapiens
gttttcagatgggtaaatggagttgtctctttaaagtgccccggtcagttcaccacacgtcgggcagctgctgctttccaggctgccccgcgattcccaggctagaaggattgacaaggcga

SEQ ID NO: 458851 - DNA, 122 bp, Homo sapiens
accatcgccggatctactgaagacagacactgccttcaaacgttctgaggaaaaatgcttcgggctgggacttggatacccacgtccactgtcccactcaggctgaggggagcaaggccacc

SEQ ID NO: 458852 - DNA, 122 bp, Homo sapiens
ttgatggtgctttcagcagctgtctggcctggtacaggtctttacaaatgtcaccccactcgatataatcctcccatcatcctcttcctcctccttcccctcttccctcctcacctcctccc

SEQ ID NO: 458853 - DNA, 122 bp, Homo sapiens
gataacaggctgggctctctgtcagaggattggcgcgacagctccacgtgctgcagctggcgcagggccaggcccgccctgccaagcagcgggaagggaaggcctggctgcagccggagctg

SEQ ID NO: 458854 - DNA, 122 bp, Homo sapiens
gtgcggggagaaggggtagtatgcggaaacagagcgggtatgaagctggctaacgccgcgcgccccctcccaggacccgctcctgccccgcgccggccggtcctgggggcccgcttttttat

SEQ ID NO: 458855 - DNA, 122 bp, Homo sapiens
cgattcctgccaggagagcagacagctggtaccgccccacggccatccgggccaaggccccggcaacagcacccctgcctcaccagcgagcttctccatctggaccaaggtatcctcggtcg

SEQ ID NO: 458856 - DNA, 122 bp, Homo sapiens
ccgccgcaccttcggtccggccgtggtgggggctgctgaggtgatctctagctgcccgcccgcctcccccacccggggcgccgctgactcgtctccagagcgcgccccgctcccgccccggc

SEQ ID NO: 458857 - DNA, 122 bp, Homo sapiens
cgcccctgggcccgggctggaagccggaagcgagcaaagtggagccgactcgaactccaccgcggaaaagaaagcctcagaacgttcgttcgctgcgtccccagccggggccgagccctccg

SEQ ID NO: 458858 - DNA, 122 bp, Homo sapiens
tgctcttcagcctcccttcaggaacgcccctgtcgcaggaagagcggcgagggaaggccccgttgcattagctaggcctggctgccttttgaagtcagcctttaaagtttgttggacagcag

SEQ ID NO: 458859 - DNA, 122 bp, Homo sapiens
aggtgtggtcagggacatttcccctggccgggagcccatggagcactgtcctcagagatgcgcaggttaggctcactgtctaggccaggcccaccttagtcactgtggactggcaatggaag

SEQ ID NO: 458860 - DNA, 122 bp, Homo sapiens
gccgtgcagtgatgctgtcagcgcatccttcacccgtgctgtccacctctcaaattaagacgcaggtaaaaggagaagcagacgcagctccccacaatcccatctcacagctagggggctcc

SEQ ID NO: 458861 - DNA, 122 bp, Homo sapiens
tatgtgtacattttgtcccaatttagaatgtaaggcccttatgtgaaaggtaccatatctcgttttccctttgtagtcttaaatgtttaaaacaagagaaaagaaaggatatttattaaata

SEQ ID NO: 458862 - DNA, 122 bp, Homo sapiens
gcagagggtgctgagtgcccaccagcttccgcacctgcatagcgatgttgctgagctcgtcgctcagcaggcagcgaaggctcatgaaggacgtggggtaccccacgatcttctccgcctct

SEQ ID NO: 458863 - DNA, 122 bp, Homo sapiens
aggaaggcacctgaggcttccagggtgggggctgtttgccaggtacgtgggggtggggcacgcttcccagtgttctgcgtctgtcctcacaatggccctcaaggtcaggcagcactgaccgc

SEQ ID NO: 458864 - DNA, 122 bp, Homo sapiens
ctagggactgcctccagcaggtgcagccccaggtgcccaattgccagatctttaacctcgcgctctcccagccttcaaagttctccaacccgcgcctgccagccccagcgcgccctcttgtc

SEQ ID NO: 458865 - DNA, 122 bp, Homo sapiens
ctctgcagactgccccgcggcctcggccaccggcaggggaaccgagaccagcaccccgcacgtcagccgggctcgcggcacgcccgccgctgatcactctgcatgtttcttcgtgtggtggt

SEQ ID NO: 458866 - DNA, 122 bp, Homo sapiens
tctctacgccccagtccctggcttagagctggggagcctgcactcttcccaagactggctcggcggacagccacaaagcgcagctggacgccgaccccggggaggctggaggtacccctgac

SEQ ID NO: 458867 - DNA, 122 bp, Homo sapiens
tagaagacgaaggtcaagtgatttgaagaatactgctattccagtcgcgtatctgggcagcggggctaactgctacccttccctcacccgctggcgccgcaccctcgagtggccctggcctg

SEQ ID NO: 458868 - DNA, 122 bp, Homo sapiens
ccagcaaggtaggtgatgcggtcgcgaggaagtgcgcggagctaccgcgggaaggacggacgcggctgcctgcgccaggggagggggctgcggggggcggggagggggctgcggggggcggg

SEQ ID NO: 458869 - DNA, 122 bp, Homo sapiens
taataggaaatttggattttattttgagtgtgctgaagagccattggatggttttgagcacgagacatctgatttatgtttttaaggatcaccctgttgttggagaatggactgttttatgg

SEQ ID NO: 458870 - DNA, 122 bp, Homo sapiens
accttttatgaaagtatagaccaagaaagaatgaggtaattaaaaggcgaaagaggaattcgatatgatgggacctaggcaaggtcagagatctagtgtggcagctgtttggaggaggaggt

SEQ ID NO: 458871 - DNA, 122 bp, Homo sapiens
cgcctgtaatcccagcactttgggaggctgaggcgggcggatcagttgaggtcaggagttcgagacaagcctggctaacacagtaaaaccccgtctgtactgaaaatacaaaaaattagccg

SEQ ID NO: 458872 - DNA, 122 bp, Homo sapiens
cctcttccctggagtggattggcctcttctccacttccctcattttcgcctgggagccaacgagtttccatagtgtggaatggagctaggatttcccaggcctgggacgcagtccagaaatc

SEQ ID NO: 458873 - DNA, 122 bp, Homo sapiens
cccaggctgggtgcgtagcgcgatcatggctcactgcagcctcggactcccgggctcaagcgatcctcctgcttggaggatcagattttttatccttgcagaagtgataatatggcttcttc

SEQ ID NO: 458874 - DNA, 122 bp, Homo sapiens
acggcggaaaatcaccccttagcagaggaggttctagggcaccttagaggtgatttcattcgagctttcttggagaccttaggaaagccagcggcgggactgcgggacctacgcgctcggcg

SEQ ID NO: 458875 - DNA, 122 bp, Homo sapiens
tgacacataatcaaactcctggccctcagaatggcaccttcccagagtagggttggcaaccgtgtagatgcttgaagaggcctagtggatggtttaccattctgcctcagtgaaggttggct

SEQ ID NO: 458876 - DNA, 122 bp, Homo sapiens
actaattagctccacaactgggttctgcaatttcctgggccacatcgctgagacagattccgcatgttctgcaccagcagtcatttccccttcatggagcccacatagtcacttaaaagtaa

SEQ ID NO: 458877 - DNA, 122 bp, Homo sapiens
ctgcggccccggaggattcggaggggcggtggcagccacgcgggcgcacggcagaaggcacggccgccctgcctcctccgggggcaaactgagggacggcggcagcggacgcaggcccgagt

SEQ ID NO: 458878 - DNA, 122 bp, Homo sapiens
cgtagaaggctgcagttggagacgggacaactaggttctgggaagccatggcagaaatcacgcagactctgattcccgccgagaaccagcctaaagaaccactcatggcaagacgggggccc

SEQ ID NO: 458879 - DNA, 122 bp, Homo sapiens
gcgcgcgggcgcgggagggtcgaaggggaccttggaatccccctgttcgggccaagggggcgggggcggctcggggccgggcggggctggtgcctccccctcccgctcagcgcccagagtcc

SEQ ID NO: 458880 - DNA, 122 bp, Homo sapiens
agcccctctctaagtggaatttctaaaagccgttgaaaataagttactctttttgcttaacgttcttcatgatttaacttaaaacactgatacttctttagtggctttgactaagattttac

SEQ ID NO: 458881 - DNA, 122 bp, Homo sapiens
tggattgaaaagaaccctgcatagatggactgtgggagagccgactcatgctggaggcagcgcctgacaacaacagccaccaactcctggtgcgtgccacccaggtccctgcagctgcttcc

SEQ ID NO: 458882 - DNA, 122 bp, Homo sapiens
ctgcgaggcaggcggcgccggagggagcgcctggcccagcaaagagttaaagggaggggacgtgggctgtcacgcgtcattgggcagattatgtgcagcaaacaaaaagtgtgtgtctgcgt

SEQ ID NO: 458883 - DNA, 122 bp, Homo sapiens
ccgccgccgcagccttaccccggctctggctcgccgcgccgcgaaggttgccccggcccccgcagagccgccaattgctggactgcagccgcgagctggagtctccacccacaggaaaaatt

SEQ ID NO: 458884 - DNA, 122 bp, Homo sapiens
tgagaataaaatgcaaaatttctcatttttaagacaaaataaggaacttcaaataaatggcggaccataagctaggaattcactgtcctccatcgttagggctttttcctccgaaggaagtt

SEQ ID NO: 458885 - DNA, 122 bp, Homo sapiens
ggcctaggaggaccccgggcgtggaccacccgccctggcagttgaatggggcggcaattgcggggcccaccttagaccgaaggggaaaacccgctctctcaggcgcatgtgccagttggggc

SEQ ID NO: 458886 - DNA, 122 bp, Homo sapiens
gggggaggggtggcgggcactaaatatagacttcaaggacttgcccgggcactgattgcccgcgccggccgatcgggcctcaggggagggacgaggctgagagaggggaccctccaactccg

SEQ ID NO: 458887 - DNA, 122 bp, Homo sapiens
ccaagccctgcggaacttgggctgcacgggaaggagctggttttacagccctgtggggtgcgggatccgagtttccctaggcacctgcaggagagccccaaaatctaacacgagggcatgga

SEQ ID NO: 458888 - DNA, 122 bp, Homo sapiens
ccctacatctgttcatctgagtggccttcgtcctcaatgcagccagtgtcaaggtggacacgcacacggctccgaagtcctgtgtgacgcccacgtgacctcatgaggctgtgtgatgtcac

SEQ ID NO: 458889 - DNA, 122 bp, Homo sapiens
gtgggaggagacgggagggtcccgacgcccgccaccggtcacatcctcggccccaaaccccggcctggctcctaaggacctgggtcggccgccctagccctaaggccactcacctctgccag

SEQ ID NO: 458890 - DNA, 122 bp, Homo sapiens
ggactactggggtgcaccatcacgcctgcctggctaaatttttcatattttttggtaagacggggtttcatcatgttggagaccaggctggtctccaacccctgggctccagcaatctgcct

SEQ ID NO: 458891 - DNA, 122 bp, Homo sapiens
acgcgccgcggcccgactggacccgccccgggggcggagtccgctccctgccgccggccccgcccccggcccacccactcggagcggcctgcaagccagggagcgccccaacgcggactccc

SEQ ID NO: 458892 - DNA, 122 bp, Homo sapiens
tgcagcccacggaacaactccgcagttctcaggtagaagaatcagaatcaggtctgagcccgcggagtatctctttaagcgctgattttttaaaatcaatgatcgtttctcattggggctcc

SEQ ID NO: 458893 - DNA, 122 bp, Homo sapiens
tgcttgaacccgggagatggaggttttaatgagccgaaattgcgccactgccctctagcccgggcaacagaccgagacaccttctcaagcaaaaataaaaacaaaaagctgcaggtggaaaa

SEQ ID NO: 458894 - DNA, 122 bp, Homo sapiens
aagcgggtcagctgagctctgcactttcagaaaagtcactgagcggccagggccttggggcggggaccccggggctgccctaatggggcggggctggatggggcggggtcgcggctcctccc

SEQ ID NO: 458895 - DNA, 122 bp, Homo sapiens
gctcaggagcaagaaaattggacctaggtttaaacttccttgcctctctgggcctgcagacgagcgttctaaagtcccgttgcatcgctttaatgatgtgcattccaagagctgcagcaccc

SEQ ID NO: 458896 - DNA, 122 bp, Homo sapiens
ctgggcccacctgccagcacttcctgggctgccgtttcgaaactgctcggaagtgaagagcgacaggagcgagggttctgttccacatgctgccagcaggcctgaggctcacagtgagagtg

SEQ ID NO: 458897 - DNA, 122 bp, Homo sapiens
ggagccggggctatctccctccgtcagcgtcttgaagtccatggagagggcctgctcttccgcctgggaaggccgcttccagtcggcccgggtcaagatgtagagcaccgccccaccgaagc

SEQ ID NO: 458898 - DNA, 122 bp, Homo sapiens
tttcctcgcacgcggacccttctggggtgcgtggggaacaggcagtttgctgcctcggcccggctggtccctgcaaaccccaaagaatttcaacagagacacttgctgggctctcgctcggc

SEQ ID NO: 458899 - DNA, 122 bp, Homo sapiens
caataattttaaatgactttttaaaaaaccacaaaaccctgtatgatccagatgccatctcgccacttggagagtacctattattttggagacatgtgcacttgctaaaattggcgtggaac

SEQ ID NO: 458900 - DNA, 122 bp, Homo sapiens
aggagcgtggcgttagttctctctttatatagactctggttctagaaactcgcctgcagccgctggctggaccagcacacgctgacggggccggactatttacaggcccattgcgggctgta

SEQ ID NO: 458901 - DNA, 122 bp, Homo sapiens
tcgggtgtggtgagaaaaaccccggcttggagtgtttgtggttcatctggaatcaggcagcgctgttataagcttggggcctatacaggcttcctgggtttctgcttattgatacacattgt

SEQ ID NO: 458902 - DNA, 122 bp, Homo sapiens
ggccggtcctcagctccgtgccacaccagtctggcctgtaggcccgccccagcccgcccccgcccgcccccggctccgccctcaggctggcacccactccgcccccagcccaaccctcgggc

SEQ ID NO: 458903 - DNA, 122 bp, Homo sapiens
cggcccctccccgtcacgtcagggcacttacctcctcgcagctgggacgctccggtgatgcggggcagtcagttcagagcgtctctcccaaatctcggcacccgactgacccggatccaaac

SEQ ID NO: 458904 - DNA, 122 bp, Homo sapiens
gaagggactcgcgagggagggagggagggagggcgggcggcccggcgcccctgccgaggccggggatgctcatcgttgcccagagttggcccgaggagccctctccgttttcccaatacttt

SEQ ID NO: 458905 - DNA, 122 bp, Homo sapiens
ataaggaatctcagaccacttcccattgcggtagcaaaagttgtcttaagtctccgagcacgtgggagttgaaagtgccatttttgggccattgagagccacggtctaatttgcattgaggc

SEQ ID NO: 458906 - DNA, 122 bp, Homo sapiens
ccccagagagctacaggtctgctcccgacgggcctcgggcctgacccgtccacacagggccgtgtcaacagcagcgactcaagggacgtgtgtacatatgtaaatgagaaatagagacgtgt

SEQ ID NO: 458907 - DNA, 122 bp, Homo sapiens
aggttgcagtgagctgagattgtgccactgtactccagcctgggagacagagcgagactccgtctcaaagaaaaaaaatatgagccaggtattgtagcacgcccctgtggtctcagctgctc

SEQ ID NO: 458908 - DNA, 122 bp, Homo sapiens
gcagtcgggctgctcagcgacctgggctctcctcttgactgccctggccaaactccacgtcgttttgccggtaggtggcctgccaatgtgccagcgcctgccagtgtgttcctcttgatgtc

SEQ ID NO: 458909 - DNA, 122 bp, Homo sapiens
tttcatgtctcacttgtgcaactagggctgcagggcctcagagctggggagggcaggctccggccaagtgctgtggggagcacttcccatcttggcggtgaactttcctgctcaattatgta

SEQ ID NO: 458910 - DNA, 122 bp, Homo sapiens
cgggagagagcgcagtcggtggcagtaggtcagcagctgagaagcccggcccctgggccgcggcggacggaggccgaagaggccagggagcggtgatttagagatgccgggacccgtcccgg

SEQ ID NO: 458911 - DNA, 122 bp, Homo sapiens
ggaaaggctggctggcctggggaggctgtagacggcgtctgcggtgtcatctgagtgccacggccatcgcttcgagacggcgtctgcttgctgcagccagccaaaggtcttaaggaaggccg

SEQ ID NO: 458912 - DNA, 122 bp, Homo sapiens
ttgatgacttcatccggtatagcttcttgtttgtactgggttccataccactcttctgtgcgatcagtttttccttcaaaagatttagaaactatggcaaccctagagatagaaaaaacaaa

SEQ ID NO: 458913 - DNA, 122 bp, Homo sapiens
accatggccatttaggtgaggaatatcaaatgcccaagctaaaacaaaagatcattagggcgagaggagacctgggggcaattcaggaggtaaaaccactggactcagtgaacagacactgg

SEQ ID NO: 458914 - DNA, 122 bp, Homo sapiens
tgagcttgaccacccttatttgactaaaatgacagtttcatttgagccttaaattgtgtgcgagtaaattcatagagtctgactcaaccagcaactcctgtctctgttagtgaatttagctc

SEQ ID NO: 458915 - DNA, 122 bp, Homo sapiens
aaggggagaaggaatgtgtgaccatttccaacggtaagtcgtacaaaaggtccggggaggcgtacctgggcggcgagaggcgagagaactccgcgcgggctttccagtgcccaggcccctgc

SEQ ID NO: 458916 - DNA, 122 bp, Homo sapiens
cgcaggttacttggtcctgaggtcctccctcaggcgctgggcatgcctggggcgcagaaccgcagctctgggccagacccggctgagactgtgcttgtgcggcgagtggaggccgctcccgg

SEQ ID NO: 458917 - DNA, 122 bp, Homo sapiens
gggcccggccgggtctccaaggcgcctggggggaccgctgggtgcacaagaggggcctggcggggatcctttgttcccttgacaagaggtgtaatgagctcttactccacactgcagggctg

SEQ ID NO: 458918 - DNA, 122 bp, Homo sapiens
gggttctcagacaaggtgaccgggagggagcccaccaagctcagggaaaggcctggcctccgtcatccacctgagctctgccttcccttcagccttagcctcagcgtggacccgggactcct

SEQ ID NO: 458919 - DNA, 122 bp, Homo sapiens
ctcccgcgccgcccactgcccgctccaggcccgctgcccgctccaggcccgaggtgatggcggctgttcctgccgttctggggcctgtgccccagagctggccgcgtttctcggggcgggag

SEQ ID NO: 458920 - DNA, 122 bp, Homo sapiens
gtcatcctgcccattccctggtgttcaggcaggcagaccttcatttaaaccattcccagacgaatgacatagggtcctgaattgaaaaactaattccctcaaaatagatcctgaacatgacc

SEQ ID NO: 458921 - DNA, 122 bp, Homo sapiens
agatgtgcttcaaggatcttgaatgagcctgtttttttctactttctatttattttttaccgcgttctttccaagtcattcttctgaactggtccgtagcacatctgcatcaaaaccagtga

SEQ ID NO: 458922 - DNA, 122 bp, Homo sapiens
ggaggaaacaacagctgataatatacaagtttatatagggggtttttcaccctcctcctccgaaatagcacagggcgctcacacacgtgtgtgtgtgtgtgcgcgcgcacgtgcatgtatga

SEQ ID NO: 458923 - DNA, 122 bp, Homo sapiens
gtgagagagaagaggaagaagagaggaggagtggggaggggagggagagcaagacagcagcgggtctggattcccctccgagccacatctggtcaggttctaagtaattagaagattttccc

SEQ ID NO: 458924 - DNA, 122 bp, Homo sapiens
gttggctgatgggcatttagttgatgggtatggttgatgggcttcctatttttgcaattgcgaattgtgctactatgaaaacatgcatatgcatctgtcttccatgtaatgacctcttttcc

SEQ ID NO: 458925 - DNA, 122 bp, Homo sapiens
gcctttaccagctaccggaagtaactgcgcacgaaatctcccgcgggagctaagcctcttcgacaagaattctatagcgcgagcaaatcagtatctcgcgagaaattgaagaggaaacgtga

SEQ ID NO: 458926 - DNA, 122 bp, Homo sapiens
ggctacgatgggggagacctctgggggttccataacagcgcgttcgtgtcttcagcgtggcgctgctgccattgtttaataataaactgtcggtgccttcgtctctggcttcaagctgagcg

SEQ ID NO: 458927 - DNA, 122 bp, Homo sapiens
ctggcaacaggtagtagtagtaggccaccgtgctgccgaagccgtagtagctgatggacgcgtagtccaggtagaagaaggcggcgcgcagacgcagcgacaggcagctgaacacgtgcgcc

SEQ ID NO: 458928 - DNA, 122 bp, Homo sapiens
ttcggagggactggtgtgaagagagaggctcagtctgacttggagttttgtgctgttgcacgtgaatgctctggaactgccctaatcgactgaaaatgagccggctacagtcatatggaaca

SEQ ID NO: 458929 - DNA, 122 bp, Homo sapiens
gtagactcagaagaccagtggccttataaaaccgtaattccggccaggtgtggtggctcacgcctgtaatcccagcactttcggaggttgacgcgggggcggatcacgaggtcaagagatca

SEQ ID NO: 458930 - DNA, 122 bp, Homo sapiens
cggactcgaaggcggcggcggcggcgggcgcctcgcgaggacccgggagcagcgcagcggcgagcagagaacacgccacagagaagaagcccagcaagtgcatggtggaaggaccgggggtg

SEQ ID NO: 458931 - DNA, 122 bp, Homo sapiens
ggagctctggacctggatctcgccttccccgtcttcattttggggagaggtgcagctggacgacatcaaattggagcccagtgaaaaaatggtgcattctcagacgtgatgaatccccaaac

SEQ ID NO: 458932 - DNA, 122 bp, Homo sapiens
gagattcccccccctttccacagacactgtgttccatgccagttccccagtaagctggagcggagggccagtgtggtgttgagggtgggagttggggggggaaactcacgcggcccgtactt

SEQ ID NO: 458933 - DNA, 122 bp, Homo sapiens
agtgaggctttgaactttaaatagcctagttcaagggaggcttgggaaacaatacacaggcgaacatttaaataacaatctgggacattaataagggaatgcaaggaaatgcagtgctgttg

SEQ ID NO: 458934 - DNA, 122 bp, Homo sapiens
ctcttgagtccaggaagcaagggtgggaggagggacgagccagtggcaatgacccagacccggacgacccccattgctgagccagcggagctgcttggtgagtggcctccaggcggcatctc

SEQ ID NO: 458935 - DNA, 122 bp, Homo sapiens
ttaggactgcgctgtcttgacaacctcacggtccctcctccagccgcccccggagcaccgcggggccacagccccagacgccacggtaccggctccaggacgtaaacactgcccttctcttc

SEQ ID NO: 458936 - DNA, 122 bp, Homo sapiens
gacagcagctcccctgaacaccaatgaaggacggtatatgcagaactgccagtcaccactcgtcacaagacctatgtgggtgtcgggaggcaggtcctctcatgcccaggctctgtctcacc

SEQ ID NO: 458937 - DNA, 122 bp, Homo sapiens
tcctggactcacacggaaacttagggctacggaatgaaggtaaatttaaaataaaacaagcgggagtcacagatacactgtctgggaaagtgaaacttaagagctttgtgagtcgtgttgta

SEQ ID NO: 458938 - DNA, 122 bp, Homo sapiens
aaaagtgttctttggttaagccaaatcactgaggacaattcagccagatggccatggtgccgattcagaaaatattaaactgcttactggaatgagtcaactgcaggactgattgatttagt

SEQ ID NO: 458939 - DNA, 122 bp, Homo sapiens
attgctttacttatctaggctgggaaagggtgggggccagtgctgggctggtcttaagcacgcaggaaggaagatgtggactgtggcctctccattgagagacatctgattcctgagctact

SEQ ID NO: 458940 - DNA, 122 bp, Homo sapiens
cacggttggctatagcagtagaaccaccaactagcaaaagcacagctattgtgtagtccacgctatgttagctacaatttgagtgataaattttaagcttaagaggtcaatgaatatcggtt

SEQ ID NO: 458941 - DNA, 122 bp, Homo sapiens
acccatctcgagtataaatctggaaacttaagggtgggccaagttcctctttaccctccccgcccagacagggccatcaccgtctccatccaggtcctcttcctcctcctcgctgtcctcct

SEQ ID NO: 458942 - DNA, 122 bp, Homo sapiens
agcctcgaatgcgatgcacagccgacctgcagattagtgttaactctgggagctcgggagcgtgcaccaccaccagtgtcaccgagcgcacccgcacagcagctaaccagtcaggcagcaga

SEQ ID NO: 458943 - DNA, 122 bp, Homo sapiens
agagtccttccagggagtaaaaacaattatatttcaacaaaggagtaagaaaaattggcacgtccctccatgaggtcacttcactttggaaaaagcatttgtgtgctttattttaaacaact

SEQ ID NO: 458944 - DNA, 122 bp, Homo sapiens
ccgtgagagggcgcgcggcatcccagtgggtggcagctggaggcggggcaccctgaggggcggggaaggactagggtgcggggagggggttgcaaaaggagccgagcggcttctgctcaatg

SEQ ID NO: 458945 - DNA, 122 bp, Homo sapiens
tgggcaggggtcttgtgggaccgagctgggacttgggccggcgggacaggtaaggggttgcgcgggggagtgaatcggaggcagttgggaaccgggagacagggggcaagcggaggagcgag

SEQ ID NO: 458946 - DNA, 122 bp, Homo sapiens
agtatagattgtttgaaaatgtgagatgtccatggttggcctctaataacattcgattcacggcaaacatatattcaagtaggagacatggtgatataggcagaaaaatcaaatgatgctaa

SEQ ID NO: 458947 - DNA, 122 bp, Homo sapiens
caggtatagcccctggcccggcctcagcccacccggcagactctcagctgaaggaggacgcgggttgccgtcgggatgccgtgtgcaacatcccaactccacagatcagaagatggaggcag

SEQ ID NO: 458948 - DNA, 122 bp, Homo sapiens
cattgcagggtgtgtatgcatgagaaaatctgccctttaggaagattaattggatggccacgtggaggctggatgagagctgagggagagacagttagaggttatggataaatccagaatct

SEQ ID NO: 458949 - DNA, 122 bp, Homo sapiens
gtggaggtactccagacaaattggaagggatctcctcttgttaaagaattgcaggcggggcgtggtgacacacctgtaattccagcattttgggaggccaaggcaagaggaccacttgagcc

SEQ ID NO: 458950 - DNA, 122 bp, Homo sapiens
ccctgtggtttgaagccaatgatctggaagtgggtggcaggacagggcctggactgtcaacgtcagcactgagtgccagccctcctccccatcccactctcgcctaaatacttcctccctgc

SEQ ID NO: 458951 - DNA, 122 bp, Homo sapiens
attctttcccacgtatctcggggctgcctgtgctgacaagaggaatagtatatcattctccggtgacgagccagctacccctctgttaggggccagggaatctcagagcacagagcatgaaa

SEQ ID NO: 458952 - DNA, 122 bp, Homo sapiens
ctttcaacttttctgaagatttaaaaacagcttcaaaataagcaatcaagcgacagtatacgtttgaatcaggcaggcttgttcaagtcatgattcccctacttacaagctgtgtgtggctg

SEQ ID NO: 458953 - DNA, 122 bp, Homo sapiens
agtggctacactgaccacacccacgcagggacctcacccccctgcaggccccttgcagaccggcttcacttggcttcacttggccctatccaggcccatgcacttggagaccagcctggttc

SEQ ID NO: 458954 - DNA, 122 bp, Homo sapiens
ggtcattattaggattattgctgtgattattaaacgctgattgagcactggaagtgtctgcggtgcttcgaagaactccagggaaggcaagtccctgctctctggacgcagagctgcacaga

SEQ ID NO: 458955 - DNA, 122 bp, Homo sapiens
ctagcctgtcattcccactctgacttacataaagggccagatttagctttttaccagctgcgtaacctggacaaattgcttagcctatcttatgtgtcctcattgtaagacaggaattataa

SEQ ID NO: 458956 - DNA, 122 bp, Homo sapiens
aatcaaggccccgtccccctaaagaaaaggctcaatcctagagagacagctctgcagccgcggccaatcaacgaggccgagcgccctttgctccgcccaggccggcctcccgccccctagtc

SEQ ID NO: 458957 - DNA, 122 bp, Homo sapiens
ggggcacacccactgccacccaggtcagagccctgggaatctatattcttctccccactgcgtttaatatattcattcattcagaaatattaaatacgatgttcaggccggtgctcagtgtc

SEQ ID NO: 458958 - DNA, 122 bp, Homo sapiens
tgcggtgcggctgggcgctcttcttgcctggaagatcgcagtttctgggtcatcactttacgctactttcccctcccccccatctttcaaagagggatttgcagtagattctttaggcttat

SEQ ID NO: 458959 - DNA, 122 bp, Homo sapiens
gtcccgcgggcacggacggcgccggggcagggatgcgcccgcagtgcgcaccgcccggcccgcgcctccagcagcctcagcgcctccacactgcgcatgcccggccggcccggcgcggctgg

SEQ ID NO: 458960 - DNA, 122 bp, Homo sapiens
gaagaaaggtacatcccaaggggacaccgacagtaagcagcggagctgggattccagacacgtggctgggcctctgcaggaagaaatcaaacgtgtggaagggttggggagaggagatgcct

SEQ ID NO: 458961 - DNA, 122 bp, Homo sapiens
gtggcattccagggggcagagacctagagccagagagggcctttccgctcctgaggaggccgggtttggctatactgaccatgctcccacggcggctgctgccccgactcccggtgcccgcg

SEQ ID NO: 458962 - DNA, 122 bp, Homo sapiens
tctgctcgtgtgccaataaagttattgaaattgacaccggttgctaaggaagtgggtcgccgagccaggttgctaaggaagtgagcggccactgtctctccccatccggggcagcggggaat

SEQ ID NO: 458963 - DNA, 122 bp, Homo sapiens
actcccccaggagcgcgggcagctggagggggcgggtcggcaggaaccaggcaagctccccggaggaggtgagtgctgagtgacagcaggagtttgccagggtggagggaaaggggcagaga

SEQ ID NO: 458964 - DNA, 122 bp, Homo sapiens
agccggaggttcgcttttgcatcttaatgaggagctgagagctagcgggcgctcggaggccggagcgcggggagttacacgtgagcacccgcctcagaactgaacctccccgcgcccgctcc

SEQ ID NO: 458965 - DNA, 122 bp, Homo sapiens
ttatttccttcattagctttatgtgtcaatttgtgtttacaattggacaagcttgctctacggaaaacaaatttgtggcagagaattagtgacacctttagttgcttgtccaatatcttttc

SEQ ID NO: 458966 - DNA, 122 bp, Homo sapiens
aggaaaggcaagcctcggctccagatccggttccatgccatgttttggaatttgtgtttacgtctgccttcatccccatcctttccgctccagcataagcaaaattataaccccgcacaccg

SEQ ID NO: 458967 - DNA, 122 bp, Homo sapiens
gctcgactatgccacggggctgctcaagcaactgctggccgacctcatcgagaagaacctcgagagcaagaaccaccccaagctgctgctacgcaggtacctgcctcgctctatccaggcca

SEQ ID NO: 458968 - DNA, 122 bp, Homo sapiens
aggtggggagagcactggtgctccctggagaaatcaaggtgtccaacattctctccgaggcgaggctgcttgagcgccagcaacaggtcctgctgaactttcttccccggctccttcgctcc

SEQ ID NO: 458969 - DNA, 122 bp, Homo sapiens
gaggaaaaggggaggggggtcgggtgccgcgaacttgctctgagggggttagctgcgcctcggattgatctgcgtcgtgcctcgataggcagtaaccttcatcgctgcggttgcgtagcgtt

SEQ ID NO: 458970 - DNA, 122 bp, Homo sapiens
cctcacttcctagacagggtggcggcagggcagaggtgctccttgcttcccagatgggggcggccaggcagaggcgctcctcacttcccatttggggcagccgggcagaggcgctcctcact

SEQ ID NO: 458971 - DNA, 122 bp, Homo sapiens
ctgtggactctctttgtcactgtggccctcattgcctttataagtgtgcacagaactcagcgtggcagctgcgagttctcagaggcgccccttcctgtggtgctctcaggcacagtgtagga

SEQ ID NO: 458972 - DNA, 122 bp, Homo sapiens
taactggggattcagtttctctcaatttagtgtccggtgaacaaaggatttggaactcaccgacgtactgcctctgctctcccctgtaactgtgagaatgcattcactagctcaatcactca

SEQ ID NO: 458973 - DNA, 122 bp, Homo sapiens
aaatttaattatttcaatttaaatggacacataccatattggacagtgttgccccccatacgtaccaaaagaccttatacaggtcactgtggcctagtggggctctggattaggtgacctgg

SEQ ID NO: 458974 - DNA, 122 bp, Homo sapiens
aaaggaggtggagaaggagtaaccagtgaggtgggacaaaaccagagagggtgccaccagcgtttccacacgaagagtgttacaaaaataaggaagtgggcaggcacatcgaacgagctgaa

SEQ ID NO: 458975 - DNA, 122 bp, Homo sapiens
agatggtgacaaaagtgacctctggttaccctcactgctgattatatgctgattagaatgcgttagcatgctgaagacactcccatcagtgcatgacagtttacaaatgcccagaagttacc

SEQ ID NO: 458976 - DNA, 122 bp, Homo sapiens
ttcctgccggcctcattgttatgcaggttcatgaggcgccgcgcgttcttcttgatctcccgagcgtccacgaagcgccgggagaagtcgatgccgtaacgcacgtcggccgagcagccgcc

SEQ ID NO: 458977 - DNA, 122 bp, Homo sapiens
ttgtacctggctggtttagattctagtacccaagaaaaacatgcttccacttatgagaatcgctccactaacttgcaaacagagccacttggccacttctggctcctcattgccattaccca

SEQ ID NO: 458978 - DNA, 122 bp, Homo sapiens
caggactatgtggccacggtggccgacgccctcaagatgaacaagaatgtggtgctggcccgggccagcggggccttgccccctgagcggctgagccgggggtctgggggcacctctcagct

SEQ ID NO: 458979 - DNA, 122 bp, Homo sapiens
gcactcttgtgtttatgtctcctggcttcttcaccaagctgtgtgacagctgggccctgtcgcctccttcctcgtatatgcagcgactatcgcagagccgcttaatctttgttgaaggcagc

SEQ ID NO: 458980 - DNA, 122 bp, Homo sapiens
accgtttcacagatgagaagaccgaggtgccagggtggcgatcgcacgaagggcccgtcacgggagaatgaggagggtctggcgtcagcaagctcccccggaatctcgtgatctggaaatcc

SEQ ID NO: 458981 - DNA, 122 bp, Homo sapiens
ggtgtgtgagtgtgaaagtgtatgaaagagtttgtgagtgtatatggatgacggtgtgtacgtaggtgagcctgtgagtatacatccgtgtgtacaacagtgtttgtaggtgtgaaggtgtg

SEQ ID NO: 458982 - DNA, 122 bp, Homo sapiens
aaatctctagttttctaagacagttccatgtataaaaatgatttatgcatttctccaaggcggtacatatccaaagacatgacaccagggggaaaaagtgcttgtttttctgatggaagcag

SEQ ID NO: 458983 - DNA, 122 bp, Homo sapiens
tgagctcgttatccgcctgccttggcctcccaaagtgttgggattacaggtgtgagccaccgtgcctggccagtcctaacttattttgtaagtatactaggtattgaaaaaaggatggtagg

SEQ ID NO: 458984 - DNA, 122 bp, Homo sapiens
gttgcgggcaggtggtcacaggattgagactccaggctaactcgtaaacacctctgggttcgtttctttaataacagaatggaattaagttcaaaattccacttgtagtttccttaaacatt

SEQ ID NO: 458985 - DNA, 122 bp, Homo sapiens
cctcagcggcgctcatctgcaggtgccagcagagggcgcctctcacattccccgaaggggcggggagggcgctctcctgacaacagtgatgtctgtgtatttaaaacaacaggacattcccg

SEQ ID NO: 458986 - DNA, 122 bp, Homo sapiens
ccatgacctgcccgtcctccagccaggtgatgttgatagtccctggggtgtacccagagacgaggcacaggagctggatggtcggggggaagtgcccgccgccgtcgcaggacgactgtaag

SEQ ID NO: 458987 - DNA, 122 bp, Homo sapiens
aggtatttagatacacaccgtggcgtcgacttaaggtgaaatctaaacaaaatgaaaggacgggagctattctgatttggccgaacctgtgcctgcgggctgggaatgacccaaggaaacga

SEQ ID NO: 458988 - DNA, 122 bp, Homo sapiens
caggctggagtgcagtggtgtgatctcggctcactgcaacctctgcctcctgggttcaaccgattctcatgagccagcctctggagtagcagggatgacaggtgtgcaccatcacgcctggc

SEQ ID NO: 458989 - DNA, 122 bp, Homo sapiens
tccgtccccaccccataccaccctcttccgaacagatctcccgcggtgccccctgcgggacggaacctcagtgccgccccctcccgggcggccccacgacccgccctctcgggccccagcgg

SEQ ID NO: 458990 - DNA, 122 bp, Homo sapiens
gctccccgtgacctgagatgccacctttgtcatgcactaagcttccctgtgcacttggcccgtgccttcttaaatcgtccctttcccaaaccttcctcatctcacctgaatctcatattgat

SEQ ID NO: 458991 - DNA, 122 bp, Homo sapiens
gatggcttggagcaagctgggattctaggcaaacaggtcagcagcggatggttcctccttcgctgaacattctaaaaagacatgcgtgaaccaggaaacagctagggacactgtgctagcca

SEQ ID NO: 458992 - DNA, 122 bp, Homo sapiens
cagccaaggtccaggatggctgcatcagagtcatccagagccggttaaaaatgacagcctcggctgggcacagtggctaatgcctgtaattccagtactttgggagggaaggtgggtggatc

SEQ ID NO: 458993 - DNA, 122 bp, Homo sapiens
ttaaaaggaagggaatgccgacacctgctgccacgcgcaggaacattgaggacgctctgccgagggaaacgggccagtcctaagacaaacaccgcatgattccactcagccgaggcccctag

SEQ ID NO: 458994 - DNA, 122 bp, Homo sapiens
gcggcctcggcctcctccccgcgcggcagctggtgcctccccggccctacggggctcacgcgcacgacacagccacaagatgtccgctctgacggaactactgccagctgccacgctccgcc

SEQ ID NO: 458995 - DNA, 122 bp, Homo sapiens
tgtgtacagttgcatgtacaccccagagctgccctaggaacctatgactctttgtgggtacgaactgtgtcttactcacacttgtacacttaacatatccagcagggccaccccacagcagc

SEQ ID NO: 458996 - DNA, 122 bp, Homo sapiens
cccagccagcccggaggtgacgtcactcgacaacccagtcgatgatgtcatcattggatgcgagaggggcggggcttggtagtccctcaggggagtttaaggacctggggtgtaggacccat

SEQ ID NO: 458997 - DNA, 122 bp, Homo sapiens
gggttctgggtcggcagcccgcgcaggtgcactcgggaggcggggcgggcgctgcaggtgcgcagtcagtctcacctgggcgcctgccaggaggtcagtcctgggccctggggggcaggact

SEQ ID NO: 458998 - DNA, 122 bp, Homo sapiens
agcaaaagaaaattcttcctgtctgagaagtactaatatagcacaaggtgcaactgagggcggttccaaaagccttgactaagccctatgcaaaaaccttgtgacgcactgctgcacagtac

SEQ ID NO: 458999 - DNA, 122 bp, Homo sapiens
tggtgtgcatatgttgggggcagggcaagggtaataaataccagggacacttttgcaatgcgtgcctgtcagctgagtgctggacaaacatttttaccactggctatttccctgaggcttct

SEQ ID NO: 459000 - DNA, 122 bp, Homo sapiens
gcgcagtgttgagaaaggccgtggtcacaggccgaggttctgtggagggtggaatgcgctcgggggagctaggcctccgcacccgccttcgccgcgtctctagcgtcgacctgatagccgca

SEQ ID NO: 459001 - DNA, 122 bp, Homo sapiens
cgagaggagaccagagggacgggggcggggactctgcaagaaaaaccttcccggtgcaatcgtgatctgggaggcccacgtatggcgcctctccaaaggctgcagaagtttcttgctaacaa

SEQ ID NO: 459002 - DNA, 122 bp, Homo sapiens
ggcgtccattggtccggcctgcccggcggggcgtttcaggaccgtggctatggagtccggcgtggcagcggcaatccctggccaaaggtacttggggtcattttccgcggggggttacgtgc

SEQ ID NO: 459003 - DNA, 122 bp, Homo sapiens
tgggaagcgcctctgccccgccgccccgtctgggatgtgaggagcgcctctgcccggccgcgaccccgtctaggaggtgaggagcgtctctgcccggccacccctactgggaagtgaggagc

SEQ ID NO: 459004 - DNA, 122 bp, Homo sapiens
cctcatggtagtgccagtgccctgggctgctggcttaccgagccatgggtgggccccccacgagtctggatgtccgcaagtcgtgctagaaaaccttaagaatgccttgtgatcacagaaga

SEQ ID NO: 459005 - DNA, 122 bp, Homo sapiens
gattggcacgggcacagaccactgcccccacctgccctgcgccatctacccaagaaggctcggcacgggcaccaaccactgcctccaactgccccatgctgcctgagaaggcactgcacggc

SEQ ID NO: 459006 - DNA, 122 bp, Homo sapiens
ccttcccggctttcccttcttggccgtcgaggcctttctcttgccagacagaatgggggccggggtgttggtggcagggggccccgggtggggcggctgctcctcgtcgagcgccttgaagt

SEQ ID NO: 459007 - DNA, 122 bp, Homo sapiens
aggtcaaagccagagcatcctcggaaacacctggaaacttcaacatacaaaaagcccaggcgccaccctggaccaaatgcatcagaatctgcatttttacaagatccccaggtgactcatat

SEQ ID NO: 459008 - DNA, 122 bp, Homo sapiens
ggcccctccgcactggggcggcctccgcggggtctttccaggaatctggatgggcctgctcgcccgcgccccggcgggcctggcagaggaccagccccagctgcggaccccggggcagtcta

SEQ ID NO: 459009 - DNA, 122 bp, Homo sapiens
ccggtagtccccattcccgcccatcacgtccctctgcggacctcagaggccgactgaccccggctcccaaagtcaggccctccgccacgtcctcccgcataagaagccaccgcctccagcga

SEQ ID NO: 459010 - DNA, 122 bp, Homo sapiens
tcctataggggggagggggcttccgctgactaaaaatatatttcccctcctcccaacttccgcccagaggttgagaagaaactgggtgaaattatgaattcaaggaacagtgacaacgagga

SEQ ID NO: 459011 - DNA, 122 bp, Homo sapiens
tggcatcgccagactccggttctccgcaggtgggagcacccatggtgaggttgggagaatcggccgatcgaagagctccgtccgtctcgcgagagtatgaggcagcatctcctgtgtctaat

SEQ ID NO: 459012 - DNA, 122 bp, Homo sapiens
ttctcctgccctactctcccaccccttcccccttcccctaaggaaaaaacaactaaacgccgctttcctgcctcaggatgaactgacggccttgaatgtaaaacaaggtttcaataaccagc

SEQ ID NO: 459013 - DNA, 122 bp, Homo sapiens
ttctgcctcgctcaggttgcacccctacaaatctctattccgggtagaacttggagagcacgtggctaagcctcccctttacagacgagaagtctgaacttgcctgaccagatcccagcttt

SEQ ID NO: 459014 - DNA, 122 bp, Homo sapiens
gcggctggttctctgtttgtgggacgctggtgtctctggaggcccttcctgagaagccgtcgccagagttacgtcgcggttttcttaactttagagcctgggggccggagaccctgattgca

SEQ ID NO: 459015 - DNA, 122 bp, Homo sapiens
tggagaggagggtgtgtggacaccaagctggccatggtccaagctgacctatttgccagccgacccctgtctgggctgccataacaaagtgccatcatgaactgggtggcttataaacaaca

SEQ ID NO: 459016 - DNA, 122 bp, Homo sapiens
agccccgccgcatcctcggggcgtgcaggtaaagggttacgcgtgtcgggaaggctcacccgcagcccgggccacgtgacgcgcgggcccaatgacagcgctggggcggccgctgcgagctc

SEQ ID NO: 459017 - DNA, 122 bp, Homo sapiens
caagtgtcaagcaccacacatggggatatagacgcaacagagggcccagttaattgctctcgctcttttggagagaattacagtgcacagtgggaaatattggagagatactttggaataat

SEQ ID NO: 459018 - DNA, 122 bp, Homo sapiens
acgtcgggcctcctgccttcctcccaggcccccacgttgctggccgcctggccgagtggccgccatgctcctgccttgggccacctctgcccccggcctggcctgggggcctctggtgctgg

SEQ ID NO: 459019 - DNA, 122 bp, Homo sapiens
aggcaggatggggacctctgagtcagctggcaatgtgctgtgtaaccttgggcaagtctccggccatctctgggctttgtgctggtactgtacaggctgggagacttgggttctagcagggc

SEQ ID NO: 459020 - DNA, 122 bp, Homo sapiens
ctacttgttccttgaggatccaggctccgaaaagccctgaggcaggacaggactccacaccgcgctgcgagaggaaagccagcctgcacctcacctgtcctggttctgcctggctgctgcga

SEQ ID NO: 459021 - DNA, 122 bp, Homo sapiens
ccgaggcggatccggtgttgcatccttggagagagctgagagctggaggtgagctgggctcgcggtcgcccctctcgcgcgccctctttgagaaccacggcttccaacctccctggaaatgg

SEQ ID NO: 459022 - DNA, 122 bp, Homo sapiens
agcgccaggggcgcgggacccagccaagctccccactctgcccccactgggacagagaggcgcaagagtccaccaacccctgccacttgtggcctttcctgactgcccagggcttccaacaa

SEQ ID NO: 459023 - DNA, 122 bp, Homo sapiens
ttgcctttgctggtgcccaaggaccgccttccactgcagtgacggcgctggcgggggaggcgctcttgagcccctcccgattgtccctctgcctagcaagcaagttgcgactggccacaagg

SEQ ID NO: 459024 - DNA, 122 bp, Homo sapiens
tggtgagtgggcggcgcggcccgccgtgtggccccagcagccgtgttgagcatctcattacgtggcaatcactcgtgttccccaacacggcagcgggagccatatgctggctcccgcgcgcc

SEQ ID NO: 459025 - DNA, 122 bp, Homo sapiens
attagatctggggagatgattaaagacgaggtctcggccgggcgcgaatggcgggagccgcggcagcttcccgcccgcgaagcccgcgccccgcccggcttggccggcgccgggggcagcgc

SEQ ID NO: 459026 - DNA, 122 bp, Homo sapiens
gactattcgtagtggcactgagcagctcccctcgtacgtgacatacatgacacatgctgtcgtctgtctctgccaacagacggaccctcagtgccgtagagacgtcctcgttttgcccaagc

SEQ ID NO: 459027 - DNA, 122 bp, Homo sapiens
aaaataaaataaaatcctagcaataaccttgggtaagttacagctgggtgtggtggctcacgcctgtaatcccagctctcagggaggtagaggtgggaggatagcttgagcccaggagttcg

SEQ ID NO: 459028 - DNA, 122 bp, Homo sapiens
tcgggctcccgtgattctcctgcctcggcctgcctagtgcctgggattgcagtcacgcgccgccacgcctgactggtttttgtgtttttggtggagatggggtttcgccatgttggctgggc

SEQ ID NO: 459029 - DNA, 122 bp, Homo sapiens
ccgtgaagcgccgggcagggtgcacaactgtcctcggagaaagttcaagaggaacttccccgcgaacaggtcctgccggcggccgggaatacgcacactttttatgttatgacttggacttt

SEQ ID NO: 459030 - DNA, 122 bp, Homo sapiens
tgctaggcttactgaggactagcccttaatggagtttgaatttctttttttaaatgagttcgttatttaaagagttgtgctcaaggactatgttaatcacaagtactcctgagagccactga

SEQ ID NO: 459031 - DNA, 122 bp, Homo sapiens
tcagcctgggtgacaagagcaaaactctgtctcaaaaaaaaaaaaaaaaaattctcaaaccgtccgttggacccaaccactgcatgctgatttcactcatgcatgctccagctcccagactt

SEQ ID NO: 459032 - DNA, 122 bp, Homo sapiens
aagccaagaggtagaccagcacgctggattcaggcccactcctgtgtggttggagtagtccgctttatttttgatatttttttcttaagatttcattttttttccaaatacagtttttttgg

SEQ ID NO: 459033 - DNA, 122 bp, Homo sapiens
accaagcacattggtcctaaaggggctgaagagcctgaactgcacctaacgggaaagaaccgacatggctgccttttgtttacactggttatttatttatgacttgaaatagtttaaggagc

SEQ ID NO: 459034 - DNA, 122 bp, Homo sapiens
gggtgagagagggaagcgcatacctcccggccggagccgcagaccccgctcgctcctccacgcctcccagtcaaggcagtcacccctccggtctctacccaggtggccccgagcgattttct

SEQ ID NO: 459035 - DNA, 122 bp, Homo sapiens
agagaaaactggaaatatttccaaagccatgtttactcccttcacccacctgtgagtcttcgccttggctgtttccgactcggaatgtcctcgcattgatcctcccaatcacagccagctga

SEQ ID NO: 459036 - DNA, 122 bp, Homo sapiens
gcgggagccgagcgtggtgaggtggggcctcaggggcaggtgggaggtgctcgggttaaccgtccgaggcccggagacccgcccgtctagggcgcctgagggaatcccgttcgggcagcggc

SEQ ID NO: 459037 - DNA, 122 bp, Homo sapiens
agggcgcaggaaaggtaagcaggagacccgccgctaggagccagagccaggccggcgaggcgggcaggcaggaagaaccgcggacagggcgacttgatctcatttttaaaaccggagagtga

SEQ ID NO: 459038 - DNA, 122 bp, Homo sapiens
gggggcgcgcgagggaagggcacacaggggggccgaagggggcgcgcgagggaaggcagacgaccctggcagaggttccgcttcagagcggaaggttgcttggcttggctgggctgagctga

SEQ ID NO: 459039 - DNA, 122 bp, Homo sapiens
tgatgaaagtactgtaatcaacacatagcttccaaggttgagaatcgcctccattccccacgaaggattgcctatggagaggttttacgagccaggcttacatgcaaaacacattgctgtca

SEQ ID NO: 459040 - DNA, 122 bp, Homo sapiens
tgggggctttgggcggcagggtcgcagggtgcaggtgaggggtccccaggtctgcgggcgcgccccacgccgggccccggcacggccactcacctgggcggctccgccgcggacacggcgcg

SEQ ID NO: 459041 - DNA, 122 bp, Homo sapiens
tgagcatctcagagcagggccctcttaacacatttctgtcggatgcgctagaagctaatacgatggcacctggtttttgagaaaagacaagctttttgttgcatgtcaacccactgggagct

SEQ ID NO: 459042 - DNA, 122 bp, Homo sapiens
gtgatccacccacctcggcctcccaaagtgctgagattacaggcgtggagccaccgtgcccggcctctaagggaaatattgaggtcgcagaccacagaatccaagagtgctaggaatcagag

SEQ ID NO: 459043 - DNA, 122 bp, Homo sapiens
attctcaataaacgtgtgtggagtatttgttccataatgtgttaggcaagcaatgtaggccgaataatttagtaaacaaaagtgtatgcttgtacttcctgaaacagttggtgaattgcaca

SEQ ID NO: 459044 - DNA, 122 bp, Homo sapiens
gaggctccaaggtccggggacactccgaggccctgcggtctcaggcagggactctgtccgcggcggactctctttacttcggctaggcaccggctcggttcatcccgcacgcggggcggcgg

SEQ ID NO: 459045 - DNA, 122 bp, Homo sapiens
ggggcggcgtagccgccgcccgcccaggaggaccatgttgcgcggcaagtcccggctcaacgtggagtggctgggctactcgccaggcctgctcctcgagcacaggcccctcctggcagggc

SEQ ID NO: 459046 - DNA, 122 bp, Homo sapiens
aaaggggttcctgcaccgccttccgcagccagctggcttcgcccctcccccggaagtgtccgcacctcctagagcccagcgagcgagcgtttgtgcttttgtcctttgaaccgggtgtggtt

SEQ ID NO: 459047 - DNA, 122 bp, Homo sapiens
tgtcaccatccccgtccctgcgaattggaatttcaggcgggggcgagctgctggctctgccggcaaactcgccttatcccacgccgccgaagggtccaagctttccagctgcgtaacacgac

SEQ ID NO: 459048 - DNA, 122 bp, Homo sapiens
aagctgccgagaggctcgtgggccttgaggtgccgcatggggcttgtaggggcctgtgtccgaggagtgttcacgtgtgcgaggaccttgctctggtctgggtgctgtgcagttcgcccggg

SEQ ID NO: 459049 - DNA, 122 bp, Homo sapiens
ttaagagttttgcgttgaagaatatttaatcctcatagcatggtgaggtacatggtatcacgaccacatattacagacaaggaacatcaggtgtgagatattaaacaagttttctgaggtca

SEQ ID NO: 459050 - DNA, 122 bp, Homo sapiens
gcttctcactggtatggagtacactgtcaaatgtgtgtccctcaaaaagtttattttgtgcgggggaaaaatataatttgccctgcaattccagacttacgggacatagaaagcgtccctca

SEQ ID NO: 459051 - DNA, 122 bp, Homo sapiens
caactgcatacccgttactcttccaaagtcccctcttctgccatatgttacatattaaaccgataggaatatcttttttcccactccaaacgacaaggcatgcatgccgttttaatgtatcg

SEQ ID NO: 459052 - DNA, 122 bp, Homo sapiens
gcagagagaatgtggcccgtgctgcactctgacgcgcagaccatcttgatggctcagggacggccaggctccaccacacctgctccctcctgactggcctctctctaccaagccagggacaa

SEQ ID NO: 459053 - DNA, 122 bp, Homo sapiens
acaattcatagcctgctattcacctacctatggccttacatcttgggattttctaaaagccgtgtatgccatgatcttttctttttctacctcatccttcacctcagtggtgactagctttt

SEQ ID NO: 459054 - DNA, 122 bp, Homo sapiens
cttccccgcctccgcacccagcaccacattgctgtgctgagtttcagcacagggaccgtgcgtcctgctctctgctgcatctcccagccagtatacaccacggtacgtcataagccctcaac

SEQ ID NO: 459055 - DNA, 122 bp, Homo sapiens
gtgaacataggtgtaccccgggacccagcatccacatgtagagtgaacacaggtgtaccccgggacccggcacccaggtgtagagtgaacacaggtgtaccccgggacccggcacccaggtg

SEQ ID NO: 459056 - DNA, 122 bp, Homo sapiens
actgaggtacttctctgagtgacaagcgggacaagtacgccgtgggcggggccggcgggtcgtgatgttagttcgcgctgtgtggaggcgggccggcgtggcgctgtgacgcagcgggagaa

SEQ ID NO: 459057 - DNA, 122 bp, Homo sapiens
tggtgtaagaataaatatctacctgactctctcaggtaaatttaggactacactaaatctcgcttatttactaaagtggctattgtaattataaaatgtgtcctttttgcacgtctgcctac

SEQ ID NO: 459058 - DNA, 122 bp, Homo sapiens
tcgcaccagtgcactccagcctgggagacagagcaagactctgtctcaaaaaaaaaaaagcggtgatggttcatttgacaggcacttccaagtttttatcatgaagaagaatttctggcgaa

SEQ ID NO: 459059 - DNA, 122 bp, Homo sapiens
attagcagggaggagccagtaaacacaagcacccacaggtgtctgcagggagggagggcgcggcacgcccatccccagagaataggtgccttcctgtgcgtgcacctgggcttgtatattgg

SEQ ID NO: 459060 - DNA, 122 bp, Homo sapiens
ggccaggatccctgggctgggggcgcgagcaggggcccggcgggcgtccgcgggggttcccggaatctgtgcctgggctgttgggggaggcctagatgaattccagtttagtctttgcctaa

SEQ ID NO: 459061 - DNA, 122 bp, Homo sapiens
caccagcggaaccctctccaccaggctccgcgtcgaggccctacggggcgtcaatacgcacgcgtactttgtgtcccaggtagctcgtctcttagccatgtacgcctctgcattccggtcac

SEQ ID NO: 459062 - DNA, 122 bp, Homo sapiens
aggacccagggtaggccttggggactgctggcccaagcacgagtggcggggacacagcgccggacgcccaagaccctccccagtccgcctaggctggcatttcttggcccccaccagcgtcc

SEQ ID NO: 459063 - DNA, 122 bp, Homo sapiens
ctgggagcagcagagaccaggcccaaagctgcgggcttacaacaggttagccatcccagtcggaaaggtctagggatgaggcaggggcggagacgggggagtactgaggtgagagaaggaga

SEQ ID NO: 459064 - DNA, 122 bp, Homo sapiens
ctaaaaatacagtctcaaaaaatcacatatctacatataatactaagacaagtaaattgtcggccaggcacagtggctcacgcctgtaatcccagcactttagaaggccaagacaggtggat

SEQ ID NO: 459065 - DNA, 122 bp, Homo sapiens
aaaacgagtcacgcggtttgtctgagtagactggggaagctgacaagctctcacctcactcgggaggcaggacctgtgggtatttggtgttttaagtttgaaatcatctgcagcctgtctga

SEQ ID NO: 459066 - DNA, 122 bp, Homo sapiens
gcaccccgcccaccgctccccgccccggacactaacccggggcccaggcctcggtcaccgcgggcctctcctggtccagagtctacgctgaaccccactcactgtttgccccgctgttccct

SEQ ID NO: 459067 - DNA, 122 bp, Homo sapiens
cctgctccagagtttctgccctgcccacacacacacaccctcttccaccctcagaggccccggtgtcctgccccacgctctaccccagagccccacgggtggctttataaaagtgccgggcc

SEQ ID NO: 459068 - DNA, 122 bp, Homo sapiens
agcctggaaagcccagggcttaaaacaacaacaacaaaaaacacaatatgcaggatcgttcggcttcagcagaacccaccgcaaagatggcggtgggacgaagccccttctcccgccgccga

SEQ ID NO: 459069 - DNA, 122 bp, Homo sapiens
ggggaagagcagaggcaccggctcggctgcaggtgggagggtgtccgggtgaggggtgagcgcggggtcggggagcggcggcgggggactgggcgacggccccggggccgggccgcgggcgg

SEQ ID NO: 459070 - DNA, 122 bp, Homo sapiens
ctagggagactgaggcaggagaatcgcttgaacccgggaggtgtaggttgcggtgagccccgagatcacgctattgcactccaacatgggtgacaagagtgaaactccatctcaaaaaaaaa

SEQ ID NO: 459071 - DNA, 122 bp, Homo sapiens
ggagatggaagttgcagtgagccgagattgtgccactgcactccagcctgggcaacagagcgagaatctgtctcaaaacagaaaagaaaagaaaagaaaaaagcagacagaaatgtatgggg

SEQ ID NO: 459072 - DNA, 122 bp, Homo sapiens
agctgcgcatcttcttcacaccctgcaaggtcaaagagcagcgctgccagcagaggggcgcggcggcccagctcgaccgccgcttgcttttccgcttcctggaggcggccgcagccggtcag

SEQ ID NO: 459073 - DNA, 122 bp, Homo sapiens
ttgttgagcacctgctgtgtgcccggccctggccgggagccttcgtgcccacagtgaccccgtctgcaaatgtagttccttgccctactcgcactggggagcaggacgcagagccgtgcaac

SEQ ID NO: 459074 - DNA, 122 bp, Homo sapiens
ttcagctgaaacgccacgggtctgggggaatagcgagggtgtgttacattttcggtcttccggtcagccggaaccactcacaccgctgctggtgctgtgtagggtgtacctcttcggagttc

SEQ ID NO: 459075 - DNA, 122 bp, Homo sapiens
cgggtgctggagaaggcggccctgaagctgggtacagcggcggggcgggacggggctgcgcgggcggctgggccggggaccccgcatcgccccaaacgagcgtttctcccgcagggatgcgc

SEQ ID NO: 459076 - DNA, 122 bp, Homo sapiens
tattattcacagaaattcaatggatgttttgaggtgccctctacttgatgcaagcctcggcgaggtggcagtggtggcctctgtccccatggcacagatggtctgttctgctttggaagcac

SEQ ID NO: 459077 - DNA, 122 bp, Homo sapiens
gtcaggttcatggcaggggcagcgtagagtggagagatagagatcagcagcccttccaagcggggactgccccagtgcactgctgataatagaggcagaagtgagagtgacagtcagatgga

SEQ ID NO: 459078 - DNA, 122 bp, Homo sapiens
gaatgaattctataaataattgagatagctgatggaacaaatagctgaaagaaaaacatacgcacttagcgtgagcctcaagctgctcctcaatccttcggtgacgtttagatctgagaagc

SEQ ID NO: 459079 - DNA, 122 bp, Homo sapiens
ttcctccaaccgccatagtaaagccaggtttctctggcaactgatatccataggcagacacgtcaccctggaggagggcgtatgcccttcagccaatcacaatcgtcttgtctaagttttag

SEQ ID NO: 459080 - DNA, 122 bp, Homo sapiens
tcctgcccacacagaactccctcctctcttgtgtggggtgcggggcaacttgccaccaggcgggatgcccctcacacagcaggtccctgccaccccatgactacagcaccccattactgcag

SEQ ID NO: 459081 - DNA, 122 bp, Homo sapiens
ttctgacattacaatatatgccaggcttatctaatattttttctgcttcagccttagaatcgaccatttctcccaagggctctggttgctttcattggataatggtagatagacaacaagat

SEQ ID NO: 459082 - DNA, 122 bp, Homo sapiens
ggcgaggcagccccgcccccggggcggtctcccgggacggccccgccccttgcccgcttccgcgtcagtgcctcaccaccacctgcccgcgcgccgccccatataaaggcgccgccgtcctt

SEQ ID NO: 459083 - DNA, 122 bp, Homo sapiens
ggactcacaggctctggggctggggctctgggggcccagtggcggcggagacggcagtggcggcagctacagcaggtaggctgggttggagcgccaggtgccaggcaccaggcaggcgggct

SEQ ID NO: 459084 - DNA, 122 bp, Homo sapiens
gccagcctgacagtccgtccgggttttatgaatgggtgacgtcacaggcctggcgtctaacggtctgagccgctggttcagacgctgacacagaccggcccgggaagggaggggggagactg

SEQ ID NO: 459085 - DNA, 122 bp, Homo sapiens
ctgtggcggggctttgcacctagttagctccttttgcatcagctgtgccccacctggctgcgtccggagggttgcaggaggagggaggctctgcacgcagacccgtgggtgcgtgcgggctt

SEQ ID NO: 459086 - DNA, 122 bp, Homo sapiens
tcctgttgttaacttgcaattacccatattgggaatctttacaccacagaaatccacaaacgctgcaaatcagagttctctttccaactccaagagccagttattaaacatgtgttagcacc

SEQ ID NO: 459087 - DNA, 122 bp, Homo sapiens
ctacggggaggaggtagggaggggagagtctggctttctcagtttgttgagtaaccccagcgggacatcctgcctcacatcctggcagttgaattagctgggcttttcaaggtcacaagaag

SEQ ID NO: 459088 - DNA, 122 bp, Homo sapiens
cgagtcctacgtgtgccggacgctggactgcgaggccgtgtactgctggtcgtgctgggacgacatgcggcagcggtgcccggtctgcacgccccgcgaagagctctcttcctccgccttta

SEQ ID NO: 459089 - DNA, 122 bp, Homo sapiens
tgctcctaccctgttagactataaacgcgtgggtgctcagtcgatgttggccaaccgcaacgactcaagatcaaaacccattaactccgaccccacagagcatcttcgatagatccaagctg

SEQ ID NO: 459090 - DNA, 122 bp, Homo sapiens
tgggcggggccgcctgtaagagaacgcggctaaaggtggggccaagcgtgcggtttgctgcgcctgcgtgaggaaaaagaggggggcgtggctccaggccggaagagggagtctgtaggggc

SEQ ID NO: 459091 - DNA, 122 bp, Homo sapiens
tttcagggactcgggagtccaaggcctcattccaaaaacactgagagattgggtactgggcgcacagtatgtctgtggggtcacgcagacctgggaaccagatcttagggcctgcagacctc

SEQ ID NO: 459092 - DNA, 122 bp, Homo sapiens
acgctggcacggctgcggggcgcccgctggggctccgggcggcacggggcgcgggtgggccggctggtgagcgccatcgtgcttgccttcggcttgctctgggccccctaccacgcagtcaa

SEQ ID NO: 459093 - DNA, 122 bp, Homo sapiens
cacagaagaggcgaggcagcagagatcctctattccagcaagctgtcgaagcctttgtcacgacgatcctgtccgacccgcgagtctgcccgctgggtcctctgctcagccgacgccaccgc

SEQ ID NO: 459094 - DNA, 122 bp, Homo sapiens
ttgattcatcccattatccccataaggatgggaactgttacttccctacctgcaatacttcgcagtgcttggctggagcaagtgctcagaccctgctcctggtgtgtcctgtggccaccagg

SEQ ID NO: 459095 - DNA, 122 bp, Homo sapiens
ctctggcaggctctctcttttaggctggcgatctgcattctcccacctgttggaacttcccgctcatcccctcctgaaggccaaggactctggctgacgtgcaccttcttagcttcctctgc

SEQ ID NO: 459096 - DNA, 122 bp, Homo sapiens
acctccatgagcctcaggatcttcatcaatacaatggaaatagtaatagtaccctccctacggagtcactgtgaggattaaatgaaatgaagcatgtgaatctgccgcacagtaagctcttg

SEQ ID NO: 459097 - DNA, 122 bp, Homo sapiens
tgtgggaggagagcgggttcaagtcctaaagcctgttgctgccccgcccctggcttgggccgctcccagactcccacaggcctggaaggtagctctgtgctctctgtcttccctggaagaat

SEQ ID NO: 459098 - DNA, 122 bp, Homo sapiens
cccgccgctccccggcagagccccgggaccccctaattggctgcgggcgctccccggctccgcccgtcgccgcagggcactctggaaactgtagtccccccacaccacgctccgcgagccgc

SEQ ID NO: 459099 - DNA, 122 bp, Homo sapiens
agccaggtcactctctgggtcttacccttggcttttctcattgtggaaactgccagacagcggtagtcagtgcccagcctgaggggatggcttcaaatggaggtaagcctgtagggatgggg

SEQ ID NO: 459100 - DNA, 122 bp, Homo sapiens
cgcgcacccgcacttcctgcccgccataccggccggggcgcccttcgctccgcccacacccggcagtcaatacagccgcccagagtcgttctcccagctgccccgggccccgcggagactgt

SEQ ID NO: 459101 - DNA, 122 bp, Homo sapiens
aaaaactaaacaaagagaaaagatcttgaggaaaggaaaaaaaaaaaaaaaaaaacagaacgagccagatggacgagaaggctgtactaaaaccagtccttcagggagttagtgcaaacttt

SEQ ID NO: 459102 - DNA, 122 bp, Homo sapiens
gatcgaatctccgccactcccggagaagaggcggtgagtcggcgcctctacgggccgcaacgtaggacaaaccactccaggacgcatttgcactggaggaaggcaggcccgcccccttcccg

SEQ ID NO: 459103 - DNA, 122 bp, Homo sapiens
gcacccagctgaagaccgcggtaccgtgcaggtggattaggacagcgaggggcactgtggcgtcgtgcaggtgacccaggacagcgaggggcaccgtggcgtcgtgcaggtgactcgggaca

SEQ ID NO: 459104 - DNA, 122 bp, Homo sapiens
ttcagtcttgaaccaagaagacatcaaggtcttcagcagccataattttcctgtgctttccggatttgaaatctacgttttctcctaggttaaatcctctatttacattctctgtgcctaca

SEQ ID NO: 459105 - DNA, 122 bp, Homo sapiens
ggcatggacaaaaaaaaaaaaattgtatgactaacatcatacaactgactgtggagtgaacgtgacccactgaccattttcaagggaacagggataatgactcatgctgcagtaacatgatg

SEQ ID NO: 459106 - DNA, 122 bp, Homo sapiens
gcttgcaggcctgttcccaaagcagcattccaggtgctctggtggacaagatgatgtccccgctggagtggtgactttgaagaaggcaacctcgatgctgaagtgtaaattctgaaatacat

SEQ ID NO: 459107 - DNA, 122 bp, Homo sapiens
ccgggcatgaaatgagtgtgattgcatcattttcatagaacctaatggcagctgtatgtacgtctaagacttcttttgtgtaagtcgaatgttcttcgaagtttccccacgtcatgatttat

SEQ ID NO: 459108 - DNA, 122 bp, Homo sapiens
ctccatctatggtttccggaggcctcaccggaagccctcgtgtgaggccgtgtgggaggccggaagttgcggcttcattactcgccatttcaaaatgctgccgaggccctaggatctgtgac

SEQ ID NO: 459109 - DNA, 122 bp, Homo sapiens
actaatgttccatccacaaacaatccacgcacagtctgaagccacctcccatgccatctgcggccagggaagatgggtctctcgcctgtcccacagtcccacacctggtctgcaaatcatca

SEQ ID NO: 459110 - DNA, 122 bp, Homo sapiens
ccctcacattcaaaatccaaccatgctgccattccgatcttgcaattccagcctccagaacggtgagaaaataaataaatttctgttgtgtaggccactcgagctatggtattttgttatga

SEQ ID NO: 459111 - DNA, 122 bp, Homo sapiens
ggcagatctggatggcgttcggcgtcttgatgtctgggccagacatgctggcagctgtggcggtggctgcaggagggcgcaggtgtctggcaggcctggcgcggaattgagttttagtgttg

SEQ ID NO: 459112 - DNA, 122 bp, Homo sapiens
gagaaggatataataaaggcataagtttttctcgatgttattgactctacattcgctaaccgccctcgcccctaggccaagaagagtcccagacgccgacaactaaggttcctccctttctc

SEQ ID NO: 459113 - DNA, 122 bp, Homo sapiens
gcaccctggaaaggcccaggtcccgcagctctccctccacgcgtggctacggtggaggaacgaagagcagctgtgagttcgtgggaaagaagggctatctggaataatacgagtccgggtga

SEQ ID NO: 459114 - DNA, 122 bp, Homo sapiens
ctgtagtgaccttagaaatataactcagctggtatttggaggataaatttgaatgggagccggactggaggacaatcttaggagacccgtacgtggggaatctttgttgtgccggtctgttt

SEQ ID NO: 459115 - DNA, 122 bp, Homo sapiens
cctagaggaagaggtatctggggacgcagcagggagctgggagcccctgagggtctgaagcggggaaggagagacagtctgctcttacccagtccttgctgggcctgtgccccggggtcggc

SEQ ID NO: 459116 - DNA, 122 bp, Homo sapiens
atagttggccagcgcttccctaataaatccccagcaaaaagggtcaccgtgagaaaatcccgtcgtgtgaaaccagtccggggaagaagaccatttaatacccgcagggcccctttctccct

SEQ ID NO: 459117 - DNA, 122 bp, Homo sapiens
aacaagggggatgaggtacgccatggagaggagactcttttacctgtttaggaagtctctcgtgtcctagaagggaaagaaaaaagcacaagtatcaatatgaatcaaataagacttcaatg

SEQ ID NO: 459118 - DNA, 122 bp, Homo sapiens
ggtacataaaaccgaccagagaaactgacgcctcacttatccctcccctcaccagaggtccggcgcctgtcgattcaggagagcctaccctaggcccgaaccctgcgtcctgcgacggagaa

SEQ ID NO: 459119 - DNA, 122 bp, Homo sapiens
ctgatgcccactttacagatgaaaaactccaggctcagagaggttaaggaactcgtcctacgtaacacagccagttaggtaagagtggatctaggatttcaacccgggccagcccagactcc

SEQ ID NO: 459120 - DNA, 122 bp, Homo sapiens
gaggcagctggcacccgggttgggggagctggcggggggacagctctgacaaggtgatgacgggcatcctgcggcaggatgcttctggggagagtcaccttcaagagagtgaagggaagtga

SEQ ID NO: 459121 - DNA, 122 bp, Homo sapiens
tcttttttttcccataacagtcctgaccaacacactattttacttattttgatttttgcccgactcctcccatagaatataatctccaagaaggcaggaaacattttttgtcttttagtcta

SEQ ID NO: 459122 - DNA, 122 bp, Homo sapiens
gccagcttgagggtctgaatcttgctcagcttgtccgagggcagcgtggggatgatcttccgcagcgcggcgaacgcctcgttcagcgactgggtgcgctggcgctcccgcacgttggccat

SEQ ID NO: 459123 - DNA, 122 bp, Homo sapiens
agtgggtatagccttttctctgctccacacctgagagatacaatacatgcctcagtggctcgtgtatcattgtgagtggcttcgtgtatcagtaaagaggggagatgtggtttgaaaaagct

SEQ ID NO: 459124 - DNA, 122 bp, Homo sapiens
attcccggtgatttttccaccccatacagatgaagacatcaaagggccccgccgcagtgacgaagacaaaagcatgaacagatctgggtccaaagaggctcggcaggtgcggtgggcacgag

SEQ ID NO: 459125 - DNA, 122 bp, Homo sapiens
cagaggagaaaaggggaactcgagagcttcaactaggttttcagtaagttatcatgaaatcgtgaggaactttgagatcccagtctgttatataaagtggtggtacttgggtactgaactat

SEQ ID NO: 459126 - DNA, 122 bp, Homo sapiens
atatacaaatgacaacacatgaatgaaaagagcagtgagattctgggaaggaaaactccacgttggttatttcacctctagggaaagtctgtttgcatttgagtcccacatgtggctttttt

SEQ ID NO: 459127 - DNA, 122 bp, Homo sapiens
caaactgggaggctcagggcacgaggtgcggcagaggagcgaatagaggccaggccaggccggcccaagtactaattcatcacagttgcaggtgtggttgactggaccctaactctgggagg

SEQ ID NO: 459128 - DNA, 122 bp, Homo sapiens
acttcccctcgcctcttatgccctacgaaactctgtggggttcaatggcaactgacaacccgggccaatgcacctgcgcttgagagcggccgcaagtgcagctacagctaagtgaccactag

SEQ ID NO: 459129 - DNA, 122 bp, Homo sapiens
cgaatctccttcaagtggtccttcaagccacccaggagcactgcagggcacacgacaaggcgttaatgctgagtctacacagtcaccgcattccctgagactaggctcgggcggaggctccc

SEQ ID NO: 459130 - DNA, 122 bp, Homo sapiens
atccaatgcatccgtcatcctcatggtcaaacacagccagccaggattctaactagaagccgagccccggagcctcggagggaatgaagcattttgcatgatgggtgtgggggaggtcatga

SEQ ID NO: 459131 - DNA, 122 bp, Homo sapiens
ctgaaggccgagggcaagggcgagcggcggcctgggggctttgaggcggccctcaacccccggctaaagggcctcgactatctcagcagcgcaggccccgaggcctccttccccggactccc

SEQ ID NO: 459132 - DNA, 122 bp, Homo sapiens
cgcttcccacctccacccccgaagtccgagcaccccgcgcccggggtcttcactccctcgcgttcgctgacgaggaaggtccccataccgcgaagtacattggccttggggtggggctggag

SEQ ID NO: 459133 - DNA, 122 bp, Homo sapiens
ggagaggatatccaaatgatatccctgtgtgcccatccctgttgtgcccatccaagttcccgacccacagaacatgttggcctaataaaattgttgttttcagccactaagtttggagtggt

SEQ ID NO: 459134 - DNA, 122 bp, Homo sapiens
tcctcggggctggagcccggctcgggatcgcagcactggtcgcggcggcgcaaacttccccggcccctaggccgtagaccccagaacccaccaggctgtgctctctctcaggcggcagggtc

SEQ ID NO: 459135 - DNA, 122 bp, Homo sapiens
gagacctgggtgccttcagcaaaggtcagatgcagaagccatttgaagacccctggtttgcgcggcggacgggggagatgagcgggacagtgttcacggattccggcatccacgtcattgtc

SEQ ID NO: 459136 - DNA, 122 bp, Homo sapiens
ctcagtgcccgcggatacgacgctcttgggtggagttgcgaggctgcggcacagctggcgcgcatggctctcacctgagactccggcggggcacgggaggcacggacacgcacgttccagag

SEQ ID NO: 459137 - DNA, 122 bp, Homo sapiens
atagtcttaagaaacaagtaaaacaaaaagtgcaccaaggtgtatctaccaccatcttggcgcccatgtgtagcccttgtgctacaagctctctgaaaagacaatgcccagctgagacaaat

SEQ ID NO: 459138 - DNA, 122 bp, Homo sapiens
tgttgctgagctcgtcgctcagcaggcagcgaaggctcatgaaggacgtggggtaccccacgatcttctccgcctctgacactacctgattccagtgggccggggacttggaggaccgacca

SEQ ID NO: 459139 - DNA, 122 bp, Homo sapiens
tagcagcgtctcttttccacgggagtccagactttggagcccaagggcctccatgatgtccggcaactggacatctcatcggagaaggacagtgagcggcactggcgcttgctagggggtgc

SEQ ID NO: 459140 - DNA, 122 bp, Homo sapiens
ggtgtgcaggcaccaaagcgtggacaggccatgctttgcttaacagcatggggctggccacggcaccagggcctctgccagcctcacgaggcccctcctggcgtggccataaaagccacagc

SEQ ID NO: 459141 - DNA, 122 bp, Homo sapiens
cctccgcagctgctggcccgggtgctaagtccctcattgcccggggccagcagggctggccgactgctccgagtgcggggccgccaagcccacgcccacccggaactccagctggcccgcaa

SEQ ID NO: 459142 - DNA, 122 bp, Homo sapiens
ctctaaaaagtgacattgatgccaactgccagagctggtacccatgccatctgctagtgacgtcacagggcagagagagccatgtgatcctctctcttgggaccttcattctgcactgatca

SEQ ID NO: 459143 - DNA, 122 bp, Homo sapiens
gcatttgttatctactgacttttataaaataaacaaggaggcttatgcgattgtacagcccgagttcgcaggagatatgtgaccacttttgatctgattccggaagcaaattcactttaaca

SEQ ID NO: 459144 - DNA, 122 bp, Homo sapiens
ggagctagtaaccttggtcaaacgattcctccgaagagtcgctgaaggaggaacgcgcctcggcctctcgaagcagcagacaaaacggctgcttcctgctggtggccggcttgggtttcaga

SEQ ID NO: 459145 - DNA, 122 bp, Homo sapiens
gtgagccctgggagggaactgaagacccccaattaccaatgcatctgttttcaaaaccgacggggggaaggacatgcctaggttcaaggatacgtgcaggcttggatgactccgggccatta

SEQ ID NO: 459146 - DNA, 122 bp, Homo sapiens
cagttttcaaggaaatggaggagctgttttttcccacggagcggcggccctgggaggggccgggcccagaggttccggccgcgatgccgtcagcgccttcggcagagtgactgaagcgagat

SEQ ID NO: 459147 - DNA, 122 bp, Homo sapiens
gttgaaaaccattcgtgataatataaacgggcctgtaaacgttagctgtgtgggaggttacggaccccggcaggagcgcccaccgaaatcctgtccccagctgaagcaacacgacccgcatc

SEQ ID NO: 459148 - DNA, 122 bp, Homo sapiens
ccccgaccccgcttatttatttgtagggtttgcttttaaggatcggctccctgtcgcgcccgaggagggcctggacctttcgtgtcggacccttgggggcggggagactgggtggggagggt

SEQ ID NO: 459149 - DNA, 122 bp, Homo sapiens
gctaagaaattaacctttgacaagtactattggattcacttatttctatcagaatacgttcgtcccagggctatccagaccccagccagcagtacacaagtcctcagcagtacccagatgac

SEQ ID NO: 459150 - DNA, 122 bp, Homo sapiens
ctttccacagcgcgggggaaccggaggctgcaggatggtcaagctgacggcggagctgatcgagcaggcggcgcagtacaccaacgcagtgcgcgaccgggagctggacctccgggggtata

SEQ ID NO: 459151 - DNA, 122 bp, Homo sapiens
gctgggaatcaccattccttttaacttttgccaatctgataagtgtggaatgtgtcttttcgtatttatacttctttgattattggtgagagagaacactgtatcctaccacagatgccatt

SEQ ID NO: 459152 - DNA, 122 bp, Homo sapiens
ctgtgggccatacggtctctggtgcagtttctcaacatggctgttgggtgaacacaaccacgcacagaacgcaaaccaatacacgtggctgtgggcccagaaaatgttatttatggacacaa

SEQ ID NO: 459153 - DNA, 122 bp, Homo sapiens
tgaagataaagaattgacttagcaacatgaagttacttgtgatcttgaggatagcaatttcgatggaatggtgggaatgaaagcctgattgcaatgggcttaggagagaaattggccacgat

SEQ ID NO: 459154 - DNA, 122 bp, Homo sapiens
ctagggactcctgagttagttaacagagcagggaagaagactgactctgccattaattcacgagtggcctggggccaatcctctctgggcctcaactggaaaaacagagaacttgatcaaaa

SEQ ID NO: 459155 - DNA, 122 bp, Homo sapiens
agggcctgctcgagaggacaagccgtcctcgcttcaagctgcagtgaatgggccacgtcccgagccctggtccggctcccaggaggccacacacactccgtgcgaagctcaccgactccgga

SEQ ID NO: 459156 - DNA, 122 bp, Homo sapiens
acaaatttttcagattccatctaaagcatccttaggctgaataatgaagaattcagttctcgtccccaccccctctctctgcctttctccacacacacataccctcccccgcacccatttca

SEQ ID NO: 459157 - DNA, 122 bp, Homo sapiens
accatctcagatagggttcacacatccctttcccgaaccctcccaggagcccctcgtgggcgcccaggtcctgcctgctgttgtggcccaggctcacctggagcaactcgactcttcgttac

SEQ ID NO: 459158 - DNA, 122 bp, Homo sapiens
cagcagaatctactgcactggctgttcctctgtctggaacactcttccttgagagatcctcgtaactaaatcctttagctactacaagtctagctaaagtcttgttaatgaggcctcttcca

SEQ ID NO: 459159 - DNA, 122 bp, Homo sapiens
aacgcgggatttcagcagggccaaaagagtgattgagctctgactggcgacccgacccggcggaaaccacctcgacagcctccagaaaggggcgtggctgaaaatgtaggggcgtggccacg

SEQ ID NO: 459160 - DNA, 122 bp, Homo sapiens
ctgtatagccttgggctgaccacagcctcccagcttgcatcttgaggctgtttgtcaagccgggaagtaacagctcccatcacatgcaaccaaaataaatacaacagctgcagtccccggac

SEQ ID NO: 459161 - DNA, 122 bp, Homo sapiens
tctgctcttgttcttcatcccgggtgtggttatggccgtggcctacgggcttatctctcgcgagctctacttagggcttcgctttgacggcgacagtgacagcgacagccaaagcagggtcc

SEQ ID NO: 459162 - DNA, 122 bp, Homo sapiens
aacaagcccccaggcccgaagacgctcatccccgccgggcaaccccgcgagcgcaggctgcgggacgaggaccttcatgctcgccgctcccgaacccccgtccgctcctgcggtcccggtgc

SEQ ID NO: 459163 - DNA, 122 bp, Homo sapiens
ttgtggagacagggttttgccaaggtgcccaggcaggaactcgggctcaagtgatctgcccgcctcagcctctcagagtgcaaggattacgtgagccaccatgccttggcatgatacatttc

SEQ ID NO: 459164 - DNA, 122 bp, Homo sapiens
catccaaccaccaccaaagcctggcaattttaccttctcaatatggctacaatttactgacgtctctctgtttactggtcaccatcagtcccagctgcagctcatgtcattcagggcactgt

SEQ ID NO: 459165 - DNA, 122 bp, Homo sapiens
ggagtcctggaaggggacgacgcccccggccaggtgagggcccagacgtgggggcgtagacgctgaggggtggccgggtgggtctgcggctctgaggcctggctttcattctccatcagtcc

SEQ ID NO: 459166 - DNA, 122 bp, Homo sapiens
tgcgggtacttttgagtctatctcaacccctcccccttggctgtcttccatagatgcacacgcgcacctcccgggcaggcagcggacgctgagcaaacggacggacgggctggagggctggc

SEQ ID NO: 459167 - DNA, 122 bp, Homo sapiens
aggtaaaaaggatgtggcttttaaacactcatgcaccacggagagtcccttgccccctcccgcctcccccccttctatttgggacaccctccatcaaagcaaacaggcttctcaggaatccc

SEQ ID NO: 459168 - DNA, 122 bp, Homo sapiens
cctctgcagccagccaccggagggcagctaccagccagccaaagccccagccccttcccacgacctcctcacccaggctcccccgggtgccccgccctgactcacggccccggcccagggtc

SEQ ID NO: 459169 - DNA, 122 bp, Homo sapiens
cacatagttttttacttgtgttctttccctgtaaatgtcaaccacttacactcaaagacacggaaggaaagggaaagatatggcaatcatagttccttttcttttcaggttatcctttgcaa

SEQ ID NO: 459170 - DNA, 122 bp, Homo sapiens
tgtgaccttttccagtaaccacagggcggggagcccctgctggctctttgaaaggagcttcgtatgttctccctgcagcttccctgataccccacccccactcctgaagctctgagtcagtg

SEQ ID NO: 459171 - DNA, 122 bp, Homo sapiens
gttttcttgacctatatagcccccagcaggcctaaaatctgtgtcctggggctaatgttacgtacagtgatgactctagaaaccagtctgttctgaaagctttcacctttcttcaggagcga

SEQ ID NO: 459172 - DNA, 122 bp, Homo sapiens
tataatatatctttaagttagttccttggagacgtcggagtttttgctagcttgacatcccgggctcacaactggcgggaaatagcttaaaaattatattgatgctttgaggcctttccttg

SEQ ID NO: 459173 - DNA, 122 bp, Homo sapiens
cagctgaccgcagacctcgacggctcctttccctacagccatggtgactggatctgcttccgtcaggtaggttcagcctgcagctgctgcacatgcgacagtctctggggactttctgttat

SEQ ID NO: 459174 - DNA, 122 bp, Homo sapiens
ggccttgagctgcaccccagggggagaactgccaggagatcggccttctccctcacagatcggcacaggctccatggggaagggcacagcacaggcccatccctagtgacctggctggcaag

SEQ ID NO: 459175 - DNA, 122 bp, Homo sapiens
atccagcgaggcgcccattgccactcctgttcgggctaaaggttcgccattgttcctgcacggctaaggctcgggtttctgctaatcaagctgaacactagtcactgggttccacgttctct

SEQ ID NO: 459176 - DNA, 122 bp, Homo sapiens
cgagactgtgctgaaaccgatctgtgcacgccaagcagctctcagccagcgctcaacagccggaagcagttctgccacggtcatcctccttgtaataaaataaagaacacccgatgcagaaa

SEQ ID NO: 459177 - DNA, 122 bp, Homo sapiens
ggcgctgagtgcacggctgggctccacgctgatttctcctaatgaattaataatggcgctcgggcgggcgggggtggccggctgcggaccgcggagagagccgaggggaaggccgtggaggg

SEQ ID NO: 459178 - DNA, 122 bp, Homo sapiens
ggggtcacatacgggttccctcaccctgccagccgcccgcccgcccggcgcagatgcacgcggctcgtgtatgtacatagacgttacggcagccgaggtttttaatgagattctttctatgg

SEQ ID NO: 459179 - DNA, 122 bp, Homo sapiens
agcgcatccgggagatcatggccatgaacgggaaccggcctatcccacacatagacccatcgcgccctatgaccccccaacagcgacgcctgcagcagcgacgcctacaacaccgcctgcgg

SEQ ID NO: 459180 - DNA, 122 bp, Homo sapiens
tcaaagctagtacagtgtttccctggtactgagtcatacttttacaatgacccaggcccacggcctcaactgatgacaaataatgagaatccaacaatcattctttctcgcatattcacttg

SEQ ID NO: 459181 - DNA, 122 bp, Homo sapiens
ccgccctgcccccgggcccatcttcaggtctgatgcctgtcctgggtgagggtgtcaccgcggcagagtgcagggaattcatgccggggaagaggttcccaaacaggaagggtggtggcagg

SEQ ID NO: 459182 - DNA, 122 bp, Homo sapiens
agagaggtaaagcatctagcccaaggccacccagctgaagcagggcagtgggaagggagacggggcagagctgggcttcacaacccagtcactgtgcactctgaaccctgttccttccacta

SEQ ID NO: 459183 - DNA, 122 bp, Homo sapiens
tataccaggtgcagctgcgggcccttgagcacgtggatgggacgcacgtgtgccagctgccggaggaccagaagggcaacatccatctgaaaccttccttctccgacggcctcaagatggac

SEQ ID NO: 459184 - DNA, 122 bp, Homo sapiens
aaaaggagcgggggcaaaaaccccacaaaaacccgcggcgacggggggaaaaaaccgcggcggcaaaaagcctcagcggcaggagcaaaaagccgccgcagtggggataaaaagctgcggtg

SEQ ID NO: 459185 - DNA, 122 bp, Homo sapiens
ctagctcccaactggattactttttgcttgttctcagaaatatgcttcttcttttgtaatcggcagtcgcaatgatttgtatgacagctgctagcccaagagagagttccagaagagggcta

SEQ ID NO: 459186 - DNA, 122 bp, Homo sapiens
ggccccctgcccccggcaccctacaccgacaccggcgtgtcacccatattgtgacatcatcgtaatttctaatccactcagcccacaggtcgcgggcgtggcccttccctcactgtgtgcgt

SEQ ID NO: 459187 - DNA, 122 bp, Homo sapiens
attctctttcgtttggggaaatgcagtggtaaaacatcagagctggtcctgcggaaataacgaagtggccaaggtcatcgaaaggatctggcctgttgttcctctgcttgcccctgcccacc

SEQ ID NO: 459188 - DNA, 122 bp, Homo sapiens
ccctcttgtgtcccacagcctcacctgggcctcgctttctgcactgcccggggctgctcccgagactgtgctgaaaccgatctgtgcacgccaagcagctctcagccagcgctcaacagccg

SEQ ID NO: 459189 - DNA, 122 bp, Homo sapiens
agccgatggaccaggcggtgccgcagcgacagagggggttgagatcggggctttcccctgcgaccagctcgcagcctgacgtcggcctcgctctggggaaaccaaggcacgggcacgcgcgg

SEQ ID NO: 459190 - DNA, 122 bp, Homo sapiens
aaaatccggaacactgatgtaaggtacctggaagtgcttcggtcaaggaatagtctgaggcgggtatccaggcctgcacgagtcagcaagtttggcacgcaggcgcacacctccacttgtta

SEQ ID NO: 459191 - DNA, 122 bp, Homo sapiens
ttttttaatacagatagctgctatggctgggcgatctcagaggatcgcctgagtcgctcacgcctgtaatcccagcacttaggaggccgaggcgggtggatcacctgaggtcaggagtttga

SEQ ID NO: 459192 - DNA, 122 bp, Homo sapiens
atgagaccggatgcaatggtagaatccaccctcctccccagtattagagcccaggggcctcgtcacgggctaatgaagctctctggccccatctcgccggcatctttcttggcaggatgccc

SEQ ID NO: 459193 - DNA, 122 bp, Homo sapiens
ctggagtttccaaagatctctggatcctgtagtcctcctcccgcgccagccaccgaagaacgctgcggacccagctcgctcctggtagcaagacccgaactgtaaggaacaaaaccctcgtg

SEQ ID NO: 459194 - DNA, 122 bp, Homo sapiens
tcaatgataagaaaagagggtgctcaggcaggcgctaactttccttaatatccacgccagcgccgtcctcattggctgcccggcccgcgtgacgtcatggcggctagagttgggcacagctc

SEQ ID NO: 459195 - DNA, 122 bp, Homo sapiens
gatctgtgtctagggagatctgctatgccatatcaagaccttgctcatctggtgatgagacggggctgtttgccttggaagactaaagaaagggtgaatattcacatgaggtaagaacttga

SEQ ID NO: 459196 - DNA, 122 bp, Homo sapiens
tctgccttgtccagcttttgcactatctcatgaaatattgttagactggatggtttgccacgggtacaagagtctgcccagcagcccgaggagaggctggggttgtaatgaaggccacgggg

SEQ ID NO: 459197 - DNA, 122 bp, Homo sapiens
cctaaagtaagaagaccagaagcgaaaggtagggctcgccctctccctaacagtccttcacgactcaggtcacacacagaggatgcccacctccggccccgccgacccggctccaaaaaggc

SEQ ID NO: 459198 - DNA, 122 bp, Homo sapiens
aaaaagttcattgctcttctcctcttagtcagccaaggtgttctctgcctacttagcggtcgctccagaatcaagctcggatgatcccgccttccatgtcgttgtgtcccctcacagtattt

SEQ ID NO: 459199 - DNA, 122 bp, Homo sapiens
tgttgaaacacccacgtggggctcctccaatggagacgtccttctcccagagaaagccttcgtgagcgtgtctccaggagtcaggcctctcaggtgattatgtcttaggagaaatgcatttg

SEQ ID NO: 459200 - DNA, 122 bp, Homo sapiens
tttggagcaggatgcgagcccgggccacgattgggtcaggttgcgccgctcgcgtggccgcgggaatccccgaccggccccttccctagggtccctcctggcgcacctgccccaggtgagtc

SEQ ID NO: 459201 - DNA, 122 bp, Homo sapiens
gctctggttaggtgaaggtgcctgggggaccggtgtttccccactggccaggcagggacccgggtagatcctctccagttctcaccaggacaccccagccttaccgcgccctcctggactac

SEQ ID NO: 459202 - DNA, 122 bp, Homo sapiens
gaaatcccccgcagttagcggtcaacagaaagggcgacacggaacggggttcctggcacccgagctcgccgcaccgaagtctcctggtaacagcgacacgggaccgggctatgtgaccacac

SEQ ID NO: 459203 - DNA, 122 bp, Homo sapiens
ataggcagctgtttgtgtcagttcagctgttacagcaggtccccctcctcctctcatctgcgttgtggtatagagactgtgtcagggcatgcttcaggaaggagggagtggtttgtttgtat

SEQ ID NO: 459204 - DNA, 122 bp, Homo sapiens
tgggttctagggggttgggagaaacaccgggcaaccctggactcttctggctgtgggtggcggcggcgaacctcacactgggagttcctagtgccccgctgtcagcctcgtttccgttaatc

SEQ ID NO: 459205 - DNA, 122 bp, Homo sapiens
ggtcccagggccagagataaaaggcgattgaaagagcaaagcggactctctcagttttaacgctgcaacttttgcaggcaggcgggggaacttctttgtgactaatctgaatttccccttta

SEQ ID NO: 459206 - DNA, 122 bp, Homo sapiens
tgtaaatcatgatgttaatgagtcagaaagaactttcccaaagcttgtcttcctggttgtcgcgtctggctgggacatccactaatagcactgggagagtcaacattctgctgctggtgact

SEQ ID NO: 459207 - DNA, 122 bp, Homo sapiens
aggtggggaacctgtggcgcctacaacaagcaacacgtggaattgaatgttgaagagccgcgcggggccgcggagtgcgcgtgcgcgcgccgccgctgctgcccgggcccgcctggagccct

SEQ ID NO: 459208 - DNA, 122 bp, Homo sapiens
tgtatttttagtagagaaggggttttgccatgttgaccaggctggtctcagattcctgaccgcaggtgatccgcccaaagtgctggaattacaagtgtgagactcatctttttttttttttt

SEQ ID NO: 459209 - DNA, 122 bp, Homo sapiens
cgccccgccccgggtgatgctgcagcagccgggaccgcggccgggcaggcagcagcccagcggggacagggatgcctgccgtctccacccacaggtaccaccgtctcctccgcgccctccgc

SEQ ID NO: 459210 - DNA, 122 bp, Homo sapiens
tttacctcctttttccacggcccttcggtagtggcaggtgaacttcacctggagaggggacgaagggacagtccgcccgaagtaggtttgggctgtctcttaccattactagtaaaggccag

SEQ ID NO: 459211 - DNA, 122 bp, Homo sapiens
ctcctggccgtacacaaacgtgctgtgctctggtctctcccatgtgggaataaatccatccgatcacctgcaaagcgttgccttcgcatcctggccctcctccttcccgactccacggagac

SEQ ID NO: 459212 - DNA, 122 bp, Homo sapiens
ccttgactttgtagatgcatcactccaatcctctacctatacctggagttctccatgtgtcgttcctttgtacatctgtctctgtgtccaaattttctttctttctttcttccttttttttt

SEQ ID NO: 459213 - DNA, 122 bp, Homo sapiens
ttagggccataaatcctatctccgccccctcccctgacagcccggcaccccagccccgtgcggtccccctagggataggggaagaaaggcccttgtcgcttagccctgcccaaccccactca

SEQ ID NO: 459214 - DNA, 122 bp, Homo sapiens
aacgtgagcagtccccacatcagcaggtatgaatccatcttcctgacccttgggaccagccggggcagtgaagcggaggtctttctctgcagaaggcccagttgccgtcagcctctttttgg

SEQ ID NO: 459215 - DNA, 122 bp, Homo sapiens
gccgccggcaacttcggtgcccggaccctgtcggctctctatcttgagggagtttctcatcgcctcttggttccaatgaggtgtgggactttccagcttgtcccctctcccttagggaggct

SEQ ID NO: 459216 - DNA, 122 bp, Homo sapiens
cctcacctgggaagcgcaaggggtcagggagttctctttccgagtcaaagaaaggggtgacggacgcacctggaaaatcgggtcactcccacccgaatattgcgcttgtcagaccggcttaa

SEQ ID NO: 459217 - DNA, 122 bp, Homo sapiens
cggctgggcttaccgcgcagggcgcagccatggcggggctggcggcgccgaaggcagctgcggtggccgttgcggcccgttcagtttccgcgcccccaacggccaccaatagcaacgcgggc

SEQ ID NO: 459218 - DNA, 122 bp, Homo sapiens
atgatctgatatggttgaccacagtctgaaggcatagaaatgctgttttattataaagtccgggccaggaaagaaatagaggatattgataattaggcctctgccctgtgggagctgttttt

SEQ ID NO: 459219 - DNA, 122 bp, Homo sapiens
gtgtgacgcacgcgccggaaaaagaggttacggggcgccggtgggacaaacgcagccagacgccggacttgttgggtggcgttagaaagtaactctgtttttagtcttcttgaacaaaatta

SEQ ID NO: 459220 - DNA, 122 bp, Homo sapiens
cccagtgccagggacctgtgcccacgtggtctcaccccaccctatgctacctcatcttcccgggaggaagctccttcagacaaggtgagctccaggaggccacagagccagagaggccaggc

SEQ ID NO: 459221 - DNA, 122 bp, Homo sapiens
ggcgaggtcttcgccatacagctgacatcggcgtgagcccgctcccctctccccgcgggccgggggacgccccccagactcacacgggggcttatttattgctttatttatttacttattca

SEQ ID NO: 459222 - DNA, 122 bp, Homo sapiens
gatgctctccgactaacatggatgtcccaccattccttgcagtggaaggttgttccttggcgcagtgagtgaagaacatgcagcgattgctaatgggtttgggaagcggagactccttcctc

SEQ ID NO: 459223 - DNA, 122 bp, Homo sapiens
gaaaggaaaggtttgaaaatcttacaggaaacgtcacgtggacgaggtggacacagcgctcgttcgccctcctgcacgtccgctgagccgcagggacaggcaacacgctgtggcgagtcctc

SEQ ID NO: 459224 - DNA, 122 bp, Homo sapiens
agctgctgcccaccgcaggccgggggtgggaacccctggagcccggccgcgcagtagccgcgatcctgccaccagggggcagcaagtggaagggaccctagagccctcacctgggagcggcc

SEQ ID NO: 459225 - DNA, 122 bp, Homo sapiens
tgtagaaagatcaattgaaaaagaatgcatcacctggtcatgagccttaccttttagcagcggcagaggtgttaactcaataggcttgccttgagacctaaactgtgaggaactttgcgacc

SEQ ID NO: 459226 - DNA, 122 bp, Homo sapiens
cccggagtggagttatattacctgtttctttgttctgatgggaccccagagaggacatcacgctttgtaactggttcttcaaggggagaagcaaatgtgtccctgaaaacttcagctgccgc

SEQ ID NO: 459227 - DNA, 122 bp, Homo sapiens
cgaagacaacctgctaggaccctgataggcgtacacctctcactcccactcacgcgccgacgacatgggcttgtctccgttactcatccaagtttgtcttgagactgggctgtgagccggca

SEQ ID NO: 459228 - DNA, 122 bp, Homo sapiens
ttaggtgttgtgcctccattgggaacagttgctataggttgaagagaaattttgctctcccgtttcactgtcacaggagcagatgcccccagtgttgggcctcggataatggtagaaattgg

SEQ ID NO: 459229 - DNA, 122 bp, Homo sapiens
aactctacttttgaaagggactgctttgcatcagaatctctccagagtgaagggtggacccgctggtttctgaagccgctgcagacgtgggtttgcagattggcccaatctcagccccgctg

SEQ ID NO: 459230 - DNA, 122 bp, Homo sapiens
ttaactgaatgacaaaccttgaatgaggtcacaaattgacatatgtcaacacctatgccccgagggtgggaagggtaaggtgtaaaggcagttaaagagtctctagtggaaaggcttggaac

SEQ ID NO: 459231 - DNA, 122 bp, Homo sapiens
tggagctgaacggcggcctgtgtctggaggcgtgcggcgcgctggaggggctgtgggccgcgccgcggctggggccggcggccgacgaggcggtggcggcgccgctggtggagaccatgctt

SEQ ID NO: 459232 - DNA, 122 bp, Homo sapiens
aaggcacagaaagattgagtaacttgactgagttcacacagacagcaagtggcagggccacgacataagttgggccttctgacttgagtcttgctcctagccactatattacaccacaaccg

SEQ ID NO: 459233 - DNA, 122 bp, Homo sapiens
ccttacaggtaccaggtaccaggaggagtcaccctctatagactagggaacttcaccttccgtgagatttagtggcttgctcctcatgacacagttagcgagaggcaaggctgaattcaagt

SEQ ID NO: 459234 - DNA, 122 bp, Homo sapiens
gcagcatccgctggaggcccaggtaagcgccgagcgcgcggcctctgcctggaggtggggcgctttgagaggctccgccggccgtaccctccctttgcgggctcccgcggtcttccttgcta

SEQ ID NO: 459235 - DNA, 122 bp, Homo sapiens
accagataactagcctgaggctggagagtgtggatggatcccaggcagccacaggctctacgatctgtcacctcctcctccctgccaggcttcccaccaatggcccagccagcctgccttct

SEQ ID NO: 459236 - DNA, 122 bp, Homo sapiens
ccatcgtgggccttttgtgtctggcttacttcaccgagcataatgtcctcagggtttatccgcattgtggcaggtgccagaatccccttccttttttaaaggctgaataatgctttaccgta

SEQ ID NO: 459237 - DNA, 122 bp, Homo sapiens
gccatgaataagttttaaaatatttaatttcagatcatttttcataacagaacattccaacgagcaggtttattaggtttagggttatcaacctaagctgattatcttaaagtgaaaaaggg

SEQ ID NO: 459238 - DNA, 122 bp, Homo sapiens
cgggcgcggagcaagctttgacctttggaactgggcaccgcagccccaatatctgccctgcggtcagagcaacctgaacacttcctagtgaattgcaatgtaaaggtgaccagcgccgccac

SEQ ID NO: 459239 - DNA, 122 bp, Homo sapiens
gacttccggcacgaaggggcggggctgggctcgtggctgagccagcagctgcagcagctacgggagtggccgggtggccggcgggtgccagccgccatggaggccgtgccccgcatgcccat

SEQ ID NO: 459240 - DNA, 122 bp, Homo sapiens
gcagactcaggcctagggtcagccgggccttgccagactcagtgggactcagcagcaccccgttcctcctccaggaatccgggactggctgtgtcagccaccaggctacggggccaagagag

SEQ ID NO: 459241 - DNA, 122 bp, Homo sapiens
ctgttccttaactttactgaagcatatatatgctggcaatatacaaataaattatcacaacggatttcagcagtgagaagtatatgaagttgaacataacagccctccctcagtacccattc

SEQ ID NO: 459242 - DNA, 122 bp, Homo sapiens
cctctcaggacacgggggcctcaggctcattcaggagtgctgggctgggccaccaggtcccggtctccggggatgccggcctcggcctgcctggtgggggcagcagagcagtgcggtcggtc

SEQ ID NO: 459243 - DNA, 122 bp, Homo sapiens
agcagcctggccaacatggtgaacacactagtctgtactacaaatacaaaaattaaaggccgggtgcagtggctcatgcctgtaatctcagcactttgggaggccgaggcaggtggatcacc

SEQ ID NO: 459244 - DNA, 122 bp, Homo sapiens
cgccggcgggccgcgcgccccgagacggaggaggccggagactcccgccacgccaccccgcgcccatctcacctgccgcctcacctgcccggtcctggcctccaaccggcgggcgggggcgc

SEQ ID NO: 459245 - DNA, 122 bp, Homo sapiens
ggctttgccgcccccgccaccatcaagcgccttacgggtagatgactttttcatctccatcgccccgcaaagggggttggccacagtgatgtgcaccaatgctgagcaaattcacaacaccg

SEQ ID NO: 459246 - DNA, 122 bp, Homo sapiens
gagagagaaaatggaaactttaacctcctggttaaattctatttaaccaggacgccgattcgggctacaatgcgtggctttcgtatgaattgcagccggcggcggtaagttaaattctatta

SEQ ID NO: 459247 - DNA, 122 bp, Homo sapiens
gcaggaggatgagagggctgggagcgcctggtggtgctattttcaaacggcctccaccaccgtgcgaaaagcaaaggcagaagcagcagcggggcaggggttacgttaaaaggcccgaccgc

SEQ ID NO: 459248 - DNA, 122 bp, Homo sapiens
aaatgaaaggaaattagcactagtataaaagacctgcactcctctgtttattgtagcactcgtcagaatagcaaacatatggagtcaacctaagtgtccaccaacagatgaatggatgaaga

SEQ ID NO: 459249 - DNA, 122 bp, Homo sapiens
tgagcaagaggtacttgatttagtcactttttctgtccccacataatactgtagttactacgatgctttcaagtatgatgaccatacccttcccagtggaatacaagttctttggggccggt

SEQ ID NO: 459250 - DNA, 122 bp, Homo sapiens
cgggcacgggtctgcaagaaactcagctcccaggccagccgtggctcaggaagcctcccacgtcgggtagaatcccaggaatccacccttgcccccatcctcccttaacttccccaagcctc

SEQ ID NO: 459251 - DNA, 122 bp, Homo sapiens
ccttgcatgtccgtgtccgggttgcagcatgaagcgtgccagctctctgaatgtccttaacgtgggtggcaaggctgctgaagatcgctttcaagtaaggagcctaccccgaattgtgtcct

SEQ ID NO: 459252 - DNA, 122 bp, Homo sapiens
tgaggggaggagcagtaaggcgcagcctggagcggagggacctggcgtccagtcattgtgcgctgggaaggcggtgatggcgacggaatttgggacacgcggggcgtcccgggggcagccag

SEQ ID NO: 459253 - DNA, 122 bp, Homo sapiens
tgtctgtaacacctgtcaatacttgtttgtattgatttctgatattcttgcagctgactacgtgtaattgggcagatcagctttgcagtagattatgctgcatcctcgtggcaaaattctgt

SEQ ID NO: 459254 - DNA, 122 bp, Homo sapiens
gagcatttgtgctcagaggagggtttaaaacatttttttacgtcagagctgcaccactagcgtactgaatacacacacacacacacgcgcaagcacacacacacacacacacactgcctctt

SEQ ID NO: 459255 - DNA, 122 bp, Homo sapiens
cggcgccattttgtgctaggagcctgataaaaccggcccggttctgtggaaagtgggcggcggagccagggtccctggaatggcggagactctgtcaggcctaggtgattctggagcggcgg

SEQ ID NO: 459256 - DNA, 122 bp, Homo sapiens
cggagcaaggatgtctcttgctttttgcacagaatccacttatctccccagtggctcttgcggggcctttaatgggctgtgctcagtgactgcaccgtgtcggagtgggtatttcttgtatt

SEQ ID NO: 459257 - DNA, 122 bp, Homo sapiens
gaggacggaggtcaccgagaggcagtgagaggtcagccccgacacaggagcagttttccgcgggagctttgctggagggaccctgccagcctccactgaatcctttcccccacgctgacggg

SEQ ID NO: 459258 - DNA, 122 bp, Homo sapiens
ggtgtggctgtggtgccagcagctggatgggggtccaggtgtgtaaataaggaagtgccgcgtgcctcgagggccagggatgcccgagagccaatgtttattatttgccaactggaaacgaa

SEQ ID NO: 459259 - DNA, 122 bp, Homo sapiens
ttaaaatgtggaaaagaatacaggattttggtaggtggcaatgaacccacaaataagtcccggccttgtctctctgtaggtaggatgggctttttctgtggaagatgtttgataataatagc

SEQ ID NO: 459260 - DNA, 122 bp, Homo sapiens
gtctattcatagccactgtaaaagtaacattcatttttctgttttttaatctaatgtctgcgtcttcagtggttctcactggctaatctaatcagtgtgttctagggaggtttattccttgc

SEQ ID NO: 459261 - DNA, 122 bp, Homo sapiens
ccaggtcagaggtggcaacctgtacatggatgacacactgggggactgggcctcgccctgcggggggacctgggtgggtgggaatgccagctgcccggccagaatcccacgagactggtcag

SEQ ID NO: 459262 - DNA, 122 bp, Homo sapiens
gaagggctcctcaagcacggccagggcggacgcctaggccgaggaggcgccaagagcgatcgagggctgctagcacgttgtcaccgctcacaactactggaaaacattcaggtaggacctta

SEQ ID NO: 459263 - DNA, 122 bp, Homo sapiens
cctgtgctgccttcgagttcctaagtaccaacctcccctgaggtaatccaagggaggagacgccaccaggccacaagtgagctggtcgtttcctcaagctcacttgcgtctccaagcagtga

SEQ ID NO: 459264 - DNA, 122 bp, Homo sapiens
cacacatggcgtcatgtctagttctctcacacatggcatgtctagttctctcacacatggcgtcgtgtctagttctctctcacatggcgtcgtgtctagttccctcacacatggcatcgtgt

SEQ ID NO: 459265 - DNA, 122 bp, Homo sapiens
gtaccgccctttgcctctgctggccacacttttattatgcatctaaggctacgccactgccgctgctgagacgcagctcttggaggctcttcttagccctctttccctctctttgactttca

SEQ ID NO: 459266 - DNA, 122 bp, Homo sapiens
ttagcacccgggccagcggctgcggagggtgtactgggtcccccagcagtgccagcccatcggcgctgagctcgatttctcgccaggccttagctgccttcccacggggcagggctcgggac

SEQ ID NO: 459267 - DNA, 122 bp, Homo sapiens
tcaccgcacgtggagaaggcactgtatctgctccgtggtgtccagatgacttatgtttatcgttgcctgggtctgcattttctcttctgtagattttgcttatcctgcaaagcttgtgctgg

SEQ ID NO: 459268 - DNA, 122 bp, Homo sapiens
gaaggaaaagtccaggccatgcaactgaaactgtttattgaaacctcagttctacaaaagcgtgaaaaaccctgatacaaagcagtggccagagaggcctgggaagagaatacctgggagaa

SEQ ID NO: 459269 - DNA, 122 bp, Homo sapiens
ggacgtttccatccacccagacagcagcgttcacgcccaggaccatgtgggcctgcgccccgggccgcacctgcctctcctgcattccgtgtctggcatcttgtgtcgttgccaccctgcgt

SEQ ID NO: 459270 - DNA, 122 bp, Homo sapiens
atgggcagtttacagtcacagtgtgtgcccctgctttcctcacctctgtaccatcactcacgctgtgctttttgcctgcaattccccacactgtgtttaattgctgcctctgctggggggct

SEQ ID NO: 459271 - DNA, 122 bp, Homo sapiens
taccgccaggagggcggcgcggtgtgcaactggctgcggaagccgcagccgctcgagccacgcaccagtttcccctcggcgcgccgctccgagttccgtccacccaggaggctgccatgggc

SEQ ID NO: 459272 - DNA, 122 bp, Homo sapiens
cgtgaaacacaagtgcttgccagctctctaatctgcggcgtcctttgaaattccatccagcgtgtgctgaagctgagccaattaacgtggagagaattgggtggatcgcagagaagctggca

SEQ ID NO: 459273 - DNA, 122 bp, Homo sapiens
ttcttttctcaagtacgcggcgttaatgaaactcgacccgtccgctgatgtccaggtggacgcgagcctccaaggaggtaaacgtcacttggccaagccagtttttgtagccaaccttcagc

SEQ ID NO: 459274 - DNA, 122 bp, Homo sapiens
cgttctctgttaggatcacggggactgccccaggcagctgctgggcccggtcgcggacctcggccagaacatcctcccagaacacagaggaatctgacatcagtggcctcccttggtagagg

SEQ ID NO: 459275 - DNA, 122 bp, Homo sapiens
ggaaaggcgagcgtgagctgcctcaaatgcttggaataattccgcttccgtttggaaagccgcagcctcagtcccgccgccgcccgctgcgtccgcccagcgccagctccgcgtcccgaccg

SEQ ID NO: 459276 - DNA, 122 bp, Homo sapiens
gagtccggcggtggcgacggcgaggggcgaggcctggaggtgggaccggccggcgaggagcgccgcacaaagaagccccgtgggggcggggggtggcaggaggacggacagaccgtcggacc

SEQ ID NO: 459277 - DNA, 122 bp, Homo sapiens
ctcacccgtgagcgcaggaccctcctggcgtcttaagtcccagctctcagtcccgctggccgcaggaacacaatgacatctctcgcccaggagggcggttgcagggaaccgaaatcggacac

SEQ ID NO: 459278 - DNA, 122 bp, Homo sapiens
gaaaggacagaaacacacggaatgaagaaaagacagaggcccggcatctgtggcacaacgcggggactgcagtcaacggtaacttaatcgtacatttaaaaataacgaagagtgtgattgga

SEQ ID NO: 459279 - DNA, 122 bp, Homo sapiens
cgctttccagaaggctccatgctcacccacgccgtccctcccccatccacacatctacagcgcccaagcccccacccccgcctagacccgccacccatggcacagcgcccacaggcacccgc

SEQ ID NO: 459280 - DNA, 122 bp, Homo sapiens
tctgcccaaagtggcctacgccaccgccatggactggttcatagccgtgtgctatgccttcgtcttctcggcgctgatagagtttgccacggtcaattactttaccaagagaggctgggcct

SEQ ID NO: 459281 - DNA, 122 bp, Homo sapiens
tactatcttaattttatgagttctattatcatgtaatcagtgcatagcctaaaaattatacggagaacattggtttggagagaataaatcagaaaggcagagacgctgtaaagaggaaatct

SEQ ID NO: 459282 - DNA, 122 bp, Homo sapiens
atatcctccctaaagaccccgggcagggagagctggggtgggaggggacagctgaggatgcggtttcacatccactgtcatgggggatactcacatccaatagcaggcaaaactgatttact

SEQ ID NO: 459283 - DNA, 122 bp, Homo sapiens
cgctgagctgggtggggacgtgatttcccccgagaaccttcccacgtgatttgccgcgtccgtgccacccaagggaaagcctggggcccctgtcccggcagtgcacttacgatggggctagc

SEQ ID NO: 459284 - DNA, 122 bp, Homo sapiens
ggtttcgccctcttggccaggcgggtctggaactccagacctcaggacatcaacccacctcggcctcccaaagtgctgaaattacaagcgtgagccacggcgccagcctacatcttagtctt

SEQ ID NO: 459285 - DNA, 122 bp, Homo sapiens
ggaacatcagtgtttcctctccactcctcacactttgcgatataaaaacaactgcctggccgggtgtcctggctcatatctgtaatcccaggactttgggaggctgaggccagtggatcacc

SEQ ID NO: 459286 - DNA, 122 bp, Homo sapiens
cagcgcctctctcaggagcgatcgggaattggcgcatgcgcactacggtggtggtggcgacgaaggcgggggttgcacgttgcctgcctcgagctctaggtggcgtcatccttcgggctgag

SEQ ID NO: 459287 - DNA, 122 bp, Homo sapiens
gctccccatcctagtccctttttctgggtagggcactgccctggggccttgtcttgagtgcgggttcctgctctctcctcgccccgccctgcggggccgtgccctcctcagcccgagcgcac

SEQ ID NO: 459288 - DNA, 122 bp, Homo sapiens
gggacaggggtaggaggcgaataggtttcagaaggaattgagcgcgactttttgggttttcgctctttatttttagtttggcatcgtgtgccttttggaagattttgttcttgatattctat

SEQ ID NO: 459289 - DNA, 122 bp, Homo sapiens
ttggctgtgtcagcctgtgggccaagggtgattggctgtgtcaggcctgtgggcggagggcgattggctgtgtcaggcctgtgagcgaggagcgttggctgtgtcaggcctgtgggaggagt

SEQ ID NO: 459290 - DNA, 122 bp, Homo sapiens
ggagtcggggaactttttggggagcttttctgagccagggagtcggctgattggcaggttcgcccctgcccgggcacctggacccagggtttctgtgcggaagcttcccctcccctcggacc

SEQ ID NO: 459291 - DNA, 122 bp, Homo sapiens
cgccttggaggtgacgcggatcttgcagcctgggaactctgcatgtgcgcctgccagcagcgctaggaagagggccccgaagagggccatggcgagcgggcctgggggtggggtggggtcgc

SEQ ID NO: 459292 - DNA, 122 bp, Homo sapiens
tcccgacagatccccttagcaggggaccaatgcccaggaccttggggagatggttggggacgggggaagcagcagatggtctgttactcaatgagcacacaggagatgttggggggtcttgg

SEQ ID NO: 459293 - DNA, 122 bp, Homo sapiens
agacgcgccgtcttatgttcttctggtcacaagctgactcgtttggtaagatgtggttgtcggcagcactgaacttcgcgaccagctcatccgccacttggttgtaggaagtggtccctttc

SEQ ID NO: 459294 - DNA, 122 bp, Homo sapiens
ccatcagaatcacaggaatgtagggagaagggagtagttctttcaagaaggagtaggagacgcagttaccagagtaagaaatgcagggccgacaaaaatagcagatgccgactatactcctg

SEQ ID NO: 459295 - DNA, 122 bp, Homo sapiens
aaaaatgtcactaacaaaagaattcatgatactcatggccttggaagagattccagtgtccgcgtggacctgcttcagcagcttgtagatgtaaatagaatagctctctttgcggcatctct

SEQ ID NO: 459296 - DNA, 122 bp, Homo sapiens
cgggcttctccggtggtggagggcctggcccgggcgtaaatgtctgaggggcttactggacggcctgggagtgcagccactcagccccctcgggacaccgaggctggggattcgcagccctg

SEQ ID NO: 459297 - DNA, 122 bp, Homo sapiens
cagagccccacagtgacttcaatcattggctcagggcactgtcagtcagaggtctgggggcggggtttgtggggcctccatctgactgcccagcgcccctcacttgcccctcgacccccaca

SEQ ID NO: 459298 - DNA, 122 bp, Homo sapiens
tctgtctccgcctgcctcgtatcctctgcctgcctttgtatctctgccccgggctcctctcggctctgtgtggctctgatgactcatctgggataggcatgaaggttacttaggggaacaag

SEQ ID NO: 459299 - DNA, 122 bp, Homo sapiens
atgttcaaacacacacatgtgcatacacacacacaagtggaccctggattaggatgctttcgtaactcagtgaattattctcctcccaccagcagagtgaaatggctattttcttttctttc

SEQ ID NO: 459300 - DNA, 122 bp, Homo sapiens
gcacactgtgggctccgccatggtcgctggcgcgggccctgtgcgcgcggcgcagcgagccggggcgggcaggctcctcccagtcacgtccacgatttccagcgaacagcccggggatgggc

SEQ ID NO: 459301 - DNA, 122 bp, Homo sapiens
ggaagtgcgcggtgccacggaccgacacagttcgctctagcatctgacgctcggactccgcgccctcagccggatcccagagcccttccattcgccaaccgcccactgcaaggcatgagccg

SEQ ID NO: 459302 - DNA, 122 bp, Homo sapiens
ggaaaaatatggacacagttaaagaactgcacatcaaagtgtagggttgttggctgggcgcggtggctcgtgcctgtaatgccaacactttgggaggccgaggcaggcagatcatctgatgt

SEQ ID NO: 459303 - DNA, 122 bp, Homo sapiens
tatggttataagaggaaaaaacgaaacacagaatattgtgtaaagcaagcttgtccaacccgcagcccgtgggctggatgcggcccaagacagctttgaatatggcccaacacaaattcata

SEQ ID NO: 459304 - DNA, 122 bp, Homo sapiens
gggggcattctgcaaggcggtgattttaggaaattccaatcctgggggcgtgagtcctgccgcccctcctgcctggtgcctaccgccgacgggttgtgtagcctgatctgcctctccgaggt

SEQ ID NO: 459305 - DNA, 122 bp, Homo sapiens
tcctgtgaccggacagagcagagcggggactgcaattcccagaagaccccacggtaggggcgggacccaagatggccgcttgtctggggacaggagcggaggccaatacgcgcagagcatgc

SEQ ID NO: 459306 - DNA, 122 bp, Homo sapiens
atagagagactgtggtctttgatgccaagtgagtgtgggtttgagaggcgctctgaggcccgacagcttctgatcccggatggggattatgcggccggtgcctcggctggctcagccgtgaa

SEQ ID NO: 459307 - DNA, 122 bp, Homo sapiens
agaccacaacaacagctgtggggctcttgctcctaagctgcccatattccacactggagtcgtgcatttcagaaccctttcaattatgcagaatttgacacttgctttgtaggatgttcttg

SEQ ID NO: 459308 - DNA, 122 bp, Homo sapiens
gctattgaattgtttacccacagtaagcatggcgggaagagcttcgatccgacccttgaacgctcaataaaaatggcgacagcacttcctgtacttgccctcaacaaagatggtgtcaacac

SEQ ID NO: 459309 - DNA, 122 bp, Homo sapiens
tatcagtgtcattatgacctttgcttgcctatttatacagtttaatgtcctccttataagcgaagataagaaaactactttttaaaaattttgtaaatttatgttgttcttcagctgctctc

SEQ ID NO: 459310 - DNA, 122 bp, Homo sapiens
actgtggtccagctgaggactgtggtgtctgaaactttgtcacatgggaggctacaggcccggggctggcttggctcccgtgaaaacactgcagcgggcagccagtccggaaggcagcatct

SEQ ID NO: 459311 - DNA, 122 bp, Homo sapiens
agactctcctttcaggccagggctcccaggttggccctgggagagagaagagaggatggccgtaaggaaggacacagccaacagtggcctcggagtgttccccaaaagaagcccctttccag

SEQ ID NO: 459312 - DNA, 122 bp, Homo sapiens
gagcttgggacatggcgaaacctcgtctccaccaaaaatacaaaaattagttgggcatggcggtgcacatttaaagtcccagcagcttcacaggaggctgaggtggaaggatcacttgagcc

SEQ ID NO: 459313 - DNA, 122 bp, Homo sapiens
tgtagccgccgagagcccaggatgtactggcggatggggcctgcctgcaccccggggaggcgcccaccccggacccccacccctccgcactgtgaaagactaactcctgcaactggaaagcg

SEQ ID NO: 459314 - DNA, 122 bp, Homo sapiens
attactgtagtgagccactgctcccagcctaagctgtttcaaaactaaactttggaatcccggattcgaatctccccggctcccagagttgcgcgttcgaatcccccagccgtatccaagct

SEQ ID NO: 459315 - DNA, 122 bp, Homo sapiens
aaatccaataagaaagtgaagatgagaaaggtcaaaagaacaaaaatggttagaaataggcgagcaaacaggtcacaaatgcaaatattataaatacagtgaaaagagtagggactcttatt

SEQ ID NO: 459316 - DNA, 122 bp, Homo sapiens
cccgcccctccctccacctcggagtctgcgcggcgcggccaggcccggccgaccgcgtctcggtcttcgcgtctgccagcctggctggcagtccgtctgtccatcccgccgcgccggggcag

SEQ ID NO: 459317 - DNA, 122 bp, Homo sapiens
atggctcaggcacaagttggaagaaggactggggaggaggacttggaaggttaaggatagcggcaacgctgagtgctctccctgacccttgcatcctgccctttagaggcctgatcctatcc

SEQ ID NO: 459318 - DNA, 122 bp, Homo sapiens
cctccaagttaaacacggaaaaggtacgttaagggcaccgggccagaagtaacctggcagcggggcgccggggaaggaggtgggggagtgccaggttaactaagtcccggcacaccctactg

SEQ ID NO: 459319 - DNA, 122 bp, Homo sapiens
aggggtcagggagttcccattccgagtcaaagaaaggggtgacggactcacctggaaaatcgggtcactcccacccgaatattgcgcttttcggaccggcgtaaaaaacggcgcaccacgag

SEQ ID NO: 459320 - DNA, 122 bp, Homo sapiens
tcctgacattaagattacacagtaaagatatggaggcaggatgccagcccagacatgtctcgttccaaagtcctaattctgaaccactagccatactgctgtcttccctttcggcctctacc

SEQ ID NO: 459321 - DNA, 122 bp, Homo sapiens
tgcaggctcttggaggtcgcatcctgtccttcccccggcaggtagagtgactacaagtcccgggatgcgcagcgctcggagtcgggcgggggccgggcggacctctacggtgacgtcaccgt

SEQ ID NO: 459322 - DNA, 122 bp, Homo sapiens
ggcgcgtggtctcggacttccagcctccggatctgtgagagtgcaagcggctgttgtttacgccacccacgaacaacccgagcaaatgaatacaatgtctgaaacccacaacccaaatctaa

SEQ ID NO: 459323 - DNA, 122 bp, Homo sapiens
tggggatgcttactatgcatatctctatcacgactaagccaaagcccaatagataggaggcgccataattttccataacaaaacaaaataaagcttacctttgtatgtggttcctgtctctt

SEQ ID NO: 459324 - DNA, 122 bp, Homo sapiens
atatatgtgatcaaatatttgataagctgattttccccaacattaggaataacataaatacgtcaacattcatcacttctcattaaaaaaaaaatctaatgattgtaaaggcagaacccaaa

SEQ ID NO: 459325 - DNA, 122 bp, Homo sapiens
aaagggagggtcagctcagcctcatgagtgatacttgttggtgctgtgtgactctgagcacgtcacttagcctctatgaacctgggtgccccatctgtactcatctcttcactgggaagcag

SEQ ID NO: 459326 - DNA, 122 bp, Homo sapiens
gggcgcgggcgctcgttgattggccgaggcgaagcggcggaaggggcggatgcgacgggccggggcgtctgccgctgccgcatgagacgtgggggcgtggcctggtacgctagtcctttggc

SEQ ID NO: 459327 - DNA, 122 bp, Homo sapiens
ttaaagtttgttaaaataaagtacatattcgataaggaagaaatagattattcctaatgacgtctgcaatgacctagtagaaggagtgatagaagcagttgttttcattatttttgtccaaa

SEQ ID NO: 459328 - DNA, 122 bp, Homo sapiens
gtgagaggcaaactgtttaaaaacacccttgcctctctcctctactgtcctcacaacgagcgccagggggcggcgctgtcgagctctaaacaaagccaaggaagttggagaagtttcgggct

SEQ ID NO: 459329 - DNA, 122 bp, Homo sapiens
ggaacaccaaattagaacgctgaccagttcctggtaatgtagaaaacacccaagttaaaacggcaacagagtgacacagcagccattgaagatgccccacttcaggcaccgacaggcgtcac

SEQ ID NO: 459330 - DNA, 122 bp, Homo sapiens
gatcaaactgggatttacccaagcggacgtggggctggctctgggcaccctgtatggcaacgtgttctcgcagaccaccatctgcaggtttgaggccctgcagctgagcttcaagaacatgt

SEQ ID NO: 459331 - DNA, 122 bp, Homo sapiens
ggcctctacgtgattggctaacagcgcagggagccgggcgctgtcccgatgattggcaggcgctagacagccctcggaaaccgccttggcttcgcccattggcatcctgtgagagtaggcgg

SEQ ID NO: 459332 - DNA, 122 bp, Homo sapiens
actcagaacagcactactcacagcagggcctcttgctcgctctagctgctgggaggaaaacggcttgctaatctccacgcccagaaattcagacaagagcattctccttatctcatctgcac

SEQ ID NO: 459333 - DNA, 122 bp, Homo sapiens
cccgcgcccaccagggaccggagagcgcccgcacccatccggcccggcccggccgcccagcgcctcaggccaggaccctactcaccctgctcacccggagcagccgccgccggccggaagtg

SEQ ID NO: 459334 - DNA, 122 bp, Homo sapiens
gaaatcccagcactttggggggccaaagtgggaggaccgcttgagcccaggagttcaagacgaacctgggcaacataggaagaccccgtttctacaaaaatagaaacaaaattagcctggta

SEQ ID NO: 459335 - DNA, 122 bp, Homo sapiens
acagagtgaaactccgtctcaaaaaaaaaaaaaaaaagaaaaaaaaagaaaagaaaaaaacgtgtatttgagtctgggccccggcctctgttggactttgagtaaatcttaatttagcaccc

SEQ ID NO: 459336 - DNA, 122 bp, Homo sapiens
cgcaactatactgtcgtgtagcgcggccaccccacagcggtccctgacgttaacccttgccgtgactgctagaagacactggtggagtgtgaattgatgaccaaggcatggcagagcctctc

SEQ ID NO: 459337 - DNA, 122 bp, Homo sapiens
ccaggatccctccagacacagacttatcccatccactgttaataaatttcttctgaccaccggtatccccttcccccaaccccactctgcgcttccttctgggtcccccatctctggaaggt

SEQ ID NO: 459338 - DNA, 122 bp, Homo sapiens
taaatcacagtttctaaagctgtagcactgattgcagcgaaccctccagactgggcatcacgcgtgcccgtcaggagcagcagccgctgagactgtgattctcctgcagctgtggggaaaca

SEQ ID NO: 459339 - DNA, 122 bp, Homo sapiens
gggcgcaaggccgcgggatttcgggtccaccgccccctctcctcactgtcgcgttgtagtcgaagcagatgtgcgggcctctccggtatcgcggtctctgcactagctcacactgctccggg

SEQ ID NO: 459340 - DNA, 122 bp, Homo sapiens
tctgtctcactggcatcttgttgagggccttgcacataggaaacttttgataagtatctgcggaaaaacaaacatgaatcctgtgatattgggctcttcaggaagcataaagcaattgtgaa

SEQ ID NO: 459341 - DNA, 122 bp, Homo sapiens
ggggccccagcctcaggcggcgcgtcactgagcacaaaggagacaacagcgaggcggcagcgggcgctgatcttcgctcgccagccactcgcaattgcggttacagacctgcagctccccct

SEQ ID NO: 459342 - DNA, 122 bp, Homo sapiens
gagcgagacctgttctttttttctgtctttgactatttgagacagtcttgctctgtcacccgagatggagtacattagtgtgatcttggctcactgcaacctctgcctcctggactcaagca

SEQ ID NO: 459343 - DNA, 122 bp, Homo sapiens
gtcccggaattcttgaggccggaagaataacagggcaaaggtcacgtagacggcgcgccccgcccccgtacgcctaagttctcgcgcgactcccacttccgcccttttggctctctgaccag

SEQ ID NO: 459344 - DNA, 122 bp, Homo sapiens
taagctcagtagtggggatgatgtttttgcagctgtggagccaggaaggacagaaggaaacgtataaaactggtctccaccgagttcttaaatattctgacacccaagaagtaaattcataa

SEQ ID NO: 459345 - DNA, 122 bp, Homo sapiens
gaaatatgatgcctgactcccactctataccaattattaataaatctgagtacctggagacgagagagaagaggtgattctaatgtacaagaatgttagagaatcactggctcagaggattc

SEQ ID NO: 459346 - DNA, 122 bp, Homo sapiens
gtgtgagagttgggggtgagtcttagaataaatcaatcacagcaattttattattattgccgttatcattggtttaggaacggacaggtggcagaattctggcccatgaaatataagaagag

SEQ ID NO: 459347 - DNA, 122 bp, Homo sapiens
catctcctctctccccaaccatgcctctcctgccccattctgcgtgtgtcactccagccccgccctctgaccaggtcgccccgtctcgccccacccaggccacagcacagatggagggccgt

SEQ ID NO: 459348 - DNA, 122 bp, Homo sapiens
tgcgaacgcggaggagagctcgggagtttcccacaatgcactgctcccggcgcaggagggcggggagggggaggggcgaccgggccccgccccgccgggaaccgtgggatccgcaaacccag

SEQ ID NO: 459349 - DNA, 122 bp, Homo sapiens
cataaggattttaaagtgggcaaccgcctcatccctcagggaaggaaagagccccccagacgagctgagggctctgtctgcaagaccatctgtggcacagaggatctaggggacagttgggt

SEQ ID NO: 459350 - DNA, 122 bp, Homo sapiens
gcgggcgatagctcagaacctgagaggggtcgcagggcagagacatgccccgcagccacacgttccccgccgccccacacgtaccctgcccccgtagaggatggagggcggctgcagcaccc

SEQ ID NO: 459351 - DNA, 122 bp, Homo sapiens
tgagtttttccttagattaagaggttgttgagtaatgtaggcaagctggagcctggatggcgtgactccaagatctgtgtgggacatttgcaagaagagagcagctggagaggagaatgtgg

SEQ ID NO: 459352 - DNA, 122 bp, Homo sapiens
gtgatgtctttgtgaccagaaatagactgtagtcacttaaccttgtttttatcaattagtcgatggtaaaattggttttaaagtcacagtttccatgaacctatctgtgacgttttaagtga

SEQ ID NO: 459353 - DNA, 122 bp, Homo sapiens
gtagaaacgcaacttccggaactgcaggaccaactctttcaggaagctgaaccgagcttccggcggaagtggcgtggccggggctcggcatgggcgcggccgagctcggtgtgggcgtgact

SEQ ID NO: 459354 - DNA, 122 bp, Homo sapiens
ggccccatggctctgcctgcctgatgagagacatgaatcttagagttttaggatgttgagcgtgtcatgcggcagagctcaggctagaaatgaacatgatttcgcgcttattatccagacta

SEQ ID NO: 459355 - DNA, 122 bp, Homo sapiens
gcgtccccagaggcgcgtggggcgggcggggctgggttggggctgtgtctgggcttagggcgggggcctgggatgctgccgctgagctgacccgctggacttgggttgtggcagacggatgg

SEQ ID NO: 459356 - DNA, 122 bp, Homo sapiens
atgctcccttcgtgggtgatggccacgccctcaccatgtccctggcagagggcttccctccgggatcccctgcctggtgcccacactgcctcgcaagcgctcgccaccctcacgtggctcac

SEQ ID NO: 459357 - DNA, 122 bp, Homo sapiens
gcatccccatcgatgacctcaccatggtggtctacgacccggacaaggcaggcgtggtggcgtgggtgtgggcgggggtggctgggggaggccagtgggagcctggatcgagtgacggtgtc

SEQ ID NO: 459358 - DNA, 122 bp, Homo sapiens
tttataacttgggttcatgacacttagcattatcctctgaaaataaatatcttaccacaacgaagacatgcattcgttctagcatttatgaacaggttctaagcactgcggacacaaggttg

SEQ ID NO: 459359 - DNA, 122 bp, Homo sapiens
gggaagcccctgggaaaccatgcttggcatccccaaacggtgtttgtctcctgtaagaaacggattttctctcagcacctttccccatttcttcccgaagctgtgacaaatggccatgtttg

SEQ ID NO: 459360 - DNA, 122 bp, Homo sapiens
tccccatttgcttccttcggtcttttccactcccctttccttttctaaaaggggccataccggtgacctgaaggagtttgttcagccagggtctattgggcaggtgtggtggtgtgtccaca

SEQ ID NO: 459361 - DNA, 122 bp, Homo sapiens
ggagaagttcccggggcccaggcagggacggataaggcagtcggtgcccggtgcccaggccgggggtgaagaggctggccaggactcagcagcaggaagtgagaatgaacttcacaggatgc

SEQ ID NO: 459362 - DNA, 122 bp, Homo sapiens
cccagtactcacttcgcggaagcccacagaatagggcatgccggtctttcagcaggggcccgccgaagggccttgggggcttgaggaggagcagctggggctggcggactcaccgcagcctc

SEQ ID NO: 459363 - DNA, 122 bp, Homo sapiens
ctaaactggcagaaacatcaatacttcctggctcccccactgggtgcatcaatttaccaccggcaggctgctcttctgcttcaagtgacaaacagtaagtgctttcaatgacagtatgaaaa

SEQ ID NO: 459364 - DNA, 122 bp, Homo sapiens
ggcccgttctcaatgagctgttgggtacacatcacagacggggtggcggtggggcagaggcgccccccacctcccagacggggcggccgccgggcgggggctgccccctacctcccggatgg

SEQ ID NO: 459365 - DNA, 122 bp, Homo sapiens
tccagttccccccgaagcaagagtcgctgttccaaaagtgaagcctgtcgtctgtgtggccggagtctgggtggcaagtgagaacaggccggtggaaggggtacttgtggctggttggaagg

SEQ ID NO: 459366 - DNA, 122 bp, Homo sapiens
tggtggggagtggggagggagcctgtggctgcctggtggggagcaccctatggggaggcacgtcctaggaggaggagtgtcctagagggagggcccggcacctgccagggcccttgggtggg

SEQ ID NO: 459367 - DNA, 122 bp, Homo sapiens
ctcctacttactgtcaagtgaacaaagttaggcgcccacgtgatcctccgagccaatggccgccccgcctgcgattcccggataaggaaatctgctcacccggaccccactccagccaaaga

SEQ ID NO: 459368 - DNA, 122 bp, Homo sapiens
cttggtagaaacacaaatatcagcttagtgaccaaccagcttctagttactggaattggccggtgtctccctcctccccctgtaaattaaagaccgcattcattaatgaataattaaataca

SEQ ID NO: 459369 - DNA, 122 bp, Homo sapiens
gaggagagcgctgcgcatgcgcatgagcgagtgtctgggctctgggtttagcgccggacccggcctggaccgtgtggttaaaggggaacaaccaccatgccttgccccgccccgctcattca

SEQ ID NO: 459370 - DNA, 122 bp, Homo sapiens
agtgaggcccggcctggccctctgccgtgttcaggccaccagcaccggctgcacagccagcgcccaccagagttgactcctcgggcctctgagcaccttcccactgcctggagtggccggct

SEQ ID NO: 459371 - DNA, 122 bp, Homo sapiens
ctcttacaagtccttggacaccaattgcacagtactctacatttaatcgacatcttattccgaaaaaactcttaatccccagggttatctaaatcctaaaatcatattcaaaataaatggaa

SEQ ID NO: 459372 - DNA, 122 bp, Homo sapiens
tgaccatatcaactgaagagtggtcactcatgtgtggaaagcccactagactcactctgtcggctctctgttagactattcttgaggctggaagaaatggagtatttagatgataatccatg

SEQ ID NO: 459373 - DNA, 122 bp, Homo sapiens
ctccttttccctccttctcttttctaacgaagcacaaagagcgttcacaggccagggaatcggctcctgactccagccgccctgcgcgcccagacagagccagagaactctgtagctgcgag

SEQ ID NO: 459374 - DNA, 122 bp, Homo sapiens
gcctggaacaatgggagtgctacagggaggagtgggctgctgccatctggtgaaagactccgggagccacagttccagctgggaattcttttcagcaaaatattggcgctgaagtacagtag

SEQ ID NO: 459375 - DNA, 122 bp, Homo sapiens
cagagaagcctggagcggggcccaggggctacggagggtcagtgcctctcacgccccaggcgcactcccctgccacctgagtccctctaggagccatgggtgccaggccagccctctccaac

SEQ ID NO: 459376 - DNA, 122 bp, Homo sapiens
cctggatgagataacgtgagccttttttccctctttgtttttttaacaagattttctaatcgacttgcagagtagttgaagtgggtaagcagcagggtaccttgtataatgcacgacagttg

SEQ ID NO: 459377 - DNA, 122 bp, Homo sapiens
gcaccagggccctggtgtcacaaagggcgctgcgtatgacgtcactatggtcgccgcctccgccaccgctgccgtagttgctacggttaccgctatggttaccgctaccgttgcagtcaccg

SEQ ID NO: 459378 - DNA, 122 bp, Homo sapiens
cggctctgcgagcctttttccaaaatgccagaatgcagcaggctcttgatgtgttccaagcgtttaggagagtggaaagagaaactgatcatttgggaaagacacgtctgtctgccttctga

SEQ ID NO: 459379 - DNA, 122 bp, Homo sapiens
caccctccacttcccctctcagaatctaaacgtggtcaccttcaagtagagaggcccgcccgcccaccgtgggcagtgccaccagcagatgacacgcgctctccaccacgcaacccaaacca

SEQ ID NO: 459380 - DNA, 122 bp, Homo sapiens
acaggaaggaaccacacgtgaaagcgcgggtgctgctgggagctcaccccgtctgtggcccgcgcaggggctggctctactcctggctcccccagcattcggcttctatcggcgctccccag

SEQ ID NO: 459381 - DNA, 122 bp, Homo sapiens
ggctggtgcccgctgacagccagggctgttctcgggagtctgcggcgcgccagatggcagcgacagcggctgtgtctggctcggagcgagagaagagagcaagccgccactgaggggctggg

SEQ ID NO: 459382 - DNA, 122 bp, Homo sapiens
tgactcacgggctctgctcgacctgaagggtttatcgacaaccgctttgctgctatgaaacgctctattaggaaaactgtgtcttcaggccacggggaggggaactgcagaagagtcgattc

SEQ ID NO: 459383 - DNA, 122 bp, Homo sapiens
agtggtgcgtctctaccccccctgctcccccactccaactcccagagtctcaaggcctcacgtcacacccccgtcccgtcccgtcgacaaggggaaccccggcctgggagagggcgcctccg

SEQ ID NO: 459384 - DNA, 122 bp, Homo sapiens
gagccccagctccttcgggcctagtcaaggacaccgcctctgtctggcccacaccccgcccgcggcacctccgcagcccagttctactccccagcgcgggacactcaccaagcgtgaccgag

SEQ ID NO: 459385 - DNA, 122 bp, Homo sapiens
gtgcaaaagtaattgaggttttgggctttacttttaaatggtaaaaactgcagtcacttgcgcaccagcctaataattctatagttgagttaaatgaaggaacaattattacttcacggaaa

SEQ ID NO: 459386 - DNA, 122 bp, Homo sapiens
tcacgcagatgtggcatctcaaagatgaccagtgcatagcccaggaagaggcgcgtcccgcggatgactgctaggttggggaagaggtcgcgcaggctctccagtccgtagacacggaagag

SEQ ID NO: 459387 - DNA, 122 bp, Homo sapiens
catatataaaatctgaaaaaagtttaatgaaacaatacctaccattgttgcgatggactccgatttttttttccttcacattttaaatttacttcccaatccatccataggccctgcggttt

SEQ ID NO: 459388 - DNA, 122 bp, Homo sapiens
cggggagcgggtttgccttcgggggcccaggggaccctgagaagtctggccgtgcccgggcggtgagcgcggaggcggcccgccctgtgtccccgcggggcggagccgggttcggggccgcg

SEQ ID NO: 459389 - DNA, 122 bp, Homo sapiens
cgtgatccgcccgcctcagcctcccaaagtgctgggattacaggcgtgagccaccgcacccggcccatagccaagccttaaaaccacattctgcttgagtgagccggcgaggcagaggttgc

SEQ ID NO: 459390 - DNA, 122 bp, Homo sapiens
tccatgccacttggcttctgggtccccttaatctattctctagatctgagatagtagggacgaggaagccaacacaaaagagttaatgcttatgtagctctgaccatgtgccatgagttctt

SEQ ID NO: 459391 - DNA, 122 bp, Homo sapiens
ccctttccatctgctgtaaccggcttcacagagctttttgccatttcctaagttccccctcgatctttaactaggctggagtttgtcctcttttgtcctctatctctttttggaaagcttat

SEQ ID NO: 459392 - DNA, 122 bp, Homo sapiens
tgtggagagggacgggctgcatgtgctccccgcccccgagaggcctgcgtcatgcggtctcgcccgctctgcgccaggcgtcctgctaacgtgtcctggagggactctcagttcctcccgcc

SEQ ID NO: 459393 - DNA, 122 bp, Homo sapiens
catttttcagtatattgtaaatgacaccactgagcaacctagcacgagctgtgtgagcaccgaggaaatgttcattaatagaataaggaagatatgaatgtgtgtgttgagggcggaagggg

SEQ ID NO: 459394 - DNA, 122 bp, Homo sapiens
gagctccctccaggctctatttagagccgggtaggggagcgcagcggccagatacctcagcgctacctggcggaactggatttctctcccgcctgccggcctgcctgccacagccggactcc

SEQ ID NO: 459395 - DNA, 122 bp, Homo sapiens
gtccttttttgtgagagtcctgggagagaaccattaaagaaacagaccccgggcagtcagcgcagatctggatacatgtgtgtgcctgtatgtgggcttgcctggcccccctctggcaccca

SEQ ID NO: 459396 - DNA, 122 bp, Homo sapiens
aatggggagcaaagcagcgtggccggggtccgagctggggttctgtccccactgggctgtcgccccagctggactaccaccatggaactcagggccgaatacctcagggagaagctgcagcg

SEQ ID NO: 459397 - DNA, 122 bp, Homo sapiens
ggctggaatatctggggccaccttaacaggctggccgtctagtcaatctgtcatcagtttcgattctcaacttttagagttctcctttatgacgttgggaaactgaagttggatagtgtttg

SEQ ID NO: 459398 - DNA, 122 bp, Homo sapiens
gatacaggctgcgtgatcctgagcccaggtgtgcaggtggaggccgtgtgatcctgagcccgggtgtgtggatacagcctgcgtgatcctgagcccgggtgtgtggatacagcctgcgtgac

SEQ ID NO: 459399 - DNA, 122 bp, Homo sapiens
tcgtaaaaagcctgtggaataggtaggtattatcttttatagatgtggaaatgtaggcttcgttattttaatagcttgtcgaagctttacacaggtagtaagaggcagatttgaacctaggc

SEQ ID NO: 459400 - DNA, 122 bp, Homo sapiens
aaactaaaacagattttggctttagaagtggtggcttaagagaagcaattaagaccaattcgccttctagtggaaataagacatcaaatacaaagttttaagagaagtgaatgcagcagcgg

SEQ ID NO: 459401 - DNA, 122 bp, Homo sapiens
ctcctcagtatcacacactgccaggaaacttgggggcaacctgcagaacaaaaagcttagcgtgaaaactaaactggccaggagcggtggctcatgcctgtaatcccagcactttggaaggg

SEQ ID NO: 459402 - DNA, 122 bp, Homo sapiens
aggacacctgggtccaagccatcgagagccagatcctggccatcctggccagcctgcagtcgtgcaagagcagcaagaacaagtcccagctgatgaaccagagtgaggccatggccctgcag

SEQ ID NO: 459403 - DNA, 122 bp, Homo sapiens
taactaggttgggacacagcttagcatgagtggattcaagttagtaatcacatcgtgcagcgtgacaggtgctctgaatactgaccagggatgaggttcttattggcagctggctggcaggt

SEQ ID NO: 459404 - DNA, 122 bp, Homo sapiens
ctgtgtctgactgtttctctagcaatggcttcatctctgtgtgttccagtgtacccttcacgtaaccatgaccctgggctcctacaacactagctcctcctttttctctccagccaagtgtt

SEQ ID NO: 459405 - DNA, 122 bp, Homo sapiens
cgcgcctcagtttccccctccagagcactgagcccttccagccacaacacgcgtgagaaacgagaaacctccacccccagccccaccaagcagaggccacagggtttcccttccctcgggat

SEQ ID NO: 459406 - DNA, 122 bp, Homo sapiens
actcggcgctgggctctcccgggctccgggtccccggctgcccccggccgccagtcgggtcggccccgcacctgtttgtgctttgcaggctcccggccccctcgctgagcgaggaagctggt

SEQ ID NO: 459407 - DNA, 122 bp, Homo sapiens
tctgtcagtggtcactggtgccctttggagttcagaccacaagacttcctcaccattcaccgttatgttgtctgcagctctccaatgtgagtcctcagccaatcagtccctgtacacagcta

SEQ ID NO: 459408 - DNA, 122 bp, Homo sapiens
cggcctttgacatcagaggagaagctcagctatgttggctgaacgttgatagaaagataacgttgaaggcaagttgcccttgagcagctctctgaagatcaactgcctccacattgcattct

SEQ ID NO: 459409 - DNA, 122 bp, Homo sapiens
ttcagggaagacagggacctttccgggacatgacgatataaacagcagttacagtaatagcgagagacgaatcttcttgttgcttaaatgagaacatcttgtctcggaaaattatatgtgtg

SEQ ID NO: 459410 - DNA, 122 bp, Homo sapiens
ttacagctgcctccagcactcagtacagtaacactagcctaggagcagtcggctccaccacggagcctaggtgtgtggtaggctatgccatctaggtttgtataactacactctgtggtgtt

SEQ ID NO: 459411 - DNA, 122 bp, Homo sapiens
actaaacacatttatgaaccatcttttaaatacataaatataagataacaaggttatttacggtgtctctggctctctagtattaggtaatagtattagaaagtataggtgctctgcaggca

SEQ ID NO: 459412 - DNA, 122 bp, Homo sapiens
ccccatgtgtacagctggcttcaaattcccaccttttctaaggacaacgtcatgttgagtcgagggtgcaccccactccagtgtgacctcatcttaactaatgacatcctgcaaggacctta

SEQ ID NO: 459413 - DNA, 122 bp, Homo sapiens
cgcagattcagaaagaaggtagtgggcaggactaaggagaaaggcagagctgtttagcctcgaagtctggactctgcagcttcttatgtgcatttggaaattggtgttaaacttgacactgt

SEQ ID NO: 459414 - DNA, 122 bp, Homo sapiens
ggtgaacaagatgtgctcccagcttggggtctcctcctggcctaggacagtgaaagacagcgcgctgccatctgtcatgggtattattactccctctccctaatccgggcaggccagaggcc

SEQ ID NO: 459415 - DNA, 122 bp, Homo sapiens
ccgttggccccgctcctatggggcagcagggaccgacgtcagcagggtggggcgggcacccgagtggtatgccccgccctgccccgcctgcccgccctggtggccgtctgggggcgacaagt

SEQ ID NO: 459416 - DNA, 122 bp, Homo sapiens
gaacggaccaggagtgtgcggtggtggagtccggctggcctgggttgcagatttaactttcgcctctgcctctgtgtgcctctgggctgtaagctttagtttgcacggttaacggggatggc

SEQ ID NO: 459417 - DNA, 122 bp, Homo sapiens
aggtgcgcggggcaagtgaccgtgcgtgtaaagggtgaagcgtgtgaggctgtggcggggcggaggtgcaaaagctcatacttacctggcaggggagatactattatctaaacgaaggtggt

SEQ ID NO: 459418 - DNA, 122 bp, Homo sapiens
ttagctgcatatgagaatcatctgggaagatattaaaagtactgatgtctgggtcccacccgcagggattctgatttaactcatttaagctctccaaagtttaagtagcaaagatctagagt

SEQ ID NO: 459419 - DNA, 122 bp, Homo sapiens
tgcttaatatcaacatggtttataagtggacagaaaaacactcactcacgtattcagccacgtatggtctggagtgctctgtagaacagcccgaagtgtacaccatgtctctgcacttgaag

SEQ ID NO: 459420 - DNA, 122 bp, Homo sapiens
agcgccagggcaagcgggaaaaagcccaaaagctcttcatgcacgccctcaagatggacccggacttcgtggacgcgctcaccgagtttggcatcttctcggaagaagacaaggacatcatc

SEQ ID NO: 459421 - DNA, 122 bp, Homo sapiens
ccatttgtccgccagtgcaaaccaaccgacctttccttactttcgggttcgacagaaaggcggcaataaaaagacccattggtcccgcctctctactgtcacgggttagtagggaagtcagt

SEQ ID NO: 459422 - DNA, 122 bp, Homo sapiens
gcggagggaacaggtgggaaccgcgggctggaaggagggagacgtcccctacctccactccggaagcctcggggtaacgtctcccattgctctagcggagttcagatctccaattccagttt

SEQ ID NO: 459423 - DNA, 122 bp, Homo sapiens
gggagtccctgacgacgcgcgcgcggctgacgcggggggcggggaggggcggggcaggtgcgggactttaacccggagccccgcccctcgggcgtacaaaaccggagcctcgggccgggctg

SEQ ID NO: 459424 - DNA, 122 bp, Homo sapiens
ccgaaccccagcgcctggctgcccggaggtggctccacagcccgagggaaccgacgcccccgggccggctgtctgctcccccacggcacgggccccacccccaatccttccggcgccccagc

SEQ ID NO: 459425 - DNA, 122 bp, Homo sapiens
agcatatccatggggtagaggtgcctccaaagtgtgaggtggacaagacagccaccctctcgcctttagagctaagtcacttggaccaacgaggatctaatcctgcttttaaacatcttcac

SEQ ID NO: 459426 - DNA, 122 bp, Homo sapiens
tctacccaaaacagaaattgtgccagtcggggagtcctttgatcaccatgcagtaaacctcgccaaaatattgtaaatttaaacaaactaaaacccaaccacttgaaaaaatttaaagcact

SEQ ID NO: 459427 - DNA, 122 bp, Homo sapiens
ccaagccacccacgtacacggctaccaaaagtgggttacaaaacaggctttctggctgggcgtggtggctcatgcctgtaatcccagcactttgggaggccgaggcaggcagatcacctgag

SEQ ID NO: 459428 - DNA, 122 bp, Homo sapiens
ccccgaggttccccgtggtggttttgcacaggctatttaggcacatctcggccgccgtggcggggcacggctcagctgttgcggggcggggccttcgcagagcatggcggcgggcgagcttg

SEQ ID NO: 459429 - DNA, 122 bp, Homo sapiens
ctggtggaagccagagcagggctgccccaggagcagccctggggcaacagagacttgaggcgacgggtctcggggaggcaagcctgaaatgtgctcggtaactgcactccagtcccctcagg

SEQ ID NO: 459430 - DNA, 122 bp, Homo sapiens
ggacgcagggggatgacgccccccgccacccccaccactgtatcactcttctgacgtccccgcccagacttggctagctcacccttatcagatggggaaactgaggcaggaggggagaagag

SEQ ID NO: 459431 - DNA, 122 bp, Homo sapiens
ccacacagccaggctgggctgggaccaggtgctgggatgggggctgtcagggaagtgcctcgggggctcgttctgcagacccaggagggatcagggcagctgcaggaggtggcaggagccgc

SEQ ID NO: 459432 - DNA, 122 bp, Homo sapiens
gcggccgggctcgcggcagtagagcagaatgggaagcgggtcctcgtcaggcggctcgggcgcggctgcggggtccaggccggggtcgggggcccggcgggggctcggggtggggcgctggc

SEQ ID NO: 459433 - DNA, 122 bp, Homo sapiens
acaggccaggctgggtgacaagccccccgggtggctgcacctcccactcgccgacctgggcgctgtccttggtgctgccggcgccatagcgagcacaagcgccttaccttctgcccctgcgg

SEQ ID NO: 459434 - DNA, 122 bp, Homo sapiens
tgaaaaaatagtatctcttgttgcaagaaatgctccatctgtgatttcaagtctctcactcgagtgaattggatggaagtggtgaatttcagccaaagtggccaaagaaatcctgttcctgt

SEQ ID NO: 459435 - DNA, 122 bp, Homo sapiens
ggccaggggctctactgttcccgcaattctgctagagttgcctcgcctcccagctctgtccggggaaaccctccctgtgctatggatgcaggcgtttcctgttggcatattgtgtcctgatt

SEQ ID NO: 459436 - DNA, 122 bp, Homo sapiens
gatcgggcccaacatccggttggctgagtgctatgggctgaggctgaagcacatgaagtccgatgagatccactggctgcacccacagatgacggtgggtgaggtgcaggacaagtatgagt

SEQ ID NO: 459437 - DNA, 122 bp, Homo sapiens
cctgcccttggagagctgttttattaacacatcactggcttagggaataggaaattcttccggggtttaggtggctttgagtgctatagtcttggcagacagttcacctgagtctttcccta

SEQ ID NO: 459438 - DNA, 122 bp, Homo sapiens
tgtggaacagttatttaaaaacaaccaactaaatggagattacttaagagaaatgtgtgtcgaggacataattccctacagccctattaatagtgggattttgttgacatgcttagaaatgt

SEQ ID NO: 459439 - DNA, 122 bp, Homo sapiens
agcgtttctacggagactggaataacggcactgcactgctgtatgcgagacctgcgcatgcgcgagtctcagtgagcgcgtaaacgctgtgcgtgccagagtgtgcgcatgcgtaagcacgg

SEQ ID NO: 459440 - DNA, 122 bp, Homo sapiens
aagtgctgtctgaggacgtagcccctttgatggagtccctgggctggaactgaggggggccgggtggagacgtggctgtgccacagggcgtctcggcgggtcgcctcctctttgggtttctg

SEQ ID NO: 459441 - DNA, 122 bp, Homo sapiens
actgtgagagggctcgtcacgcttggatgctccacttggcaggtgtaaacctctccactccgaggaactgtttccagcatcaccagggtctggaaggtccaatctccattctggatcaggcc

SEQ ID NO: 459442 - DNA, 122 bp, Homo sapiens
taaaaagagaggcagccccacgcaaagtgaaggggggcttgggcccctgatatggacaagcgtcatgggcttcagcagcctgtttctgcgaaattgcagaagaatgaggctggtgactccgc

SEQ ID NO: 459443 - DNA, 122 bp, Homo sapiens
ggcgtcctgagtcccagcaattcccaccgcagcctcctcagccgcatgtaggctgcaggccggcactggtcagagttgcccgctccccactgtggtggctgagatgtctccttttgagcgtg

SEQ ID NO: 459444 - DNA, 122 bp, Homo sapiens
actgagggaccagcgccggctccccagtttctctgcattgtgaagtcattttcttaaactcgggctttaaataaccaccgatgacttgcctacgggccacgcagatgctatactctgacctc

SEQ ID NO: 459445 - DNA, 122 bp, Homo sapiens
tccttaatttctgtgagccttagtttctttaggtataaaattgggataacatctatttcacggcatcacgatagggattaaacatgagagcatgagtcaacatgggtcaagagcttggctct

SEQ ID NO: 459446 - DNA, 122 bp, Homo sapiens
aaggggcggatcggctaaggggagagagcccgggagccctgcacaaatgcggaactgcgacggatggcagcaaacccgcagggaagggattgttatttaataaatgctgccagaaattccag

SEQ ID NO: 459447 - DNA, 122 bp, Homo sapiens
agggcgggcctgaggccggcgctcagtggggaccgtgggctcaggaggcagttgccagctcggatgtcctccttgggagacctcagtctaacaaagccccgggccgagcgggctgaaggaag

SEQ ID NO: 459448 - DNA, 122 bp, Homo sapiens
gttggtcacgtggttgttcggagcgggcgagcggagttagcagggctttactgcagagcgcgccgggcactccagcgaccgtggggatcagcgtaggtgagctgtggccttttgcgaggtgc

SEQ ID NO: 459449 - DNA, 122 bp, Homo sapiens
ttccccccagagagaaaagaggaccaccagagcatgggagtgcggacagagactaggtcccgaggtgggacctatctaaggcagaagaccagtccatagcgtttcagagtatactccagacc

SEQ ID NO: 459450 - DNA, 122 bp, Homo sapiens
actgggtaacaagagtgggtacagtatggtactcacacctctctgggcagcctttgtgcacgtgcatgtgtgcatgtatgtgtgtgtgcatgcatttgtgcgcatgtgtgtgcatgtgtgtg

SEQ ID NO: 459451 - DNA, 122 bp, Homo sapiens
actacactccaaagtgggcaacagagcgaaaccctattcaaaaaaaaaaaggaaaagaaacgagaaaattggagcaaatgatctctgagccttgaagattcttacagggtggacaagaaaac

SEQ ID NO: 459452 - DNA, 122 bp, Homo sapiens
tttctcagtgtcttaaggctggctctccatgagtgctggctgattgactctcatctatatcggtaaggttctttttgccccaaattgtgctctttaacacttcggcatttaaatcactttct

SEQ ID NO: 459453 - DNA, 122 bp, Homo sapiens
ttgatatgatgatttccagaaccacactactagttggatggccttagtgaagcagttaaccgctccatgccctagctttctggtctgcaaaacggagataaaaataggctagggtcgtggga

SEQ ID NO: 459454 - DNA, 122 bp, Homo sapiens
gaggctgtggatggaggcggataaagccccagcttcttccgcagagagagtgctcctcaccgcagggcaagaagggggccgcaggaccaggctttcctgttcggaggcgccatttccagccc

SEQ ID NO: 459455 - DNA, 122 bp, Homo sapiens
cgctcgattcctgcgccttgtgacgtgaggcgttttgttcctcccactccagacactggacgctcctagcaaccggctagcagctcggtttccaaggactgtaacgccttcaaccgcccgcc

SEQ ID NO: 459456 - DNA, 122 bp, Homo sapiens
ccccgcggccgcttggaagctccttatttgggcagtgatgtcaggggaagtcgcaggggccggaccacccacttctttccattcactccccagagtttcctgtcgccgagcacggggacccc

SEQ ID NO: 459457 - DNA, 122 bp, Homo sapiens
gttgcggggctcggggaagttacccccatccgtgctggagtagcggggaagccctgggtgcgttacactcgaccgtgatggggagaggggacttagatgttgtcacgctgggggtcccttta

SEQ ID NO: 459458 - DNA, 122 bp, Homo sapiens
aaggttcacggacagacagggtcgtttgtcacagcagagaagcacctcacggctcctacccgcactcatcgcggacagtgcctgcagcgggagcggcgcgagcaccctccccagatgaaaac

SEQ ID NO: 459459 - DNA, 122 bp, Homo sapiens
cccctcgtccccctcccctgttccaaagtcccataagtcattcttatgcttttgcatcctcgtagcttagctcccacttatatgtgagaacatacgatgtttggttttccattcctgagtta

SEQ ID NO: 459460 - DNA, 122 bp, Homo sapiens
ctttgcttgactggtgggaagcagagaggggaaagataatgtcccaagtaaaaaggctgacgtccagacaagaaaactagagtggataaatacgggcacgccctactcaaacccaggccttt

SEQ ID NO: 459461 - DNA, 122 bp, Homo sapiens
ggctgccccggtagatttctgacggccgctcgcgggtgcggcggtgaacgccaccccagccgggctgtctatggctctgagagaagaggcagagctcccagccatgacccacagccaccggc

SEQ ID NO: 459462 - DNA, 122 bp, Homo sapiens
tctgtctccttccttctcgggcctcacccctggccctcgctttcagtgcccagcccggaccgcagcactccagttccgccccaacccgggaaccctggactgaggctcccgtttctgtcctt

SEQ ID NO: 459463 - DNA, 122 bp, Homo sapiens
aaacaggccctggactataaggacttctgcacacgtcgactcctggtcacgtgagagtcgcgtcatcactgagctcgagtccccagttacccctcccattaacactgcagcccgcccgctgc

SEQ ID NO: 459464 - DNA, 122 bp, Homo sapiens
ctgtgtacagcgcccccgcagagatggtggtgaagtcccgggggcagagagggtgctgggcgagctgaggcactactaccatggcttccgcctgctacggatccacaccaagatcgcagcac

SEQ ID NO: 459465 - DNA, 122 bp, Homo sapiens
gaccgacggctctgggaggtttgaggcctggcggggcggccccgggaagtgatttgtggccgctaggcgcgcgctggaaaccctttcccatctgcggagcccaccggagctgtgatcggagg

SEQ ID NO: 459466 - DNA, 122 bp, Homo sapiens
gacgctgggtccgtttccatcgctggctgtaaaggaggcacaggaatccaaggccggcggcggtacccagcaacagtcccagcccggcacgggcaccacccagggctcccagtctagacatg

SEQ ID NO: 459467 - DNA, 122 bp, Homo sapiens
ggcagggaggagagaccctcgggaagctgatgacgcgtccggggcaagtcagcctgtttccgagacgcgcgcctcacggtcgtagcagcgctgcgcccaccctgcccctttagtgacccagc

SEQ ID NO: 459468 - DNA, 122 bp, Homo sapiens
agagaaaggacccagtgcggtcgcttacagaacccagggcggggttgggctgggcgcccgcgcgcgttttcaagcctgcggcccggagttcactgcgaggactgagatcacccgttaccccg

SEQ ID NO: 459469 - DNA, 122 bp, Homo sapiens
acccacagtaagagcatcctggtgaatgaggaacggcgacctgcagggccacacgaatgccgtccccgtggggggctcatcctacccacagtaagagcatcctggcgtgaccccactgagga

SEQ ID NO: 459470 - DNA, 122 bp, Homo sapiens
tgtggtggggagaggatacgctggtgctgtagggtgcacatgccgccagaggtttgctgtcgcccaagatgtccttaattaaaaaagaagacgtggaagtcctgggggccgaggcggccgag

SEQ ID NO: 459471 - DNA, 122 bp, Homo sapiens
gggaccaatgcggagaggggcggcggggtgggcctcggtggggcgggctcggcaggggggcgccctccgggtgggggaggggaggcggccgggagctgtccaaggtgagcgcggaggggccg

SEQ ID NO: 459472 - DNA, 122 bp, Homo sapiens
gccagcagggcggggatgcggcgttgagccccgtcattcagcttcagtgtggagaaggcccggagctgtgggcatcagctcggggacccgagtgactgtccctgcctcggggaggggggggg

SEQ ID NO: 459473 - DNA, 122 bp, Homo sapiens
gggtcccctcgcccgggaagctgtccttgccgcatgatagatacttagaacccctccagccgaccccagcctccgcacactagtcagccacagttcagtgggggcatttttcttttgttaag

SEQ ID NO: 459474 - DNA, 122 bp, Homo sapiens
gcgcgggcatgggtagggcagcgcccgggctgtgctcagtccaaccggggctctgcggggcggttttggcccacagttgccagtcatagagtagccaaaagttcatattttcatttttaatt

SEQ ID NO: 459475 - DNA, 122 bp, Homo sapiens
cccacagggaggaggcctgggctggactcagaagcatgaaagctaaactaggaccagggccgggcagcgttagacaaagctttaggcagaagatcagacaggcaccagccggagaagctccg

SEQ ID NO: 459476 - DNA, 122 bp, Homo sapiens
cagcttgggtacgcagcggcagtggctatttgtcctcaggagccgcagcgctgtgagccacgcagccccttcctgggctcaggctccttggttgattctaggctcagcgttttggcgcagcc

SEQ ID NO: 459477 - DNA, 122 bp, Homo sapiens
ataagaaaacaagaggctcagagaggccacaagataagtagcaggatcaagtttaataaacgtttattgagcagtagaatacaagtgagtgcctggatcctgatcaccaagtcctgtacaac

SEQ ID NO: 459478 - DNA, 122 bp, Homo sapiens
ccaatcaaaagagaggtcgaggatttgagccaatcgcagcgggcgaaaggggcgggccgtcggcgagcgctgaaggtctctagccctcccctgcgctttagcctcagtgcggagccttaggc

SEQ ID NO: 459479 - DNA, 122 bp, Homo sapiens
cagctgaagggcctggaagaggccacgaggccgcggggacgcgcttcggggacccccgcgcgcccctatttccgcgtgccccatttcccgtgcggcacctgctgcgcccagtggcccacctg

SEQ ID NO: 459480 - DNA, 122 bp, Homo sapiens
cagtaagaagaacatgagagtttcttgatagtaatagaacttcctacacagactgggaaccgggttgtagcttgaggggatgtgacaacatagtggcccggaattttcactttggaaattaa

SEQ ID NO: 459481 - DNA, 122 bp, Homo sapiens
aacccttcgcatatggctccctaggatatgaccacatttgcacactccttcttgcagtgccggtccaaatcctccttcagtctcaaggactacttcaaatgtcatccttctatggaagtttc

SEQ ID NO: 459482 - DNA, 122 bp, Homo sapiens
gttcctgaggtggcgagtcatgtgtggctgccacttcgtttgcacggggcatctcagtcacggtgctctaagcagggcagaaaccactgtgcgttcccaacaggggcttgggggcgactgcc

SEQ ID NO: 459483 - DNA, 122 bp, Homo sapiens
tggcaaaccagcccagctggaaaatcctaaatgcaggctcatcagacttgaaatgaaatgcgtctgatcacccatactttctatgcttttgtggctctcccggatttctctacctgctggcg

SEQ ID NO: 459484 - DNA, 122 bp, Homo sapiens
gtgatcagtgtcacctggaataaataccacacgcctcctcctttctctctttcttgggtgcgtggtacagaagactgagattggcttacagagtgccccagggtccttgtactcgagggaca

SEQ ID NO: 459485 - DNA, 122 bp, Homo sapiens
acgtggggcccactggctcacacctgcttttccaccacccctcgcctgccttggggctcacgtccctccccggaattcccacgccccacaggcagaatctgaggcacacctcagcgccccgc

SEQ ID NO: 459486 - DNA, 122 bp, Homo sapiens
tgcgaaggtcagaggcccagcggcgccagggctcctcggcggagagccgcccgggtccggcgctttgctttcgccttctgccccaccgcgggcgaagccccagggccccggggagactccag

SEQ ID NO: 459487 - DNA, 122 bp, Homo sapiens
caagcccctgggtcattcaaaccacttcacgtttccaagcaccctaccccaggccttaaacgcggctccagctgcctgttccccacgcgctgctctggacacaggatcaagtcagagaccag

SEQ ID NO: 459488 - DNA, 122 bp, Homo sapiens
tgatctgttctccaggtttacttcatctcttcatcaagaaaaggcaagaaccaagagacacgtcagcatctctggcttggaaccttaaactttaaagtcacgtggaacctggaagaatcccc

SEQ ID NO: 459489 - DNA, 122 bp, Homo sapiens
ccgttccctcctgcgcagggacagagacatttaaaggcctgaatggacgtcagcaccagtcgagctcgctgggtgagcgccaggtctccccgccccacggattgtagcgcgcacagggcgat

SEQ ID NO: 459490 - DNA, 122 bp, Homo sapiens
aaaacattcagaaccactttcaagatgctgctgctgtgccagtgtgacaaaaaaaagaggcgcaagcagcagtaccagcagagacagtcggtcatttttcacaagcgcgcacccgagcaggc

SEQ ID NO: 459491 - DNA, 122 bp, Homo sapiens
acctgcaggagtttgcgggcccctccgggaaactctccctgctggaagtgggctgtggcacgggggccaacttcaagttctacccacctgggtgcagggtgacctgtattgaccccaacccc

SEQ ID NO: 459492 - DNA, 122 bp, Homo sapiens
ccttggttgaaaggcccatctcattcagcttccagcttcctttttcttttccttttgagacggagtcttgctttgtcgcccaggctggagtgcagtggcatgatctcggctcactataactt

SEQ ID NO: 459493 - DNA, 122 bp, Homo sapiens
tcagagcccaagcagcctccagctctcaaaccgtgccccgtgtgctgaccattccgcagacgtggacttcccactagccatgctactgtttcaggaactgggaatgaggaattcctgaggtt

SEQ ID NO: 459494 - DNA, 122 bp, Homo sapiens
agccactgccaccgctgccggctggttgaccatagtcaggctggtagccgccctgaggcccgtaggaatcctggggcccgtacccgccggggccctgcccgtagcctgcatcgccgtaggcg

SEQ ID NO: 459495 - DNA, 122 bp, Homo sapiens
caggagccaaactccgtctcaaaaaaaaaaaaaatatttagcctagtgccttgcacacaacgagtgctcaagaaatatactgttaatgtttttattatttgttcatctgtaccggtgctcag

SEQ ID NO: 459496 - DNA, 122 bp, Homo sapiens
gagagtgatcctctttccaaactggatctctggcaatctgcaaatctgccatggcttacacggcaactgtatagggaatttttcttcctagaaaatgcaaagagatgatgttttctgattaa

SEQ ID NO: 459497 - DNA, 122 bp, Homo sapiens
atctgcctgcctcggcctcccaaagtgctgggattataggtgtgagccactgcacccagccgtatgtgattttctatgtagaagtcttgtgcatcttttgctagatttattcttaagtattt

SEQ ID NO: 459498 - DNA, 122 bp, Homo sapiens
ctggagccgattttatacctaagatggctgcgcccacagccactcccattccaagatggccgtaccaacatggcagcccccacgtcacggagtttaccgtacagggcttctcttaaaatggc

SEQ ID NO: 459499 - DNA, 122 bp, Homo sapiens
ccttggggaccttggacacggagctggttatgtcacatctggctctcagagctggggcagcgtctaggaggcctgatgtagaaagcactcagctaagccctagttaccggcacacgggcacc

SEQ ID NO: 459500 - DNA, 122 bp, Homo sapiens
caggagcactgaggttggggcgacctgctgccaactggtctggttttcccttttaacacacgcttcttgcccactatccggtccctgcggtcagtgggtgcagcaggggtcgcagtccaaac

SEQ ID NO: 459501 - DNA, 122 bp, Homo sapiens
cttttaaggagagttcctgacatgacggtgggcttttcctgcagatgcacctctgggtagcgccctctttacagccttgaaacctggtcaactacattactcagaaagctctgcgttgaatg

SEQ ID NO: 459502 - DNA, 122 bp, Homo sapiens
gctccgggcgtaggaacttccatagtttccctctcacaggaggggaaccttttccgctcgcgggagcccaggccagacgccacagtcaggcttccagaccaccttggccccgaaaccagttg

SEQ ID NO: 459503 - DNA, 122 bp, Homo sapiens
gctcaccccctcacacctgcgcatacccgacacttgttcacctccacacacctgcacgcacgactggatggcaggctcctcggaggaactttctaccagcgtctaggagttgctgagtgatg

SEQ ID NO: 459504 - DNA, 122 bp, Homo sapiens
ccaccctcctactgcttcttaagggacaccttgggtgctcaggaaccctggtttgagagccggatagtaagtggaagagggagtttgctctgaggccttgttgggcaaatggcatggacgga

SEQ ID NO: 459505 - DNA, 122 bp, Homo sapiens
agctcttagagatgctctgaagaaaagtttaagaactatttggattccaagtagatccaacgagaaagagcaggattgagatgtatacctccttagccagcatgaaggtgcggttggtgata

SEQ ID NO: 459506 - DNA, 122 bp, Homo sapiens
acgatatttgaaagcatggtccgctggacagagtaaggccgaaacctgggcgcctcgggccggactccggagccgcagctgaatgctcggctcctgggcctaactcggtgacccccaccgcc

SEQ ID NO: 459507 - DNA, 122 bp, Homo sapiens
aaaggctggctcccctggccgaggcctgggactgatgcaagacagccagccagtcacctccgcctcccatgaacctcttggaaaacttctcctgtcccacttctgccaccctccagctcctt

SEQ ID NO: 459508 - DNA, 122 bp, Homo sapiens
ccgattgtacttcagccctgcagggtctaacatcttgtccttaaccttgttatgattagacgtgagagtgtgggatgaagcctctaagaactaatgggatacgttggtcttgactgaactac

SEQ ID NO: 459509 - DNA, 122 bp, Homo sapiens
cagagattccatctagcaaaggagatcatgtaaaggacccacctccttccacaacctgatcgccaggtttgcccatgcccagcccctctgggtgggagacttgtttctccttgtctatccct

SEQ ID NO: 459510 - DNA, 122 bp, Homo sapiens
tttctgcaccctcgcacccacacccctcgcggttccagggggcggcggccccgggcggagcgctttcgcgtgcagccaccactccaggtaggagcggagcgggcattcctgcgcctacgggc

SEQ ID NO: 459511 - DNA, 122 bp, Homo sapiens
gggctgggcggggcggacgtggggcaggtcacttcgtcttccgaggctctggggaaggaccgctccgtctcacgggtcacttggacagtgggcgcacccgagggttgaggcgtcatcctacg

SEQ ID NO: 459512 - DNA, 122 bp, Homo sapiens
cacacaacccttcgcaggcttgctaacacccctctggcaacctctctggtcatgtcttcccggtgtccaaccctgacccctcttgctgccgcatcggctgttttctatttttgctgtgctgc

SEQ ID NO: 459513 - DNA, 122 bp, Homo sapiens
tataggatgtggtgacttgggggttctttgttgggaccagaggaaagctgagaaacagctcggtgctgttgtgtttagcactggcttggtaaacaggagagtaaacacagacactcttatgc

SEQ ID NO: 459514 - DNA, 122 bp, Homo sapiens
aaggtataggcccggctggttgcagcccgttctcacctgctccaccccttccctggcagccgggaagaagtccctgacctacttccaccgtgaccccagggctgccttgcaggaggccacct

SEQ ID NO: 459515 - DNA, 122 bp, Homo sapiens
tatttgggtggctgaggcagcagaatcgcttgaacccgggaggcagagcttgcagtgagccgagattgcaccactgcactctaggctagtgacagagcgagacatcgtctcaaaaaaaaaaa

SEQ ID NO: 459516 - DNA, 122 bp, Homo sapiens
tcattcagccgcgagccagaaatgctccaattgttcagaagaccctgggcgactcagcaccggatatgagcgcacattctgccaggaggacgttgtcaggagccacgcgtggctcatctgtt

SEQ ID NO: 459517 - DNA, 122 bp, Homo sapiens
tataatcaactccttcaaatgacactctcttgatcagcacctccttctactaggtttaagcgcctactcctacccagcagtctgtttaccacattttctaaaaatcattttccttatgtttg

SEQ ID NO: 459518 - DNA, 122 bp, Homo sapiens
aactgctgaactggagagacgatggagatggaagagcaggtctgcagggtcacgcagctgcgagtgcaggggatgtgctcacacacagccccgcccctctggaggtgatgccgtctagaaag

SEQ ID NO: 459519 - DNA, 122 bp, Homo sapiens
ttcccttcttaggaaatgctttcagtgaggctgtgagcagtaccggagggtgatggcttgcgtttccttaagttatcctatctaaaatattttcccaagtatttccgccgggcgctgtggct

SEQ ID NO: 459520 - DNA, 122 bp, Homo sapiens
aagacaagacggtgtttcatcagccagtgttgcagaactcggcccctctcaggctctgcacgtaccccatcccccgacaaagcctagctctccctctctttctgattcatgggaactaccta

SEQ ID NO: 459521 - DNA, 122 bp, Homo sapiens
gttttattgctgttcactggatttggctgacatttgctttttactttcatcaaatcttaccgaatgatgaagacacatcaagttacaaaggtaccactttctctctaatatcttttcttttt

SEQ ID NO: 459522 - DNA, 122 bp, Homo sapiens
acctttggacagtgccaacatgtttttcttttgtttgtttgagacggagcgttcctctgtcgccagttagtgtttacagctcctagccccagtgggcgtgtgctaccgtgtgctcttttaat

SEQ ID NO: 459523 - DNA, 122 bp, Homo sapiens
gaaataagagagcgtttcaacagtgaggatcctggtactatggatgcagcccagggtggccgggtgagcaagctggacgcgaggccagaggctctccagggcatctatggagagagaactgg

SEQ ID NO: 459524 - DNA, 122 bp, Homo sapiens
ggtaggaggaaaatcaggaatgtgtaataacatgcaagtctaaagaaagtctcggccaggcgcggtggctcacgcctgtaatcccagcactttgggaggccgaggcaggtggatcacgaggt

SEQ ID NO: 459525 - DNA, 122 bp, Homo sapiens
gctgttgagtctcgactggttctgcaagtggatctcagtgcagggcccggggacccaaggcgaggcctttttcccctgctaccgctgggtgcagggccacggaattatctgcctgcctgagg

SEQ ID NO: 459526 - DNA, 122 bp, Homo sapiens
ccatccatcccttggttcatttgtaaattgtactaacagtctgttctgaaattaggccctcggctcccttgctcccccttccctgagacagtcttaacacatcgatcctctcaaagcatttg

SEQ ID NO: 459527 - DNA, 122 bp, Homo sapiens
gctcgggagagcgctggcctctccagtaaatggtggggatccgcacgcctcaaagggctgcgccccgggaccccagctgctccgctcctcacagcctgaccctgcttcacttccagccgtgc

SEQ ID NO: 459528 - DNA, 122 bp, Homo sapiens
gggccactttcttccaattaagaacagacacacatgtggtagctggaaatccagaattgtcgtgaataaagactcttacttgtagatccaagagatatttataaccccattagactctagac

SEQ ID NO: 459529 - DNA, 122 bp, Homo sapiens
gttttaatttttaaacttcttgtagagatgggggtctcagtgcattgaccagtctggtctcgaactcctgggctcaagcgatcctcccaccttggcctcccaaagtgctgggattacaggag

SEQ ID NO: 459530 - DNA, 122 bp, Homo sapiens
taaaggccttatactattattaaggaaatgcatttctggctaagtctgacagtacaggaacgcagacctgctactctcaccaggggctgaactaacagaacaaaaaaagatagatgtatcac

SEQ ID NO: 459531 - DNA, 122 bp, Homo sapiens
ctcactcccaggtcttctgccctggataacgaagggctcattctatcaagggcacttctgcggcttctccttccagtgccaaccaactcactgactaactgggtatcctacagttcaattcc

SEQ ID NO: 459532 - DNA, 122 bp, Homo sapiens
gcggatccggcgaccgcggaggggagaggagcgccggacgctctcgcacgcccgcccgcccgcccgcgcacctccaacccacctgccgccggccagacaggaatggactgtgtgactgaatg

SEQ ID NO: 459533 - DNA, 122 bp, Homo sapiens
tggggcatattgaattagaggttaaaggtggagggggtggggtgtggagaaagggaaagacggagaaagaaaagaagggctgctcagtggcagacttttagtgaaatggtgaatgcagcctt

SEQ ID NO: 459534 - DNA, 122 bp, Homo sapiens
cgggcacggcgaaggaggtgcggggtgctgcagcgccccctggcgacagtccaggagacgcgccgagggcaaagaaaccactaacggagcatccaagggcgagcgcgcgggacgcctctaga

SEQ ID NO: 459535 - DNA, 122 bp, Homo sapiens
aagcttgttcaatgaaaaaaaaaatgaatgaatggtcacttgggagaggcggctcccaagcggacacccaggagtcggccaacccctttaacgcccgcatcccctgctctccacgacctcaa

SEQ ID NO: 459536 - DNA, 122 bp, Homo sapiens
gctgtaacacaataccatatgccaggctgctcaaacaatgacattgatttctcacagtttcgcaggctggaagtctagatcagggtgcagcacactgcagttcttggtaaggatcctcttcc

SEQ ID NO: 459537 - DNA, 122 bp, Homo sapiens
aaaagatttttggttttgtattctacaaataaagcaacctattaattgaattcctctcagcgaattcttcactcaggtgattctggagagggcgggggacagacgcggccgcagcccaggtc

SEQ ID NO: 459538 - DNA, 122 bp, Homo sapiens
ggtagggtggtattagcaatgaaagcacagacctcggagccgggagagaccacggaaatccgtagcccgatcccgctcactttatagaagaggaaacgaggctcagggagatgtacagattt

SEQ ID NO: 459539 - DNA, 122 bp, Homo sapiens
gccgccgctcggcctcaggcagctgcatcctcggccgggccgggtccccgccccgcgccgcgcccggccccgccatggtgtcctggatcatctctcgcctggtggtgtgagtgcggcggcgg

SEQ ID NO: 459540 - DNA, 122 bp, Homo sapiens
ggggccacggggagcggtggtgtccagggcccggtcggaagtcagcaagtccagcttcagcgcgtttccctcgaggcgcccttgagctgtggggcggagccgggcggagtccggggctcaga

SEQ ID NO: 459541 - DNA, 122 bp, Homo sapiens
ggagattatgaaccgtttcacagaccggtgtacaccctttgtgtacagaggttgtacacccgtctgtatcgggagtcatatcatcctcttcctccctgaatattaggaacagtatctcaggg

SEQ ID NO: 459542 - DNA, 122 bp, Homo sapiens
aagtataaaggcaaagtagttatgacactgttggcagtgaaattatacttggaactctttcgcagaaatcgctagggcctccctagctctgggccccttctcctccaggcgctccagtttca

SEQ ID NO: 459543 - DNA, 122 bp, Homo sapiens
ctccgcgcgggaccctgggcctccgcaggccccggcggggtcgccccgaggcgggcctggcgagtccaatcgccctgcccgcaggggacccgcccctcatgggtcccgccaatcgcagggta

SEQ ID NO: 459544 - DNA, 122 bp, Homo sapiens
cgcagacccacaagtgagcgaacacacatctctgagcagatctgcgggggcagaggagcgcgcttcgctctttcctgcacccccagcctcctcgcctccccaccccgcccctcctccacctc

SEQ ID NO: 459545 - DNA, 122 bp, Homo sapiens
gggaaccttctagtcaattgcctgaagttcgaaggtttggggggtttttgtggttgcttccgtttgttttggcagttgcagaatcccccgaaaaggtgggaatgtggatttttcaaggcagg

SEQ ID NO: 459546 - DNA, 122 bp, Homo sapiens
agaagagccatggatgcatccggagacaatgctgctcacgagcttacatttcctgggcttcgatttcacttatctgagaaacagaaccaagagtaaggatgtgtccggctacatccttcaga

SEQ ID NO: 459547 - DNA, 122 bp, Homo sapiens
gcaagaacatttttttttggaaatcaagttaggatttttcagatagtgtagaattgtcatcgagcaaggacttacaagctttgcttttattgctttcatggtgtagcttttttctgcatctg

SEQ ID NO: 459548 - DNA, 122 bp, Homo sapiens
gagacgcactttcccccgagtacccacccctgagagcgagaagagcacgttggttatgctcgctcacggctctggagccccaacatctggctgcagagtccacttctgctgcctcctggctt

SEQ ID NO: 459549 - DNA, 122 bp, Homo sapiens
cgaggcctcggagctggttgctgctcacaggcagagaaacgctggtatgcatttgggtgtcgcttgggtggatgttgcacagctgcaacccctcagacctcgtctctccgcgcctgcctggg

SEQ ID NO: 459550 - DNA, 122 bp, Homo sapiens
ttgtttctacaaatgtttactgagcccctgcagggagttgggcattgtgcaaagccctcacggggctcatgttctcagggcaaagacagtcccttaggcagagaaatgtggaatatgcagag

SEQ ID NO: 459551 - DNA, 122 bp, Homo sapiens
gcgcaacacgtatagttgccgtaatgccgggcgctcatgttggcaaagagaagcatcgagcgagtgcgctccatctgcaccttcaggccctcggccgtgccgctgctcagtagtctgtcatc

SEQ ID NO: 459552 - DNA, 122 bp, Homo sapiens
ccacgagtcatgcacagcagacctcgtgtccagaagacctcagtgttcttctgtctcctccgctccagtcctaggccagaagctgcctttgaggcaagaggtctgatagtccactgtgtttc

SEQ ID NO: 459553 - DNA, 122 bp, Homo sapiens
tctcctcttttgcctgctctgagggttctggctctctcactgacagcccctcctcccactcggggaggggtctgcacctgcagagtcattcccttggcttttcaggtacataatcaggatag

SEQ ID NO: 459554 - DNA, 122 bp, Homo sapiens
gacgccttggattcgactctgtggtgggtggtccacctccctgagaccaggcatccacgtcgggcagcacatgctacccagtccacagaagaggaaacagaggctccgagaggaagggactg

SEQ ID NO: 459555 - DNA, 122 bp, Homo sapiens
cagctgaatcattcatgtcccctgagtggccctcattggctctttacaggcttgtgtcctcgcagagataacccgttgttgctctttttctcatgcttttctgtattagattttaagttcca

SEQ ID NO: 459556 - DNA, 122 bp, Homo sapiens
gccagcccggcctctgttctctcggttttcccttcctagcttaggccggcctgtctctctcgctattttccacagcctttcggtaattgtagctcccctcttaggaccttactcttccattc

SEQ ID NO: 459557 - DNA, 122 bp, Homo sapiens
accactctgccatcgcacagcacttgaaactcctgtgaatactggaaagaagagctgagacgttacgagaagtcaggtcctggggaagtcacttgatctccaactctcactaagcctgaagc

SEQ ID NO: 459558 - DNA, 122 bp, Homo sapiens
gtctttattacagtgtaaatccaagctcaggcctcccctgggccccatgcaaagccccggcgttggggctagtagcatccaggagacaccaacgcctcacggcgcctccagcggcgggtccg

SEQ ID NO: 459559 - DNA, 122 bp, Homo sapiens
agaaaagtcaggaagttaagacacttgccaaaagctacggagtgtgttttatgagagctgcgattaagatgaggccagatctttgcctcaagttctgcgctcatagttctcctgcttcatga

SEQ ID NO: 459560 - DNA, 122 bp, Homo sapiens
cgaggatgaggactgaggctcaatttggagacacggtcctatgtgacctcagggtgcaggcggggtgaggtgtggagatggaagtaggcctctcctcatcctcccttcacctcaggatgccc

SEQ ID NO: 459561 - DNA, 122 bp, Homo sapiens
tttggggaagtgtagtcttgagcccccaagattccttttctgttctatggagtgggcccgcgcaaaggactccatttcccggcgtgctgccatccgtcgggtcgcggcagccattttgttcc

SEQ ID NO: 459562 - DNA, 122 bp, Homo sapiens
acccagtaaggcttgcatagtccagtaagggttggacggaggatagcacgtggcacaagacgcattgtaaatcaaagccacggtgaaaaacaaaaggacactgaagccacacgttatccagt

SEQ ID NO: 459563 - DNA, 122 bp, Homo sapiens
cttcaaagcctcattttacatgaggctttcctgaagccatagacatggggctgtcctccacgcacctattgctctcacctgcaggtggcccatgtctgcactgcccaaatttgttaggcgtt

SEQ ID NO: 459564 - DNA, 122 bp, Homo sapiens
cgttagcatttactttggagttaaggtgacgcaggaaccgtcactgcagcgtttgctttgcgttcagatgcggcagctcagcgcagctgtaggtggaggagcgtgccagggaggggggagct

SEQ ID NO: 459565 - DNA, 122 bp, Homo sapiens
cccatgcactttccagatagagatttctgaggatctcctttcttgtcccccaatccctgtcgccgcaggagaaatctgttccccaatatgcgtcccccttcctcaaaataaggctgttcctt

SEQ ID NO: 459566 - DNA, 122 bp, Homo sapiens
ccccgcccccgccccccccgcgctcactagggagaggctggggggaggcagtgacccacgcgcctcagcccgcggctgacgcaccttcgaaaagttgcgctccgaccttctcacgacctaca

SEQ ID NO: 459567 - DNA, 122 bp, Homo sapiens
attgccttccccgcagtcatttcgctattagctgttggaggagcagaccgtgtaggctgacgagatctgagtaaggacgagggatgagatgtcaaggcagggaacacggctgcctttgcgag

SEQ ID NO: 459568 - DNA, 122 bp, Homo sapiens
aatccctgtggtgtgtctctgacagggaggaggaggaggggccaggcagggtctggtctccgctctgagcactgaggccacagcagcagcagaacagcaacaacgacaacaaaaaaccagag

SEQ ID NO: 459569 - DNA, 122 bp, Homo sapiens
cgaagcggagggagagggggggaccgagcccgggcccgggctgaggggtgggggagaggccgccctgcgctgctcgcgcccccacacccgctaccggcaacgactactgtgaggtgacagag

SEQ ID NO: 459570 - DNA, 122 bp, Homo sapiens
ggatttgcctcttcaagatcttcaaatttgtcatcgtcgggaatggcgaggctccgggctcgggacagcggggtggcgcccgggcggcgcgggtagcccgacatcgccgcgggcccggcggg

SEQ ID NO: 459571 - DNA, 122 bp, Homo sapiens
ggtgcgctcacctggagtagtcgctctgcacctccagggtccgggtatccagcagcaggccgcaccaggggaataggccgtgggccggcatctgaacaaaagccgtgccacccagggcctcg

SEQ ID NO: 459572 - DNA, 122 bp, Homo sapiens
caagggaggtgctgcggaggcggatgcatggaggcggatgcggaggcggatgcatggaggcggatgcatggaggcagatggatgcacacgtctagagtttaaaaggagatctgaggcggaga

SEQ ID NO: 459573 - DNA, 122 bp, Homo sapiens
caggatcaactctgctgtgtgccggctcagagttcccacccagctttgggggtgtggggccgagagaaaaacacagaaatgcgagttcggtggtgactcaggctaggcggtggggaatcagg

SEQ ID NO: 459574 - DNA, 122 bp, Homo sapiens
agatgatgatgacgttgtttagacactcaggaacagagattgcagattggcttaagagtgcgccctttattaaagatggtatgcatggaaagacatggaacaattttggaaggatacaaaaa

SEQ ID NO: 459575 - DNA, 122 bp, Homo sapiens
cgcgtgggaggccggcggggagcttggcgccagcacagcacggctgggccgcgagagggacgatggggtgccgcctccggccggccccactttcgaaggaatctgccttgctgttcctgcgg

SEQ ID NO: 459576 - DNA, 122 bp, Homo sapiens
ttctgcagctgggttcgggggcgtcactggcccttccctcttgctaggagataaacgctgcgcaaagccaatcaccaggctgagggggcggaggctgcttggagagtaacgtccccggctct

SEQ ID NO: 459577 - DNA, 122 bp, Homo sapiens
gttctttgtgagagaggaaactcgcttatgaataacaggactggacgccgtaaaagttggcggctggaattcttgtttctcaggcgccgctgttttctcttgactttttatctctggttttt

SEQ ID NO: 459578 - DNA, 122 bp, Homo sapiens
ccaagaggggagagtgggctggttgaaaccagcggaaccggcctccccacggtcagctcccgggtccacagacctgagtccccgttggcgcagctgggccctcagtacccccggagagtggg

SEQ ID NO: 459579 - DNA, 122 bp, Homo sapiens
gcttggggtcaggggcctggaactgtcctggacacagccacttcctggctgtatgagcttcgtcctgtcactaaacctctctgaacctctgtttgtactcagggcaaatggaggtgcctaca

SEQ ID NO: 459580 - DNA, 122 bp, Homo sapiens
gtcccaggcgcccaggttcccctccccagcccggaccccgagccgggaccctggtaccggcgccgctcacctgccgcgctccaggcggcgctccccgcccctcgccctccgcctccgcctcc

SEQ ID NO: 459581 - DNA, 122 bp, Homo sapiens
atacttggagaatgtctaacttattcaacattagatatccagcacccaggaaagggcctgcgcacataataggtgctcggtaaatacttgttgaaatgctgagtcactgaaatcaatttgat

SEQ ID NO: 459582 - DNA, 122 bp, Homo sapiens
aaagcccgctggctccccttcacattcactcacaactaaattcccaggaggactgatctgcggacctaccagctgagtcccagtcagtgagaaagaatgaagaggacaggaggaccacctct

SEQ ID NO: 459583 - DNA, 122 bp, Homo sapiens
ggttctgcagaaaaccaggaaggcgacagtgaaagggcgaacgggctgtgcgcttagctccgaatggcagcagagccatttccgagcccaaactgtccggactccagcgaacaaacccgagc

SEQ ID NO: 459584 - DNA, 122 bp, Homo sapiens
gggcctgcaccacgggcagccgcaggtgggacaagtgccacgtggaagtcgtggacactccggacattttcagctcccaagtgtccaagacagatcctggctgtgaggagagaggtcactgc

SEQ ID NO: 459585 - DNA, 122 bp, Homo sapiens
gtttctcttgcccaagtcactgttactgtgaggcatttgcaagggccgtttaatacaccgcgtggaaaccgtgttcagtgtctactcacgcagaggcctgccttctgacacacacatcaatc

SEQ ID NO: 459586 - DNA, 122 bp, Homo sapiens
tccaggcaggtctgcaccttgaagtaggcgacctgcaggtagttgtaggggctccgcttgcggaactccagctccatctcttcgctgagcgagtgggcggccggcggcccgaggcagcggcg

SEQ ID NO: 459587 - DNA, 122 bp, Homo sapiens
attatgctaaaggagccagatgaaaaacactacaaattgtatcattctatttatataaaacgtccagcaaagggaaacagagagacaaaaagataagtggttgtctggggctaagggtggga

SEQ ID NO: 459588 - DNA, 122 bp, Homo sapiens
agagcaggcacgcgtgtccccacaaaggcaagaaacacggaacaccagggtgccacggcccgaaaacctgtgtcccattgtgggctcacgaggacatgggtcagcacgagcacaccgtgagg

SEQ ID NO: 459589 - DNA, 122 bp, Homo sapiens
aaaacaatgggtttcatcaaagcaagtaaataattttctgtaaagctacaacaatcaactcgtactccctcctcagcttatttgatatagttgatttatgtggattattaaatctcccattt

SEQ ID NO: 459590 - DNA, 122 bp, Homo sapiens
atgctaaaagctggtactcaccctcctcctgggcctcctctggaaccaaagcgcccaccacgaccacggcctctgtcacccctagaaatgcagattttattttgacctcattgaaggaatac

SEQ ID NO: 459591 - DNA, 122 bp, Homo sapiens
aggtggaggaggcccggaagatgatcgaccaggtgcagcccagcggcgagtgagagccctcgtggggaacgggggggtggaggcgatgccgggggtggcgagtgagagccctcgtggggaac

SEQ ID NO: 459592 - DNA, 122 bp, Homo sapiens
aacactacaatgaagagtcaatgaagtaaataaacatctttccaaaatgcagatgcttttcgctttgctgcactggaggagcaggggactagcggataaacattaggcagctttagagaaga

SEQ ID NO: 459593 - DNA, 122 bp, Homo sapiens
gctgcagtagcacagggcaggcttgcagtaatcgtctgacaggcgtaaaccccatttgcccgtctgcagacaggccttgtcatcgcaagccaccatttagaagacgttatgtcaagcgcctc

SEQ ID NO: 459594 - DNA, 122 bp, Homo sapiens
cctccatgccggatcgcgggcgccgggcacccggggcctgaggaatgctcaggtgacaggcgcggcgcccggggcaacaggtcccgcccggcttcggcctcccggggtccggccgatcccac

SEQ ID NO: 459595 - DNA, 122 bp, Homo sapiens
gggtcctgccccggcaacgggatattttgcagatacccactgtgtcagaattcctggctccggggcaggtcctgaccccacctgcacacctccactttatcttagctttgcgtaaggtttga

SEQ ID NO: 459596 - DNA, 122 bp, Homo sapiens
ctgagctgccgcttcccactcagcatgaaatcggacccaccaaaaagcaatttcagctctcgcttctggcaaggtttccagttttgaggcagagctctggcacggggcagcctggtggtcag

SEQ ID NO: 459597 - DNA, 122 bp, Homo sapiens
caagggccacatgctcttgaactgttattacctttagcctccaacacagtattttatatgcgttttgcatttattcatttgccggattgaactgagaggggtgcctttcttagaatcgtatt

SEQ ID NO: 459598 - DNA, 122 bp, Homo sapiens
tcttccaggaagcccctcctgattgctcctgtacacatgcacaacagagtgcgtcagacgcgattctgctcttatcctgagacttctgggctttcatgccactggtaacaactgcttgtgtc

SEQ ID NO: 459599 - DNA, 122 bp, Homo sapiens
tgtcctatttggggctgagaaaattggagccccctcaaagatcattgactcagactccatcggtgggtctgtgtttacacaaggggagggttgacccacagagaagcgggttgctggccctg

SEQ ID NO: 459600 - DNA, 122 bp, Homo sapiens
gctgccgtcccagccgccgccgccgccgccgccgccgccgccgcccgagaaaaagtttcgcggaggggctcagtgaaaaaatgagcgagctagaggaagactttgccaagattctcatgctc

SEQ ID NO: 459601 - DNA, 122 bp, Homo sapiens
ttcttgaattctgccaaaagaagaccaggacaacaaaggtttcaggaaaacctctctgcacgcttccgggagccaactgaatgaagccgtgttgcccgagtgtgcgcacagagagccttggg

SEQ ID NO: 459602 - DNA, 122 bp, Homo sapiens
aggaatgagactgggaggagttttagaacatgaaccacatttctaaaccaaatcttggaacgcaaagtctagagagagtctagaatgtttgaaatttggatcatttcagaaaatctgaacct

SEQ ID NO: 459603 - DNA, 122 bp, Homo sapiens
agaaggacgcactgctctgattggcccggaagggttcaggagctgcccagcctttgggctcggggccaaaggccgcaccttcccccagcggccccgggcgaccagcgcgctccggccttgcc

SEQ ID NO: 459604 - DNA, 122 bp, Homo sapiens
ctgcagcagaggcgccgggtgccgctcttggctagtgctgtgcaaaatattggctcctcccgctgcagccagctcggaagaaaagtgcactctctatcaggcttcctgcagcggagacaccc

SEQ ID NO: 459605 - DNA, 122 bp, Homo sapiens
accatcctgggcaagcgcagctacgagcagcacaacggggtggacggtgagtggcccccccgcccggtgagtgtggccctccccgcccggtgagtccggcccgtccccgcccgggcacccgc

SEQ ID NO: 459606 - DNA, 122 bp, Homo sapiens
ggattagtgcccctgtaagagagacctcaaagagctctttcgactttgtgtcctttccaccgtatgaggacccagctcgtaggtgctgttgatgaaccagaaagcagtttctcaacagacac

SEQ ID NO: 459607 - DNA, 122 bp, Homo sapiens
aggctgcttttgacttcttttacaatacagacccttctattacacaggcactgaaactaacgcaaatggtggaattaggattggtaccacatagaaacatttttacagaaatgaaaaagcaa

SEQ ID NO: 459608 - DNA, 122 bp, Homo sapiens
ccgcctggcggtctgccctgaaccgccggttaccctgcccgcccgcagctcccaagcccccgcggcggccttggcactaccacctgccccggcacagtctcgccctccaccgcccgggcagc

SEQ ID NO: 459609 - DNA, 122 bp, Homo sapiens
agcacctgggccagcagctgcggagagtgtgctgggtcccccagcggtgccgcccgacagcgctgcgatcgaattatcacggggcctcagctgcttccccgcagggcagagctcgggacctg

SEQ ID NO: 459610 - DNA, 122 bp, Homo sapiens
tcccataaattcacccgaccatgagcacaagtgctgctcaacccacccagccaccccacccgcaggccaaaaatacgaggcagcacttgcctagtgactcacatcctctgcctgggccccgc

SEQ ID NO: 459611 - DNA, 122 bp, Homo sapiens
aaaaccatcgttgtatttcaactacaagaacactaatgaccccaacacgcaaaaccaactcgttaataaaattaattaaccactcatttattgatctccccactccatctaacatctccaca

SEQ ID NO: 459612 - DNA, 122 bp, Homo sapiens
gcccagggccacagaccgctcacagcggtaccggggcggggagcagggcgggcagggaatcggcccgcccttcgtcctgcccctcgccctactctgtcaccgcccctgggaagagtggaacc

SEQ ID NO: 459613 - DNA, 122 bp, Homo sapiens
ctggagtttgtgtgtgtggcttctctcatgtgagcttccctgatgtcatgtttgctagcacgcccaagcatttgactttttcgtgagcctccagtgactctactttgctaatataccttaaa

SEQ ID NO: 459614 - DNA, 122 bp, Homo sapiens
ccgcggggcggtcccggggctcgaaggcagaggctcccctaggtgtgccctgcctgaccccggctacaggaacgagcgctgtgggcctcggtttctcacccgtaaaatgaagaaaataatcc

SEQ ID NO: 459615 - DNA, 122 bp, Homo sapiens
agcacacatctacccctccctctgtgaggcgtatctgggaaaccaagcaatgcccaggagcgaccagggagggaggagacttccgagcccgtctctccctccatcctccagctgctgcccct

SEQ ID NO: 459616 - DNA, 122 bp, Homo sapiens
catctcagatgatgggcggccgggcagagagctcctcacttcctagatgtgatggcggcccggaagaggcgctcctcacttcctagatgggatggcggccgggcagagacgctcctcacttt

SEQ ID NO: 459617 - DNA, 122 bp, Homo sapiens
tcggcctcccaaagtgctgggattacaggcatgagccaccatgccaggccagaatttgttcgtagtagtacagaaaataatggtgggacttaaaattgatgatattttagatttgatggaaa

SEQ ID NO: 459618 - DNA, 122 bp, Homo sapiens
gtggcacttgcggcggttgcagacatcgttggacacgctggtggtgcacggggtgatgtacgccgacctgtacttcttgcaaatgtcgtcgaggttgcaggccttcgctgcatccaggcagt

SEQ ID NO: 459619 - DNA, 122 bp, Homo sapiens
gtgctggtccgggagatacctttgtttcttctgtagcaggccctggggagtttactggagcgcttgaggtagaagaacccagctacggagaggatgaggccggagctaatgaagaacgtgcc

SEQ ID NO: 459620 - DNA, 122 bp, Homo sapiens
agatatcagtgtcgatggcattcgctcccagctattcttaggagcctctcaagagctccacgcagcccggctgggcagcaagggacagaacaggcaaggctgggggtcaggggcaggggcag

SEQ ID NO: 459621 - DNA, 122 bp, Homo sapiens
tttattctttttggcttgggacccagggggttttctctccctctgagtcatcgatgagaccgtaacccccagtccccagccctaggacagcccatgctttccagatgtatttctgtgaaggt

SEQ ID NO: 459622 - DNA, 122 bp, Homo sapiens
gaggggagtacgcaacgtgccatgcgcagtggggcgaccgggaggactgatagagcgctccgccccaccccgccctgcggggaagtcccgccctttccgagtggccgcggctgcggcaggcc

SEQ ID NO: 459623 - DNA, 122 bp, Homo sapiens
ccctcccgcgcaaagggggcggggcggaggatgcaaatgaacctcgtgtaggccacggaccgctgtttcctttctccttggtaggggggttgtcccgaacttcctcgccccgctccgccccg

SEQ ID NO: 459624 - DNA, 122 bp, Homo sapiens
cagcagagtcaactttgagccctgttgcaatggttcttcttctaagaaaatgatgacacccggctttgtaaaagaattctttgctccctggaatgtgatgtactggaacaagatgcatttcc

SEQ ID NO: 459625 - DNA, 122 bp, Homo sapiens
gacttatttatgcttcaggggttgtcagtgtatacacaatagagaaggtgatggaggctccgaggcatgccaagtcagcactttgtgcatgttgaggccaaagagcatgttaagcaggctta

SEQ ID NO: 459626 - DNA, 122 bp, Homo sapiens
tccttttaaacacaaaaatgtccattgatacagcagattccgttcataggcatccttaatcgcagaaacaggagggcggcccttttcctcaaggcgctctcagtccagggatgtgcccgctc

SEQ ID NO: 459627 - DNA, 122 bp, Homo sapiens
ccgtcccagaacatcctttcctgctctcctgtctgtctaccccagagtccatgtagcagccgaatcctccagtttagaagcggaatcctctggacttgttggtccagactattaggttcttg

SEQ ID NO: 459628 - DNA, 122 bp, Homo sapiens
cgttgaagatattttgccttgtgaataaattgttcctgtaacgtttgagtcttcttcccccgtaaagttgcatttcctctcaagccagaatcttcaaaccagtataaatcaattcgtatttc

SEQ ID NO: 459629 - DNA, 122 bp, Homo sapiens
gctcactctcccgcccagggggccgggagccggggctggacggagctggggctgtggccgcgcgggaagtcgggaaggaaattcccccagtggcgcagggtccggcggcgccgaggggtggg

SEQ ID NO: 459630 - DNA, 122 bp, Homo sapiens
gcggccagtctggtccaggatcctggtggagctgcggcgaggccgcctcgtcagcacccgcgtcctctgagcacgtccagtgtccccagcctggcgatcaggtagcgaacagcgcaactccg

SEQ ID NO: 459631 - DNA, 122 bp, Homo sapiens
cccttcggcctttctccagtcaccccaattctccctgactgcctggctatctcccctccgcgcctgcccgcacgctgcccccaacactgcccgggctccctctgcccatgagaacacgggtc

SEQ ID NO: 459632 - DNA, 122 bp, Homo sapiens
cagatctgcccaaacgtgcttaccagcttccccgcattcctgctccaggttctcagcatacggactgcagccatcttaccccggaaatgacaacagtgccgcaaactggagagactctcctc

SEQ ID NO: 459633 - DNA, 122 bp, Homo sapiens
cctcccccaccgtgactctgcgcttcctgccccagccccggggcgggaggagacatttcccgttcacaccaaagttttcctggcagcgcctagacctgggcttagccactgcccctcttgcc

SEQ ID NO: 459634 - DNA, 122 bp, Homo sapiens
ctgcgtggcccgagcctccccgacaagtgctgccccctgctccacggcgcccagtcccatcgaccacccaagggctgaggagtgccggcgcacagcaggcagctccacctgcggccccggtg

SEQ ID NO: 459635 - DNA, 122 bp, Homo sapiens
agtgatcttaaggcgacatcttaatatactgtcatgtattttctccttttgtcccctcatcgaacccatgtggctgccttttgccctctttgtttagttacttggtaaataaagagaaatac

SEQ ID NO: 459636 - DNA, 122 bp, Homo sapiens
aaacataactgggcagaacaaagtttgactgtggtatcttaaacaataccaattgacttccggttatgaaagaagcagcatcctgttctgcatgcgcagaggtgatgctactggtccagagt

SEQ ID NO: 459637 - DNA, 122 bp, Homo sapiens
aatcagagcaataaaagaaatggccagggtcttagttcccggaggccaactgatgatttacgtttgggcaatggaacaaaagaaccgtcactttgagaagcaagacgtgcttgttccatgga

SEQ ID NO: 459638 - DNA, 122 bp, Homo sapiens
tggctacttttctctggcaccacaaacgccttcccgcgaatggcggagccagtcagctcccggggtgctcgcttcagccaatcggtgctcacggatgctacgcttgttcctgtctcctctgc

SEQ ID NO: 459639 - DNA, 122 bp, Homo sapiens
ctcaatcgaggcgccggcggggcggcccggcggccggaagtgcaccctgctcgggctttgcgcccccggcagcttcctccgcccgcgagggccccgcgccttcccattttcccaaccggcaa

SEQ ID NO: 459640 - DNA, 122 bp, Homo sapiens
aagagggcactgtctatgaaccaggaagtggccctcaccagacacggcatctgccagcaccgtcctgtgaaatgaatagtggtttataagccacttggactgtggtggtttgccattgcagt

SEQ ID NO: 459641 - DNA, 122 bp, Homo sapiens
ccccgccgcccacatgccaggggaaggagcgcagtgtgcgcgccgccaggaagcggcgatcgaaaccctgcagcaagagttcgatcccgcgttctcctcgggcgccatgacgtgggcggggc

SEQ ID NO: 459642 - DNA, 122 bp, Homo sapiens
tagacagatgaattctcagtaacttccttgtgttgtgtgtattcaactcacagagttgaacgatcctttacacagagcagacttgaaacactctttttgtggaatttgcaagtggagatttc

SEQ ID NO: 459643 - DNA, 122 bp, Homo sapiens
gtggccaggtgctgaagcgggaaggctggactctccctaggcgtcggggttccttcctggcgccccctcttcttaggctcttttcaagcacatacccggcaacgtgtgctctacccaagagc

SEQ ID NO: 459644 - DNA, 122 bp, Homo sapiens
gacaagtcacccagctgagtcactcccagctaggtggggacgaaggggatgcactgtgatcgtctgcgggaactaaacttgttccagggataaataggtagggtgcccggtgactcagagcg

SEQ ID NO: 459645 - DNA, 122 bp, Homo sapiens
aacagaagaaggggaaacaatgaaaattggagagtactgagtttataagaaatggatatgcggcatttggtggaaactggctttggacttgggaataggagaactgtaaatatggataatat

SEQ ID NO: 459646 - DNA, 122 bp, Homo sapiens
attcaatgaaggggtatggcacagttggtttcacacaatgagccctcatttaatgttggccgttattgctactattgttattgttgaaattgttgatgtcaatattgctatgattggcactc

SEQ ID NO: 459647 - DNA, 122 bp, Homo sapiens
cggtgaggctcacgcatgtgcttacgggcaagaacctgcacacgcaccacttcccgtcgccgctgtccaacaaccaggtgagcccctcccggagcccccagagagactcctggcctgtgtga

SEQ ID NO: 459648 - DNA, 122 bp, Homo sapiens
gggcggcggggcgggggcgggggcgggggcgagggggcagcgcggagttgagattccgcccggctactagggtttctctgggagaacgtgagaaatgatgttttcggccccagaatgatgga

SEQ ID NO: 459649 - DNA, 122 bp, Homo sapiens
ctttagaacgtccaaccgcaaaaatcaccttcttcgcctggtcttcctcaccaaagcgtccgctcccagagagtgtatctccgcgaacccaaccaagacgagcccaggaaataagtgcgggt

SEQ ID NO: 459650 - DNA, 122 bp, Homo sapiens
aacatgagtcttcgggccccgggtccaatagttgttttactcaagtgcagtatttgaagtcgccactggccgcctttgccctgctcttcagaataactccggcccaaaaagcttaaatgtat

SEQ ID NO: 459651 - DNA, 122 bp, Homo sapiens
cgaagggcaggcttgatcttcataagagaaaacagtactaacaccatccactgattgactcgcatatttccatcacttaaagctcctggcgtcactgccaggaatggaaagttaaaaaactc

SEQ ID NO: 459652 - DNA, 122 bp, Homo sapiens
tcagagggccaggatgacttgcttatgtgagaaggggtggactgtcccaaaggacaacgacgaggaagtgaagacagtctcaaaaaaatctcaaaaaaagactatgtgggcaaggtcgccca

SEQ ID NO: 459653 - DNA, 122 bp, Homo sapiens
taaatcacctaatatggggagggctgagtcgtccagccgaatgagttgggttaacaccagcgccgcagatcgatgttcccactatccaaacgtcgggctaatcccagttctgctcccttaac

SEQ ID NO: 459654 - DNA, 122 bp, Homo sapiens
tggtggccctgaagttgttcatggctcagacagccccagccactcaccagccctacacagcggccagcaagctttgggcaaactaagatggagaaaacagaagcagatgatgaagcggaaaa

SEQ ID NO: 459655 - DNA, 122 bp, Homo sapiens
gtgctacagagctgacggaagcctcctcaccacagggcggcctcactgtggggtggttggcgggtgggggtgggggtcactgggcaggaatcccgaaacattggcagcatctggaaggcttt

SEQ ID NO: 459656 - DNA, 122 bp, Homo sapiens
gctcgaaactctgcagcaagagtttggtacccgcgttctcctcaggcgccatgacgtgggcggggccgcagcgttgccaggagaccgggcggaagccgggcctggactgaaaagggggcggg

SEQ ID NO: 459657 - DNA, 122 bp, Homo sapiens
gaggcaggaggattgcttaagcctaggagttcacgaccagcctaagcaacaattgagactcgcctcccaagccttcccaccccgttctctatttaaaataataatagtcatcttaatgggtg

SEQ ID NO: 459658 - DNA, 122 bp, Homo sapiens
cgtgatctgcccgcctcagcctcccaaagtgctgggattacaggcatgagccactgcgcccggctgaaaaaaatcttatgctgatggcactatcacgtatctctgcaacaaaagtatatcta

SEQ ID NO: 459659 - DNA, 122 bp, Homo sapiens
ttcttcctcagcctctgctcctccaccctataatccttttatcacctcccctcctcacaccgggtccggcttacagtttcgttccgtgactagccctcccacacctgcccagcaatttactc

SEQ ID NO: 459660 - DNA, 122 bp, Homo sapiens
gcgcgcaggagtcccgaagtagcggggactagggcagccaggaggcagggggaaagctctcgcttcccgttaagcacaccctgcattctcgggtcgtggatgcagctccagcggagagcccg

SEQ ID NO: 459661 - DNA, 122 bp, Homo sapiens
agttgcccttgccgatggtgcggtcgatctcgtagtagccgatacgggcgggcatgggtccgcgggaggccggggctgggggacgcggctggccggccgcaggggacacggcagcgggggcg

SEQ ID NO: 459662 - DNA, 122 bp, Homo sapiens
tcatagacttctcactttcatttttctgccgcccaggaattacattccactattaaaatgcgctgggactgcctggcccggccgctcctgcgtgttcagacacaggtcgggcgaggaccctg

SEQ ID NO: 459663 - DNA, 122 bp, Homo sapiens
tctttggtgagggggagggaagctccaaaggggagtgctcagggattgtgttggttactacgctgaacttggaccagcctggcccggaagttcccagaagtgtgggctgaagggggcctgca

SEQ ID NO: 459664 - DNA, 122 bp, Homo sapiens
tctctcctttctcctcgactgttgctgtccttgctggcccgtcacaccctcactctgcagcgaccagaaaaaaagagccagtcgcttccgggacgtccctctgaagagagggacaactcctc

SEQ ID NO: 459665 - DNA, 122 bp, Homo sapiens
cacttgggctttgagcaatcaaaccagaacagagcagctgacaatgagagctccatctggcggtgaaactagtacaaatcagtgtgtgttgcccagaacactttcttggtaggtctgtttag

SEQ ID NO: 459666 - DNA, 122 bp, Homo sapiens
tgtggatagttgttgaatttggtgttcctgttgcggagaccatcgctggagggttctattcggccgtcttgctccatctcctgaagcctgacttttttgagcatgccctaacagtatgtcca

SEQ ID NO: 459667 - DNA, 122 bp, Homo sapiens
tagtctccctgtcacccagccggcggagcttggcggcacggattccagtgctgcctccaccgctgggaggcaccacttgacatgacctgggacaggtggctcagtctctctgtgcctctggt

SEQ ID NO: 459668 - DNA, 122 bp, Homo sapiens
cgctccgctcactccagcctgtttgggggcactttgtttgtgtcccacaatgctctgcgccggcggcctggctggggaaggggaggagaagggggcggggcggagcgcgctcgggggcgggg

SEQ ID NO: 459669 - DNA, 122 bp, Homo sapiens
ctgcctcacttcctttgtcacttgcaggctcttctgtctgcagataacagcaaaaacttgcgatgataaacaaaactgatctctgtgaacaaacaccctccaaacacacagactattaacac

SEQ ID NO: 459670 - DNA, 122 bp, Homo sapiens
gtctattccctgcccacaattctacctgctggtatgctggtgtcaaaataagaatatctccgtgtaatattttatcaacttggtgctgaaagggtgaattaagcagaaacagaaagaaataa

SEQ ID NO: 459671 - DNA, 122 bp, Homo sapiens
ggctacgtgcccagcgctcgcgtctgctccagtcgctctggcggtgcggggcgctggcgacgggacagggtttttgctgcccggggcctagtctacctcggcacgcttttctctgaaggaga

SEQ ID NO: 459672 - DNA, 122 bp, Homo sapiens
gccggttagctaatagacagctcacaggcagcatttatgcaaacgccaagcctggacccacgctgagtctccgcggccgccagacctatagttgcccggctgggctcccagaggagtgaaga

SEQ ID NO: 459673 - DNA, 122 bp, Homo sapiens
tagcctcatctgtagttttcatttgtacaaggaaaatgtactcctacattactttgcttgcgtccttaaaaattaatttttaaaggccaggtgcagtggctcacaactgtaatcccagcact

SEQ ID NO: 459674 - DNA, 122 bp, Homo sapiens
gcagaaatatatgtttgcagctaacagagtgtgcacagtaaaagcagaatgaaatataatcgaggtccaatgctgacattgtaagaagattgtggtcttcttaaaaagcaaagaaaatgttt

SEQ ID NO: 459675 - DNA, 122 bp, Homo sapiens
ggacgccagcgtttcagaagtagcataggctcctagatggacgctgacaaacccaagtagcgccttacattgtcgggcgaggaccagactccaagttaaaaggccggccgggctatcagtgg

SEQ ID NO: 459676 - DNA, 122 bp, Homo sapiens
aaagaaaaaaaaaaaagaaagataccctaaatcatccttccaaaagccatagcagctgagcgcagtggctcacgcctgtaatcccagcattttgagaggccaaggcgggcggatcacctgag

SEQ ID NO: 459677 - DNA, 122 bp, Homo sapiens
aaatgaatagaaactaaaatatttcttaaatatttaaagttcagctactcaaaatcttgacgctctggtctatccaagtcctactgattgctagtggcaatttcttcagggtgttctttctc

SEQ ID NO: 459678 - DNA, 122 bp, Homo sapiens
tgttataaggatgcaaagacatagtaatgatagagtggactttggggactccggggagagcgtgagaggggagtgaggaataaaagactatacattgggtagagtgtatactgctcgggtga

SEQ ID NO: 459679 - DNA, 122 bp, Homo sapiens
caccagcgaatctgcctttgtcgacaacctccgcaagcgtttcagcgagaacctcatatacgtaacgtgacccacttctcagctgtttttctagggtggttgttcccttcttgccttcacga

SEQ ID NO: 459680 - DNA, 122 bp, Homo sapiens
cgccgcctcccattggctccgccagttgctaggcgatgaacaaccgtggcctgcattggtcgggtgggggcctcggtagtctcctccttacctccaaaaaaacccggagaaaaagaagacct

SEQ ID NO: 459681 - DNA, 122 bp, Homo sapiens
gcctttctgtctccagctttccccttttcagaaggacatcagtcgtattcgattagagaccgctctaacgacctcattttgacctgactttaagaccctttctccaaatagagtcatattta

SEQ ID NO: 459682 - DNA, 122 bp, Homo sapiens
acagagtatacagcaggctcttgcctcactggcggggatcatttgccctagactggacaccgttccaatcccacctcaccccaaaaaatcaagtgtttctaagtaactcaactatgccccag

SEQ ID NO: 459683 - DNA, 122 bp, Homo sapiens
ctacaccatacaccatgtaaggcaatgggggaatagaataaaaataaatggccatgccatcgaaaagtttaaatctggtgaaaggtaggtgtaaacactagcagttataataggttaaatag

SEQ ID NO: 459684 - DNA, 122 bp, Homo sapiens
gagctcttacgtagtaacagtttcccccaaactccatctcagtcatgcatccctatgggccgcgattgcttcgattatcccataatttcctcactcctgacttagatggtttcgatttttca

SEQ ID NO: 459685 - DNA, 122 bp, Homo sapiens
ctcgcctagttcccgggtcttcggagcatcgcgagtgacagtggggttctccggggagggcgcggggagcggaggaaggttggctgggggaccggaggcgaagggggttcctcaaggccgag

SEQ ID NO: 459686 - DNA, 122 bp, Homo sapiens
agagagggggtgtggagtgacaccgtgcctgcttcatcttggccccaccccctgagggcccgaggactcagtgcaagggatgctgtcacaatagctgaagatagggtggcggcacatcctgc

SEQ ID NO: 459687 - DNA, 122 bp, Homo sapiens
ggtctcgtcagtaacatagggagtcgccatcttgaaaacgcaaaccacttccggcgtgagcgggctggggtcccgcccccctccccaccggaagtggagtcccgatcgtagcaagccaccat

SEQ ID NO: 459688 - DNA, 122 bp, Homo sapiens
tccgacgcgccagggcggagcggggatcgtggcgccgcggggctgtacgagggcgagctgcgcctcggccaggggtcccgcagtcccgcctccccggcccgggggcgtgggtgggggccgtt

SEQ ID NO: 459689 - DNA, 122 bp, Homo sapiens
atcagggtcatagactacaaatcaacgagtcaggtacagaagacagaaccttaggcattgcggaatttgaccaaaaatggtaaataaattggtgcaaattcatcatcacaattggaaaactg

SEQ ID NO: 459690 - DNA, 122 bp, Homo sapiens
gggtgacggttggggttggcccggtgacgttggagcgacgcagggcgggggacggcgagccgcgaggcagccacgcgggagaggccgccaggcggccacgccggggcgagggccaggggcca

SEQ ID NO: 459691 - DNA, 122 bp, Homo sapiens
aaatgagattcaaaggtgtctcctagcctagaatgtaaattctataaggaccttctcactcggagcacagtattggcacattatcagaaatctatacagatgcatttaggatgcatttctgt

SEQ ID NO: 459692 - DNA, 122 bp, Homo sapiens
ccaggcgggcgctggccacccccagccgtagcactgtgtccacactgcccctggccccaccgtcgcaccccaccgggctgccaccatgggcctcagtgctggccgctctaggtgactgctct

SEQ ID NO: 459693 - DNA, 122 bp, Homo sapiens
ttaattttgacctcatacatgaaaccactatttgttttcacattccatagaatctgaatgcgtattgtgtgctgttactgattgatcgtcatgtagcagtcttagtgtgccttcatttcaat

SEQ ID NO: 459694 - DNA, 122 bp, Homo sapiens
aggtttgttcctttttgaaattaggacacaagtccccaggcaggcttgttgggactccagcgaggtagcttttccatcactgaaggaaacgtagcaggcagcgtcaccggagcagggcacgg

SEQ ID NO: 459695 - DNA, 122 bp, Homo sapiens
aaaaaaaaagcctgcggcacactccaaaatccggaacatcccctcagatttctgtaaatccgggacatatgcgccgcaggtacgtacaccttcagctgaattaggaaagggaattacagtgg

SEQ ID NO: 459696 - DNA, 122 bp, Homo sapiens
tctgcttaactcagctctgtgcacacagtgggtccttcttacctaatgacttctgggcttcgtccatctgttcctttgttcatttgttgagcacctactgtgtgctggctctgtgctaggag

SEQ ID NO: 459697 - DNA, 122 bp, Homo sapiens
gctgcgtctaagaaacgaatatatagtgctttgcactcgactggcccattgtcagcatcccgcacttgttctttacctaacttgtgtggcttgcatattgcaatctgtattacaatccagac

SEQ ID NO: 459698 - DNA, 122 bp, Homo sapiens
aaaaagaaaaactcatgtcggccccagccctgaggctacctgacctgacaaaactctttacgctctatgtgtcagaaacaaaaaaaatggcagttagagttttaacccagactgtagggccc

SEQ ID NO: 459699 - DNA, 122 bp, Homo sapiens
ccgcctgtgcaggacaccgcgagaccagcagggccctgggaccctggcgcagccagcgcacgtcaggtgagtgaccagagtattgggacaccttgggggacagagcctgaaccactggtttt

SEQ ID NO: 459700 - DNA, 122 bp, Homo sapiens
agtgtgctgactcacaggccagtgccctggatggtttgcatgccctttctgcttttcttccgcagacttaggctgtgaggagggcaaaaatgcctttcctcctcctcatttcctcttccctc

SEQ ID NO: 459701 - DNA, 122 bp, Homo sapiens
ttgttgaaggcagacacgtggttcagagagaacttataaatctcccctccccggcaagatcgtgatgttatctgctggcagcagaaggttcgctccgagcggagctccagaagctcctgaca

SEQ ID NO: 459702 - DNA, 122 bp, Homo sapiens
cacaggtgcaaagtcaggtagcgaagactgagttcaagccaggtcaagcaagggacaggccgcggacaggcgggggccggtggccgggtcacggagcaggttccccatagccgcagggcctc

SEQ ID NO: 459703 - DNA, 122 bp, Homo sapiens
ccaggtgtctgagcagccacctagtgcagtgacccatcggggcttcccttgtggcctccgcggtccagaacctctcccaggtgtgatggatcctccaagccgctctttgagccgctgtccag

SEQ ID NO: 459704 - DNA, 122 bp, Homo sapiens
ctttttgagccacattcctgttctcagaggccccacccctttgggtacatctgatgagtacgtgacttttttgtggttgcccgggatcctgcctacacccaatacatagtgatatattttat

SEQ ID NO: 459705 - DNA, 122 bp, Homo sapiens
acggtcccctcatttgacgggttcgcctcctagcagcgcctgggcgagtgacatctgggccggaccagctggtgctgcgcggcgcaggtaagggcgtgcgcgggcagggacaggggtaaggg

SEQ ID NO: 459706 - DNA, 122 bp, Homo sapiens
ggcaagcgcggggcccaggcagcagctggtgtcgccaaggaaaccgctcgcagcgcctcccggggccggccttttcacttggcctttttggcaggcttcctcagccaccctgaaacccattc

SEQ ID NO: 459707 - DNA, 122 bp, Homo sapiens
cccctggctcccaggcaaacgagaccatcccgctctgcgtgctgtctccggtgggcaccacgagcagcatggctgtttattatctaagctgaggttctctgaggcaagataagggggcgcgg

SEQ ID NO: 459708 - DNA, 122 bp, Homo sapiens
ctatttacagaggtgtggacggagtcctgcagggacactgcagtggccagggctggaaaccgcgggagctagcccctaagcctcggggagggggacggggacggggacgggaaagccactgt

SEQ ID NO: 459709 - DNA, 122 bp, Homo sapiens
ctgtccagcctgtccggctcggggcaggcgacctcgtctggtggcagtgggggaggcagccgtttgcttcctcacagggtgtgccggaatcagaggctggaggcgtctggggagtaggcaaa

SEQ ID NO: 459710 - DNA, 122 bp, Homo sapiens
gcacgtccagggtccccaaggcagcaggttccaaggcactggggcagcccacgccgggggcgagccctgagcagcaggcaccattctcgccctgcgcagggcctgccacttggggcaggcca

SEQ ID NO: 459711 - DNA, 122 bp, Homo sapiens
ttggctcttgtgtctctcgtttcaggaaattaaaatgcatgacagatagcgagtccgccccgcccgactggccctattacctagccattgatgggattctggccaaggtccccgagtcctgt

SEQ ID NO: 459712 - DNA, 122 bp, Homo sapiens
tcgccgcggcggccgctgttggctgccgcgccgctgggactgagatgactgtggctgggccggccacggcagctgcttctgccttgactgctgcccctgacccttctgctgtttcttccttg

SEQ ID NO: 459713 - DNA, 122 bp, Homo sapiens
gagggtccgtgctgagcgccaaacttcaagatgagcagggccagcctcaagggccacagacggccatctggcccctccctctgtgtgatctgtgagtctgtgggagatggtctggaactgtc

SEQ ID NO: 459714 - DNA, 122 bp, Homo sapiens
tcagtggggactgaactccttgtttaaaatagtttatcaaactaatatatgagtgttttgcgccaggcattgctaacgaacacctttatgatcctgttgtcacaaactacagtctagtgaga

SEQ ID NO: 459715 - DNA, 122 bp, Homo sapiens
gaaggactaccctacccttgcgagggaccgcaggaggtgacgcccctgggcctcggtgggcgcttctggcggttttcgatgtggcaacccccatcagccaggataatgatgaggcaggtaca

SEQ ID NO: 459716 - DNA, 122 bp, Homo sapiens
gctgaaagagcgccggattcgggagcgaatggcacagacacagggattgtgacaaaaatccgtatgcaagctttagatgctgagtgacacatactgatgcacagagtcaaagatgtcatcct

SEQ ID NO: 459717 - DNA, 122 bp, Homo sapiens
tctccatctcgttaggttgaaaaggcgcgagcctactggcaaggagctgcagcagaggggcgtgaatgaaatcattgactgctgttgatgtttggtctgcccctaggtcttttggtcactgc

SEQ ID NO: 459718 - DNA, 122 bp, Homo sapiens
ccaaggctagcaattatttcagctagcaaagggcccagccaggagcttgcctttgacatgcgaactaaatctagccagagccagacctcccctacctggcccatacccccgcagaaggcaat

SEQ ID NO: 459719 - DNA, 122 bp, Homo sapiens
gtgggatcgagccagcaggaacatgtgcacatagaggcacaggatgaagaccagcatcagcgggaacagcgacgtgaaggtgatcactgtgggcacatgatgggagaagatcaccatggtga

SEQ ID NO: 459720 - DNA, 122 bp, Homo sapiens
tgagcggcggttattggggctccaccagaggggacgtggacaggcgagacggcacagccccggcgcagccccgcgagtcctgctaagcccagctccccggactaagggcccgagatacgggc

SEQ ID NO: 459721 - DNA, 122 bp, Homo sapiens
cgtgggctctcgggcgcgagtttcggacgaggcctgggcgcggtggcaggggtctgcccacgccgggatctctgcctggtcccaggagcgggagactggagaagccccaggacgtgccgggg

SEQ ID NO: 459722 - DNA, 122 bp, Homo sapiens
gactgcactgagacatgactgcaccactgcactccagtctgggcgacagagaccttgtctcgaaaaaatatatatatgtaaattaaatttgtgaggctgggcacagtgggtcacgcctgtaa

SEQ ID NO: 459723 - DNA, 122 bp, Homo sapiens
cgtctctgtggctcagtctctgctggctccagagcgtggcctggcctgcgcgtcagtggacgtctgttcccgtgtgggggtgttcttgtgggcgggtgggctctgctgtttcccacgtctag

SEQ ID NO: 459724 - DNA, 122 bp, Homo sapiens
gttgctattattattatgactactatacacatggtctggagaaagccaacctccccaaagcggagattctccagtagagaacaggccctctaggttgcatatcaatagggagcatgtttaag

SEQ ID NO: 459725 - DNA, 122 bp, Homo sapiens
agtccagttctttggagatgcagctcacattgaggtcaagacagatcttgttggagatgtcgttaggctgtactgcaccaatgacaatgtaggtggtgttcctgttctttattacggccctg

SEQ ID NO: 459726 - DNA, 122 bp, Homo sapiens
atttggtgacactcggcgcgctgccgaccggcgttcggtgacacttggcacgctgccgaccggcgtttggtgacacttggcacgctgtctcctgatgctcttgctctgcttcatctgtgctc

SEQ ID NO: 459727 - DNA, 122 bp, Homo sapiens
cgcgctggctgtgggttccctctgagatcagtgcggagctgtcaaagcgagcaggggtggcgccgggagtgggaacgccacacagtgccaaatccccggctccagctcccgactcccggctc

SEQ ID NO: 459728 - DNA, 122 bp, Homo sapiens
gctgcctcctcaccatctggagaaagcggcggatgcgctgggcgtcctgtgcccggaacacgtgccacacagtgctgacctggctgcccggagaccagagcccctccccgtccaggcctgaa

SEQ ID NO: 459729 - DNA, 122 bp, Homo sapiens
tgctccgtggctgtctttggcaatcaggtaggtagaacagtttgtgaatgttcccaggggcgtgtgttagattgcacctaactattgggtgtggtaggctataatttgctgattgtccaaca

SEQ ID NO: 459730 - DNA, 122 bp, Homo sapiens
gccatgtggcccatggccgggattgcacctggctctgctgacacctcctggcggctatatcgagtgccctgactgtccttgcctgcatcactgtgctgatgcccccaagggcttccaaggcc

SEQ ID NO: 459731 - DNA, 122 bp, Homo sapiens
tggggttgggtcaaggtggagctctggtacctggtcatgctgcaggtcagccttgggactcgtaagctttgggccaagggacagctggcatcctgctggggggtcaccctatctctggggtc

SEQ ID NO: 459732 - DNA, 122 bp, Homo sapiens
tagggaaatacttaccacataagaatgtacgatatagctgcgaagtcaagctttaaaaaacgcctgtaatccttgcactttgggaggccgaggtgggcggattgccggagctcaggagttgg

SEQ ID NO: 459733 - DNA, 122 bp, Homo sapiens
gctcttgtctgagctaattggctgggccagcgactgattcatggcagggagccgggctctcggggacccccgtgtccctcccccgcgcctcccgcccaggaaaggctgcgtgaggcttttag

SEQ ID NO: 459734 - DNA, 122 bp, Homo sapiens
acttacttgttttgctgaaggggaggttaaaaggagctaaatgacctgggcagtgtcccacgggctcaagcccagccccctctggagagctagcgctgttcatatggttgcattcattctct

SEQ ID NO: 459735 - DNA, 122 bp, Homo sapiens
tcactcggagactaaaaatcccagataagcacctgctttgctagacccttgctggccctccggcttcgggcaggtctcctctttatgccactgtaaccccacaacaccggataccagcatgg

SEQ ID NO: 459736 - DNA, 122 bp, Homo sapiens
cctaagggttgaaacagactaaactgaaatgtggtggagtactccaaccccagacatacccgtcttgaattacacagagcaacttctgtagacttcaccacaaaaaagacagagtgctctga

SEQ ID NO: 459737 - DNA, 122 bp, Homo sapiens
cccagctctccggccaaaggttcggaaggtcctgggaaaaactgcgtgccagtcatccagcggactttcgctcactcgagtggggagcagagcggcagcgacacggacacagacagtggcta

SEQ ID NO: 459738 - DNA, 122 bp, Homo sapiens
agataggaggggtggatttgcaaggcctagaatagctggggagtggtttccccgcggaatcggcctccctgccgctcctgctttgtactgtgacgctcagcctgtgatgactggtgtggaat

SEQ ID NO: 459739 - DNA, 122 bp, Homo sapiens
agcttcaatcccagaaaagtggatcaaaacgacaggttccacgaacaaacactgcgccggcgcctctactttggagaaaaggaaaagggcgtgaggtttcggtcatttttgtcaaaggaaat

SEQ ID NO: 459740 - DNA, 122 bp, Homo sapiens
gaaaatgcccgctccctccaagtccctgggcaattgctgggacgcatctcagagactgcgcggggcggagaaggggtatgtgtttgggccactaatttgattttcttggaaactttcttcca

SEQ ID NO: 459741 - DNA, 122 bp, Homo sapiens
tttgaatgcaccatgtccatctgccagagaatccactggtcaggctctagggaggcaaaccggggggcccctgccaggaaatagctgctcagaccacacctagatcgcctgcaatttcaaag

SEQ ID NO: 459742 - DNA, 122 bp, Homo sapiens
gtccagaccctctggaaaccaagagccccagccagagctgtcccccgttttgcgtccaggcgagaagagcgttccgggaaaggcacctcataactcactcagcacagcgcacacgcagagag

SEQ ID NO: 459743 - DNA, 122 bp, Homo sapiens
caagataggggggtgggtttcctgagggctggagacaggacaggtatgaccatgcacagccgcattctttggcagagaacacacatgattcccccaaatatgtttctggaaacggaattgag

SEQ ID NO: 459744 - DNA, 122 bp, Homo sapiens
gggtgggcgcagccctttccccttctcctgaaaaccctgaccccaagctcaaggcagcaccgagagcaattcccagccaccagcgtcacccccagcgccacagcctgcctcccctagaggct

SEQ ID NO: 459745 - DNA, 122 bp, Homo sapiens
acccaccaattccagacacagtggggcgcactgggcatggtacaggagccctttcacctgcgcctgccgacggttgcagcagccgaggggcccgggcactgcagcctgagcccggccgtgca

SEQ ID NO: 459746 - DNA, 122 bp, Homo sapiens
atcaattatttccttgccgttgtctgtcggcctgtcagcctacccccacccgaccgagaacgccttgacggtagtgaaatggtcttgccaatagactccagagcaggctccgccacgatgtc

SEQ ID NO: 459747 - DNA, 122 bp, Homo sapiens
ttttagaagcataccatagggctcatgctgctccttccctgtgcagtgtatcaggaggtgcgtgtggctgatgtggctgatgcggctcagcgtggtggtgttgaccgtggccgcctggctga

SEQ ID NO: 459748 - DNA, 122 bp, Homo sapiens
ctacctggctggggcgagtggggtggtgtgggcctaaagcccagtgccaagaaaagacgccggtaagaatgccgaagaaagtctgtcaaaagggcaccgggttctcccctcgcccttcggtg

SEQ ID NO: 459749 - DNA, 122 bp, Homo sapiens
actaaccaatgttatttctgtaaaccaatgagaatccctgattaaccatttttgtaaccgcgccccaccttttgatttgtcctttaaaaatttgagcctctcttttgttctctggagcactc

SEQ ID NO: 459750 - DNA, 122 bp, Homo sapiens
atttaaatgttcacagtagctcagtgtacccaaatctgatttgtttgcttaattacttagcggctaaattaggatcgtcctccaaaattgtattgaattacatgaatccagttgcaaacatg

SEQ ID NO: 459751 - DNA, 122 bp, Homo sapiens
ctcacacctcccggttacttctcctcttcccagggacccagacggggagagggtgctgggcgccggcaagccacagcgtctgctctcatgatctcgcccccacccgccttgggcccccagag

SEQ ID NO: 459752 - DNA, 122 bp, Homo sapiens
ggccatttgagatgttccagcagaagatgacccttccccttgtgcgctggaaacgggccacgggcggcagtgccagaacggcacggtgtgcaagcccggctgggatggtcccaagcacggca

SEQ ID NO: 459753 - DNA, 122 bp, Homo sapiens
gcatcagccagagaaccacatgccccacagcggcaataaccagcatccaccagagaacgacgcaccccacagcggcaataaccggcatccaccagagaaccacgtgccccacagtggcaata

SEQ ID NO: 459754 - DNA, 122 bp, Homo sapiens
tctttcataccttatacatcactaccgcattcccccgaataggggagcccctcagcatttcgccacctagcgcggaatgctgctgcaggaagaggtggcgcggcctgaccgacctggcctga

SEQ ID NO: 459755 - DNA, 122 bp, Homo sapiens
tttccgcagagctgaaatcttaagccctttgctggcagcctgtgaatcctggaagggaaacgtgtacagccaagcctcagcatgggtgcaaggatgtcttccagctcctctccctccttagt

SEQ ID NO: 459756 - DNA, 122 bp, Homo sapiens
caacaaagccaaggaatctcgctgctgaggggtgagccggggtcttaagactgggattcccgttgagggaggtgaacagctgtgggagctcaggccgagccgggactctctctgcctggcca

SEQ ID NO: 459757 - DNA, 122 bp, Homo sapiens
taagaaagtgacagaggaacctgggggccgagcggcttgtttgtgggctgccccagcctccgtgcgagcgcttctcgcttggatggaggcggggccgcagtctcccaggtcccagctggggc

SEQ ID NO: 459758 - DNA, 122 bp, Homo sapiens
gcagtctatgaccccgacccccttcaggcctctggtggaggcagctggtggcaagggggtcggggctgtctagaagctgctttggcggagcaagtaccttgagtggagtcggagggtcgcgt

SEQ ID NO: 459759 - DNA, 122 bp, Homo sapiens
agcctggaggaggactctaccattccaagatattcagctgaacaccctagtagtgctagccggcagcagtggctcctgagacctccacaccagagtcccgcacacattcaaggtaagaaccc

SEQ ID NO: 459760 - DNA, 122 bp, Homo sapiens
ttgaaaaacagtcttcatccccagctccatttcagttttctggcatctctcactttcccacgtttctcaagagcaaaacaaacttttctcatgcgggcacctgagtcattcttctgcttctt

SEQ ID NO: 459761 - DNA, 122 bp, Homo sapiens
tgctctcgcctggcaaggggctctcggccgtggattagcgcagctggagacgtgggaggccgcgggccccgcccccgaccggcggcggctgcggcggcccagcgcggcagtcggcgctgcga

SEQ ID NO: 459762 - DNA, 122 bp, Homo sapiens
ccctaattggagcttgcggtggggccgttcgcccagcctagaactgccctaaccccgcagcgcgggtcctcttaccagagccctggcgggctaaaatgggatcctcctattctactcctact

SEQ ID NO: 459763 - DNA, 122 bp, Homo sapiens
cgccacgaggctgtggcgggaagaggttgtctggtgacgaccgcccccctaccccatgagcggaactgcacacggcccgctcacggttgcgcactggtgacataaaccctcctacttcctgc

SEQ ID NO: 459764 - DNA, 122 bp, Homo sapiens
aggagtggcggaaaacatgggtggagactaactgcggcgctcactgggtgcccgagtgcacgccagcgttccctggggcgagcccgggcgcgtgcacaccccccgggcgtggacgtgttccc

SEQ ID NO: 459765 - DNA, 122 bp, Homo sapiens
aacaagcctcaggcccagagtctatgcaggcaacagcatctagccgtaagttaataacaccgatggtttttcttgtatttatttttagttactttccatctatgttaagtgtaaaatttcac

SEQ ID NO: 459766 - DNA, 122 bp, Homo sapiens
gggccagagtaccgcaggctcagccgcggtcaggggctcagggcgccggggaagcattcgcgtgggctccccccacgggccgcctttgccaccaagacccactcttccagccaggccttggg

SEQ ID NO: 459767 - DNA, 122 bp, Homo sapiens
gaaaggaaggcaatctgggatcctcgtcgggggagggaggccaggaaggggttctctgggcgtgcacaaggagtccaaggcagtccctctggacgggatgagagacactctccagctcaggg

SEQ ID NO: 459768 - DNA, 122 bp, Homo sapiens
acaaacaaaaagcctaagagatgacttcggaaagagggaaactgaggcggagctcccagccgtgccaaacagcagctcctcctgagggctcctggggacctcagtgaggctcggttttgggg

SEQ ID NO: 459769 - DNA, 122 bp, Homo sapiens
tcatccatgtgtatataattaatatgtaggtgagaattctgggcgttttattcattgtcacgttcccagtaaccaggagggttcctagcacatactcagttcccagtgagagtttattgact

SEQ ID NO: 459770 - DNA, 122 bp, Homo sapiens
cctccccttccctaatcacacctcattcccacccccagccctgaggcccagcccacagtccggcccacagcccacgctaaccctggtggtcccagttagagaagtgggaggccaggtccctt

SEQ ID NO: 459771 - DNA, 122 bp, Homo sapiens
cgtggctcgccccggaggctccgccccttctccccagggtggggccggggtggtggttaccggcagaggctgcagaggtttcgcaaggacgtgacctttatgggaaaaaaaaaccactgtgt

SEQ ID NO: 459772 - DNA, 122 bp, Homo sapiens
attggcgcgcgggacagaggggcggcggccgggcagcctcggggcgtaggagtggcccggcgcctccgaggggtcggggcgggagccgggcgtggggggcctcggagcctggggagtcccgg

SEQ ID NO: 459773 - DNA, 122 bp, Homo sapiens
gcatccacaggatggatgccaggaccctggggtggggacgtcttctagggacaatggactcgtgctttgtcctgggggccccctggagccccggccaggtagggcctgaaggtagaaggggg

SEQ ID NO: 459774 - DNA, 122 bp, Homo sapiens
ataaaactcttaaaataaacattaggagcaaatttcatgactttgggttagtcactgacacgacaccaaaagaaaaaacaggtaaactggacttcatcaaaattaaaaactcaaatgacaac

SEQ ID NO: 459775 - DNA, 122 bp, Homo sapiens
acaggcagctggtattaactccgtgtcggcgtaactgacccactgttggacaaggacagccgcccggctgccccctgggccccccaggcctgctggccacagcagctgggccacagccgtgg

SEQ ID NO: 459776 - DNA, 122 bp, Homo sapiens
ctaccccgtggcgttatccaaaggcttctggactgacctcagcctctgaccgcccaatggcgtttcggcaacaggatctccaacttttctgtataatttcctcctttactgtccgtgatctt

SEQ ID NO: 459777 - DNA, 122 bp, Homo sapiens
gctaacatttctatcttttctccctgtaactaaagcagtggtttggaagccactttatatcgaagtgtaattcattacaatttgaggaagtatagtctggaagtgattagttaccaactgag

SEQ ID NO: 459778 - DNA, 122 bp, Homo sapiens
ggacgtaacactgaccgtgcagggctaccccaaggacctgctggtctacgcctggtaccgcgggcctgcctccgagcccaaccggctgctcagccagctgccgtcaggaacctggattgcag

SEQ ID NO: 459779 - DNA, 122 bp, Homo sapiens
catccttaagtaatgctgaactctgcttccccagacagcccacctccacttccccgcggccgggcgtctaggactcagcagccacgccatcattgccacacctccacctcgagcagccctgc

SEQ ID NO: 459780 - DNA, 122 bp, Homo sapiens
actaaaatggcaaacgcttatagaacacttacgaggtggcaggcggggttttcagggctccgctcattgagtatattaaccgggattcccgtgagggctgtgagacaaacacgggcagtgct

SEQ ID NO: 459781 - DNA, 122 bp, Homo sapiens
taatggggtccagcgctggctgggcccagacagactgtggtggcctgcgcagcgagcaggcgtgtgcgtgtgtggggcaggcaggatgtggtgcaggcaggttccatcgctttcgactctca

SEQ ID NO: 459782 - DNA, 122 bp, Homo sapiens
caggcctccatcttgttttacgtccttgggggcgtggcctgtaaccccattgcatagcttcgtttagcccggcatggcccagattcatcctggcttagggaatgagtcctttctggtttggt

SEQ ID NO: 459783 - DNA, 122 bp, Homo sapiens
acgcccatatcacaccgacaagggtgaagctgtggaacttatacctcggctgggccccgccgccaactcctagggcacgggaactgcgcacaggccggggttccgcgaggggcggagcttcc

SEQ ID NO: 459784 - DNA, 122 bp, Homo sapiens
acacctggtgcagaaaagaaaatatggagtcaatttctaagagaagggaaaaggggattgcgtttcaaaaagtgatttaaacctaagacaatgcgagacagattcatagaaaggcctgttta

SEQ ID NO: 459785 - DNA, 122 bp, Homo sapiens
taaatatcagcactctggaaacaaacaaaatgcaaaccaacccagtgtaatcttaccacgcggtttttaacaatagcaagcacactgtttttaataagtgcgtgatgttttgctgtagtata

SEQ ID NO: 459786 - DNA, 122 bp, Homo sapiens
caaacagaagtaaacagagtggaccattagcagacgccgggcgcggaggcggagccagggcgctgagggccccgcgcggcggcgggacgcccgcccgaaggggaggcggggccgctactaaa

SEQ ID NO: 459787 - DNA, 122 bp, Homo sapiens
gacgcaggagaggcgtgtaggagatgcgccagatgcggcggcgggcgaaccttcacgggacgtttcttagcgcaggttcacctgtgtctgcgtttcctccaacatgctctttgatattctca

SEQ ID NO: 459788 - DNA, 122 bp, Homo sapiens
ctacaggccctgggaaactgggcgtccaggctccgaggatggtactgaacctggcgcagccgtgggagggtgaaccaggtgccgctggcggagccccctcccagccttcctttcccgtcagg

SEQ ID NO: 459789 - DNA, 122 bp, Homo sapiens
gccaggcttgctctgggacttttatgctcccagaggccctgccaaactgaccacctcccccgactgccactctggacctaatagctgttccttaggccccactccatgccacccccaccagc

SEQ ID NO: 459790 - DNA, 122 bp, Homo sapiens
acagaaggggctcacagcaggtgtcccgtaaggagcatcttccttcctggggccagcagccgtcactccctgtgagcctgtagagccgagttttctctgcatttatcttgggcagagaatgc

SEQ ID NO: 459791 - DNA, 122 bp, Homo sapiens
ttaggggctccagtgccaccattgcttttgctgcttttctggctttccctttcggacatgcgcgctcggagcaaggcgccctcgcactcagcttaccgcgcatgtacgttgccaggggtaac

SEQ ID NO: 459792 - DNA, 122 bp, Homo sapiens
tgtgacctgttgtaggaagtgagaaatacacccaggcagggccagatactgcgtagcaggcggggcacagaggagggaacgcttgtgtctaactgatgctcctaatgcggaagcccctgaaa

SEQ ID NO: 459793 - DNA, 122 bp, Homo sapiens
gagccagatgctggagagtctcatgggtcccaaggtgcccacagggcagaaaagcccacacgtggtgatgggagggcgacctggaccacacacgtgaactgacgctcagccgcagagtcctg

SEQ ID NO: 459794 - DNA, 122 bp, Homo sapiens
gtcgttcgaggcccgtccctcttccggacgcaattaccaatgagaaatgcccttccccgacgtctttttacctgattggtgcgctcatcagttcccggaatacctttcctacaacagattgg

SEQ ID NO: 459795 - DNA, 122 bp, Homo sapiens
ccaggctggagaacggccagccaaagggaggagactcggcccccgccgtcggaaggttcccggtacagtggggttgacaagatctccaacctcagggagctccaggtctgataggagagacc

SEQ ID NO: 459796 - DNA, 122 bp, Homo sapiens
gggggcggggttttcccaggctcgagcacagcagctgctatttaccttcttggcttctcccggggaccaggaaccggcccccgctctccgccgcccgtcgccgccccccgcctccctgcccc

SEQ ID NO: 459797 - DNA, 122 bp, Homo sapiens
gaggcctttaagccagagttcgtgaatgagtttcagaaaatttcagagaactccctgacacgggatgaaaggagctgtgtgtgtgcatttggatggctgcagggtggtccggtggtcacccc

SEQ ID NO: 459798 - DNA, 122 bp, Homo sapiens
atctctctctcgggggtcggggggtgctctctcccagggcgggaggtctgtcttccgccgcgtgccccgccccgctcactgtctctctctctctctctctttctctgcaggttctccccatg

SEQ ID NO: 459799 - DNA, 122 bp, Homo sapiens
caaatccggttgttggcggggccttgctgtctctgcagaatccatttcccatccatttcccggagtcacatttcttgcgtcccttggctcctgtcctccagcagcgcagcatcctgcttcag

SEQ ID NO: 459800 - DNA, 122 bp, Homo sapiens
agtatgaggagctgcagacactggctgggaagcactgggatgaccggcgtcttacaaagacgaagatttctgagatgaaccggaacatcagccggctccaggctgagattgagggcctgcct

SEQ ID NO: 459801 - DNA, 122 bp, Homo sapiens
ctcttagggcgtggctcatagtagacactcagtgaatacgtgttaaatttgttgaataagcgaatgaatttggtcctatgaatgaatttagatgaggaagcccatggagttcaagggactta

SEQ ID NO: 459802 - DNA, 122 bp, Homo sapiens
taagctttagctcctcttcacccttttctcccccggccacttctgggggcagctctctcacgccgggacgctgatcatttatttctgcatcctcccagcagagctggtctgtaaaggggctt

SEQ ID NO: 459803 - DNA, 122 bp, Homo sapiens
agcggctgctccgactgttccaggcccagccgccccgtccactgccaccaccaacgccgccgccatcttacactggccagcggccgccaccaccaccgcctccgctctctgcgcttgcgcct

SEQ ID NO: 459804 - DNA, 122 bp, Homo sapiens
gcctgcgctcacaggcgtgtgcgtggggaagtgtttgggccgccgtgtacacagcaggcacgccataaacgcttcttggatggctccatgcgagggaagggagggagggcagagttcaggcc

SEQ ID NO: 459805 - DNA, 122 bp, Homo sapiens
aagccctccaccctccccttccccgctcggctccacccctaccccacgccccctcccgcgcgcgcggttaaatccccgcacctgagcatcggctcacacctgcaccccgcccgggcatagca

SEQ ID NO: 459806 - DNA, 122 bp, Homo sapiens
ttgtagagacgtgacccttgcctgctggctccagctcagggaggtgtgctgtgtgtccttcgcgacgtgcgctaggggccggcccctgccagctgggaggccagtgctgtgtgtccttcgcg

SEQ ID NO: 459807 - DNA, 122 bp, Homo sapiens
ggggatgatccacacccagaccacgggttacagaggggtctgtccatggcgggcgcagggcgctttctttgcgtcggagggtgtctggagggaaggagaagcctctggagggagggagaagc

SEQ ID NO: 459808 - DNA, 122 bp, Homo sapiens
gctatctttttcctctgtcttattttcattgaggaaacccatgcctatgcattatgcatgcgagtctggtgtggtgtttaagtaacctcccatgggactgccgtgagactgctgtgagtctg

SEQ ID NO: 459809 - DNA, 122 bp, Homo sapiens
agatagttgtacttctgtctgttgggtatgggttgggatgggcggtagcatagctgattgcggtgggggaatttcagatagctgatgatgtggctatctgaaaattgccactacatttttaa

SEQ ID NO: 459810 - DNA, 122 bp, Homo sapiens
agaccccatctctttaaaaaagaaagaaagaaaacaatatcccaaagtatggagctttggcgtgctgagtgctttgaactaaaggagattggaaggcctcagaagcaaagtctctctctgac

SEQ ID NO: 459811 - DNA, 122 bp, Homo sapiens
aggagggcccaggcatgtttgcagagtggctgggggccctgcttcaccacggcatagggacgggtgcagtaggaagaaaggtagcctcaaggcccccataaataaattggtgcattaaggaa

SEQ ID NO: 459812 - DNA, 122 bp, Homo sapiens
tttttttagttagtgatttttattttttttaaagttggttggtctagcgatgaaatgtgacgttaaaatgccaaaacagattgtgtttgggtcctgtggatgcagcttcactgttttgtaat

SEQ ID NO: 459813 - DNA, 122 bp, Homo sapiens
agacacctctggagggggcgctgggcagagggctggctctgatcccacaataccctgagccgaacatccagacccctctcaggcagcccagcactttctgagaggtcaaagtctggaccatc

SEQ ID NO: 459814 - DNA, 122 bp, Homo sapiens
ggggccgaagcgcaaggggcgcacgcagcgggagccactgggcccagcagcacgcaacgacgcctcctgctgttgaacttgttggggtccaggatgtccagtaccgagaaggaggtggggcg

SEQ ID NO: 459815 - DNA, 122 bp, Homo sapiens
ttaaacccccagcaccgtgattggctccagctgcaggggtgtgtctgtgtccgcggcgaacgggaagtgagcaggcgcgcgggctcggcgcgcgcaggcgcgactagggtgcagcgccaggt

SEQ ID NO: 459816 - DNA, 122 bp, Homo sapiens
acgtgaccccggggagggagtctgccgaggaggggacgtgctggtgggtcccgcggcgagcgcctggggctcaggtgaactgcgcagtgcccgctcctcgccactctgccaccaccatccct

SEQ ID NO: 459817 - DNA, 122 bp, Homo sapiens
ctcggatatttccagtatgtgtccggcgtccccagaacgacacggagatggactggcttgcgggggaccccacgtcctcttccccaacacgaggagcctcgggatccattttcactgctgca

SEQ ID NO: 459818 - DNA, 122 bp, Homo sapiens
gagcaattttcccagtccattcttccttgttcttgtttcaaactgctacagaaatcattacgagaatgacagtctagaacttgactttccaagatatcaaaaaaaaaattatctgtaaagta

SEQ ID NO: 459819 - DNA, 122 bp, Homo sapiens
aagcaggttgtcggtgaagaaacgcgtcgggtcagcaatctcgctgagcagcatcagctccgccatctttcccccccaccccccaaccaggagacggttcccaaggcccgcctctccccatc

SEQ ID NO: 459820 - DNA, 122 bp, Homo sapiens
cgcccggcggcgccaccagcccagggtggacatctcccgcgcctcccaaacctctcctcccgcagctgcccagacttctgcaccgaggtgcagctcgacgcctccttgtcagggcttctccg

SEQ ID NO: 459821 - DNA, 122 bp, Homo sapiens
atgttcctggcagattggaggaacagtaagagggtttatgtactggaaaagacggggagacgaatggggaatgcagttagagagtaacaatagccacggcacctagggctttgtaggccatt

SEQ ID NO: 459822 - DNA, 122 bp, Homo sapiens
agccaacgcgcccggcagctcaaacattcttcaagctgggagaaccaggatgattaaacacgcgcgccggccaccacgtgcacttcagtgcccggaccctgacccgcagacctcaaaccgcg

SEQ ID NO: 459823 - DNA, 122 bp, Homo sapiens
tcctgcggccctgaagcggggaactcactgtgggagtttgatgcctcaaatcaggagctgcggaaggaagaaatttcaacgtttcgttattatgcttcagttcagtgtgagcaggctttgta

SEQ ID NO: 459824 - DNA, 122 bp, Homo sapiens
ttcctccaaaaaccgcattcagaaagctttagacaggacagtctagacagtccaggcccgcgtctgcaggttgcccggcaacaggcgccgcagcgcagggcttctgattacactctgacctc

SEQ ID NO: 459825 - DNA, 122 bp, Homo sapiens
tcccgcctctgggggctggaccgagagggtcctcggcggcttctttaaggctgcggtccccgccccgtcgtcctccccgccctcctccctctcgccgcggctcctcccgccctcccagagca

SEQ ID NO: 459826 - DNA, 122 bp, Homo sapiens
gctccacacccagtgtgagtgacctggagcggcggcggctagaagaggctttggaggccgcgcagggagaggcccggggggctcagctccgggaggagcagctccaggccgagtgcgagcgg

SEQ ID NO: 459827 - DNA, 122 bp, Homo sapiens
tgacagatgcctttcaggaagggcagtctggcttgtcagagcgagggcgagatgaattggcgtctccactgcggccgtgggtgtcatgccgcacagtttcatattcccagataaggcgtgat

SEQ ID NO: 459828 - DNA, 122 bp, Homo sapiens
ctctcccctcccccaccccaaaatctcggcgatgattggacggaaggcgaatctacctcgcgctgggtggaagtcgtgctggctgtcactgtaaaacgttacctgacagagggggaagctct

SEQ ID NO: 459829 - DNA, 122 bp, Homo sapiens
cgcccatctggccccctcctttcccacccctgctctccgagggtgacagcccggcagatccgtaaccaaacagcatgaaggtctgccttttccataggacccaagtggggaaacaaaaatcc

SEQ ID NO: 459830 - DNA, 122 bp, Homo sapiens
gggggaggaaattggcttcagaccagggaaatgctgcagatggggactccacagaagtcccgaactgaggccagagagcaaggagttcaaggatgattttccagtggaagaggaggcacaat

SEQ ID NO: 459831 - DNA, 122 bp, Homo sapiens
tggactttgttacatttattttacagtttagtattgtttgtattttgaattacattaaggcggaggatggggcactgtaatgtttttgaagtttaggacctttaaagctcttaagctgactc

SEQ ID NO: 459832 - DNA, 122 bp, Homo sapiens
gcgggcggtgcggtggggccggtcccgggtgctcgggccaatggcgcttcgcccgctccccgccccggcccgccccggcctcctcgcccggcacacagcgcctgccagcccctgccctctcc

SEQ ID NO: 459833 - DNA, 122 bp, Homo sapiens
ttcacatagttccggctcgctgagctcggcggaaggagacggtgggagcggtgcgtagcccgtttggaattttggcgcgggacggcggcgggggaagggaggcctctgcgcgctctgattgg

SEQ ID NO: 459834 - DNA, 122 bp, Homo sapiens
ccctggccgcagtgcccaactgcccgcagtgcccatggtggctcggatgggaggaaccaccgcggagccggggacagggggagcagggcagtgctctgctgggtgaggggcacccagctcca

SEQ ID NO: 459835 - DNA, 122 bp, Homo sapiens
aggcggcgcccacagcactcgggactcagctgccggagggacaaactaacttcctgagcgcgggacctgaggctggcgcggccgggagccacctgcagcctgcggtgaggcgaccctggccc

SEQ ID NO: 459836 - DNA, 122 bp, Homo sapiens
aggaaaaagttatttgctggagtctcacccatcaggggaccaaaatgatatctcttggtccgctgtgtcctgaaggctccttctcagccccactgggctgtcgtgctttgcaatcctccctg

SEQ ID NO: 459837 - DNA, 122 bp, Homo sapiens
cgcgtcagggcggcctccctcactgattgtaagagcgagtctctcagctgggggcgctgacggtgggggccgaaggtgtatggggatgctctcatttctactccatttgctgtgaacctaaa

SEQ ID NO: 459838 - DNA, 122 bp, Homo sapiens
aggcagtagaaatgggctaatgagctgcaattatctcagagcattggagtgttgctgccacgtataagaaacagtttgcaatagcaaagtatgctgaggcaaggcattttccagcctatgac

SEQ ID NO: 459839 - DNA, 122 bp, Homo sapiens
tatttcaaatagcgccccatcgagaagctccacactgcggcattttgtgtgtcggggctacgcctctgggatggaatcctgggagcgggtggaaggctaacccagacacggtcttgcagggc

SEQ ID NO: 459840 - DNA, 122 bp, Homo sapiens
gcgcaaaacgagcactgacacagcgggggcccacatcccggaggttctttagggagaggtcggggagtgcggttacctatggctccgaagtccccgctggcatcctgaaaggcatcgtattt

SEQ ID NO: 459841 - DNA, 122 bp, Homo sapiens
tcccaggcacagacgcacagctgtggatgcacgtcctcggtgacaaggtagctgaggtcgcgtgccccgggtgtgtacggcccacagagccacaggggactcgccaggagatgcgtgcaccg

SEQ ID NO: 459842 - DNA, 122 bp, Homo sapiens
ctgtttgctactactattatcatattcctgtggcaacaccaaagctgatgagaactatcccgtgagttaaagctctcaacgacagcaggggataggcaaggtcctcgcctcttacttttaat

SEQ ID NO: 459843 - DNA, 122 bp, Homo sapiens
ccagcacagactcacgactacagtgccaagcatgacacagaaaggcaatgggatccccatcgaactcagggagcaaacacacaatgcggtactcagtctaactcttggagagcagtctcgcc

SEQ ID NO: 459844 - DNA, 122 bp, Homo sapiens
acttgtactaaaaacccctcctatatgcatatttagttaggacatgtttgtttccagttgcgtttgtttttcctactagatataaggaattcctatggaggctgagggatatacaagcagga

SEQ ID NO: 459845 - DNA, 122 bp, Homo sapiens
cctcccccaaccttatcccgcccctgggggttcgcgggcatttttcaggaactttctttccggcttgagaagccgccactcccaagatggaggtacgctgcgccgccattaagagctagccc

SEQ ID NO: 459846 - DNA, 122 bp, Homo sapiens
gtttgcactgaaagttgtgttggctcaggagctgcttttccggggatctgcagttgcccccgccacctcctggctgcggttggcaggtccctccctcagcagttcgtcctccgcctgcgccg

SEQ ID NO: 459847 - DNA, 122 bp, Homo sapiens
ggagcgctgctggctgctttgccacaggcttgacccagggccagggtctctccgcctttgcggggaaggggtggggaagtgtgtaggagcgtgggtaatttgggtaggaaaaggcagggagc

SEQ ID NO: 459848 - DNA, 122 bp, Homo sapiens
tcagtccctctccaagagactcttggggtctctggttagcactcttgttcccaaacccagcgccctggttatcactgggctgtttgtgaaaaatagacaccggagctatttccaacaagacc

SEQ ID NO: 459849 - DNA, 122 bp, Homo sapiens
tccgcccccggcggaaaactggtctctggaccgcccgcccaggtcgggctcaaaatgcggcgtggatctgaaaggatcaaacacaacactaattcagcaagctattattgagcacttgccct

SEQ ID NO: 459850 - DNA, 122 bp, Homo sapiens
gcgcccccgccagccaggcagcccctggagggcaggaccccggttataagcctcagaaaacgtggcttcggaggacgtggcaaggaggactgaacgaaggatgaggagatgaacaaatgaat

SEQ ID NO: 459851 - DNA, 122 bp, Homo sapiens
tttccagctccatgatggttctgcaggtttctgcggccccccggacagtggctctgacggcgttactgatggtgctgctcacatctgtggtccagggcagggccactccaggtaagagccga

SEQ ID NO: 459852 - DNA, 122 bp, Homo sapiens
acacaccaactccacacccttcccacagaaacagtgctgatttatgtttttaatcagattcgcctttgctgatgtgcagtgaggaataattagttggaggtcagtgcagagaactgcactac

SEQ ID NO: 459853 - DNA, 122 bp, Homo sapiens
cccagagtggaggcagggctgaggtgcaggtggcaggtgcatcggctggtgccgtggtgacggcgtgaggggccatgatgccgtggcctcccccggggctcgtgttccagggatagctcatc

SEQ ID NO: 459854 - DNA, 122 bp, Homo sapiens
tcctcagcccttgggtggtcgatgggactcggcgccgtggagcagggggcggcgctcatccggcgcccatggaatgggtgggaggctcaggcatggcgggctgcaggtcccgagccctgacc

SEQ ID NO: 459855 - DNA, 122 bp, Homo sapiens
agagaggagatggtcaaggttgtggacttgcgttctgtctcacagcagtacgtgtcgcctcggcacccggtgggttctggttaaccacaggagcgtgtcctgctggtgaacagctctgtaca

SEQ ID NO: 459856 - DNA, 122 bp, Homo sapiens
ttatgcggcccgggctttaacaagcctcttcagtgattctgatgtatgctaaagtttgagcgaggtttttgggcaacaataatctagtcttaaaattcacttcaactgcagaaaatgaggta

SEQ ID NO: 459857 - DNA, 122 bp, Homo sapiens
tttccattatttcaaatgattaacatagtatctcatttcaatcactcaaattaccttttccgtaaaagctgcatcctgtatatttatggcttgttttggttttaataatccagttatgtaca

SEQ ID NO: 459858 - DNA, 122 bp, Homo sapiens
ttttcggaagcacaatgcagaacgcccggtgagggtttgcaaagccgccctgggagatgccgcagtgtgaaacctttacggttgcacctggcctctctgctgcatctggcctgtctgctgca

SEQ ID NO: 459859 - DNA, 122 bp, Homo sapiens
cttaagccacgtgtttctcgaggaaatgctgagaggatctaatgggaaaacgtgggtacacgtcttagctaagaccctcgcccacgataagcccttaataagtagttatttttcagtggtgg

SEQ ID NO: 459860 - DNA, 122 bp, Homo sapiens
ttaagagacaccgaatctggccccctcccacgacacctctcgacaactggacacagaattcgaggccgcagccaggtcccacggtcccagcccccagcgtcgcacagccccgccccctgagt

SEQ ID NO: 459861 - DNA, 122 bp, Homo sapiens
ctccgggacctgaggtccactttactgtcacttctcctccccacagcttccgccccgaagcggcccccacctgagccgtcaccatcctcccgcattaatgggggcattcgtgcagacaaaga

SEQ ID NO: 459862 - DNA, 122 bp, Homo sapiens
ttccagtccccactggtgactcaccgccacccccaccaccatccccatccccctcgctggcgcagacattctggcccagctctgcagccaggtcagggtgactcagagggctggctgctgcc

SEQ ID NO: 459863 - DNA, 122 bp, Homo sapiens
atctagggaagcgccgccgcgtgccaccctggagctctgaaacgcaccgcgggcgccaggcgactgggagaaatttggagacctgtcagagtggtcagacacccgcggtgacttaaacccgc

SEQ ID NO: 459864 - DNA, 122 bp, Homo sapiens
gtctttcataccgctccacaaattcttccacagacagctgtaaagcatctgccctttccacgttatcctgagggaattaaaaaagacctgtccagttaaaaaaaaaaaaaaagtccagtggc

SEQ ID NO: 459865 - DNA, 122 bp, Homo sapiens
atatgggagcccccgttcaagccggtggctccgggcaccagccatggcaccctcgtccagcgaggcaggcttgccctcgaagtacgcggggttctgtgccttctcatactcctcaaaggaga

SEQ ID NO: 459866 - DNA, 122 bp, Homo sapiens
catgcgaagagaggaagctctcggcggctgtgctagcaatctgggggaaagccctgggctcggccaggtggtgttggccacgttggccacgcccccacttcgcgcagccgagtggctaagga

SEQ ID NO: 459867 - DNA, 122 bp, Homo sapiens
tcctcagtggggatatgaacaaacctatttctggatgtcaatatggctgctgttctgcaacgtgcctctgctcccaaaaatattacctatcttttttgcaaccatgaaagcaaccatgcatc

SEQ ID NO: 459868 - DNA, 122 bp, Homo sapiens
attggagagcggatggcatattaaataaaaaagacagatgggcatttttaatgatctgaacgtgaagccttaaaatcttggtaaatgctctgtcagaggcagcacttgaccgtgggatcttt

SEQ ID NO: 459869 - DNA, 122 bp, Homo sapiens
ccccctagcgctggctcctcctctgcccccgcctccagtccccgcctctccctctgattccgccctctggtcccgccccgctactctggccctgcctctggccccgcctctcccgctgactc

SEQ ID NO: 459870 - DNA, 122 bp, Homo sapiens
ggagcaggcggtcgggcaggcggttgtgagcgcgtggggtgcctgaggagtagctgaggccgggcggggtgaaggctgggagggacagggaggggagggggtagcggagctgcaagggcaga

SEQ ID NO: 459871 - DNA, 122 bp, Homo sapiens
catatattttctagattttagcttcactgaattattttacctgcttctaatttttcttttcgctaaaccttttgtgaaggctttgatattttgcttgcctcttccccaaaagaagtcatgga

SEQ ID NO: 459872 - DNA, 122 bp, Homo sapiens
cttccccacaaccagcacccaattagagaactcgagtctggcctcctgggttcaggaggacgcctagtgctcgcgccagaatttctttgtttaattcttgactccctccgcacacaccccct

SEQ ID NO: 459873 - DNA, 122 bp, Homo sapiens
ctgcctcccgtcctggcccccacgaaggcaagcccacgcgagctctgcatgcggcaggaccgccagctccccacctcaggcagggctggggcatgcgccacgagtcacatgatgtccacgaa

SEQ ID NO: 459874 - DNA, 122 bp, Homo sapiens
gacttgaaaaacgccctattatttagactgacctaattcaaagttctttgcagcttacctcgtgctaatcactggcaagtggtctccagctgctctttggttttggttgtttcacgtccttg

SEQ ID NO: 459875 - DNA, 122 bp, Homo sapiens
tacgcttccacaacagagatttttgattttttaatggcagcactctcataactacattcacggaccaaccaaagccatctccaagcctagaaaggatacatactacacgcagcgaaaatgcc

SEQ ID NO: 459876 - DNA, 122 bp, Homo sapiens
gttgtttgtttcacataccttctggcaactgctgctccacaaatgtccaattcgcacttccgtcctgcctgtctacagggaatattctgctgttccttgccttatttgtggacatttctttg

SEQ ID NO: 459877 - DNA, 122 bp, Homo sapiens
cctgcaagtttaaattcctcttagcaagcccagcatcgcagccaataacgcatcagggggcggagccgtagaggcttgcgccccgcctcgctccgctattggaaggaaagcagccaatggga

SEQ ID NO: 459878 - DNA, 122 bp, Homo sapiens
aggctgcgcgcctggctcccagcctcagtttccccattggtaaagcattgacggtggttgcggacggcttctgcggacagagccttgggctccgacgtctgcgcgggtaccggcagcacccc

SEQ ID NO: 459879 - DNA, 122 bp, Homo sapiens
gctgagggagcagctagggagggtctggtgcggatgtgaggctgcctggcagggcttgcacggggccgtctccgctgcccttctccctgacgctctctggttctgcagcccagcccctgggt

SEQ ID NO: 459880 - DNA, 122 bp, Homo sapiens
ttgaggatgtaggcactggtgtgaaggaacatggccctgtatcagaggtggcggtgtctccggctccaaggtttacaggcttgcaggctacacacggtgcgtgaggcacccccaaagctccg

SEQ ID NO: 459881 - DNA, 122 bp, Homo sapiens
accctctggttgccggcactgacgtaggacaccacaaatcggtccacctcagcctggggacgcagccagccaagctccagtgttgtcggtgtcacagccaccactcggaggtcctggggccc

SEQ ID NO: 459882 - DNA, 122 bp, Homo sapiens
ttggcttgcagtaataattcaatacctgccagctattcttattccacatccaagccctttcgcctgctgctgggtgaaaacacatgtcagtgtttcctgacggtttccacaaagaagattcc

SEQ ID NO: 459883 - DNA, 122 bp, Homo sapiens
tgcagcataacatatggcttcctgaacttgcaagtatggcttaatgttctctgttgaaatcgtgtctgtttaaacagtctcttggaaaagtgagccatattcaataaaatcattaatttcat

SEQ ID NO: 459884 - DNA, 122 bp, Homo sapiens
cgccgttttttaagcccgtcggaaaagtgcagtattcgggtgggagtgacccgattttcccgattttccaggtgccgtctgtcacccctttctttgattaagaaagggaactccctgacccc

SEQ ID NO: 459885 - DNA, 122 bp, Homo sapiens
aagtgacttaacctcccagtttcctcagccatcaaatggggattgggggtggggggggcgcggggaaagcagcctctccagacaccttaccaggttcctgaacacagcgtcatcccccacgt

SEQ ID NO: 459886 - DNA, 122 bp, Homo sapiens
ctcactcccatctgttttctcaaatcatgtgcaaacactttttcttcttcggtgaagtaacgattaggaacaggaaccttcactgtcttgttcactgctgtattcttagtacttagagcagt

SEQ ID NO: 459887 - DNA, 122 bp, Homo sapiens
ctgagggaggccggggaggcgtctagaaagttctgctctgagttcgggggttgccgcgggcgccccgactgtgtctgctcctccagcacgccccacaacttaaccccttccttcccgcggaa

SEQ ID NO: 459888 - DNA, 122 bp, Homo sapiens
acatacgaaaatgagggtcggtttgtgtggaattgaaaagttgtttatataaagcttgcccggtgggttttcagtctacatggctccagccactgcctagagactacttctacccggaacaa

SEQ ID NO: 459889 - DNA, 122 bp, Homo sapiens
aggtcctccccacggcaggtccatcccacggcaggtccatcccacggcaggtcctccccacggcaggtccatcccacggcaggtccatcccgcggcaggtccatcccacggcaggtcctccc

SEQ ID NO: 459890 - DNA, 122 bp, Homo sapiens
aattcaggaaggttggcgttggtgcagtgccgccccctcatctatggtccacagtcaggtcgccagttccccagtagcgtcctagcagctcaggcggtggcacgtcagtcgtcaggtctcct

SEQ ID NO: 459891 - DNA, 122 bp, Homo sapiens
tgctcccgccccccaacccccactggctcccctgcaccctctgctcgggggcagcagagccggcttagaggcacctggcttcagccccagggctttggggtaagaacacaatgagactgggt

SEQ ID NO: 459892 - DNA, 122 bp, Homo sapiens
ctgcataaccggcctgcgcgagccttctgggcgcctcagcttgaacaaaagacgcctttgcgaacattagaatagggcgccccctcctggcggatgaattagaaggcaaggccctcaggctg

SEQ ID NO: 459893 - DNA, 122 bp, Homo sapiens
acaggggatgacagatcaccctaggggttcccattttggatagtggtcaaggaccacagacggcatcaactccctgatggctacagagggggaagatacaggcctgtcctcagaacatcagc

SEQ ID NO: 459894 - DNA, 122 bp, Homo sapiens
cccctcccttcttccctgattaatttcctaaagtttataggagcagtttcagtaccagcccgagtaggatggaatcaaacacggtgctggaacattcctacccggaagtggccccgaccccc

SEQ ID NO: 459895 - DNA, 122 bp, Homo sapiens
cagtctgtagcatcagaaactggtcatgagttgagttttaacaggtgttcatggtaaaagcgccatccctggtgactaaggtttgatgtccttggaagaattttctcgttgggggggctggg

SEQ ID NO: 459896 - DNA, 122 bp, Homo sapiens
gtgttggggggacgcaggtagcgggacatggcggcggcgtgtctcggccgggcgcactaacgggctcagcaaaccgtccgcggctcaggcggccgagcctcagacacacacagctagagggc

SEQ ID NO: 459897 - DNA, 122 bp, Homo sapiens
tggctggttgtacccatcagctttgcgctttcctcctacatttccaccgcggccacccctcgcaccacgtaccccgcggcctctttgttgttgggcacctcctctcgcacctcgaacgcctc

SEQ ID NO: 459898 - DNA, 122 bp, Homo sapiens
ttcagcaaatagttgacattgcagactgtgatttgcctttgaaggccaatgctgactccccgaggaatcaaagctttcaccccagtgggggccaggcagctggtgacttctgcatactcctc

SEQ ID NO: 459899 - DNA, 122 bp, Homo sapiens
attggagttgactatttatattacaagaagattcttcactctccaaaagcaaccctttgtcgtctgagcacccctaaagacttaagtgtttgttaacagattactaaccatttggcaggagt

SEQ ID NO: 459900 - DNA, 122 bp, Homo sapiens
atgcattaaggcaggaactggcaggcctcagggtacgccaactataggactcgtgcttctcgtacgctgggctataatctatgaaactgagctccagagccagccaatcacttagctcctca

SEQ ID NO: 459901 - DNA, 122 bp, Homo sapiens
ccccagccttgcttctctttaagccattcttagcatgacaaccagtgaaaatgtctcaaacgcaaatctgaagacatctcctcttggtcaaaaaaccttcaaggcttcacatcacccatttg

SEQ ID NO: 459902 - DNA, 122 bp, Homo sapiens
catttcccgaaaaatctacacatccgcatgaaatcctcacaagagacctacagaccctaccgggagcgttcctgtcactacaaaaaatttaaaaattagccggatgcggtcgcgggtgcctg

SEQ ID NO: 459903 - DNA, 122 bp, Homo sapiens
agtcattaacagtcgccttaaacagtcgacgccagagccacctggcccaccgcagaattccgtcagctcttcatactgagctacttgccaagcagccacagaggggcgatagcaacagggga

SEQ ID NO: 459904 - DNA, 122 bp, Homo sapiens
ggagctgtaccaatcggagatgaccgtggcctcaacagggccaatcgggggactcgagcccgacaacagggcaagccgccaacagcgatcaatcagaggggaggagcggctcccagataccc

SEQ ID NO: 459905 - DNA, 122 bp, Homo sapiens
tgcagtaaacagaggaatagcaggtagaggggaagctgggtccaccctgcagtccagccacggtccctgggctcctcaccccatgcgactctggtttctgaggagtctggtgtgtaggagga

SEQ ID NO: 459906 - DNA, 122 bp, Homo sapiens
tctgagcctcagtttcttcagtggactcaagaatgatactcagtgtaaggattctcaaaacgagcatcagcaggttccgcccacgccggcctcctgggttcagttctctaataaccacctcc

SEQ ID NO: 459907 - DNA, 122 bp, Homo sapiens
ggaccggaacacacagatctgcaaggcccaggcacagactgaacgagagaacctgcggatcgcgctccgctactacaaccagagcgagggcggtgagtgaccccggcccggggcgcaggtca

SEQ ID NO: 459908 - DNA, 122 bp, Homo sapiens
ctggagcaaagggatgccaggggacgggtctcggtgcagtgactgccattagcttggggccgcagaaagtttctcccctttctcgggctcctgccaggcccttggctttcagagccaggccc

SEQ ID NO: 459909 - DNA, 122 bp, Homo sapiens
atcatacatcaggcattaatattgggtgtccccttgccaaaggaaatttaggaaggtatacgtggctttgcccagtgaaacctctttatggtggccctgaagatcctcttcaagtccttcaa

SEQ ID NO: 459910 - DNA, 122 bp, Homo sapiens
ataagctcctagctcaaaggactcgttcctccacctcctattggtagcactgtgccaggtcgtgtccactcaccactgcagaccctttctccagccttctcctgcctgctctgtgccccagg

SEQ ID NO: 459911 - DNA, 122 bp, Homo sapiens
cactcagccagggagactgcattttccattttccgaggctcgggctggctgggtgggagccgccccgtctcagcctgcccgctgaaggtggcaatcgcagtcagcacacctgacctgtgccc

SEQ ID NO: 459912 - DNA, 122 bp, Homo sapiens
ctcttttctactcattacttatatttgttattggaaagtccaacattagaatacttggttcgatgtcacaggcctctttggaagaaagaaatcttcagaacctgagggggcggtcagtagag

SEQ ID NO: 459913 - DNA, 122 bp, Homo sapiens
ttaggataccttcactgacacaatggtccccaaaattcaacctggaggtccagccttgcccgtctggcaaaaaaaggggagaagggggcaaaaccccaaaatgggggacagcatacaagctt

SEQ ID NO: 459914 - DNA, 122 bp, Homo sapiens
tttcctctgaggaggcaagaatcaagttgctgcatactcatatagatttgctgctgctaacgaaaccaagcgtatgattctttcttcttttttgcagctgtgaggagttttagccaattcaa

SEQ ID NO: 459915 - DNA, 122 bp, Homo sapiens
aagtatgagtaggggacaaataagtattaacaaaaataaaatctaccaattcaattcactcgtaagtgtatggtagaagaaagacctggtaactttattaagttcctatgaattctacattc

SEQ ID NO: 459916 - DNA, 122 bp, Homo sapiens
cccacacccttacctggcttctcgtggtcatagcctaccacgatgaagtagtcagccagccgggccatggccgccgccgccgcgctcgggaagcgggtccccgtcgccgccctcgccgccgc

SEQ ID NO: 459917 - DNA, 122 bp, Homo sapiens
aagctgagatatcttttccctgcatttatactgaaggtcattatctttctttctttatcccgcagacctcagtgggaaggtgtttgtatttcctagagaatctgttactgatcatgtaaact

SEQ ID NO: 459918 - DNA, 122 bp, Homo sapiens
ttgggtatgccagcttaatgaaatacttgcagtttattacactcaggctttcctaagccccgcgtgcctgtgggtatttgaaagctgaaggtaaccccaagctaccacaaatgtaattgtta

SEQ ID NO: 459919 - DNA, 122 bp, Homo sapiens
cgccgggctgtcgcgaatcccaggccccgcgccgcttcccccggtacccgccctcacctgcgggcccagctcggccggcagcttctgcagccgccacaagggcgtcccctcttccggctcca

SEQ ID NO: 459920 - DNA, 122 bp, Homo sapiens
tcacctttcagcgcctctttcatcgcgacgcgttcctctttgctgaactgagaagggattcgcgacgccctttgatgctccccgctcctcgggcccatcgatctggagacggtagggaaaac

SEQ ID NO: 459921 - DNA, 122 bp, Homo sapiens
tttgtcttttgagaccttcatttaaattcaaagtcatacaaatgttgttcctgaaccgagcgaccctcctacccactatgggctgacacccccagccccatgacactcaaaagttcccggac

SEQ ID NO: 459922 - DNA, 122 bp, Homo sapiens
tttggccgcctattaaatcccacccatttctccgggggcgatttcctaaccttccgggaccgaattctgcaatttgatgtgcgttttgtccgaatggtagcgacacgggcctaagggagggg

SEQ ID NO: 459923 - DNA, 122 bp, Homo sapiens
cgcaaacgaaaggccagctcgagctcccacagctctccggaaggcctcccagaactaaagcggaggagggtgtcagcctcatcccgctgccagctggccctcggttcctcaaagacagtgag

SEQ ID NO: 459924 - DNA, 122 bp, Homo sapiens
ccagaaatgggccctgcgacctcccagagtggggatccctcacaatgggaagacgggacccgcagacttcagacgcaatttccctaccctttaagaaagggccctttcatatacgtatgaaa

SEQ ID NO: 459925 - DNA, 122 bp, Homo sapiens
tcctggtgaagctgtgttttttcccacactggaaacacagagtagccctgtttctgcacacgttagtgcaccgctgctacgtgtggccgcccagctgtctgcaggctgtgccgaccactgcc

SEQ ID NO: 459926 - DNA, 122 bp, Homo sapiens
tgatgggagcccagggaaggcaggaccctggcttcgggcattttctctgctagaatctctcgatacctctctcccttcaccttctcctccaagtctcacccagatgatgtttctgtgagttg

SEQ ID NO: 459927 - DNA, 122 bp, Homo sapiens
attcgtatctgctgtatcccagtccccagcccattacctggcacccagattgctactgaacggagcaaaattgttgaaatctcagcatatctgacttaaaaattctgttattcttagggtct

SEQ ID NO: 459928 - DNA, 122 bp, Homo sapiens
tagcgggcggggcggggcctcacgatggagttgccctgtcagtgcaggtggaggccccggcggggcaaagtggcaggaacctcttaaagggcgagagcggcgcggagccagaacgcggtcgg

SEQ ID NO: 459929 - DNA, 122 bp, Homo sapiens
ctccttcctctccttaaactgtttatccaaatccatctttcttcaggtctctgcctaaatcggtctcagagtggccttccctgactatcctcttcaaattagttccgcagcctctaacttta

SEQ ID NO: 459930 - DNA, 122 bp, Homo sapiens
ttctgaaaagggaactataattgtctgctgtggtatatgaggattggtgtgggagggaggcgagaacagcatttgtgagaaaagtacaggcagcattgatgtcaacatgagtggttgtttca

SEQ ID NO: 459931 - DNA, 122 bp, Homo sapiens
ttctctcctaggtcacattcagacagcacacctttgcccaattttctttctggatctcaccgtcctgagtgttgtacctgcaggttgctcacagcctctggagcccaagatagtctcccctt

SEQ ID NO: 459932 - DNA, 122 bp, Homo sapiens
ggactagccagttgccaaaaacccctatcatgatcggtgttaccataaagaaaattataacgaaatgcgtgggcggtaacaataacattgtagatctgatcatctcctaacagagttcctgg

SEQ ID NO: 459933 - DNA, 122 bp, Homo sapiens
acgattcgtaagcccctttaagtgagaagcactgatgtggaccggtggtttccgctgtgccgcacattaggatcagctgggagctggatagcacaggccacaccccacaccaaccagtcgga

SEQ ID NO: 459934 - DNA, 122 bp, Homo sapiens
cgtcctcggggacaatgatttttgtcattaggaaccagatcccatcacagcttggctttacgtacagtgaaggtgtcattcctggcttaaccttacactgccccgaaggccccctccccagc

SEQ ID NO: 459935 - DNA, 122 bp, Homo sapiens
tccctgacccccatcccccacgccctccctcctggccgcggaccaggcgtcccggccccccgccccacccctggaagacgccccgccagctccgcagtgcggaccccaccgaccctgcccca

SEQ ID NO: 459936 - DNA, 122 bp, Homo sapiens
ctcctgctatttcaccctggccacaggctagccgccgaggccggtcatccgctctctccgcggaggagtcaacgccacggaagcagcggcggaacctctctaagaatccttccagcttgtgc

SEQ ID NO: 459937 - DNA, 122 bp, Homo sapiens
aaacaaattctctggtggtttcaccagatatttgcaccccaaagttccctgcccaaatcccgaccccaaatgctgacttgatctgaagaaaaaaattagagatgttcttaattaaaggcaca

SEQ ID NO: 459938 - DNA, 122 bp, Homo sapiens
gtttttctaagttttcaaagagaactgggaaagttgcatgctttcttgtatttcttagatcgatagggttctgtacagtgtgagttctttcatgtgttctaataaagtagagcacatgatgc

SEQ ID NO: 459939 - DNA, 122 bp, Homo sapiens
gggctggaggccgacccggtgagagtgcaaggtctcgcgaccaccgacgacagcagacagcgagtcgggccttcccatctgaggccagcttcagtacaggcctccaagcccgggcttgtttt

SEQ ID NO: 459940 - DNA, 122 bp, Homo sapiens
gagccgcggctgggaccggagtggggagcgcggcgtggaggtgccacccggcgcgggtggcggagagatcagaagcctcttccccaagccgagccaacctcagcggggacccgggctcaggg

SEQ ID NO: 459941 - DNA, 122 bp, Homo sapiens
tgccagtgtggaaagagcttgagagatggcatccctgtccctcactggtcatcctactgacgaggagcctagaccagaaagtggagtgaccatgccaaagaggcagagccaggtggtggcgg

SEQ ID NO: 459942 - DNA, 122 bp, Homo sapiens
gttatcagaatatctaatcattaaaagtttatttgattcagctgagctaatcagccacatcgattcatccatcacatctcagagatgaattagaaacttataggtctaaataataataattc

SEQ ID NO: 459943 - DNA, 122 bp, Homo sapiens
gaggggcatgagacatcaatcaaatgcatttaagaaatacattggtttggttcagaaaggcgggacaagtcaaggtgggcttctaggctataggtaaatgtaaacattttctggttgacaat

SEQ ID NO: 459944 - DNA, 122 bp, Homo sapiens
agggctttagtcctgcggaacttggctttggggcgagctttcccccacttctctccgagtcgcctacttttaagtttaatttcttgatttgcttttgccctgaaaaaaaaaattagagacgc

SEQ ID NO: 459945 - DNA, 122 bp, Homo sapiens
gcaggctgggagagaaaccgagacttcggctcggttaaaacgcgtaaaaatacgcgtttacggaatgaatgaaagcagccgccgaatgctgggcacccacccttctcacgctctttcatcgc

SEQ ID NO: 459946 - DNA, 122 bp, Homo sapiens
ctggcaggtccccacgggcaacactcctcttagatgaagaggagaaagtggggatgcaggcgcgctggctacatttctgtcaatgcggctaatctagaaaacacagggactaaaattaaaaa

SEQ ID NO: 459947 - DNA, 122 bp, Homo sapiens
tttaaacttttttgttaaaaactaagacaactacacacacattagcccgggcttaatcatcggggtcaggatcatcaatatgtcatcaggggataggaattttccagctctattctaatcct

SEQ ID NO: 459948 - DNA, 122 bp, Homo sapiens
ataaaggttcttttacagacgatcctataccctaaacaggaggtaacaaaacgcgggtgccgacgccatccactatatacaaacctagtccgcctagcagacgatccctgcgccggaagtga

SEQ ID NO: 459949 - DNA, 122 bp, Homo sapiens
gcgaggcggggcggggaggagggggcgcgccgctctggccccggcactgcgcgctctcgccgccctgtgtatgccacggcccgcctcctccagggaggctgcccaaattcaacgcccttcct

SEQ ID NO: 459950 - DNA, 122 bp, Homo sapiens
tgcccctctggctgtcccggcctgaccgccgcgcgccgccctgctgctcacctacttccgcgccacggtcacgcccctgccgtccccaggctaaccctcccggggctcgacccagagcacta

SEQ ID NO: 459951 - DNA, 122 bp, Homo sapiens
ggcgacgtacactgctgcttagggagcaaagcacttccaccgctttcacgcgacgaaggtcggaagagcaagagagagaaaggtaaacttcccggcaggggacagtgaattgcttttaatta

SEQ ID NO: 459952 - DNA, 122 bp, Homo sapiens
attcgcgccccgggcagctgcagagagcgggctcactcatgctttgcgggcggcgggcggcgggcggcgggcggtggggaggtgcggacggcggcgcggggagcggcgagcggcgcccgggc

SEQ ID NO: 459953 - DNA, 122 bp, Homo sapiens
ggctccctccagaaagggcatttccctcctttccaggagcttgatccccaaaatcctggccgctctggttggtcaccagtgcttccaacaactggtttattcttttctttggattttattcg

SEQ ID NO: 459954 - DNA, 122 bp, Homo sapiens
ttattttctttcccttttcagaaatggctcagggaactgttggaggcgtgttcatcacgacggcaggttccacgtctaacggcacaaggttctctgccaggtgacagtcgttgagggtgtgg

SEQ ID NO: 459955 - DNA, 122 bp, Homo sapiens
cgttagatggacgcttgctctgcgtggtgataccagagcgagagtcgactgttcctgtgtcgcagtcgggtggtgtgcttgcttccaagtctggaggcgggtggttcgagctcgttctatgg

SEQ ID NO: 459956 - DNA, 122 bp, Homo sapiens
ttctcacatgcacgactgtcatttctaggctcacaaagcagatgattaagagcagaaatgcggtggccacagggacacagtaggttgtcccgcgacgagccagtgacaggaggagagggaag

SEQ ID NO: 459957 - DNA, 122 bp, Homo sapiens
attcaagccccgcctccatcaacatattcccaccctttcacacccctcatctgtatgccccgccctcagacccacctcctggctgtgtcccatcacccactgggacaatatatctatcattc

SEQ ID NO: 459958 - DNA, 122 bp, Homo sapiens
tgggaaacccggcagcctggctctggggacccccacactagtttggcccaaagagagcctcggcttggtgccccggggccacccaacaccttcctcctccctcctcagcccatccagaatgt

SEQ ID NO: 459959 - DNA, 122 bp, Homo sapiens
cttcccaaaggcgcttctgcagggaagtcccagccctacctcagggggttcattaaagcgcgtacccttttagggcagaggatggtctcgcccctccttagaggccatattgagattcctgg

SEQ ID NO: 459960 - DNA, 122 bp, Homo sapiens
tgagaacctcggtctccttcttgatggaaaaccgcaggctggtgtcgggcgtgcagcctgcgctgctccggcagctctgcacgtgctctgcggccctctccagggaggaaatcctgcggatc

SEQ ID NO: 459961 - DNA, 122 bp, Homo sapiens
taacttaaaagcctaaagaaatctcagataattcacttcggagtagaaacctccttcagccgcgctcactacggcgcccggcttcgcggcaccggccactagagggcagtggccgccgcaaa

SEQ ID NO: 459962 - DNA, 122 bp, Homo sapiens
agggtacctaaaagaagttaaccaatcatcacaaatgataggaattcaacaactcatacccgcagtaacaatattctcacctctgatttattttttacttcatataagatacagtgtaattc

SEQ ID NO: 459963 - DNA, 122 bp, Homo sapiens
cctaaatgacatcataagtctgccaaactttcagattctagtctactcaacagagatctccggaccacagatgcttaaaaactagttttcccagttgtaaaagcccagtgtcacagaagagg

SEQ ID NO: 459964 - DNA, 122 bp, Homo sapiens
ggctctccgtgccttatttttgcacggtggcaccgtgggccgtgcgattgcagcttcgcacgctatctggagtgtctgtgccggagccgcccgtctattcacctggttaagccaggctcggc

SEQ ID NO: 459965 - DNA, 122 bp, Homo sapiens
ggcagctcttcagtagcgaccgaggcacacgtggtccatggacaattttatcctgtgaagcggatacggtttctcacaaaggttggccagcacgtacaaatgtctcaacgcatactcgcacg

SEQ ID NO: 459966 - DNA, 122 bp, Homo sapiens
gattgaaaatcaggcctccaagcttgtgcttgaaaggacgagagcaccagcctgggtccgcgagggagggcgccagtgccacctggtggccgcgccggggagcccaggttccagcctggggg

SEQ ID NO: 459967 - DNA, 122 bp, Homo sapiens
aggggttgtcacagagcccttttccggacagcctgacacctgtgtctttagtccggtggccgtgctaatcgcctttaagtggccaacaggtgcccggtttagcctccgaattctaaggaagg

SEQ ID NO: 459968 - DNA, 122 bp, Homo sapiens
cagaatagtgtgagctattcacctctcaccttctaggttctatacttctgttaatgtagccgatgtccttctgagttttttttttctttttgagacgaagtcttgttctgtcacccaggctg

SEQ ID NO: 459969 - DNA, 122 bp, Homo sapiens
tttatcttcactgtgtcatcataacggggtcttttggcctcccggctcctttcttcagatcgtatggagtagcctttgagtttttctcgattccgttctgttccccgcaacagctcatcatg

SEQ ID NO: 459970 - DNA, 122 bp, Homo sapiens
agaaaaacccttgagtgtggtgggaagagatgttgagcatcaggagcccaaaatacaagacgcgagtgggagcctccccctagttggcaactatggaagtcatttaacctcttgggtttcct

SEQ ID NO: 459971 - DNA, 122 bp, Homo sapiens
cctaggactggctagtcatgtgacctcgggtttcccaagtttgaagcccggcagtcctttcgggggcaaggttcacctgtcacgaaacgagtgtcaccccttcgactctcgcaagccaatcg

SEQ ID NO: 459972 - DNA, 122 bp, Homo sapiens
actcatgatttggctctctgtttgtctgttattggtgtataagaatgcttgtgatttttgcgcattgattttgtatcctgggagtttgctgaatttgtttttcagcttaaggagatttgggg

SEQ ID NO: 459973 - DNA, 122 bp, Homo sapiens
tattccgcccccatctccaccccacactggagtttgcaaggactgtttattctgcttattcgtgttagtatcaacccgtgcttttcaaaaaacctcactgtttaacagactcatcttcccct

SEQ ID NO: 459974 - DNA, 122 bp, Homo sapiens
cgccggtggctgcagaagcggcgaaggcctcgggcgcctcgcgggtccggggcagagtcgcgtttgagaaaagaagcgagaacaaacaacttaaaatggcagcgacggccgctgcgtcaccc

SEQ ID NO: 459975 - DNA, 122 bp, Homo sapiens
gaggaagagtccctgcacctgtctcccattatcaaagtgagtcaggagggcaggttgggacgtagcacgcacctgtgggaggttggagattggggagctgagcaaggcaccccaggcctggg

SEQ ID NO: 459976 - DNA, 122 bp, Homo sapiens
gggggatccagaggtgagggttggcagggtggaggcagtgtggcccaggcccccttgggacgtggtcaccacctccaaacccatatcctgggctctgttctttctgaacatagtggagccat

SEQ ID NO: 459977 - DNA, 122 bp, Homo sapiens
attactgtggcattataatcatcttgataactgtatcgtgaattctccaactgtgttcttcgccggaagtccacggaacaccaaccacgaccttcggaatttccctccggaagatgaaggca

SEQ ID NO: 459978 - DNA, 122 bp, Homo sapiens
atggttccagccggaaaaagaggaagttggcgcatgcgtactgtccacttaaagacttcgcgagagaagccccacgactcataggtgtcttagaataagccggaaaagaatccagaactaaa

SEQ ID NO: 459979 - DNA, 122 bp, Homo sapiens
cgccccgcgccgcgtgctcacctggggagtgtggcaatcctggcggcgccgagtgttgcccgggccggagcagcggagcgcgcgacagtggcggcgacggctccggcagcggctcccgcggc

SEQ ID NO: 459980 - DNA, 122 bp, Homo sapiens
tggggatggttggttcagtacccaacatcctgacagcacatctgaccatgtatattgtatcggagaccacatcctcagctcagaaaaagagctgaactcatttcaaatagaaagcacactgc

SEQ ID NO: 459981 - DNA, 122 bp, Homo sapiens
ttccctccaggggctgagcccagcacatcgggcaccacggatgaggagcccgaggagctgcggccactgcccgaggagggcgaagagcggcggcggctgggggcagagcccaccgtccggcc

SEQ ID NO: 459982 - DNA, 122 bp, Homo sapiens
caaggagggagcaggagcattcgaacgcggaaatcgaggtgctagtccaaactgctcggtcggctttagtcatagctggataatgcccggctcaggtctaccacaagccatacagctgcttt

SEQ ID NO: 459983 - DNA, 122 bp, Homo sapiens
agtacttctttgagtctaactgcaagtctctatcctcacaggaaattaaaaatagcagatcggttcctacatctccaccagccccttcaccaccaccaccaccttttttatatttcagtctg

SEQ ID NO: 459984 - DNA, 122 bp, Homo sapiens
aaaaaaaaaacgagggaaacctgctcctgcccctcatgccctcagctcctacggatagggcgcccttgagaagcttcttgggccttgaagatttgggggcgcgtgcctcgagcccccatctc

SEQ ID NO: 459985 - DNA, 122 bp, Homo sapiens
actcaaagcagtggataaagcacttgcgacctaaaataagcaatggaatgaacaggaaggcgaaaccagagtttaaagcggcaggacaaacaggaaaaaggaagagtgaggcaggaagggtt

SEQ ID NO: 459986 - DNA, 122 bp, Homo sapiens
cggagctgcagtgggacgcgggggcggtgggatacggggggtctcgacacctctctgggccgtaatcgccttcgcttctccccggcaggaagcgcgcccccggggccggtcccggagggctc

SEQ ID NO: 459987 - DNA, 122 bp, Homo sapiens
tatttttaaaatctcatttaatcccccttccccactcccagaaaccctataaagtgagtgcgattactttgttcatttcaaaggcaaggagatagatgtgcaaagggattgaatgagcgact

SEQ ID NO: 459988 - DNA, 122 bp, Homo sapiens
tgtgcctcccaagccacctgctgccatctgcttgcttgtctcagggtgctccgaggggaacgtgagtaagacaggggcctctctgaagatgtgagctgagaactgaagaatgaaagaagcca

SEQ ID NO: 459989 - DNA, 122 bp, Homo sapiens
ttctcctcttgcaatgttttttatgacctagtcttggaagtcacaccttgtcgcttctaccgtagtctattcattagaaacaagtcattaggccaggtgtggtggctcatgcctgtaatccc

SEQ ID NO: 459990 - DNA, 122 bp, Homo sapiens
tagagaggacgccaatctggattcagaggtcccttttccgcggtaattggaccatttgtccgccagtgcaaaccaaccgacctttccttactttcgggttcgacagaaaggcggcaataaaa

SEQ ID NO: 459991 - DNA, 122 bp, Homo sapiens
ggcttcccttcccggatcggccgcctgtgggactcgagagacctgtgcacgcaggggacgcggcggtgcccggggttagagctctcccctgtgaccgaaaagataattaaaaatcgcacgcg

SEQ ID NO: 459992 - DNA, 122 bp, Homo sapiens
gacctctctgggatctcttttaaaagggtgctaatcccatacatgagggctacatctcatcgcctcccaaaagtctcacctccaaataccatcatgaggagaattaggtttcaacatataaa

SEQ ID NO: 459993 - DNA, 122 bp, Homo sapiens
ccaagatcaagcacagtgtgggaaatgtagccgggtttctataaatgtatgatgagtgagcgagagagagaaggacagtttggcattagatggtctccagaaaaactgagctagctttcctg

SEQ ID NO: 459994 - DNA, 122 bp, Homo sapiens
gccggttgactagtgagacgagtggagaaacacagagcaccctccgggaggcgcacagttcgttaagcccagggacatgctcaatgaacctttgcagcaagaggcagtgaggcgctggacgc

SEQ ID NO: 459995 - DNA, 122 bp, Homo sapiens
gtaaaccttttttttttttaagtcacagtgcccagtgattaatactaaacattcaaaagacggtattattattgttattgttgtcataattattgtgctagctcaagggatcagtgattgtt

SEQ ID NO: 459996 - DNA, 122 bp, Homo sapiens
ccacctccccgggccccgcgcgggggccttcgctggaatccgccatgcctgccccaggcccgtctgcactgctcagcctgcaagggaatgaaaggggagtcaggcagaacccggccaggggc

SEQ ID NO: 459997 - DNA, 122 bp, Homo sapiens
ttatatatacaaatatatgaatatttgtgtagtacatatcccacactgcttaagggtgtgcgtgtgtgtgtatgcatgcataatgtctatgatctgttaccgctaaagtgagagaaaaagca

SEQ ID NO: 459998 - DNA, 122 bp, Homo sapiens
agggaggagagatgcccggagaggacccagacacggggaggatccgctcagaggacatcacgtggtgcagcgccgagaaggaagtgctccggaaagagcatccttgggcagcaacacagcag

SEQ ID NO: 459999 - DNA, 122 bp, Homo sapiens
caggtgctttggagtcttcgcggtgtacgggaccttaaagctgagctggctgtattgcctcgtggctgctccagtcctgtgctagacctctcgctgggtctcggggttctcagcgcctgttc

SEQ ID NO: 460000 - DNA, 122 bp, Homo sapiens
taatttgcatgattgatttaatgtagttttggcgttctcatcacacaaggaccaccagctcgtgacactgggaggagagaacgtcctcaaggtccggaaactcaaggacgtgctgattcggg

SEQ ID NO: 460001 - DNA, 122 bp, Homo sapiens
gctgggaggatgcattacacatgggtatggatacagggaagggaataattgtggccacttcgcaaactatctgtcacagtaattagactgataaggaagtgtgctgagtacaaatagatatt

SEQ ID NO: 460002 - DNA, 122 bp, Homo sapiens
gatactactcattgatgcaatgttatcctgatagtggcttttcagagatatcatcttaagcgtgatatcaacagggggaatctcacatacgagtagaggctggtttagaaaaatcctgcagg

SEQ ID NO: 460003 - DNA, 122 bp, Homo sapiens
gcaggcgctaccaactgactgcagatcgctggtgaggggcgagcccatgttcccgccaggcgggcgtcgggctagtgggcaggcgtggcttccggctagagggtcgtggaaggcgcccggtt

SEQ ID NO: 460004 - DNA, 122 bp, Homo sapiens
tggtccaggcctgtgtcttcctccaacttcccatcccattttcctggggcccgctgcctgcggggcgtttctgcttcctgggacttcaagctctgcaacggacccctgagctctctgtgttc

SEQ ID NO: 460005 - DNA, 122 bp, Homo sapiens
gtttcagaggtagaaactgagaccatagacagagaccaccccaggcaatggagaccgagacggggacagcctcgcatccaccctagggggtctggcagagacttaaagggtgggggtgaggc

SEQ ID NO: 460006 - DNA, 122 bp, Homo sapiens
actacccacccttcccaaggaaactgaggcgggcaggctgcccaggggaagtgactcagccggggtcacttgctgagtcaggccttattggacccaggagtcctgcaccccacctccccagc

SEQ ID NO: 460007 - DNA, 122 bp, Homo sapiens
ctttcaaacaaaaccaaaacaggaccagagaagctcagaccgtccctaacatccctgctgcgagacccgcaggctgtggaatctcgcacgtcacctggccccagcagggcggccagctgagg

SEQ ID NO: 460008 - DNA, 122 bp, Homo sapiens
ggtttagtataaagtctaagatgctcagaaacattaagacaattgtccttactgtgccaccgaaaggctaaagggagtaagcttttaacaaaggtttaagggagtaagtcccagagtccaaa

SEQ ID NO: 460009 - DNA, 122 bp, Homo sapiens
agggtgggggtggcttgctttctttggggaggttcaaaggacgccttgtgcagcccgtggcgctcctctgatcttactgggatgctctgctctttcggtcgcgcggctgattcgcattcgac

SEQ ID NO: 460010 - DNA, 122 bp, Homo sapiens
ccgcggcgggaggtgctgagagcgcggcggccgcggggcctggagcccgggatttgtgggcggcgagggcgcgaggggccgcgcgccatgctccgggccccgacggcgcggacgccccctcg

SEQ ID NO: 460011 - DNA, 122 bp, Homo sapiens
gctctcgctccccgcggccccgcgcgtccgaattaagcggcggggcggggaggggcggggcggcaaggccacgcccccaacgcgccccgccctggcagccccgcccccgccttccttccacg

SEQ ID NO: 460012 - DNA, 122 bp, Homo sapiens
cgaaggcctgcgggccgccgccgggccgggccagcccgcagcccggcgcgccagggccggcgggggcccctcggtacaggagcatttttttggccgccacggtacccgtctgctgccgccgg

SEQ ID NO: 460013 - DNA, 122 bp, Homo sapiens
ggcaagacatcttgattgaatttggagtctagtccagtgcctgacctagggtagagagtccgaatgaagacttggttctggggtcagtgtgtgatcccctcaccaaagtttgccagaatgga

SEQ ID NO: 460014 - DNA, 122 bp, Homo sapiens
agggacctttagggcagacaacttcattgtgacagaatgagacctgtggcctttggacctcggtggggccatatgtcacccctgcaggccccaggccccccaagccaccaagagtcacagag

SEQ ID NO: 460015 - DNA, 122 bp, Homo sapiens
ccaagaccagactacttagcatatttggagcactactgccatcgtgaggatgtcgtttaacgaaaccctacgccattacagagttctagtgtgggctacctgttgggacaggtctggtctgg

SEQ ID NO: 460016 - DNA, 122 bp, Homo sapiens
taaagtagaaaattggcccaagcaaaaacctgctttgggcatggtctcagacaggagagacggtcctttcctaacctcccgggggcacgggcctgggccacagatccccgtggccgtctggt

SEQ ID NO: 460017 - DNA, 122 bp, Homo sapiens
tataattgtggtcctcccttgttctgttctggaacctagagggttaacaggcagctcttccggtccacccccctccttccagcctgtagcttcttgttgccgtggagatggtggccccgccc

SEQ ID NO: 460018 - DNA, 122 bp, Homo sapiens
aggccaagttggggaggggaggaagtgaggaggaaaacatggacgggcggtggtgttggccggtgcaggatgggagaggaatttgctcctaatactggcctcctgggccttggctggagcat

SEQ ID NO: 460019 - DNA, 122 bp, Homo sapiens
tgaagtaaagtatgcatcagagctggaatgagaactaattcttgattttagaagatcccacgtccatgaacagtcctacttagcaatcagtgactcagaatgaaggcagtcgagtacaatag

SEQ ID NO: 460020 - DNA, 122 bp, Homo sapiens
tttctttctccagagcctcctctccgtgctccctcttattactgggccgggcatccgccgcgcctcccgcaggtgtttgcctggagagcgcggttgcacctgccgcccctgcacatgcgcat

SEQ ID NO: 460021 - DNA, 122 bp, Homo sapiens
ggttaagggatcgtgtcagacacttcacgcgagttaagggatcgtgtcagacacttcacgcgagttatatgagatgatgcaaagagtggtgtccgatgcagagggaccttcagttaatctgc

SEQ ID NO: 460022 - DNA, 122 bp, Homo sapiens
caacaaaggcttctaagtgcctcctctgaactcagctccatgctgctagctgaggatgtgcggatgaatgagtcttgcttcctgcccctcagggcctcacaatcgaagtgagtaaacacttc

SEQ ID NO: 460023 - DNA, 122 bp, Homo sapiens
aagttagagctggttagtggcagagctgcggcttcaagccaagaagcctgactcccagcccgggtctggaggcctacatcagttgcctccttttgttgcttatttctgtctccctgctttct

SEQ ID NO: 460024 - DNA, 122 bp, Homo sapiens
cctcatgatctgcccacctcagcctcccaaagtgctgggattacaggcgtgagcccccgccggacctgtttgtttggtttttgttttgagacaaagtcttgctctgtcacccaggctagagt

SEQ ID NO: 460025 - DNA, 122 bp, Homo sapiens
gctcctcgaggccccttcccggggccggccggcgggctgtgggaggaggggacaaggccacgggccggccctacccgctcctcccaggctcttggttcagtccactcggagcacacctcgga

SEQ ID NO: 460026 - DNA, 122 bp, Homo sapiens
gttcccgccatcttggggcacaggcgcaggtggtcagccgtgactcccggattcctgtggcgcggcacgggccttcgtcaggaccacggctgcttctccaggggagaccgccccggaagcgg

SEQ ID NO: 460027 - DNA, 122 bp, Homo sapiens
ctctgtttcaatcttggggcctgggctggctccataacaattataatctcctatctgaagcggcctggaggcaaagggccggtgaggctgaattctttgcagaattaaccgccattcagatg

SEQ ID NO: 460028 - DNA, 122 bp, Homo sapiens
ggagcgcgtggggtgcgagagaagagaggcaagttaggatagggagagcggctctctggccggtattttaacaaagggctgaactgactaagcatggccgggctgcctcccggtctcccgag

SEQ ID NO: 460029 - DNA, 122 bp, Homo sapiens
ccagctcctgaccacgagtgatctgccagcctcggcctcctgaggtgccaggattgcagccggagtctcgctcactcagtgctcaatgttgcccaggctggagtgcagtggcatgatctcgg

SEQ ID NO: 460030 - DNA, 122 bp, Homo sapiens
accggagacgtaacttccggtgtacacagccggtccaaggcggtgcgctgggggccggggcgcgtcgcaggtgaggagcgggcgcggcgggcgcaggcgggggctggcgggcggggtcgggc

SEQ ID NO: 460031 - DNA, 122 bp, Homo sapiens
tacctccatggagaggggcgtgagtggcgccgcccacctgcccttcttccttccagagctcgtgctttctggttagggccgctcaccacactgacagacagcacaccaatcttcactagacc

SEQ ID NO: 460032 - DNA, 122 bp, Homo sapiens
gtttgccagcagagcgtcaggtggtctctgcgtctaatttccatctctctgagtattgaccgtgagcatctttcacacacttgcttcgtttctgggtttcctcttctgtgagctgcctggtc

SEQ ID NO: 460033 - DNA, 122 bp, Homo sapiens
accacctcttggcttctgttcccaagggtgacagtgtcctggggtcacacgggctcaaaccgaggtcgatttccgaacgctcactttggagcaggatgcgagcccgggccacgattgggtca

SEQ ID NO: 460034 - DNA, 122 bp, Homo sapiens
cccacgcggagtctggatgcggcggcccctggggcacgcggcggcccctggggcacccggcgggagctgcatgctgcctagttgctgcttgcgttggccagacccacacagcccctggactg

SEQ ID NO: 460035 - DNA, 122 bp, Homo sapiens
ttgacagacgtgcaaactgaggcttggagagatgcagtgacctgcccaaggtcacagagccggtcagccccagcccggagccagccggggctccacaccggacccccttcaactctctccag

SEQ ID NO: 460036 - DNA, 122 bp, Homo sapiens
tggaggacctggactcagtgcagcgtgtcctgttacacaggtcagtgcagggccccgggacgcggggcgagaccgtcctcttgccccggaaatgttggcgagggaggggccgcttttctttc

SEQ ID NO: 460037 - DNA, 122 bp, Homo sapiens
atgtgtcgagagggcctgcttctcagccaccgcctcggacctgcgctggtccccctgcaccgcctgcctcgaaccctggacgcccggattgcccgcctggcccagtgtaagctcctcctctg

SEQ ID NO: 460038 - DNA, 122 bp, Homo sapiens
acgccctgcggtgcccgaggggttgcggtctcagggactcgtgtttgttattaggactggcgtgttaactaaaatgattgtgactgaggtcaggagtttattgcttttgttatttttattgt

SEQ ID NO: 460039 - DNA, 122 bp, Homo sapiens
ggagcatgaagggccggggaggagcatgcaggccgatttgtcctgtcttctgccactcctcggcctcccgtcctaatccatctccccacctgtcctgacacttccgtgccaccctctggtga

SEQ ID NO: 460040 - DNA, 122 bp, Homo sapiens
catagaggaagtcgtagaggtcttgttcttcaagatccccttgatgggccggtgcgaggccgtcgaggccgccattgccgggcgctccggctgtcggctcagggtcgctgcttggcgtgggg

SEQ ID NO: 460041 - DNA, 122 bp, Homo sapiens
cgcggggcaggggctcggtccccgccaccgtctccggggcgccccacacactggcgcctgcggtggggcctgctcccggcggaggacaaagaatccagacccttcctggacgcttgtcccca

SEQ ID NO: 460042 - DNA, 122 bp, Homo sapiens
acattttcccctgcttactctccttcccttctctctgctaggcaggtaaattatttacatcgaaacctctcacaagttctaatagattatatcaattattattagaaataattgttacatga

SEQ ID NO: 460043 - DNA, 122 bp, Homo sapiens
ttaaaactagacttggaggtagggaggtaaaggtaggtgggtgaggaggggaagagcctacgaagataaaggaaacctgacccctgctctggagagaagcacagtttgaggaaatagccttg

SEQ ID NO: 460044 - DNA, 122 bp, Homo sapiens
cccgattttctgaagagcccaacctgtcggaagagcaacactaagtgtggggtacattcacgtggacgcagtgtttacaccacacaactagaagaagctgcatgtaatccgagctcccctga

SEQ ID NO: 460045 - DNA, 122 bp, Homo sapiens
attaaacaagggctgttgtttttgcctgtcatggagttccgttcattctgaacatgtcaccggggactttggaatgtgtatccataactccctgattttcaaccacattccagcctgcctga

SEQ ID NO: 460046 - DNA, 122 bp, Homo sapiens
tggctccctcccccgctgcagcacctggtccccccccctcccagtcacctgattggccggcggccccatcaatcgttgcccggctgtgctgacgtcatcctgcagtagcggggttggggtgg

SEQ ID NO: 460047 - DNA, 122 bp, Homo sapiens
cactttcccagccccttctcagtttgtctgctgggtgctagacaagctggggccagatgccgggaactcttgacagcccctggtttgtgctgatttcctttcctgggcccccactggagtct

SEQ ID NO: 460048 - DNA, 122 bp, Homo sapiens
ggctatgaatgctgctgttttcatctgaaggaggatttgaaggccaactgcagtttgtttcgtgttctccaagtcacacagatcaaaaatgtttctagttagatcacagggaacatttccaa

SEQ ID NO: 460049 - DNA, 122 bp, Homo sapiens
cccaagtaggcccaggcagaagcatcacctcgccggcagccgctccttggacatgctttccgctgggaacccgagctctacacccctgccccaccgccgccccggtccttgctcagcactac

SEQ ID NO: 460050 - DNA, 122 bp, Homo sapiens
agcccgcctccgccgcgctcaaggggttccacggatttcaaacaacgcatgcgtgtaaagcgtgtacagctcagggtggaacatgcactccatgaatagtggctctcatactgccacgtggg

SEQ ID NO: 460051 - DNA, 122 bp, Homo sapiens
gagcctggaggggcaggcaggggcggtggagcggggccggaagtgaggctagcggagccccgcagtggcggctcgcgctcattggccgggagcagcgcggtgggcgggacggagctcggcgg

SEQ ID NO: 460052 - DNA, 122 bp, Homo sapiens
taagcagtttctagaaatggaggcagggaccatcaggaagctcaaaacctttgcttcagccgagtttgcagaacgccctgtgaggagaatgggtgagctgggtcgaggaagcttcatcctcg

SEQ ID NO: 460053 - DNA, 122 bp, Homo sapiens
cagtggcatttagtacattcacagtgttgtgcaatagccacttctaattccaaaacacttcgatcattccaaaggaaaacctcttaccaattaagcactttctcccccattctccccttcct

SEQ ID NO: 460054 - DNA, 122 bp, Homo sapiens
gcttcatcctgccccgcagcgggggcacctgttgaatctgcgggtttctagatgtttggtcggagaggagaggagggctttggtctcttggagatcggagtctccctttgcctcgtgttttg

SEQ ID NO: 460055 - DNA, 122 bp, Homo sapiens
ggacaagccgtgatgggtgcttgggtggagggacaagtctgggcgctgggccctgggcaccgtggggcttacatgctcaggcctgcaggagtgagtgaatagtgctgggggagacagaggca

SEQ ID NO: 460056 - DNA, 122 bp, Homo sapiens
ggtgaacagggggcctcggagggagagccctccccgccctgtgtgcccctcgcggaaaagcgtcctgggtcccaccttgctgattgcctcaggcacatgagccgccacactgtttccgagtg

SEQ ID NO: 460057 - DNA, 122 bp, Homo sapiens
tttacccacactatgtaaatgctcccactcaggcacagccgaacgaaggggcacatggggcgaggcagaggccagggccatgtggactctccgtgccctctctgggcaccgcctccctgtgt

SEQ ID NO: 460058 - DNA, 122 bp, Homo sapiens
acaagtatagcccctctttgatttttatgttacacattgggcagtaggtttttaaagagccgtgtttgactctgtcctattttggggcccaggtacatgattcctatttttagcaactctct

SEQ ID NO: 460059 - DNA, 122 bp, Homo sapiens
caggccccaggctctgggtgggaaaagcacaaatgcctgccagcgtggaggatggggctccggcagatgacccccgaggggtgagcacaggacctcaccccacagtgcaggagcctgtggcc

SEQ ID NO: 460060 - DNA, 122 bp, Homo sapiens
cccccgaactttcaagctatgggcttttctcctcagaggattacacagaggcttgggggacggagagcagaggtgttaaaaagcggcttcccaaaaatcctttctacacagtcgctctccgg

SEQ ID NO: 460061 - DNA, 122 bp, Homo sapiens
cggatcgatgttcctcccactgccaacacgcccacgcccgttcgcaagcagtctaagcgccggtccaacctgttcaccgtgagtgtcaaccctgggtggagatttgaatgcgattccgaagc

SEQ ID NO: 460062 - DNA, 122 bp, Homo sapiens
ccatctgggccgggcgcggccccggcacccagcccgccttgttgtccatattatggactgcgcacaaagtgcccgaggactcctctcctggacgggccattgcagccctctcgggtgtgaaa

SEQ ID NO: 460063 - DNA, 122 bp, Homo sapiens
catttatttaacttccttgacctcagctttcctctgtgctccaattcagccatccactgccgtagtccgcgtcagcgaaaagaactgcttcatcactgaaatcaaactcccactaggactac

SEQ ID NO: 460064 - DNA, 122 bp, Homo sapiens
tttctctgggggcatgatctcacaaagaatactcaagtctttttcttcttatggaatcatcgaaactgctatttatcataatcaccacttatgagcctgggtttgggattttgtgcatgtag

SEQ ID NO: 460065 - DNA, 122 bp, Homo sapiens
ttctcgagacagccgggcatcctccctcccgtgagcgagcctggagcgccacctagtgcccgccagcaacatgaacacacgccaaggagcgctgccagcgacaggagctgggctcccggtgt

SEQ ID NO: 460066 - DNA, 122 bp, Homo sapiens
accacagctgggtactagtgacagaaactacaggcaaagcgagcacaggaaaccggttcccgaaaagagcctctgcagtttctttccaagggagtccagccccatcttctggttgaaaagag

SEQ ID NO: 460067 - DNA, 122 bp, Homo sapiens
ccaaatttggacacattactcatttccaattctctgtgcttctattatctcattattcagcgagaaggtgttccgtgttaacgttgaagatgaaaatcacattaacataatccgcgagttgg

SEQ ID NO: 460068 - DNA, 122 bp, Homo sapiens
gcgggcgggaggaggcggcggcggcggcgtggagcgggggtgggagcggcgggaggcggccgcgaaggggttaaccctggcccgggccggagcccggaggcgcacgcacggcccgggggacc

SEQ ID NO: 460069 - DNA, 122 bp, Homo sapiens
caacagctcccacgtctcatcctccgggagcggggcggggcgaagcggaagaggaggggccgacacaaccacgcccactagccgcgctccaaggccgcggcccacttaccgcgagaacgcgg

SEQ ID NO: 460070 - DNA, 122 bp, Homo sapiens
cagttcgcccacggggcacagagggcagccccgcgtctgcctgcacgcacgcacctctcccgacgcttctgctcttcggccagctgcttcacccgcagcgactcctgcatggtcgccaggct

SEQ ID NO: 460071 - DNA, 122 bp, Homo sapiens
caacaagttagggtgagtggcagttatatagaccggcggcggagcacgcgtgtgtgcggacgcagttgcgtgaggggtttgtactatcctcggtgctgtggtgcagagctagttcctctcca

SEQ ID NO: 460072 - DNA, 122 bp, Homo sapiens
tggggcgggctggcttccgcggtctccatggcgacgcgagggcgctgggagaggcctctccggatagatctagctccagtcagactcaatcccgagtgaaatggattttttaataaatctat

SEQ ID NO: 460073 - DNA, 122 bp, Homo sapiens
gaataaaaacaatctaattaactttgctttaaaaatcttacttggtgaatgtaccatggacgggacactgcattggctaagcttggcatgtataggggttacaggaaaacaccagaacaaat

SEQ ID NO: 460074 - DNA, 122 bp, Homo sapiens
atcctctcacctacaaatcccggctgatggtggtggtgaagatggacagttccatccagccggggcccttccgggctgtcctcaagtacctgtacacgggggagctagatgagaacgagcgt

SEQ ID NO: 460075 - DNA, 122 bp, Homo sapiens
agggagtggtatagctggacaccaacctgtgccctgctggctaccaccttgctggccgcacgtgcccagccatgaaacccagtcccttgtgaaggcaagagcagcccctgctgagcctaccc

SEQ ID NO: 460076 - DNA, 122 bp, Homo sapiens
cacctccggaccaccccacttgccaccaagcacatcctctccaaatccaacccttatttgcgacccttcagtgatgacccagcagacctccaaaaagcctcctctgcccagatctccagccg

SEQ ID NO: 460077 - DNA, 122 bp, Homo sapiens
acatattgaagaagatcaaagcaaactgtgatccatgtacatggatgaaaactaaaggctcgagttaatcacattgtagtttttaaatttctacagcctagagctcactagtcacaggtctt

SEQ ID NO: 460078 - DNA, 122 bp, Homo sapiens
ccactgtctttccttctttcttaaccccagggaaacctcatctagatttgaggatgaggacgggtgtagggagccaatctcatcctctgacatttctccctaagggcgcagtcctttgaaac

SEQ ID NO: 460079 - DNA, 122 bp, Homo sapiens
ggagcaaagcctaaggattcaatctatatgagggggttaaggaaaggtaaagttcaagggcggcgcagacgtgaaggacagcactatcacagcttaaacttggtactcggtaaactggtgtc

SEQ ID NO: 460080 - DNA, 122 bp, Homo sapiens
gcattgtgtgggcgcagccgtggggaagcaggcattgcgcagcggctcagggtgaattatcggccccatggaggcagggtggcagtatttctcaaaactgcaaatgcacacgccctgggacc

SEQ ID NO: 460081 - DNA, 122 bp, Homo sapiens
ccctctgccgccccttccctgccccggcagccgctctcctcccgcccctccccctccccacgggctcacagggctgcatcctgagtttcgggtgagccagaagcgagcaccgcagatgctct

SEQ ID NO: 460082 - DNA, 122 bp, Homo sapiens
ccttgccacctttacctcgcccagacattctgaaatcacagcgcctactcagcagaaaatcgggctgcccactgtgattgccagtcgcagaccagggcttatagtctctcgatgcggacctg

SEQ ID NO: 460083 - DNA, 122 bp, Homo sapiens
agaaagcacaatgtgaagaaaaagaggcgagaacgacccccgaaccaaccaaagcccgcgcgccgctgcatccggcgcccacgcccacgtcccactgccgtcgccaccgccgccgagatcat

SEQ ID NO: 460084 - DNA, 122 bp, Homo sapiens
cggacggccgcggcggagggcaaaaatggcggaggcttcggcggccggggcggactcgggcgccgctgtagccgcccaccggtttttctgccacttttgcaagggcgaggtcagccccaaac

SEQ ID NO: 460085 - DNA, 122 bp, Homo sapiens
actcttgttccactcactgcatgaaatgaagctggcggaatattgctacaaaagaatgatcgtggcaggaggcggggtagagcaatgtcaggtcacggtgcgtcttgcaccgaaatattaag

SEQ ID NO: 460086 - DNA, 122 bp, Homo sapiens
tggccgtggatctcagcttcggcattccagcctggaacaatcctcccagacctggaggtccgccccctccaaaacttccaccgcctccgccaccacctcctccgccaaatccgccgcctcca

SEQ ID NO: 460087 - DNA, 122 bp, Homo sapiens
tctttgcccttgcctcgtgggaagttttggagtttatgtcctagcccaagacaggcagctcgcttatttaattagctgattcctctgtgagtgtttatagaatagattttttgacaatctct

SEQ ID NO: 460088 - DNA, 122 bp, Homo sapiens
caaaacagcacccaaaggcccctggcatgtgggagatctgcccaagctggggcagagcagcgtgtgcccaggaaggggtgcagctgggttttggcaataaagtggggaccgggtggtaggaa

SEQ ID NO: 460089 - DNA, 122 bp, Homo sapiens
caaaggccatctttcaacttaaggaacagagagaggaaataaaactgctacctctgccatcggccgctcagcctgggtcacgactgcagcaccgacagctcattcttttgggcatgattcaa

SEQ ID NO: 460090 - DNA, 122 bp, Homo sapiens
acctcaggtgatccacccgcctcggccttccaaaatgctgggattacaggcgtgagccaccgcgcccggcctagagcacactttctgtagcagacactgggccaggtgattggcagggctgt

SEQ ID NO: 460091 - DNA, 122 bp, Homo sapiens
ctccaggatgctctgtgtacgcgtgtcagagacaatgcggaccggctcgaggggcctccgcgtcgtggcctcgtgccagcctcaccacagctgtgtggtacataagaatcacagcagctgta

SEQ ID NO: 460092 - DNA, 122 bp, Homo sapiens
ccgaagttcttcttggtttttatcctaagtactgatgtcaggatgactcggcagctttgacgagccatctggccctttaggcaggaagccagttggccttcctcctcccactgtcccgcctg

SEQ ID NO: 460093 - DNA, 122 bp, Homo sapiens
ggcgtgctcgggtcagggccgatctgggccccgtcttcgtgttttgttttttgacggtggcggcgtgggataatcagagtggccgggtttgggcgtgatgcgtgttcagtggaagggtcata

SEQ ID NO: 460094 - DNA, 122 bp, Homo sapiens
ccagtctatatagcaggatggctgctgcgttggcaagaacaacacaaaaggggccctcagcggtaaggggattttatgcatctctttaacatcctgcattcactggaaatgattgtagattg

SEQ ID NO: 460095 - DNA, 122 bp, Homo sapiens
gatcaatcagaggggaggagcggctcccagatacccaatcagcggccttcaggcgcagatcgtgggcggagcggtagccaggccgcgggccggccaatcagcgggcgagcggctgcctcagc

SEQ ID NO: 460096 - DNA, 122 bp, Homo sapiens
gccccaaggatgggtctcactcacgcgcgtacacagacacacacgcagagagcactctcacgctgggcaagctcgggatcgcgctacccttcccgagttgaatgatagtgtttggtttctgt

SEQ ID NO: 460097 - DNA, 122 bp, Homo sapiens
gccccccgcgggacccaggtccccgcctgctgcagagcgcactctgcgcacgtcgagccgcgaaaggttcacagaagaaaacaagagaaagaagtagcaggcactgaggagccgccggcgcc

SEQ ID NO: 460098 - DNA, 122 bp, Homo sapiens
gctaatttaaaataagccttccacccccaaaacccagtgctcattcatcacatgagaaaacgcgcatgataacgcctcagggaggaaagcagcaaagcccgttccctcgcagggcagcctca

SEQ ID NO: 460099 - DNA, 122 bp, Homo sapiens
cacatatgtgcaatgccatgctcctgagcctttgattgcagacgtgtgggaagtgggccccgtccccacccccagtgccaccctgctctgcttctcttcccttgctgtgctctaaaacgaga

SEQ ID NO: 460100 - DNA, 122 bp, Homo sapiens
attatacaaatacaaaaaatttctcagcccgcaagacctagagatcaggtatcacattttcgaaaaggaaaaacagggagggaaagaagtgaggaagggagaccacagtgcagttctctgcc

SEQ ID NO: 460101 - DNA, 122 bp, Homo sapiens
tgtgaagcagttcccgggagcattcacgcgattccccagacacgctggaggatgtcctctcgtggcacagatgcgggctgtgatgttcagagatggcctgctcagccatttcaccgatggat

SEQ ID NO: 460102 - DNA, 122 bp, Homo sapiens
ggctggctccgactgtgcgcgtttcctcttgagtgcacctgccccgggctgttgtgcagtcgtgagtgtgtgtgtgttcattcacgtgtatactatctgtaaataccggcccgactcgttac

SEQ ID NO: 460103 - DNA, 122 bp, Homo sapiens
cacaagaacatattgccatttcctattaagaatacagaaccgtgctcaacactcccacggcgcacattcattcaatatccaccacgtgtcaggccccgccctggtgccgaggtaaggacggt

SEQ ID NO: 460104 - DNA, 122 bp, Homo sapiens
ctccgggttttgcccttggccttgggcatcgcgctgaccaccgcaccagcagctcaaacacgctgcctctgtctctcagacctcgtgtaacaaactccttccggaaggcgtgcacaaggctt

SEQ ID NO: 460105 - DNA, 122 bp, Homo sapiens
gcaggcggaggcggggccaggcgggggcggggccaagggccgcagagcctggcgcggagccggcgagattttggtggggtctcacctgttgcgtgactcccccacagtccggccgcgggagt

SEQ ID NO: 460106 - DNA, 122 bp, Homo sapiens
gatctagggacaaagtgtcctggcagggggaccagcaaacacaaagccccaagaaaagaacgaatggcatgcttggcatgcttgaagaacacaagtaaggcaaatgtgtctgggatgtagtg

SEQ ID NO: 460107 - DNA, 122 bp, Homo sapiens
gcagattggcgggtcgctttggtgggagtttcttgcttccttggcacaccattcgctccgcgagtttgttaagggcccctgtgtgccaggctcggcccgagcatctgtggaaccagaggaag

SEQ ID NO: 460108 - DNA, 122 bp, Homo sapiens
cagaagccccggaacctgcgcaaggcagagcaggtggcaaagaaggctccaggcaggccccggcctggaacctgcactccccaggccctttttgaaattagtgtttctccaagtatggccag

SEQ ID NO: 460109 - DNA, 122 bp, Homo sapiens
aaaaacaggatttcattttatacattttctgcatgaggtagttggcaatctggttgtttccgtttggcctgttttaattcaggttacctagaagctgaatctgtgatgaggatatttgcaca

SEQ ID NO: 460110 - DNA, 122 bp, Homo sapiens
ttaatagcacaaaaattaacattgaagaaagtatcttgcaaaacatgagaattatggggacgcttacatgaacaaataagcacatataagcagaaaagagaaagttgtcccatgattaggaa

SEQ ID NO: 460111 - DNA, 122 bp, Homo sapiens
tcagtgtttaacaccatctgttttcttctgtcctcttccccccaggcatccaccatgttacgagcctccttggcacccgtgtaagtaactgctcttaggaatttttattaaggagaacagca

SEQ ID NO: 460112 - DNA, 122 bp, Homo sapiens
cgccagatgcccagtgcccacctgctccaggccactgctgttcaggaagaggtgctgcagcgacctgcccacaggctggaaggctccgtcacgcaaggccctgagtgggttgcccgagagct

SEQ ID NO: 460113 - DNA, 122 bp, Homo sapiens
atgtaagtacaaaccacgagctgcttgacgctgagctgttggactccgggctatttcagccgctgctttgggtacacagtggccggggagcagccggggagcccttactctagaaaggattg

SEQ ID NO: 460114 - DNA, 122 bp, Homo sapiens
cgcttccagcctaaagcccgtcctcttccacctcttgggtgcagactggccctcccactccgaccgcaggtcccccaccggccacacagacggctacgctagaacccagccaaacaccgggg

SEQ ID NO: 460115 - DNA, 122 bp, Homo sapiens
agtccgggaatttcttttgcaatttggtttcttcttgcctctgctgacagcgtggccaggcgactgcagtcacgtctccaacaaccaaggtaagggacggggcggaggagcgggagtgggtg

SEQ ID NO: 460116 - DNA, 122 bp, Homo sapiens
gatagtcccagagtcactttaaatcacacgcatggtcttaatttctgtaaataaaatgtccggctgaagatagtaatcaaaatcctgtatacaactatattaaatccaccccttctccctcc

SEQ ID NO: 460117 - DNA, 122 bp, Homo sapiens
agaagttcactcagaccttcctgaattcagatcatctcagaagtctggagggaaatctggcgaaaccttcgtttgagggactgatgtgagtgtatgtccacctcactggtggcaccgagaaa

SEQ ID NO: 460118 - DNA, 122 bp, Homo sapiens
agaggtggaagctctagtcttcacaaagcctggttttgcagcctctgcatttctgaggtgcgccatattttggcgcagaggttgaggtgcggagaggaaatctatttctcccatagcccaaa

SEQ ID NO: 460119 - DNA, 122 bp, Homo sapiens
gccatgcacctgcacagaggcccctgcaggcccgagggaccgtgcggaggtgggccccagcggtgaaggaaggggctccgccagggtgggagtggcctattaacttcccaggtgacaagcca

SEQ ID NO: 460120 - DNA, 122 bp, Homo sapiens
ccgtgtgaagggcaagccactctggccgagagggagccccacacctcggtctccccagaccggccctggccgggggcatccccctaaacttcggatccctcctcggaaatgggaccctctct

SEQ ID NO: 460121 - DNA, 122 bp, Homo sapiens
tgtgcagtaaaagtaaccccgagggtgagacgtcggcagcgcggcctgccttggcttcggcgccgcatccccacatcccagcttgcaacagggaaatctggggtgggggtggagtctggagc

SEQ ID NO: 460122 - DNA, 122 bp, Homo sapiens
gctccaggaaccgaccacttagcaaaccgcaccgaccccgactgtcgcagttaccggcggcgtcaggggcgggctgcacggttggaggccccaccccgcacctcagctcccgcctcgagaac

SEQ ID NO: 460123 - DNA, 122 bp, Homo sapiens
agaggcgctctgaggcccgacagcttctgatcccggatggggattatgcggccggtgcctcggctggctcagccgtgaaaaataaaacagggtggattccaaacgagacgacacacgtgaat

SEQ ID NO: 460124 - DNA, 122 bp, Homo sapiens
tttaaagaataaactgtgtctcatggtcagggcaggcagaacagcattaatggtgaaaagcgtgtggcttttaggtagactgcctgggtttggagcctggctccacaacttactggttatgt

SEQ ID NO: 460125 - DNA, 122 bp, Homo sapiens
ttctggtctaagcaactcagcaccagcgccgccaaggggaggccgcccttgtcctggccccgggaagagacgcagctccagccccgacgcagaccccatggcgcacacaggcaggcagagct

SEQ ID NO: 460126 - DNA, 122 bp, Homo sapiens
ccctctttgaggtatcgactgggcattgcccccaccccagcacatctccctctaaaccgccgggagtgggggcaggaatgctccaaagctgagatctaaatgtgtctctgattgaacgtccg

SEQ ID NO: 460127 - DNA, 122 bp, Homo sapiens
ctgcctccccttctgctccccgagacctggcgtggagaccgccaccaggagctccgaacacgcaggcccaaattggaataggagatggattttgataaaagaggttaaataacaggtttttc

SEQ ID NO: 460128 - DNA, 122 bp, Homo sapiens
attcttctttactcttagaaaagctgggaccttccttaatggattaaccttctattgctgcgtaacaaatgacaagaaatttagtgatttaaacaacacgtatttattgtctcgtgcttcca

SEQ ID NO: 460129 - DNA, 122 bp, Homo sapiens
cctgccccgtcagcccaagcagccctgtggtaccaagacctgctggctgccctggcaagacgtggggctggatcgggattggaaggctaagggtttgttattttcgggctcaggcctgctcc

SEQ ID NO: 460130 - DNA, 122 bp, Homo sapiens
cccatttacttattttggtgacctaatgaagcattaaaataataagttattcaggccaggcgcggtggctcatgcctgtaatcctagcactttgggaggccgaggcgtgcggatctcgaggt

SEQ ID NO: 460131 - DNA, 122 bp, Homo sapiens
catcagacttaatgaactgtagttacaatatcttactcttgcatcttttatgcagaaccacgtgaacatactagcagggtgcctcccagggccttaggagggccctgaatgagtgagcttca

SEQ ID NO: 460132 - DNA, 122 bp, Homo sapiens
tttttatgtaaagggatcgtgccgctctacgatggggtttgttttaattgtggccaacgacgattaaaagatcaaatctagccttgtctctgtactctcccgtctccccccccatacacaca

SEQ ID NO: 460133 - DNA, 122 bp, Homo sapiens
ccacaggcaagagagtaccggcagacagcggcgcgagacaggggcagaacgatgaggcgccggagttagctcgccggtgcgggtgcgggtgcgcggcgcgtcgcggcccctcctccgcgacg

SEQ ID NO: 460134 - DNA, 122 bp, Homo sapiens
ctgtctcatataatgcccgaaattgttgcctagagagctgaacagtgacatctgttggttcgatttgaaataggcaagttcaaaagagaaacagccacactagtatttcttcccctttcaaa

SEQ ID NO: 460135 - DNA, 122 bp, Homo sapiens
ggctggctgctgtctcctccccgcgctgctgctgctgctgctgctgccgccgccgggctccgggggtgacggttgctgcaatcgctcctgcctcgctccacaccgacatcttgcctgtcaat

SEQ ID NO: 460136 - DNA, 122 bp, Homo sapiens
ctgagccacgaggatggagcagccaccccggcccgggactggcgcaaggtaaggtgcagccgcctgttgcttttcgcagagcgcgggatcatccctctgcccgggtacctaggccgtccctc

SEQ ID NO: 460137 - DNA, 122 bp, Homo sapiens
ttcatttcccctcccccaccgtagcttccttagaggactccaaaacaaaacggggctcaccggctttgggaatctcgtcagctgcccccagcgcactggtagactacgaaagttcaaacccc

SEQ ID NO: 460138 - DNA, 122 bp, Homo sapiens
cacagggccccaagaaaaattctccactgtcactctgtggtatggccataaatgcctcagcgccgcctcactgataggtctggtactgtttgaacaggaagatcaaaatgaatacaaaatga

SEQ ID NO: 460139 - DNA, 122 bp, Homo sapiens
aaacaaaattctgattgcaatataatggctgtggctgggacacttaacaatttccagtaacgatacactggcaaataactatggttcagttgcagggctggtaacatgatattatgcatcaa

SEQ ID NO: 460140 - DNA, 122 bp, Homo sapiens
aggaagactggtagacgtctactgaaatgtcagcgcattcgaagtttctgataactgcagcgcttccctcccagactacaatctacagtgactggcctctaacagaaacatggttgtaccac

SEQ ID NO: 460141 - DNA, 122 bp, Homo sapiens
gtggaggagacaggcaggcagtaggcacagctgacatgaaggctctgaggcagccgggcgcggtggctcacgcctgtaatcccagcactttgggaggccaaggcgggcggatcacgaggtca

SEQ ID NO: 460142 - DNA, 122 bp, Homo sapiens
gaggggggaaatggctccggctaactctgaatttaaattaaaaaaaaaaaaaaagcaaagcggttgcgtctttgttccgtattcagtggtttgttctcgcggttatctagcggaaaacagcc

SEQ ID NO: 460143 - DNA, 122 bp, Homo sapiens
atgcagacctccttagagttgtaagcccttaaaagggacagaaattgctcacagggagctcggtatttggagacgtgagtcttgccgaagctcccggccaaataaagcccttccttctttaa

SEQ ID NO: 460144 - DNA, 122 bp, Homo sapiens
actgtacttatctctgccacctactcaaattacccttaaggaaaccaaggatacctgaaacgccaaaatcaaatacttatttttcaagtcttaaccttatctgtcctggggatgaaggaact

SEQ ID NO: 460145 - DNA, 122 bp, Homo sapiens
aggcaaccactgaggttcccctgcagcaggtgacagaacagagagtgtgcggatggggagcgtggaggagcaccggggccgggcatgagggctggccggcttcagcgccctcggtaacaagt

SEQ ID NO: 460146 - DNA, 122 bp, Homo sapiens
ggcctgcccctgccaaccctccctcggggctgagcaggtccttgtgcctaggaggcccagcgtctgcgtaattgccacggaggggtgaggtgtgtgtggaggcttccccagcactggccttc

SEQ ID NO: 460147 - DNA, 122 bp, Homo sapiens
cctttttccagggtcccagctgccccaggcggccaggcaggcgcgccgaggttggggggccggctccaggcctccaggcccccaccctggagggccaggcagccatctcctccctacccagc

SEQ ID NO: 460148 - DNA, 122 bp, Homo sapiens
actagcctccctattgtgactcgtttgagctcttagcccggcgtgtagtctggcgggagccgtccctggatgggggtcactagcctccccattgtgactcgtttgagctcttagccaggcgt

SEQ ID NO: 460149 - DNA, 122 bp, Homo sapiens
cttcaaatcccgcccagcgggcagcgcaaagcgagcggtttggggaaatgccgaagggaccgggaaaaacaaactccaagtcgagtttaacagccgaaacgctccgtgcctaggccggcgga

SEQ ID NO: 460150 - DNA, 122 bp, Homo sapiens
ccaggctgggggcggagacttccgcgcgggcatttctccacccacaggtggcggcgtgcgcgcggccccgttgccatggcgacgctcctgctggcccagcaaccgccagactcgcaccccag

SEQ ID NO: 460151 - DNA, 122 bp, Homo sapiens
agctttcaaagcaaagccagactccggccctgcccggggtaggaagtctttgtctgcctgcgcgcccgagcgctcccggcttgggattgatttttggcccccgctgcagcaagttgggggct

SEQ ID NO: 460152 - DNA, 122 bp, Homo sapiens
ggaacctacctgtcagcaaaatctcgacacccaaacctcaacataaatcaaacactttcccgggcagagaatgtctgtgtcaggcaagaattagagacaagcggtcagcagagcctcagtgc

SEQ ID NO: 460153 - DNA, 122 bp, Homo sapiens
tggtcctcaggcctaaaaacagaaaccaatttgtttagagaatgcagctccggtggcagccggctgctctgagccggcgtcccagcaacctgggagagttcacgacccccatgaccccgccc

SEQ ID NO: 460154 - DNA, 122 bp, Homo sapiens
gaattgggatactccaggaacgggaggcccactcctctccaagcctctctaaactaggagcgctccggggtagtacgctctggtcggcagaggtgaactcttccaccccaaacttggtgctt

SEQ ID NO: 460155 - DNA, 122 bp, Homo sapiens
ggcctcggtatgaagccacccccactgcctccgtggggtctctcccccagctcccagccccgcagtctggctgcgcttgtgccctgaaggagcaggccatgctcactgcccacctgtcaccc

SEQ ID NO: 460156 - DNA, 122 bp, Homo sapiens
ttcatttccaagaagtttcacaagtctgccaggggaagtccctggacttcttgcttctttcgtgtaggacaggctgtcgaaacctcagtggataaaagacctagagaatgtgtatcccagaa

SEQ ID NO: 460157 - DNA, 122 bp, Homo sapiens
ggcgagggctgggagctgggccgggtccggggacagcgggcgaggggcagctgccggagccgggcagccaggccgctcagggcaggggacagctggcgccggttctgcggtctccggggccc

SEQ ID NO: 460158 - DNA, 122 bp, Homo sapiens
gctgggcgtggtggcgcgcgtctgtggtcccagctactcgagaggctgagatgggaggatcggttgagcctgggagttccacgctgtagtcatccgtgattgcaccactgcactgcaggctg

SEQ ID NO: 460159 - DNA, 122 bp, Homo sapiens
cccaacctctaatttcttctctttgctctacctgatgcaataccttaaagtaaaaagagccggcaattggcaaatatttatgaattaactggagttctgtcacaacattcttatgggatcca

SEQ ID NO: 460160 - DNA, 122 bp, Homo sapiens
gcggaggcagctgggattccggcctcgcacgcccgagctttagccactgtgcggcgctgtcggggcagcagcccaggcatccgctcagttcctgctcacgtccagcgcccatctccccttcc

SEQ ID NO: 460161 - DNA, 122 bp, Homo sapiens
ctgcgctggggcctgagccgagccggagtctggctgctcccaccgcccgcacggtgcccacgccgggcgctgcacaagcagaaagacggcactgagttcaagagcatctacagcctggacaa

SEQ ID NO: 460162 - DNA, 122 bp, Homo sapiens
ggggcggcccgattggggcctgtgaggggccctccacgcagggctttgtcttgggccacccggacacggacgcgtccagctggcgtccctgggcgcgcggccggctctctctgggaatcagt

SEQ ID NO: 460163 - DNA, 122 bp, Homo sapiens
tgggagatcccggagaaccacccacggggctttaaaaaatgttggtgcccaacatctccccgaaatagggcccgccctatctcggtcggggagcgcgggacctccgtggccacccagcgcca

SEQ ID NO: 460164 - DNA, 122 bp, Homo sapiens
tcacggtacccccacgagtagtagtcacacagcaaatcataggcaggagtggacaaacagcgctgggagcattaattctggtagatttggagtctgggcagggcctaagaggatgggatcag

SEQ ID NO: 460165 - DNA, 122 bp, Homo sapiens
ggagctccgtccccaaggtgttttgttagagtcagagacctctccttgggtgattccattcgtcagccccacaagtccccgtctctggcctttttcagggtctccggcagctctctgacagt

SEQ ID NO: 460166 - DNA, 122 bp, Homo sapiens
gaagtcaccttctgcattctttctcattagtcatctacaattttttttttcttttgagaccgagtttcactcttgttgcccaggctggagagcaatggcaccatctcggcttactgcaatct

SEQ ID NO: 460167 - DNA, 122 bp, Homo sapiens
tcttcagccctaccaagcccctccttctccaactgccctgccctgtggtgtggcagaagccggctcccttcatgtcattcaggtccctgggtgtttgcaggagcgggaccccaagaaggagg

SEQ ID NO: 460168 - DNA, 122 bp, Homo sapiens
atatgctgctcctcaggaggaaagatgacccggaggaccgcgggaggaccttcccactcgcgatcttcccagtgccccaaagccagggaccccactgccgcctaccccagcccgcggcaccg

SEQ ID NO: 460169 - DNA, 122 bp, Homo sapiens
attctgctccccgggccctctctcaaacacctgagcaggcttgtgtctcccaggggaggtcgtcccccgctactcgggagggttacggaaaccagtgcttccgcttccccgccgcccgcggg

SEQ ID NO: 460170 - DNA, 122 bp, Homo sapiens
atgaaaatcattacccctcttatctactttagactgatataagaaacaaatcggggaaaacgcgtcacgtgacgactggccccgcctcttcctctcggtcccatattgaactcgagttggaa

SEQ ID NO: 460171 - DNA, 122 bp, Homo sapiens
ttgttttgctctcggctttcgaaaatcaaagctgccacccggcggcctcacgtgcagccccgctccccaacgcccaggcggccgcagctaccttggtgtccacgtcggccaggcagtcccgg

SEQ ID NO: 460172 - DNA, 122 bp, Homo sapiens
gtctcaaacaaaaacaaaaaaaaaaaaaaaaagaggaaggaggtggaaagggtgaaatttcgaggcagttgacaatgcaaggggtcacaggaatcatcagcttctgagaagtacctctctgt

SEQ ID NO: 460173 - DNA, 122 bp, Homo sapiens
aaatcaactctcttagcaaacttcaagtgtacgatacagtattactcactatagtcaccacgttgtccattaggcccttcagaacttattcatttcatgatgaaaaatgtatatattttgat

SEQ ID NO: 460174 - DNA, 122 bp, Homo sapiens
cagtaccaaggaccattggaggaacgggaaaacagaccacccacacctcagacacagagccggtgctggtcagcgtcttagcttgggttccctgagacaaggatttgagtgcacgtggctga

SEQ ID NO: 460175 - DNA, 122 bp, Homo sapiens
tggttctgcagactcctggcaaggcggagcggtcagttctagatgatcaagaaggacctgcgtggtttgctgcagccgaagctgcttctctctctttgcactgtgcttgccgccacctcatc

SEQ ID NO: 460176 - DNA, 122 bp, Homo sapiens
actgcgagtattgcggggaaagaacagcaacgcatttctaaaccggcagagggttttgagcgacagtctccgtcgtaacatttcctgacttttggaggaggaaatgtgcctgtcaacgggat

SEQ ID NO: 460177 - DNA, 122 bp, Homo sapiens
agagggtgcctgtgcccgtgaggcacgtacagagggaaacgtggtgctaaggggagagagcggcttctcctcgcggtggcctctgcatttagggaggtcccgtgtgaagccgtggggtgcca

SEQ ID NO: 460178 - DNA, 122 bp, Homo sapiens
tggtgtggaccatgctgccttgtggagctgggagttggagacagccgccaccccacaggccgggctactggcagccacactcggctttttgcccagtggcagaagagaccagccctcctccc

SEQ ID NO: 460179 - DNA, 122 bp, Homo sapiens
gtggggcaacccaggagggctggagagtgggggcctagaggcctgggatgcagtaggggtcgctggggctccaagcctgtggaccccgagccctagcattgcagctgggcaaagagaggcgg

SEQ ID NO: 460180 - DNA, 122 bp, Homo sapiens
cgtgccgtggtgcttcgttacataggtacgcgggtgccgtggtggttcgttacacaggtacgcgggtgccgtggtggttagttacataggtacgcgcgtgccgtggttcttcgttacatagg

SEQ ID NO: 460181 - DNA, 122 bp, Homo sapiens
agtctagacgccgccgcgcaggaagatgagcccaaggaatctgcagctggagcagaaccacgcgtccctgctgattgcttgcagtggaggtgccctgggcgtagggtcggcagtaagcgtga

SEQ ID NO: 460182 - DNA, 122 bp, Homo sapiens
gctggggccctgtgccgctggcgatcccggggaccgcctggaactcgcggcactcgggagcgagagggaaagcaacccagaggccccgcagccgccggcgacacagctacagaccccgactg

SEQ ID NO: 460183 - DNA, 122 bp, Homo sapiens
ttattaagtactttactccgtagacagagtagggcgttcccgaaggtaagaggacgaacgcgtccatcctaggtacaatgctcgtacctagatcatagggagatgtgctctgctacaagggt

SEQ ID NO: 460184 - DNA, 122 bp, Homo sapiens
gaaagtatattctattaagaggtactcgatccctaattgcaaatccccacttatatccttcgaaacaaaaaaaaaaaaaagaggagacatggtatataatttagatattgccacagtaatgt

SEQ ID NO: 460185 - DNA, 122 bp, Homo sapiens
gtcgcccatcggagaggcaggactactgcgagcagttttaccgcgacctccggaggccggcgtgacaggctctgtcactaaaataggtctgtccagtcgtactttttcctcaccttgaactt

SEQ ID NO: 460186 - DNA, 122 bp, Homo sapiens
ggagaggccattggtgctgggaccagaagtgcgtgggacctgacccgtggagcagccccgcggcctgccggtggagggggcttcccggtggggcctggctgtcattctagggaacaggccgg

SEQ ID NO: 460187 - DNA, 122 bp, Homo sapiens
acagggcctcagcaaccggatgataccgcgagagaggacgcctgacgtaattaaagtgcgcgaacggaagtggcgcggaacatgacggaaaatcagtacggttggtcccttaaggaccagcg

SEQ ID NO: 460188 - DNA, 122 bp, Homo sapiens
cctagctgtgtgactttgtgcaacagagtccccactccttgtctgagactcagtttccctcgcctgtaaaacagggcgtattcaagagtccaggaggattgtgtaagtaaaaagcccacact

SEQ ID NO: 460189 - DNA, 122 bp, Homo sapiens
gcccaggaggctgcagcggcctgctttcaacagcatacttctgggtgggaccccccggggcggacaccgccgctccccttggccgcggtggcgggcgccccctcccgacgctcttgggtagt

SEQ ID NO: 460190 - DNA, 122 bp, Homo sapiens
tggggagagaagaaggttgcaaagtcttgtagcacataaagcatgccaatttcaaacacacgcacgcatgcacacacaaacaccccatactccatattgcccgaggcactggatatcacaaa

SEQ ID NO: 460191 - DNA, 122 bp, Homo sapiens
ctccatcgctatcccaggaaaaagctcgggcccagcaggcgcgtcacagggtggagggggcgggactgcaccatttgcgcaggcgcctccaatagttggccaatggaaaagctgtggctcta

SEQ ID NO: 460192 - DNA, 122 bp, Homo sapiens
aaataaacaattcccaatgttccaggtgagggctttgaaaggccttccaaacagctccgtcgcccctagcaactccaccattgggcactgccatgcagagacgtggctggcccagaatggcc

SEQ ID NO: 460193 - DNA, 122 bp, Homo sapiens
ttgggtggctgtaaaaaattcttgggaacctggcacttccaggggctctttcacctgagccgtatttcctgtgtctttctctggtcaatgaagacagacttctactttacttgttgttctct

SEQ ID NO: 460194 - DNA, 122 bp, Homo sapiens
gatggtatcaattatctactggcagcagctcctgttgcttaagggagtgttatgccctcacgcttcaggtcggcttgcatgggtacaggttgatcctacagacaccctccagtgctgcatca

SEQ ID NO: 460195 - DNA, 122 bp, Homo sapiens
gcagaaacctcgttacctaccgagggtggagcctgcgtgctgacggataggccgagtccccgccccgaaacacaccccgcgcacgatgctccgccccacacgcatgccccacccacccagca

SEQ ID NO: 460196 - DNA, 122 bp, Homo sapiens
tggtggccctgcgccctcaggccgagtcccacctcctctgcagctcttccaggacccacgcggtcccaccgcaccacggctcccccggaccccgcttccccgaggcctgcgcggagacgccg

SEQ ID NO: 460197 - DNA, 122 bp, Homo sapiens
ccccacgtgacctactgcgcgggccgccgcctccaccgcgcccaggccccgcccccgtgacgtctcatcgccctctgcctgtccgagcgttcggctcttttgcgtttgctgattggccagcc

SEQ ID NO: 460198 - DNA, 122 bp, Homo sapiens
caagggtcagatgtaatcttccaacatctgactttcgcgtcacccatttaggaagagacgcggtccctttaaggccctggaaagggtctaagtgttggtttctgtggggaggccacgcccca

SEQ ID NO: 460199 - DNA, 122 bp, Homo sapiens
aggggaaggacccgggcacattgccgggtcagtccctgaaatgaacttaatacttttgtgcggataaccgtctggcctttcagaccctcgatatgggcctcctggagccattcaagagggag

SEQ ID NO: 460200 - DNA, 122 bp, Homo sapiens
gctgcgccgatggaacgagttgatgtgcacactaggtatagggatgacttcatccccaaacgaacgcagccgactctcggggaaacgcagtcgccgggagacgcgcgcggaacagtgtgttg

SEQ ID NO: 460201 - DNA, 122 bp, Homo sapiens
cagggatggtatcttagtcaatttttttcccttgagatgaggtctgtgcctgatgtacaacggatactccataaatgtttgacaaaccaacgaagaatgaaaaaaagcctagtcagactccc

SEQ ID NO: 460202 - DNA, 122 bp, Homo sapiens
tcacacgggctcctcggtcccaggctgcagctcttgttgccatgatgatgatgtcacggacgcaaccactggggggaggggagaggggggtgtgtgtggcgaagggaggctgcgagtagtgc

SEQ ID NO: 460203 - DNA, 122 bp, Homo sapiens
attacgatcagggaatgatcctctaccacctgttaattgtggtagaggaatgctgcgagccggtccaaatacaaattatggcacggggacaatcccgtcatccattcgccaggcatgagaaa

SEQ ID NO: 460204 - DNA, 122 bp, Homo sapiens
tattattttaaataacaatttcatggtctattgtgttgataaattgtcatttcagtatttcgctagtggatgcttgagctttgcctatcatttgtacttttaatgttctaatttggtaaaac

SEQ ID NO: 460205 - DNA, 122 bp, Homo sapiens
gacgattctggagagccaagatcccctgggcaagcaccagacacgtgtagccccagcccacggcttattcctcaagtcagtgctgtacgggaacctcggtaagaaaaacaggcacgagaagc

SEQ ID NO: 460206 - DNA, 122 bp, Homo sapiens
ggtgactttggacctggaatctggtcccactgcacgggcagcagtgtggacactggaaaccgcgtggaggagtgtcatgtacaagacagacgtggaggtggcgccacaagaagtctgagcat

SEQ ID NO: 460207 - DNA, 122 bp, Homo sapiens
cattaaactctgcatataaccaaaagtcttctgtggtagatcaggagtaaaaccaggtaccgatcattgatgaccaaattttgtgggttttgaggcaccaatggataatcccttgtagtatt

SEQ ID NO: 460208 - DNA, 122 bp, Homo sapiens
gtccaaggtaaagggtgcaagggcctgggggtattggccacctgtccctgccctgtgctccgagggaacccaggaccctttgaccagggcgcacaggaaaaggcctccctccaaggagcaga

SEQ ID NO: 460209 - DNA, 122 bp, Homo sapiens
cgaactcctgaccttaagtgatctgcctgcctcgacctcccaaagtgctgggattacaggcgtgagccactgtgcccagccagcagttcataatatttgttttttattccttgattctaact

SEQ ID NO: 460210 - DNA, 122 bp, Homo sapiens
ccggcacacgctcctgaatttctgcttccacgcggccctgaccttcactgtgttcgccggcggcatcaatcgcaccaagtaccccatcctgtgccaggcggtgagtgccggggcgccctcgt

SEQ ID NO: 460211 - DNA, 122 bp, Homo sapiens
gagccccaggaaggaaggcatagcgcatctcacctgagcgcaggtcctggggtgctcaggcgtgctgctcccctgagacctaaggcctacgctgaggccccgcccaccaggccccacctcct

SEQ ID NO: 460212 - DNA, 122 bp, Homo sapiens
ttcttggaaaggttcattaatgaaaacccccaagcctgaccacctagggaaaaggctcaccgttcccatgtgtggctgataagggccaggagattccacagttcaggtagttcccccgcctc

SEQ ID NO: 460213 - DNA, 122 bp, Homo sapiens
catagtctcagaggaaagcacatttattaaagcacgttaatgttcccttggccatcctagcgtgaggtatacagcatgcgcatctttaatggtgccactctggaatgcacatcctgcactct

SEQ ID NO: 460214 - DNA, 122 bp, Homo sapiens
gagaccgacagactgtcactggcaaaatgaactgtcacctcccatttttcagaggcacggcgggatgaattgcagccttgaaccttgcggcccgctgttgattgagttccgctgtcttagaa

SEQ ID NO: 460215 - DNA, 122 bp, Homo sapiens
gcctgggctggagcgggagctgcgggcgtgggggctgcgggatccgccataactgctctgcgcgagtctcgggcggcggcggcgacagcggcggcgaacgaggcgcggggaggcgggaccag

SEQ ID NO: 460216 - DNA, 122 bp, Homo sapiens
ttgcattttgcagaatgaaggagtttgggccagtgtgagccagctcccttcctagggtgccggctcagggagtcaggtaatggggccagggaaacgtgtgcccactgacttgggaaagagag

SEQ ID NO: 460217 - DNA, 122 bp, Homo sapiens
ttttccccaagctggggggcaccaggctgcagccgtggtcatcgtcccagtgtgaacccccgaggcctgcacagctgcaaccattttctttgtacttaaacacaaacgtttatgttcgccag

SEQ ID NO: 460218 - DNA, 122 bp, Homo sapiens
tcaatcccactataatcttattggaccactgtcacatatgcagtccttcattgactgaaacgttgttatgtggtgcataactgtataaggcattaatcctaaatacaaaatctttttggtta

SEQ ID NO: 460219 - DNA, 122 bp, Homo sapiens
agatgaacggtgctcctggggcaatcaagagctttgccccagccagccggagtggtgctgcggagcccctcaccttgaatgggcctcagtttctggttctgtagatggggagtgtgtaccag

SEQ ID NO: 460220 - DNA, 122 bp, Homo sapiens
cgggcatcagatcgtgcacgtccgcggggactcggagaccgacctggaggcgctcttcaacgccgtcatgaaccccaagacggccaacgtgccccagaccgtgcccatgaggctccggaagc

SEQ ID NO: 460221 - DNA, 122 bp, Homo sapiens
gtcgcattcacagtctgcctgggctctagctgggccccttatatacctgctcggattccccggggttggggcttggtccgcccctcgcaacccggaggacccgtgattgacaggttcgcagt

SEQ ID NO: 460222 - DNA, 122 bp, Homo sapiens
caatgaacctattatggatacagtcacatgtgtctgttacatgagtccaagtgatttgtgcggccagtgaagtgcagaaatagggcaattgtgtggataatgaaaactaaggcttcttcccc

SEQ ID NO: 460223 - DNA, 122 bp, Homo sapiens
ctgtctttgtccgccatgttagattcaccccacagagatagcggcagagctggcagcggacggtctttgcattgccgcctccccagggggcgggaagctggtaaggaagcagcctgggttag

SEQ ID NO: 460224 - DNA, 122 bp, Homo sapiens
gggtgggctgactgcttttcaggatctgattattccccttcggagggtcctgtggtcaggcgccaactgtgaggatctgttaccatgggtgacattttcatccaatggagagccatgctgct

SEQ ID NO: 460225 - DNA, 122 bp, Homo sapiens
ctcgtccgacagcacctggacaccggggttggggaggccgggagtgaggccggggtagctcgggggctcccaacacaccatggccatccctgtgcttccagaaggctcctcctcagcccctc

SEQ ID NO: 460226 - DNA, 122 bp, Homo sapiens
gcaatttcacaggatttttatgtgggttaaatgaacttcaaggtgtgaaagaatccagcccgggggctggcacataggaggcacgcaataaatttgcattctcctcactatgagagatacac

SEQ ID NO: 460227 - DNA, 122 bp, Homo sapiens
tctcttggtcaaaggtgctgcagaaagaggggagccaaagagagatacctgatgatcccacggcaggccatgggaaatgtgactaaacatttgctgcaagttttctttgccatttgacttct

SEQ ID NO: 460228 - DNA, 122 bp, Homo sapiens
ggctagccgcagagtccagctggtctcccggccagggacgtcgtgggagaatcaggaagtcgaagccacacagccgagaagggacagctgacatctcggaggccgtcacgagctgtcactcc

SEQ ID NO: 460229 - DNA, 122 bp, Homo sapiens
cccgtgactccaaggtgatctcgttggactgcgtggctagcttgggcatgggggcctccacggtcagtgtgccctcaggggacagggaggaggagaccttggtggggtccacaccggggggc

SEQ ID NO: 460230 - DNA, 122 bp, Homo sapiens
cggccctgatgtcggctaagtactccggctggtacgtgggcttcaccaagaaggggcggccgcggaagggccccaagacccgggagaaccagcaggacgtgcatttcatgaagcgctacccc

SEQ ID NO: 460231 - DNA, 122 bp, Homo sapiens
aacttgaggaaaatgaaattattcatcaggactacaaaaggctcaaagttcaaaccacctcggggtggagatgctggaaaaaaggaaaccattaacaagtaattttatttgctatatataaa

SEQ ID NO: 460232 - DNA, 122 bp, Homo sapiens
cgggcttcaggctgtcctgggcatgacctcagatgaagcggctcacacagctgaggctaacgttgtcggagctgacagctgaaagccgtttgctgaccacactcccacagccgagcagcatg

SEQ ID NO: 460233 - DNA, 122 bp, Homo sapiens
aacctccacctcctggattcaagtgattctcctgcttcagcctgtaagaccacaggtgcccgccatgacgcctggctaatttttgtatttttagtagacacggggttttgccatgtttgtca

SEQ ID NO: 460234 - DNA, 122 bp, Homo sapiens
ctcagagagccaagcgcggggcagggcggggggtggggcgggggcggggtgttaacccaccggttctgccccgccacaaatcacttccaagtcggtgactcaaaaatagtaacagttgttgg

SEQ ID NO: 460235 - DNA, 122 bp, Homo sapiens
aggttgttttttgcgtccctctccaactgctggaagcctttcttcgggttctggcccctgcgttcgagacccacccgggtcccgctgctcctggcacccacagtggaaggcccggggtatga

SEQ ID NO: 460236 - DNA, 122 bp, Homo sapiens
ccttctgggagttgtagttttgttgctcacccaccaacagatggggtatagggctctgggcgtgcggggctggggcggcggttacctgggcgtcctggtagccctggagcagcaggaagtag

SEQ ID NO: 460237 - DNA, 122 bp, Homo sapiens
gcaaagtgagtgggtgtttccaaagcaaaacacaatactttagtacagaaggaacaacggcgatattttgtctgatgtaggtatgaggctggatcttttggtgaggtcctgccagaattaga

SEQ ID NO: 460238 - DNA, 122 bp, Homo sapiens
gaggaatgcctgatttgagggaggagctgtgcagatgaatagtggctaagagcacggacccgggaatgggaaggcagggtttgaatcccagctcccatacttactgattatgtgatcacagg

SEQ ID NO: 460239 - DNA, 122 bp, Homo sapiens
cccgtccctcacctctagcccctcggcttcagctcaggcccctcggggagcatcccttgccgtgagactgacagcctttgggggcgcagggtcctgttctctgcgctctagcccatctgtgc

SEQ ID NO: 460240 - DNA, 122 bp, Homo sapiens
gggtgccacgctcaggggtagggcccagagtaggaacatgggggccgagatctgcaccaccgcatagaccctggtggccttttgctgctgggagcagcacaggaatctaatgagtagagtca

SEQ ID NO: 460241 - DNA, 122 bp, Homo sapiens
gcagcggcccgctttgtgcggcggattagcggcccatacagctccggggttggaaggttacgctgggcaatgaggtttttgttccgtgattgttcaggcctgttgcttttgattgaatggag

SEQ ID NO: 460242 - DNA, 122 bp, Homo sapiens
cattttgtcagccaaagaatgacagcttcattctcagtaagctgctgggctgcccctcagcggcccctccttgtctatctctattgtcaaaggctttggctgacaaccggggtcaaaacatc

SEQ ID NO: 460243 - DNA, 122 bp, Homo sapiens
aggcagtgcagagagaagagtcaggggacacgtcaatgtgggaacactcagaagctcccccgcagagatcatgtaagggagcagcgctgggctcagctaaacaaaggcttctgtgacagccc

SEQ ID NO: 460244 - DNA, 122 bp, Homo sapiens
agagagatagagggcaaggaaaagcatccttaagatgattcggacttggatggacgggaccgtagagtgaatctaagcgccacatctctccgtcgcttcctctggccgtgagggaagagagg

SEQ ID NO: 460245 - DNA, 122 bp, Homo sapiens
caggggccgcctggggaaggggggctcgctcagcagaggggagctgggaagacaagggggcgatggcatgggccggagcagagcctacaccacaggcttatggccagaaagctcgtagggaa

SEQ ID NO: 460246 - DNA, 122 bp, Homo sapiens
ttacagactcattactgtttttgctgcccaactatttccttttaggaagtttggtgtgtgcgtggttttgtaacctcacacaatagccacaatagcatgttataaatctcaaagtactttca

SEQ ID NO: 460247 - DNA, 122 bp, Homo sapiens
gtaacttgtcactttagttcttgcagtccaccttctacactaacattaacgagtaaagctcgtcgcttttcgcccaattccccctcccccccgcataacgaatgcactgacccttttccaag

SEQ ID NO: 460248 - DNA, 122 bp, Homo sapiens
acaccaggatcttgttttcagctttaaaaaccaagagaatgggccgggtgcactggctcacgcctctaatctcagcactttgggaggccgaagacagcggatcatctgaggtcaggagttca

SEQ ID NO: 460249 - DNA, 122 bp, Homo sapiens
ggtccctgtctcaggctggtctaatcatagtacccagcactcctggacacagtgactggtcgaggtgtagaactatgacccaattcagcttggaaaaatccctccacaaggtttttgtagct

SEQ ID NO: 460250 - DNA, 122 bp, Homo sapiens
gaccgaacggggacagggtggacaggactgccacgcgtgggctgtaaatactgcgggaggcgttgctgctcattaatatatatggcataatatatggctttgtaaccagctaaggcccaagc

SEQ ID NO: 460251 - DNA, 122 bp, Homo sapiens
tcagagaggagttcggtgactcagatttatttgaccactggcctttcaggaagcagagagcgctttccccagggactgtcactcttccaccatgtttcattgtttccccagcagattgagta

SEQ ID NO: 460252 - DNA, 122 bp, Homo sapiens
atacacatgcacatgcaaattgtttgaaagaaacatcatatggccaggtacggcggctcacgcctgcaatctcaggactttggatggctgaggcggaaggatctcttgaaccggccatagtg

SEQ ID NO: 460253 - DNA, 122 bp, Homo sapiens
gtccacttgggcatggggagctgagagctagcatgccgtttaacttggcaggaagcaggccgggcgcagtggctcatgcctgtaatcccagcactttgggaggctgaggcgggcggatcacg

SEQ ID NO: 460254 - DNA, 122 bp, Homo sapiens
ccactcatacagctagataaccaaagataacaaccaaccccgcctcctggctgctgtcgccgcctcttccacgcagcctcccggccgccgccgccgccagcacctccgcagcttcccggtcg

SEQ ID NO: 460255 - DNA, 122 bp, Homo sapiens
tgaatggctagacagccgccaggtgggagaggcggagggtgaagaggcgggttccgcacgcggttagcctggggctgatctagtcttcagctttcaccggctgggagtccggagctgcagca

SEQ ID NO: 460256 - DNA, 122 bp, Homo sapiens
cccacgggcaggccgcgcgtccggccggcacaggaagtttggggcgctgggcagggaccgcggggtgacatttggactcccggctgcccgaaagggcgacgaccccaccttcccctccctcg

SEQ ID NO: 460257 - DNA, 122 bp, Homo sapiens
gaactccttggaggcctggaactataaatgtaagagtataattattctttccccaagcctcgtgtaaaataggcataacactgattggtttaacttaaaaataaatttaaagtggagattct

SEQ ID NO: 460258 - DNA, 122 bp, Homo sapiens
agagcactcttcagcccctgctgtcaccaaagccccacctcagttcttgcccttaggtaacgccaagatagcaaaatggaattttaccaaaccgctcttaggttccttccccaggagaccag

SEQ ID NO: 460259 - DNA, 122 bp, Homo sapiens
gagagggagggggcctgggtggggcggggcctgggcgaggatgcgatgggggggtctgggcgtggctgcgaggggcggggcctgggcggggctgcgaggagaggggtctgggcgagactgag

SEQ ID NO: 460260 - DNA, 122 bp, Homo sapiens
cagctggcttcgcccagtggatcccgcaccgatggagctgcctgccagtcctgtgctgtgcgcctgcactcctcagcccttgggtggttgatgggactgggcgccatggagcagggggcggc

SEQ ID NO: 460261 - DNA, 122 bp, Homo sapiens
gcactcctcgcaaccactgaaaacgaacataatgctcgagatgcaacccgcttgctatgccggccctaggtaacacctgcctgctggcataggtcacccaccagagaccccttttgctggac

SEQ ID NO: 460262 - DNA, 122 bp, Homo sapiens
gcccctccgctgctgccagccgatccccctctacccccacccactactccggccgccagacgttgcctacagtctcggctctgtctcccacggctgtgggtccggaccccacgggaccccta

SEQ ID NO: 460263 - DNA, 122 bp, Homo sapiens
gctcccggcgtactccgcgctccctgttcccggcattccccgcgctccccgagcttcccgcgctcccctgctcccggcattcccggtgcttcccgttcccggcgctcctcgcggccgccgcc

SEQ ID NO: 460264 - DNA, 122 bp, Homo sapiens
taggcttcccggattccaccctttttctttcctctcctttccctcctttctcagctctgtcgaataggactgtaataagaacatataacaatatcccaggagtctcttttagagagctctct

SEQ ID NO: 460265 - DNA, 122 bp, Homo sapiens
ccggcgcctctgcccgcagcgctcgccgtcgggctagggctccgccgccgccacgcctcgcgcccggcactcaccgccccatgctggtgcacacctactccgccatggtgagtagtctcggg

SEQ ID NO: 460266 - DNA, 122 bp, Homo sapiens
acttacccccaagaaaggtcagcacgggaaggcggcccacacacccccgcctgctttccccgcctgccacccagacctagccaggtgaccttcggcaacacgtcgcctccttcaacttccat

SEQ ID NO: 460267 - DNA, 122 bp, Homo sapiens
ctccgaagcgtccctcagtggagcaccaaggcaggactggcttctcagggcacttggcagcgggacactccagacgagacctacccctgcctgggtctggggaccatgggaagggcttagag

SEQ ID NO: 460268 - DNA, 122 bp, Homo sapiens
atgagaggcggacacttgccagttggatataattaccaaaatgagcacaaattggaccatcgtcttggaatgccccctcctagctgtcacccagagtcccgggacctacagtgttttttaag

SEQ ID NO: 460269 - DNA, 122 bp, Homo sapiens
ctaagagtcgtagtgactggccaaaaaaaaccgcaattttggggtctaattcgattgtgacgcagttgaaattagcttctcccccatgccttccctttcacgcttccgtcctgacgcaaacg

SEQ ID NO: 460270 - DNA, 122 bp, Homo sapiens
agagctttgtgtatattgtacaagtcatatagctaattaatagtacagctggaatgtgaacgtagtctgacacaggagtccacttagccattgatctgtgtggctcaattatactctaagca

SEQ ID NO: 460271 - DNA, 122 bp, Homo sapiens
gtccttgctcttgtgaatgagactgatggacggtgcccgcagctcacttcctggccagcacgtctggaattccggttttgtttcctcacttgcaaccattaaagttcgcatgcaaagctgga

SEQ ID NO: 460272 - DNA, 122 bp, Homo sapiens
tctgaccttagactagttacttaactttttaaagcatcagacttcccacctgtaaaaacacgagaagagaaccttccttacagagctgtgaaagtccaataatacaaagaaaatataacatc

SEQ ID NO: 460273 - DNA, 122 bp, Homo sapiens
accggggaatcctcaggcgaagagagtggctgcgatcagaaaccagtgctgcctccaccacggaggctcccctgacagaggcccgcagtgactcatctgcagatggccatcttactctttgc

SEQ ID NO: 460274 - DNA, 122 bp, Homo sapiens
cttaaggggggtcctgggccaggcctaggtttagtacaaaggtcactaagactcattacccgccatctggggaccttcgtccccatgtgacagcagcctgcacagccttgtggtggcactgg

SEQ ID NO: 460275 - DNA, 122 bp, Homo sapiens
cccagtcgccagagatgtatcctcgagtttggtcctctggtctcccagatagtgctgctccggccttttcccactattccctggctcccgctgtgctcggccggggagattctggcgccatc

SEQ ID NO: 460276 - DNA, 122 bp, Homo sapiens
cagctcctcccgctgtgatgtgctgcctggctggttctccttactgagtcctaagcatcccggccacccagcctggccagtatttcttcgtcccaccctccctatgtgggcgggtctcttcc

SEQ ID NO: 460277 - DNA, 122 bp, Homo sapiens
tctgagtggaaaataatagaaggggcttgaggagactggaaattccagtttgtgtaagggcgcacagtgctgtaatacagagtcctacctccctgcagtccctggatgtgaattcccaggct

SEQ ID NO: 460278 - DNA, 122 bp, Homo sapiens
cttccccttgacgtcaggctgggggggtcgagcggaggccgggggcgggccgcgaaggctcgctcaggagggggctgcgacccgcagcgacctgtggacccgcccgctctccgcccgggggc

SEQ ID NO: 460279 - DNA, 122 bp, Homo sapiens
attcatcaactatttgttgagctcctactgtgtgccaagcacgcctctaagcgctggggacggcgatggaacaaaacacacttccggttctctggagtttacatatcggcgtgtatgtaggg

SEQ ID NO: 460280 - DNA, 122 bp, Homo sapiens
tgggagcctgtgcctttaaattctcagcaggttgaaatggctgatgacatcactggttcccgggagcggtagagctggagccggagccaagggagtccaggctgccgggggctgcagacatg

SEQ ID NO: 460281 - DNA, 122 bp, Homo sapiens
aggagatagaagcgcagatcaaggccaactatgacgtgctggaaagcgtgagtgtgggttcggggcgccccaagtcgcctaacccggcccggagtccctggggtactgggatgccagggcgg

SEQ ID NO: 460282 - DNA, 122 bp, Homo sapiens
tatggaactgtctgcattggaccctaaactggactagaagaggcatcttcaaggttcatacgttgtccagctgtaagttcatttgagtagcagacctaacaaatatttgaggtcagaaccct

SEQ ID NO: 460283 - DNA, 122 bp, Homo sapiens
aaacttttcccgaagagaagttgggagggctgatctctcttttcccacccaaggctcctacgttcttttccaaaggagacagtagctcgcctgttctccctcgcggcttcctctcctactct

SEQ ID NO: 460284 - DNA, 122 bp, Homo sapiens
aaagctgccagagagatgactgtggtggctcacatctgtaatcccggcactttgggaggccgaggtgaatggatcactgaggctgagacaagcctgggcaaaataacgagatcccatctcta

SEQ ID NO: 460285 - DNA, 122 bp, Homo sapiens
atgaatagaattccagcaggcagaggtaagagaagtgcatttcaggagagggaggaatagcgttaagcacaggcagaatggcctctgtaaggagggggtaccaagcctgggactggcacaga

SEQ ID NO: 460286 - DNA, 122 bp, Homo sapiens
gggcgggccctgttgctcaactcacctctcccgccccgcacccgctccccggggaggcgccgacccagcgaaactggtgcatgtgtcagccgcccagcaccggcccaggaggccggccgcgc

SEQ ID NO: 460287 - DNA, 122 bp, Homo sapiens
taactaagggtaatttagcttatcagcagtacccaaatcaaatgagctattctgaagatacggattcagagaaatcacaaaggctcatgtgcttcttcattaaacatttgtctattaatttc

SEQ ID NO: 460288 - DNA, 122 bp, Homo sapiens
gagagccgggccacaggcaggcccacagcatatcctatgcagatcagatcccaatgcagccggggaaacaggacgtgggacacgcacagtcctgctcctcttcctgggacccctgtctgctg

SEQ ID NO: 460289 - DNA, 122 bp, Homo sapiens
ctgaacccgtgtccctgagggtggtcacaatctcagccccaggtggaggctgctgaatgccgtggctgcaaagcagggcgctggggctggggggtcagctgttggggggagggagccctctg

SEQ ID NO: 460290 - DNA, 122 bp, Homo sapiens
gtgtcaggcaatatttcagcttctttcagtcagattcattgttttcatatggcctatgagcgttaagattcttttttccttgtataaagtttcttttcctaaactcaaaattgtattacatg

SEQ ID NO: 460291 - DNA, 122 bp, Homo sapiens
cgtccccggccaccgctgtcgccgctgctgcaattcaaggcgcacactatcccactttcccgctggaggcgcagaggatgccccttgagccagacctggagaaatagccccagggcccggca

SEQ ID NO: 460292 - DNA, 122 bp, Homo sapiens
ccgcccgggctcactccctccctggggacccagcggaccggagggtgctgggggcgggcgcggtaccttttggacagatccatgaggaccccggagaagagcttctccccgaagcggaacga

SEQ ID NO: 460293 - DNA, 122 bp, Homo sapiens
ccaacccctcattggaatcatcttggtaacatttaagattctacaacagttataatgcgacgattcagaggtggtctcaaagttgttacagtgttaaaaaaattatagtaagcagtataaaa

SEQ ID NO: 460294 - DNA, 122 bp, Homo sapiens
aggtggacgcctgggcctcggggactgggtatcgggttgctgcagtggccgctggcagggcgccctggaggtgagggccggcccgcgaggtgaggctgcctctgcccggcccttggctgtga

SEQ ID NO: 460295 - DNA, 122 bp, Homo sapiens
caagactagatggaagttctgtcttctctatccttatggctccctgcagcactagccattcgtcaaagctggttctaccttaaggataaacttgtccttttctttgcaaaactctaaattca

SEQ ID NO: 460296 - DNA, 122 bp, Homo sapiens
tctggggagacgcgaggctgcgggctcggagctgcccagagagggctccgggactggggccgcagtcgccgcgcagggacttgacaagacgtccggggtcccggctgccggcccagccccat

SEQ ID NO: 460297 - DNA, 122 bp, Homo sapiens
gcggagtggccgcagaggccggggtcggcctttgcgccgtggcttcgggtgttgtggaggcgcacagaggcacgttagttgatttccagtggtttttggtttcgggggtcttaggaaggtgt

SEQ ID NO: 460298 - DNA, 122 bp, Homo sapiens
gaggtgcttttagggcatcatctgagagtcattgctgaaccttgggactgttgtacaggtcgaaagggttctcctatggaggtcgtctgaactctaggaagtacaggagcaggacaagggat

SEQ ID NO: 460299 - DNA, 122 bp, Homo sapiens
gtacctgcccaccgggagctttcccttccttctcctgctgctgctgctctgcatccagctcgggggaggacagaagaaaaaggaggtagaatggatccccttggccttcccctgtgggcggg

SEQ ID NO: 460300 - DNA, 122 bp, Homo sapiens
agaggtcagcgaaccactttacaatcacattttactgggacacagccacaccttttggttcgtgtattgtctgtggccactttcacagaatgaccagtggccctcagagctaacagacgcac

SEQ ID NO: 460301 - DNA, 122 bp, Homo sapiens
ggcgccgctactcccgaagatttcgaggctttgatcatgctactcccccgtcaacccctacgaagttacagtgatttagaggctgaaactcacttggcctactaacccccacgcgacctatt

SEQ ID NO: 460302 - DNA, 122 bp, Homo sapiens
cctcctcggctggcgagggtggggggggcgggggaggccggggctcgccccgagcagccacgatgctcctggacgccggcccccagtacccagcgatcggcgtgaccacctttggcgcgtcc

SEQ ID NO: 460303 - DNA, 122 bp, Homo sapiens
tgcagccgggcaggaaagggcccgccacgaacactcggttatttccggattgactcggctcgttccgtaaagcgccggaggattggctggggcgtcgggagagaggaggctcgaaactacat

SEQ ID NO: 460304 - DNA, 122 bp, Homo sapiens
caccaccctgactgctggtccacaccatactgtcccaagcttctcaggctgcggtgcagacgaagaaatcatcgctatgcatgctggccttgggatgggggcgcaaagcccctggacgcgcc

SEQ ID NO: 460305 - DNA, 122 bp, Homo sapiens
tgccaggaagcaccaacctcagaaggtggggcactccatggttaacacttctttgggacccgaggatctagtttaggaatttttagttgtctttgatattttactcatcccctatcatccta

SEQ ID NO: 460306 - DNA, 122 bp, Homo sapiens
acactcagctttttataggcggacgccggttgggcgggtcatgtgactgcgctgcgaaggcggggcgaagggacgccgcgcaagcgcacggaggcgtgtccccccgcccgttaacccattcg

SEQ ID NO: 460307 - DNA, 122 bp, Homo sapiens
gaacaggtgcagggatgtggttgcaaggatgtcctgtcccgtcagagaaagcctttcccgcgggcgctttgttttattatttccatcctggggaccaaaaatgatcccggcaagagagagaa

SEQ ID NO: 460308 - DNA, 122 bp, Homo sapiens
cacctccgcagtttctcttcttctcacaacctgcgacgggtccttcttccttgatactcacgaagcggacacagttctcattcccactaggtgtcgggtttctagagaagccaatcggtgcc

SEQ ID NO: 460309 - DNA, 122 bp, Homo sapiens
ccataggccaggccgccgagcgggaaagcgcggggggcgggggtggcgcgtggggaggggcgtgaatgaagcaagaggagggagagcatgtatgggatttctggaacctagtcccgcttagg

SEQ ID NO: 460310 - DNA, 122 bp, Homo sapiens
gatcccgaggaggactgaaaagagacgtggaagcagggttgaggtgtggcgggaacgggccgcgtccactccccgcacccccgacagcgcacctgagccccgcctcggccgcacagcgctcg

SEQ ID NO: 460311 - DNA, 122 bp, Homo sapiens
tctcggtgggtctgcacacgggcgaggtgcgcacggcgcgagccctgctggacagagacgcgctcaagcagagcctcgtagtggccgtccaggaccacggccagccccctctctccgccact

SEQ ID NO: 460312 - DNA, 122 bp, Homo sapiens
ttctctttttcctcagtttcagaacaagcttcctggaacccatgacccatgaagtcttgtcgacatttataccgtctgagggtagcagctcgaaagtagaagaagtgggtgaggttttctct

SEQ ID NO: 460313 - DNA, 122 bp, Homo sapiens
gcctcctgtcggatcactggtggcattagattctcattgtgcaaaccctcttgtgaacttcgcattggagggatctaggttgcatcctccttatgagaatctaatgcctgatgatctgtcac

SEQ ID NO: 460314 - DNA, 122 bp, Homo sapiens
tttgtatacctaaggcaggcatttggatcagtaacatgttttactaagcctagagtaattcgtaaagggtataagcataggacagattttgccctcaatcacaatatttgtattcacttgaa

SEQ ID NO: 460315 - DNA, 122 bp, Homo sapiens
atgaaagcacatacatcagcaaactgcagcatcgggtgcagacccaccgcccgcccctcccgggcctccactctggggcaaccaggaagggttccggttcctgccgagactctgtgtggggt

SEQ ID NO: 460316 - DNA, 122 bp, Homo sapiens
aagacaaagaatggggcaagagaagatcatggtggtgggctcagtcaggagggccgggaccgagggatgcgctatgagaaaagctggagatttggggctccaagacctgaatttgagcctcg

SEQ ID NO: 460317 - DNA, 122 bp, Homo sapiens
cttctaactcctcctcccgcagctggggagcggttggcagcagcgggctggaaattccgacgattaaacaaagggagtgggtggagacttgacatgcacaatcctaggcgcccaactgcacg

SEQ ID NO: 460318 - DNA, 122 bp, Homo sapiens
ctcacattcaacatcctgcttctcaaaagtggaaactggaagcctgacagctgacagatgcgttttccaattaaaatattgttttaaaaattcctgtaagttatgattaccaatcattgatg

SEQ ID NO: 460319 - DNA, 122 bp, Homo sapiens
gaatagcattactcctcctgtgtggagccccggcgcgaggaggccctctccgcagcccgccggtgtgtgtcctgaacttcagtcctgctggacttcatcctcccggagtcctgtgtgacttc

SEQ ID NO: 460320 - DNA, 122 bp, Homo sapiens
cagccggcagccacagccttgggaggccagggagcactagggggcccccaggtgttcatccggttcccttctagtctgggaggagccgagggcagggtccaggaggcaggacttacaggaat

SEQ ID NO: 460321 - DNA, 122 bp, Homo sapiens
tttcccaccactatcacttcgtgataggtgatcatttacaattactcactgactcagtcccgggaagaggcggtgcaaaatgggacgctctatccaggtgctcattagaaatgcagaatctc

SEQ ID NO: 460322 - DNA, 122 bp, Homo sapiens
aacgacggaccgagctacttccgggagagaatgggagggtggaaaattttgtgcgtttggcgggtttcgctctcttcataagtattgatcattccgcagccctgcggaccggacacgtgagg

SEQ ID NO: 460323 - DNA, 122 bp, Homo sapiens
tggagtaggagaaagaggaagcgtcttgggctgggtctgcttgagcaactggtgaaactccgcgcctcacgccccgggtgtgtccttgtccaggggcgacgagcattctgggcgaagtccgc

SEQ ID NO: 460324 - DNA, 122 bp, Homo sapiens
tcttcaccccgccggcactggattgtttgtccattgtatatattggttcttcaatgtctgcggcaggcttttgtaggttttgaatcttcgcagtggcccggagctcttgccctccctgtata

SEQ ID NO: 460325 - DNA, 122 bp, Homo sapiens
gactcaggaggatcttgttcggtgcgaattttggactccgggaggcggcctggacccctccgccagggacagtgtcccctagggactattcagccaccttccgttgttttggtgacgattca

SEQ ID NO: 460326 - DNA, 122 bp, Homo sapiens
cccagccccgcctgacgctgcagctgggccggagactcgccattggattaaaaatagcgtcgccagtccgccccaagcccgcggtgcccgctcccgccccgcagcccgctctccccgcccgc

SEQ ID NO: 460327 - DNA, 122 bp, Homo sapiens
gcctcaggcacatgagccgccacactgtttccgagtgtccacaggcgcgctcggccatcccggacactgcagcacatagtccttgtccacctgccatggctgttagcgtggcgcggagccct

SEQ ID NO: 460328 - DNA, 122 bp, Homo sapiens
gctagcccctcgctcagctgcatttctatcgggcactcgactccccggaagtggtggcaccgcacgcgctgttatcgactctgcgcctttggaaacggtgtgtctgcgaatccaacgacggg

SEQ ID NO: 460329 - DNA, 122 bp, Homo sapiens
tcgggttggctgccagccagggcacggttccgagccggccggggctgactccgggagcagcgaacagaaaacaacctggctccagaaagacaattaacaaaggctggagaccagccaccccc

SEQ ID NO: 460330 - DNA, 122 bp, Homo sapiens
tccaaagcacggaacaggtggaccgcacccaggcgctccagagcacttatgtctcagtaacgtttgtttgtccaaagcagcatacgatccagccccgctgcccacccttacctgggaaacgg

SEQ ID NO: 460331 - DNA, 122 bp, Homo sapiens
aatggtaggagttccgtcagcccattcatggaggcagaggagggtgcagggcgcggagctcgagccagcaagcagaggaagtcagaggcccttgtaacgagctgaagatcacaaacactgct

SEQ ID NO: 460332 - DNA, 122 bp, Homo sapiens
tccaccctccgctgggcgccgccatgttggactagggtcctcagggcaggggcgggtagacggggcgcggcgagggacacgtggagcgtccgccggaggccacgtcggcgtcggctgtccac

SEQ ID NO: 460333 - DNA, 122 bp, Homo sapiens
gtgggtgggctgccactgtgggctacaggctgggcacgaagcgaatcctctgggagtaggcgaggtcaacgacgtacaggagcaggttgacgtaggtgaagatggccaccaccagctggctg

SEQ ID NO: 460334 - DNA, 122 bp, Homo sapiens
gtcagtctctccggatagacttgggaagtcaggtcgtttcagccacacatcaccattctccgtccctgagcccggcatgctggtttagtgcccccaaaggaagagaactcattttattctgg

SEQ ID NO: 460335 - DNA, 122 bp, Homo sapiens
ctgttgcccaggctggagtggggtcttcgttcactgcaacttctgcctcctggcctcaaacgatactcctacctcagcctcttgagaaactgggaccacaggctcgggccacaggcccgttt

SEQ ID NO: 460336 - DNA, 122 bp, Homo sapiens
tcttctgcccttggcaattaaggtccaggtagaggcaggacaaggaagacttctgcctggcgctgccggccttggcatttcctccacgaacctgcaagagaattcatgccattgaatcaccc

SEQ ID NO: 460337 - DNA, 122 bp, Homo sapiens
gccactaaatgcatctttatttttctgtccatttaaacctggtcaaagaaaattccaacacgaaacccagagtgctggagcaagaagatctcaagctatgagtctacaaaggaaagcgcttt

SEQ ID NO: 460338 - DNA, 122 bp, Homo sapiens
atgtgaccctttcattcggagagaacaccaatggaattttgttgtgcacccttctatgcacgtctgaatgttgtgtagacattctgcttacaactaggtgtgggtgctgctgccgaaggctt

SEQ ID NO: 460339 - DNA, 122 bp, Homo sapiens
aagctgcgagaggcttctgaacaaggtactgacggcgaccagctgtgatgactaaaaagacgattctggtggtggtggatacggtggctggagataagaaaaacctcggttcaaacgagatc

SEQ ID NO: 460340 - DNA, 122 bp, Homo sapiens
tccagcccgctcacctttcccatgcagcagcccctgcttcactcactgatcactccttcgcgagaccattagtgactgagcacctagcgcatggtgtgtcaggagctggagattgagccttg

SEQ ID NO: 460341 - DNA, 122 bp, Homo sapiens
gctactgattttctgttacaaaacactctacatcttataaggaacacaactgagcaattacgctctcctattctcagtgaccttagagcaaaagcctgccctctgaaaacagaacattaatt

SEQ ID NO: 460342 - DNA, 122 bp, Homo sapiens
atcgccagactccggttctccgcaggtgggagcacccatggtgaggttgggagaatcggccgatcgaagagctccgtccgtctcgcgagagtatgaggcagcatctcctgtgtctaatcctc

SEQ ID NO: 460343 - DNA, 122 bp, Homo sapiens
tgagggcggtgctgagaaacctatctgtacctctgtttcctcctcaacaagatggaagctcgagtgtttgtgttgctgtctcatccctgcccaggggaggaggaaggaagtccttaggttca

SEQ ID NO: 460344 - DNA, 122 bp, Homo sapiens
aggctatctaacctcaaatctgcccccttttaaacagaagactgtgttgaacacatttttcgcttctatcagccccttgaaaggggaagggcacctagactggctgttaccattgcacttgg

SEQ ID NO: 460345 - DNA, 122 bp, Homo sapiens
tctcaaacgcgagccactcctcgaggacttctttcctggtcccttagggatcctcagagccggagcggccaggccagttgggtctcccatcccagctcagctatgggggcgcagggagctcc

SEQ ID NO: 460346 - DNA, 122 bp, Homo sapiens
tcctctctttaagggtcacgtgggtgccctctggccgcaggccatggtggccaacctgcacgcggcgaaggatgtcaggatagccagtccttgagaccccctaccgaccacatcccattctc

SEQ ID NO: 460347 - DNA, 122 bp, Homo sapiens
taccagataagccatgcttgaggctgtcgtagcctagtgggtagtcgtgaaatgcagatgcgcctttgcccctcagatagcatctttcatagtaggatggggaaaaaacaccgtttccttac

SEQ ID NO: 460348 - DNA, 122 bp, Homo sapiens
ccgcttcccggagttgtgcttgcccttgatgcctttactgatcatggggtttgcgctaggcgtgcagagggcgatggtttcagtttctccccaaaaaagatagctgtagtcgttcctccatg

SEQ ID NO: 460349 - DNA, 122 bp, Homo sapiens
cccggatccctgccgtgaccctcgcggtgacctcggtggccgggtccccggcccgctgctcgcgcatcagccacacggacagcagctccgacctctctgactgcccctccgaacccctgtcc

SEQ ID NO: 460350 - DNA, 122 bp, Homo sapiens
gaaaatttccacttaagtagagtttctgcaactgggagagccctccaaacgctgaaggatcgagataggatatgtgattgttgtaaagcagaagcacttccagaaccttcaactcttggaat

SEQ ID NO: 460351 - DNA, 122 bp, Homo sapiens
cccatctcggcggcggcgatgtgctcggcgggcgcggggagggatcgcggcggcggcgcccggggcccgctgctgtccagccccgctggccccactcacccccgccacccggccgccgctgt

SEQ ID NO: 460352 - DNA, 122 bp, Homo sapiens
gtgggggcaggggcagcgcccggactcctcccggggcaggactcccagaaacgcaggaagcgatgacgctgctcagataaaccctggcgctctgcgctggcgtcctggtcaggagctcctct

SEQ ID NO: 460353 - DNA, 122 bp, Homo sapiens
atacggaaaacttactacgctgctgtgggacttgtgctcgctccgccaggaggccgagggcgtctttagttcgttaacagaggagcaggcggaggcgggtggaatttaggaggtttgtttca

SEQ ID NO: 460354 - DNA, 122 bp, Homo sapiens
ccgggggctcccgcagtgacctggacaacctccctccagagcctgcggggaaggaggcgccgagctgcagcagccggctgaagctctcccacagcgacaccttcatccccctcctgaccgag

SEQ ID NO: 460355 - DNA, 122 bp, Homo sapiens
tctctaatacctgctacagcacctcacccacaatagggcctcaactaacattcacagacccgaagccctgtcctggggtgaccagctcagcctggtttgcccaggactccctcacttttagc

SEQ ID NO: 460356 - DNA, 122 bp, Homo sapiens
actagccgcgtggacagcagccgtagccctcacaaggcgtgtgcggtgacgggtctcgggcgcccagccagcgaggggccggctccaggtggtgggagcccacgcccccggccagcactctg

SEQ ID NO: 460357 - DNA, 122 bp, Homo sapiens
gcatgagggagccagcagggtcttgtcctcaggggctcctgaggttatgggagtggacaccgtaccaaagtgtatgtcaagttcactgtgtggggcccaggggagggtaaaattgtggccaa

SEQ ID NO: 460358 - DNA, 122 bp, Homo sapiens
tggagaacaaatcacggggctgcacgtgggcacctcgggggtggtgtgctgtgcagcctgcgaggctgcctaggaaacctcttcagcccaattctacaaaacacttggggtggcctcagatt

SEQ ID NO: 460359 - DNA, 122 bp, Homo sapiens
tgcccgaccgctcgaggctggggaagcctttcctgaacatcagccgggtggtgctcacctcgccctgggagggtgacgagcgtggcttcctgggcattgccttccaccccagcttccagcac

SEQ ID NO: 460360 - DNA, 122 bp, Homo sapiens
ctgcgggtgccggcgccgtgcggctccggcgggggtgccgtggagttttctcttggctcgcggcatcatccacatttggaaaactgcagagccagcagccggcagggcctggagggcgcgtc

SEQ ID NO: 460361 - DNA, 122 bp, Homo sapiens
agaaagttgccatccaccccttccttgagcagcaaggtctcacagtcttgcttggtcagacgtccatggtagtaaggcagatccatggagaacgctcttgtatcccaggaagccctgttggc

SEQ ID NO: 460362 - DNA, 122 bp, Homo sapiens
acgggagggtgtgcgtctgtgttcccgggttgttaccttgcacacacccacttatgcccgcgtgaaaaacctttactccccgccgccggccaccgctgccagggtcacacaccttaaactca

SEQ ID NO: 460363 - DNA, 122 bp, Homo sapiens
cccagcccgggcgcccaggggattctgggacttgtagtccctccccgcagcctcaggcgccgccacgacccgctacttggactacattgcccagggagcttcccggcctatataagccaccc

SEQ ID NO: 460364 - DNA, 122 bp, Homo sapiens
accctcgctctgaccattcccatcgactcacctccagatgccgctgaggcctaggtgtggcgcgaggggggcatccaggcagagcctcaccagcactcccgggcttagctggcccttcgcac

SEQ ID NO: 460365 - DNA, 122 bp, Homo sapiens
gagggtccaccgcctggcgcctggacaccccaaggacaggcacggttccagggaggccagcgcaggtgggcggggagctctgtgcctggtgctgacaagggacatgggcacagcccagcccg

SEQ ID NO: 460366 - DNA, 122 bp, Homo sapiens
aatggaactatttctttttccagggccatataaacacctgaagagaggacgatgtcaggtcgacagattgtggaatttagattcagcacctaagctatttgaggttgacactcactgaaatc

SEQ ID NO: 460367 - DNA, 122 bp, Homo sapiens
gaaaagagacactggccaccatgcaccaggcaacggaggcgggtgtcgctggcttcaggacgctccctgagatgctctttggcagccggtgcaagcgcctaacagtatatgccccaggctat

SEQ ID NO: 460368 - DNA, 122 bp, Homo sapiens
gggtggagctctctctgctgctgccgctggatcccgcctggatgcacgtcccgccaccgccgccgacccatcagcggcagaagggcagcaatggccacacaccgaagcaccttggcgggcta

SEQ ID NO: 460369 - DNA, 122 bp, Homo sapiens
aagagcagtttctgatgggcagcaaaatagggcttgaaacctgaagactggctgcagccacgaagtctccacagagaatatgtgtcggttagattttaaatcccagatcccatatcaagcat

SEQ ID NO: 460370 - DNA, 122 bp, Homo sapiens
ttttgacaaatactgagcaggttaaatgaagttgatgtggtggtcagggttgcccctggtcgctagtcgacagttctaagatactagcccatccctctgagtgtgagaaagtgggctaaacg

SEQ ID NO: 460371 - DNA, 122 bp, Homo sapiens
cttttactgtgcctaatggacaattgagacattcagcttatgtctgaaaggaaagtgggccgggatggtctagcagacctcccagatgaaggcttgtaggaggagcaaatagagacaaggat

SEQ ID NO: 460372 - DNA, 122 bp, Homo sapiens
ctttctgaatctccacaaaaccattacatcttgagaagtatgctcagcaaatccatgagacgctttgaaaactacaacgcctgcagccggcattggtcaacaggaagggcccaattcttctc

SEQ ID NO: 460373 - DNA, 122 bp, Homo sapiens
aggcaagtcctgattctccttcttttactggaagtgactctggcaggctgggaaccccgtcgctattctgtgatggaggaaacagagagaggttcttttgtagccaacctggccaatgacct

SEQ ID NO: 460374 - DNA, 122 bp, Homo sapiens
tggccccccagggcttgcacacagagcccgggatagcagttccatcttccgcacactgcacgtttggaggggcaggaactgctttgtgtctgagggcagcactggtcaaagccatgccggga

SEQ ID NO: 460375 - DNA, 122 bp, Homo sapiens
gctacatcctcaaatgtcactgactcctgaaataatatgctcctgctatcctggagaaaacgccatagtttcctcaggaaacagaggcagaagaaaggaatttgcaaggaggaggtttatag

SEQ ID NO: 460376 - DNA, 122 bp, Homo sapiens
cgcccccaaccccgctctcccaaccggttccccactcctggggcccgcggcggccgcccgcggctaagggtgtgggaaccgtgcactctgcccccgctcttccggcgtctccccgcatggca

SEQ ID NO: 460377 - DNA, 122 bp, Homo sapiens
gggagccgcagacgccgggcgtgtaggggcgcagttcaacggttggggtgttgcaaaggccgtgggtgtggggctgcgggctgcgcacctcggcggcggccggcagggttggggtccagccg

SEQ ID NO: 460378 - DNA, 122 bp, Homo sapiens
tgtgatcgccgggacagctatgaagtgacagcatacgagccatctacagtgtgggtgggccgggcaaagggatgatttatgtcccggtggcacagggtgggaaaaagatatttgctgattga

SEQ ID NO: 460379 - DNA, 122 bp, Homo sapiens
gaggaaacgccagggaggcttcctgccccgcccagcggtggcccagggcacagggaaccacggctgcttctctccgaggtttgtggcctgagaaactctccgctgcgaatctgggctggcct

SEQ ID NO: 460380 - DNA, 122 bp, Homo sapiens
ctgttgcctcccagggaggcagggactggggggcggcgtccaggcactcaggccaggctccgcaggtgccccccgccttttggaacaatgccttcacgctgctgtctgccgtgagcctgccc

SEQ ID NO: 460381 - DNA, 122 bp, Homo sapiens
ctggaatttctgggctcaagtgatcctgtttgagcccaggattacagctgagattacaggcggtcaccaccacagttggcctcattccagttttaaagatgaggaaactaattcagagaggt

SEQ ID NO: 460382 - DNA, 122 bp, Homo sapiens
tgctcttttttattaattttttggtattgtgactcctccccaaaaccgcatccggtaaatcgcttctgtattttgttgacagcggacatcatttccaccgttgagtttaattactctggaga

SEQ ID NO: 460383 - DNA, 122 bp, Homo sapiens
cggacccgcgggcagggcaggcgcgggccgggggctccgcagcaagcgggctcccctccgcgctctgccgagaaaggagcagtgctccgggtccccagcgcaatctctgctaccagggaccc

SEQ ID NO: 460384 - DNA, 122 bp, Homo sapiens
ccctggtggagtacgtcggtgggttgggatggggagcggctggacagaccggtctcactccgtttggtgccactccacccgcccgggtttccgcgccctgccgcgctgctccgacgccgctt

SEQ ID NO: 460385 - DNA, 122 bp, Homo sapiens
gcccgcagcctcctccgcgggagctggagcactctgctgggtcctggggacgcggcgcagcgtggttccaagcgctccgcagtcgccgggcaaccacaatggggctgccttgccgtgagacc

SEQ ID NO: 460386 - DNA, 122 bp, Homo sapiens
acaggaggagagcgagtgccggggccggggccggagccgatgggagggagtcggggcaagcgcagagagacaaaaataatccagaatggaaaactcagtggccgcaggactgggtagatctg

SEQ ID NO: 460387 - DNA, 122 bp, Homo sapiens
atgtatataaaatgatgccacttgaactttgttggtagaagattgcacaagttcatcatccgagccaattaagacataaaaatataaaagaggtaacatcagtctgaggtaaacaccaaaag

SEQ ID NO: 460388 - DNA, 122 bp, Homo sapiens
aacattttagtggttccaagaatcaagcccccttgtgtattcttggctttcaatgaactgcgtcttcagagcagcgcaggttaaaccactttctcgcctcattgtagtcaattggcttagtt

SEQ ID NO: 460389 - DNA, 122 bp, Homo sapiens
tgggtcaggctgtaaataagagcgaccctcgattcactctttaccctgggccaggcagtccgatgcatcctgcatcccatcattcctaataccaactctgaggatgctgacaagcagcagcc

SEQ ID NO: 460390 - DNA, 122 bp, Homo sapiens
ccaatcaaaagcctcttccctgactgactcgattccaagaacttggcagtccagggctgtcgctgggccagtctctgcatgagcattccaagcgttgcctaaagacttgctaagcagcagaa

SEQ ID NO: 460391 - DNA, 122 bp, Homo sapiens
ctgggtgcgggtgcgggtgcggggttgggcctgcgcatcgggtgagacgctggctgcttgcggctagtggatggtaattgcctgcctcgcgctagcaggaaggtagtgtggtgtgactaacg

SEQ ID NO: 460392 - DNA, 122 bp, Homo sapiens
cagctgaggcccggcgagaatttgagcacggtgcgggtaggctggcagtgctggggcacccggcgccccctccacagctgctggcctgggtgctaagcccctcactgcctggggccagcaat

SEQ ID NO: 460393 - DNA, 122 bp, Homo sapiens
gcgattcgagggcccaccctaagcgacgcctccgacgcggaggaaaaacgcgattcggcccgccctcattccgagaagcagcacccagaccacgccctcaggggcagcgacaaataggcgag

SEQ ID NO: 460394 - DNA, 122 bp, Homo sapiens
ccggggcggaacgggggaccctctctgaagcggctctccgtggagttggatgttgcccttcgcgggagggagtggcggtcaagacccctttatcctcggccccagaggggcaggtggcctcg

SEQ ID NO: 460395 - DNA, 122 bp, Homo sapiens
cttttttcactcggtgtaatatcgtgagcatcttccctgtccctaagcagcccaggagctcgtgagcagtcatgctgagttttcagcagctgcacagtatctgtcccatggctgttctgtca

SEQ ID NO: 460396 - DNA, 122 bp, Homo sapiens
aaatccaaatggagctgggtattctgtgtttttatttgctaaatctggcagccgtacccgcggccccgggcagggagggagcagctgggctcggccagaccctgccggcgtctggggggcct

SEQ ID NO: 460397 - DNA, 122 bp, Homo sapiens
tcacctgcagctggcaaggcgaccggaaactattttgatagctgatttctgcaacacacccgtcagctgttcatatcggcaactcactgggtcatcactttcccctctggaagcatcaccat

SEQ ID NO: 460398 - DNA, 122 bp, Homo sapiens
tgggttatcactacaacagaaacagaaacacacgcacgtgcggcagctgaaacgaggactcgttactcacaatcacccctcagatttctgggctgctccactgcactggaaacaggcacacc

SEQ ID NO: 460399 - DNA, 122 bp, Homo sapiens
ttgttacgggcgcggtggtgcaggggcaaatcgggactgggatttggtccttacccttaacgtggctctaagaccagaagggaacacctgacttgtgttgacctcttcagttagctgcaggt

SEQ ID NO: 460400 - DNA, 122 bp, Homo sapiens
ggggttgcagggggcgccggggaatgtgggatctttaaatatgggcggggcttgcggggtcgtcgaaggcggtgccaacccgggctcggccaatcggcggcggctcccgcgtcgcaccgccc

SEQ ID NO: 460401 - DNA, 122 bp, Homo sapiens
ctgggactacaggcacccaccaccacgcaaggctaattttttttgtacttttagtagagacggtttcaccatgttagccaggatggtctcgatctcctgacctcgtgatctgcccacctcgg

SEQ ID NO: 460402 - DNA, 122 bp, Homo sapiens
agcacggccatgaggaccagtgccaggtgtgtgacagaggtgcaggggcctgtggaagcccgacgggccttggtggacgggcttcccgagattcgagggcagccacaggcatcgccctggcg

SEQ ID NO: 460403 - DNA, 122 bp, Homo sapiens
tggcctggtgcagcgtctttgttggtgcactccacccggccgctgttccttctcacgttgcgctccatcctgtctggcaggtggatttatgagaaagtaatgttcactgttgccattctgtg

SEQ ID NO: 460404 - DNA, 122 bp, Homo sapiens
agagagagagagagagagagagagagagagagagggaggagagggcgcgttagtgagcagcgactgtggcattgatgtttgagcatacttctgaactggcttttgttgagactatcagtata

SEQ ID NO: 460405 - DNA, 122 bp, Homo sapiens
tccgagggatgcggggcactgaccggccacgcatggcctgcagctgagggtgaatcaggacgagcccgcggatgacgacgcccctctggccgggaacagcggagcggaggacggcggggcgg

SEQ ID NO: 460406 - DNA, 122 bp, Homo sapiens
ggaggctgggtgtgcaggagagagctccgcccgggaccctgcacacaccatctccatctccggcaagacggtacttggccctgctctaaggagctgatcactgctgccttcgtgaccctgag

SEQ ID NO: 460407 - DNA, 122 bp, Homo sapiens
gaatctgctaccaccctaaggctggagcaaaagaaaggaagaaattgctgttaccagtcccgtcaggcattcatctctattactgctgaggcttgctattgctgccagaaccactgacacat

SEQ ID NO: 460408 - DNA, 122 bp, Homo sapiens
ctggcttctgagaatggtggtagccccttgaggaattgcctaagttgcagagagctgtctcgcccaaggtcagcctttcctggggtgtccaatatccatcgactcatccatgtggggttgta

SEQ ID NO: 460409 - DNA, 122 bp, Homo sapiens
acccctggccaagtgctcctgttaccaccgcggtctctacctggaggcgggggatgtggtcgtcaggcaggaagaacgatggtgggtacctgctcgggggtcaggtgtggcgtgggggcggg

SEQ ID NO: 460410 - DNA, 122 bp, Homo sapiens
attgaaataattcgccccccatcccccccggctcccatcctctgggaaggctgcacagcgcgccaaggaaatctgtcctcccagccagaccccagcggcctttctgctgcgctccacagcta

SEQ ID NO: 460411 - DNA, 122 bp, Homo sapiens
gcagcccggagggcggggctggccaaggattgacgggctctgggcctgcgcatcggagcccggggaggtcggctcctgtttcctctgggtccgccgcaggctcccttccctgcagttgggag

SEQ ID NO: 460412 - DNA, 122 bp, Homo sapiens
agaaggcacttgcacatcgttgctgttctgcctctttgcttcagcatgattacccagaggcgcacccgtgccgtggcctgcccgtcgtctatgcacccgtgctgtggcgtgcccgtcgtctg

SEQ ID NO: 460413 - DNA, 122 bp, Homo sapiens
cttttgtctgcctggccggatctactttcctaggggggcggagcgcggtgtgtgcgagagcgccgggggtgtccgcgcagggatagctggtgtgcgtgcagcggaaggcgctaactgccctg

SEQ ID NO: 460414 - DNA, 122 bp, Homo sapiens
ggggttcttgggtagcctttggggtgaggggacttgggcggccttggtctgtaagctctgcgttcccgggcgtggaagagactggccgcgcacatgcgtttctgtggttttcctggtttggg

SEQ ID NO: 460415 - DNA, 122 bp, Homo sapiens
gcctcacgtgtcctgcgctgtgcacctgacgtcccgcctgcgagggtctgcctccacgtgcgtcctgcgatctgttcaactttgcacgtttggcagccagtgttgggaggcacattgtaggt

SEQ ID NO: 460416 - DNA, 122 bp, Homo sapiens
tctagactaggagggcgctgccaaggcaaggcccccgcgggagtgtcggggtggggacagcgggagagctgtgctgtgcagttgaggaagctgaggctgagaagtaggatgcaccacgtcca

SEQ ID NO: 460417 - DNA, 122 bp, Homo sapiens
cttatcatgctagctcaggtttttaaaatgtgatctgaataagaccaaagtttcttcttgcgttcttttcatgctggttctaagcagggagaaaaacaagtctgtatggacagagcaaacct

SEQ ID NO: 460418 - DNA, 122 bp, Homo sapiens
cttcaagccaactataacgcctcaaattcttctcaaacgttggatctctctgacttcttccgccatagctgttgtgcatctttgcctttaagggccagctaggatagtttccctatttaaaa

SEQ ID NO: 460419 - DNA, 122 bp, Homo sapiens
agacattggttataatcagcaggccggaaccagaagtttcgagtactgcatgagcttgggcgtccctggcaaaaccggctggatttatctagcaaagttccctgaggaaaagtaatatttgg

SEQ ID NO: 460420 - DNA, 122 bp, Homo sapiens
cagagcgcctgtcaccgaggaccttcattccacagagtgtctgcctggatctcggatggtcgtaagccacagagcacctgtcactgaggaccttcattccacagcatgtctgcctggatgtc

SEQ ID NO: 460421 - DNA, 122 bp, Homo sapiens
attttctaaaaataaaaaatttaacctaaaaaaagtcttaaggccgggtgcagtggctcccgcttgtaatcccaacactttgggaggccaaggcaggagagttgcttgagcccaagagtttg

SEQ ID NO: 460422 - DNA, 122 bp, Homo sapiens
gcatgtgctgcctaccagaccaggttttggaaaatgacgatggtgaggtctgttcatggtcgggggtcgttttggaccttgttttgccattttaaaacacgattggagtacagttgcaaata

SEQ ID NO: 460423 - DNA, 122 bp, Homo sapiens
attacttccttgtttacctgccatgtccctggaagttcccatttatccagtaacaacctacgctaactggaagtgagttctgtgtctcatgtctgaagagaccctgtgaaggttcaggagag

SEQ ID NO: 460424 - DNA, 122 bp, Homo sapiens
gctttcactcagccaggaggacgcattgttacaggtgtggaacttgttgctccgagccctcgcctggcagctcactctggatctgcgggttctgaggagcctcgggacccacctgggtgcag

SEQ ID NO: 460425 - DNA, 122 bp, Homo sapiens
ttccgggcggaagtgaggcgcccagcggaacggcctctggtgacattttcttgggggcggcgcggacgactgaagggacttggtggtagaggctgcggaggcggcgaggttcactttggtcc

SEQ ID NO: 460426 - DNA, 122 bp, Homo sapiens
gctagtggctgccatgttgggtaggacagacacagcactgttccatcactacaggaatttcgattggacagctctgtgcggcagatcatttataagagattcagagatagaaatatcagtga

SEQ ID NO: 460427 - DNA, 122 bp, Homo sapiens
ttaaatcttgcaactgcactctcttctggtccgtgtttgctatcgctcaagctgagctttcgctcgccatccaccactactgttagctgccgtcgcagacccgctgctgactcccatccctc

SEQ ID NO: 460428 - DNA, 122 bp, Homo sapiens
taggacgcgagaagggggtgcagcggccggggaccagggcggcggtccccgcggtgggatcgcgccagcgccgggaggccggggagagggtgttctctgccgggagccgaggcgaggctgct

SEQ ID NO: 460429 - DNA, 122 bp, Homo sapiens
ccgtccggtcctaagtagccaaaccggaggctcgatcttttgcttcggtccagctacctccgacaggcggggagccaatctccacttttcccaccccggtcctcggtacagggccgagaaac

SEQ ID NO: 460430 - DNA, 122 bp, Homo sapiens
cagaacatatacgatctgtggactatattaaagatttcggatcttatctcatagcaaaggcggggtgggctggaatggggagataaactgaagtgtttaagcagaagagtgacatgatctga

SEQ ID NO: 460431 - DNA, 122 bp, Homo sapiens
ggacccgcacagctcaaacctgtgttgttcaagtgtcaacctacttaagacctcaaacaccgaagcccctcagtcgccctggaaggcagcagacgcagcttcctagcgctcccagctgtctg

SEQ ID NO: 460432 - DNA, 122 bp, Homo sapiens
ccctgcaactgagagagcccccctgggctggggaaatgtgctggctcctggccccgggcgcgcctccatgcactgggcagggttctcagatgatgcctggcttgacagttgctcattcattt

SEQ ID NO: 460433 - DNA, 122 bp, Homo sapiens
gaaacggcttggagaagctcccgcctgggacactgaagaagtgagcgaggaggaatgatgcgtcagttcagttcaccaggagaaacgtggaaaggccagtgtagcgaggagagcgtcacaca

SEQ ID NO: 460434 - DNA, 122 bp, Homo sapiens
ttggtctagagggaggaagccccaggatccgcccctagggctgagcccggggcttccccgcggccttaaccccttcagtgccgaccccacccactgtgggcggggctccggggtcctcagag

SEQ ID NO: 460435 - DNA, 122 bp, Homo sapiens
tccggaagttttgacactgtgcgccccgagtaatgtgatggagagggtaatcatccggtccgttatctaaacccgtcactccaggaaacagcgacccgctgttttccggatccgcgctctcc

SEQ ID NO: 460436 - DNA, 122 bp, Homo sapiens
ctgccccgggctgggggagccgggctgcaagtgccagctctggccagcagagggcgacgtcgtccaccgaatccacagcgtggcgcctcgtcgtccacaagtcctgggtctgggctctagcc

SEQ ID NO: 460437 - DNA, 122 bp, Homo sapiens
cctcgctcgctctcggcgcctcctctgcctgggttctcactttggcggcacttgaggagccgttcagcccaccgctgcactgtggcagcccctttctgggctggccaaggccggagccggct

SEQ ID NO: 460438 - DNA, 122 bp, Homo sapiens
ggggggtagagagcaaagggagagattcgtggaagggaagggaggtaggggtggcgcaaacgcccagagtatcaaacttgggggtggcacagtaggtgacagcagcagctgcaggtggtggc

SEQ ID NO: 460439 - DNA, 122 bp, Homo sapiens
gcccagagctttacccctctattaccagctgcctaggggaaggagcattcaacgaagccccgtaactttaagtccctaagggctgtgggtatagacaaccccaggcttgaaaggggtaaagt

SEQ ID NO: 460440 - DNA, 122 bp, Homo sapiens
tgtcctcccggggtttaccttcatccagcaccttccccttagtgagcgtatccggggcaccgttggaccaaagagcaaggcagaatgtgaggtgagtggggccagaatgtattggtggccac

SEQ ID NO: 460441 - DNA, 122 bp, Homo sapiens
ggcttggggactgggagaaggcagcaggcatttcttcccatggggactcaggctggacctcgcccaactggggactcagctagacagaggggaaggcatacaagcacaggggaagcactggg

SEQ ID NO: 460442 - DNA, 122 bp, Homo sapiens
gggggtgagaggggggtcggggtgagcccttgcacggggatgcggcacctggctcaccgacgctatcagcttctgggttctgtcccacctcccccgccccacctccattcctccttccccat

SEQ ID NO: 460443 - DNA, 122 bp, Homo sapiens
cgctctagtatgccacttgtcatgtacactttttctgctgacacagagcagtgtgcaatgcgtccgggaggctgggcagcccagggctggcccaagctctgtttgcctgagttggcagtggc

SEQ ID NO: 460444 - DNA, 122 bp, Homo sapiens
ttttttttttaagactgagtcttgctctgtcgcccagagtggagtacactggtgctatctcggctcactgcaacctccgtctcccaggttcaagtgattctcctacctcagcctcctgagta

SEQ ID NO: 460445 - DNA, 122 bp, Homo sapiens
gtgctacacaggtgtggtataatgaagagaagatcagaggggatccagagtctgatgaagcgtatttgagggttaatagggagaaaatctcctaatcaatgatgttaactcttaacaaaaga

SEQ ID NO: 460446 - DNA, 122 bp, Homo sapiens
gcaggaatgcaaagagttggctctggcctcagacacctgatcctggcctgtccggagggccgtcctgttggcagccagccccagtgctccccagagccagctgcgtggcagcatcgagggca

SEQ ID NO: 460447 - DNA, 122 bp, Homo sapiens
tgcgagcagaagcgctgcagcagcccggccacgcccttcccgcgctcccagggcgccacgcgcagcccctccaccagcaccgtctccccggcgtcgatcacgttcaccgactccagcgcgat

SEQ ID NO: 460448 - DNA, 122 bp, Homo sapiens
agcctgtcactcttgccacatcagtggagtgtatggttgcaaattctgttactcaaggcccgagggcggggattggagtaatatccaatcagagtgtcggaatgagaactgcccaatcaggc

SEQ ID NO: 460449 - DNA, 122 bp, Homo sapiens
agacaaattaaatttaacagagtttaagtgagcaaaaaagattcatgagccaagaatcaccgaggacaaaaacaggcgcacggtgggcagggaatatttatagcagaaagcagaagtgactg

SEQ ID NO: 460450 - DNA, 122 bp, Homo sapiens
ctctgagccgccactcagctgggctcacttccccaaatctcgcagccagccaattactggcgattaattacccatctccggaggtaggcgaggactccgcgtagccaaggtcagccagttca

SEQ ID NO: 460451 - DNA, 122 bp, Homo sapiens
tgtttcaggatttagggtttctgcctcctcgctgtcattatggaactggacggaggatggcggtgggtgggtaggaagaagcctcaaggcccattcagatgagcctaggggtacaccgggcc

SEQ ID NO: 460452 - DNA, 122 bp, Homo sapiens
ctttcctctgtccagctcttcccgtgccccggggctggggaaagcgtccggcagccccgccgctccctggccccgtcccaggagccaccccaccgtagggctccagccagggtccaggcgtg

SEQ ID NO: 460453 - DNA, 122 bp, Homo sapiens
ggagcgggccgagctgtccggcgctctgcccttctcttcctacagcctggtctcctttggcgtttgcgcccctgcatctgagcacgtcccagagggcgccggaatgtcaggccctagacata

SEQ ID NO: 460454 - DNA, 122 bp, Homo sapiens
gttcccacacgctggattctcgttacctgctcttgagcccaggaaaagggcgggaacctacgaaagggaagcccagtgaagtgctcagcgcacctgttgctccagacctttccctggggctg

SEQ ID NO: 460455 - DNA, 122 bp, Homo sapiens
tggaacatgctttcacaccgggtgcagctaaccaccacatcatacaaaactcgtcgctgacgttttagatgtataatctgattggcatggactcacagaggagggagtaagggaagagtaag

SEQ ID NO: 460456 - DNA, 122 bp, Homo sapiens
caacctcccactggagggcgccttccggagcgcgcgtgtttacacttttgctacaccaggcggaggaaacaagcgctcgctgaccccgggggattccaaaccgttactccgcccgccggggt

SEQ ID NO: 460457 - DNA, 122 bp, Homo sapiens
gcccccggccccgcacctgtggccagccccacctttcctcccgcggccctcgcgagccagcgcccggcagccgtccccgcgccccagtgcctgggaacttggctcgacccccagcgcaggag

SEQ ID NO: 460458 - DNA, 122 bp, Homo sapiens
tggggctttcttgcctagaactcccagaagcccatgcgacacttccgctggatgcgcctacggctccggggtcccgcttggcctacaactcccagaaacacttgcattgctctttctgccgc

SEQ ID NO: 460459 - DNA, 122 bp, Homo sapiens
tagcatgtacacagggctcacagagactgagcttaggagagatgtgtgggatgctctttgcggggcagatggattaaatgccaccttatgattagattctccaaggggctacgtgggggaaa

SEQ ID NO: 460460 - DNA, 122 bp, Homo sapiens
aagctggatggaatcttcccacatgtagagttctcaggtccaggtattattttatgaagtcggatggaatcttcccgcacatggagttctgaggtttctcaggttgctctctggctcagtga

SEQ ID NO: 460461 - DNA, 122 bp, Homo sapiens
ctctgagctccgtggggaacagtgctggccccgagtgcgcacctggagcgctgtgctctgcggtaggcagcctgtggtccagggcccgctgaagccatgccttcgaagcgctgtgggcatcg

SEQ ID NO: 460462 - DNA, 122 bp, Homo sapiens
tgtcaaggtagaaaggtacggagaacgggaacccaccgacagccaacttcccttgggacccgccttttgctttaaaaacaacaacgacaagtctgtgcttcaccccacacatgcctttcgtt

SEQ ID NO: 460463 - DNA, 122 bp, Homo sapiens
aaatacactttcagcttcttacatgacatactgtattctgagcgcttttcacataactcacgccgccccaacctcttcccggctgcaggccttggcctgagtcaggaacagggcaaggcagt

SEQ ID NO: 460464 - DNA, 122 bp, Homo sapiens
gtgatttcggggagcgactctccaccgaatgagagggaagtatttgagtgctttgaccaccgacacatctcctccatgaatacagcctgagcaagtgcctcgcgtgagtggagcttggaact

SEQ ID NO: 460465 - DNA, 122 bp, Homo sapiens
gggggcccatcccggagctgtcgtccggactggaaggcgcggcctccgagacgagagaggcgcttccggtcggagcaggagggtctccgttcacaacattgaggctagaagaagccaagaaa

SEQ ID NO: 460466 - DNA, 122 bp, Homo sapiens
atgcaaaaaggctacatgtgatgaaggcagttattagccactctcctatctcctagacaacggttgaatcttacctaataatttaggaatatttaaaaaatataatctaccatttaaaacat

SEQ ID NO: 460467 - DNA, 122 bp, Homo sapiens
aggagtgcctgcagccctgtcagtttccaagagtgtctccttcaagcagcctcgtcaggtcgagccacccccagtgccctctctcctctggcagccgcgctccctgcccttcctccccacct

SEQ ID NO: 460468 - DNA, 122 bp, Homo sapiens
ttggcctgagggttcggggtcccacgtgtctgggaatggaacgtgcggaggtggagctcacgtttgctgggctgtcccgggcgtttaattacgtttgtgcttcattatgaggaggcctccct

SEQ ID NO: 460469 - DNA, 122 bp, Homo sapiens
ggttccccacccgatgtcctctagctcatttgagccttgtcgccctttatgctattcttccgatatgggtcgtaattccgtctatctagggttcttcctgcgcgtgccttagaggccagaag

SEQ ID NO: 460470 - DNA, 122 bp, Homo sapiens
tgatttcctgccacagtgccggagcgggactggcgctgcctcccgggtccaggttccagccgctcccagctgttggcggcgctgctgagatgatggcctggatcccccaggttccgggactc

SEQ ID NO: 460471 - DNA, 122 bp, Homo sapiens
ataatcccacaattaaaacctccggagaaagattgcatttcccttccccaaatgtcatcccgggagtataaacaaagcatgaaaaatagtctcttcagccttcccagccggcaatcatggtt

SEQ ID NO: 460472 - DNA, 122 bp, Homo sapiens
tgccttcctcaagccaaagtcgactcctgggacctggaatcagcagctgagaacagacagcgggaagaccaccaaagatcaggctgacagtgcccatcaagcatctaggccaccgcctcggg

SEQ ID NO: 460473 - DNA, 122 bp, Homo sapiens
gcagtcgccgcctcggtgggaccaagcccggaatcccgaccgagaccagcacttctgccccggctttcagccgccgggggctgccggaagctcctccatattacccttacccacttcctgta

SEQ ID NO: 460474 - DNA, 122 bp, Homo sapiens
tccgcgtggtcccgctggcaaagcgctggcacccgcagctcctcggtcccgcggcgctggcggccgccctggcctccccctggctgccataaggcactactgccttatgcgcaacacaaaca

SEQ ID NO: 460475 - DNA, 122 bp, Homo sapiens
gctgcagacggtggccgtgctgcagtgggtcctgaaatacctgctgctcggtaaggaccccgccccccgggccgcggggcttgggctccatatcctccctcgggacggtccggattccagga

SEQ ID NO: 460476 - DNA, 122 bp, Homo sapiens
ggtgtttgcaaaccaatcgcctgaacgtccccgatcttacctaagagagaacccctcctacgtctgcgaagtgctccgaactgatatatgacaatatctactttggatcacgtgctcagaga

SEQ ID NO: 460477 - DNA, 122 bp, Homo sapiens
agccagtctacaagaggcgctagttgcaaagcttccggttctgggggaaggcgtggcttccgcgctctttgaaatgtccggcgccggaatgtctgggtgctttggttggagagggtcccatt

SEQ ID NO: 460478 - DNA, 122 bp, Homo sapiens
gagggtgcctgtgagggacagagataacccctgctctgggcccacggctctgggctgtctcgtcctaacccctgcgctgggcccacgacactgggctgtcttgtctgggttcaccggagccc

SEQ ID NO: 460479 - DNA, 122 bp, Homo sapiens
acaatttttctctctgcctgtgatgtgactcattaggcagccaaatgaaagccatgatgacggccatgatgacagcggccatcaagcgctgcttgtttatcttcctcccctcggcctgtctc

SEQ ID NO: 460480 - DNA, 122 bp, Homo sapiens
agaaagtaaaaccttacagtataaagacccatagatgctcttttgtttttgatgtgtgtacgggggttagatatttattgagcacctactgcatgacagagtgttcagcaatgacaatgcag

SEQ ID NO: 460481 - DNA, 122 bp, Homo sapiens
gtaaactatatatacagaaatatatatccataaatccacactctaccccattcctcctgtcgccatcccccatcaccaaatactcaaggactacaatatgccagtaattgaagtctcaagat

SEQ ID NO: 460482 - DNA, 122 bp, Homo sapiens
gcaggggtgggaggaaagggtgggggggagcaagacgtgcgccctgctcccccccacacacgcggactctaaaatgaaagattattcaaaaaagaaaaaaatagagcgagagtgcaccggga

SEQ ID NO: 460483 - DNA, 122 bp, Homo sapiens
cccgggactgaccattttaattgaaacaatgcaagtgtaccgagcaaaactatcagctcacgattttagagcaaagaaataaacttttcggtgtttctggggcatatcattacagtacttat

SEQ ID NO: 460484 - DNA, 122 bp, Homo sapiens
ctcctggtgactccgagaggccttcacggggttcagcagcttcttgggcttgatgagctccggattccactctctgtattctggccgggccatcaggcccccaatgtctgcccgctccctct

SEQ ID NO: 460485 - DNA, 122 bp, Homo sapiens
cgggctcgccagccgtgccacccagccctgccccaggactagccgacccctcgcgcagtccggggagccactccccccaactcacgccccgctactccagccgcagctcggctcctcgccgc

SEQ ID NO: 460486 - DNA, 122 bp, Homo sapiens
ggcggtcacgcccacgcccgcccctgctccggccccttcaaagaccgcgcgcccagaggccgggtgccaagacccccgaaaggtcgccctcttcggtggacacgccccttccgtctggcccc

SEQ ID NO: 460487 - DNA, 122 bp, Homo sapiens
gaagacgtcaaacgtaaacagctcggtgggttgatcactaaaggagcacgcactggaacccggggccttcagacctcacgatacctgatcttactggttgctggcaaattaaaagcttatgg

SEQ ID NO: 460488 - DNA, 122 bp, Homo sapiens
cgcctgctgcaccaggacgtatgtgattgctgcatccaccatgtctgtctgctccagtgacgtgggccatgtcagccgagtctcctcccccagcacctgcactggctcctcctggcaggtgg

SEQ ID NO: 460489 - DNA, 122 bp, Homo sapiens
aggaaaatcgttattgaatgaagggaaaaaaacacaacctcttttgagtatgagtacaaacgaataaagggagatgagcagcagcagggcattgtaattaggtaaggcttagttggtttaat

SEQ ID NO: 460490 - DNA, 122 bp, Homo sapiens
aatatataatttcctgtcctttgcctgagccagtatgacattggtacatgtgcagtcttgcgtgtttcggctgtaaagtgcgatctgttgtctcagcaagtgtgtaggtaagctaaatattc

SEQ ID NO: 460491 - DNA, 122 bp, Homo sapiens
ggacaggaagaactagcctttgccctcttcttcatggtaattccttatttttacttaaagcgttatttatgttagtgtttataaagaccatacccatttgtttctcagcataatcctgtatg

SEQ ID NO: 460492 - DNA, 122 bp, Homo sapiens
aagctgacatctcattgtaatactttaaatcagacttcagaatatggcattggtgagcagcgtgggaagacttcatgctagtgaaaaaaacacccaaggaacgtgcctttttgttagtgaaa

SEQ ID NO: 460493 - DNA, 122 bp, Homo sapiens
tgcagtcctggtcccggcgaggacagcggccggctcttcccgtggcccggagggccctgtcggaaacagcttgaggacccggagttcccaggagtctcctgccagccttcgtctctgcctgc

SEQ ID NO: 460494 - DNA, 122 bp, Homo sapiens
tcttttttttttttttgagacaagatctctctctgtcacctcttctggaatgtagtggcacgatcacagttccctgtagccttgaacttctgggctccagagatcctcctgcctcagcctcc

SEQ ID NO: 460495 - DNA, 122 bp, Homo sapiens
taacttggaagccaatttcagcccacagtcaacagggagcacacacatatttagagacatcgtgcagtttccgtaatcggcgctcacgggcagagaatataaccgcgcccttatggtgttta

SEQ ID NO: 460496 - DNA, 122 bp, Homo sapiens
tgagcagggtgttcactgcgcgctctgagcgcacaagtttgttctcctctccttggagaacgccggcccgctctgtgccaccctctccccaagcccccggtacgtccgtctgtccgggtgga

SEQ ID NO: 460497 - DNA, 122 bp, Homo sapiens
ggacccagtgaggactggcccaggtacttctacctgctggtgaatttggatgggcccaggcggaggttcagggacccaagagtgacccaaagatatgaggtagggattccttcccatggact

SEQ ID NO: 460498 - DNA, 122 bp, Homo sapiens
cgagctgcgcctcggaatggcccggagcccgccctgcgcccccggctcctccagcgtcagcggctcctgcgcgcgggatgcattgggcaatttttgaaatcctgaagtaggaagagaccccg

SEQ ID NO: 460499 - DNA, 122 bp, Homo sapiens
tggccaagcctctgctgtcatttctcctccctcctctcagtctgcagctgcgggacgggccgggctcctcagtttctgctgtgttgtgaccccacgaggcgctcagcacccagggaaggcgc

SEQ ID NO: 460500 - DNA, 122 bp, Homo sapiens
tgccacatggttctccagaaaaagtccattctctgaggtcctccggcaaaaggcttgctgcgagtcacagcagagagaaaggtcctatgtcccccagagccacagggaagtcagggaatggg

SEQ ID NO: 460501 - DNA, 122 bp, Homo sapiens
ctccgccctgcccctgcccacccccaaacctacacacgtgttagcccgacaccgccccaccgggtcccacgtgcacctggtctaacacactccccacgtgtgggcgccccacgggcttcctc

SEQ ID NO: 460502 - DNA, 122 bp, Homo sapiens
ggccaccctctggcttagtctgcaattcatcttcccgtctctcttcccatacctgagcctcgtgccgcccgggattgcggcgcccgcgccaccacgctggggtaatggtcccagcaccgctg

SEQ ID NO: 460503 - DNA, 122 bp, Homo sapiens
ccccgggtggactgccgaccccggcgcccgcagctggccccttcccctcccccgggctgacggcattgaaaattcacccgcatttttaaaacgtggctttggggttttctccctttctcctg

SEQ ID NO: 460504 - DNA, 122 bp, Homo sapiens
taccagggagtcaaggcttgagaggcacattcttatcctaaagtgactgctcaaacctgacgagaccaagtaaattactgaagatacaaagagacaaaatgcagattaccgtccttattcct

SEQ ID NO: 460505 - DNA, 122 bp, Homo sapiens
ctgcagaggtggcagcagccttcagtcctgtccaggtgggcatgccctgcgggtggggggcgcctggccactctcccgtgatgccagtccccgaggcacacaccccaagcctccagctgcgt

SEQ ID NO: 460506 - DNA, 122 bp, Homo sapiens
gagtgaagaggggggctggggatcagcctggcagacgttcttatcaagcattgaggtccccggagccccgtgcccacccttagccatggctctttgggcggtgtgagcccctccattccctc

SEQ ID NO: 460507 - DNA, 122 bp, Homo sapiens
gaaggaacaagaaaacaaaagcccaaacctttattgtaaatcatgacagggtgcccaaatcgaacacaaaatgtaattttacattttatgtaaaattggatgctatttttgaataccactgg

SEQ ID NO: 460508 - DNA, 122 bp, Homo sapiens
tctcatgtctccttaaaatgtataaaaccaagctgtgccttgaccagcttgggaacatatcgtcaggactccctgaggctgtgtcatgagcgcatccttaaacttggcaaaataaactttct

SEQ ID NO: 460509 - DNA, 122 bp, Homo sapiens
ttctgcctgcgaggagagcgctgggcgtgaggccgaacgcactgggccgagcgacggaggcgcgcgcagagggagggtcccgcgcactagcggaaggcccggcctggcccagcgcccgcagc

SEQ ID NO: 460510 - DNA, 122 bp, Homo sapiens
ggctcggtctgcaaacaagacgctgcaaggctgagtgagagagagagggtgtgcgagcagcgagcacatgttacatcagacacagtacctgatttttcactgcacagcttgtcagctagata

SEQ ID NO: 460511 - DNA, 122 bp, Homo sapiens
cagggatcaggtctctgactcgccacacggagggaggccccgcaggtcctggcttcctgccgccgggaggggccctgtgaagacccaaggcacctgctcccgctttggaaaagggcgcctgg

SEQ ID NO: 460512 - DNA, 122 bp, Homo sapiens
gtgcacctgccagaccctgtgcatctttctattgccacagttaacatactgaattagagccgggcacggtggctcacgcctgtaatcccagcactttgggaggccaagaggggcagatcacg

SEQ ID NO: 460513 - DNA, 122 bp, Homo sapiens
agcctcccaaagtgctgggattacaggcatgagccaccgtgcccagccaggaggatctctcgagcccggaagtgtgagactagctgtggtgatagtgagacctgtctaaaaaaaccaaaatt

SEQ ID NO: 460514 - DNA, 122 bp, Homo sapiens
ccacattcaccatggggggcgtatccgcacagcggccacattcaccatggggggcgtatccgcacagcacacacattcaccatggagggcgtatccgcacagcggccacattcaccatggag

SEQ ID NO: 460515 - DNA, 122 bp, Homo sapiens
ttctacattttgtccttggggagaaaggacacacagaggaggtcatggtgttccaacattcgcttgaattagagtgttagtgtcaaggtctattccactgtgtctctgtagcatctccaggg

SEQ ID NO: 460516 - DNA, 122 bp, Homo sapiens
attacgctgggcgggtctgttaaagcctaagggcgtttattacactgtggggggactgggcggagagacacttcttgggcagaagaggtgaaggatgaatggtttattggactggggcggca

SEQ ID NO: 460517 - DNA, 122 bp, Homo sapiens
agctagggattcgggtgcgggatgccctcggccgtccacacccaggcgcgcgctccagtccgcgcagcccaaactttgcccaccgccttctgtttggctcactccgtttcctctcctgctgc

SEQ ID NO: 460518 - DNA, 122 bp, Homo sapiens
tcttcccctcgggctggagtgtggccgccatggccaaccagtctggctggaggtgaggcccgggccccagcccggctgggggccccgcagcacccgcagccctgaccgccctcccctgcgtt

SEQ ID NO: 460519 - DNA, 122 bp, Homo sapiens
atgagtcccctataaaaacattccttggaaaagctgaacaaaatgagtgagaactcataacgtcattctcatcggaactgaggtccagcatgttgcttcctctggggcctgtaggagtgagg

SEQ ID NO: 460520 - DNA, 122 bp, Homo sapiens
attcttacaaagtcttcaacagccgtggggagcgctgggtgatgcgggcacggccacagccgtggggggcgctgggtgatgcgggcacagctcatgtaattgagcttcactttatggcactt

SEQ ID NO: 460521 - DNA, 122 bp, Homo sapiens
cagcacctacttcgtcaccacgctgatcttcacaccgaagacgccggtctgctttttggacggggtcctcttcaggctcatatctcggctggtgaatttcatggaaaattccactttgatct

SEQ ID NO: 460522 - DNA, 122 bp, Homo sapiens
ttttgaaagagtatggaaaaacttcctcactgcgtgggggaataattcggtaaaatattacgtttcatttcagcaatcatccttacactacataatgagcaccacagtaagttcagcataat

SEQ ID NO: 460523 - DNA, 122 bp, Homo sapiens
tagaaagacaggaagacagacatttccctgagtctgcgtccttcatatgagcagagtaaccgcgctcccctctgtgaccaggggaaggtttcgctgggcggctcttctgtctgtcctgcctc

SEQ ID NO: 460524 - DNA, 122 bp, Homo sapiens
atttgcaccaagtttgggtggtagacacagccccgggggattgtattggttaaccacacacgctgctatttcagtttaatcttgactgaacttcttggctactgcaggctttcttacaccac

SEQ ID NO: 460525 - DNA, 122 bp, Homo sapiens
ttttgtctgtttgttttgttttttgagatagggtctcactctgtcacccatactggaatgcggtggtgtgatcacagctcactgtggcttggtcctcccatgctcaagagactctctttgcc

SEQ ID NO: 460526 - DNA, 122 bp, Homo sapiens
cacaatctgggcaagtgggagcctgggcagcccctgagctctgaggccatggaggaagctcgcagagacgtcacccctggcctagacatcgggcgggcccagcaaggacctggagcccttgc

SEQ ID NO: 460527 - DNA, 122 bp, Homo sapiens
ttaactgtctcccgaggccgggattggccagagcggaagcggagacgcacttcctaggggcgcgtctggcacgcactgcgcagccgcggtgggaggaggcaccggccgcgcggcgggaggag

SEQ ID NO: 460528 - DNA, 122 bp, Homo sapiens
tcccatttagcaatccattcgttcgaacagtagattaatgcaagtactacaagattaggacgaggcaagctgccgtaataccatccagtagtcaaaattacaattggagaagaatgacagtc

SEQ ID NO: 460529 - DNA, 122 bp, Homo sapiens
ctactacctttgcacacaccctcttgacctttgataaatgtactttaaatgactgatagtcgtgatgattgcatgctttctcctgatataaaatctccttgaaacacagaaatgttcttgct

SEQ ID NO: 460530 - DNA, 122 bp, Homo sapiens
tccaaatactctccctgaattatgctataaatcttctagctacaaggtatgggaattcagcgtacctttgacttatcttgcttaaccttttctcaaagctctccctaaatcctactgtttgt

SEQ ID NO: 460531 - DNA, 122 bp, Homo sapiens
aaatcaaagtcaccgtgggtcccagtagcaaatctagaacctgcatcttaaggcaaagaacgatgaaccaccataaattccgtgggcctttgagaagccgaagggtgagctgattggaggaa

SEQ ID NO: 460532 - DNA, 122 bp, Homo sapiens
tttcaggtctctgttaacaccttggttcctcagatattgcggacagtctaattcgccccgcgacgtgagggagaacccaggagcgggctccggtagagaaagaagcttccggtcaacgacca

SEQ ID NO: 460533 - DNA, 122 bp, Homo sapiens
gcctcacttgtgccaggcaagatgctcctgggataagagctttttataaacagaagtttccggccactttggcctgtaatgctggggctttcagtagcagttggaattctccccctcccttc

SEQ ID NO: 460534 - DNA, 122 bp, Homo sapiens
atatacacacacatataaacatacacatatgcacttttttttccatctgataatagttcacgtataaaggaattttgtcataaaacagtggggacaaggaataaatggtaatgaacatgatt

SEQ ID NO: 460535 - DNA, 122 bp, Homo sapiens
aaagataagggttcaaaaatacatgcaatgtggcagaggcgagggggtggggtggggacacgtattgaaaaaatgtcctgaggacgtggcttcaaacactgctaattctccctagtgaagga

SEQ ID NO: 460536 - DNA, 122 bp, Homo sapiens
gacatcatcaagaatgacaacgacaccttcaccgtcaagtacacgccaccaggggcgggccgctacaccatcatggtgctgtttgccaaccaggtacctaagctcctgggtactcacagcga

SEQ ID NO: 460537 - DNA, 122 bp, Homo sapiens
gtgatcgccagccaatggcaagccgggacccggtcccactgctgattggcccccagatcccgtgggatctcacctctcgcagaggcttaaagccttgtacttgctgtgcagtgcttggctct

SEQ ID NO: 460538 - DNA, 122 bp, Homo sapiens
catgactggcattttgcctttttaaaacatcccctttgccattacagagaattgaaacctcgaagccagctgggaatggctagtagccttttaattattatttatgaattcatcagaaagaa

SEQ ID NO: 460539 - DNA, 122 bp, Homo sapiens
tctcatctcataagagcttcccttaccctgaccctagcggttgacagccattgggtcacccgattggccgtcagacagcgcggtccgtggcaggctatctgtgtgtgtcgcgtggcgctgct

SEQ ID NO: 460540 - DNA, 122 bp, Homo sapiens
ccttgttttctttgttttgctgagcttgtctggggcgggcgccgagttggggtcctattccgtagtggaagaaacggagagaggctcttttgtggcaaatctaggaaaagacctggggttgg

SEQ ID NO: 460541 - DNA, 122 bp, Homo sapiens
gatttgcaaggattccagtggccttccctccttctggaagcctaaaggtacaagggtgatcgagctggaacacccacacacagtcttctgtttgtttccggcacacaggattcttttcaggg

SEQ ID NO: 460542 - DNA, 122 bp, Homo sapiens
gttgttaaatgtattggcataaaattgtgaataatattcccttattttcctcttaatttccgtagactctggtgattttactcctctcgttcatagtgatgatttgtctttctcttttttcc

SEQ ID NO: 460543 - DNA, 122 bp, Homo sapiens
caagtcagctgtcatcagagaacaaagaatcccccagagccgctcaagttgtgtcacacccgggaagccctgagagctccctgattaggatttctaaatcagccccatcgaggcctgaagaa

SEQ ID NO: 460544 - DNA, 122 bp, Homo sapiens
gctgggcccctgaggcactggcagagccagactttgatggcggtttaactttgatgaccacgttctgaccctgactgagctggacctgtctctcaaggacatgctgctgcgggacaggaggc

SEQ ID NO: 460545 - DNA, 122 bp, Homo sapiens
ttaaccctgagcacactttgatgaagactatagctccctaaattaagaaaaggaaaagcacgtgtagagaagcaattactaatgtcaaggctaaccaatggcatgcattggtatatacttca

SEQ ID NO: 460546 - DNA, 122 bp, Homo sapiens
gaatctggtgtcctgtttagaaaaggtagaccaatcaggagctgaaaccccttgtctccacgtaatgcaaggctgtaaatatgaccttgcaggaaggagagaggcgtgagagagtaagcgag

SEQ ID NO: 460547 - DNA, 122 bp, Homo sapiens
ggggcctctggggagggcccggaatgtgacattgagatgtgctgcccctgaagcactccacgtctcagtggcttcagatatcgattttgctcacaaaccggggacttggcagggccagcttg

SEQ ID NO: 460548 - DNA, 122 bp, Homo sapiens
attttgttcccacacactttgtgccagggttgagctgagctttggcactgctaagcatgtcgcttctgggttaggtaggtggagtaggttgctttaggtttagggtcacaggagagctgggc

SEQ ID NO: 460549 - DNA, 122 bp, Homo sapiens
aggtcagcaaatacaactgcaaaaccggggcctgccagcctggccaacacagcaagaccccgtctctactaaaaagtaaaattaaaattagctgagtatggtggtgcgtggctgcagtctca

SEQ ID NO: 460550 - DNA, 122 bp, Homo sapiens
tagaatgagcaatatttcttggacgagcccatattggtccactactgttcaaaatctttgcgtgctatcctccactaccttgacttgagagaccctcatccttaacttctctttatctttta

SEQ ID NO: 460551 - DNA, 122 bp, Homo sapiens
aatagttacttcttactaattccaatatttggggggattaaaaacaaatttatgaagacacgtgagccataggaaaaaaatatttaaagagagtccttaagaatgaatattgtggacctctg

SEQ ID NO: 460552 - DNA, 122 bp, Homo sapiens
ctgtttaaccacacagcacccgacttctgtatgcagcgaggttctagagtttccaaaacacgggtctcctctcccacctcagcctcctagcataaaactagacacatcctcatgcttttgag

SEQ ID NO: 460553 - DNA, 122 bp, Homo sapiens
aaagggcagagccatacacgccacacatggtgcccacagccagcgtggcagctgcagggacgcgcacacggctgcaggagtcatagctctgctcggcaaagctatgctggtagaaggcctca

SEQ ID NO: 460554 - DNA, 122 bp, Homo sapiens
tacaaggaatagaaggccatgagtatatcagttatgcttgagtgaggtcactgatgtgaacgcaggtaggagaagcaaaatacagcctggcagctttgctgcaaaggctgccaatttgaatg

SEQ ID NO: 460555 - DNA, 122 bp, Homo sapiens
cggaaacctcatccaagcagtcccagaggaaacggataaaggtatttgaaagggagcgagcggccccaaatcgcacaattgagcggctgggggagttatgcgccagtgccccagtgaccgcg

SEQ ID NO: 460556 - DNA, 122 bp, Homo sapiens
aaccataacctgaggacatcccaccacataaggagagaaagacttaagaagtaaaagatgcggcaacccttttatcgcttttaaagtctgcattaaaagggcattctgttagccaggcatgg

SEQ ID NO: 460557 - DNA, 122 bp, Homo sapiens
gtgaccagtgaaacaggatcaaccttcaaaaaattcttcactcaaggttgggccggctggcgcaaaaagaccagtttcaggaagccgaaggaggatgaagtggaagcttcagagaagaaaaa

SEQ ID NO: 460558 - DNA, 122 bp, Homo sapiens
gcgggaaaggggtcagggcacagagatacgaggtcggggtgcggacataagggattggggcgcagagatatgaggttggggtgcggaaataagggatcggggcacagagatataaggggttg

SEQ ID NO: 460559 - DNA, 122 bp, Homo sapiens
ttcttggctgtaacacagataggaggaaaaatctttcctcccccaaggcagagttttaaacgcatcatctcagaatgccaaatgttctggaaaggaagaaagttggcagcgaaggaacccgc

SEQ ID NO: 460560 - DNA, 122 bp, Homo sapiens
ccgaggatgttgctaaacacgttgtcatgcacgggacagcctccaccacaaagggtgacccggccccaaatgctggtcatgctgaggtcaagaatccctgccccagaagtgaatacatgtcc

SEQ ID NO: 460561 - DNA, 122 bp, Homo sapiens
cccttcctctctcagctcatcccgatcctcatccgggaccgcggcgcactgcgcacatcgcgccccaaatgcttgcacacccggggctggaaggtcgcctggtccctctgagggtcatctag

SEQ ID NO: 460562 - DNA, 122 bp, Homo sapiens
gtgcagaggaaaggcgggagtgcccggctcgctgtcgcagagccgaggtgggtaagctagcgaccacctggacttcccagcgcccaaccgtggcttttcagccaggtcctctcctcccgcgg

SEQ ID NO: 460563 - DNA, 122 bp, Homo sapiens
aacacccaaacttaagatttcactgacttcatcttattggatgtaatgaccaacagaacacgcagatctccacactgagatgaatacagataagagttttaaaacaaaccagctaaactcca

SEQ ID NO: 460564 - DNA, 122 bp, Homo sapiens
gggatcagtcctccgcagaggtcccagggctggctgaggccggggcaggggacgcagtggcgccagctgctggcactgacggagcctctctcagggcctgcgtttcccacaggtgggagggg

SEQ ID NO: 460565 - DNA, 122 bp, Homo sapiens
cgtgcgtgacggtggacagccaccactctcggccactgccacgttgcacctggtcttcgccgacagcttgcaggaggtgctgccggatatcactgaccgccccgacccctctgacctccagg

SEQ ID NO: 460566 - DNA, 122 bp, Homo sapiens
aggcttctcactcaaattccaggctctgttcaatcatacttgaagcaaatatcctattcccgaaagtctcaaccactttcaggttctcattgacttaataaagcctagaaaggcattgatcc

SEQ ID NO: 460567 - DNA, 122 bp, Homo sapiens
ttgtttttcaaaggcagattcccatccagcagaagcacttaagacaatcatctttcacaacgatgagtaatatctctcacgctgtcatccagaatgactcacagcatcagagggtctcatgt

SEQ ID NO: 460568 - DNA, 122 bp, Homo sapiens
ctgtgggagaagggctcgcacaaaggtgggagaactgaggatgggtgtgttcttgctctacgttttgaaaagcccggggcttagctccttcccggacatgtcctttccacttccttcagttt

SEQ ID NO: 460569 - DNA, 122 bp, Homo sapiens
cagccccctgatagggtggtgccacctctctgcggggagccgcaaagttgggacagtcaccgggggtataggtggagctggaggtgaaggtggaactgggcacgggactgaagcccagggtg

SEQ ID NO: 460570 - DNA, 122 bp, Homo sapiens
ctttgcctgtaacttctatctccctaaaatgtataaaaccaggctgaaacctgaccacctcgggcccacgttctcaggacctcttgatattgttccccaggtcaatatggtcactcatattg

SEQ ID NO: 460571 - DNA, 122 bp, Homo sapiens
gcctctggctctggtctagtggtgcagcgtctctagccctcgccccgcccaccgtccccgcgaggcgtccactcgccgagccccgccctcacccagcacccaccccgctcctcgcgccctcc

SEQ ID NO: 460572 - DNA, 122 bp, Homo sapiens
tctgccattcccgattcttcccagcagatggccccaaagttcagttcctgaattgcctcgcggagccgcgggctgcaacgtgaggcggccgctgccagtcgactcaaccaccggagtggccc

SEQ ID NO: 460573 - DNA, 122 bp, Homo sapiens
tgcctctggtctgactggatcaatgaggaccaccccagcagtggcagcgacgacggtgaccgagaaacatttgatggggtctgcggggcccctgaggacatcgagtgcaggtcggtcaagga

SEQ ID NO: 460574 - DNA, 122 bp, Homo sapiens
cagagggggccctcagaggaaactcaggaaaactcatgccattctccattcaagggagggcgatattccagtgctgatcccattttcctcccctcctcgtgggaggccatcccgggagatct

SEQ ID NO: 460575 - DNA, 122 bp, Homo sapiens
ttgtaaatggagcagccaagggatactggccactttgggaaaatctgctttcaatcagaccgggcatttaatgactgggattgtggccaagctgcttgctgtctctgagtctcagtttccca

SEQ ID NO: 460576 - DNA, 122 bp, Homo sapiens
agtgctctccactcaccttgagaagtccctgcaaagttatgtggcaaggggtgtgggtgccgggagagagactgggaggcggtgcgctgagctgccggggtgttttgtgggatcccccatag

SEQ ID NO: 460577 - DNA, 122 bp, Homo sapiens
gtttctaaactgttttggtgttatgaacccctagagtcttctggggaatccaatggacctcgtctcagaataatgttttacaatgtatagcagaaagaagagaaattatattgaaatacact

SEQ ID NO: 460578 - DNA, 122 bp, Homo sapiens
agacggctccgagtcttgggctgtgagtgtggtcgggctgtgagtcacagctgcagcagacgctccgcagagcaggagcagcctggcccagtgcggactccccagtgccaacctcttatgga

SEQ ID NO: 460579 - DNA, 122 bp, Homo sapiens
attcaacaaatattcaaattggagctggagttctgagcggctgggtactgtgtattccagcggtgggtgtctgtacgtagttagaacctggcaagagagcactctcgaggagcccgcaggcg

SEQ ID NO: 460580 - DNA, 122 bp, Homo sapiens
ctaaatgaaaattaactcactctagttgggactgtcaataaatacaggaaaacagactttcgttctaaagggaaccacttccagcccattctccgtctgctgtaaactttaggaatcaaaat

SEQ ID NO: 460581 - DNA, 122 bp, Homo sapiens
tgttaattaatgttgttcctttcaccttttacctccttttccttctttttaccatctactcgtccctccccattaataaagtattagtaagttgcaaaataaactaaggtaggtactagatg

SEQ ID NO: 460582 - DNA, 122 bp, Homo sapiens
aatcagggaatatgcctttcaaaatttcttagattgaaaactagaaactgccctatagcacgccccttactgacttatttcaactatcacatttattcctgtaacaaaggcattgcattata

SEQ ID NO: 460583 - DNA, 122 bp, Homo sapiens
ggtcaccgagcgcgcaggcgcgcgcaggggatgccgggaaggcggaagcagcagagacgccgcaaggccagagtgcctccccagcggcgcctccgcaccacagcgcccccggcggccgcctg

SEQ ID NO: 460584 - DNA, 122 bp, Homo sapiens
aggtgccagtgggaagcatattccaggtgtttaaccatgggcttccaaactggatagagacgctctgcaaggccaaaaggtgtccctgcagcagggaggggagggtgaggtggaacagaagg

SEQ ID NO: 460585 - DNA, 122 bp, Homo sapiens
cacttttctacttttgtcccagtggatcatcttgcccttgatgtatccagggccccaccacgtacggatgtgtggccagtgtatctgaactaggtatggatgttaagtaggattttaataga

SEQ ID NO: 460586 - DNA, 122 bp, Homo sapiens
atgttcccactgcctgctgcaccggcgcacaaatgcgggagggcaagggtgcttgtgaggcgggggagggcaccggggggaacgcgcgagccgggagcgtgcagcaagggagcgggccagcg

SEQ ID NO: 460587 - DNA, 122 bp, Homo sapiens
ttccggattaaagggacatacgctgctgcccgaatcccaaatgcagcgtgatgccactaccgcagcccagctgcagccttgaggaagagggtgcaggagctacagaggctgtccttgacatg

SEQ ID NO: 460588 - DNA, 122 bp, Homo sapiens
aaggcgaagcggggcaaagttccctgcccaccgacgccagcctgcttggatgacttgcctcgtttcataattcacttactgtctgcaccagccggcctccagcctggctggaccctgctgcc

SEQ ID NO: 460589 - DNA, 122 bp, Homo sapiens
ctgctttctgccgttcccccaacgtgactcctccggttgctgcatactatatggcagtggcggccgggccggcccggcctagccacctcattggctatttcgcattcagagggaggaggaga

SEQ ID NO: 460590 - DNA, 122 bp, Homo sapiens
acccatcccccagttgccacattcaatttgggacagtcactcttatcaagttcatcagaacgtttatctctggcctccaggaagaaggcctgcacaggccctccagccccccaccccccctg

SEQ ID NO: 460591 - DNA, 122 bp, Homo sapiens
gacgccagggcagggatctgcatgtcccaaacccagagaaagctgtgggcaccatctgcccggaggccaggtggctgaggccccggagaaaggtgcacgggagcagggccaccagcgccgca

SEQ ID NO: 460592 - DNA, 122 bp, Homo sapiens
ggtggggggcacactgcccggatccaggccgagatagggaaagactcgagacagcaagcacggtctgtgtcagaattctggagggggagactttagcatagatgggtaagagggtcggtcca

SEQ ID NO: 460593 - DNA, 122 bp, Homo sapiens
ggaggagatggggggctgtgctagctgcttgcccagcgagtgttcccggagtctcctcgccgcaccccgctatcgggcgctcagaccaggggctcggcctggcgggaaatagcctcgaccga

SEQ ID NO: 460594 - DNA, 122 bp, Homo sapiens
aaaatttaccactgtacccattgtacaataggtgtacaatgcagtgacaattagtaggttcgcaatgttatgtagccatcatcactctctagttccagagtatttcatcacctcaggggaaa

SEQ ID NO: 460595 - DNA, 122 bp, Homo sapiens
actggattcaaggtgacagagggacattctctggcagaatgccttgagagaactctgtcccgccatcccgcatttgcccattcattcaacattaattgagcacctactatgtggcaagcatt

SEQ ID NO: 460596 - DNA, 122 bp, Homo sapiens
ttggtggaggggagaggttccgtgatcaactgtgggcgctgttgagctacagaccttttccgtcactgctctcaacaggcggacaggccctggggtggaacccaagcagcttctacccagaa

SEQ ID NO: 460597 - DNA, 122 bp, Homo sapiens
acgttccagcggaggcctcctcccagaagggctctggaggcctcgcaggagtggggatcccgcggttctgagttggcacaaggaagagagtggcaccaggggcctggagtggatggcagggt

SEQ ID NO: 460598 - DNA, 122 bp, Homo sapiens
tgtatgaagaggatgcagcgatgtggccgggagttagcatgaagcgtggttattctatcacggagatatgctcctcatccacaaaccagagggacgcacggtccaatcaccagtgtcaggtt

SEQ ID NO: 460599 - DNA, 122 bp, Homo sapiens
cgccacggccacggccacggccccggccccggccaccgcccgccgggcagcccagagcgccgcgcacggccgcactctcccgccaccccacgcacacgcacacccccgcccgcccacgcccc

SEQ ID NO: 460600 - DNA, 122 bp, Homo sapiens
actctctgtgaagtttccaaggaagcatttcagcgttcagcacacaggacccaggtccaccgcctccactgctcctgcaccggccggcccccgcctcccgcccatccatctctgggctgttt

SEQ ID NO: 460601 - DNA, 122 bp, Homo sapiens
tgggagagtccacagcaggcaggggccagagaggctcccgaggatgaaggcggctgaggacggaggttgtggtggaagaggaggttatcaccagttgtggaagtttccaaggttaatgcacg

SEQ ID NO: 460602 - DNA, 122 bp, Homo sapiens
ttggtagccgctttgccaagggctcccttcctggccaagagcatattgatgaggaggcagcggtgctggcctcaagtggttaattgggaaggcggaggagcaagaaactaagtgttctctca

SEQ ID NO: 460603 - DNA, 122 bp, Homo sapiens
tggatgtgtccgaatgcacttcctttttaaggctgaatcagtaacactgtgtgtctacaccgcaccttgtccctgctgtcatccatcagtggacacttgagtcacttttgacttttgactta

SEQ ID NO: 460604 - DNA, 122 bp, Homo sapiens
aaggcacactctgtatgtagaaactctcaccgattttgtctgtgcacaaagctaaacaaacgtccctagaacaggatatgggattgtggcaggcttgtctggcaactgggagaattggattt

SEQ ID NO: 460605 - DNA, 122 bp, Homo sapiens
cagtaagttcattagtgttttcaatcggcggcgggcagacccctcatcagagccgaaagccggcaagagccattcatcagcgtgaagtgttattcacggatgacccctaaatcacggcgaga

SEQ ID NO: 460606 - DNA, 122 bp, Homo sapiens
ctagagcatccctgagcgcgcccgccctggagccgctcgctcgtaccgcacggccgcccccgaccacagcattttaaaatctgctactgtaaaccactggtggctgtatgggatcctactga

SEQ ID NO: 460607 - DNA, 122 bp, Homo sapiens
aaaagagtaaaagtggagacactgggtaggagactattgctgtttttgagtctagaaacacgggttagactcctatggttgtagaagagatgctaagaaatgggaaactgcaggctctatgt

SEQ ID NO: 460608 - DNA, 122 bp, Homo sapiens
cagatactggccagaagagtatcctgaggtgttcactcaaacgtgtcccaagcctgcctccgagtctctcgggcggtcgcatccacacactcgcacgacgatgacctgcttgcatcaaacct

SEQ ID NO: 460609 - DNA, 122 bp, Homo sapiens
gcaccatggaagatgaacatttagcttcttttatatcggtccctgtctcaataccactggcgccagcgccagtgcctgatcctgaactagttttgctacttctcagacccggcttcatcatg

SEQ ID NO: 460610 - DNA, 122 bp, Homo sapiens
ctggaccatgagcccaggcagcctggctgcaccatctgtgccctgagcactgtagaacaccggcctctagaagacagtagaagggagggagagcctagggaaacaccacagaaccgggaaat

SEQ ID NO: 460611 - DNA, 122 bp, Homo sapiens
taaaagcaaaatccacctatgtcctgaacagtatccactttacgagcctcattatatgtacgagataaaattcagaaataaataaatatacatgtatacgtatacaaatatatttcaaatta

SEQ ID NO: 460612 - DNA, 122 bp, Homo sapiens
ccctctccctgatattctgtcccatcctgggactaaacatgtgctgtgtctttaaatgggcggaagtggctggcagtgctttgcttgggtactgcattgattaggagattatatggagctgc

SEQ ID NO: 460613 - DNA, 122 bp, Homo sapiens
ataaaaggactctattcactaagtagcctgtgtttttaaatccagggctgcaggcagcaacgcaagtcaggctgaacattcagtctccagagacagctgtgtggagcaaatcagagttcatg

SEQ ID NO: 460614 - DNA, 122 bp, Homo sapiens
ctgaatgacatcggattaactttgtttctgcagagctgttctggaggaagaaagtgatggcgccaatgacttaaatttagaggtcctgaggcgatgttttggtgtttgtttgctgttgggag

SEQ ID NO: 460615 - DNA, 122 bp, Homo sapiens
caaggggatctgcaaaggggatgtgaagaaaggtggcagaaggatggtgcagggagtcaacgtgatggtacgtgtcacccataggccatgtggggaagaaagaagggctgggtggtgctcct

SEQ ID NO: 460616 - DNA, 122 bp, Homo sapiens
tttcctgagcgtgaaagtctcctcattctgtgggttaggagttggtcattgaagggctgacgcttaagagcccagatctcccaactcccttagttggcccttccgggagccgcccggtctct

SEQ ID NO: 460617 - DNA, 122 bp, Homo sapiens
tctttggccgcggcagctctggtgctcacgccgcttagggctccagctgtgcacagtagccgcctgggcgtgggggtgggaaacagctggagcgccccggggaggcgcgggttggggtggaa

SEQ ID NO: 460618 - DNA, 122 bp, Homo sapiens
gcctggcaagtagcagcaagctgaaagagagcaggacaggtcactgcagatgagctacagcggagccagcagctcctgcagaatctgcagtgctgccacactgaacactgccagtcctgggc

SEQ ID NO: 460619 - DNA, 122 bp, Homo sapiens
caggttagcttcactaaagcgacaggcaccacagatgtggtcctgggtgggtggtggggacgggcggtccgtgctgagtggacacgttgcagcaacaccacagagaccccacagtgtgtcgg

SEQ ID NO: 460620 - DNA, 122 bp, Homo sapiens
gcagaacggcggcagggcgatgacgcgtggccgcgaggtgagtaccacctccccgcggctcgcctccaccaggatgttctggatcatgttctccagcagcgcctcctgcaggttggcgaagg

SEQ ID NO: 460621 - DNA, 122 bp, Homo sapiens
tttggtacccatcacccagttacaccccgcttctcacctcttaaaattggttaggggcagcgggagagctttgaagcagacctgtgcttaaaaatcggggaaagtgggaaatcaacaaaggc

SEQ ID NO: 460622 - DNA, 122 bp, Homo sapiens
gagcgaccccgaaggaggcgacatgggagggctcagcagcaggataaaccgcctcgtttccggaggctgaagcaggaacgggagaatgccgcaagggggtctgagggcaagccctccctaac

SEQ ID NO: 460623 - DNA, 122 bp, Homo sapiens
ccccgcagatgattaacacgcagccgctttgataaccgtcctgcgaagtcgccttcatcacgtccttgcttttcagagtcccgagccttgctctgagtgagcatctccgtgttgcctttcgg

SEQ ID NO: 460624 - DNA, 122 bp, Homo sapiens
gctgccccttccactccgcccccagggagctcccgggtcatcctctcatccgggctgccccgcggcccccaaggagccccacccccgggaccaaatggcccgcaaggtttggggcagcggcg

SEQ ID NO: 460625 - DNA, 122 bp, Homo sapiens
aggagagcacacgctgactgtgaataagtgtgtcagttcttaaggtccagcaacacaaagcgaaaagttagtggaggactacgagcgcgatctcgacagagggcgctgggtggtcagtggct

SEQ ID NO: 460626 - DNA, 122 bp, Homo sapiens
agtgatcctcttgcttcagcctctgggatagatgggactacaggtgcacaccaccacacccgggcaaaagggtcatttttattctgctttcggagttgcttcttcggttgctgtttctcaga

SEQ ID NO: 460627 - DNA, 122 bp, Homo sapiens
tagaaaccgattcctccagcttatatgaatgactgtcagcaagataaaatgcctacagaccgatcagaaaaaaatgacacaatcgatattaactacggtaacttacaatcaaaatgggcaac

SEQ ID NO: 460628 - DNA, 122 bp, Homo sapiens
caggaggtgctgcccatggcccctggggacccctccagggtaggggctggggcatagctgcgatggttcagcagaaagaaactgtcctctgcagctgcaggggctctcaggcagggccccca

SEQ ID NO: 460629 - DNA, 122 bp, Homo sapiens
gggcgttttccaccgggcgcgtgtctggggctgtgactcagaatcctcaaactcagagttcgcagacggaggaactcatgctcaaacgtctgaacaaaaatatacagagcatgaaattttta

SEQ ID NO: 460630 - DNA, 122 bp, Homo sapiens
ggagctggcggggtggggcgcggctccggcgacccgagcccggctccgcagaggctgcggcggtcgcgtcctttatttttgctgcagcagcagcgacttgtcaaagggaaagacgtaagagg

SEQ ID NO: 460631 - DNA, 122 bp, Homo sapiens
ggaagataatgagccaggtggaagttacaaatgttgccgcaagtagtttctgttactttacgagttctgggagcttctctaacagctttgacaggagtgaatccccaaggctaaacccaaat

SEQ ID NO: 460632 - DNA, 122 bp, Homo sapiens
tcttaaaaatattgaggctcattaggatgacacattggagagatgaatgtgtgtgctcaacgttgtgttccaggtaaaatgaaacacaagtcctgttgtttgtcaatgatgatgcttgttat

SEQ ID NO: 460633 - DNA, 122 bp, Homo sapiens
tgtgaccttattttctctgccatcctcaacacgtacttccatgttgggacccaaaataaccgttccagttcctgccatcatattcagagtcaagccaaaacgaaggcagcctagaaaaaagt

SEQ ID NO: 460634 - DNA, 122 bp, Homo sapiens
ttaccgccaacctgcagcgggtctcagttctccccaggtctctggacagccgtgatgctacggtcccctccagctccgataccgggactttctgtgcgatgtggccctggccaagaagcctc

SEQ ID NO: 460635 - DNA, 122 bp, Homo sapiens
tgaaaacacagcaagggccccactagctgaaaccaagttgcagagttttgagggtcccaccgccgaccgccggcccgccgcgagccctgccccctgcgcggccacgcccccttgctccccgc

SEQ ID NO: 460636 - DNA, 122 bp, Homo sapiens
aacggccacctgtttgccctcaggtcgctggactacgaggccctgcagtctttcgagttccgcgtgggcgccacagaccgcggctccccggcgttgagcagcgaggcgctggtgcgcttgct

SEQ ID NO: 460637 - DNA, 122 bp, Homo sapiens
agagcaacttggtccactggccgaaccgcttcttccgcagcaggaaggcgcagattttggcgtccttgaccaggtccatggaggcctcctcggagggccactggtgccgggttttcttcccc

SEQ ID NO: 460638 - DNA, 122 bp, Homo sapiens
gggtggacgcggggccacgtcttggccggcgttttgcggggtcttcctgttctgaacgcgcgtaacttttgcctcagtatctcacttcttggaatccggcggcgttcacgtgtgtgctccag

SEQ ID NO: 460639 - DNA, 122 bp, Homo sapiens
ctgagcaccccgtgtaggcatccccgcataaacatcctgagcaccccgtgtaggcatccccgcataaacatcctgagcaccccgtgtaggcatccctgcatgggcattctgagcaccccatg

SEQ ID NO: 460640 - DNA, 122 bp, Homo sapiens
cggaggctctcgcatttgcttgtcattacttaagatgccgtttagaagcacctcatgtcccgcgtatctcatacctgctcatttactcccatgaccacctgtgttttacagacgaagacaca

SEQ ID NO: 460641 - DNA, 122 bp, Homo sapiens
ctggcatggtgtctgcgttcccctcctatgaaaggatcagctctagttacatgccctgtgcgcggcctgaagcctgtaaccgggattacgagcccactatgagccagggactaaaggtgaca

SEQ ID NO: 460642 - DNA, 122 bp, Homo sapiens
taaataaataagggcttttgtttgtttgccggctcctgcacatggctgctgggactcaagcgctcgtgttgtctgcgcctctgtgggactctggggacgggaggcaggggaggcccccgcag

SEQ ID NO: 460643 - DNA, 122 bp, Homo sapiens
aggatgtctgtttatcaatcctcaaggcagagcagggaggccaactgaaattagagcagtcgtatgtgttagaaagtcagtaggttggccgggcgtggtggctcacgcctgtaatcccagca

SEQ ID NO: 460644 - DNA, 122 bp, Homo sapiens
gaagggaccagcaacgctagaacagtgacgtccggtagcgtccagccgtcagccctcagacgccacgggctgccggatgtgagtcatcctgacttccgctttgaaaaaaaagacccgagcgg

SEQ ID NO: 460645 - DNA, 122 bp, Homo sapiens
tctgcagccagggcctagccttcatgcagccctgagtcctgacactgccatgagagacctcggtgcagccagccagatctgagacccagagggaggggagggaggagggcaagtccagctgc

SEQ ID NO: 460646 - DNA, 122 bp, Homo sapiens
tagcccaaacggggtcacagcaggacaaggaagtagccgatctcccagatgcggtctcttcgctccgctccacccgcaccagcagcggcccacccacctctcctgtaagaggaagaacgtcc

SEQ ID NO: 460647 - DNA, 122 bp, Homo sapiens
gttggagctccacaatctgctagtttgtatgctccccctctgctcccgtacaggtttgagcggcggggaactgaagcagcgagccacacgccccgtcgcatgccttgtgagagggacaaggg

SEQ ID NO: 460648 - DNA, 122 bp, Homo sapiens
tgcccattgtaatttaggggaaggttaggaattgctttcaagcttctgttttactcaggccgctagatggagaagctgagctgtggaagtgttagctatcaatcacttgtgtaaagtagcat

SEQ ID NO: 460649 - DNA, 122 bp, Homo sapiens
cccctgtatgatgacacagaaacctgaatgtcagcagcttctgcctgacactgcccatggcgagctccactgctcttccagggagtcccgggcagctgccagcagggaaggccctggagttt

SEQ ID NO: 460650 - DNA, 122 bp, Homo sapiens
cccctacgcggggcaggccagccctggggcgccttaaaaaccggagctggcgcttggcatcgccactctgggcaggatccaacgtcgctccagctgctcttgacgactccacagataccccg

SEQ ID NO: 460651 - DNA, 122 bp, Homo sapiens
tgctttttattaattctattagataagacccatttggttgcaagtgaaagaaacccaactcgaaccagcttaagcaaaaagataatttatcactgtgcataactcaaaaactatggataaga

SEQ ID NO: 460652 - DNA, 122 bp, Homo sapiens
aaggcgccgcgcttggctcttgaatcttgctggcagttttcccaagttccacagaagccccggtgagaagtacagttctgcctcctgttgttttgggctgttgtttacgcggtcctgggata

SEQ ID NO: 460653 - DNA, 122 bp, Homo sapiens
acagaagaaaaaagaaaagtagttaatacaactattactctacggaaatattaggggtagcgcaaacaaagttctgacactaaactttactgagccctgcatcctgcccacgacccccccag

SEQ ID NO: 460654 - DNA, 122 bp, Homo sapiens
aggttggcttaagaaatcagcccaagaacaagtgttagataggaaatctcacatcccttccggaagtcaccaacacagtgtgggagggacacgttggttgggctatctctgaccccagttag

SEQ ID NO: 460655 - DNA, 122 bp, Homo sapiens
gggacagtaactgcccttaacctgggcacagcacccccctactccagcctgttcaggcgtcgcttctttggcagccctgccacactgctggctcactgaagcctgcacgcaatgaaaatcct

SEQ ID NO: 460656 - DNA, 122 bp, Homo sapiens
ctcaacaatgccaccatcgttttccgtgttactgcagcgttctcaatgtgtctgtctgcccgctggcatacggacccttctcttccccttcgtttccccagcaccgaacagagggtaaagtt

SEQ ID NO: 460657 - DNA, 122 bp, Homo sapiens
gggcgcgggccgtgggcggcgggctcggtcccctccggaagccgggctggggtggggagtcgtcagcggagggtcctgggcgtcttcaattctgagtgaggccgttggcgacaaggaggaat

SEQ ID NO: 460658 - DNA, 122 bp, Homo sapiens
acagattcttgaaaagccagaaacagtacagagagaacggaggagaggccacacgtatgccggataaaggtcccaggatgctgctaggagagcactggccattagagtaaacagaaaaatag

SEQ ID NO: 460659 - DNA, 122 bp, Homo sapiens
gggccagggaagggggagcccgccctccgcgccctcggtctccctcacacgcgcgtctcccgtctcgccggctccgggctcctcacctcacagcctggagctccctcccggcgtccggccga

SEQ ID NO: 460660 - DNA, 122 bp, Homo sapiens
tgagggcaaagagaagccaggggaaacgggcgttgctgaacaaacccagaaggataaagtcggcatacacggaataattgctctgctccatagctctgtagggtacacaaaagagatatgac

SEQ ID NO: 460661 - DNA, 122 bp, Homo sapiens
ctggctccccgggctttggcagcaactgttccacagagccaggctgcagggcgtcaaactcgccaaccaaatgtgcccccccggtggagaaggggaagaggacccttctgacatgtcctgca

SEQ ID NO: 460662 - DNA, 122 bp, Homo sapiens
tctgccctgatgcaggcaaagagtccagatccaggcaaatgaagtgtcagagggaagccacggccctactcagggagcctgagttcagtgaatctctcaggagagaggtctgggctggaaga

SEQ ID NO: 460663 - DNA, 122 bp, Homo sapiens
accacaaaccttgtgtatggattcggcatggagccctcagctggcggctctgggtgctgacggccgctggagaggtgggctcccctcgtgcactttattgcctgggcagttttgcttgatct

SEQ ID NO: 460664 - DNA, 122 bp, Homo sapiens
gaactctgcagcatggacctcaggacagagctcctgggtcggggcattgccggcctgcaacgcaggagcgggtcgggggcccgcactggtgagtacagctccagcgttggtgtgctagggcc

SEQ ID NO: 460665 - DNA, 122 bp, Homo sapiens
agctctgcatccgactggagactttacacctgcttcctacgaagagggagctcttgccagcgagcccatgcttacccataatctacgaagagatcttttcatctcctctccgtgaacacttg

SEQ ID NO: 460666 - DNA, 122 bp, Homo sapiens
acaaagtctatcagaggtgagggcgggccaggaggccacctgggcagggcaggcgtcccccgggcatgtgcccggcagggctggaggagctggtagggtgggcaggacactatgtgctcaga

SEQ ID NO: 460667 - DNA, 122 bp, Homo sapiens
gggcgcactggcggggccgcttgggggcgcgttgggagtgcctggggccaaagagtcacgcgctttcaattgccacgtggagtatgagaagacaaaccgcgcgcgcaagcaccgaccgtgcc

SEQ ID NO: 460668 - DNA, 122 bp, Homo sapiens
agggagcggagcttgggcacgaaagccaaaactgggcggcgcggggcgggtggggaaggccggctgagaaagccgggattgcctcctggtgtcaaagctcggaactgcagcaggatcctggg

SEQ ID NO: 460669 - DNA, 122 bp, Homo sapiens
tctccacttcctgacgtcatactatttttgtctttgaatagctcattgacacaattgcctcggagatcggagaactgaaacaggagatggtgcggacagatgtcaacctggaaaatggcctg

SEQ ID NO: 460670 - DNA, 122 bp, Homo sapiens
gccctcaaggccttaatcttgcagcctgggatagggcggggaaggagagagacaaagaaacgcacacagcaaggtttgtgctgggaccaataaattcctgatccttacccaaatacctagcc

SEQ ID NO: 460671 - DNA, 122 bp, Homo sapiens
ccaggagggggcttcttagttgccccttcccaccagcagcacttttaaaagcatttaatccgcccggagcggccttcggaggtaattgacaaagtccttaatctgcgcggcgaacgagctgc

SEQ ID NO: 460672 - DNA, 122 bp, Homo sapiens
gggcgggctcacgcaagcgccaagggaccggtgggaggagttcgggtgtggatgcgcaggcgctttgagagacggtgaagccggtggccggtggccgggcgggaccaacaaagatggcggcg

SEQ ID NO: 460673 - DNA, 122 bp, Homo sapiens
tgtgggtgctttacagacgaggctggggttgaggcagcgtgaatctccccgtttgcgcagcgggagccgaacgggcctcggactgaccgctccagatcccgtggtccgcccacgacgccacg

SEQ ID NO: 460674 - DNA, 122 bp, Homo sapiens
aaaatagggtccttgccagaacccagttttcatatcttgatcttgcccaggccttgctgccgctcagtacaaaaagattatgcccatcatctccttcctaagttcctacgaccatttttatt

SEQ ID NO: 460675 - DNA, 122 bp, Homo sapiens
cgcggctcccaccagcacccccgaccgccatcgccgccatctttctcctcgcgctgtccacgccgggattccttgatactagtagccaatcacaaagtcaaactagtgccccagaaggcggg

SEQ ID NO: 460676 - DNA, 122 bp, Homo sapiens
gcctcgtgggctgagttccggtagagggagttgggggggggcaacgcggcaggcatcatccgccagggagggccagacattcggttctgggaagctacatgcatccactggttggagctcca

SEQ ID NO: 460677 - DNA, 122 bp, Homo sapiens
gggcgggagtgggggcggcagagacgtaagactggcaaagctggcgaggccagcagtcagcggggcaaatagagcgagaacagaagagcgggaagggctggcgcgagcgaggtgcgagcgag

SEQ ID NO: 460678 - DNA, 122 bp, Homo sapiens
gtctctgcaggtctgactcctgcctcctgtgaggaagcagagccattcagaagtgagaggcggccaggaggggcgggcgtggtctgtccacaccgggcagtggcgggagcctgttgagctgg

SEQ ID NO: 460679 - DNA, 122 bp, Homo sapiens
gccaccccgcttcgcagtagacggacagaggagtcgtagcggtcgaggcttttgcggctccggcgtgccggaaagtgcgtgagtgccgccgccggggagttttgttccatttcccggatcct

SEQ ID NO: 460680 - DNA, 122 bp, Homo sapiens
cgtgcgtgtccctacggagctgagactgcagttcctgcgacgcccctgcagcagcagcagcgtggtcagagcgagcttctgagcggtggtgggttccatgtgatggtggagtaggagacagg

SEQ ID NO: 460681 - DNA, 122 bp, Homo sapiens
tgcggggggagttaggggacgcgggcacccgtaggcctcacagacccacactgcccaccccggtacctttgttacactttacatcctgaggaagcgctaaaacctatattttaaaacagtac

SEQ ID NO: 460682 - DNA, 122 bp, Homo sapiens
cccacttcaaaggcttcctcctttgggctaccttccctggatatcttgctaggaagtagccgcttcctctctttcaattctatacctgcatcctgaaccagtgctgcctgggcactcagccc

SEQ ID NO: 460683 - DNA, 122 bp, Homo sapiens
ggagcctgcttctggggagccacacacgtcctctcccacttcttgctggagacttggggacgtgaagggggggttctgtgatcccggaaaaaaagtaacttctcttggtaggtgatactagg

SEQ ID NO: 460684 - DNA, 122 bp, Homo sapiens
ggccagcatccttggttggctgtgagctggttggtgaccttggaccctgcccagggtttccgttgtggtccagagtcatgcagtggggccagtgtgagcagtggaggtgctccaggggcctg

SEQ ID NO: 460685 - DNA, 122 bp, Homo sapiens
cccgagggggctctacgcaaagtgaaatactcacagttcccgaaacccacgttgcttgggcgcctccgtcccctcacttttcccgagaccgccggccgcagcagccccctgcgcgtcgcgac

SEQ ID NO: 460686 - DNA, 122 bp, Homo sapiens
ctgaagggaatcccaggggccaggctcgcaaatctgtgtcttggtccagagcagataaggcggagctctgacctcctgcccggacacgtgcccgccatctggcatggtggaaagggcgtgct

SEQ ID NO: 460687 - DNA, 122 bp, Homo sapiens
tgtccctcaaggtctaagagctgagaagattcacagaagaacctgtgatcagcccatactcggcccaggcacaacattcctgacctcaaagcatatggggattggttgttctgacatttcat

SEQ ID NO: 460688 - DNA, 122 bp, Homo sapiens
gcggtgaggctgcccggccccttcagacttgccacgggctccccccaggctccccgggcccggacttcaccttcatcagactcgcctcggggtctggtctgaccctggaactctccgggtca

SEQ ID NO: 460689 - DNA, 122 bp, Homo sapiens
atacattatttgatatacagtagatcttactggattactcagggccaactgtctcaattccgaaccacatactgagatgaagctggtgatttgcactccctcattctaccctccatcccatg

SEQ ID NO: 460690 - DNA, 122 bp, Homo sapiens
gtccttgcaaaaaagcttgttctgtgctgcctagattctatgccatctgatagcacgtttcgagttaacccttggccccatttggctataatgttaagtggaacataacttataaaagactt

SEQ ID NO: 460691 - DNA, 122 bp, Homo sapiens
tctgggatggccgccccgcgccgcccactccggaatcctgtcccctccccggcgcgcccccgcccagctagcctagagcctctgccggatcttctcgaatttcaacacaaagggaatcctcg

SEQ ID NO: 460692 - DNA, 122 bp, Homo sapiens
ttgcttgttggaagccctgtaatggtttccttgggacctgggatgaaatgcaaatggtcccggggctcaccgtcagccccgcgcctgggcctcgccccagcccccaccttcctgcccgccat

SEQ ID NO: 460693 - DNA, 122 bp, Homo sapiens
atggtctagcgggggcgcgttaatgggtacctctgccagtcccagacacatccgggtcttcgacagcccattaagtgtcgggggtcaaaaaatcgcttcaggctgcaactttaccttagaga

SEQ ID NO: 460694 - DNA, 122 bp, Homo sapiens
gtacacttagacgaacataagtgtcagaattgacaaatccaggcctacaggactccagatcgagcacttgtactttactgccccaataaaaagctgttaacattttagcttatttttttgag

SEQ ID NO: 460695 - DNA, 122 bp, Homo sapiens
cgggccagggccagggccatggtccgccgcgggccgccgaataaccgctaccactaccgccgccgccgcctacatcccgtaaactttccccgcggccgctgggaattctgggaagctcgacg

SEQ ID NO: 460696 - DNA, 122 bp, Homo sapiens
caggaaagtgcatttgtaacacacgtttgtggaaatgtggtatgcgcgcgcactgggagccgcgtttctttgggacacttccctacgttcagcgaatacagggcatcactttccagtgaaat

SEQ ID NO: 460697 - DNA, 122 bp, Homo sapiens
taacactcacggcgaaggtctacagcttcactcctgaagccagggagaccacgaacccaccgggaggaacaaacaactgcagaaacgctggcttaagagctgtaacactcaccgcgaaggtc

SEQ ID NO: 460698 - DNA, 122 bp, Homo sapiens
ttcccgggcttcgaggacttcggggttcccttggccctcctgtccttagcaggctgggcccgcgcggcctccagcggctctactccccttgagacttcatcctggctcccagagtgccgggc

SEQ ID NO: 460699 - DNA, 122 bp, Homo sapiens
caaaggaatcttctctccagtcctgcctgtcacttactccggctcacgctgaagcgttcgcgtttacggttccaaaaccaagactgaaaggcagtcttcacatatttattgtttatacccta

SEQ ID NO: 460700 - DNA, 122 bp, Homo sapiens
attaaatccatttttaacccacagaccatacaaaaacaggtgctggctggatttggcccacgggccatggtttgacgatggctttaggttgtgttgttcttccagagagcgtctgtggtaat

SEQ ID NO: 460701 - DNA, 122 bp, Homo sapiens
tccatgttatggagatggcaacagtgccacctgctggtgggaggtgtggtggagcgatgccgagaggttcgcagatgcctccagggggcataggaaaacccaagaacctgaggttcagcgga

SEQ ID NO: 460702 - DNA, 122 bp, Homo sapiens
cttactgatatataagcacttgaaatcatttctaaggatttgtattaatttgctgtccttcgcatacattgtgactatttcccctcctcgagccagtttcctcctaactctttttgagagat

SEQ ID NO: 460703 - DNA, 122 bp, Homo sapiens
ccccggctttgctgctgggctcccgcagggcacagtgtggcctcttctgccagctgtgagcggcgctgagcagggcaggggctcgaaaccccgtccctcgcctgcggtgcggcccgcgggac

SEQ ID NO: 460704 - DNA, 122 bp, Homo sapiens
ccttcccttccgggtgtgaggggctggcccttctcttccaggttggggggctggcaaactcgaacctcgccggcgccctagccaaggcctcctccccgcgcctgccgcgggttccacgcaca

SEQ ID NO: 460705 - DNA, 122 bp, Homo sapiens
tacatggggcgcagatccctccctcaaacagagggtgctgtgtgtgaacctggagacttccgcagcagatgcagatgtctaaaggaaacattcaaagcacactgtgttttcccagtgctgtc

SEQ ID NO: 460706 - DNA, 122 bp, Homo sapiens
acagggtctcgccccgttctcaatggctttgggtgtagcataggaaggtcctgggtcttccgtggtctcggatccccaacctgcccgccgaatattcattcagttcacggtcagcgcgggcc

SEQ ID NO: 460707 - DNA, 122 bp, Homo sapiens
gacaatcacagaaacaagttgacctttatgtgttccttgagcccagtcgagaagggccctcgtgactgggcctcatgccaatcaacgcattacaaaaagagccagggtcggccgggcacggt

SEQ ID NO: 460708 - DNA, 122 bp, Homo sapiens
gcctttggcatttatgtttaaaacgacaccacctgctaagtaacaaacactcttcttaatcgcggtggcaaaaacgtatccgtcccgtgtgtgtttgtttttacccttccgctacactctta

SEQ ID NO: 460709 - DNA, 122 bp, Homo sapiens
accatcttgggctgctgctggaattttcgggcatttattttattttattttttgagcgagcgcatgctaagctgaaatccctttaacttttagggttacccccttgggcatttgcaacgacg

SEQ ID NO: 460710 - DNA, 122 bp, Homo sapiens
gctgccggggtgagccaggcggcggtgctgggcttcctgcaggagcacggcgggaaggtgcgcaactccgagctgctgagccgcttcaagccgctgctcgatgccggcgacccgcggggccg

SEQ ID NO: 460711 - DNA, 122 bp, Homo sapiens
ctcctctctattggccagtgctctgaacgctcacgcattcaaatgagagcgcgcgctgggcgcagccattcagcttcctacaccctgcggctgaaccctgagacgtcatccggcagtccaaa

SEQ ID NO: 460712 - DNA, 122 bp, Homo sapiens
ttggcgccaggatctttaaaacccggaagttcctgtggttcatccgcgaaccttgtcctccggtcctcgcatcagagcacttagcattttgcttccctagggcagctggcctgtcgctccgt

SEQ ID NO: 460713 - DNA, 122 bp, Homo sapiens
ccacaagcttggcgccaagaaggagggcgtgggcggccccgcagactaccacgctctgggcgctatggaggtcatctgcaatagtatggctaagacgctgcagacagccctgcagccccctg

SEQ ID NO: 460714 - DNA, 122 bp, Homo sapiens
gggtctatggggctgtcgggccggcagctcgcagggcagacgggagaagcgcctgcatcccgggatccgggcattcacgcccaggaactgctgttcgttagcacctttcttttaggtgacgg

SEQ ID NO: 460715 - DNA, 122 bp, Homo sapiens
gcagcagcggcgcttggaggaaaggaagccggttggagggcgcagcgcacccctgctgcgcggaggagggggctgagctgaactcagcagaagttacatgcacaaggttagtggcccccaca

SEQ ID NO: 460716 - DNA, 122 bp, Homo sapiens
caccgtccttctcctcctggctggtgtaaagttcctgccgaattggaggcaagtgggggacggacggacgcgcgggcgcgggacagacccacgtccagccagtggaggcccaagagccggcg

SEQ ID NO: 460717 - DNA, 122 bp, Homo sapiens
tacctagcacagtacattgcacatgagtactcaataaacattgattatactcaaatttctcgtttcatgtttctaaaactgatttcatgggtctaatgtcataactctaagcagcaatcaca

SEQ ID NO: 460718 - DNA, 122 bp, Homo sapiens
gagtttccttgactcaagatcatcccatgaaatgctggtgggtctgttaacctaggtgggcgtcagcactttgcccagctcgtccaccgtcgccctggcgtaggcgacatgcagcgagtgct

SEQ ID NO: 460719 - DNA, 122 bp, Homo sapiens
cagaaggacttttgtttacaggatgagagctgaaacaaaaaggcagagcctcacctggtgcgacctcaactggaaaagtgcatgagtgactcaaattttttaccacatcatgcatgtctatg

SEQ ID NO: 460720 - DNA, 122 bp, Homo sapiens
cgaggaggaagaatctacagccaattccaaggccagatttcattcaatttggtcttccttcggcagtaaccctaaactcaagtttcacatttctccttcgataacattaaggtcgctcggtc

SEQ ID NO: 460721 - DNA, 122 bp, Homo sapiens
tgagctctgcctcccccctcgacagttctttttgctttactctcttccaggtattggcatcgtcttctgtccaagcagatgtgcggcccagagtgccaaagtcattgcatcttacagctcat

SEQ ID NO: 460722 - DNA, 122 bp, Homo sapiens
aactgcagcatttcagacctggtgccagcctaatggctacatgccaagattactatttggcgacaagcagccagacaagcagctggttattgcagcgaatccgagcagtgtgcctgaggcca

SEQ ID NO: 460723 - DNA, 122 bp, Homo sapiens
cggcggtcttccagcaccacgaactccagtactggtctgcgttgtagggagctggaagcccgacccagcactcctcagccccctgtgcccctccctctgctctttccgcccctccctccgcc

SEQ ID NO: 460724 - DNA, 122 bp, Homo sapiens
cgacacaagtacaggatgggggagtccgtggcggcccctgctcagctggaggagcctgtgcggagaaagtctctgtcgaccacaccttggctggaagcacagagggaaccagcccgaggcag

SEQ ID NO: 460725 - DNA, 122 bp, Homo sapiens
gccccggctgatggcgctggattcctcgagccacacctgtcaaagcagggctgaacctaacggctgcccaggtctagtcccttctcaaacatgccacttccgtgtcctgaagcacaggtctg

SEQ ID NO: 460726 - DNA, 122 bp, Homo sapiens
ataatctggaaaggcaagtatatctctcatttacaaatgtatgaattgaggctgcagtgacgtttacaattcacataaggcattgagtttgtaagtaattgccagagttgggatttgaattt

SEQ ID NO: 460727 - DNA, 122 bp, Homo sapiens
cactcaggccagactcggcactcagccgcttctcctgcggcgggaagtggggtcaggcttcgacggagctcccgactcacaggctggccacctgggatgccccccacgtggcaggccttccc

SEQ ID NO: 460728 - DNA, 122 bp, Homo sapiens
accttggtgctctaaccagcactggagtcctgctgcccagagggtttgcagccccccagccgggcccaatagccccaccctgtgcctttcagtatgaatccaagagtcgcatgtcagcagag

SEQ ID NO: 460729 - DNA, 122 bp, Homo sapiens
cggctcaaggctgcagcatgagtgtggctcgcctaagctgtcccggtatttaaactatcccgggcgtgagtcactgcagagggcagtgttggccctgggaggggggactgtgggccacagtg

SEQ ID NO: 460730 - DNA, 122 bp, Homo sapiens
aggctatagtgatcttattagatcatacatacagagcaccactggtcagctggcgttgctcggggtgtccttaagaaaagctcaggtctagttgtcaagtgcaacccagattcagatacaga

SEQ ID NO: 460731 - DNA, 122 bp, Homo sapiens
ggggctgctctggcgtgccacctgtgcgctgtgtgctccaggcagagatggggctgggaacgctgcgaggcctctcccggccccaccctgcgagaggttaaatacctttctgcaggcaccgt

SEQ ID NO: 460732 - DNA, 122 bp, Homo sapiens
ttagttttctaattttctgtttcaatctgcctgtacttgcagggagactcatgtaccgttcgtttgctgctattaaacaaagatgaaatgattttcagcaaaacaaagttttaaaatataca

SEQ ID NO: 460733 - DNA, 122 bp, Homo sapiens
gaaaagaaggacgggggtggggagggaatcagggagtggggagaatggcgctccccttcacgcagctggtgtggctgggagttggcttggaagtttacacacttgagctctatcgattccga

SEQ ID NO: 460734 - DNA, 122 bp, Homo sapiens
aataccgaaaaagtattcggggatctctagggagctttgggcagcccaagggaacaatagcgcgttgggaaatttacagttttacctgaatgaaaggggcccaagtagggaacaggagtgag

SEQ ID NO: 460735 - DNA, 122 bp, Homo sapiens
tcaaatgaaaacactcttttttttttttttttctctgatgaagaaagaagatttgcttgacgatagtctgattgggtgtgtcagtggttagtcagtctgtacctcccatccctggaatgatc

SEQ ID NO: 460736 - DNA, 122 bp, Homo sapiens
aaatacaaaaaccagtcaggcgtgggggtgcgtgcctgcaatcccaggcactcggcaggccgaggcaggagaatcacgggagcccgaggcagggaggttgcagcgagccgagatcacggcag

SEQ ID NO: 460737 - DNA, 122 bp, Homo sapiens
cgcaccgtgtagcccagctccttggtccgcccctccagcagggcgtgcttctcgcggctgcggctcacacgctcgccgtcgcccacgctctctgcgtgcctcagcttctcgtgcgcaatctc

SEQ ID NO: 460738 - DNA, 122 bp, Homo sapiens
ttgcctcgaaaaacttgtggagattgcaatcagttatcctacacagaggctgtgtattgccgtcttctccatcccccacatttctctccatggtaccacttttatcctaattgctgggagtc

SEQ ID NO: 460739 - DNA, 122 bp, Homo sapiens
tcccggaagttgaccggggtgcggagctcctgggctgcagctcctggagtttccgaggttcgtgcgcgtctggtggcggcggcgtgatgttctcggcaggagcggagagtttgctccaccag

SEQ ID NO: 460740 - DNA, 122 bp, Homo sapiens
gcctctttcccgggccctgggtgcctggagcgagccaccgttcctgcagctgttttgtggcgtctgtcgccggcccccggtggagcgctgcagacccagtctctgcaaaactaactccctgg

SEQ ID NO: 460741 - DNA, 122 bp, Homo sapiens
aggtcacattggtggcttacatgtcccaagccaggctctagagtcctctgaagatgtgtacgttgagtggccactagatggcaacctgtggttctggacagggtgactcagcagcctgtttc

SEQ ID NO: 460742 - DNA, 122 bp, Homo sapiens
agggacagaaggagccagcgtctgagctgctcccgggccacacagcaagcaaggaagtcacgggtccttgtccctggccaagaggtcccagaggccacaggaaacgctgggcgcccgaagcc

SEQ ID NO: 460743 - DNA, 122 bp, Homo sapiens
aagaacacattaaacagcctgaagcccaagtgtgctcactcactcatcaaacagggcactcgactggttgagagatgacataagacaaaaacatactggcagaatagataggactggaggaa

SEQ ID NO: 460744 - DNA, 122 bp, Homo sapiens
ctggagaactatgggaacctggtctcagtgggtaaggatgggctcctcttgaaaatagaacgtacctattggatgaaaacctttgtttctaaattaagtgctttgtttgggctttcggttct

SEQ ID NO: 460745 - DNA, 122 bp, Homo sapiens
atgtagtgtttgcggttgaagagaaaccttggccagagaatgactaaaatctattggcagcgtctttaaaagaatcatgactgggcctacaccagcgaatacgcaagtgtgctttttttctt

SEQ ID NO: 460746 - DNA, 122 bp, Homo sapiens
aatttgctgcctggtaggcatctgcacctgtccagccaaatgaggctggcatcacactaacgagtttcactttcaaattcacaaccacaaacctcacgtggagtcttcacgccccttggcaa

SEQ ID NO: 460747 - DNA, 122 bp, Homo sapiens
aacatcttgcctaataacagtaccagtcacagcgggggtggtgggcggggggagggtgggcgcgacactgaggccagcattgctgtcaccatggggtgacagccctcttatagccacacccc

SEQ ID NO: 460748 - DNA, 122 bp, Homo sapiens
ccccagatctctgacccgcgttaccggcactcacctgccgctgcccccgaccaactcaagcgccactgcctctacctcggccgccagtggccaccaagcgccaccacctcccccatgacaac

SEQ ID NO: 460749 - DNA, 122 bp, Homo sapiens
gtatcagtatcaagacttcctcagtgccctcggaaaagccagtcactcctatgcgtgttccgggctgggaggaagtgatggctgaccacagaggaaagcacgtactagacggaaatggaaca

SEQ ID NO: 460750 - DNA, 122 bp, Homo sapiens
ggagttcttctgggccacggccaactgcactgtgcaatgcctgtgcgaggagggcggggacgtctactgcttcaacaagacctgcggcagcggggaggtgtgcgccgtggaggacggctacc

SEQ ID NO: 460751 - DNA, 122 bp, Homo sapiens
ttctggagctgggagaggccactgtgggctggattgttggggacagcttcagggagagcccgattcaaggcaatagagaactttggctgcaggccgttgcctagaatagggcagctgacaca

SEQ ID NO: 460752 - DNA, 122 bp, Homo sapiens
agctggtagggctgtgggtgcttcactatggcgacggtgggggctccgcggcacttctgccgctgcgcctgcttctgcaccgataacttgtacgtggcgcgctatgggctgcacgtgcgctt

SEQ ID NO: 460753 - DNA, 122 bp, Homo sapiens
gaatttagctccctataaataaactgtacgtttgagaagagccggtggagcggacgccgccgcgccgcgccaagccagcagagctcaaagccgggcaggagctctggggcgggcacgccata

SEQ ID NO: 460754 - DNA, 122 bp, Homo sapiens
cgcacacccctttctctgcgtctggtggaggtgcacagaggcttttgagtcaggcccaagcgcagccaggtgacctccccgcggcctttcaagcctgagctcggtggacagctccctctccc

SEQ ID NO: 460755 - DNA, 122 bp, Homo sapiens
gccaaggagagattgggcaaccgtcacaaaccagagaagccgaggagagctttcagccaacgccatgtggggtcctgagcaggacccaccggaagttggtgcagctgcctaaagaccgtcct

SEQ ID NO: 460756 - DNA, 122 bp, Homo sapiens
cagcccctcctgagggggcttgatgggcgtccacaagtgggcagcttttccgcgcttccccgtgtctgactgtgctgagggcctcctgaagtgcaattggttagtcacggtttagtgttctt

SEQ ID NO: 460757 - DNA, 122 bp, Homo sapiens
gaaggagtctttgaaagatggaaatacgaaagcgcccttggaaaataagaattaacttgacgaactgtgtgcaagggagagtttggcttgctgttggttgcagagttcactgaacgacaacg

SEQ ID NO: 460758 - DNA, 122 bp, Homo sapiens
ctggctcctgctacattacctgtattctttggctttgtgggggtaccagagatgaccttgcgctatgagaggatttgagcttggcgtttataatcatggtgggcgagagctacaaagttagg

SEQ ID NO: 460759 - DNA, 122 bp, Homo sapiens
acgactcgcggtagctcaggcagagcgggttcctgcagcggcgcgaccctctgacgtctccgcttctaattggtcaagagctgcgactgcagttctgaagcctaactggttgcccgtgccgc

SEQ ID NO: 460760 - DNA, 122 bp, Homo sapiens
ggtggatgcaggaggagaagctcaaccctatcctcacttagcctttgccattggtgaggccggagggaaagcagcgttgacagtgtcagtgtgtgtgagtgtgtgtgtgtgcacgcacttgc

SEQ ID NO: 460761 - DNA, 122 bp, Homo sapiens
gataagcaagctaagccctgggtgaggaagtgactttctcaaagtaacatagcaaatcaacgaccaagtcaagatggtgggagtccccaacaagctgcctcctacacatcttcaggtctcga

SEQ ID NO: 460762 - DNA, 122 bp, Homo sapiens
attttttcaactaatcaagaaaaagggaagtctgaaatgcaagtagaacacccaccctttcgaacgttttatcttccgttccaccgtcttctgactcgggagagagctctttagccatttgt

SEQ ID NO: 460763 - DNA, 122 bp, Homo sapiens
atgagagcgaaactccgtctcaaaaaaaaaaaaaaaaagtttccgagcaattcaccttttcgcacattggggcagggtatgccatttcctgggaggcacagtagtttgaggttgggaatagg

SEQ ID NO: 460764 - DNA, 122 bp, Homo sapiens
ccaaaaatatttactctctgtccctttacagaaaacgtttgctgacctttatgaggcagtcgatcttcctcctactggcttttcacatgttgctgtgtgtctgtgtgaggtcatttattgag

SEQ ID NO: 460765 - DNA, 122 bp, Homo sapiens
cattcaagcgcccaacacacatgcacgtccacaaaactggccttccacccggccacggctcgaagcatttccgaagactgaaatcacacagagggtgctctctactgcagaagaatcacacc

SEQ ID NO: 460766 - DNA, 122 bp, Homo sapiens
tctgagaaatgcaggctgggcatcaaggaagaagctggaactgggctgggtgaggaacagcgaggaggagcttctcatggggatccctatggaattgtcacaagcttaggctggcctatgtg

SEQ ID NO: 460767 - DNA, 122 bp, Homo sapiens
ctcggccctgccccggcctttctttcaaactcctgagcgcagcgcggccctcggcgcccgcggccggcgccccactgtctcccagccccgaccccagggctccgcgacccccaggagctggc

SEQ ID NO: 460768 - DNA, 122 bp, Homo sapiens
cggctgggctgacctggagcctggagccccggggccgagggagctggcctgccagcggggcggaggaaagctagtgccagccctaccaggttccgcccccgcgcctgcccccctccttttta

SEQ ID NO: 460769 - DNA, 122 bp, Homo sapiens
ccctcacagcctgcacagcacacacggtgcccgcacagcacacacagcacacacggtgcccgcacagcccacacagcacacacggtgcccgcacagcccacacggtgccctcacagcccgca

SEQ ID NO: 460770 - DNA, 122 bp, Homo sapiens
atagaaaaggaatcacctcagcctggtgatttcaatgcatttattcccccagcaaatgtgcgctgagtgcctctccatggaagcctgaggggaacccagcagggcgcagagcaagcaacatc

SEQ ID NO: 460771 - DNA, 122 bp, Homo sapiens
gccaccgctcggaccacgtctggcccaagccgctacgctcggcggcgggcccggcaccagcgttacctgcccaggaagggcatggggccgtccgccgccaccaacaacccgaaaatctgcac

SEQ ID NO: 460772 - DNA, 122 bp, Homo sapiens
gatctctaaaactgtgctcagattcacaaagtgaaagtgcaaaaccccgtgttagctcatcgctgggctcaactgcttagaaggccaacctctgcaggggaggccacagggggagggatccc

SEQ ID NO: 460773 - DNA, 122 bp, Homo sapiens
caaggcctttcttgtctcatcagtctttccgggtcctgggctgaggcagacaggatggctcggtgagcttgtgacaacattccaggcctgcagctcggatggcagctgtccatggcaggcca

SEQ ID NO: 460774 - DNA, 122 bp, Homo sapiens
gaaaaccacacagctgggggctgtcaggattggaccagggtcaggccggccaggcgatggcgggaaaagcaggcccactctgcagacctcaatgtctcaggtgcactgcagggcaaccccgc

SEQ ID NO: 460775 - DNA, 122 bp, Homo sapiens
cggaacccaaggcggagcggagctggggtggggtcagagtaggggccaaactccgagacccgaagctgcaccacaggaaggagccccggcgactcccgcccggctcctacggaaacgccggc

SEQ ID NO: 460776 - DNA, 122 bp, Homo sapiens
cctgctcggtgatacctcttcctgccctggacagagagttgggtcatgccaggctgccagcgtggaaaaccggccacgtgcaggtctggggctgggcacacacagggtcacacccaggaagg

SEQ ID NO: 460777 - DNA, 122 bp, Homo sapiens
atctatctagagtcgcacagggtccagggccgctgcagttgactcagttgttcccatcctcgttttatttgacaaagtacttcatttggccactctggaagaatttattttcttgatatcaa

SEQ ID NO: 460778 - DNA, 122 bp, Homo sapiens
agtttccgcggcggtccggtgcggtcagtacctgtctaaaatcaatattgccgaggcctccgcagcagtcaggccctgccaccgagctgttcgttacctcggctcccgggttcccagatctc

SEQ ID NO: 460779 - DNA, 122 bp, Homo sapiens
aaagagaaactttttattagaaagttttcctggactggtgactgaaggctgaaagggcatcgtgccaacggtggtttcagctgtccctgttcctgtgaaccaaatagcaaaccccaaactct

SEQ ID NO: 460780 - DNA, 122 bp, Homo sapiens
ttgttattcctgtcacaacttagaagttcgagtgctcacatggtaagctttgatttccatcgagaggaaaggctttatgttttataaaaaatatatactaaagtaatctacacgaagcttag

SEQ ID NO: 460781 - DNA, 122 bp, Homo sapiens
tgagaaccgctcctgcagaagcagagcgcgcggtgacggtgctgcggcaccagggacacacgcccctccaacttcccttccctccactcccggtgcagaggaaggctcacccgagaacttgc

SEQ ID NO: 460782 - DNA, 122 bp, Homo sapiens
aaatgtcctagcttacagtaaaaactcagttatgcttctttccacatgataagctgaaatcgtagtatcaaagtttccaaaaaaattcaccattaaattaattattggggcaaaaacatcaa

SEQ ID NO: 460783 - DNA, 122 bp, Homo sapiens
ccaaaaaggagacctcaatgagttcattaaatgaccttctcaggcttagaagcagcaatccgtaattatgaaaacagtaatgtcttgtagaagtataatgctgtacagtttaccattcaaat

SEQ ID NO: 460784 - DNA, 122 bp, Homo sapiens
acctctaatataaaaggcatttatatccaaaagttcccattcatctcccgctctgggaaccgggagcgccccctgtccaatcagctttcaaatcccctgcgtcagcgagtgggcggggctca

SEQ ID NO: 460785 - DNA, 122 bp, Homo sapiens
gacccggagggtttgcctttgaccccgcctgtgaccttaagaaaacccctttctaccctgcgcctgtcccacagctggaagtgataattttaagaatgaattaagcactcggtgtgtgacac

SEQ ID NO: 460786 - DNA, 122 bp, Homo sapiens
tgggacagcacctcagctgccccaccagagaactctctcaggattaccatgacccaagagcgccaagccctggcatggctcttctctacacttaaggcagaacggccttgaataaggtctct

SEQ ID NO: 460787 - DNA, 122 bp, Homo sapiens
gtttaagccatctggtctgtggtattctgtttggcagccctcacaaactaatgtagtatccggtaaatatttgctgaagttgtttgtttccttttctcttacagactgaattggaaatggct

SEQ ID NO: 460788 - DNA, 122 bp, Homo sapiens
tcatatgagttaggaaacatacaactgggtttctgaacttcttttaatacctaaccctttcgaagtcaccagccagtaaaaaccactgcaaagaagggagaagaagctgcagagaaaatccc

SEQ ID NO: 460789 - DNA, 122 bp, Homo sapiens
gggcactgtctcacagaggatcagggtgaggcacagctccctgaccctctctggtgtctccgggttaaggcggcagctgtctctgccctaggttggcagtgcctcagtgactggcaggggct

SEQ ID NO: 460790 - DNA, 122 bp, Homo sapiens
gtcgggcgctgagcgacgcggcggtgatggcaggccaggggcagcaccattcatgggcggcggcggcggcggcgctgcgacccgcggggctgccacccgtgcccctaccacccccgcccctg

SEQ ID NO: 460791 - DNA, 122 bp, Homo sapiens
ctgaatacaggcggagggcaggaggctctgggacgcaaagccctatcaactcggcggcttcgttctgttcctgtacacgctccagtaagctgacaataacaatacccacagacactaccgcg

SEQ ID NO: 460792 - DNA, 122 bp, Homo sapiens
aataaaatgcactgaggagacagatttttgagagttaaaaggaccctctcaaaaaccgaccgcggtcctccactgggtagggggcgctccaagacagggactcttctagcctgttgcctctc

SEQ ID NO: 460793 - DNA, 122 bp, Homo sapiens
caagaacgagtgagtcctgaggcatttggaacccttgaatgggacgcacaaagcccaaaacgcaacaatgtagattgacaagagtcgtcgggcaaactcgggggagggagggaaggatgtgc

SEQ ID NO: 460794 - DNA, 122 bp, Homo sapiens
gagatgttcgtttatttccggacctagagatgaggcgctggggcgcttgggtgtttggggcgggtccgaggccggaagtgcgtgggctgccgggctggcccagcttagggttttcaggaaat

SEQ ID NO: 460795 - DNA, 122 bp, Homo sapiens
tgtgaaggaccctgcatagatttctaggcactggagcgtcctctggaacgccctgtgagacggaaggtggcacgcacctgctccttgaggctgttcaccttctccttctccttctctagtga

SEQ ID NO: 460796 - DNA, 122 bp, Homo sapiens
ggagctagcacaagagctaagaaataacctccatccctacccctcagcacacaacccctacggtaacagcacactgagccctggctcccaagggctgcctcctgacagctccgtcatggcac

SEQ ID NO: 460797 - DNA, 122 bp, Homo sapiens
caggcctggaggcctagggggataatgttgctttgagggccaggcccagggttcctgtgccgtgtgtagtctagggacttggtgccctgtgtcccatccactccaactgtggctaaaagggg

SEQ ID NO: 460798 - DNA, 122 bp, Homo sapiens
tttctcttctgcggtggccctggcctggtgctaggactgcgcgcctcccctcagtacccgcggacaccctgggcttccctgggcccagcatctgcctggggcctcgccctgggctccccctc

SEQ ID NO: 460799 - DNA, 122 bp, Homo sapiens
ccgtatacttcctgttccctcactgcctccctcctattttattgtaagatgggagtctggcgggtgatgaaaggcagcaaccaaagtgacttgttttagaagaaaattgggttcatttctgc

SEQ ID NO: 460800 - DNA, 122 bp, Homo sapiens
agggcttcaacaggctgatttgtttaaaaaaataatttgtagacatttcgggtcatgtgacggggaaatttttgtttaactttgattacatttgggtttgggtacgtcatagagggtaattc

SEQ ID NO: 460801 - DNA, 122 bp, Homo sapiens
gtgactatgtgacatttgacgggtaactgcatctcatctgtaaaatgcgtcttgcaggatcgttctggcttccgtacaatcctgcagagagcagcaaagcgcgcacgcagcctccgcctcat

SEQ ID NO: 460802 - DNA, 122 bp, Homo sapiens
ctctgtgctgcacttcacaagcctgggccctgcttctcaaaaggagcccgcatgggagaccggggcccgaccagcagagggtgtgggcagggccagggaccaccttgtgtccagctcagggc

SEQ ID NO: 460803 - DNA, 122 bp, Homo sapiens
acaacccaaacagcttgcgactggggacaaaccatttcaccagggcggtggggagccagccggccggccggccggccgacccggggtgcgtgtgcccagaagctgtgcgggctcagtgtgta

SEQ ID NO: 460804 - DNA, 122 bp, Homo sapiens
aactgtaagggtgtgtgacttaaccccggcctggcacggccttaggtcctgattataactcggcgtcttattgccgcagagtctgtcagtctcgtgatctccactttaacactaatgttggt

SEQ ID NO: 460805 - DNA, 122 bp, Homo sapiens
catgtggtggcgcagcgcgtgcttggtcttcatgccttcaaggacacagcgagtcagaggcggccacacccccacgcagcccacctgggggcccatgcccgagaccctggggcaggcacagg

SEQ ID NO: 460806 - DNA, 122 bp, Homo sapiens
cttaaattccactcccattccaacacccaagaggctagatctgtctcctctacccacacgcgggggcatgtctagatccccgtgatgctgaaaaagatgtctcatttgcacagacatcagaa

SEQ ID NO: 460807 - DNA, 122 bp, Homo sapiens
gagcgtggaaaggcagggggttcgagtccgaagtaagtggaggtcctgttgggaaggatgcggtgcttcacaggtggtcttacttgagaccctgttccatccagctgcaggcagaccctgcc

SEQ ID NO: 460808 - DNA, 122 bp, Homo sapiens
tggggtgggcttgggaacagctctcccctagagaggccgttgggggtgaggaagcccagccgctcttaccttgagcctttgggtctaggatctgcaaaagtttagaaaaaaaatggaactca

SEQ ID NO: 460809 - DNA, 122 bp, Homo sapiens
tgtcctgtggctttctgttttgccatggaaataccttcaaggacaagaaggcccttgtcacgcctaactcgaagacaacttgctcttggtacctctcacccattttctttttgtgaaaacag

SEQ ID NO: 460810 - DNA, 122 bp, Homo sapiens
cagctccacaccgtacacctgcctgcctggacttccaaatcagaccttaaggaccagggacgggacttgtttttgcagtcagatttgctcactgtcttcctgacctccctaagtacagtagt

SEQ ID NO: 460811 - DNA, 122 bp, Homo sapiens
ctaccagcccgtgtgccagccagcagaatgggaagccgggagacgtggatctgacacccgcgtgatgagccaagcccctcggctgcctcgaacaagagctgagggataagccacagcctttc

SEQ ID NO: 460812 - DNA, 122 bp, Homo sapiens
gtaaccccgggcatctttctcgtcactgaccctggaggagggaacagatgttctatctcacgaagcatggctatcagggagaagccaaacaagaaggggacgttcccgccttcctcggcaca

SEQ ID NO: 460813 - DNA, 122 bp, Homo sapiens
ccctgcaacaccgactgggccatggcgagctggcagagcacttctacctcaaggccctgtcgctctgcaactcgccgctggagtttgacgaggagaccctctactacgtgaaggtgtacctg

SEQ ID NO: 460814 - DNA, 122 bp, Homo sapiens
ccctgcagatttaaagaagtaccggcgctatgaagtaataatgaccgcctataacatcatcggcgagagcccagccagcgcgcccgtggaggtctttgtcggcgaggctggtaagctccgtg

SEQ ID NO: 460815 - DNA, 122 bp, Homo sapiens
aactttgtttccagtgtgaaccaaatcacctttctcaccttgccccaagcaagagtaaaccgcatagatttcttcagagagaagataggaaaagtggcatccaagggagcgtcctggttgct

SEQ ID NO: 460816 - DNA, 122 bp, Homo sapiens
ctcccgcaggccatcaccatcgaggctgagccaagagctgatggcagccgccggaccacccgctatgacatcgacatgaccaagtgcatctactgcggcttctgccaggaggcctgtcccgt

SEQ ID NO: 460817 - DNA, 122 bp, Homo sapiens
tgcggagcagcttttggaatggattcgtcgcacgatcccctggctggagaaccggactcccgagaagaccatgcaagccatgcagaagaagctggaggacttccgggattaccgccggaagc

SEQ ID NO: 460818 - DNA, 122 bp, Homo sapiens
cggagacgcgccaagcaaagccgttacacggactgtgcacgcgcctccggtgtccctgcgcgtgacacaaatttggccccgagggagctccgtgtgctcagcctcagagccgtaggcgagag

SEQ ID NO: 460819 - DNA, 122 bp, Homo sapiens
tttgatcgttaggaagaacactaatgtttattgagcgccgggctgggtacttcattctcacgttctttttcagccctcagagcattcttgtggtagggcaagtgagtggcagatgcattgag

SEQ ID NO: 460820 - DNA, 122 bp, Homo sapiens
ggccagagtcatccagcccagatgactcactctcacctgccctctcccgctcccctgacccgttgttttgaggcttttatgtgtataactcatagaactgcacagcttgcctcgaagatgca

SEQ ID NO: 460821 - DNA, 122 bp, Homo sapiens
tcttcgctttcctctgcatctctctccatagctggcgtttgatcacctcttagattcctccgcattcctctccatgcagtggaggaacgggcaagctggctccattccacccctttggggac

SEQ ID NO: 460822 - DNA, 122 bp, Homo sapiens
gagaatggggacagggacagagcaagttctcagaggacaccagcacaggtggctaagatccgagctgcttcctgcagcgtcaccacaccggcgacccatgctgaggcttcctcaatgaaaat

SEQ ID NO: 460823 - DNA, 122 bp, Homo sapiens
tactcaggaggctgagacaggagaatcactggaacccaggaagcagaagttgctatgaaccgagatcgcaccactgcactacagtttggacaacagagcgaaactccatctcaaaacaaaaa

SEQ ID NO: 460824 - DNA, 122 bp, Homo sapiens
caccaagggacgctgggttttgaagagttctgtgccttctacaagatgatgtccacccgccgggacctctacctgctcatgctgacctacagcaaccacaaggaccacctggatgccgccag

SEQ ID NO: 460825 - DNA, 122 bp, Homo sapiens
aaggggtggaaaaatactacgaggctctaaaacaaagatgcgcaaagctgcgctccaaaccgagagcaggtgttcctggtagacacccccatgccgtcagcatcccctccgcactgcagcat

SEQ ID NO: 460826 - DNA, 122 bp, Homo sapiens
ctgcagcaggaaggcggctctgctgagccaggaagtgccgggccgaggcaggagaacacgcgtgactgtcacaagacggaggaacggctgaggccagtcgctcatggctgtgggtggaatgc

SEQ ID NO: 460827 - DNA, 122 bp, Homo sapiens
actttagtttcctcatttataaaactatatcaaacctaaacctatctcacaaggttgtatcgaattaaattatatatacctggcacacaggtattgagaggccagctttcttctttccccaa

SEQ ID NO: 460828 - DNA, 122 bp, Homo sapiens
cctccgcatccgctggcccgggtgctaagccgcttattgcctggggccggcagggctggccggctgctccggccggctgctccgagtgcagggcccgccaagcccacgcccacccggaactc

SEQ ID NO: 460829 - DNA, 122 bp, Homo sapiens
tggctccgctctggatccggtcaccagtgctgcaatgtcgtgtctgagccttgtcaaccacgccctccccctcctctgggtaactttccagtcctttagcatccacagccccactcccgctg

SEQ ID NO: 460830 - DNA, 122 bp, Homo sapiens
tctctctctgtgtgtgtgtgtttgtgtgtgtgtgtgtgtagtgcggagcttgttaacagacgtgcatgcctggcctgtggactgtgcagtaagtgttgaaaaaggcactcttccctgacttg

SEQ ID NO: 460831 - DNA, 122 bp, Homo sapiens
agtcaactctaccttccactcgttgccggctttcgccgagaaccccgagaaacggactaccggagtccctatcttgcagcccgatccccgctacccgtcggagtgccccgctgaccaggctg

SEQ ID NO: 460832 - DNA, 122 bp, Homo sapiens
ccgcagaggggcggccccagagggcggcctcaccttcccgcgagactacgactcccatcccggccctggaggccctgcagggccaggccaggccccccaggctcccagcccgatgcccccca

SEQ ID NO: 460833 - DNA, 122 bp, Homo sapiens
ccttttaggggggattcacggacacctctagcgccctgtagggttgccatggtgacggagcgcttaagggactggcaacggggattcccagagaagggtaaagggatcactctcccgtgtgt

SEQ ID NO: 460834 - DNA, 122 bp, Homo sapiens
caaggaacaattaccttgcctaaggctacatggtgacatgatgtgtgagtgggaaaactgcgtgttaatttccagtttgtgatattggcacataattctacagttcctctgggaccaagtga

SEQ ID NO: 460835 - DNA, 122 bp, Homo sapiens
cgccgtcatcgcctgacatttttttctttctcggcgtgctgcagggtgggaagcatttctcgcgcaaagttgccggatttctccagtccccgggtgtgagacggtggctgttcctccgggga

SEQ ID NO: 460836 - DNA, 122 bp, Homo sapiens
ggaccccaaatggctgttcctcatcactcagtacccagtttgctgacgtctacaatattccgcctctcatcatcaaagaagatcatctgggagaaaggaattccagtcttctgctgcaacct

SEQ ID NO: 460837 - DNA, 122 bp, Homo sapiens
tgtgccacttgcatagcacgcaaagaactggttatgactaggtgtgccgtttgcataacacgggaagaggctggtcgccccaccctcatcttttattatgcagatgggttatctacctagtt

SEQ ID NO: 460838 - DNA, 122 bp, Homo sapiens
cagaacccgcgcctgggatccctgcctgccgagttggcgggggtggggtggtggagagggcgccgtcgcttatttcattcattcagaagccgctgcagaggctgggggtggcgaggctgtgg

SEQ ID NO: 460839 - DNA, 122 bp, Homo sapiens
ctcccggagaagggcggagggatcctcgtgggaggtgcgctgacaccaccgagacgtggccgggcaaggccggattgagggagagagaggccgtccagggccagggacaacgctacttccgg

SEQ ID NO: 460840 - DNA, 122 bp, Homo sapiens
cggcggagcgcgggcgccggcagcagcatctcgggttagaagcggggctgttcgctggatcgtccgcccgggcgcggcgagaatgcacaaccccgtccagagcgcaccacctcgatcctcgg

SEQ ID NO: 460841 - DNA, 122 bp, Homo sapiens
ccccgcgcttgcacagcctggggtgcgggaggcagtttgcacgggaaggctctgtgttcccgggccggcttcgccccagggccccgctcagtggccttcgcctggggattgatgtttgctgc

SEQ ID NO: 460842 - DNA, 122 bp, Homo sapiens
ctaaacctcatggtgaaacataatctccaatattggaggtggggccgggtgggaggtgatcggatcacagaggcagatccctcgtggcttagtgctgtcctcacaatagtgggagagttctc

SEQ ID NO: 460843 - DNA, 122 bp, Homo sapiens
ccatccttcagtccttcccaaaaaaggcaagctctttcacacttttttagtggtacatcacgacaccttcctctgtgtgatcttgtactctgcggtcttccttgcccccataatcaatgcta

SEQ ID NO: 460844 - DNA, 122 bp, Homo sapiens
ttcctgagaataatttttggcatttatagtgtgatttataaaaaggtagctggctgggtgcggtggctcatgcctataatccactcaggccaagtctgatggcttgagcccaggaatttgag

SEQ ID NO: 460845 - DNA, 122 bp, Homo sapiens
acctcatgatctgcccgcctcagcctcccaaagtgctgggattacaggagtgagccatcgcgcccagccctgttgagggttttaaaaatgactataattatagtaagaaaggagtagtcttc

SEQ ID NO: 460846 - DNA, 122 bp, Homo sapiens
caaagtccagcctagtctggactgcttccccatcagccttcccaaggttctatcctgttccgagcaacttttctaattataaacatcacagaacatcctggatcaaagcgtgtgtcttgctc

SEQ ID NO: 460847 - DNA, 122 bp, Homo sapiens
ctttgtatttttgcagttcctccctataccagcttccttacagctgttctgatttcctgtcgtaagattttttcttttcattttctccagggagggtaaatcaatataacctcttctctaga

SEQ ID NO: 460848 - DNA, 122 bp, Homo sapiens
ccctagccctgcaccctgcgctcagcgcttccaccggtcttattttattgctgttttgtccgattaggtatcgcagcgtcctccacccggtgttgttctcaaatgcgaaggaacccagggct

SEQ ID NO: 460849 - DNA, 122 bp, Homo sapiens
gaccgcagccgccaaatccgcggggccggggaacgaggagactttcctttccgcgttagccggggccacccccgccagagggaaagcaccaaaggaaaaaccaggacagggactctgggggc

SEQ ID NO: 460850 - DNA, 122 bp, Homo sapiens
ctgctcatctcagagcgagtcacggttaaagaaccaagcaaagtcaccactctgtttcaacgtcacagctcagctgcccatcggcctttgtttgttgcgcattttaaacgacgttgacagaa

SEQ ID NO: 460851 - DNA, 122 bp, Homo sapiens
acacagaatgctttttaaaaagaattcaaaaggaaaattataaattttggccatggggtacgtaagttgaatatttatgttgagtaaatagctaacaaatttatcaaaacattcaagggcac

SEQ ID NO: 460852 - DNA, 122 bp, Homo sapiens
gatttgtttcttgccgtcaagaccctggttaagtgacggccaggacggtggaaggaaggccgggggtcctgtcccccagacggcactccagacatcaggctctcggatcacaattgattcaa

SEQ ID NO: 460853 - DNA, 122 bp, Homo sapiens
taaataataaatacataaagtatttatgtatttacttacattacaaagttcccccaggggcgggaactttgccttgttcttgcggcatccccagtgccttggacagctccgggcccagagtc

SEQ ID NO: 460854 - DNA, 122 bp, Homo sapiens
acctgtcccaatagctctcggaaggaaccttcccagacctgccacccaagccgcgtcctgcgagtctcctcactaaggcctggctctgaggcgctgccgcccagcccagcccagcccagccc

SEQ ID NO: 460855 - DNA, 122 bp, Homo sapiens
ccccgcagtgatccacgaggctctggttagcccacccgcctgctgccgtgcacagagccgcggggctctgacccttgtaaataacagacaagtaaatttcttgtttgcttcggggcaaatgt

SEQ ID NO: 460856 - DNA, 122 bp, Homo sapiens
gtcccggagcgagctccgtgcgttcaggaactgaaattactatgccaagagcagaggcggcgcgcagcagtcgggcgtagaccgagggggctgcccccaccgcggggctgcagacgccgccg

SEQ ID NO: 460857 - DNA, 122 bp, Homo sapiens
cagcctgcaggcctgatggcctcgcaccagcgctggcacatggcttgagaaactgcattccgaggcctccagccccttcccggagaaagaacccaatactcacctaggatcacggaactctg

SEQ ID NO: 460858 - DNA, 122 bp, Homo sapiens
cataacttgctgcagcctggaactcctcctgggctcaagcgatcctaccgtctcaccttccggaatagctgagactaagggcaggcaccaccacgcttggctaatttttttttttttttttt

SEQ ID NO: 460859 - DNA, 122 bp, Homo sapiens
ccgcaatggtcagcactgctagagtgaacttcaaaactgagctgacctcggggtaaggtacgagtggagccttgccaattccaattagatacctttcctatatgcccctatttccccctgta

SEQ ID NO: 460860 - DNA, 122 bp, Homo sapiens
ctgtgagctatcagcagccaacactcagcagctggaacaatgagcatcatgatcctgaagcgggaatctgggctacacaccacagcatcactactcgggctgtgagacttcagggatgaacc

SEQ ID NO: 460861 - DNA, 122 bp, Homo sapiens
gggatgaggtgggaggcgctagaaaccacttagctacagccaaccgcccaatgcagcactcgctcgctccccccgccagcggaagcgtccgcgaagcacaatgcagcactgagccgcggtgg

SEQ ID NO: 460862 - DNA, 122 bp, Homo sapiens
tcactgaagcctcaaccttcacctgcttaatttctgaacgttttgtagagacaggagtctcgctgtgttgcccaggcttctcttgcacttttgagctcaagtggccaccctcctgcctcggc

SEQ ID NO: 460863 - DNA, 122 bp, Homo sapiens
tctcctcctttatggccccgcccagcgggtatcccccgcccccgctggccgatcggcgatcgatcgcaatgtctgcgctctccgcgttcttccagcgctgtctttttagtaccacatgcgca

SEQ ID NO: 460864 - DNA, 122 bp, Homo sapiens
gaggccgaagtcaggtcccgcatttagcagccacgcctggaaaggcctagcttggcctggcggcagcggctctcgccctacatgccatgcgcttgggcagcccggggactttccagcgtaga

SEQ ID NO: 460865 - DNA, 122 bp, Homo sapiens
gttcctcctctgcttcccttccctagtctttcctccggcagggagctgggcaggggtccccgggtgtctccctgagtcccgactgcactgactgggtccatcagagggctgcttcgttctcc

SEQ ID NO: 460866 - DNA, 122 bp, Homo sapiens
acagtgaaacttggtgttcccggctagtcattcaaatcgaagctgtcgcagacctctgaacgttagtaacgcaacatgtgtttctccgcgactacagacctcgggagaggagcggtgggcaa

SEQ ID NO: 460867 - DNA, 122 bp, Homo sapiens
tttgaacaagccctgggcatgtttggcgggaagttggcttagctcggctacctgtggccccgcagttttgtagtccccgccttgtttctccccagaggcctctcaatcctccctccatgatc

SEQ ID NO: 460868 - DNA, 122 bp, Homo sapiens
atggaggagggaatgaatgaatgtccatctgtgctcaacagcagatagtgcaagatgggacgtgaagggccagaggaaactggaaggtatgcaaaagccatttccaacaaaacctgtagttt

SEQ ID NO: 460869 - DNA, 122 bp, Homo sapiens
aaagctgcagttctacctccatcttcaacagaggcagatgcccaagtcttgccattgctacgtggtgtcctgaccgccaaggaggtagagctcacaatcacataggaacatgtatttccaat

SEQ ID NO: 460870 - DNA, 122 bp, Homo sapiens
ttagttttttgtctctgtgacctcgatggatgatttgatggtgactgcggtcaggggctccggagcctctgggtctgcagctgtcttctcagccaggcactctctcgtactgacgggggtcc

SEQ ID NO: 460871 - DNA, 122 bp, Homo sapiens
caaccaccaaacataatccaactgctgcagccaataagcccaagagtgtccaaactgaaacgaagtgctttcctctttcattcagttgggcttcttcaaattgcagatggaaattcctttag

SEQ ID NO: 460872 - DNA, 122 bp, Homo sapiens
gatcaacagcaatggaatgaggagtgaggctttttattagaaaaattacaaaatgagtcccggaaggtcagtaagtgcaacatgaaaaaaatctatgaaaagattatttgacctaattattc

SEQ ID NO: 460873 - DNA, 122 bp, Homo sapiens
gtggatgctggtccagagagatgctggtccagatgctggtccagatacttcctatagtcccggctataggaagctctaggatgaagtcccagagatgggagcttatgtgtggttggaagaca

SEQ ID NO: 460874 - DNA, 122 bp, Homo sapiens
tgggaccccaagatggcggcggcgctgaggcggctgcgggcgctgggccggcggcggcggcggccactttcactcactgagaggagcggagcagggacacggggagccatggcgggggggag

SEQ ID NO: 460875 - DNA, 122 bp, Homo sapiens
gtttcgcgggttattaggggccaatgctggtaccgcccctttccaggagggctgccttggcgactaccgcttagaccatgtcgtgcctttgggttgggttgccatagtgacacgcaaagcgt

SEQ ID NO: 460876 - DNA, 122 bp, Homo sapiens
cgcgggcggcggcctacctggaggggccagtcgtggcggcacccttccagcctgttgggacggcgcgtggtcccccagcgacgccacgcctcctccggcgttcgattggtcatcgtgcccgg

SEQ ID NO: 460877 - DNA, 122 bp, Homo sapiens
ggaggaggaggaggtggaggtcggctttccatttccagatgtgactgcccagctgctgctcgccgctgctggattccaatttcctccccttctggcgatggattggtgatgacaccgagtct

SEQ ID NO: 460878 - DNA, 122 bp, Homo sapiens
ctgatccttttatcctcttgatatgaaagccctccaggaacatccttcagtccacaatgtcgaggatacactctacaggatgaattccaagccctttagtgcagctccacaatcgcttacct

SEQ ID NO: 460879 - DNA, 122 bp, Homo sapiens
gttttcctgttgtcctagactttctggctccaggagaccttctgtgggtcacaggggtcacgatggcttgaccatggtgcagcctgctcagaggaccttagaatgtctttcgtttatagtgc

SEQ ID NO: 460880 - DNA, 122 bp, Homo sapiens
gactgccggcccattcctaccttcaggcacttcagagaaagaccagtgacagccttgggacggtggacatcgtcttagtccccacctgcgccaactcccctagcctgaccacagaagccgca

SEQ ID NO: 460881 - DNA, 122 bp, Homo sapiens
cccgcccccgggccctttcaccgccgcggccccgccctatcctcctccgcccaccgcccccgtcccgcccctgctggacctcgccgtttcgcaagcatccgagttctccagccgaggctcgg

SEQ ID NO: 460882 - DNA, 122 bp, Homo sapiens
gcgagggacgaggccagaacacgggttcctcgtttgcgtagctgtggagggaacacagagcgggacccggcgcttggggtgggtggcagcgccaacatccccactcgggcttctcccatttt

SEQ ID NO: 460883 - DNA, 122 bp, Homo sapiens
gcccggtaggggacctagcgcgcacgccagtgtggaggggcgggctggctggccagtctgcgggcccctgcggccaccccggggacccccccaagccccgccccgcagtgttcctattggcc

SEQ ID NO: 460884 - DNA, 122 bp, Homo sapiens
gctcctccggggtgcgtggggtaatgtcccagcgcaggtcgagttgcagatccgagtccccggggttgttgactgtccttcttgcaggacatttcttaagggggtgagatggattcactgtc

SEQ ID NO: 460885 - DNA, 122 bp, Homo sapiens
gcacagggcgcggtccgcgagtgggagcggctgcttgtgggcagggtggacgcggggccacgtcttggccggcgttttgcggggtcttcctgttctgaacgcgcgtaacttttgcctcagta

SEQ ID NO: 460886 - DNA, 122 bp, Homo sapiens
atgtcacctaaattgctgaatgtactcattataatatgatatctgacaaaggtagtacagcgtttctgagtcatttgggaccaactgcagtggttgtttaaaatgctggttcctgcacacaa

SEQ ID NO: 460887 - DNA, 122 bp, Homo sapiens
attagtaggaaaaacttggctgggttaatttgctttgctgagccgattcaacttaaaaagcgaggtccatactaagtgcccaagaatcaagaaggaggctcacatttgaacttgatgtttag

SEQ ID NO: 460888 - DNA, 122 bp, Homo sapiens
agccgcggctgcgcccggaatccggggcctctccttcgtgaccccggagtgggcaagtgacgagggcacggccagaaacgcattggcgtcaaggaaaccacgacccatcttcctggaaggaa

SEQ ID NO: 460889 - DNA, 122 bp, Homo sapiens
cagtgggcttgtcaactgagctgtaattccaccagcctgctttagtcaatactgcaatggcgcttccttctatacatattattagaaactgccctagtggaaaataatcttctaccagccca

SEQ ID NO: 460890 - DNA, 122 bp, Homo sapiens
tagaacttgagaaattgaggagatgatcacttgggatacagtagaaagttaggaggaaagcggtgggaagagcaggatttataggacccgacagtgaagtaatgtagctagggatgcacaaa

SEQ ID NO: 460891 - DNA, 122 bp, Homo sapiens
gctgcgcgtgattgagcgcgcccggcgggagctggacatcggcatctcggctacctactgcggggctcattcagtgcctaagtaatctcagccagtgggggcccgggtttaactcagagcat

SEQ ID NO: 460892 - DNA, 122 bp, Homo sapiens
agttcaccccctttctctgagctgtcaccttgtttgtagccccactgaaacagggacagacgaacatgagattcaagttgattttagtgacctatatttcatccagcagattttttttttca

SEQ ID NO: 460893 - DNA, 122 bp, Homo sapiens
caagtagctgttttgtgagcccacatttcattgcagctgcaaatccttgggtaacctcaccggcgtttggtccaagaatatgaaatcctatcacccgatcctttaatacagaaacaaaacaa

SEQ ID NO: 460894 - DNA, 122 bp, Homo sapiens
aggcgctccaggcctgggggacggcggcgcgaggggaccctctgctgggcaccaagctgccggaaagagcaccgctccggagtcagcgaccttattggattcttgccccaggtctgccctta

SEQ ID NO: 460895 - DNA, 122 bp, Homo sapiens
gggcggcaacgaaaggcacaaggcacatgcgcggacacacacaggctcacagcgatgcctcgcacccacgctcacgcacacgccgcacatacacacacacaggcccatggcgacgcctcgca

SEQ ID NO: 460896 - DNA, 122 bp, Homo sapiens
gaacattttagcttttactctcaacttgctgttctctttacattccttaagttagactttcgggtgtggcttctctcccaggggtaacatttacttccattttctagactgaaccaaaagtc

SEQ ID NO: 460897 - DNA, 122 bp, Homo sapiens
ggtacgtacaccttcagctgaattaggaaagggaattacagtggatcctggagcccacttcggtttgaatcctggctccataatttcccccagaggatcttgggtaagtgatttaatggtct

SEQ ID NO: 460898 - DNA, 122 bp, Homo sapiens
ggaaacttttggccaataagagcaggaattgagagccaggggaggggaagggaggtctagcgacacggccctaaacctgggcttacctcctggtgggcgaccggggtcccagctaaccgaat

SEQ ID NO: 460899 - DNA, 122 bp, Homo sapiens
ctcacaccctccctccctcctgctcccccaaagggactcgaatgaaaggcgtaaatacaccgtgtctgcctacccgagggctgctgtgagtgtcagatgagaaaacgcctggggtagtggcc

SEQ ID NO: 460900 - DNA, 122 bp, Homo sapiens
ctccttgaggaagtgacagctgagctgagacctcaagacacagtcacctgggccaccttccggcagggcgctgagcctggctgtacctcggggaagacgcggcctggggcctgggtgccatg

SEQ ID NO: 460901 - DNA, 122 bp, Homo sapiens
gctttgcaggcaaggctctccctgccccccgacccttcatcaccaagtgccaagaggatacggggcaatccggtcccatttgacattgagcattccagacacaatgccaaagtcttctggag

SEQ ID NO: 460902 - DNA, 122 bp, Homo sapiens
tctgtgtgtagtcgcagttttagggactgagcgtctaaaaggctgaggcatgagcaccctcggaacgcgggcacggctgtgtgggtgagccactctggatctggtattaagggttcgttcat

SEQ ID NO: 460903 - DNA, 122 bp, Homo sapiens
gtgacagagcgagaccttaaaataaaaaagaacaaaagagctcagacaccccagtccttccggggcatcagatggcctgagactcaaagaggacaatatgtgtgtttttcttttttttgaga

SEQ ID NO: 460904 - DNA, 122 bp, Homo sapiens
cacccagagactggctttgggattgggcactggtccgctgactgccaggctgaagggacccgccaaggactgaacgggtaagagaagaggtttgcaagacagagcgcgcagcccggcaaggg

SEQ ID NO: 460905 - DNA, 122 bp, Homo sapiens
caggtacccgaggaggaggtggcctctgttccttccagctatgccctccatatgtgccaccggaccccatcaccacgagccccagctaagtgacagccaacaaccctacttctgtttttgtt

SEQ ID NO: 460906 - DNA, 122 bp, Homo sapiens
ctgccctacctccccatcctctaccccttgggctgggtctgcctggtggatgcggggcctcggtccagaaacccaggcactagtcctacttgaggttcctggtctctgtgtggctctcactg

SEQ ID NO: 460907 - DNA, 122 bp, Homo sapiens
tcttggctgaactccctgtgcatgttggcgctgaaaaatgtgaggccgctgtgtgtgggccgctcgggcctcctgggctcgcaggacacaccgagctcggtcaccccgtgctggccgcggcg

SEQ ID NO: 460908 - DNA, 122 bp, Homo sapiens
gctccgcccactccgccggcccggcgagccacgcccatggccacgcccctcttagtgcctcggagacaagcagcttctgggtgagcgctaggcagtcctgacggtactacagccttcacttt

SEQ ID NO: 460909 - DNA, 122 bp, Homo sapiens
ctaacctctctcctctctctcatgggtagtctgtgtgactctggccttacaaaattcattcgtaggcctgactcaggcagctgccatcatgctgaacttgactagtagttggatatgccact

SEQ ID NO: 460910 - DNA, 122 bp, Homo sapiens
gcacgctacctatctgcctcaatactccgcccggcggtgggcaggatataatgcaagagacgtctgaaaaagcaatgagatgcgcatgacagctgggcgaagacagagggcaaacttaaaag

SEQ ID NO: 460911 - DNA, 122 bp, Homo sapiens
gctggggagggggcgccaggaggcctcggcgggtccgcaattggccgggacagcttctcacgaaaggtcctgggccggcatcatcagcctcacctgggaactggttagaactacaaattccc

SEQ ID NO: 460912 - DNA, 122 bp, Homo sapiens
tttagctcagtcctataaaaggcttcataacctgcactgatctggattcaacgcagctgccgatggacaagaaaaacacatctggagactctgcagccgttctttccagctgtttgtgactc

SEQ ID NO: 460913 - DNA, 122 bp, Homo sapiens
taagggatggctttcacagagcattcaccgctgacccctcaccgtcgggacctctgtagccgctctatctggctagcaaggaagattcgttcagacctgactgctcttacggaatcctatgt

SEQ ID NO: 460914 - DNA, 122 bp, Homo sapiens
tagcgaggtgaggagagagtcagcttagcgtttgggttttgcagtcaaatttcagcaaggcgaactaacctcgctggtcttaattttctcatcggtaagagggaaaataataatgcttactt

SEQ ID NO: 460915 - DNA, 122 bp, Homo sapiens
gcttccagattgttttgtgtgcatctgcaaagacacacacacacacacatccctcacacacgtgttcacacatacccctgtacttctgtagtagactcttggtgctgtgtagattttcttca

SEQ ID NO: 460916 - DNA, 122 bp, Homo sapiens
caatggctgtcgcagtgcctcatcttgccgtctgtgtgagcccaggtatgcagtaggctccgcccaggacccagcccggcccctccttaggcctgggctctgggagcggaaattccggcgac

SEQ ID NO: 460917 - DNA, 122 bp, Homo sapiens
tatgtgaaatcgtacatttttggtccgttattctaagactgacaaaacgttccattgcttcgtatttgaatttgagaactgagactcatttaaaaattcttcactgttcttttcctttttgc

SEQ ID NO: 460918 - DNA, 122 bp, Homo sapiens
cagtatatgcaaacatctttaactgtttaaggtcacgatctccagcagtctctatgtctgcgttattgtaattcatttgggaagcaatgatataaaaaaaatttttaagagcagcaaaattt

SEQ ID NO: 460919 - DNA, 122 bp, Homo sapiens
ctccccacaacaaacaatcacctgatccaacatggcagtagtgctgaaattgagaaaccccgcaataagcttcggttgtaaactttgtaccaagaaggagaattctctgcagacaactcaag

SEQ ID NO: 460920 - DNA, 122 bp, Homo sapiens
agccccaagagggcagcagcccccagccccagccccaacaccttcgtccactgcatcctgcggactcttggccagctggggtaggactggtctataggttattccctatagagggggtgttg

SEQ ID NO: 460921 - DNA, 122 bp, Homo sapiens
ccccctttctccagccttggtgccttcacctccgtaccaaccgcccaaccccaccgcctccgacccccctgcctggaagctgctgtcctttgagggcttcggagatgagaacaggaaacagg

SEQ ID NO: 460922 - DNA, 122 bp, Homo sapiens
aaaaaaaaaaaagttaccaaaatagcaaaaagcagtcatttatactcctcacctagatttcgcaaatgttaacattttgtcatgtttacattaatatcttttttctctaaatatatatacat

SEQ ID NO: 460923 - DNA, 122 bp, Homo sapiens
ggcctcaagcggtcctcccggctcggactcccaaagagctgggatcacagacgtgaaccacgcgcccggccacattccccaattaatggtttttggagagtggccggtttggaacgggctag

SEQ ID NO: 460924 - DNA, 122 bp, Homo sapiens
cacgagcggggagaaagagactctgagcgctggtccttgtgagccgacaagctaaaaatacgccggcccagtaaacaaatcccattccatcccgaccggagccacaccgttaacctagtaat

SEQ ID NO: 460925 - DNA, 122 bp, Homo sapiens
ctaagaccccaagaaagatggcatcactgggaggcgggcgccggccacactttgagtccccggggagggggcagcgtccgcgtggtctgggctctgtagcgtcccagctgagccggcgatat

SEQ ID NO: 460926 - DNA, 122 bp, Homo sapiens
ctatgaaaagagcatgtttattctccctcagaggtttcagaaatccagttgttttattatcgggacagagggaaatgtatggaataccgtgttcgaagtgattagtaaaggtaatttaagtt

SEQ ID NO: 460927 - DNA, 122 bp, Homo sapiens
atacagaatgtgaggtcctgttccagtcaatggaaactggatacagcagtagggtggatgcggcaggttataaatgatgctgtctcctttgtttggtgtacactcgtggcaaaactgctgat

SEQ ID NO: 460928 - DNA, 122 bp, Homo sapiens
atctagggggaaagtggcagcaaaggccagagcagtgcctcaaggacagccctccccagccgagccgagccgggggatatcagggtccagagaccagccctagcccctgaggggcctaggga

SEQ ID NO: 460929 - DNA, 122 bp, Homo sapiens
gcagaccctcccgctgcagcttcaggtcccgggcgcgctgtggggccggcgagcgcggctcgaagttcaactgcatctccaggtgaaagtggcccgggaggtagtccaggtcgtcgatgagg

SEQ ID NO: 460930 - DNA, 122 bp, Homo sapiens
ctcctcagctccttattagtcccaactcaagctggacatgattcacagggataatgagctcgtaaataaattcctgctgcatcagctcatggagctgaaggttaggctagggatgtgggcca

SEQ ID NO: 460931 - DNA, 122 bp, Homo sapiens
tctcttagccacaacctctcaccctgagcaaatcaagtaacctttctgggtcttcatttccgtaggtataaaatcagagttttaagactatttatctggtttcttgggagtaataaatacat

SEQ ID NO: 460932 - DNA, 122 bp, Homo sapiens
cactccagcaactgctttcaatcggagttccatcctccgccgcagtatgccctaacgcagcgttatcttcagagctaccaccagcttccgaaacctttcggaggagcgcttcgccaccacct

SEQ ID NO: 460933 - DNA, 122 bp, Homo sapiens
ttgactagcccaagagcctcatttaaactttagccccactctctcctcctcgccccgccccgaagctaatccctgattggatgaggcaccactcctcgtggggctgcttaggccaccgcgcg

SEQ ID NO: 460934 - DNA, 122 bp, Homo sapiens
aagatgtagaagactccgagaaaaatatgtaaaataaaataaagagttctattctgaccacgttaagtagaaggtgcttattggttacacaaatggagatggcaagtttgaagttggatttg

SEQ ID NO: 460935 - DNA, 122 bp, Homo sapiens
cccaccttccagcccaagagggcagcgcggaagggcagcaccaaggacagcggccacctgcggatacccaagtggcataacaaggtggccaaggaggagaaacccgaggcggaggaggccga

SEQ ID NO: 460936 - DNA, 122 bp, Homo sapiens
ccaaattctagactctagtgaaaaacccacagacctgagttcgtgggctggcaagctacacgtttggctcatctgaggtcctggagggtgcaacgtctgggccaccatccgggttcctgggc

SEQ ID NO: 460937 - DNA, 122 bp, Homo sapiens
ctttcttgcaactaggggtgaacacatgctactgccaggactgacgaaagcagcagcactcggccgaaaagccaaaacacgaagaagggcaaagcggaaagactgaaaactcttatctatcc

SEQ ID NO: 460938 - DNA, 122 bp, Homo sapiens
ggggcacccccagggactcaggtcttgagggacagcggaagggtggggtggggagtaggccgttgtctcgtgccacctgggtgttatgtagactctgaatgggcagttcctgggagctggtt

SEQ ID NO: 460939 - DNA, 122 bp, Homo sapiens
agaggaacgcacaaaagtgtcccgcaagtcgaaatgcgagtcctctccgggggctgggatcgagggctggtttgggggtgggggtggggcggggagggtcggctgttgttgtgtgggtctcg

SEQ ID NO: 460940 - DNA, 122 bp, Homo sapiens
tggggggtggcctgtgatcaggcccagtgggactgaggagcaaatgtggacagtcttccccggcacacatcggctgacctgcatgcccagactgtctcctggggcgcctgtacaagttggtc

SEQ ID NO: 460941 - DNA, 122 bp, Homo sapiens
ttccggctcacatcaagcatgaaaaatgttcacacataccccccacacacacatgctttccggaggggtccatgtggctagaggctggaagatgtggatgagaggagcctggcaggtaagcc

SEQ ID NO: 460942 - DNA, 122 bp, Homo sapiens
tacagaaaactgattaagacatacactttaagtgatctgcgccaaggtggcctcaatgaccgcaaatgagtgtgtttgacaaagagcagttaaaacggtttttaaagggatcagcccctttt

SEQ ID NO: 460943 - DNA, 122 bp, Homo sapiens
agcgtcgtggccgggggcagggcggcggggtaggttgttcctgaggtgggaggcggtacccgtggctgagaagaaggaggcctgagagcgacatgtccccggcggctcaggcggagcggccc

SEQ ID NO: 460944 - DNA, 122 bp, Homo sapiens
gcaagacccaatgatgagttctgaacctttcccagcccttcctctaaagtaactggaagacgttaaccggcaataaaaggccaaagggcagaatggggaagcaaaataaaaaagtcacttgc

SEQ ID NO: 460945 - DNA, 122 bp, Homo sapiens
cacaaggccagaacatacgaagagggtctggagcccgggggcgggggtggctgacccgtccgtctgtgagaacctcagggagcctccaggctccagtgcagtgcaggtatcacagagggcag

SEQ ID NO: 460946 - DNA, 122 bp, Homo sapiens
tccaggaacagaaaggaagcccctgcccctggttcctcttgaaagcagccagtcggatggcgtcacaagctggccactgttgtgaacgcagagattaggaaatgagctgtcgtttcagagcc

SEQ ID NO: 460947 - DNA, 122 bp, Homo sapiens
gggctgctgcgtttgcagacagaaggctgccgaccgggcctgctctacgcaggtctgctccgccccaagggaagtggctgacaagtgtttaggaactcatctcccccaagactcaaaggggc

SEQ ID NO: 460948 - DNA, 122 bp, Homo sapiens
agtatcataacccagatattgacattgattcattcaagatacagagcatttccatcatcacggtgattcctcaggttgcccttttataggtgcactcactccctcagccccaccttgggaaa

SEQ ID NO: 460949 - DNA, 122 bp, Homo sapiens
acacttggcaaaccttttgtcctcaaagtaatatgttttactcccaggcacggtggttcacgcctgtaatcccaacagtttgagaggccgaggcgggcagatcacttgaggtcaggggttca

SEQ ID NO: 460950 - DNA, 122 bp, Homo sapiens
tcctggaggaggtgatacggttgggctgatgctaggccaaagaagaattacagtagtgaacgatttcgcctcagtgcccatctaggcgctgccccttggttcagttcttcatggtttccagg

SEQ ID NO: 460951 - DNA, 122 bp, Homo sapiens
gctgcgggcgctgattgggcggcgcggcagcacgtcaccggaaatgcgcggggaggcaggcgtcttctccgagacccgcggcgctgggagctccgcgtgcgaacttgcccggggcgaaatct

SEQ ID NO: 460952 - DNA, 122 bp, Homo sapiens
ctttaaaaaagcccagttagcagggaaagccgagcgacgaggatgggattcgaacccacgcgtgcagagcacaatggattagcagtccatcgccttaaccactcggccaggcctctcctgat

SEQ ID NO: 460953 - DNA, 122 bp, Homo sapiens
ggcgcctgtagtcccagctactcgggaggctgaggcaggagaatgggtgaactcgggaggcggagcttgcagcaagccgagattgcaccactgcagtctggactgggcgaaagagcgagact

SEQ ID NO: 460954 - DNA, 122 bp, Homo sapiens
tgccaaagacatgtagtgagtttgggtttgattggaccaaggcagcccttgttcctgaggcggggagaatggagggaggcgtggagaggggaggtgggggcagggagtacacgtcccctggg

SEQ ID NO: 460955 - DNA, 122 bp, Homo sapiens
gagccccttcacttttgctggcaacatgcccccctcttgctggatgggctatcttcctttcgtgttgaaggacacacctttgaaaatttgttgcctcagtaaaagatgttggggcagtggtt

SEQ ID NO: 460956 - DNA, 122 bp, Homo sapiens
cgtagccttcattttgtctgggcgctcaggtcgggccacagctcatcttacctgtgtgtccgagacggtgcttccgcacctctgtaaggggccggggtcgggggctgccctcacgctcccca

SEQ ID NO: 460957 - DNA, 122 bp, Homo sapiens
cccaggccacacaagtgtaagatcaggcatgcatgtctgccaaggtttcagttcaatgtccgtgcccctcttttgctctcttcccaaggtacagaggcggaacggcgcggtgccctcgggtc

SEQ ID NO: 460958 - DNA, 122 bp, Homo sapiens
cctgagccgccgccacctgtcccgcagccatcaggcaggagctgagtgggatcagcaccacgtaaggggccggcctcgctgcgctgattcgtcgagcccatccggcgacagaggacagccag

SEQ ID NO: 460959 - DNA, 122 bp, Homo sapiens
tgatcctattctgagatttgagctgttgtggcaaaactaagaattctttaaagcaaaagacgcccttgcaatgcagggctcagagtgtctatttgcaatatatcaaccagtgaaggcatcac

SEQ ID NO: 460960 - DNA, 122 bp, Homo sapiens
ggaagcaggatttccgcggttgtgtaacggcctgtcgcaggcgtgcagggacctggactccgcctcgtccccggggctcgggcagccgagccatggcggggaactgtggggcccgcggcgcg

SEQ ID NO: 460961 - DNA, 122 bp, Homo sapiens
gatctgaagattttgttctttggaatgtgaccctgtttggacttagagctaatcaggaaacgctgccggggaggttgctttgtaatcactttgcttacctccccccgggcgccgccgaccct

SEQ ID NO: 460962 - DNA, 122 bp, Homo sapiens
ttgctctggggagcagccagtgaggcaaggggggactgaggggaagcagaaacaggaagacggaggaatcagtgacccctggtacaaagccccatatacctcagtctcaattaaggccctgc

SEQ ID NO: 460963 - DNA, 122 bp, Homo sapiens
tcctgctgctggtcagcgcgcggatctgcagggctaggctgtgctctgcatgcggccctccgtcctcagggaggcaagacccggcttctctacacggctgcagccgccctcagaaggcgcag

SEQ ID NO: 460964 - DNA, 122 bp, Homo sapiens
agacccacaggcagatggaagcgattttcggtcacgtgggtggggactgaactgctgccccgcaaggcaaggccccatgtctggcttcaggaagcggccccaaagccacatggtccatggcc

SEQ ID NO: 460965 - DNA, 122 bp, Homo sapiens
aaggcggccggacccaggccgagggagggcgcgcactcacttgaagcccgtctcgtagtccgtcccgtccacccacttccagggcccgttttggtcgtggaggcccatccaggtgttcacag

SEQ ID NO: 460966 - DNA, 122 bp, Homo sapiens
cctctgctcctcagaccatcaccggcctggccccaggctaggggccttcatgggcgtcagcgtggggccggcgtcccgccttgcctgtcttccctgtccacctcaccttcgcccccgggggt

SEQ ID NO: 460967 - DNA, 122 bp, Homo sapiens
gaaaattaacaatcgcttcttctgttccccatggaaacaaccccgccccactaaccctcccgccccaatgagtcgtgaggttttggcgttttattgagtattcaagctgacaatcaaacacc

SEQ ID NO: 460968 - DNA, 122 bp, Homo sapiens
gtcaagcaaaagttggcaggaaatccttcaggcaaatgtaaaagctttagaacagagcctcgaacatacattacagttagttttactccttcctttaaaaaaaaaaaacattaaaaacatca

SEQ ID NO: 460969 - DNA, 122 bp, Homo sapiens
cgaaggtcgagagggaggggtagggccggagacagggactcaagacaggggctcgagaaacgtcccggcaaggaaaagggcaagaaaagcaaagaactcaaaatgttaagacccaagtcggg

SEQ ID NO: 460970 - DNA, 122 bp, Homo sapiens
cctccctcttcaaggtgtgttgaccgactacagtttaagcctgtcgtcccacaaaaggcccgggagggccggggtcccaggaagggccatcctgggtcaacaccgccccagttgggaagtcg

SEQ ID NO: 460971 - DNA, 122 bp, Homo sapiens
gataaagcaaaacagtaccaaatgattagttagcattttacatttagaatgcaacccagccgggcacagtgtctcatgcctgtaaccccaggactttgggagaccgaggcaagcagatcatg

SEQ ID NO: 460972 - DNA, 122 bp, Homo sapiens
gactgagcggtactccggtgtactttttccctgtcccaggcgtgcagagtccacgccgcgcggccaggtgccccaatagtgtacctgaaagtagggatggggccagttacagctgcactttc

SEQ ID NO: 460973 - DNA, 122 bp, Homo sapiens
gagagaagaatgcaaaagtctccttaaattacctgattgaaataaccaggcggaatattccgcggggccgccgcgtgccagggaagccgcctttggggtggtctgtcagaggcggtttgtgc

SEQ ID NO: 460974 - DNA, 122 bp, Homo sapiens
aataaggctgataaattggagtcgcatcagtgaacttcttgaaaactaggtagagagttgcggtttgagatgcaaataggaaactacaacataatctttaggaggaaaacttgaggagggca

SEQ ID NO: 460975 - DNA, 122 bp, Homo sapiens
gtgggggccggtgcgcccggaggtctacgctgggattggtgaggtcctctggccccgccccgccagggaggatttccaggccggcccgaccagctcgccctgcatacacttcttggctgtgt

SEQ ID NO: 460976 - DNA, 122 bp, Homo sapiens
acacccagttcccaccttcatcctctagaaaaatgtgttgctttgttttgtttaacttttcgggtcacagaccctttcagaatctgataaaggtgatggaccccctacctcaccctaaatgc

SEQ ID NO: 460977 - DNA, 122 bp, Homo sapiens
tggaataaggagcatacccatgactggtcatactagtaagtgttgtgtgcttctctccctcggtgtatccattttatgctgagtatcttaactgactggacagatttacctgacacattcca

SEQ ID NO: 460978 - DNA, 122 bp, Homo sapiens
tattttaaaaacatatatcagatcacatcaaattcctgtttaaaagcatcagtggcttcccgccacacttagaataaaatccaaattcctttctatggtcttcaaggccctatccctctgtc

SEQ ID NO: 460979 - DNA, 122 bp, Homo sapiens
cgagatcgaaaccgagatcgagacagagatagggaacgaaaccgagatagagaccacaagcggagacaccgatcccgctctcgatcacgttccaggacccgggagaggaataaagtgaagtc

SEQ ID NO: 460980 - DNA, 122 bp, Homo sapiens
ggatccgcggtccgccccccttaaccacagtctgaggaagcttcagaagtgggtcctggccgtcccaggcgatgccactggggaagcgcagcgctagagccgcgggcctgggagccgggctc

SEQ ID NO: 460981 - DNA, 122 bp, Homo sapiens
aagtggtgcaggaggaagtgcgtgggccagcgcaggcagaggctgccagggcgaggacgacgatcagggagttgtccagcagggtcaccagatgtttgcagagcactgcccaaaacagaagg

SEQ ID NO: 460982 - DNA, 122 bp, Homo sapiens
aagttgcacgcatttattgtttcagatcacaggctccgagggaactgagtttatgatccacgctttcttcatcgctttggagagtacacgcctaccccaccccagtatatccgttaggtcct

SEQ ID NO: 460983 - DNA, 122 bp, Homo sapiens
cccactgcagagcgcccggccctttgtgacacacttgagcgtagggacatgcgaggagagcgccggggccggaatggcacaaagtcctcatcattggggtcatctaccatggcatcagaatc

SEQ ID NO: 460984 - DNA, 122 bp, Homo sapiens
aggtaactgattaccagcggttattccggaggtcacagtgtttgcagcttccccagctcacgattgtccaacctgagattggcctttggagatgtctttccaggcttttgcatttctgacgg

SEQ ID NO: 460985 - DNA, 122 bp, Homo sapiens
caacaacccactcaggcacttccggtaagaaatctagtgcccttggctcggaacctgcgtcgtagtgcgcaagcgccccgggcctggagacggccgcggatgccgagggagggggcgtgtga

SEQ ID NO: 460986 - DNA, 122 bp, Homo sapiens
gccggtccgtggggagagggcgggccaagccggtgggcgcgggcagggacgccctgtgcgcgccggaccggcgggggcggggcgtgcaggcgggggcggggcacgccgtcccatgggaccgg

SEQ ID NO: 460987 - DNA, 122 bp, Homo sapiens
ctcagccagctccttggcagaaagagcattgattccaagccccctcaagagttttccttccgctgggtgtggtggctcacacctgtaatcccagcaatttgggaggccgaggcgggcagatc

SEQ ID NO: 460988 - DNA, 122 bp, Homo sapiens
tgctccgccgattcagccagacaaagaccgcaagttccccggtccaccgctccagacaggcggggaccagtctccccgaattaggcccattccgggcccgggcgccctcactcgccgcgggg

SEQ ID NO: 460989 - DNA, 122 bp, Homo sapiens
gggtggggcggggcggtgaggtgggcggggccttgcgggcaggcggtggagaaggcggaccgctgggaggagccgagtgcgggtaagcagctgccggcaaggttctcgccttggccggctct

SEQ ID NO: 460990 - DNA, 122 bp, Homo sapiens
tgtgaccctggaccctgagacagctcatcctaacctagtcctgtcagaggatcgtaagagcgtcaagttcgtggagacaagactccgggatctccctgacacaccaaggcgtttcaccttct

SEQ ID NO: 460991 - DNA, 122 bp, Homo sapiens
aatttcattctgtttctcatgagtttcttcatccttggcattttgtgtcttttctggactcggatgacccagagtcccatggccagaattaccaagagcaagaagatgagcaatcccttggc

SEQ ID NO: 460992 - DNA, 122 bp, Homo sapiens
gacaactgactgcagtggtgggaattctgccagatgcagctacatgcccaccgtgcccagcgcgccctcgggctctcccctgtgttcgtgttatttgtgtgtgggaaaagcagactaactgt

SEQ ID NO: 460993 - DNA, 122 bp, Homo sapiens
gaaaagaaatttacttccttacagttctggaggctgatgagtacaaaatcaaggtgccggcgcctggtaagggccttcttactgtgccatctcatggcagaaggcagcacatggcagaaggg

SEQ ID NO: 460994 - DNA, 122 bp, Homo sapiens
cacgtctggctcagcacacgtgatctgattctgcgaaaattacccgagaatgtcaggatacgacaaacactggtgagagccgtagctggaatgaatgtcagggtgtgacagacgctggtgag

SEQ ID NO: 460995 - DNA, 122 bp, Homo sapiens
agccggctgctgcggccgggcaggtgagcgccatgtccgagggaggaaggattttcccatcgtgctcagaggcggctgctcagaggttgcttccgaggctcctcccaacgcccgcccagtcc

SEQ ID NO: 460996 - DNA, 122 bp, Homo sapiens
caggcgccgcggccggagcaaaggcccagcgagcccagcactcagcggaacctgtagaagcgtcgggggttgccccgcttctgcgaaccgccctgggatgcgaggttcagcgtcactatctc

SEQ ID NO: 460997 - DNA, 122 bp, Homo sapiens
agtccttcagaccagttccgcttcctgcgttctcccactgaagccaggttaaacaccttgcggttcctccctcaacagaggggcaggactacagccccagccggcacctaaccaggaggccc

SEQ ID NO: 460998 - DNA, 122 bp, Homo sapiens
tgggccaaggggccagactctgaagttcatggggttaaggtctccccgccagccaggtgacggcagcctcctcgccttgcccagacaagaaagcctcgatctaatctcactctgaacttttc

SEQ ID NO: 460999 - DNA, 122 bp, Homo sapiens
taaaactctggtttccttgcacatcagcagggcctctactaaagaaatggaaaaaaggagcgtctcagccgtgcactcagggtcctgcgcctccatcgcaaagccccaggaggactccctgt

SEQ ID NO: 461000 - DNA, 122 bp, Homo sapiens
ccccggaaccttcgctgttctcttacctatgaaccttacgaactgtaaagaaaggcgcaccggaagttgtggtacccaagccatactctcataaatccagccaggtcgcgctgaaacagttt

SEQ ID NO: 461001 - DNA, 122 bp, Homo sapiens
gctggcggccttgcagcgtgcgtggcaacagcagctgggcccgcaagactcagcacgggacgtcctcgtccaagtctgggccaagagcagcggcccagggggcggggccggccagagggagc

SEQ ID NO: 461002 - DNA, 122 bp, Homo sapiens
ttctgcgcccttttgccgctgcgtgctcggatctaggactatacatcccagaaggctgcgcgcaaggagggcggggaagagggcgtccgtgacggcggcctcaccgcggcatcctgggaggc

SEQ ID NO: 461003 - DNA, 122 bp, Homo sapiens
cctaagggaaaacctctaacaaaagaagtccacaagagactcgtaggctaccgagttgggcgtatggtgttctgacagtcatttgcactcaggaggcagctatttggaggaccggagcgtca

SEQ ID NO: 461004 - DNA, 122 bp, Homo sapiens
aaccagaagaaataataagtctattttcattaaaggctggataatgaagtttacatttgtcgtttgagtacttctggctatgctgaggttgatggagctgtgataagaatggagtaccaaag

SEQ ID NO: 461005 - DNA, 122 bp, Homo sapiens
acacgttcaggggccgctcgcggttgccgttgaggaagatggtgctggtcctggaggcaccggctccgttctgcatctcctccccgcagtccctggggaaggggatccgcagcccacctggg

SEQ ID NO: 461006 - DNA, 122 bp, Homo sapiens
gcatcaattttggcaggaggctagatagaagtagcaattgacattcatcaccctaaagtgcggattatgtcagtacagatgctacgatagaagaactaaaaaatgacagaaatggttttact

SEQ ID NO: 461007 - DNA, 122 bp, Homo sapiens
cccattctcgggacactggtggataagaatggggtctctggagtccgacgcctggattcacgtcctggctagtcgcgtgaaccttggtgctctcatctgtgcagtgggaataatgcaggttc

SEQ ID NO: 461008 - DNA, 122 bp, Homo sapiens
tgcggccgatgcctcccccgcccgacccccacggctggccttggcgtcgcagcaatattccggatgcctgtgcccattgccgtaccagggctcccgagcgtactcctccatggcgctggcgt

SEQ ID NO: 461009 - DNA, 122 bp, Homo sapiens
cctctgtgaatgtcacctcttcccaatacttaagatcaataatgattagtggatattttccgttggtgcaaaagtaagtaattgcggcttttgccattaaagtaaaccaatattttccaact

SEQ ID NO: 461010 - DNA, 122 bp, Homo sapiens
gctaaaggaaggagatccgggctgggctgagaagcatcttccaggatcacggccttcccgcgggacacaccaagcccattccggatcttgctcttcctgaccatggctggcaggctgtggag

SEQ ID NO: 461011 - DNA, 122 bp, Homo sapiens
gtggaggaggccatggtgttctgccgggagctggggtgcggccctgtgctccaggccccccgccgggacgtgggcgtcgtcaggaagtacctggcctgcaggggtaccgagcccaccatccg

SEQ ID NO: 461012 - DNA, 122 bp, Homo sapiens
tcggtgcattatcttcagcaaaaagaacagcacaggtactctcccatttaggcattctaacgaatgtgcctttcgccaaatccagctcagtcattttcctgaaaataagataccaattaacc

SEQ ID NO: 461013 - DNA, 122 bp, Homo sapiens
ggcgtgtgaggaagctacccaagaccagggaaggccatcaccccagcaggagaggatgaacggtaactccagtgtgcaagcaggacagggactagcagctgtccccacccaccaggatagag

SEQ ID NO: 461014 - DNA, 122 bp, Homo sapiens
gatggaaggacccgattgcagtggaatacagcacccctcttccccaaaatgatgggaccacggacagaggtagcctccgtactctttccccccatttccatcagagcgatgtggtcagtaga

SEQ ID NO: 461015 - DNA, 122 bp, Homo sapiens
caaacagcttaaaaatggttcttccacagcccagtttccagaattgctttagccaccctgcgcctgggattatctcaaagctgaatcttttcctgcaggctctagcttcctgccgtgttgcc

SEQ ID NO: 461016 - DNA, 122 bp, Homo sapiens
caataccctcgatcatttggcagtaaggtgatatgaatgaatttgaagcaggataaactgcgtgggtgaatgtcaggctgaagcataacacacagagaacatctttcataaacatgatgaga

SEQ ID NO: 461017 - DNA, 122 bp, Homo sapiens
taccgccgcgtctccctagcaaccgtgccctttaatggttgccggaagaggctataatcacgtgctccgaagacttccgggtttccaacgtgacttccggttgtcagaatttacccctgacg

SEQ ID NO: 461018 - DNA, 122 bp, Homo sapiens
cgcgtggcgagttcggcacagggcagccacatcccacctctccatctagaggccgcgtggcgaggttggcacagggcagccacatcccacatctctgtctagagactgctttctaggactgg

SEQ ID NO: 461019 - DNA, 122 bp, Homo sapiens
catggcttttaaggataccggaaaaacacccagggaggcggaggtggcaattcacgaattcgagtcactctaacgagccgcatcgtaaaatccctggagaaggtgtgtgctgacttgatcag

SEQ ID NO: 461020 - DNA, 122 bp, Homo sapiens
atgttaccagtctagaaaccgatttttttttaacaccccactgtggacagggtggaaactcgtttgctttcttgtttaagatctgtagtaacatgaatggatgaaattgtttcctattggat

SEQ ID NO: 461021 - DNA, 122 bp, Homo sapiens
ccttaaccccttcccctccactctctccagcgcgcacacacagcccacacggtcccggtgcggagctattcatccaccccgctcgaggccggggggccaactacttccacgagccccccctc

SEQ ID NO: 461022 - DNA, 122 bp, Homo sapiens
tgggatagtctttttcacctatcagatttgcaggatcaaaaagtttcataaaatattcttcgcaagagtgtggcaaagcaggcagtcatacacattgctggtgggagtataaattgttagaa

SEQ ID NO: 461023 - DNA, 122 bp, Homo sapiens
gacactcccttcaaggcaagttcatctaattcttggaaagttaacagagcaaagcatgcccgctagggaactttcaccttggaacttctaccctctgggggattgcttcgaactcacaccta

SEQ ID NO: 461024 - DNA, 122 bp, Homo sapiens
aaaaacaggatctggcagcagccaatgggaggccccaacagctcgtgctggcgcacacagcgggaggggagggagcccaggatgtgcacgcaccctctccctcatccaccgctgtcacctcc

SEQ ID NO: 461025 - DNA, 122 bp, Homo sapiens
ctccctccgaggctaagtgtgggactagggctccagggcccaaggagcaacggccgaacccggcgtcgtgcggcaccggagcgagtcctctcctcgcctcgcctcgcctcgcctcagccaga

SEQ ID NO: 461026 - DNA, 122 bp, Homo sapiens
cagagaccactcacttctggtattttactgttgaatgtatattgagccaattggaattaacgtttgttcacagtctagctgtgaaatactgcactgaagctgacagctcccaaggagaacag

SEQ ID NO: 461027 - DNA, 122 bp, Homo sapiens
gctgctgggccactggcggagcctgctgcgtcgcgtgccggcaagcccgggcctggcgcacggcctgtattggccccagcacttcctgccgcccctggacggcggcgcacccccgcactacg

SEQ ID NO: 461028 - DNA, 122 bp, Homo sapiens
aggaacacagtcacgggagcgccccagaatttccgccagcgtgtgagcaggaagacagcacgtgggcctcggtcaccctgagccctcggcgcctccaccagctcctccaccctgtgccgcag

SEQ ID NO: 461029 - DNA, 122 bp, Homo sapiens
gccgcttcctcccccagtcctgggaagacaagcagctactgttctgggatcaagaccccgcggggaggggacctcgcagcccggtccccttcccttcaccccggccgcctcctccggcattc

SEQ ID NO: 461030 - DNA, 122 bp, Homo sapiens
gcaggtgctcagccggctgatgacgggccagggcgcctgcccctacccgcccttcatggccgctgcggccgccgctgcctcagctgggctccagtttgtcaacctgccgccctaccggggcc

SEQ ID NO: 461031 - DNA, 122 bp, Homo sapiens
gaaggcctggcctagaggacagtgggtctggcatgctgggctgagaggcagtactgggagcgattcttggggcctccttgccgacaattgggtgaaaccagcggatacgatcgtagcgtctc

SEQ ID NO: 461032 - DNA, 122 bp, Homo sapiens
tcggcatgaagcactgtggtacctaccaactcagtggctgtggaacttcaactttctgaccgtccacctccaggtcctccaattccttaaaatatttgttctttaagcaatggagaatctct

SEQ ID NO: 461033 - DNA, 122 bp, Homo sapiens
catcctctgccgggtttgtctccccttaggaatgcggtgctgatgtttgtggctgggacgcgcttctggtcagcaacttttctggaaatttcagcctatattgataagctgtgagattgcta

SEQ ID NO: 461034 - DNA, 122 bp, Homo sapiens
acaggcagcaccatttcaagcctccatttcccaatatagagactgaggcccagaggtaagcgatgacttgtaccaagccacatagccaggtacaggcacagaagctgagctgagagtccctg

SEQ ID NO: 461035 - DNA, 122 bp, Homo sapiens
ctcgccctccgcctctctttcaaagcaccagccttcagtcctgcaagtcgccgacttccccggccactggaaccgccccttccatgttaaaacggtagaagacacaccccctcgggggcccg

SEQ ID NO: 461036 - DNA, 122 bp, Homo sapiens
gcagagattttagatagatacaataaaaaagtattaacttatccaacaaaaatttagtgccgattatgtagcaagcacttagtgaactttatgctgtgcatgcctcagatactttagtgaac

SEQ ID NO: 461037 - DNA, 122 bp, Homo sapiens
cacctcctgctgtgcggcctggctgctaacaggccatggaccaggtactgttctgggccccgggggttgggaacccctgctcagagacacaccgggtggtaggaggagctaaaggtggagag

SEQ ID NO: 461038 - DNA, 122 bp, Homo sapiens
catgtaggtcaggctggtctcgaactcctgatctcaaatgatcctcccgcctcagcctcccgaaatgccggcattacaggcatgagccgcctggcctggatagatgtttatgatacactgtt

SEQ ID NO: 461039 - DNA, 122 bp, Homo sapiens
gaggcagatagcagccccaaaccatggataggttggggcctgcgcagacctcaattattacggtattttacagtttataagacaaagagcttccccacacattaagacacttcagtcagaag

SEQ ID NO: 461040 - DNA, 122 bp, Homo sapiens
catcacatggctgtccctcctgggaaagtcgaagccaaagacgaggccaagcaaaagggccgggaggaggaaagggcccgcagctcagctcagccgggcgaggcgggaggcaggcactcagc

SEQ ID NO: 461041 - DNA, 122 bp, Homo sapiens
ccacgtggaatctcagaatcaccgggggaacatggagcagccgctggccccagccccacccggacctggccctgctggatgcatttcccacggctgttgaaacaaatcacctcaaacgcagt

SEQ ID NO: 461042 - DNA, 122 bp, Homo sapiens
tatatatttccgcccttagtgtggggagagcgggaactactcgacccacagagccgatcgcggagcggattctgcttttaggagtacccgccaacaagcgggaccgagcaggaatccgtatc

SEQ ID NO: 461043 - DNA, 122 bp, Homo sapiens
tgtcagtacctcacttccggctgtgggtgagtaacagtttactctgcggctacaccacatcgcgttcgtccattcaccaatcgatgggcacctatcagctgagtgatgctgctgtgcctttg

SEQ ID NO: 461044 - DNA, 122 bp, Homo sapiens
atcccatctttgcttccgtacctttaccagtgtccctgtctctctgcagtccgagaatgtcgaccggggcgcgggctccatccgggaagccggtggggccttcggaaagagagagcaggctg

SEQ ID NO: 461045 - DNA, 122 bp, Homo sapiens
cagtcattctccctggaagccccagtgtcctgaccagtaagttgttgacaacagtggatacgtagatacctgtagaatacttagcacggtacctggaatgcagtacctgctaattgttagct

SEQ ID NO: 461046 - DNA, 122 bp, Homo sapiens
gagtcaaattggcactcggccgtcgccgcccccacggttcggggccaacctaccggcgggcgctcctccgcggaaaagccccgcagtatccagagctctccgaacacagcggcgaagcagcc

SEQ ID NO: 461047 - DNA, 122 bp, Homo sapiens
gaaaatcattccattccattgagcggagtcagaaacatgactaggtcacgatcacaaccccgtgtgtgccagggtgaccgagactgggtgactttatggtgtttcaacgtgtgggttttgac

SEQ ID NO: 461048 - DNA, 122 bp, Homo sapiens
aagccaagtgcttcatagctacatgttgcgagtggctaccatacaggatggacagcattccgttttggattaatagtcccctcctaacccccactacacctgccgatccatatatctaccaa

SEQ ID NO: 461049 - DNA, 122 bp, Homo sapiens
cagctcccagggagccgcgcgcggcagttggcggggccgggcttctgccggcggcgggcacgttgctaggagctgccccaacgcctctccgggaagagggcgccaggctcaaaggccctctt

SEQ ID NO: 461050 - DNA, 122 bp, Homo sapiens
cttctcgtaccccggaagggtgcgtgcgcgctctcggagataggggtcttcagccgtgcgcgtgtggagcagggccacggcgcctgcgcagcggaggctgtggaccacatttcccaagaaca

SEQ ID NO: 461051 - DNA, 122 bp, Homo sapiens
agcctgacaatataagcaatgctataaatattatagcacatactgagaaatatgatggggcgctcagggtaggaaaacctagaagaatcgatcaggaaggtcagtactgtgaaggcagtgga

SEQ ID NO: 461052 - DNA, 122 bp, Homo sapiens
cccggggcaaatgctagaaatttgcttagaacgtccgggtcccacggaaggcgcccttgccgccctctctcgggtcgtagctccctgacgctggggcgcaaccccttcgctcctcctccccg

SEQ ID NO: 461053 - DNA, 122 bp, Homo sapiens
cattcttgttcaccttctgtgcatgcgctggactctaatttgaacctaggattagcactgcggcatcagaggctatgggggctgttcagctttcaaagataaagcagaaatgttttcaaagt

SEQ ID NO: 461054 - DNA, 122 bp, Homo sapiens
tctgctccctggtgtgttgattcttcccccagctgctgcctaatggagtccaggcgctcgcgtcacaggaaatgcctatactgccctcctcactcacttccggtggcaggtatggaacctat

SEQ ID NO: 461055 - DNA, 122 bp, Homo sapiens
gagcattccctcataaccatcactggcttggggaatggagctggcaaatcaaattgtcatcggtgatatcaggctgaatgaatactattgaaaagtccaacctcgaagatggaaacagtagg

SEQ ID NO: 461056 - DNA, 122 bp, Homo sapiens
cagcgccatcttgccctgacgcagttacaaaagtcacgggagaaatcctgtctcctcctccgcgccagcgccccaaagttttgcagaggccgagccggggccctcacctcgcgcagggacag

SEQ ID NO: 461057 - DNA, 122 bp, Homo sapiens
taacagagctggttggcttttgttgttacattaatctgagagccattgcttcacagaggacgtgaggctcgcagtgtgcttagggggtgcgcctcatcctttcctcgctaaatgcggggccg

SEQ ID NO: 461058 - DNA, 122 bp, Homo sapiens
cattcaacctcagcatctacgtattgagcagaggccctgcgccaagcactgaggagtcagcggtgaccacctcttggcttctgttcccaagggtgacagtgtcctggggtcacacgggctca

SEQ ID NO: 461059 - DNA, 122 bp, Homo sapiens
ttcattttctgatagagacaaaggagacacgtggacccaaaactccgtggacccaaactccgtggacccaaaactccgtggactcaaaactccagcgccctctgggggaggggcaagtaccc

SEQ ID NO: 461060 - DNA, 122 bp, Homo sapiens
ccccgggtccgcccgccacgtctacgcctaggcgcccccgacattgtgatcccagcccggcgtcccgcccccaactcaccgccaccgcgggcgggacctcccggaccacgtgggccggctca

SEQ ID NO: 461061 - DNA, 122 bp, Homo sapiens
ttgtagaggcacagagccattgttgggaggagatccctgaacggttgttgaccactgaggcgcccaccctccttcatcagcttgcacaggggactgtgaggcttaataagctgattgtcatt

SEQ ID NO: 461062 - DNA, 122 bp, Homo sapiens
cccccgcccccgccacacgcacctgaccctcccaagaccctcatgacggatacctggagtcgatctgtgaggcggtgtcctgcgaagacggtgccaaagccccccttacccaggagggggcc

SEQ ID NO: 461063 - DNA, 122 bp, Homo sapiens
cactgcaaacattttctcagatatgacttttcacctccaagacaggaaaagagatcttgacgtggaggcccgcccacctacaaggcagaaagctccacactcaatcttcagcatcgtcaaac

SEQ ID NO: 461064 - DNA, 122 bp, Homo sapiens
cagcgcactgccccagccagagttttctcctcggcttagaggtttattaatgctcctccgcgctcccgggggagggggcgctaggtactaccccgccaggccccgccccgttccattccggg

SEQ ID NO: 461065 - DNA, 122 bp, Homo sapiens
ggacagctcctcgcctctgcccctccctctctcccgtccctgccctcctccccccagacacgttgcacagggagcgttaaggggaaagaacaaaacggaacacacatcctgagacacactgg

SEQ ID NO: 461066 - DNA, 122 bp, Homo sapiens
ggggcgggggccggggccggggcgcggggcgagggccgggaggtgccaggtctggggtcccgggtcagggatcttggatctgggtcccgaggcaggggccggggtagggacggggcggatgc

SEQ ID NO: 461067 - DNA, 122 bp, Homo sapiens
tggagaaacactgcttggctggggctgggaacctgcctgctggaaggggtggtcaccactcgtccactcggcacctcagctcagccctcaggtgctcacacaagctgtagtctctcggcagg

SEQ ID NO: 461068 - DNA, 122 bp, Homo sapiens
ctctttgagaggtgacaacatgctagcagccctcgctcactctcagcgcctcctcggcctcggtgtccactctggctgcgcttgaagagcacttcagcccgccgctgcactgtgggagcccc

SEQ ID NO: 461069 - DNA, 122 bp, Homo sapiens
ccgcagccctgtgaatgctcagccttgtgaatgctcatcccgccgctgttcgctctcccgcggttgctgcttgcatagggtttcagatccggaaatttgaggatgcgaaacgtgagattttc

SEQ ID NO: 461070 - DNA, 122 bp, Homo sapiens
gggccgagaaatagccacgcgcgccgggggtttgagggctggagaacctcatggaagaggcggtggggcgccctgccccaagagaccccgggctgaacagagacagcggtctccggcccccg

SEQ ID NO: 461071 - DNA, 122 bp, Homo sapiens
cgaaggggcgggggaccggccctttgtgatgtcacccgggaggaggccgggctctttgtgcggttggaaaggcgaaggcgttccaggtagagcggggagggagagggtgccccttggcgttc

SEQ ID NO: 461072 - DNA, 122 bp, Homo sapiens
ggccgggcgcggaggaggcgatcccggcagcagctgctgcagcggtggtggcggagggcgcggaggccggggcggcggggccaggcgcgggcggcgcggggagcggcgagggtgcacgcagc

SEQ ID NO: 461073 - DNA, 122 bp, Homo sapiens
atgggctttaataatatggaaaacatccttttcctgcagagacagattggggactgaaagcgtcagttggctgggtggctcattagctgtctttaatgagtggcaccaccttggaaataacc

SEQ ID NO: 461074 - DNA, 122 bp, Homo sapiens
tgctgtaagaagttaacaagtaataatttcctatttaacatctgttcataatgacatttccgctgcgtttttttccatcaagaataccaaaacagtttcctaatatacagtatttgaaagtg

SEQ ID NO: 461075 - DNA, 122 bp, Homo sapiens
gctgtggacccgggaccgggcgccgctgggcgggcgcggcagggtcccggatccgtcctccgtgacgcgccggcttcctccggacactttccggcctcttttgtgtgagtgtgtgagtcaag

SEQ ID NO: 461076 - DNA, 122 bp, Homo sapiens
agccccggacatggggtcgcgccttcagaaggggacctagtggccccgctaatcctcgaacgggtctggtccttgctcttgtgaatgagactgatggacggtgcccgcagctcacttcctgg

SEQ ID NO: 461077 - DNA, 122 bp, Homo sapiens
gtaaaacatgagagaaaattgacctgtcaggggaatagatgggcccagatagtggccgcccgccccgggccagcttccctccacccatcccacctgcacagagcgcccctgcccggcctggg

SEQ ID NO: 461078 - DNA, 122 bp, Homo sapiens
aggaagcgggcagatccagctgtggcaattcctcctggagctgctctccgacagcgccaacgccagctgtatcacctgggaggggaccaacggggagttcaaaatgacggaccccgatgagg

SEQ ID NO: 461079 - DNA, 122 bp, Homo sapiens
cacttacctcggtgaagaagttatccattgttccagcgcagtcccggactcgccgagtgccgctccgactcgcggaagtcagcgccgccgcgggtccggggaaaccatgcgtgtcacggcgc

SEQ ID NO: 461080 - DNA, 122 bp, Homo sapiens
atggaaagctctctgcagcaggggcagcaaggcgggcttgtggaagtgctgcaccagctccgcggacagcagcaccacgacacagcgggtgctgaggaaaaggcttaggtcctctgccgaga

SEQ ID NO: 461081 - DNA, 122 bp, Homo sapiens
ccagaaactgttgttgaatcccatgttgccggtcctgatggttatctttctagtgagacccgaaaattcacgtggggacatgacagctttccattttcatgaattgcaaatgtggagggctc

SEQ ID NO: 461082 - DNA, 122 bp, Homo sapiens
ccctacgtagtagcgcaggtagaaatcgctagccacagccatttttgtacccgggaagcccgccgaaaacgcagccaacgtgtcccccggcgccttgcagtgacgtcatcgcgcggaataag

SEQ ID NO: 461083 - DNA, 122 bp, Homo sapiens
aacggccccgccagtgaggagcgcaggcagcaaggcttagcggaagaggcgtgacccaggcgtaccgcaggggcgtggcccgaacgagctgactttagcccttacgtgaaaggcgtggcgta

SEQ ID NO: 461084 - DNA, 122 bp, Homo sapiens
gccgggttgcgccagtgcctgcaagggaacctctggccccatttcctgggagcctgaccccgccctaggattcctggagtgggtgtgcccacgcttccggcccagacgtgggtggagggatc

SEQ ID NO: 461085 - DNA, 122 bp, Homo sapiens
aagtgatttattaaagcaacgtgttgaaacctttacaatttttagtgaagatcagggtgtcgttgaaagactttggaaaccaggttgagcatttttacatgtcacacaccacattttttcac

SEQ ID NO: 461086 - DNA, 122 bp, Homo sapiens
tctgcactttcccatttctctagtaatatttgagctaggtacttgttctatctgagcctccgtttcagcctctctcgaataaggatgacagcagacccacatatggttgctgtgaggattat

SEQ ID NO: 461087 - DNA, 122 bp, Homo sapiens
accatgcggcgctaggcctcggctctccagtccgcaaggtcctttccaggccgccgcgggcgctgctgagctctggaccggactgtcccgccctccccgccgaggaagccccccgccgggcc

SEQ ID NO: 461088 - DNA, 122 bp, Homo sapiens
cggaggctaacgtgccaaaaataaatcacaactgcaaacccgggaggcaggccaaggctccgcagggacagggcatggagcccagtctccgggcggaaggtgggggacctctggtggagggt

SEQ ID NO: 461089 - DNA, 122 bp, Homo sapiens
ttttgcctccatgggtttctcttgcccaagtcactgttactgtgaggcatttgcaagggccgtttaatacaccgcgtggaaaccgtgttcagtgtctactcacgcagaggcctgccttctga

SEQ ID NO: 461090 - DNA, 122 bp, Homo sapiens
tccgacatcgccatcgccatttctctccgggtctcacgcactcactgtcactatcggcgccgcagccgccgcggctgtctagacccacccaaggccaaccgagctcctgggctgaggaagca

SEQ ID NO: 461091 - DNA, 122 bp, Homo sapiens
aattcattccattctgggcagttcaatacggcacagtttgagctcgtggaggcttgatgccgaaaaggctacttgtgtggatttgtgtcccaaccacccgtgtgcagcgtgcccatctttta

SEQ ID NO: 461092 - DNA, 122 bp, Homo sapiens
taggtaaattactgtgtggtttctccctgagtcatcagcgcagggatgaggttggaggagcgaggttttcctgccagtatttgggttctctttacccgaagaaaccaatccccggaagatac

SEQ ID NO: 461093 - DNA, 122 bp, Homo sapiens
ggagataagagacacagtaaagaagactgagaagagacgtggccagaggaggaggagaaccgagagatagtggtgcactggaagaaaacctcaaggagggaacgagccccactgtgtttggt

SEQ ID NO: 461094 - DNA, 122 bp, Homo sapiens
acgaagttcgtgcgccaggcttctgctggcacttccagttcctctcagggacttacctttcgacctctttaaagtatttgcttgatgaaatgatgaaattcttgctctgcaaggaatgcctt

SEQ ID NO: 461095 - DNA, 122 bp, Homo sapiens
aaggtggacgccctcctgaaggagaagcggcgcctggaggcagagctggagaccgtgtcccggaagacccatgacgcctcgggccagctagtcctcatcagccaggagctgctgcggaagga

SEQ ID NO: 461096 - DNA, 122 bp, Homo sapiens
ttatctcaagataatttctaacttcccttgtgatttcttttttgatccattggttagttacgagtatgtcgtttaatttttcttttttttttttttctttttgagacagggtatcactctgt

SEQ ID NO: 461097 - DNA, 122 bp, Homo sapiens
agggaatgaatacctatagtgaggttgctgaacccagtatgcagtccaggcagcccctgccgccatgggagggccgtgcacagcgctggtccagcaggctgggtgctcagggcctcccctgc

SEQ ID NO: 461098 - DNA, 122 bp, Homo sapiens
agatctggggtgcgcctggcttggaggccatgtccttgctgccgcctctcctggggcctgcgtctgctcccaccctgccgcatgggccttagcaatcacttagccaggccgtgctgtggggc

SEQ ID NO: 461099 - DNA, 122 bp, Homo sapiens
cagtgtcttttatttgctacttcatgttgtactgcctcaggcacggggacacttgagggacgccatcctgtgacttatgcttgtgcccaccagctgccggggtccccctcccactagcgcca

SEQ ID NO: 461100 - DNA, 122 bp, Homo sapiens
ctccgggagccagtcctcaagccccgacagccgccggccccgcggtccctccgcagctcccgtcccggggagagcagccccgaccctgcccacgctcaccccgcggatcccgcggaggagag

SEQ ID NO: 461101 - DNA, 122 bp, Homo sapiens
agagggaattcagcaaacttgctgccccgggctgccggctggagcccggcagattcgctgcgcagcactgccccctggtatccagcgccgaaagtgcccccctccgcagctgcaaggctcct

SEQ ID NO: 461102 - DNA, 122 bp, Homo sapiens
tccacgtcgctgtgattggttctctaagcttccgtcagtttacaatccttgcaccaggcccgtcttgctctcgcgcgagtttttgtcgctgctgggcggccaggtcctggcaggtgcatgaa

SEQ ID NO: 461103 - DNA, 122 bp, Homo sapiens
ggtgggcatggaactcctttaagaatttttctaaggttgtctgttgagaggaagtggctgcgtatggtgtgaaaacaaacatgtcaatgctacagtgatacaaacttgacctttagtaaaga

SEQ ID NO: 461104 - DNA, 122 bp, Homo sapiens
gccggagtctgagaggccggaagtgccccttagcgggtgggggaagctggtaggcacgggcggctccgcagtgaccggactcgggggaggtgagtgatttgcctaagtaaaagggaaagata

SEQ ID NO: 461105 - DNA, 122 bp, Homo sapiens
accgcaagatccgcctcctggtttcaaatgattctcctgcctcagcctcctgagtagctgcgattacaggcatgcgccaccacggccggctaattttacatttttagtagagacggggtttc

SEQ ID NO: 461106 - DNA, 122 bp, Homo sapiens
gatcttccttcaacccagctttcacccgtgttcttgcgtgaagtgcagtgtgtttgtatacgtggccggtacagcagcggtgccgcccctggcattttcctggtccacctgactggccacag

SEQ ID NO: 461107 - DNA, 122 bp, Homo sapiens
ttacctcgaactctcttcagcgaaatgggatccttctcctgttctgctgacattacagaccgcaaagcatgactcccccccaggccgcgggaattcggtctctttgatgctgcggcggcggc

SEQ ID NO: 461108 - DNA, 122 bp, Homo sapiens
gctccaggagggagaatgggagaggggcaaggagggaacgagtggaagattgcgtcacgacgcacataaagacgtacgaagccgtcgccaagtaagggcaaagacctagcaacccggaggga

SEQ ID NO: 461109 - DNA, 122 bp, Homo sapiens
aggtcctgaggcttagagacagccccgatggccacggtgccactgtgtggatgaatctctcgcacaaccccgaggagaaaaagacagaggcccgcctgatgctcttcctctcccccttccct

SEQ ID NO: 461110 - DNA, 122 bp, Homo sapiens
gccatccccacacatgtgacctcagtcagcattctgccctttcatgggtgtcagttgtctcgtccataaaatgggatgatgttcttgttccagccggcatactggatgactaaatgagggaa

SEQ ID NO: 461111 - DNA, 122 bp, Homo sapiens
cacccacgacggtgcgggtctcgggcgttctggagatacgtaggggtgaatttatgtttccgacgattgcatctggaggggtgtgtaagactctgtggctgaagaaagctattacgcttctt

SEQ ID NO: 461112 - DNA, 122 bp, Homo sapiens
ctcagagaaggcaggtgtgtggaaggccttacgttgtatgcacacacaaatgcatgtgcgcgcgcacacacacctctcagagaagaatctattgcttcccccattttgcatatagtaatatg

SEQ ID NO: 461113 - DNA, 122 bp, Homo sapiens
cacagcaactccataaggaagagcctattatttttccagttttacggataaggaaactgacgttccaggacagtaaaaaacttacctcgggttgctgggcttcagacccaggccgaatggct

SEQ ID NO: 461114 - DNA, 122 bp, Homo sapiens
ttcttattattcttgtgtccaaaatgacagtaaaacacaaacaatatgactgtgctgatacgtgttggtggcacctattaattttttggttctggcactgaagataaatatgtgtatttatg

SEQ ID NO: 461115 - DNA, 122 bp, Homo sapiens
gtgcggggggcgtccagtgtccctgaacctggcgtgtgggggctggagcttattgggaggcgagggaggtggccaggggagccgggaccgtgcgtgtggccaggccggtagcgcccagtaag

SEQ ID NO: 461116 - DNA, 122 bp, Homo sapiens
tgcgctcgacctcgcggtgcactcagcaggggctgccctcggtcccaccgtctcccttaacgcccctgcctcccagtcccacggcccccaggaggagccagtaccctagcccagggagccgg

SEQ ID NO: 461117 - DNA, 122 bp, Homo sapiens
tataacataggggctttaagggaagcccgcttatgctcagaatttcaaatgaagccacagcgttggaggatgggcggttggtgggttctccaagactaagcagagggaacagcagaggagga

SEQ ID NO: 461118 - DNA, 122 bp, Homo sapiens
gtcaaggaaaggggtgacagacggcacctggaaaatggggtcactcccacccgaatgctgcgcttttccgatgggcttacgaaacgacgcaccagtagattatatcccgcacctggcttgga

SEQ ID NO: 461119 - DNA, 122 bp, Homo sapiens
cctacttgcctttaaaaacccagttcaaattccacttttttttccccttttttattttgccgaagactcatgatattgcttggcttggtgctaggtgcttggtgctgggggtactgcactga

SEQ ID NO: 461120 - DNA, 122 bp, Homo sapiens
gtccaggcccacagacagcaggcagtggccggggttgcaggaaggctctgatccttgtcccgtcctgcaggcctgttctcggtggatgactgtggaaagggcagaatgctcctagcttggcg

SEQ ID NO: 461121 - DNA, 122 bp, Homo sapiens
aataacttgtctgaagttacacagctaagaagtgttattgccaggatagagccccaggcccggctctcagccatgctgctgtctcagtgtagcttgatgtaggtggcttctccctgcccatc

SEQ ID NO: 461122 - DNA, 122 bp, Homo sapiens
gaaatacccccccctcactccagccctagtcctggtgcctggatatgtgcactccctgtgcgctctgatccccgcagacacaagtccccagcccctccaggacagcaataagggtcttacaa

SEQ ID NO: 461123 - DNA, 122 bp, Homo sapiens
ctctccactgcgggcccctggggccgttacctaactggtcccagctccaggccaagaggccgcgcttcagggaagggcatgcgctcgccggcgacgcccaagccccgagccccgagcaccgg

SEQ ID NO: 461124 - DNA, 122 bp, Homo sapiens
gggctgctcaggagcccacggttgggcggcggaggctcaggcatggcgggctgcagttcccgagccctgccccgcggggatgcagctaaggcccagcgagaagtcgagcacagcagctgctg

SEQ ID NO: 461125 - DNA, 122 bp, Homo sapiens
tgaaagcggaattcttcacgctggggagagtgtggtggaaagagaatgggactagagtcccgaagcaagtgaccaagtgaccactcatccttataatgggccaaccttccaggtccggtcca

SEQ ID NO: 461126 - DNA, 122 bp, Homo sapiens
acctggctctcggcgcctaggttttctgcctctgccggccccggagcccgatccaggccgcgcctccctgttgcccaaggggcgtgcatctttgggaccctcttcccggggaggtgcaagaa

SEQ ID NO: 461127 - DNA, 122 bp, Homo sapiens
cgctgaaggtcctagcttcccagcaggggtgtcccagtcaccccccattgccgagcttcgcggggtcttgccagccttctgggccacgtgccttgggtccccggagcactggggcccaaggg

SEQ ID NO: 461128 - DNA, 122 bp, Homo sapiens
atcagttgcaggaacgcagcatcacacacccagtcccacgctccgtttccatcaatcagccgcacatgctcagtttctcagttgcacatacttgatgacacactcaggaacatgcccttgct

SEQ ID NO: 461129 - DNA, 122 bp, Homo sapiens
ccccacccgcgactggttccccgggactccccagagcgcccgcctcagccctgaccgcggcgcagcttacttctcctgagacccgctgagccccgggcctccagcctcctcccccaaaatca

SEQ ID NO: 461130 - DNA, 122 bp, Homo sapiens
ttctcaatggcctgaaagctcagctgactcccatgaagtttgccaggaacataaggctgtcggtgacattcgtggcgccaagatttaaacacgcggttgcacgcattggccactgtctgtgc

SEQ ID NO: 461131 - DNA, 122 bp, Homo sapiens
atgggggtgggccgggaatggaccagtcgagacaccaattccagggttcggttgcgcttccgtcgctgtttcctttcgtcactttgtggggaaaagtggtagcaatcatacctcttcttgaa

SEQ ID NO: 461132 - DNA, 122 bp, Homo sapiens
cacacacacacacacacacacacacggctatgtggaaattaaattacgttgtgtgcctcacgtacccagttcatggtctgacctgtaatatgtattaataaatgataactattactgataga

SEQ ID NO: 461133 - DNA, 122 bp, Homo sapiens
cgtttgctccggcaagcttgggcgagcaggtcaagacctcagagttttagaaagcaggggcgaagttttcaagcacgatgggaacacctgtaggtgcaggtgcctgagggtcggccgaccac

SEQ ID NO: 461134 - DNA, 122 bp, Homo sapiens
gcggcttgggaagcccaggggaccctgctgtttgcgggtggtcggtagtgagtccggagccggacaggacctcccagaggcatttcctaagtttgagggaagcgggatgcgcctgaagacag

SEQ ID NO: 461135 - DNA, 122 bp, Homo sapiens
accaggcgcggtggctcacacctgtaatcctagcacttcaggagaccaagactggaggatcgctggagcccaggagttccagaccagtcctggcaacagaactagaccgtgtctccaaaaaa

SEQ ID NO: 461136 - DNA, 122 bp, Homo sapiens
gtggcagggagaccaggttcccccctgtggcttcaggagggtgggcgccctgagagaactcgcttcaaggcccctgtccctgcctggaaggagcccagcgtgcgaattccagctgccctgca

SEQ ID NO: 461137 - DNA, 122 bp, Homo sapiens
gcggtccaatgagacgcgtcgcttgcatgcgcgcaccaataggagggcagtgggtgggggcgccctcgtccgcgcccaattggaggctgccgaggcggggccgagccgcgaagcccagcccc

SEQ ID NO: 461138 - DNA, 122 bp, Homo sapiens
tatcccagctgcacgcacacagagtggggtgtgaaatatcccagccgcacgcacacagggcgagtgtgtaatatcccagccgcatgcacacagggcaggtgtgaaatatcccagctgcacac

SEQ ID NO: 461139 - DNA, 122 bp, Homo sapiens
cactccccactcggccccgcccacagtgcggccacgcccgtagcacgcccctcccggccacgcccacaaagctgcccacatggccccgcccacagctcgcccgctccgcacccccggcccct

SEQ ID NO: 461140 - DNA, 122 bp, Homo sapiens
tccggtgagtcccagccccgagttggctctggcgcccgggtacccgccagtgccggctgccgatgaccgattcacgctcccggtactggggccccctctgcccagccacccctacccagagc

SEQ ID NO: 461141 - DNA, 122 bp, Homo sapiens
agaggaagaaaggatcattatacgagtggaaaaaatgaaccgtctcgactcagcaaataccgcagccctgccctccttccagacattccccccctccgtgctgcccccacactaaaaacagc

SEQ ID NO: 461142 - DNA, 122 bp, Homo sapiens
aactcaaaggaaaaaagttgcccagtttgtgaagtagaaagacagaatggccctatttcgcgtggatggaaatagaatcatttcttaggaatataaaaagggaattgcccgaagcacttgca

SEQ ID NO: 461143 - DNA, 122 bp, Homo sapiens
ataggtcgctatttgcggacgtggaaaatggagctaaagcaaaaacttgttcgtcgctaccgggcttgcagttcccaatagggcagagtccgtcatctttttcgaaagggcaattattttga

SEQ ID NO: 461144 - DNA, 122 bp, Homo sapiens
aggaagatatgtgggctggtctgtggcagaagcggtgcaagtactcggagacagcgactgcgattgcttacgagcagcacgggttctttgagcaggtaaacctcagaccactgacggtcttg

SEQ ID NO: 461145 - DNA, 122 bp, Homo sapiens
ggctctagctcacacttctccatcagggcttcattgcctgtggctcagtctgtctgtctccggtggtgtgaatatgtgccataacctacctacccccatgggccaaactctcacttgaaaaa

SEQ ID NO: 461146 - DNA, 122 bp, Homo sapiens
gcccagcctttctgtatgcaagccattcggctccctttgggtttctttcactgcttagggcggtagtctgttaaaggcatataaatacataaacacaaatcagcagtgattagcctagatta

SEQ ID NO: 461147 - DNA, 122 bp, Homo sapiens
gtgagggagcggctggctgagagattaggatctcagctcctctacaagatgcatgagcctcgccgctcctgtgcgggccccattcctcttctgatccattagcggggtctccatcacggctg

SEQ ID NO: 461148 - DNA, 122 bp, Homo sapiens
agcagccacaaaggagtggcatgaaggcagaatgtgggcagaaactggggagacaaacttcgtcctttgctgaagtgccagagagggtggcagaaagaagtgtgaccttgtttgtgagctga

SEQ ID NO: 461149 - DNA, 122 bp, Homo sapiens
tctgtggatccccttcagatgatacggtttaatggggtattggggaaataagaagccatccgagcacaagcggtccctgagggtgggccacctcttcggctccttgtcatccataatggtcg

SEQ ID NO: 461150 - DNA, 122 bp, Homo sapiens
aaacccacggaggtcaccagccctccccgcatctactctcctaacagctcaggacagccccgtcacactactgccagccctggtgactcactttgttggcaatttttaaagccctcttcatt

SEQ ID NO: 461151 - DNA, 122 bp, Homo sapiens
gttctcgacctcctcttcagtcacttcgaccagcgtgcagttctcatcctccgacggcaacggctccgccccatgcctcgtgacccaggggtgcagcttcaacgaacgacaggaggggtgag

SEQ ID NO: 461152 - DNA, 122 bp, Homo sapiens
ggacggggcagaccgagggctccaacaccctgccaaggccactccgggaggagcaagcaccgcgttttcccagagagaggagtttgagttgagttcctcacctgtgcctgtgactcagcccg

SEQ ID NO: 461153 - DNA, 122 bp, Homo sapiens
tctgagtttggaggcatcctagtctggttttgatttttgttgttatgtttaaacacttgccgttttctaattctggtgaagtccatctagatagcaatgatctcaagtgtcctcccttgatt

SEQ ID NO: 461154 - DNA, 122 bp, Homo sapiens
cagaacatctgagagcctggtcttcactttttgtgcagagaccacaatgcttatgaaatacgaaatttttcctgtggaagatatcaggtcggtgcaaaagcaattgcggtttttgccttttt

SEQ ID NO: 461155 - DNA, 122 bp, Homo sapiens
tcctgatagccttcccgccagctgcgcatgtgatggggtgtgccaagggccacgcagagccgcgacttccccaagctgctccgggtgtccccggcccacgcgctgagcacgctctggggctc

SEQ ID NO: 461156 - DNA, 122 bp, Homo sapiens
ctggtcaattgtatgcctaaaactcgaaaaccaaggcgcccagggttgtgtgagggtttccgctctgcgccccgcggggttccatgggtcctgcacagcatcaggcctgagccgccggtcca

SEQ ID NO: 461157 - DNA, 122 bp, Homo sapiens
cagtgactcacgttccggagggaggagattcggagccttagctcctggcggtctccactgcgcgccatctgtgccaaccggcccttggacttgcgatcccctagcagctggtgcctggggca

SEQ ID NO: 461158 - DNA, 122 bp, Homo sapiens
tgatatgggggctggatgctggatttgcagtgaatggtccagcccggggccacttcaggccgtgtcacccacacgctggggtgcactctagcagggggtggtaagccaatttaggggctgtg

SEQ ID NO: 461159 - DNA, 122 bp, Homo sapiens
cacaacaataattgtggtttagactctttacagcacactgatattggcatctcatttcaacgtaattttgaccacatagctccctaacaaataggtcagccagtttcaggagtttagatgct

SEQ ID NO: 461160 - DNA, 122 bp, Homo sapiens
cgccagggatgacccgggacctagtcccccacccagcgggggcagcagcgcaatgaggggcgtctcgcactcccccagcagcacatccctgcgaagtcccgcgcccctgtctagcaccttgg

SEQ ID NO: 461161 - DNA, 122 bp, Homo sapiens
cagtttttgctcttttgtgttgtactgaacacaatatttgtgtttttattatttatgccacgtcagtggggcaagaaatctggagtgagtgaagaaagctaagttgtgaacaagagtgtttt

SEQ ID NO: 461162 - DNA, 122 bp, Homo sapiens
tcagcgcttcatcggttcgagtcaattatctgaggcgcggaggcggcgggcggggcgaggcgattccccggtggggctgcggagcgcggcgccgagactcagaggagggggcgctggggaag

SEQ ID NO: 461163 - DNA, 122 bp, Homo sapiens
tcttgatttctgaggggtttttggcgccccctgaagttttgcactcaagtgcctcattcgcgccctacccaggtccccgcccaggatcacaggatttgtgaccctggccttggccttgtccc

SEQ ID NO: 461164 - DNA, 122 bp, Homo sapiens
gaggaggcctggggagcagaggtcaggggacagggaacggtgtccccgacctgtgggaagcgtggggacagaggctgcgtcccgacctgcaggaagcgaggggcagggaacggtgtcctcga

SEQ ID NO: 461165 - DNA, 122 bp, Homo sapiens
agaacaggaaagcatctggtaagaagaaatcatgagtccgtcagtgcccttactcatatgcgtctccagtggcctcatgttgtggtcacaggagtttcctgttcacagcaatgtgtgtgata

SEQ ID NO: 461166 - DNA, 122 bp, Homo sapiens
ttagaagaccctcggggaagtgtgtctgcatggatgcgtgtgcatgcgtgtgtctggctccgtgactcttggggtgcagcctggatgggtgggctcccagcacaggcagctggggctctccc

SEQ ID NO: 461167 - DNA, 122 bp, Homo sapiens
agccggggaagggggaggagatggagccacgtggggtttagtgcttggagacgccccaggcgggcagcctccagcgcttagagaaaatgcgagaaaatcaggcccttccgtccggcgcacag

SEQ ID NO: 461168 - DNA, 122 bp, Homo sapiens
agataaatcctagcttaagagagctacgttggaaccagggcacttcttgttttacaatagcgagcagtttacgaaaaacactgctcctggtttaatgcttcatcatctaagaattggaatca

SEQ ID NO: 461169 - DNA, 122 bp, Homo sapiens
aacgagacatggggttttactggggcttacatacaggggagagagtccgctggtggtgagcgggggcaggagaaaccacaaccggttgcaaaaagcagtttctatagcatttccacttagca

SEQ ID NO: 461170 - DNA, 122 bp, Homo sapiens
ctgcctcaccccagaacctagtgcagcctggtcgctcgagaacctggcaggaacggggtgcgcgggaggaaagggaagtcagtcttggtgcttttttgaactcctgcttcccaaagccagcc

SEQ ID NO: 461171 - DNA, 122 bp, Homo sapiens
gtaactcctgagctcagatgatctgcccacctcggcctcccaaagtgctgggatcacagacgtgagccactgcgtccggtccatctgacttctcaaagactttagaccttgacttcagtgat

SEQ ID NO: 461172 - DNA, 122 bp, Homo sapiens
ccggtgacccagactttggtcagaagagtaccacagcccaacggggctgcggacggcaggcgtggagcacgccttggcgtttcccctcaaccctactcctctaccatcggagctggaaatga

SEQ ID NO: 461173 - DNA, 122 bp, Homo sapiens
tattttaagccttaattttttttctcacaataggcttattatacctttaccaagtagttacgtggaaaacatttatttatttattggatctagttgataaccaaacatacagttctttccta

SEQ ID NO: 461174 - DNA, 122 bp, Homo sapiens
tgaagtattgatgacacgtcacacaactttgaagaggttttgtgacataccctgaaaaaccgcagcttccttttctaggttgatgagtcaggggatttcaccaataaatgtcatacttagca

SEQ ID NO: 461175 - DNA, 122 bp, Homo sapiens
cagagctcagagagccctttccattgtccttgattcctttttgctgtctttcttacaggtcggggctgccttttaaaccccatccttgggttaggtatgtgttctccttgcatctcagctcc

SEQ ID NO: 461176 - DNA, 122 bp, Homo sapiens
gacatatctccctgcaggatcagtgacagggagacagctggccggcctcagaacgagctccgccccataaggactgcacggctgtcctgttagaaaagcaacggtgaggggctcctccccag

SEQ ID NO: 461177 - DNA, 122 bp, Homo sapiens
acatatatattacttgagacctctagactataaaatacttcaaaagtctagtccttaaaacgtagggcaaaaaatacctcaattttggccgggcgcggtggctcacgcctgtaaacccagca

SEQ ID NO: 461178 - DNA, 122 bp, Homo sapiens
aggccccaacttgccgtgctgtgaacacatcctcagaaccgggcacatgcctttttcttgcggctacagctctcccgaggaattttcaaagcacacggggttcgcttggcaggagtctccca

SEQ ID NO: 461179 - DNA, 122 bp, Homo sapiens
gaatgctctccaggagtgcagtgggcgccggcggacttatttagggtcgctgctgccaagcgtcagagagcgaaccggaggcccggggctgggggctgtggtgagaggcgcccctttctttc

SEQ ID NO: 461180 - DNA, 122 bp, Homo sapiens
tggtaggggaggcgctcaggctggagttcttgctgctcagggcggagaagtcaacaaggtcgtcgttgctggactcctcgtgctccgtgtccttggcgcccagcagcgagggcggcagcccc

SEQ ID NO: 461181 - DNA, 122 bp, Homo sapiens
aggatggtttagatgcccacttctcttaacatgtgaaatacccaaggaaattagtgcttacgtgctcccttgttttggattgactgttgcagcaagaagaaggattccagacattccattca

SEQ ID NO: 461182 - DNA, 122 bp, Homo sapiens
tgcctgtcaccctgtcctgcccagcggcccgagggcagcagtgggtgtgagggcagcccccggcctcccaagagcagctgagaggatccctgcgggaatccgggcttcgggtgcatgcgatc

SEQ ID NO: 461183 - DNA, 122 bp, Homo sapiens
gaacccaccaattccggacacattttggcgaccatgaagggactttcgcctattgccaagcggtgagacaatcgctgagcagtgagaccatcacctattgccgagcggtgagaccattgcct

SEQ ID NO: 461184 - DNA, 122 bp, Homo sapiens
gccctcgagcggcaaacaccaggtgccagggcgtgagcaacagtttgcgtggaggccactcggtctccacagccacaaatgaagcccggcgctgcaagtcccggtccaggaagagcagcacc

SEQ ID NO: 461185 - DNA, 122 bp, Homo sapiens
tcccattgattcacatttttgagaggatggcttctttcaggtctgaaaaagacagagaatcgcctccaccagcttacactggaatagctggagacctggaggaaaagtttgaagtgccagca

SEQ ID NO: 461186 - DNA, 122 bp, Homo sapiens
gtgagcttccagcatctgtattttctgaatccggcagataagaaatgcttgagccaggaccgattgattagcagcggtttagagatcttatctgtcaaccgcatccgtagaaggagatcgtt

SEQ ID NO: 461187 - DNA, 122 bp, Homo sapiens
tgctgacagccctgttggtggggctggggatgtcagcggggctgcctctgggggcgctcccggaaatgctcctgcccttggcgtttgtcgccaccctcaccgctttcatcttcagcctcttt

SEQ ID NO: 461188 - DNA, 122 bp, Homo sapiens
catgtattggtttgtgagtgtttctggaaaaccacggtgtgtgaagaccaatttccatgccggcattgcatgcatccaaatattaataatgcacagaggcacagaattagagcagttaagag

SEQ ID NO: 461189 - DNA, 122 bp, Homo sapiens
cctggacacccatgcttcgtcggtgggcagacgcgatagcggctgcgcaagcaggataggcgacgatctgggcgcgaagctgggggcgggcgcgtgcgcactccgcggggggcgaggggggg

SEQ ID NO: 461190 - DNA, 122 bp, Homo sapiens
gaggagaaggcagagggtcgccttcgtggctttaaggcagagtgaggcgccctgaaatcccggacctgattgggagtagagcagatcggcagcgtctttggagcaaggcaaggggagtaagc

SEQ ID NO: 461191 - DNA, 122 bp, Homo sapiens
aaggtacagtatataataaaatttatatataagaatataatttcatggtgtttttacttacgtaagggaatcattccttcagcagtggaatagacttgctttttccattacatttaacatag

SEQ ID NO: 461192 - DNA, 122 bp, Homo sapiens
gaggatggagcgctgagcctggggctggctaggatgacctggacagcaacctttcctcaacgcagtcatcttccctcctccccaaatgtaaaaatgcagctgctttaagctgagagaaataa

SEQ ID NO: 461193 - DNA, 122 bp, Homo sapiens
ttgatgaaccactcgccgtcgcgtgggcagggggatgcgcggcctgagtcggggaggctacgtgaaccgcgctctatccaggagtcacggcggccggccccagggccgggggtgggggcggg

SEQ ID NO: 461194 - DNA, 122 bp, Homo sapiens
caagcaacagcaattgcagctcctgctggttctactaaggaggtaaaaataaaggcgactcgctttcaggtgggcaatgatctgttactgcataacaaaaaaaaaggcagtgttctaatcta

SEQ ID NO: 461195 - DNA, 122 bp, Homo sapiens
atccctcctaacacttgcttcttccaaatcagcaagattagagcagtcaacagctgactgcgttcagaccctgcaggctgggctggcctgcccaggacctgagaaggggcagctccggtggc

SEQ ID NO: 461196 - DNA, 122 bp, Homo sapiens
agtaaaagggaaaagcaacaggtgtcagaacagaagggaaaatgtgttcctgcttgtgtacggaaaggcaaacaggaaaggaaagaaagtagtgtttcttaagccccagctttatgctggac

SEQ ID NO: 461197 - DNA, 122 bp, Homo sapiens
tctacctccgcctctaacaatgaactccttgtttctgcggtgcccaaatctctctaaacccgggtgggcgcggggcggttagcggagacgtgggagaggccgagagcaaagctcgcgccctt

SEQ ID NO: 461198 - DNA, 122 bp, Homo sapiens
ttaaaccagctgataggaactcagaactcgcggccttgttgcggagcatgtgggagagttcgattcaggcggagaaggagtgggcactcctactgaaagctgttcacttctcgggaggtttc

SEQ ID NO: 461199 - DNA, 122 bp, Homo sapiens
gtgttgcggggtggagaaagagagagagcacaggcaatttcctctttccctctccaagagcggggctgctcccaggttcaggaaagcaggtctgttctgtgagctcttgtgtgtgtgtgttg

SEQ ID NO: 461200 - DNA, 122 bp, Homo sapiens
atttactcttagatccggcctatggtttgttgttttgagccagggtttcactctgttgcccgggctggagggcagtggcatgatcacggctcactgcagcctcaacctccccaggctcaggt

SEQ ID NO: 461201 - DNA, 122 bp, Homo sapiens
gggatttccaaaggaaaagaaatcaggatgtcaaagagatacctgcactcccatgtctaccgcagcactaagtcacagtagccaagatatggaatcaacccaagtgaccatcaatagaggac

SEQ ID NO: 461202 - DNA, 122 bp, Homo sapiens
tgtaactcctgtccgcccacatcagcctgtctttactgaactgcccgctagttcatcctacgtgtatcagggactcttgtgctcatatcctagtgtttgtgttcagtgccgtcaacactgtc

SEQ ID NO: 461203 - DNA, 122 bp, Homo sapiens
tcttaggttccgtggctcgcggattccgggagcaccccagggagtggcacttgcacgccgcggaccgcagggatccccaagccctgcacccagattcttccccgccacggagagacaatcat

SEQ ID NO: 461204 - DNA, 122 bp, Homo sapiens
tatttaaatgaaacaaaacattttttcccatagatttcattcactttcaagtaatctgtacgaagaagttgagaataataaaaaatggacagaaaaccaatttctcaaatatagaaaagacc

SEQ ID NO: 461205 - DNA, 122 bp, Homo sapiens
tatcttaaacaataccaattgacttccggttatgaaagaagcagcatcctgttctgcatgcgcagaggtgatgctactggtccagagtcaacaagaaagttttgagttattctcctaggaga

SEQ ID NO: 461206 - DNA, 122 bp, Homo sapiens
gagaccaatgccattcaggcagtgagcaggaagctgcttttatggggagctttttggcaccgtgtccgacatacactccagtcaatcacagtaaagggcctaataacagatgtggtgattaa

SEQ ID NO: 461207 - DNA, 122 bp, Homo sapiens
ttgcacgctgcacttaatggactggactcttgccatggcccaggagtcaggtgtttggagcgaggcagggcagttggcactccactcctatttggagggacttcatacccttgcctcttgtg

SEQ ID NO: 461208 - DNA, 122 bp, Homo sapiens
aaaccacatcatagccacacagaggagggaatgcagccacggagctggaattgcctgcctcgggggtgatggttggagtccctcaatatttgacaagagtctatctttattttccgaaaaga

SEQ ID NO: 461209 - DNA, 122 bp, Homo sapiens
taaatcctggctgtggcctcaatcctgcagcgaagctgcccagatcattttgtgtttgggcggcggctgagttcccaaacgcgcgcggagaccctgggaaggaggaagtaagcgcgaaagtg

SEQ ID NO: 461210 - DNA, 122 bp, Homo sapiens
gaacaaaggctccgcacaccagcccacagcgtacctccaaaatgaactttcttcttgaaccgtgaattctcggccatcctttctaacctgggtgtgaccatctcactcggaccactgctcct

SEQ ID NO: 461211 - DNA, 122 bp, Homo sapiens
acttaggattccccacccactaaagattccctccatctctcacttgggtgcatttgtttccggggcaggtgttgggcccgctggggctgggccaggagtgagctccgggttctgggctgggg

SEQ ID NO: 461212 - DNA, 122 bp, Homo sapiens
cagggcaggtgcacggagccaggtgcaatgctcccaggctggtgctgggccctgcggggccgcctttcaccctgttccacgcgcacctctccgggaatgctttccttggggcacttgctacg

SEQ ID NO: 461213 - DNA, 122 bp, Homo sapiens
gaagtttcacagctacatccaatgaggacggcaggtagcgaggtcctatccgaagctcttcggcgtcatgagcagccaataggagttcgtgtagaagcgagtctgctcaacagcttgttatt

SEQ ID NO: 461214 - DNA, 122 bp, Homo sapiens
ccccaacaccggaagtagatttctcaataggcagggctgggtatgagtcacaggcaattccgttttgtttgggaccatgagacctcccactcctggggccagaaggagttgctgagaaggag

SEQ ID NO: 461215 - DNA, 122 bp, Homo sapiens
cctgggtcctggggccctgcccaggggaggtgaatctacaggccaatgggagtgccaggacgggctcctcccctaatagagaaaaaaaaatgatacacaagctaggctgggcagaggttatg

SEQ ID NO: 461216 - DNA, 122 bp, Homo sapiens
ggcagccggactgcagccggggccccgcactcgcagccggcgcgaaagttccccgcgagccgcccagcccacatctgggggcagctggagccgcccgcagctgcagcaccgcagggcgcggg

SEQ ID NO: 461217 - DNA, 122 bp, Homo sapiens
acttggcagatagcgtgtaagaaaggccctgggcagcggaggctgctgtgtggagtggctcgattcctgatgtgcgcagtaggagagaggccggggctcagtcagggaggggaccggcggcg

SEQ ID NO: 461218 - DNA, 122 bp, Homo sapiens
cgggccggcgtactggcctggtccagcacctgcggggccctcgggcttggagggctgggccgggcggggaacgggcggggcgggccggaggcggcggcggctgactcgccttctctccgggg

SEQ ID NO: 461219 - DNA, 122 bp, Homo sapiens
cgttacctgaagaccttcagatccttccaaattatagcatccaagcccttctatgaggcccgtggcaggatcagccgcacagaattgcaggagccggccggtggcgctctccgctccgtttt

SEQ ID NO: 461220 - DNA, 122 bp, Homo sapiens
ctcgtgatgcgccgttttttaagcctgtcggaatagcgcagtattcgggtgggtgtgacccgattttccacccctttctttgactcggaaagggaactccctgaccccttgcacttcccaag

SEQ ID NO: 461221 - DNA, 122 bp, Homo sapiens
ttgcctgggtcctgttgttctccaagccaaatagcatctctgtgctgacagacgagtctgcgtctgcagacgcagcatctcttgactgtttgctatttaacgacagtcgtaacacatgagtg

SEQ ID NO: 461222 - DNA, 122 bp, Homo sapiens
ccatgccccttgtgggacaaagccccaattcgcaggctaccctccagagctccagcggtccggttctccccatcagcaccctctgcgcacactgacccgcgcgtccctccgcagcctgaccg

SEQ ID NO: 461223 - DNA, 122 bp, Homo sapiens
taggagcttaaagaattgacaagctctagatttcatttccccaaacctctttgtccagctcgaacccacagaacagggacaaaagtcgacaaaacccagcggtgcctcacccagaaacctgg

SEQ ID NO: 461224 - DNA, 122 bp, Homo sapiens
tgaaggcacttgttggtaaaagacacagacgtgtcggtgtttgcctctcccggggaagggcgaaacgctctgaagttctctggcgctcttctcaggagatgattcggcctcccctcctaccc

SEQ ID NO: 461225 - DNA, 122 bp, Homo sapiens
taggatagagctactaccttgggaaacccccacatatcagtacatgtaagtctttatctgcgcctttcatattccccaggatagaattctacaatattcaatgttttgggtgcgatggggaa

SEQ ID NO: 461226 - DNA, 122 bp, Homo sapiens
ataaggaggtagaaaggaacaagcatctgtgaagggaccacagtatgccagaggccttatcgatgttaaaactgacagtgttcaataatatgaaagatttaaaaagatgaggaaatgttcta

SEQ ID NO: 461227 - DNA, 122 bp, Homo sapiens
gaaatgctcagcctcgggaaacctgtgtgcgcgaaagctcagcctcgggaaacctgtgcgcggaaatgctcagcctcggggctctggctgcccacttggcctgggaccttcctgctcccctg

SEQ ID NO: 461228 - DNA, 122 bp, Homo sapiens
caagagctgcagcagtccataaatgatcctttctttccactgttgatagttgaaggcagccgtttccagcttcttgccggtgatcactctgctaaaaatagctttgatgctgtcacatgcaa

SEQ ID NO: 461229 - DNA, 122 bp, Homo sapiens
ccctccccgaagggcggggtccacggcatctcctgcccagtctgacctcgcgcggagccccgttctctgggaactcacctccccgaagctcagggagagccctgttagggccgcctctggcc

SEQ ID NO: 461230 - DNA, 122 bp, Homo sapiens
aggtctaaaagtgtcctttgaaagaacccttaggaaagtcacactagcatttccaggagccgtgcggccagtggacccaggtgtgtgtggcgtctgccctcccccaccgccacctgactcag

SEQ ID NO: 461231 - DNA, 122 bp, Homo sapiens
ccggctcggcgggaggctgttgctggcgggaagatagccgcgggcttttctgccgcgtctcgcgggtgggggcaggaagaggacgacccattccctggggagatctgaggacggtggtcccc

SEQ ID NO: 461232 - DNA, 122 bp, Homo sapiens
aaaacacagtaacagcaaaatgaattgagcctttgaaggcattgcgctaaggtttttactcgcaatcatctcatgcactcttctcaactctgatagagtaagtaccaccatcccccttttgc

SEQ ID NO: 461233 - DNA, 122 bp, Homo sapiens
ggcgggctggggaggggaaggagattcccaggcggggccctgagcctgcagagacggtgccggtaagactgccaagttctctaagaggcagacgctacactaggggtgcccccagtgcagtg

SEQ ID NO: 461234 - DNA, 122 bp, Homo sapiens
cagctacggcctcaggtgagtggctcagggaagggtcgctgaggctcttcccagggcccccgggcctctcttgggccgctccctgggagtgctttaacctctgccgccattccgcttcgtct

SEQ ID NO: 461235 - DNA, 122 bp, Homo sapiens
gagagagagccagaactgtttacagagcccgggagatgggcccaggcttgacagccgggccgacttgaaagacaggctgcagtggactgtggccccaacagctgggtgtgtgcagggtggga

SEQ ID NO: 461236 - DNA, 122 bp, Homo sapiens
ttctgctgttaatcattcattgggcccgtcaaaagtttctgcccatctatttccatcaaccgtccttgaccagccaaccacatggctgaaattcagggactctttggtggagcaattaccag

SEQ ID NO: 461237 - DNA, 122 bp, Homo sapiens
catcgccctcaacttcctgcacgagagggggatcatctacagggacctgaagctggacaacgtcctcctggatgcggacgggcacatcaagctcacagactacggcatgtgcaaggtgcgtg

SEQ ID NO: 461238 - DNA, 122 bp, Homo sapiens
ggggcacgtggacccgcgcagcctgggagccaggaaccccaaccccggcgaggggcgcctcgcacccccgtcctcacgcagtccccgaggcctcccggtgactgccgggtgtgggaggagga

SEQ ID NO: 461239 - DNA, 122 bp, Homo sapiens
atgcgtgtgtcctgcctcgtggtgtgtgtgtaggttgtgttctgggtgcatcctctcatgcgtgtgtcctggctcgtggcccgtgtgtaggtcgcgtgctgggtgcatcctctcatgtgtgt

SEQ ID NO: 461240 - DNA, 122 bp, Homo sapiens
gcggctcagctttccaggcgcctccaagggagcccgggagggcagtggggagatcagagacgagcaggatctcctagatcgtgaactctagaaaagagaaatcggccaatgacggtccgcat

SEQ ID NO: 461241 - DNA, 122 bp, Homo sapiens
ggaagaagttcggggactgcgcgggggcgctgtgctctccgcgggggaggttggccgagacgctcggccgctccgggcaggggaggaagcccgctgtccccggctgcttgcagactgaggcc

SEQ ID NO: 461242 - DNA, 122 bp, Homo sapiens
tggcctccacctcctcacggtcagctgtccggaaggcctcgagtcgcccctcctggatctcgatgtgccacatggtgttccttcaaacaagaggcaaagcagctggagacgggccccacagt

SEQ ID NO: 461243 - DNA, 122 bp, Homo sapiens
gctcttaggctccgctagattgcaaatgacctgctttcattctgatcccgggctgcgttccgacccctgtcggatagtaaatcccaagtaacgtacctgctgtcggcaaatctgagctttct

SEQ ID NO: 461244 - DNA, 122 bp, Homo sapiens
cagagatgatctcccatgctgattccttcacaaggtccaatctgaaattcccactagaaacgagaagcttggccattaaaacaaagctaactgctcactccaactcagaatctcctaaacct

SEQ ID NO: 461245 - DNA, 122 bp, Homo sapiens
cccgtctcacagaccacatttcagcccagagctctcgcagtcccctggggccccggctgtcgctgctcccaggactgaggccggagatgaagtgcagtcaccgctccctcgactccagaggg

SEQ ID NO: 461246 - DNA, 122 bp, Homo sapiens
ggcaaagcctagattagacggtgtagaatataaactggacagaaagcacagtggagctctcgtgtcttttccattctctgcattcttcagggagggcaactaacacggatctatggcactta

SEQ ID NO: 461247 - DNA, 122 bp, Homo sapiens
ttagctgcttccaccacctaggacctggaccaaaatcccttcctgggcctaaggcagtgtcgtagactgcacacttgcctgcctgtctgcctttcttccttccattctttctttcctttttg

SEQ ID NO: 461248 - DNA, 122 bp, Homo sapiens
cccgagcgggaggaggcacaggacgcagggctcctggcctggctgtgggcttggccttggcgcactaagcgctccccatctgcccgagcctggcctccgcggccctctcggcccagtctacg

SEQ ID NO: 461249 - DNA, 122 bp, Homo sapiens
agcatcatatctcccagaaatcttagtggccaaggggctaccctagggaacttcaagtaccgaaatgctctcctgtccgtctcagtgactgccgtggtgaccggtggggcttgtagtcacct

SEQ ID NO: 461250 - DNA, 122 bp, Homo sapiens
gcgggagtgagccacaggctgtcttcgcggaagactcacaggcgcaggcgcagacgggtgcgcgcccctagggtgcgcgcgagctaagaccgcggcccggggcagggtgtccccggccccgc

SEQ ID NO: 461251 - DNA, 122 bp, Homo sapiens
tgagtccctctgagtcgagcggcgcgcgggtcttcccggcggctcccgcatccctggccccggggctgccatcccgcccggttttcatctgggccaaatatgtgcacgcaaaggttaattct

SEQ ID NO: 461252 - DNA, 122 bp, Homo sapiens
ggtgcatctattgtggccagacatatactacaaaatgatcaaatcacagcccttatggatcgccaaaactccccagtctagccgcatttgatgatcaagacctctttaatcatgcttttata

SEQ ID NO: 461253 - DNA, 122 bp, Homo sapiens
gtgtgaaaaaatgggacattgcctgtcaggcatcaatggtaaagtgtcacttagtcacagcgtaaaaaataaataaataaataaaaaggctcaccattccatcccctaagcccaccaaagtc

SEQ ID NO: 461254 - DNA, 122 bp, Homo sapiens
gcaacctccctgcctgattctcctgcctcagtctgccgaatgcctgtgattgcaggcacgcgccgccacgcctgactggttttggtggagacggggtttcgctgtgttggccgggccggtct

SEQ ID NO: 461255 - DNA, 122 bp, Homo sapiens
cccaggcatctgaggcccacatgacagtttcatcctcatccagggctggtccctccatgtcgaggtggggctgacaaatcacaaaggtcaggctggatcaaacccagggcagcccacagtgc

SEQ ID NO: 461256 - DNA, 122 bp, Homo sapiens
aaatagggttggtctggaacctaaggggcggagccgacgcgtagagccgctttgcgcgtgcgcatcacctaggcggttagatttgaatacttcactgaggcgagccgggcgttgtgagcgga

SEQ ID NO: 461257 - DNA, 122 bp, Homo sapiens
attactcagccctaaaaagagacgaagctggtgaacctcgagaacacgaggccgcgtgaacgaagccagacaccgaggaccacgtagcgtgagactctcagtctatgaaatgtgcggagtcg

SEQ ID NO: 461258 - DNA, 122 bp, Homo sapiens
aatggcagaacacgccagggtaaggatcggagcgcactgagaaacggcacaacacatcagcgtttggatcagagcgcactgagaaaccgcacaacacaccagggtacagattggagtgcact

SEQ ID NO: 461259 - DNA, 122 bp, Homo sapiens
tctcagtactccggggcatgcgcgtcctgccgctcgctctcggggagctcccaccaacaccgccctcatccccagccccaggacggatacccaagaccgaggtccaggaccgcaccgaccaa

SEQ ID NO: 461260 - DNA, 122 bp, Homo sapiens
aggtaaggagtttgagaccaacctgggcaacatagcaagactccctctctgcaaaaaaaacgaacaaaaaatatagtcaggccttgtgtacctgaccgtagtcccagctactcaggaggctg

SEQ ID NO: 461261 - DNA, 122 bp, Homo sapiens
atctggtggacctcattctttaagtctcagctcaggcatgatctctagaaaagccatccccgaaggttttattcctattctttacaccccggtgcctaccacttagtaggaactcaataata

SEQ ID NO: 461262 - DNA, 122 bp, Homo sapiens
cctgtgcctttgtggtagggcactggccagtttcctcctctcttacccgattcctcacgtcgtctctaaaagggtgtcacttgactgaagtaccctgagaaagggtgcaagcccgggtccca

SEQ ID NO: 461263 - DNA, 122 bp, Homo sapiens
tttctctgtcctgtggacagcccttcccaccaacccttccttcccccaggacctccccaacgccatgaatgcggccgagatcacagacaagctggggctgcactcactacgccacaggaact

SEQ ID NO: 461264 - DNA, 122 bp, Homo sapiens
acgcctcacagccggggttcctggccagcttcggaagccaccgagaaataggattccgtgcgcccgagagaacttttccaggggctaaggaatcggccagccggaggcgcgagaaaagttct

SEQ ID NO: 461265 - DNA, 122 bp, Homo sapiens
ccgctggctctcgggcccagccgggctgcctggttagcccggggagggccacatccctgccgccccagtcaccgcccttcttgagccgggaatcccgcccacgccgcgccacgctccgcccc

SEQ ID NO: 461266 - DNA, 122 bp, Homo sapiens
tctctcagcagatgacgtgcaggtcacgcagaccatgctgagctttttggcggccacaggcgatgacggtcaggtaggctggaggttggggagcgggaggcttgggtgaggggagtgggggc

SEQ ID NO: 461267 - DNA, 122 bp, Homo sapiens
tgtttcaacaccccagagcagcacattccattctctggcacagctgggggctggggattccggattcccctggctgcctgtgttcttcacagccccagcagagcctgctgtctgggctggga

SEQ ID NO: 461268 - DNA, 122 bp, Homo sapiens
ggggacagtagagtttcagtgagataacgtgtacatcactcagcatggcacgcagccatgcgacgtgctcagcacatgtggctgtgatgactgtttggtttgcacaggcatttctatgtgtg

SEQ ID NO: 461269 - DNA, 122 bp, Homo sapiens
ggcagccagctagtaagtagcagagctgacagccgaacccggtaacttattgtagagccccggatcttgcctacgatggggtctgtttctctgaggaagcaaacttcctcggaacccacagg

SEQ ID NO: 461270 - DNA, 122 bp, Homo sapiens
ggataattgtctttagtggcagcctgggcctcggggaaggaagggcatgaggaatggccccggctgggatgtcaggggcccaggacaactcctgtctctaccaggaaattgccccctctttt

SEQ ID NO: 461271 - DNA, 122 bp, Homo sapiens
cctttcatcaaagccccatacggggaagcttatcgggcagatgtcaaatgacagcttttccgggatgccaaggagttatatccttccccgaaaatattttaggacaaaaaattacctcagta

SEQ ID NO: 461272 - DNA, 122 bp, Homo sapiens
gaaagtgaaagcagtcttccttgattaggcagctgaataaaatctgggctggaatctgctcgaaaacaagtagttttaatgaatggtcttcctttgtctatgcttggcaagattgtttgcaa

SEQ ID NO: 461273 - DNA, 122 bp, Homo sapiens
cctgcccaccctagtttccgaaacctccctcctgaaccactgaaagtccgttccccgtctcggagctcacacagagaatctgtccttcaaggccaaagctctgagacttgcccccagcaccc

SEQ ID NO: 461274 - DNA, 122 bp, Homo sapiens
acggagttggggaacccctgagccctggagagagaaagacctgaccccagtgctggagaacgccagggccagagcatttgcaaagggtcccacttgcaaagggacctgctcctgtccctttc

SEQ ID NO: 461275 - DNA, 122 bp, Homo sapiens
tgtgcccacttctatccttgccgagacctgccgagatgtgagaactgcctcttcaagagccggcacccagtagtcatagcctgaataaacgaatggttgaagacgtgaaataagccccctgg

SEQ ID NO: 461276 - DNA, 122 bp, Homo sapiens
ctgcagtttagtgattgactggcctcctgaggtcctggcgcaaaggcgagattcgcatttcgcacctcgcccttcgcgggaaacggccccagtgacagtccccgaagcggcgcgcgcccggc

SEQ ID NO: 461277 - DNA, 122 bp, Homo sapiens
gttgactgactgacgaacaaatgaatgaagtgagatgggggctttggggattcgggttcacgcaccaccccaaaagcattcgaaggccgggcgaggccaggcactgccgaggagggcgggcc

SEQ ID NO: 461278 - DNA, 122 bp, Homo sapiens
ctcctccttcccgtatccgcagcgccagggcagtgctggtctgggcagtgcgcggggaagcggggacccgctgtcactgcgcctcccgctgccgacgccgcctggacggccgcactctccct

SEQ ID NO: 461279 - DNA, 122 bp, Homo sapiens
ccgcaggtaggctgactccagggatcccgggggggatctgttctcccgcgcaggagtcagcggcgcgagctgagcccggcgccgaatagccccgccgccgcggtgacggacgtcgctcctac

SEQ ID NO: 461280 - DNA, 122 bp, Homo sapiens
gcaagcgtgtacatcatctctccacaattcagtgacacctcatcagtcctctacatggggcgcctatcccacagctattcagatcccacagagaacccaggtcccgcttttgctttcgttct

SEQ ID NO: 461281 - DNA, 122 bp, Homo sapiens
agaatacataaacaaatgtgtgtagctgtatttcaataaaactctagataccaaaacaagcgatgggccagatgtggtctacaagctaactgtagtttgccatgtacgttccttgggtctat

SEQ ID NO: 461282 - DNA, 122 bp, Homo sapiens
ctctcctggctcgctggctgccagctttctactcttgttttgaattattttttccacccccgggattggtcttccagtcctttatttcgaaccacctaccatgggtgatactttatatgcct

SEQ ID NO: 461283 - DNA, 122 bp, Homo sapiens
tcctggaggcacaaggcctggctggctgcgagctcaggaggccgcctgaggactgcacaccgggcccacacctctcctgcccctccctcctgagtcctgggggtgggaggatttgagggagc

SEQ ID NO: 461284 - DNA, 122 bp, Homo sapiens
cgggctgggaggctctgtgaggctgagggaagcagagggcacagacctgggtcctgcaggcggtggctccacctaagagcacaaccctgccagaggcaggatgcccagaatgggcggggctc

SEQ ID NO: 461285 - DNA, 122 bp, Homo sapiens
caggaacctgtggcacaccctaaagagaattacactgttgtgtatcctccaggaactatacgaggtttagtgtggtggttcttagcaacagaacaaatctacagcactttcacttgttttca

SEQ ID NO: 461286 - DNA, 122 bp, Homo sapiens
ctgcccgtgctgctgctgctcctggtgctggcggtgggccttgcagtcttcttcttcagacgccatgggacccccaggcgactgctctactgccagcgttccctgctggacaaggtctgacg

SEQ ID NO: 461287 - DNA, 122 bp, Homo sapiens
gtgcttatcaagcaaacatggcctcgacgggtttcgcaatgatccttatgttctggtccccgcagtgggctgggagcttcaggagagtggagaccctcctttgctgttctctaactgctgcc

SEQ ID NO: 461288 - DNA, 122 bp, Homo sapiens
ctccctaggaagccccccagaacttacctcaggaaggcaggcagtgccactgtgctgtgccgtggggctggcattgccttgtctttcatgtgcactgagcatgcccgctgcactttgttctg

SEQ ID NO: 461289 - DNA, 122 bp, Homo sapiens
gggtacccacatgttctctgggttggtcagtgggcaggcacagggctggcagtcctcaggcgtcccggctgtggcatctccgtagtagccaggggcacaaagctcgcagaactcccctgcgg

SEQ ID NO: 461290 - DNA, 122 bp, Homo sapiens
tatttttccctctcgaatggccccgaagaatcaataaggattcaagggttttcctctccacggtaaggagattgttcttggcaagttatgctgagaagcctgttgtgtgccttgtcctccct

SEQ ID NO: 461291 - DNA, 122 bp, Homo sapiens
ggaagttgtgggcctcgggggtgagaggacgactgcctgggttgtcgtggccgcagtgaccgctaggggtcgccttggacacgcgaaatacgtccgcgagcggagtccctgcggtggggaag

SEQ ID NO: 461292 - DNA, 122 bp, Homo sapiens
cccgagtccgcgaggcccacatggagtgggcaggacgggcccgggaggaaacgccaggcccggcgtccacggcgagccggacgcgggtgcaccagcaacggcgagggagcgccccgcggggg

SEQ ID NO: 461293 - DNA, 122 bp, Homo sapiens
gagctggtcccggcctccagcttccagggtagccgggaagctgtagcccccagtgggcagcggtggagagagctcaaggaaggagggagcaccgggaggagacggctgcagcctgccaggag

SEQ ID NO: 461294 - DNA, 122 bp, Homo sapiens
ggtggaaagggtgggggatggggaaggtggggctggggaaggtgggcgtaggcatgctggcgggagttaaattttaaataagattgccagggatggcctcactgagaaggcaacatttgagc

SEQ ID NO: 461295 - DNA, 122 bp, Homo sapiens
tgcaaggcatcggccaatgggaactattgctgggctcgttcgaaagtaaacggtggacggcgcggcccgaggcaggtggcgggagtcagtttaaggctggcgcccagctttccgcgcctgcg

SEQ ID NO: 461296 - DNA, 122 bp, Homo sapiens
tcctggaaaacaggcagcgtttttaacagccggttgccctcttcagctgagaaaacagcacgagccaaaactaggaaccggggccacctctattgtgaatgtggccaggctgacttattgtc

SEQ ID NO: 461297 - DNA, 122 bp, Homo sapiens
ctttgagcaagcactgcaaatggggtaactggaacagccttgtcgcgtgtttccacccttcgtatgaggcaggtaccatgggtcttcaccaacagcacggcctgttgtctccaggaaatggt

SEQ ID NO: 461298 - DNA, 122 bp, Homo sapiens
gcaagaagactctcacgtgttgctacaccgcaagtctccaattaagagtggaccggcaagcgaatgcgtccttaaggcagggcttttcaaatattttaaatgacaactgttcttcttgtctt

SEQ ID NO: 461299 - DNA, 122 bp, Homo sapiens
tgtaacaggctcgaacattcacatttacattttccttggtgccgcgggggtgactggcaacgggagagaaaatactccaaaccccatctttcttgctgtctccgcatcacatcttcccccaa

SEQ ID NO: 461300 - DNA, 122 bp, Homo sapiens
ggctcccttccagctcccggattctgcggggtagaggcggccttggagcccagagaccagcgacctcagtctgcaggagcccggcgcagaggcccaagggcacccccgggatgtggtcaagc

SEQ ID NO: 461301 - DNA, 122 bp, Homo sapiens
gtcggtggctgtggttggtcggtcacgctggggaaatactcttacgggccgctagggggccgagcatctgtgccgctctagggcctggcttccagtatcaagttcttgtcctttgcgttgac

SEQ ID NO: 461302 - DNA, 122 bp, Homo sapiens
aagagacttaagctaaaattggtgggctaaatagttggaaaggggcctggttaagttttgcgttagaagtgcgtttaacttgcaggaatttcgccttcctgggcatccgttggaccccattg

SEQ ID NO: 461303 - DNA, 122 bp, Homo sapiens
ccccggaagtgagccgcttctggcgcggggcattgtggggggcgtagtctctttctcaggcggtccttcgcggcgtccccggggcccactcccgagcgcaggcgggcagccaggcgggcggc

SEQ ID NO: 461304 - DNA, 122 bp, Homo sapiens
aagtgaggagcgtctctgcccggctgccatcccttctaggaagtgaggagcacctcttcccggccaccatcccatctaggaagtgaggagcttctgtgcccggccgcccatcgtctgagatg

SEQ ID NO: 461305 - DNA, 122 bp, Homo sapiens
ttccacctgatcctggtgtgccccacatgcggtggcagggcagacgtgtgaagcctcggccgtctcggggctggcaggtgtgcgggtgaggaggccccggtggccaagcagagcctgcgttt

SEQ ID NO: 461306 - DNA, 122 bp, Homo sapiens
actgagttgtaatagccactggtatgcctactcccaccctgcaaaccagtggttttcaaccgggggcaagtttgccccacagaggatatttggcaatgcctgagactttatggatgggctgc

SEQ ID NO: 461307 - DNA, 122 bp, Homo sapiens
gagctggggagtggggctgccagccccctgtccaggtgaagcctggggtggttcagcatccgctgggctggcttctttcaccttcagcttggatcctgcggccacctccggagctgtggctg

SEQ ID NO: 461308 - DNA, 122 bp, Homo sapiens
gagcacagcacacccacgaagccagccttgggtgggagatcagaggagggagccacaaagcggggggggagcagcctaacctgacaatgtttcgcatgagtagcatgaacgcatttttggct

SEQ ID NO: 461309 - DNA, 122 bp, Homo sapiens
tcagccccgcgcagtgggcgcctgcggggtcctagcggctgaactctgggctctttggcccggaccagtgtccgcccgtctcctgccgcgggttgggggctttctagccctctggctttccc

SEQ ID NO: 461310 - DNA, 122 bp, Homo sapiens
gcttaggcaaatgctcacttatttcttggctgtcactacggatacatttcccataggaagcgggaaacaattatccttttccccagcaatcttgaagctctgtaaagttaggcctattacag

SEQ ID NO: 461311 - DNA, 122 bp, Homo sapiens
ctgcgacaccgtcatctacatcgggcccaacggcacggccctctctgacaaggagctcaccgacaacgagggccccccagactttgtccctatcgtgccagccctgcagaagacccggggcg

SEQ ID NO: 461312 - DNA, 122 bp, Homo sapiens
gccatcggtgggtgaggtggctgcagcagagccgggggctcctgtgtgcggaggcagcaccgacatccactgcagccacaccctcctgagagggtctggaaggaagcagggcaccctgcgaa

SEQ ID NO: 461313 - DNA, 122 bp, Homo sapiens
aggctttaaagtaggaacggctccaaattcccaatatctccggccttaccggttgcaaatcggacccctgcgggaaaaccagacacttctgtttcgtggctttcgggctgcctccagcccac

SEQ ID NO: 461314 - DNA, 122 bp, Homo sapiens
tccccacatttgtcaggtaggcctgtagggtgacgggtagaggaagaagggcgatgggaacgtagccctccaagttaaacacggaaaaggtacgttaagggcaccgggccagaagtaacctg

SEQ ID NO: 461315 - DNA, 122 bp, Homo sapiens
ttgagctccgcccggactccagggggctcctccccctgctcctttcggctgggcgggcggcgggctagagagggaatgtcattgcttctcagagccgtggtgccgcctccgtctgctgcttc

SEQ ID NO: 461316 - DNA, 122 bp, Homo sapiens
ccctccccactcccttcccctcctctccaggcctgcgcgcgcgcctcttcctccggcacgcgccgctgctagccgagcactctcgccagaacctctggctcgcgcgtgccttttcccctcag

SEQ ID NO: 461317 - DNA, 122 bp, Homo sapiens
cacccacccagcctgaggtcacatggggcctggggaactggtgaccactccctaggaccccgagtcctggcccgaccttgggactgtctgagcacatgggtgggcatggctgtgcctccccg

SEQ ID NO: 461318 - DNA, 122 bp, Homo sapiens
ccagagtccactgaaattattcaagctagtcagttctaaacctgctcaccctgccttgctcgcctttcccacaaaagccacaacaaaggctcttgcccacgttttcccctggctccctctgc

SEQ ID NO: 461319 - DNA, 122 bp, Homo sapiens
gtgggctcccagctctgtgtcctcgtgcagggacggcctctctctaggtagcttgctactcgttttgtgcatctcctctttcctggttcctggatgctccgtgtgtttgggagaggatcccc

SEQ ID NO: 461320 - DNA, 122 bp, Homo sapiens
ggagtgggtagatttcaaagcgaagcgctccctcgatgagagcgccaaacgccagccagccgcagcggggcccagccccgcctggcacacagggagttgcagaccaagaaatccagaatccc

SEQ ID NO: 461321 - DNA, 122 bp, Homo sapiens
ctcatggagctgaccctggagctgggctaagccacaagggcacagaaggcaggcagggtccggttctcattctgccaatccttgccccctgaaccaacagtagttcatgctggattattgtt

SEQ ID NO: 461322 - DNA, 122 bp, Homo sapiens
tgaacgagccctggctgagtgcactttgtcctcgggtggcctggcctgcagagcctcctgcgaggacgctggccttgattgcaaccccctccaaaccctcagtgccgcaggtgctctggcag

SEQ ID NO: 461323 - DNA, 122 bp, Homo sapiens
tggggcttccctgcttgaagatcatgggcttttcccttccactggagaccaaggaaaaatcgagagttggataaaggatctggctctgagttctatgtttcctgctgcttgtagagaggcct

SEQ ID NO: 461324 - DNA, 122 bp, Homo sapiens
ctgggcgacagagtgagactccatctcaaaaaaaaaaaaaaaaagtttataatacagagacggccaatgttattatcccaatgatagatatgagagttatataaagtattatactgataatg

SEQ ID NO: 461325 - DNA, 122 bp, Homo sapiens
tgaggggaccacggagttcacactatgaaaagaccaggatgtacaggtgcctccccccaccgcaccccgagcctcagtttctccatctgaaaagagcacttactctttcctccgacttgctg

SEQ ID NO: 461326 - DNA, 122 bp, Homo sapiens
ttccaccttgtgacttctctgaaactgaggtgcgtctttcagtcagtggcgtctcatagtcgctgtcagccagctggtattcgagatggagtcgtggaaaacccgtggacaccttccgctag

SEQ ID NO: 461327 - DNA, 122 bp, Homo sapiens
cctttgaatcccggccgggactggagtcccggcgcaacacatggcttttataaaaatctccggattacctcgctatcaaaagctcccgaagcccttgcagggggaatttacaggcgcccacc

SEQ ID NO: 461328 - DNA, 122 bp, Homo sapiens
ctggcatttacttcctacccatcacttaacattctgtcctctaaccctcagtctcagagtcgttttcaaatgactctttgtgattccattcaatttgcaagctgatttacatgctccctgtc

SEQ ID NO: 461329 - DNA, 122 bp, Homo sapiens
gtggagtcggcgctggaggacttgatggggctgggtggatgctgtgcctgcaggtagtcccgttcctgagtgaggtccacgatcagctgcagccgggcagagagggggatggaggagaacaa

SEQ ID NO: 461330 - DNA, 122 bp, Homo sapiens
ggttaaagtcacatttggtgaaaaaggggcctatctcctctttcctcacatacgggtcatcgaatacttttaaaagcattttccaccatgaatgaggggaaatggaagaaaagaggtggtga

SEQ ID NO: 461331 - DNA, 122 bp, Homo sapiens
agtgtgcggtctgagaactgcgagaagcccacaaagcaggggctgggcctgcaggctccccgcggtccagctcccgaggcaggtctccaaagtgcccccgtcccccgcataactagaaaatg

SEQ ID NO: 461332 - DNA, 122 bp, Homo sapiens
tagcctgcgccaaggggtagtgagaccgcgcggcaacagcttgcggctgcggggagctcccgtgggcgctccgctggctgtgcaggcggccatggattccttgcggaaaatgctgatctcag

SEQ ID NO: 461333 - DNA, 122 bp, Homo sapiens
cagcgggctcggggccaggcctgggccctgcgggcggagcctccgcctccgcctcctcgccgtccccaagatcgccctccgcgtcgctctcgtccgagttgtcctcctccaagtagcggtaa

SEQ ID NO: 461334 - DNA, 122 bp, Homo sapiens
caggaggccctggtgtggacagcagcctcacaggccgtccttaccgcaaggaggttcttacggggccatccacactgcgaggaggttcttacggggccgtccacaccgtgggggacccgggc

SEQ ID NO: 461335 - DNA, 122 bp, Homo sapiens
gttaaatgttttgtggctttagggagaggtctaacaacatgcgggaaacaagaaatcaagcgcatccaggattcatttataatctctctcgttgagtagaagtccgcatctctcgatattgt

SEQ ID NO: 461336 - DNA, 122 bp, Homo sapiens
cccgctcgtgcgagtgtcctcggcgcaggtgtcctccccggcacatgtgtcccccccaggcgtaggtgtccccttggcacatgtgtccccacaggcacaaggtccttcctggtgcaggtgtc

SEQ ID NO: 461337 - DNA, 122 bp, Homo sapiens
accatgggaacaggcaggacctgtgctgaagggtccctggaagtgtgggtttaaggcacccgtccttcacacttctccacagggacatggggcagcagggccagagtgttgaccatcagcaa

SEQ ID NO: 461338 - DNA, 122 bp, Homo sapiens
gccatccctcggtcaggccatggctttggtaatgttcggtctgagcggacggggactcagcgtggagtgagacgcgtgaacggtgcgggtgtgcgtgaaggggtgtgagttcctgtcgtgtg

SEQ ID NO: 461339 - DNA, 122 bp, Homo sapiens
tctctagcttggaagaggaaggtcaatgcgagggttgttacggtgaaatcccagagccaccgtttcgttttccacctagaggaccacggctccatctccgagccccgcactcacaactgtga

SEQ ID NO: 461340 - DNA, 122 bp, Homo sapiens
aagaagatgggaggatgatcatagatctagtttttgagttgagatgatgatctactatcccgaatgcttgctgatctcagaatggcagtggtggtggaggaggcaaacctgcacaggtggca

SEQ ID NO: 461341 - DNA, 122 bp, Homo sapiens
ccccaggggtgagagaacactgctttcatctacccttccaaaacgggtcccactgtcacccgtgcatgcccgtatctgaaggacactggtgtctgatcatcccaaaaactggaattttttct

SEQ ID NO: 461342 - DNA, 122 bp, Homo sapiens
tggaaaaggaaccatgggagagaactttcagtggcagaatttcaaagctcaggcacccaccgtccccttcctcccacccccagcattttattcgctcctcttttttggcactcggcatttcc

SEQ ID NO: 461343 - DNA, 122 bp, Homo sapiens
ggggcggaggctgagcgggcgaggcccaggcgcgcatgctcgggcgggtaaaatccgcgccggggacagtcagggatgctcccaggcccttcgctcttgctttcagctagtcattgtcgagc

SEQ ID NO: 461344 - DNA, 122 bp, Homo sapiens
aaaccaaggaatggacacgggtggaagagaaagagggagcaatagcaagaaaaaaggaatcgatgactggacatctggtcccagggaatctcgatggcttggaggaaacccccatcttgggt

SEQ ID NO: 461345 - DNA, 122 bp, Homo sapiens
tcttcacttgtcgctttttttccttcctcgcctccttgccccgccctatccctgtaggcgcgttctcccgcgacatcaaatggcagcatgcgggactacaccaaatgcggaaaggcgccttc

SEQ ID NO: 461346 - DNA, 122 bp, Homo sapiens
ccgcccctccccccgcccctcgcagccttttctcgcctcactggctttcctgagcgagagcggaactgctgggggaaccttcgccaccctctcccgggcaactctacggggaaagcccagct

SEQ ID NO: 461347 - DNA, 122 bp, Homo sapiens
gctcccggacgtggatgaaacccaaggaatcccctgggatggccaggggaggaggagccacgtggctgctggaaggcatcacagctcagcagcccgggaagacgctcctcgctgcccgcagg

SEQ ID NO: 461348 - DNA, 122 bp, Homo sapiens
ataaataaagcttttgctatcttttgttaaatgattcctaaaaattaaacctatttcggccgggcacagtggctcacgcctgtaatcccagtactttgggaggccaaggcaggcacatcaca

SEQ ID NO: 461349 - DNA, 122 bp, Homo sapiens
cgtcagatccaggagcatgagcaggactctgcgctgcgggagcagctgagcggctataagcggatgcgacgacagcaccagaagcagctgctggccctggagtcacggctgaggggtgaacg

SEQ ID NO: 461350 - DNA, 122 bp, Homo sapiens
aaggtgtgtcacatgtttttaaccaaaaagcacaataaaaaggtttttcccaaagagacacgtaattgtcttgttgactcatcgaggggtttcagttttcctcatttcactagcccaaatgt

SEQ ID NO: 461351 - DNA, 122 bp, Homo sapiens
ggcgcgtcttcgccgacaccatagaggtgggccttccgcgacgccacaggagcgggtgttcgcctacgtcactggggcgctacagtacctggagctgggcagtcttctcatcagagtgggga

SEQ ID NO: 461352 - DNA, 122 bp, Homo sapiens
ggtttgttgttcctgctgaaacacggcacatgctctgcctgaattctggccatgtgtttccgtcgtttagttatctaacttgttatctcctgacttcccatttctctgtgaaagtcaggtgg

SEQ ID NO: 461353 - DNA, 122 bp, Homo sapiens
ttttcaatgaaataattcaggattatctaccttctgcttagatatatgctatattagtctcggctgtgcaaaacacatatatgctagagttaacattaggcctgttctttccctgctagagt

SEQ ID NO: 461354 - DNA, 122 bp, Homo sapiens
tgggttcattcctccgaagaggatgtttaggcgtggaagcaccgctgtttcccaagagcacggtttctctctggcagcaccacttatggcaccaaaacaggtattttttggcaacaccagca

SEQ ID NO: 461355 - DNA, 122 bp, Homo sapiens
gccggactgggtttcagcggctgctgcagctgctaccaacgcggcctatgtgggactgggcgccggggtcgtggactcaggctcgcggcgtgtctgggagccgctagggtttttggcaagcg

SEQ ID NO: 461356 - DNA, 122 bp, Homo sapiens
tctcggggtcctgctatgaagggaaccctgggaagggctgacacgggctttcctggttgtcgagggggcggagagagcaggccgacaggacagtgaggctcgccctccaagctccctcatag

SEQ ID NO: 461357 - DNA, 122 bp, Homo sapiens
tggtacatttgttgcttgacaaaccaatagtgatgtattattattactaactgaagtcaacgtaagttatagttcactgtgcggtgcattctgtgggttttgacaaatgcatgccatgtccc

SEQ ID NO: 461358 - DNA, 122 bp, Homo sapiens
gctctaaacaaaacagtggtaggttaatgtgttcagaagtcgctgtccttactacttttgcggaagtatggaagtcacaactacacagagatttctcagcctacaaattgtgtctatacatt

SEQ ID NO: 461359 - DNA, 122 bp, Homo sapiens
tcatggcgagctcctggagtgcaggactagcctctgggatggaggcttgcacagggagggcgccaactgcccactagctgctcagccacctcctcctgctgcaaagcagaggaagacagtca

SEQ ID NO: 461360 - DNA, 122 bp, Homo sapiens
gagtcatcaaattcagagacacaaagcagaagggcgggtgcccggggcatggaagagcagcggggagtcagtgtttaatggggacagagttctgatttgggctgatggaaaagtctggaaat

SEQ ID NO: 461361 - DNA, 122 bp, Homo sapiens
aagtgcacttctaaggacgcggcttcggtgtttcccatgccgctgcttgcccctgggaagcgttggctctgcctcggaagaagttagcgccaagatggcagcctggggtctttggggcccag

SEQ ID NO: 461362 - DNA, 122 bp, Homo sapiens
caagctaggcatcctgataccatcttaccgaggcagctggggcactggaaagcagtgactcgtgtgaagttgctcaacagttaccatggtagggtagggactgagactcagaacctctcact

SEQ ID NO: 461363 - DNA, 122 bp, Homo sapiens
attccctctttcagtcaccccgccagaccccagggcgctgcggctcactccacactttcccgggaaccctacgcccaggaggctcagcgaagctccaaaaccaattttacggactgtactac

SEQ ID NO: 461364 - DNA, 122 bp, Homo sapiens
aggacaggctgactctcttgttaggggctaatgtacctagtgactttaagttgaaggcaacgctcattcatcattctgaaaatccttaggatccataagaattatgctatatctcacaattt

SEQ ID NO: 461365 - DNA, 122 bp, Homo sapiens
aaacttatggaccaatggaatagaatacacagcccagaaataaaccctcaaacttgtggtcgaataattttcaacaaaggtgccaagaccatttaatgggaaatggacagttttctcaacaa

SEQ ID NO: 461366 - DNA, 122 bp, Homo sapiens
taaaaaaaaacaaaaaaattagcccggcatggtggggggcgcccgtagtcccagctactccggaggctgaggcaggagaatggcctgaacccgggaggcggagcttgcagtgagccgagatc

SEQ ID NO: 461367 - DNA, 122 bp, Homo sapiens
cggcccaggccttccctgggctccgcttttctagtttcggagcggagggcgtgggtcaagcgtttctgggaaagtcgatgcgctcggcagtgtcctgaggtgttgggtgactgagggcctgt

SEQ ID NO: 461368 - DNA, 122 bp, Homo sapiens
ccgagctagtttccttctttcttcacacgcctgcagagtaatagggggctggtacccagacggaggcgactagcaggacttgtgctctaggcggctcttggtcacgtgacggccacgtcacc

SEQ ID NO: 461369 - DNA, 122 bp, Homo sapiens
ccagtagtgtatgtgagttcctatctctccacattctcaccaacacttgttactgtctgccgttttcattttagccatcttagtgggtgtgaagtgatatctcctagtggttttgatttgca

SEQ ID NO: 461370 - DNA, 122 bp, Homo sapiens
tggtggttccgcatagagagtcgccgccgcttggagggggagagcccttcttccgagtaccgaggccctgctgctgggctttctcggcccctcaacagtacccggcgtcggcggccatcacc

SEQ ID NO: 461371 - DNA, 122 bp, Homo sapiens
cttgcttacttcattcaggatagataaaagccatgttgtatgaaaaaaaaaatgccctaacgaatgggaaatatctaaactttcaattgctacagatgactcagtgagtgggcagttgcaga

SEQ ID NO: 461372 - DNA, 122 bp, Homo sapiens
agcgctgccactaacgtggggtgggggccctcgtgggggaccgagaacaggcggtgggggcgcgggaaggggcgcctcctgtacccccggccccgccgcccgcctccgctcccggatgccgg

SEQ ID NO: 461373 - DNA, 122 bp, Homo sapiens
aaatgctaggccttgtgggcggggccggggtgcccgctcttgccactggtccaatcacagcgcggcgttcctcctggccggccgccgattggtggttgccatagctccgggcgttcgcttgc

SEQ ID NO: 461374 - DNA, 122 bp, Homo sapiens
aaaaaggaaaagaaaggaaactatatattaacatcattggccaaagaaagaaaatatgaacgaagttgagattacatggcaaatgacaaaaaggatcagcagctgtgacccagacactgatg

SEQ ID NO: 461375 - DNA, 122 bp, Homo sapiens
aagcattaggcgtcacttcctttaccgtgaactacaaggctcagccaaccacaggctttacgtcatttctcggcgccgggaaacctgccattcttcgctgctgatcgcgggattctttttgg

SEQ ID NO: 461376 - DNA, 122 bp, Homo sapiens
cggccgccggtcccagccggctacagagccgctgctgtgcccggtcttgcaaatcgccgccgtccagccgcctgctctggtgcgagtcttctccgctttacgactcggactcagaaaagccg

SEQ ID NO: 461377 - DNA, 122 bp, Homo sapiens
gagcgctgctcagcgctttcgttcagctgtgccacatttccacgacgctggcagagaagacgtgggtccagcttttccccagattgtggaagatcctctctgacagacagcagcatgtgagt

SEQ ID NO: 461378 - DNA, 122 bp, Homo sapiens
attggctataggctggcctccgaacaactggacggtccaagtcctgagcgtctggttacccgggcaaccgcatggtctcgcgatacatacctcgcgcctgcgcactgcccctgtagcggggg

SEQ ID NO: 461379 - DNA, 122 bp, Homo sapiens
ctttcccctcagcaccttagagcacaagacattaagggccacccagaagccagtacggcacgaggcggtgaaccccaaccgccccccggtcgcacctcccgcgcctgcccgcagaggcacgt

SEQ ID NO: 461380 - DNA, 122 bp, Homo sapiens
gtgtccggtcggtgctcttccaaggttccagctctgggccgcgtacaccctgcctcggcccgccctcagcaaagattttgcgccttctgaaccgggaggatatggaaaggttggggtgggga

SEQ ID NO: 461381 - DNA, 122 bp, Homo sapiens
attcaggctgtggcttttgagggtgttttgcactgtaatacctcggtcgtagcaaagtgccgtgggaccgaagtattatggtgcagtgacttgacgctcgagcctggttgggcctgggggct

SEQ ID NO: 461382 - DNA, 122 bp, Homo sapiens
cttatgcagagtccgtgaagcctaacggtgagtgacggatgaacaaagccaatcagacttcgatctgcaacatagagtgattctgaagctgccattcccgccccgcgacgacgaggccgccg

SEQ ID NO: 461383 - DNA, 122 bp, Homo sapiens
gctctgcgccgccctcgccctcggatcccctggagggtgcgcagccgggcgtcaccagatcgggtccctctcatgccccgtgaacgcaactattctccggggcaactggctccactgcccag

SEQ ID NO: 461384 - DNA, 122 bp, Homo sapiens
caaataaggtcacattcagaggaactcctgcaatctttccgggggggacacagttcaacccgtaccactgagcagtcgctgactgggtcaccgatgaaggcgtgaaaagtcacgcacgggcc

SEQ ID NO: 461385 - DNA, 122 bp, Homo sapiens
gtctcccggtgtggcgcggcgcaggtgaaggtgtggttccagaaccggcggatgaagtggcggcactccaaggaggcccaggcccaaaaggacaaggacaaggaggctggcgagaagccatc

SEQ ID NO: 461386 - DNA, 122 bp, Homo sapiens
tggcacatcgtgagaatgacagatgggggatgagcaaggtgccaggggttttaaataagacggccgcgttttgccaaacacctaccccacggggctggaacaagtgacgcagaaatgggcag

SEQ ID NO: 461387 - DNA, 122 bp, Homo sapiens
cctgggtccacaagacatcgtttccttaaaaccaatccccctgattttgctaaggtgagtcggaacaagttgatttctgttacacacacaaacacacaccccacatgagacagccaggtagg

SEQ ID NO: 461388 - DNA, 122 bp, Homo sapiens
cccggcgcccgctctcgccggccggggacatctacaggtggggccggggccgggccgcgccgcctcccagtccccgccccatccagccccgccgctctggtcccgggataggtggcgcctgg

SEQ ID NO: 461389 - DNA, 122 bp, Homo sapiens
ccagaatgtcagtcctcttctggtcccagcctgtggcagccctcttaggagggatctgagcgtgggcagaagtaggtgctgactccaggccctgggaccccacagtttcccttctctactca

SEQ ID NO: 461390 - DNA, 122 bp, Homo sapiens
tctccccgacccaggtgcttcctcccctgcagagctgtggcggggttcagaccccgattccgggagaggacacctgtcggggaagggcggggctgggggactgcggggccgcggcgaggctc

SEQ ID NO: 461391 - DNA, 122 bp, Homo sapiens
ggtgggcggggcacaggtgggcggggagcatgcaaaacagcccagggcggcggccaatcgcggcgcgcgccgggggtccaggccccggggatccgaggcgccgcccgcgcgcagtctctggt

SEQ ID NO: 461392 - DNA, 122 bp, Homo sapiens
agcttggagccgtggtccagcgtgcactcgccggggcccggccgactgggctgcagctggcgcagggcgtccctgtcctcagcgcagaggcgtctgctgcacagctgcagttcccggagctg

SEQ ID NO: 461393 - DNA, 122 bp, Homo sapiens
agggcttttgtgttgagatattgcatctcttcctacccctggtacctttgagtcctttatcgaagctgtggcttccctttgtccttctggaatcctatgctgtttctgttggaccacccagg

SEQ ID NO: 461394 - DNA, 122 bp, Homo sapiens
ccctccactttgagcgcgcggacgggggcggggcaccaggccacgccctcgtcgcgaccacgcccactagactttctccgctggtggaaagccccacccagctcttccgtcctgcccaatca

SEQ ID NO: 461395 - DNA, 122 bp, Homo sapiens
tctttttctctgagaggagtctcgctctgtcaccccggctgtagtgcagtggtccaatctcggctcactgcaacttccatctccccggtttaagcaattctctgcctcagcctccccactag

SEQ ID NO: 461396 - DNA, 122 bp, Homo sapiens
aatggaaagtgagggattgtatttaggaaagaaaatcttctacttagctccccaaactctcgggatcatctaaatagggacccacactgccaacgtatgcttctcctgttggctgtcacatt

SEQ ID NO: 461397 - DNA, 122 bp, Homo sapiens
ctgacacacagtaacagacaccccgttcacaccagtatcagcattcacgactgctcaccgcgggcctcactgcaacccaccccatgaccccaggacggcccccaccaagttcccagaggcgc

SEQ ID NO: 461398 - DNA, 122 bp, Homo sapiens
tctcgccctagcccagctctggaacaggcagacacatctcagggctaaacagacgcctcccgcacggggccccacggaagcctgagcaggcggggcaggaggggcggtatctgctgctttgg

SEQ ID NO: 461399 - DNA, 122 bp, Homo sapiens
atatttatactatatttgaaattttattctcatataattaaattgtcctacaaacagtggcgtttcacacttcaaataaaatcttaggcttatacatgtaagatgtagtcacctgaagctgg

SEQ ID NO: 461400 - DNA, 122 bp, Homo sapiens
gcaccattagtgccatgacaaacacagcaaaaaagggcaaataatgtcttagtattattacgaagatagttctgatcttatggatcctctgagaggatcttggagattccacagaagtctac

SEQ ID NO: 461401 - DNA, 122 bp, Homo sapiens
tgcagcacaattttttttctcttgaaaggcactgtcatttaaacataaacctggagtactcgaaatagaattcaggtttacaagatgaaagcgtgtggagaagtgtcagatggcagtggaag

SEQ ID NO: 461402 - DNA, 122 bp, Homo sapiens
tgcggtggggaggggacgccaacagggtgagttggaggctcttccctcggcaggcagactcggacagcaccggggggtggagggtgggagcttcaagtggggaaaacaacccaacaaacatg

SEQ ID NO: 461403 - DNA, 122 bp, Homo sapiens
cccccgcccgtttaagctctgcccttccttggtctctctagacagggctttccattcgctcggatggctccagtctctcgaacacttaggccctcccttcctatctttgctccgcccacaga

SEQ ID NO: 461404 - DNA, 122 bp, Homo sapiens
gccctgcgtgactttccgcagcgcctgtcgggtgttttccactcagcagcttgttgcgaacgtctctgcgtcctgtggtttctctgtcacgctaatgattttggagccattatttcatactt

SEQ ID NO: 461405 - DNA, 122 bp, Homo sapiens
atgagatgaatttaatttagaataaggaaaatttaaggcaacatagaccaagtagaattacgcacctaagaagtgacaatgaatatggacagaaggatgaaactgaggtttgatgaaaacat

SEQ ID NO: 461406 - DNA, 122 bp, Homo sapiens
tatttgggacactgttggagacaaatactgaggaagcctctgttctttatgtgaaattcacggcttcacaggtgccctgcatttccgtcggtggatctggctgccctgtgcatgcaccggca

SEQ ID NO: 461407 - DNA, 122 bp, Homo sapiens
aaaaggcatgccttcattccaaaaccccagattcagactcccagggctgcttagggggagcgctggggcagagccaggcctcggcgggcggggtgggccgggctgggccgcgcttccgggat

SEQ ID NO: 461408 - DNA, 122 bp, Homo sapiens
catgatgtttttaaggtgatgaatttaaaaaaaaaccacaataagtgcacctttgtcccacgatggaaggaccccaaaggtggaacatcccaatttaacaagagtaactttctgaacatctt

SEQ ID NO: 461409 - DNA, 122 bp, Homo sapiens
agccaatatcagacatgaagttaattggaatcaactgcgcccatctttacaggaacacaccggaatgtgtaccattcaggctcagcttaccataatattctctacggaatagttgaccacag

SEQ ID NO: 461410 - DNA, 122 bp, Homo sapiens
ctcgttctcccagccgtttgggccgtggtcctgtcgtgggaggcgacggtgagggcggcccggggtcccgacaggggtgtttgtccctttggggacctcccctgtgctgtggccccggcccc

SEQ ID NO: 461411 - DNA, 122 bp, Homo sapiens
tggaggaaggctctgtgacctcataaacttttctaacttgtcatcttccctgaaagtacacgacttaaccccaggtgaactgttgcagaatgaggagtgcccacatgagattgaatgaggct

SEQ ID NO: 461412 - DNA, 122 bp, Homo sapiens
tttttgtgtaaatatgttttcaactcatttgggtaaataccaaggggtgtgattgtggctcgtatggtaagagtatgttgagctctgtaagaaactctcagttgtcttccaaaggggctgta

SEQ ID NO: 461413 - DNA, 122 bp, Homo sapiens
agccaagccctacctcgcaggacaagcgtagcgagcagcgtcattgttgccaggctgggccgagggaagcaggaaggctccccaccgaggacagaggtgaagtgcgggggtggacatgactc

SEQ ID NO: 461414 - DNA, 122 bp, Homo sapiens
agagcccctgaaggcgttatggagatatgagtgtcttccatttattcagctgtgacttggcggaaaggacaccagacccacagtctaggaagtataagaaaatcttattatttatttattta

SEQ ID NO: 461415 - DNA, 122 bp, Homo sapiens
tgtccctagaaatgtcccttattctctcatttgacacctctctcactgcattagcagagacgttttgcttttaggaagttttcatttgaaatataaatatttccatgtgtattgaaatagtc

SEQ ID NO: 461416 - DNA, 122 bp, Homo sapiens
aagccacgaagacactgacttaatgggctctaagtccttccagttctgggatcccacctccgggttaattccgcttcccttgaggagcgcatgcgcaatgggaccactcgctcaaagaaccc

SEQ ID NO: 461417 - DNA, 122 bp, Homo sapiens
tagtatagggctaattattcctgactactgaggcaagacccttctgaatgtactgcccaacgtcccatgaattaggaactttttccatttggctaatgggagcaggcactataaccagccct

SEQ ID NO: 461418 - DNA, 122 bp, Homo sapiens
accggggctccctcagttgctgctggtcccagtgttcaggaaggccccgagcccaggggccggggtggctggcttcaggcccggcccacgtcctgactctggggtgagccttccacagctca

SEQ ID NO: 461419 - DNA, 122 bp, Homo sapiens
ataacaagtttagaattgctccaaaatgtaggtaagcatgataatgcatatgaagtttttcgtaagtttttatgaatataccaggaatatgatgttgttgtttctattcctgatgacaagaa

SEQ ID NO: 461420 - DNA, 122 bp, Homo sapiens
gctgcggagtcactgcgcagcgcggccgcgcgggaccgccccggccgccggcccgccccccgcccctgcccccacccggctcgcccggcccgcccccgcgcgccccacctgcggctgccacc

SEQ ID NO: 461421 - DNA, 122 bp, Homo sapiens
cctccaaatttaccggtagaacctggcacacagcttttgccgtcgtttggagaattactgcgtgcactgccgttcgctcagagccattgtgcacgtttgtttctctgatcactaacagcctg

SEQ ID NO: 461422 - DNA, 122 bp, Homo sapiens
ccatttcattgatttatatatctctttatctgtttcttcattagtttctatagtagtcaccgtttcttccaatgtcatttaaatgttgatcacatgcctgtaatctgcttttaagttcttgg

SEQ ID NO: 461423 - DNA, 122 bp, Homo sapiens
aatatttatcgagggtcctgagcgccactccacagaggtcggggtcaggcctgggcagcacgttgtgccatgactgccccgtgccgggcagccccagccgcctgacaccgcctgagcagttt

SEQ ID NO: 461424 - DNA, 122 bp, Homo sapiens
ttatggatccaggtttgtggggttcctgctgggaagggctgtagggggattcctgttcctcgccaggaatgatggaacgcccagctggacgaaaggggctgtggacgatcgggagaaacatt

SEQ ID NO: 461425 - DNA, 122 bp, Homo sapiens
cggggttgaatcactgtttttcttgactccctttggagatcggcagagcccacattcggccgtgttcgtggacctgggactggaaacagctgcgctctaattacatgtaaagtgtaccaaaa

SEQ ID NO: 461426 - DNA, 122 bp, Homo sapiens
ccagggaaaagaatgaggacaccccaagcagagagtgaccaggccaaccaagagcccccacgtgggcctttgtcaggaaagtcaggggctgaagaaccatgacatcctaatcccagtttgga

SEQ ID NO: 461427 - DNA, 122 bp, Homo sapiens
agacatctgtaagccaggaagacaggcctcctcagagaccccacaggacctagatctggacgacttccagcctccagaactgtgagaaaataaatttctgttgtttaagccacccagtcata

SEQ ID NO: 461428 - DNA, 122 bp, Homo sapiens
tgagttacacctgcatgggctgtggggctgcccaaggcaatgctggggcctcatggccaccggtcctcacgggctccccctgctgtcccccaggaagggggaccgggcatccagcacagcag

SEQ ID NO: 461429 - DNA, 122 bp, Homo sapiens
cctaggctgctagggccatgcttttaaatgagatgctgagtctagagaggaaaaaggactcgctgcattgcacaacttgttcctggcgtaactggagctaaaacctggcgtgactcgtctcc

SEQ ID NO: 461430 - DNA, 122 bp, Homo sapiens
gccctttcgcctgcgaaagctgcctgggacctgtccccctcggatctcccactcgggacccgggaggaagagggcaccttgggcaccggctcatccacaggtgcagaattcccagaatctcc

SEQ ID NO: 461431 - DNA, 122 bp, Homo sapiens
gaggcgtcccgggggcctctgaggctgggcgatttggggtgccagagaccgctaaagcagcggcccactgcccaatttatgtgtgcgctaaatcacgaccatgatttctgcgtgttttctag

SEQ ID NO: 461432 - DNA, 122 bp, Homo sapiens
gtggtagtgtgggcacgcatagccctggcggcacaggcgtggcggcttcgggcactgctccgtcttgtagctgcccagcacgaagttggcatctgaaaaatgggccacacggtgcctgagca

SEQ ID NO: 461433 - DNA, 122 bp, Homo sapiens
acagcggactgcggtgaaatgccagaaaattacgcaatacgtaaaccaaatggcagactccggacagcagactgcggtgaaaggcagtgttttgggttaaattgtgcccctcccccaaaaaa

SEQ ID NO: 461434 - DNA, 122 bp, Homo sapiens
cttggtcgtggctgaggagaaatcccacagatgtcactggacgagggtgacgggtggggccgggctttcccctgggtacaggcacaaccgtgctcttccctcgcacagtgacccgcggtgtc

SEQ ID NO: 461435 - DNA, 122 bp, Homo sapiens
ctcccatcccgctcagcctgctccagacagagcgcgagtgaggagcaggcgggcaggcggcgggcagccgggcagccgtggacagaggcccgggcacagccagttgctgtgccagagggtgt

SEQ ID NO: 461436 - DNA, 122 bp, Homo sapiens
agacagagacagagagagccagacacagagacagagagagagagtcacagccagagacagcgacagagataacagaagcagagagagggagaaagataacagagccagagacagtcagagac

SEQ ID NO: 461437 - DNA, 122 bp, Homo sapiens
ccagacccgagggacagagtcagaatggctgctctgggtgaacatcgcccatctgctctgcgctaggctccagcggactctcaaggggccagggcagcagacattgagggccaggagtctgg

SEQ ID NO: 461438 - DNA, 122 bp, Homo sapiens
ggtgcgggtcactgaccgggactctggcaagaacggacagctgcagtgtcgggtcctaggcggaggagggacgggcggcggcgggggcctgggcgggcccgggggttccgtccccttcaagc

SEQ ID NO: 461439 - DNA, 122 bp, Homo sapiens
agtctggttgccatggtgcgcctcgcgggattaggggccggtagaggtgggcgggtcgggcggaagtcggtctggtcaccatgggggccgcagacgcctgcactcgggacttcctcttccag

SEQ ID NO: 461440 - DNA, 122 bp, Homo sapiens
cagcccccgacaggctcccagccccactggcgcagaacccatcaccgcttgcccttcacgcgcttcattgggagtgcagcccccaccccgagcgcacagctccacgcagcctctccacactc

SEQ ID NO: 461441 - DNA, 122 bp, Homo sapiens
tacagcctaattccctcctactatgtggcataaatattcacaggttgcagggattgggggcgaacatctttggggggctactgttctgcgtacacacatgggtgaaggccagggatgctact

SEQ ID NO: 461442 - DNA, 122 bp, Homo sapiens
aaccccacttacatcccctagtgtgaactcctaatccttgggcctaaaaattgtggaactcggtatgataatggacatgatgaattgtgtctgattaataaatttcttacaagttttattta

SEQ ID NO: 461443 - DNA, 122 bp, Homo sapiens
caaaatgttggtatatagtagggttcgcagtatcccctggacctactaaattgggtaacacgcggggacacggatgtgagagtcttagtttcggctttccgtctactaacctcagtttcctc

SEQ ID NO: 461444 - DNA, 122 bp, Homo sapiens
tttgagaagtgacaggaatctgagtggctcctcatgagaaccttccgacggaagtgacgtcgttacgacgcgcgacccctgtagactcgtccctccggaaggctcagtgcataagtgggcag

SEQ ID NO: 461445 - DNA, 122 bp, Homo sapiens
caggatgtgcggtgtccggaggcatccgggctcagcattgttttctcccacctccttcaacgccaaaccttccttccttatccggaggttcccagactcagctgtcagccacgagacgcaca

SEQ ID NO: 461446 - DNA, 122 bp, Homo sapiens
agcccacacgcgagtgaggtggcagcgtgagagcgcgcgcagccctcgagctgtggaaagcggagcactgtggcggccataagaagtgtggcgcctctcagcctgaggggaggggaaggaaa

SEQ ID NO: 461447 - DNA, 122 bp, Homo sapiens
gtgacttccggcgccgccgggtgtggggcggaggtgtggggcggcttccggagaacccagcggcgcgggactggggcgggacttccggcgacaccggaagtgcattagcgccaggttggggt

SEQ ID NO: 461448 - DNA, 122 bp, Homo sapiens
gcagctgtttccctacaactcctcccccacctgccctgccacggccctgctgctggtttccgaacctgagtgcctttttgacttggtttcctccacatgcgttatgggaaaaacaaaaacaa

SEQ ID NO: 461449 - DNA, 122 bp, Homo sapiens
ggctgcggacggagggggagggcgcaggacttccccacccggctccaggacccgcgccggcgcccaggctccctgcccgcacttcggagagcgcggcaccttaaagggaccgaggcgcttcc

SEQ ID NO: 461450 - DNA, 122 bp, Homo sapiens
ccctgagctgagctttgaggtccgagttcatctccagctccagaagagcctgggagatgccggactcgaactcgtccggcttctcatcattgggcttcacgatcttggcgctcgaactgaac

SEQ ID NO: 461451 - DNA, 122 bp, Homo sapiens
agggatggtgattgagcagctcgccttcccacagccagctggaggccccaggacttgggtcggctgtggcccaccggaggtggcacgctggtgtctgtggcgcaatgagtcgtgcgttgcat

SEQ ID NO: 461452 - DNA, 122 bp, Homo sapiens
ttttggagagacagccaaaggaggcctcactgagaaagtggcatttcaaagaagtcctgacgaaggagcaggagtgagcagcgtggatatcctgtgggagggagagtaatctaggcagcagg

SEQ ID NO: 461453 - DNA, 122 bp, Homo sapiens
gcctgtcctggaatccatgtctgcctgggtgtcgaggctttcagggctgggcctgcccgccggcccttcagcacaaggctctgcccaggcaggtgctgggggtacccatcgaagctccacag

SEQ ID NO: 461454 - DNA, 122 bp, Homo sapiens
ccctatctgggcaccacacaaagaggccgctgaacgcgcgcgcaccctccccgaggcgtgcgtcaccgccgacgtacggcagcctagggctaccagccaatccccgcctcgctccccttaat

SEQ ID NO: 461455 - DNA, 122 bp, Homo sapiens
agaaaagtcccttccagaatactggtgggtagtcaggagcatgccccgggtttgaggatacgtggtctgttcttacagaagatgggtgggaaacccaaacagtcctctccctcccatagatg

SEQ ID NO: 461456 - DNA, 122 bp, Homo sapiens
atccgcccacctcggcctcccaacgtgctgggattacaggtgtgagccactgcacctggacgggtttgtataattgctactttaatggtacttcactatttagaataattggtggaaaggat

SEQ ID NO: 461457 - DNA, 122 bp, Homo sapiens
gaggggaggattagacaaatcaagaatatgggatattctattacacaactggtctggacccgtcaaaattatcaaggtgatgagaccccccctaaaaaaagaaggactgatctgaattaaag

SEQ ID NO: 461458 - DNA, 122 bp, Homo sapiens
tagacattccccttttaacatcatgccatgccaaactcctgatgttcccctagtgctccacgcctgaagctcctacaggcttgctcatctcaggaaacagtaactccatcctccaagatgga

SEQ ID NO: 461459 - DNA, 122 bp, Homo sapiens
tcagcgcatacatacacaggctcatatatgcacaggagcacagttacaggaagctgcacacggaaatttcccacaaatacaactaatcacagatggctggaaaacagcccagtctccctgaa

SEQ ID NO: 461460 - DNA, 122 bp, Homo sapiens
gggattgttttctttgtaactacaccccccaaaaagggcaggagcatgaaggagctaacccggggcccccacacacctgtttttgtagatcctccagtatatacagtacttaaataggaaac

SEQ ID NO: 461461 - DNA, 122 bp, Homo sapiens
cacagatgtgttcacactcggttgccgcgcgtggacttacaagcccacgaagccatcgttcgtcacagcctggaaaagggagggggcatcgatctggtttatgtttggacctcgaggctcca

SEQ ID NO: 461462 - DNA, 122 bp, Homo sapiens
ctggcctcaggtggtaccgggagtgcggggatgttgtcaagccccaggcggctgcactcccgtgagggccccacagcaccccaagcaagcggcatttgaatgcccaggatggccctctgtat

SEQ ID NO: 461463 - DNA, 122 bp, Homo sapiens
aggacttttcggggctcctgggaaagtgggggggggggccgggggacttggactcgagggcgctggagataaggagggcgcctgccacccaatgctcaaaggacccaggtgtctgggtcctc

SEQ ID NO: 461464 - DNA, 122 bp, Homo sapiens
ggtatttgttctacttcaaatgcgcccatgactccagctggctctggtgccctttgagaccgtggagcctccagcgggggctgcagccttcaccagcactgtggtgagtgtgggggatttgg

SEQ ID NO: 461465 - DNA, 122 bp, Homo sapiens
agtctccactagagacaggactgaccagttgctcttccttccaagaaccttcgagatctgcggtctggggtctggttgaaagatggcggccctcactaccctgtttaagtacatagatgaaa

SEQ ID NO: 461466 - DNA, 122 bp, Homo sapiens
ttcatgcaggccccgcctcccgcccagaggcctcacaggcggcccggcccgccccacctgcgcccgattgacggccgcgtctgccaatcacagcgcctcccgcccttgacggcctcgtgccg

SEQ ID NO: 461467 - DNA, 122 bp, Homo sapiens
agctaaaacggtaagcaggaaggacctcctggatttcagaaaaggtttgaatgttttcatcgagcacagaaagcctttgtgatgcatggatccagatctctctctgactcaggaatgacatt

SEQ ID NO: 461468 - DNA, 122 bp, Homo sapiens
tcacggagctcaggttctggtgggcctttggtgtccaagcgtttctaacatcctcccgtacgcttccacccccgagggtctgctagcttggtgaaaagacgtgggtgggaggcgtggtggcc

SEQ ID NO: 461469 - DNA, 122 bp, Homo sapiens
tcctcttcagggcaggaaaggacagtgagtcactgcaagcatcctttagtaatttctccccgcgccctcctacttccccgcgttacagaggggcagagcaccaggaaggacggcaaacatgc

SEQ ID NO: 461470 - DNA, 122 bp, Homo sapiens
cctggacgccatctccccggagctgggggcctcggctccgcaacggctgcgaagtttcaccgatgccgcaggcctaaggccacccttggtcccaaacccagcgccgggacgcgcgccccagc

SEQ ID NO: 461471 - DNA, 122 bp, Homo sapiens
agattcagccatgttgtcagaatttccttccctttaaaggctgaataggccaggcgtgatcgcttacgcctgtaatcccagaactttaagaggccaaggcaggcagatcgcctgagcctagg

SEQ ID NO: 461472 - DNA, 122 bp, Homo sapiens
ggccggtctcccagggtgggcgggagggcattcctggcctgcccgctctgaggccttctccgtggagctggctgtcgggctcctcgccggcccttcctggagaaaaggcttctgcctcggag

SEQ ID NO: 461473 - DNA, 122 bp, Homo sapiens
ctggcaacctgtgttttattggacagcaggaaccagctactcatattcatgcttggggaccggtggaggtttcaatgcataggagagacagcacagggacgcatccgggcacaggtgcatgt

SEQ ID NO: 461474 - DNA, 122 bp, Homo sapiens
aagtgaggagtgcctctgcccggccgccaccccgcctcggaggcgaggagcacctctgcccggccaccaccccatctgagaggcaaggaccacctctgcctggccgccatcctgtctgggag

SEQ ID NO: 461475 - DNA, 122 bp, Homo sapiens
tgcccttcgccgcccagcgagttgtggagccgcagctccgagtgtggaatccgccagccccgagaggaaacgccacacttcaccaccacttcctcagcgcgtgtgctgtgcctgggtccgtg

SEQ ID NO: 461476 - DNA, 122 bp, Homo sapiens
cactctgcaatgttctcacaaccatgaaattgccttaggacacgttcccccgtggttacccggcgaatgactggataacagatggacaatcaactgcatttgcctaaagtgtgccacttgac

SEQ ID NO: 461477 - DNA, 122 bp, Homo sapiens
ctccatgtgtgagtttccatttggaaatggtatagtcatcatcgtaatgtagcagtcattcgttaatttttatgagccacttgtgacgtttcaggaagctgacagccgacatggattagctc

SEQ ID NO: 461478 - DNA, 122 bp, Homo sapiens
gacagaggcgctcagaaggagggtcacagtagggccaggcactcttctcgggagctcctacgtgttttatgcacgtggttaagaaaaaagagggagaattcaggtgccacagtggccattct

SEQ ID NO: 461479 - DNA, 122 bp, Homo sapiens
tgaaagcagcccgaggctacaaatgtcagaggaaagacgcctgtgcctgtggagacctttcgcatctccccccagtctcatgccattcttttttctgtaaagttgctgggaaccagcaaatt

SEQ ID NO: 461480 - DNA, 122 bp, Homo sapiens
cttggcctcccaaagggctgagattacgagtgtgagccaccctggcctaaacatttaaaacgacatgtgtgacagccaggcatggtagcctgcacttgtaatcccagctccttggaaagctg

SEQ ID NO: 461481 - DNA, 122 bp, Homo sapiens
aggaggagctgacgcgccagcctccacggtgctggcgtcactgcctctcctgcggcaccacgctgcggagcacttaaaatacccacgtcctacaggaagaggacagatgaggctctaaattt

SEQ ID NO: 461482 - DNA, 122 bp, Homo sapiens
gggattggatttccaaaaggccctccttcctcccagcctgtcagctccctcccagtgtcccggttgttttcttaacactttagaggctgtggctgagttggcaggggttccccaccctgaac

SEQ ID NO: 461483 - DNA, 122 bp, Homo sapiens
aactttctgcaggatttggtggatgtgtttctccttggcttggcagctctgttgatgcctcgcatgataacattttgaggttttgaggaaggaatctagatttgcccaggtgtatcttgatg

SEQ ID NO: 461484 - DNA, 122 bp, Homo sapiens
cagtgtcctgttcatttcattcagcacggcaagctcgttcggaaacaaagtcgaaagctgcgagtaagtgacacccgacacatttacgctggtgaagtccagtaactgtttaaaaaataagt

SEQ ID NO: 461485 - DNA, 122 bp, Homo sapiens
acatggtgaaatctctgtctctactaaaaacacgcaaaattagccaggtgtggtggcgcacgccggtaatcccagctacttgggaggctgaggcaggagaatcacttgatccgagatcgtgt

SEQ ID NO: 461486 - DNA, 122 bp, Homo sapiens
ccgtgctgtcctcacatcagcccggcccttttcgtccggcgtggagagttccagcctttacggttgtccagggccgcggaggtagccagggcagcatcctgttccagcacatctcagcctcc

SEQ ID NO: 461487 - DNA, 122 bp, Homo sapiens
ggctaaaagagcggcccaagcagcagcagcaagatggaggcgagtggggtccaggcgccccggggcgccaagcggccgccgccgccgctgctcctgcgcccaggcccatagggcaggtcccc

SEQ ID NO: 461488 - DNA, 122 bp, Homo sapiens
gcacgaggaattgaagcggatgtcatcgccctcgttgttagggagggtacaactgaggcacggtctatttaagatactcaaccaaatcacagccggcagagcaataattacaatccactctg

SEQ ID NO: 461489 - DNA, 122 bp, Homo sapiens
gggttggaggctcacctggtcacctgcgtgcgcgtgttaaagtccagggagcgcatagagcggagaacctcgatgcagcccatgtactgaggggagagaacaggtgtcagatgccatcggaa

SEQ ID NO: 461490 - DNA, 122 bp, Homo sapiens
agcccgagtccaagatggcagcgagcgctgacgtcaccagatctcgtgagagcagaagggcgcgatttggaggctcccgcgcttcggagacgccggcccttccgctcggagaggtactccct

SEQ ID NO: 461491 - DNA, 122 bp, Homo sapiens
ggaagtaactggttgttttgctggctccagtttttccgcggggcggaaaaggcgtgtctgcgtgtgtcccaaccatttctagtcccctttcctcgcaggacctcatgagtaagctgtggcgg

SEQ ID NO: 461492 - DNA, 122 bp, Homo sapiens
cgcgcagcgacccagcccgccctccgccaacgtttaaatagccccgcgcccacctccctccgcctcggattcggctcccagaataagcaacagctttacttccacacaggtgcacccacctg

SEQ ID NO: 461493 - DNA, 122 bp, Homo sapiens
agcccgtgacccaggagacagagcaaccaggagggagacctggcatgtccagcccagtttcggaagtgacccatctgcactctgccgcatgctgtcggccgcacagactcacctgggactac

SEQ ID NO: 461494 - DNA, 122 bp, Homo sapiens
cagaagctttgaggtcatagtaattttgcttgaaaggctcacccctcctccatatatggccgagttgctgtgcttcctgttcttttgtgccaagaattcctctcctgtcccctgacccagca

SEQ ID NO: 461495 - DNA, 122 bp, Homo sapiens
cccgtacccgcgcccggcaggagataagatgtggaggaagtgagctcacgcagcccgggccgtgcccacgtggggacggaaaaaaagcccacgactcgctcaaccttgtccgcggggctcct

SEQ ID NO: 461496 - DNA, 122 bp, Homo sapiens
gcccctgcgggtggagctgcggccggagcctgaggggtcttttcctccaggtcctctttccggcgggggccggaggggtggtgatggacagcccgggaggggcggggcaggaccaggaagat

SEQ ID NO: 461497 - DNA, 122 bp, Homo sapiens
acgttagacatatcgttaaatccattgtctgggactatttgcaccaaaaaatgctcaccccgaatatctgagtttttgataaattccagttgttcagcaagttctttcacagtgttgtctag

SEQ ID NO: 461498 - DNA, 122 bp, Homo sapiens
cagagagctatctgggcatcgcggggaggttctgggactccgcggccagctggaaccagccgcgtaacgggaaccctgggctaggggccgggcaggcacgtaccgcatgcagcgggcgccgg

SEQ ID NO: 461499 - DNA, 122 bp, Homo sapiens
cacccagggatggtactgttagttcttttgaaccaacaaattacgacttggtggctttttcgatccacctctgaaatgtttaaagtcccataaagaatggaaggactttccgtcacaaccca

SEQ ID NO: 461500 - DNA, 122 bp, Homo sapiens
gagcctatttccctttctttcatcatcattgtactttccaggcaaccagagtcttgtccacgtttttgaagaccggctatagcaaacttgccacgtgactcaactgacataaataacgtcca

SEQ ID NO: 461501 - DNA, 122 bp, Homo sapiens
tgttgttgtcttactctggagatgccaagtgtattttttctttctatgtaattttagattcgccttacaatgtaaatcttcacattggagataatattggttggaccttgcccatcttcact

SEQ ID NO: 461502 - DNA, 122 bp, Homo sapiens
tggtttgctgcacagtgtggcagaatccctgccaggtctggatgtaccccagaaataaggcgatggggcttagtctgggcatgcacagaacccagagtagagtggttattatcactgaaaag

SEQ ID NO: 461503 - DNA, 122 bp, Homo sapiens
gattgggatccagtctttcccgctgtgaaagggaccaggtccctacaccacaactgccgtcgctctgtcgcctgcactgtgacctgcactagtcacgggagccctagagagataagccagga

SEQ ID NO: 461504 - DNA, 122 bp, Homo sapiens
gctgggggaggagcggcccaagccgcatgccggggcgctagaggagagaggccccaggcccgtggtctccattgtgaggccccgtcatggtccaaagagaaagcctgtcaagtgagggggct

SEQ ID NO: 461505 - DNA, 122 bp, Homo sapiens
cagcaaatgggaggaaggaccctgtcctccccaggtcacagaattaataaaagcttctaccggcatgcagagccgcgatgaaaggttgcagaacaaagtcattaaagtgatgatatttacac

SEQ ID NO: 461506 - DNA, 122 bp, Homo sapiens
atcacaggagaaagcccttgtccgagcaggaatatccactttatttggactccatgacaccgttcctatgcccttgactagatgtgaatgtattatacattgttctagatttgggggaaaaa

SEQ ID NO: 461507 - DNA, 122 bp, Homo sapiens
ctgggtagcgagagagttccaggcaattccgggggctgccccacagaagcaggtggggatcgacagtggctctccggcccagggaggagagcgcggtcgcgggtccctcccctcagcctgga

SEQ ID NO: 461508 - DNA, 122 bp, Homo sapiens
cagtatttccaaggcgcaagttgcggagtttctgtttcctttttcctctggcgagctttgcgttccctgtgcgccggaagtgatcccctgcgtggctgggctgctcgggttagatcgtcagg

SEQ ID NO: 461509 - DNA, 122 bp, Homo sapiens
ctgggcaaactgaaggcctgtggctgtgatgcgtcccggcgaggggacgaggaggccttccgtaggaagctgcaccgcttacaactggatgcactgcagcgtggtaagggcctgagccatgg

SEQ ID NO: 461510 - DNA, 122 bp, Homo sapiens
actgccactgccgctgccgctgcctgcgctgccgggggccaagcggccatcgctgcccgccggatctgccagctccacctccagggcggccggcggctccccagagccattctgcccgtgta

SEQ ID NO: 461511 - DNA, 122 bp, Homo sapiens
gtgttctcctcacatgacttgataataagaataattctttctaattctcccccatggagacggttaatcagtcaaaacatttcagcctttcctgtcataaaaataaaaaacactggcagcat

SEQ ID NO: 461512 - DNA, 122 bp, Homo sapiens
aaaatcaagtgattttgcttttgaaaattcctgctaatgtttttcatgcaacatctctttcgtgtgtggctcaggggtagaacattgcatcaggatttgctcatgggtctcatgtctcttcc

SEQ ID NO: 461513 - DNA, 122 bp, Homo sapiens
ttggggccgatggaggggttgattcataacgtttgctaaatcctgtggtgtaaacaatcccgccctggcagatcccaagctgccaatgtgctgtcagctggctcacaaaattcctcacactt

SEQ ID NO: 461514 - DNA, 122 bp, Homo sapiens
cctattggctctctctaccaggggtaccgtctggggaacctctggtcaccttgtcctccgcgcgctctgtggcgaaagggacctgcgcaggcgcgtgaagggcgccttcagggcccgcgctt

SEQ ID NO: 461515 - DNA, 122 bp, Homo sapiens
aaaatgaggatgacggtagcagtgggtaggggtcagaggtcacgcttaccaagggtttaccgtgtcaggcacgggtctgtgttacctcatcacgtcctcatacgacactgcaagaaaggtgc

SEQ ID NO: 461516 - DNA, 122 bp, Homo sapiens
ccggggctctgccctcgtttgctggatgcagcctccgtggctgtgcagtttgtacctggtcgtgggaggggccggtgagcctcgtgttcaccctgaggaagccactgccagaggggccaacc

SEQ ID NO: 461517 - DNA, 122 bp, Homo sapiens
tctgtgaacatatcaccatatgtgatagctatattttcctcttgacagtgctcattaaagcggaacaaactatttcctctgtaacaaaaatgaaaaattcatacacaaagagagtcttaagg

SEQ ID NO: 461518 - DNA, 122 bp, Homo sapiens
ccccgtaccctccctacttcgaaggcgcccccttccctcacccgctgtggctccgggacacgtacaagctgtgggtgccccagccgccgcccaggaccatcaagcgcacgcggcggcgtctg

SEQ ID NO: 461519 - DNA, 122 bp, Homo sapiens
gattgcagacggagtcttgttcactcagtgctcaatgttgcccaggctggagtgcagtggcgccatctcggctagctacgacctccacctcccagccgcctgccttggcctcccaaagtgct

SEQ ID NO: 461520 - DNA, 122 bp, Homo sapiens
tggtgagaatggggtgggcagggttcatcactggcaaaagctatggcagagccccagcttcgcctgggctagatgttttgcctggccacggagctgcacaccgaatggaagttataagactg

SEQ ID NO: 461521 - DNA, 122 bp, Homo sapiens
cgtgtgccaggacgggaggatggaatacaccatgttccaggacggaaggctggaatacaccgtgtgccaggtgagagtcagagtcatcggcatggaccaggttgaccttcgtatacttacag

SEQ ID NO: 461522 - DNA, 122 bp, Homo sapiens
gataaaaagagtctaatgaactgttagcataatgctaagtgctgcagcacacaaaatgctcggcaagtgctgatgattattattaatcattattattcttttaatagcttttttaaaacagt

SEQ ID NO: 461523 - DNA, 122 bp, Homo sapiens
gaagctgtggatctggtaaacagagtacaaccttctgctgcatatttttcatccattcagcgcaattttaagtagatattaaaggtaggcgccaccgagaaggtaatatttgagcagaaatc

SEQ ID NO: 461524 - DNA, 122 bp, Homo sapiens
aaatttaaatagtgcattattcaaaagaatgagaacaactatatattaacttataaatatcgttcagtagggaaaaagttgcagaacagtggataaaaaataaactaatcaagcagggcaca

SEQ ID NO: 461525 - DNA, 122 bp, Homo sapiens
acttttttccttttttctagcgctccagggcagtgttaccagtgcccatcaggtgcctgccgtctcttctgtgtcacacacagccctgtatactcctccacctgagatacctaccactgtcc

SEQ ID NO: 461526 - DNA, 122 bp, Homo sapiens
ctcgcgaggaccctccccccgggtcccccagctctgccgcggccgcgcccagatggccgtcggatcccccctcaaggtccccctgtcggctccgccctcggtcgcccaggccccgccccggc

SEQ ID NO: 461527 - DNA, 122 bp, Homo sapiens
tggaattcaagcgaccgtgggccttgagggaaccggggggcaagacacccacccagcattcgcggaatatttcctcgaattatttcggggaggggtgaggccggggcagggtggggccttct

SEQ ID NO: 461528 - DNA, 122 bp, Homo sapiens
gcggacgcggggctacgggtcggcggcggggccacacttcggggaaggcgaacaacgccgcgcccccgccctgccccccgccagctccgcgggagtgagacaccagggcagcgacccccggc

SEQ ID NO: 461529 - DNA, 122 bp, Homo sapiens
agcgagcgccgagccccaaccgccgccaccacccgcccgcccgcccgccccgggggccgccgggaactgccgctggccccccaccgccccaaggatctcccggtccccgcccggcgtgctga

SEQ ID NO: 461530 - DNA, 122 bp, Homo sapiens
tgtctctatacctatctctattgctatctctattcatctttttcccccctgctttgctggcgtcctacacacatctttctattaggtaaggcttcacccatctcttctatgccagaaagtaa

SEQ ID NO: 461531 - DNA, 122 bp, Homo sapiens
acctcagctgcagcagcaactgcagttccggggcgggacctccacgcacgtactcgtgcgcgctggggaggaagtcccgcccctatggcaaactcagctacctgattggctgcctcgcggac

SEQ ID NO: 461532 - DNA, 122 bp, Homo sapiens
gcagaggggtatgcagagagctaagcaatgcctgtaaccaaacacttgaccttgaacttgcggcatccttctcaaagcctcccacaggaagggccttccacagttagtttatccaacccttc

SEQ ID NO: 461533 - DNA, 122 bp, Homo sapiens
tccccgaaagaaaggcaagacgaacgcgaaccttcagtcgttctcatgtggagtattcatcgttcagcgccaggaagtatcctgagctgaagggcgggttcttacagaggccatctgagcta

SEQ ID NO: 461534 - DNA, 122 bp, Homo sapiens
ggcatccagactgggctcttcgcttcgggaagtgggcggttggacggtgcgggtgttgtccgggaaagaatcaggaaatccctcatgacctgaagtcattcaagaagcattcgccgagcacc

SEQ ID NO: 461535 - DNA, 122 bp, Homo sapiens
ctgcgtctctccaagtttccgtgtgcgtgtgtttcgtcagaatcaggcttcagttgcagtcgcctcttttcttttctctttcttctttctttctgtctttttttttttttttttttttgaga

SEQ ID NO: 461536 - DNA, 122 bp, Homo sapiens
gccaatcagttcttggaaccgcacacccgatgccgacatccctctcttgttggctcccctcgttagcgggattcaataactaaacgtccatttctagcattgactgaagagctcaagcttga

SEQ ID NO: 461537 - DNA, 122 bp, Homo sapiens
cgcgccgcgcgcatggagtcagctccagcctctctgtcgagcggaagcccctgcgggggtcggggaagcccaaggccctctctgtgcccaggtcctcccctctgcctgcccgcgtgcccctc

SEQ ID NO: 461538 - DNA, 122 bp, Homo sapiens
acgagggggcaaacccacagcaggatgagtgatgtgcccctgcctgtgaggggactccctcggggcctgcactgggccttcccctgtggcttcccagccaacaagcctcaggttcaggccat

SEQ ID NO: 461539 - DNA, 122 bp, Homo sapiens
attgtgttggaaggaagaagcagctggcctgcggaagctaagcagatgctggggctctctcgagcaggctaagttggtgaaaggtcagtcccacacccacagcctgggcgggactgcctggc

SEQ ID NO: 461540 - DNA, 122 bp, Homo sapiens
tatgcaaaggcataggtcagggacttgaggtataactctatagattcgttgcttccttttcgattcataggtaatttgaagtttgtgctgttaccttttatccatatatgtgattgtattgt

SEQ ID NO: 461541 - DNA, 122 bp, Homo sapiens
acaagtgactcactttaatggatttgcttcagacaggagaaacctgtaatttctcttaggcgtgcttcatggacccatagtggagtgaatcacagacttgcacaagccttgaaactgtgggt

SEQ ID NO: 461542 - DNA, 122 bp, Homo sapiens
agaaagctttgaacaagagtagaaagacacactgtcacttgtcttttcccctgaaaaagccgggccacattctgctcagccaacatgttcccagaggaatgtgatttaacttccgcttttca

SEQ ID NO: 461543 - DNA, 122 bp, Homo sapiens
tcagcatttctgtctctgtcaaacaattagtttatagatagtcataatctttctttcttccggatggtttatccttgtatgctgaacaaaagaaaaaatgtgaagactgaaaggtgtgattt

SEQ ID NO: 461544 - DNA, 122 bp, Homo sapiens
gggagtgtagctggacaccgagcaccatccacgctcagccccacggggctccaggagtcccgagcccaagcccctgcacttgcattttatttaaaaaacctgagggttaaattcgggcaagt

SEQ ID NO: 461545 - DNA, 122 bp, Homo sapiens
tatgttactcttcacataaggcaaaattccttccacgtgaaaactttttagttgttgctgcgacaaaccacatgcatgagaaactgcactttcatatgagctattgctatagtacttattag

SEQ ID NO: 461546 - DNA, 122 bp, Homo sapiens
cttggcagtttcccattgcggggcagctgggccgggggcgggggtcggctgcagatctcccgttgtgtgagagaaacgcaagcacggagctcccttgacctgctgcatcctcctcggcaatt

SEQ ID NO: 461547 - DNA, 122 bp, Homo sapiens
ggtcccgccccctgccttggcgcaaggcaggtgagaaacggtcgcgcagtttgaaattaacgccgacgggaggggcttaatccgcagcctggagatccagccccctcaacccgggaggtggt

SEQ ID NO: 461548 - DNA, 122 bp, Homo sapiens
ccctcctcccttcccgcccatcgcactggtcctgcagagatagctgtccccttggggccccggggctcccgctggcgcatctgtctgaccaaccaccagcaggcgtgtgttcaaaggaccat

SEQ ID NO: 461549 - DNA, 122 bp, Homo sapiens
tgagtgccctgaagctcctcacgagaaacacaggcggaggcacctgtgaggacgaagggccggaaggggccttccacgaggcacactgttcaacaggggctctgctcacaatgcggcttgtt

SEQ ID NO: 461550 - DNA, 122 bp, Homo sapiens
gaggagacagtataagacttcctggacccaagggacgccgggtcccctggaagcgcccatcgcattgaagaccacgtgtgccttgctggggtcccattcagacaagtcccgggtcgttcgct

SEQ ID NO: 461551 - DNA, 122 bp, Homo sapiens
cgccagccaggtttggggaggaagtggtgtacgagggatccaaacccacgagaaatcctgcgtgccgcgtctgtgttctgctctggtggtaagaggcaagatgagcctctgcaccgtgggct

SEQ ID NO: 461552 - DNA, 122 bp, Homo sapiens
gcgagccagcgagtgtgctggctaggagggtcagttgtggttttcagtgagggtcggaggcgggaggaatagtggattaacctagtttaggcttgggagttcaccaccactacttttagaat

SEQ ID NO: 461553 - DNA, 122 bp, Homo sapiens
gctcgtaggagggtttgcttgaatgatacttgtgagtgaagggagcaacagatgaaaggtcgtgtcctgtcatggtcctgcaggaaggcagaaccacttcaagtccttaacgcagagagcat

SEQ ID NO: 461554 - DNA, 122 bp, Homo sapiens
tcccaggcagtgctcgccaggaaccaagacgctgccagggcgcggcgcaaaagttcactgcgaggccaggcctgggcgcagctcatggtcaggggctcctgcctccacagtcccaccccgcg

SEQ ID NO: 461555 - DNA, 122 bp, Homo sapiens
agggcagcgggcgccagccagggttgggttgcagctcagggagcaggcagggagggctcccgtgggtccacgtgaccctcccccaggccagcctctcctctccgggttcctgggctgtaact

SEQ ID NO: 461556 - DNA, 122 bp, Homo sapiens
gtggtaggatcctcatctccgttgttttttacaggattcctccaggctaaagtaataaagcgagtaattagaatgctaaagacagatgtaaataacaggaatgagacagcggtgacagatga

SEQ ID NO: 461557 - DNA, 122 bp, Homo sapiens
tcatagtggaaagttctgagccgggtgggtgtggggggctagttttataattcatccagtcgactaaatcttggctcagcaccttccacctgccaagtactgttctgtgtatgagaaaattt

SEQ ID NO: 461558 - DNA, 122 bp, Homo sapiens
ctccccgcgcttaaagtgtttccacgttacaggcgacttaaaggcagccctggagcctgacgtataattcgagcgccgatgcagaaaggagtcaggtgtttttttttttttttttttggttt

SEQ ID NO: 461559 - DNA, 122 bp, Homo sapiens
ctcagccaggccagtcacagagagacgagcccggcgattcgccagcggaatgtccaggggcggggcagcgagcgagcgcgaagcaatcctgaggcggtctagggggcggggcgttcaggggg

SEQ ID NO: 461560 - DNA, 122 bp, Homo sapiens
aaaagccaggcgagatgaaatctgcaggctccagtctgcctggtaacaccccaacaaaagcggcagatttgaggcattgtcatcccccgcacccctccccacgtggccttctggcacgagcc

SEQ ID NO: 461561 - DNA, 122 bp, Homo sapiens
aggaagctaatattgttatatggaaaactattacgatgcaatattaaagccaaaaaaagacgctcatctactttgtgagggaagctatgtaaagcttatgtaaaagttgtatgtttgtaatt

SEQ ID NO: 461562 - DNA, 122 bp, Homo sapiens
tggtgataggagaggccagagaatttctcaagcagcttgaggactcacccataaaaaagccgcttgcagtacatcagttatattatgttgtcgaacagagcttcctgcttgttgggtcttgg

SEQ ID NO: 461563 - DNA, 122 bp, Homo sapiens
acaatttccacttgccaaaacttctgccctttttcagccatgaccccactgcccacagctcgccacctccctgggatacatggagaattttggtttatgcaacacactcccagtgtgcacag

SEQ ID NO: 461564 - DNA, 122 bp, Homo sapiens
cagcgagcccccagcagcagatccttcccttttgctcctcctgatagcgccaatcttcgccgccactgccacactgcgcgcccgctatccactcaccgcacagcgagaaggcctggcggaga

SEQ ID NO: 461565 - DNA, 122 bp, Homo sapiens
ttgcgaaacccccttttcccttcagcttgcttagatgttccaaatttagaaagcttaaggcggcctacagaaaaaggaaaaaaggccacaaaagttccctctcactttcagtaaaaataaat

SEQ ID NO: 461566 - DNA, 122 bp, Homo sapiens
gccatgtcctccaatcagtcaacagaggagacaatttgatctccatctggcagtctcctgcgccttacttctcaaggaaaagaaacagtatcacttagtgactccctggaacccaccaaatc

SEQ ID NO: 461567 - DNA, 122 bp, Homo sapiens
gctccagccgctccagggaagccagcctcggcagccaccgtgaagaggaagcggaagagccggtggaggccagaagagaataaggcagaactcccacctgctgagctggtgcagagggacgt

SEQ ID NO: 461568 - DNA, 122 bp, Homo sapiens
gtggtctatggtctcactgggaatgtgaccttaagagaaaagatgaattatctatgaggacgtctggggcaggttctttccaggcaggggaacccccagtgcaaaggcaccagaacaggagc

SEQ ID NO: 461569 - DNA, 122 bp, Homo sapiens
cagttaaaaaactattacttgacaaagatgaagggccagacttccttattcaaaacctcacgccatttatcttaattctgctgcatctgatactgacttcctctagagccaggaaactttgc

SEQ ID NO: 461570 - DNA, 122 bp, Homo sapiens
ctccctctggctgatttgtacaaaatcgcttcattaaaataactgaaggctggcagggcgcgttggctcacacctgtaatcccaacgctttgggaggccgagacgggtggatcacctgaggt

SEQ ID NO: 461571 - DNA, 122 bp, Homo sapiens
aagaggtctctgtctttgcaagcacatgttcaattgataattccagaaataaactcaatgcggccaatttattttatgaacctctttgatgcaagttggactaataaaaaaaatgcagacag

SEQ ID NO: 461572 - DNA, 122 bp, Homo sapiens
gctgtggtgaaaatagtaggtagaattaacacacttaaaaatcaattctatggccgggcacggtggctcgcacctgtaatcccagcactttgggaggcccaggcgggcagatcacctgaggt

SEQ ID NO: 461573 - DNA, 122 bp, Homo sapiens
aacgtaaacaaactcagccgcctaaccggaactgcgtttccagcagcaagggggaacttccgagatcaaaggtgacagcttccggcaactgatgcctccactggccactcctccctccgtcc

SEQ ID NO: 461574 - DNA, 122 bp, Homo sapiens
cttggaggaggtgcgcaagggcaacctggagcgagagtgcgtggaggagacgtgcagctacgaggaggccttcgaggctctggagtcctccacggctacggtgagcctgggctgctcggacg

SEQ ID NO: 461575 - DNA, 122 bp, Homo sapiens
atcatggctcactgcagcctcaacctcctgggctcaggcgatcctcccacctcagcctcccgggtagttcggctacaggcgtgtgccaccatgcccggctaattttatatttttagtagaga

SEQ ID NO: 461576 - DNA, 122 bp, Homo sapiens
ggctgcccacccgcccaccccgcctggaagctttctgatttctctgttcgccccgccaggcgctgtggggtccgtctcaccaggtctgcacgtgagccccctgcccccaatccctcccagtc

SEQ ID NO: 461577 - DNA, 122 bp, Homo sapiens
ccgccgcccgccggccgctcctcgcagccgcccgccgcggcgccctccccgcccccggggcgctcattggcccagcgcctcgcgcccgccgcccattggcctgcaccttcgccaatccgccc

SEQ ID NO: 461578 - DNA, 122 bp, Homo sapiens
ttacatataaaacagaaatcatttcccttttttaatatggcacgtggctcttccctaagtcgccctgggttaaataccgactcaattaacaagatgctaaaaaccgtttacgtttttttacg

SEQ ID NO: 461579 - DNA, 122 bp, Homo sapiens
cgggagggcggaatctggaagatgagctggtgcagtagcttgggcggcgcatgcagcagccgctcgagcatgtggaaggtgcggtaatggtccatggtgtcgctctgcagcaccgctgccgt

SEQ ID NO: 461580 - DNA, 122 bp, Homo sapiens
caataatgatttgtggatggattgattatagtctgatatcgctctggttccacagaaacccggagctccttggcccactgttaccccagcagacctaaatggacggtttctgtttttcactg

SEQ ID NO: 461581 - DNA, 122 bp, Homo sapiens
tgcagggggcagagcccgaagctgtacccaatcaggggcaccggggaggagctctgcgatcggtccaatcaggcgcgccgtcggggacgcagctgcagacgttcaaccttctcgcgggattt

SEQ ID NO: 461582 - DNA, 122 bp, Homo sapiens
tcatacattaaactattatgtcatacttagaacatgccaacactcaagatagttttcccacgttccacaggatggaggcctgaaatttacatctcagctggaaggcaaagctggtgcggtac

SEQ ID NO: 461583 - DNA, 122 bp, Homo sapiens
ctcccgctcctcctcattgtccccgccccttgctctgttttcttccagctgccggaccagcgggcctgccgcctctacggaccagtccctgctcaggtgtcacttttgctggcaggccgaga

SEQ ID NO: 461584 - DNA, 122 bp, Homo sapiens
ccctgctgaaaccccaactatatacattagagaaatgacagtactttaggagtcttgggacgccacctgtctttcactgggccagcaagccatgacccatgattacatataaataaatggtg

SEQ ID NO: 461585 - DNA, 122 bp, Homo sapiens
gccaacaggtcagagggcacgcggagtccgcgccgccgcactagcccccgaggccgcctgcgccattttgaataaggtcaccacccggagttcgctgggagaaaaacttggtggggagacgc

SEQ ID NO: 461586 - DNA, 122 bp, Homo sapiens
ggcaccagccccagggccaggtccttggtgcctgcaccaggctcagcaaagtggaccacacgccgacaggcctggccctcggggccccgatccagcatggttgtgcgccgcagggagaagcc

SEQ ID NO: 461587 - DNA, 122 bp, Homo sapiens
ccgccccgccggccggccacgcccctgccgcgccgcacacgtactcggtccggtgctccgcgccgcccgcctctcggctgcccagcagctcccgcagcttgtccgcagccggggcgcgtatc

SEQ ID NO: 461588 - DNA, 122 bp, Homo sapiens
gacaataatgaacattgaagctttagaaagagctgaaactgatcatggctcagaaaatgacgatgattggactggatatcatgtgatcaactttgatgcctccattgagttcagggactttc

SEQ ID NO: 461589 - DNA, 122 bp, Homo sapiens
ccttcatgctcgcctaaggataggccgcgcctcctggcctctgagccattggcaggagggcgtgggcggggcatcgtcgtctggcactggccactcagaacttaggaactgaacctggccat

SEQ ID NO: 461590 - DNA, 122 bp, Homo sapiens
cagaataaaatctaaactccttagcgagaccctccatgatctgaacttcacatcttgtaacgcctacccctcgcccgcaaaagcctatggttcagccagacattttccccagtcttcgaaca

SEQ ID NO: 461591 - DNA, 122 bp, Homo sapiens
ctgaggaatgtcagcagcaaggtcacgtgggcctctgctgcacccacccgcgagctgggacgtggcttccctgagcatacaggcaccttgccacctgggcacccccttgggcgtcccttagg

SEQ ID NO: 461592 - DNA, 122 bp, Homo sapiens
tttcttacaggcttctgtgagatttctctagagacatttccacagcatctctgctgctggcgcccttcggaggctggggctcgtctgttgggtgggaggaatgcagtacgagcttcctcctt

SEQ ID NO: 461593 - DNA, 122 bp, Homo sapiens
tggtgctcaccaccagtgtcattaccactgacagcatgaggacaaagccggcctgtctgacgtaagctgtttccaccccacacctccaggtcccggcccctgcacactctgagaattacatc

SEQ ID NO: 461594 - DNA, 122 bp, Homo sapiens
ttttgtgaattgactaatgcgttagaattttaaaaaccgggtagaacgcagcgcaggaagcgagcgttccccgccgcagcgccggagcgtccagccagaatccccctgcatgcgcagcccct

SEQ ID NO: 461595 - DNA, 122 bp, Homo sapiens
cctcaaaggaacacagctcttttctccttctcgtcacccgcaatgtggcaagcaagggagcgtgtttcagccctgtttgtgttaaagctcttttagtacctccaggcgggtcctgagttctt

SEQ ID NO: 461596 - DNA, 122 bp, Homo sapiens
taccacactggcatagggggctctgatcccttcctagcgggaagctgcagcagggtctcccgggactggcctctcgctgcggcctcaactccgaatgggtgggggagacagcccccgacacc

SEQ ID NO: 461597 - DNA, 122 bp, Homo sapiens
tacctgggactaacaataagacccttgttgttgactgggcaggttccacagctgatactccggctgccttgagcaataccatcaggcagatctggggctcagccctgtccttacccagggcc

SEQ ID NO: 461598 - DNA, 122 bp, Homo sapiens
tccctttgcccggcgggagactaaaggccggaaaagtacagcccgcccaggggtgggagccgagctagccccacctcccggtggcttctcgcgatcgtggagacgcagcgagcctatgtaac

SEQ ID NO: 461599 - DNA, 122 bp, Homo sapiens
gtcctgccttggctccgcgagatttggggcgaaagcttaggcaacaggggcacgttctcgcgaggtttaggaaatttcccacggccgtgttgtgtctgagccgagtagtggaaggcggtggg

SEQ ID NO: 461600 - DNA, 122 bp, Homo sapiens
gtcatcagagatcctgctctttccttctctctggctgcctttctcagcacaagcttccgtcgtcactatggactaatgtccaagggggcttctggagctggggccattgagaccatgcaggc

SEQ ID NO: 461601 - DNA, 122 bp, Homo sapiens
agcgcaaccggaactagccttctgggggccggcttcctttatctctggcggccttgtagtcgtctccgagactccccacccctccttccctcttgaccccctaggtttgattgccctttccc

SEQ ID NO: 461602 - DNA, 122 bp, Homo sapiens
tttcacaagcatgtctaatgagagagcactggaaaggctgatttcagtccaaatgccattcgttaattctgtcattcattgacattcaccagttcctgatgcctgctatgctggacgttgtg

SEQ ID NO: 461603 - DNA, 122 bp, Homo sapiens
gggcactgtctgataaactgccagagaaagacaaggaagacaattgtgaggtcgatcgatcggctgactatattgacaagatactgattggttacatgttgaagaaaacatacaatacaaaa

SEQ ID NO: 461604 - DNA, 122 bp, Homo sapiens
tggttttgaactcctgatccgcccacctcagctgggattataggtgtgagccaccgcgcccggccaggtgttcttcatcagactgcagggacacctccagcaattgctgcatggttcctggg

SEQ ID NO: 461605 - DNA, 122 bp, Homo sapiens
aggaagcccaaccttctccctgcgcctcagtttctcccgacgtcctcgatggcgccatggcgccacactaggtaccttcgggttcgacctcccgagcagctccacacgctgaggccccgcgg

SEQ ID NO: 461606 - DNA, 122 bp, Homo sapiens
ctataaaggcaaagttgggcagttgcaacagtgatgccacagcccataaagcctaaatatcgacgacagggccttttacagcataagtttgtaactcctagtttaaatgaacaggagccacc

SEQ ID NO: 461607 - DNA, 122 bp, Homo sapiens
agtcacagggagtgtggacagtcaggggtttgctttctgctcctgagttggggtgtgcagcgtggagcccacagcctggttctgggccagggcacagtgccaggggctccgctctgacctcc

SEQ ID NO: 461608 - DNA, 122 bp, Homo sapiens
tgttttcttcctggtggaacgttccacttgaaactgttccacaagggctgttctcgcctccgactccgggaggaactgtaattaacacagcaacaaacgcccacgacgctaactggcaaagg

SEQ ID NO: 461609 - DNA, 122 bp, Homo sapiens
tgggtgtcgcggccacaaggacggccatttgcctgggagcccgtccatcccccccaccctcgggttctttgatgttcgccaacaaactgccatcacagggaaaagaaatgtttctgtggccc

SEQ ID NO: 461610 - DNA, 122 bp, Homo sapiens
aaggttcattgggcccaggcggcagttgctactgctccggggaccaagcccagagaaggccgagagggctcagcgcagcacagggatgcaggcagtgggtgaacagagataccctcgagtag

SEQ ID NO: 461611 - DNA, 122 bp, Homo sapiens
cctcatcgggtccctttttttttttttttttcagttgtctcctcccatcttcagatcattcgaatcattttggggacttaatcatgtacatggacaagtgtaaattatgatttttggttttg

SEQ ID NO: 461612 - DNA, 122 bp, Homo sapiens
tgcaatggttttactgtactgcctcgatctgtgccaggcatttatacacagccacatgtgcgagtcaggtagagcgtatgtggtcacccccatggctcacggagttagctgaatggcctctc

SEQ ID NO: 461613 - DNA, 122 bp, Homo sapiens
tttacaccacagaaattggcaaatgctacaaaagaggactttttcacccagagagctggtcgtgaaacaataaccagccactgcctgggggtcagggtaccctgaacattgaccacagcagc

SEQ ID NO: 461614 - DNA, 122 bp, Homo sapiens
ggcttattaagagaaagagagaaaggcatgctattttaatcattaaattcttgatgatgacgatcatcatcaagatgagaaagaaaagaaatatgagccaagagaatctgttgttgccagca

SEQ ID NO: 461615 - DNA, 122 bp, Homo sapiens
gggtgtgtgttattgtgctggaagtcaaggctgatgtgagcgtattggtgggggaagtagcgtgaggacccatctgcaaatgttgcttgcatcttgcaaaccacacagaactgtggggcttg

SEQ ID NO: 461616 - DNA, 122 bp, Homo sapiens
ttttggctggagacctggaggccctgaagggcatcttgtgggtgcccaaccctgtctctgcgctcctccttgaggcagcccaggctccctgtgcaggcttggtgtcagccctccagttccct

SEQ ID NO: 461617 - DNA, 122 bp, Homo sapiens
gctcccggcactggcctctgtgccctggccgttcctggggtggggcatgggtcaggaactcgcactctcactctcgggagataggaactcagtcccattcataaccccaccgtgtaacctgg

SEQ ID NO: 461618 - DNA, 122 bp, Homo sapiens
gagatcgtccgcaactgggcgagctgtgcatggggcgtggctaaggccgtggtttggttacgattggccagcgggacttaagtgttgtctctgaagagcatggacattagtctggagggtcc

SEQ ID NO: 461619 - DNA, 122 bp, Homo sapiens
aggtcctagtgcccatcagatacccgcggccgggactcggagctgtggggtgtggggaggcggaggcaccaactaagagcgacctagcatcgcaaagccgccctcggggcgctcatggcggg

SEQ ID NO: 461620 - DNA, 122 bp, Homo sapiens
cgggggatgcagggacccgggaggccagggaacctggccagttgttttgggccaggggtgcgggcgaggggtggttgttgtttccccacttgtggggcccgaagtcatccaccggcggccgc

SEQ ID NO: 461621 - DNA, 122 bp, Homo sapiens
ggctgagcaggtgatggccacggcgccggcaggagtgaaagcaagccgctcttcctgctccgcagggccctgctctgtgctctaagggccggagaacagcgtttcctggagggagtgtctca

SEQ ID NO: 461622 - DNA, 122 bp, Homo sapiens
ggggagaggtggacaccctattcttcctacagggcgcggctagtgcggagtcagaacactcgaggaagcaaggaggggagctgaggatgggcagccatcctctctatgctgggtgcacaggc

SEQ ID NO: 461623 - DNA, 122 bp, Homo sapiens
ggtgggatttaggctggcctgagagtgggcttcctacacagtctctacagcaaagcccagcgcttgacaagtcctgcttttgaatgcaaactccttgtgagcttcctaacacctcagtctta

SEQ ID NO: 461624 - DNA, 122 bp, Homo sapiens
ccgggtaaaggggatgaatagcagactgccccggggcagttaggaattcgactggacagccgcgtgggagggagtgcggggagaggcagagttgttttgttattgttgttttattttgtttt

SEQ ID NO: 461625 - DNA, 122 bp, Homo sapiens
accagagggagccacctgtaaagtggacggtgggggggccagggatggggacaaagagcacgaagtacaggcacagggacggacagacagacacagacacagacagttacacgctcaggaag

SEQ ID NO: 461626 - DNA, 122 bp, Homo sapiens
gggtccgagttgcgtggttaggagcgcagcggaggagccggtcttcctgggtccatgttgcgtggttaggagcgcagcggaggagccggtcttcctgggtttgagttgcagctccacctctt

SEQ ID NO: 461627 - DNA, 122 bp, Homo sapiens
gagcgacctaatctgggagcgagtggcttcagggggtggaggggagggctcatggttacacgttaacccaaggagcgtcctgtggactctgtgactgataacagggcccagggagatgttgt

SEQ ID NO: 461628 - DNA, 122 bp, Homo sapiens
tagagctctgaccacagggctgggttctgctgcacagcatgtgggatcccctgatgcaggcgttcctaaagaatagcagccattccagaaattacatccccctctggcctcctggcccctct

SEQ ID NO: 461629 - DNA, 122 bp, Homo sapiens
gctgactgagtccgaggccgtcgagtgaaaccagggggcagccagagagctccatgctctcggcgtcgacgccggatgagctggaggacgagaagagcccctagggccaggagaatcacccc

SEQ ID NO: 461630 - DNA, 122 bp, Homo sapiens
ccagacgtgaggcgacactgaattgctcccgagacgcgggaagggcgaaggcaatcgaagcgaagagctttaactcatcttctccaggatttggggcacgggaacctgtctcctgaccttcg

SEQ ID NO: 461631 - DNA, 122 bp, Homo sapiens
acaagcagggactccctgggaggcgggctagcactgagtggccggaccagccctcggggccgccccgtaccaggggcgccaggggaagagccatccagggctgggcgctgggagctgcggcc

SEQ ID NO: 461632 - DNA, 122 bp, Homo sapiens
ttggtccgctaaagataatgacccgcccctttctcgatacgtaaacatctagcgcgctgacgctttccaagcacgcatgcgcagttgtgaaatattgcggagttttcggagtccaaaatggc

SEQ ID NO: 461633 - DNA, 122 bp, Homo sapiens
taattaaaaagaaacacctatggacatgcttgccaacccggatgggtctcaagggaattgcgtttagcggaaaaagccagtctcgaaaggttgcatagtgtatgattccatttatagagcat

SEQ ID NO: 461634 - DNA, 122 bp, Homo sapiens
ctgaaatagagcaaaatgcccgacttttgggggcggggctcctggcaacagcactctaggcgcaggcgcagaggcgacctccaggcagggccaggtgggagggacggtggggggtagggtcg

SEQ ID NO: 461635 - DNA, 122 bp, Homo sapiens
tccaattggcgtagcgcttgctgagcggcggcggcaaccgacgtacacaaggggcttgagcgttctgtggagagagtgcgaggtcaggccatgaacttggggtaagcaggggtaagctgggg

SEQ ID NO: 461636 - DNA, 122 bp, Homo sapiens
cgcgagggtgggcagggggcgacctgggctcagcgccagggctctggggtggtgaaggggcgtccgggcgctggggttggccaggagggagcttttccgtggtggtaccagggagaagtgtc

SEQ ID NO: 461637 - DNA, 122 bp, Homo sapiens
gctcgcttcctgcagccgagggtcctgatgcagctgaagctttcagatgggttagcataccgcttcgaggtccccatagccaagttccaggagctgcggtacagcgtggccctggtcctaaa

SEQ ID NO: 461638 - DNA, 122 bp, Homo sapiens
tctccttgtggccgtgctcacaggcgcacatgagggccgtggagccgtcatcatcttgcacgttgacatctgcctcacaggccagcagggctttgacaacgtccacccgcccgtggctgacg

SEQ ID NO: 461639 - DNA, 122 bp, Homo sapiens
ttcgcaacattgcgattgcactggcttgagaacgaaggaagttagtcccttgcggtgatccgtcctttcatcctggcgtttgcctgcagcaagatggcggcggtgtcaatgtcagtggtact

SEQ ID NO: 461640 - DNA, 122 bp, Homo sapiens
gcagctctgccactctgcccgtctgcctgagtcctctcctgccatcctcctgaccagaggcgtgggcttgagttgaatgccacgcagtggctaaaaatcagagagagggcaggcggcagggc

SEQ ID NO: 461641 - DNA, 122 bp, Homo sapiens
ggccaggtgcatgggaggaagcacggagaatttacaagcctctcgattcctcagtccagacgctgttgggtcccctccgctggagatcgcgcttcccccaaatctttgtgagcgttgcggaa

SEQ ID NO: 461642 - DNA, 122 bp, Homo sapiens
gttcgcatccataatagacgcgaacagagtcgtgattgttccctgttgcgggacattctgcgcctgaatgagcgggggctgctgtgtcgacgcggatttgccatatggttgcgcggagccag

SEQ ID NO: 461643 - DNA, 122 bp, Homo sapiens
ctcacaggacgcatgtccccttgccgagttgagggcagctggcctagagtgagtgagggtcgtgttgggggaggggggaatggagtggggaaggggaactggggagcactggagccttgtcc

SEQ ID NO: 461644 - DNA, 122 bp, Homo sapiens
accagacaaaaaaccttttacaaagagacaaaatctttttgtagaaacaaaaggaaaagccggctgggcatggtgtcattcacccccagctctgtgtcaaccagaagcccggcgccacaccc

SEQ ID NO: 461645 - DNA, 122 bp, Homo sapiens
cggcggcaaccaccgtgtgacctgtagacagcccccagccccacgcacacaccaagcacacgcccagaccccaggcgggcgggacagctcccagaacttgttaaaagaacttccccatttga

SEQ ID NO: 461646 - DNA, 122 bp, Homo sapiens
tgcggaggaccaaagcggcgcggaccccggcagggcaccgtcggaaacacgctccgcgggcgccgagcccgagacactgacagacccacggagaacgtttccaaacaggattatagctttta

SEQ ID NO: 461647 - DNA, 122 bp, Homo sapiens
ctccacatggaaagcagaaaacactcgatgataggtgtaattatgactaacgttagagctcgcctcttacatttactcttaccctacctttaacgggtgtttccaaatgtaatctaatttta

SEQ ID NO: 461648 - DNA, 122 bp, Homo sapiens
cggggtttctttccttggtgtaccggaagaattggattacacccgggcctggacaatcagcgcaaggttttattgagcggaagtagctctcagcagatggggaagacagaagggagagatgg

SEQ ID NO: 461649 - DNA, 122 bp, Homo sapiens
agcaacgagcgtttcctccagccccgcctccctccgccacacacaaccccgctctagcctcgcctcccaatgacgtccgaaccctgctttctgggagcctagcaacagaagcgacctccggg

SEQ ID NO: 461650 - DNA, 122 bp, Homo sapiens
ttagggaagggcggattgcttctctgggccttggtctcctttcccataaaccaaggaggtcgggatggatcatctctagggccccatcccattctcatgctctggccgtctatgagtcgctc

SEQ ID NO: 461651 - DNA, 122 bp, Homo sapiens
gagaccaaggcgagcccgccaatcggcagtcaggaggtgctaaaggggcggggagtagggcggagccttgcctgtcagtcatgggcacaacccggttttgggctcaggaggtcggggagggg

SEQ ID NO: 461652 - DNA, 122 bp, Homo sapiens
gggcaggacacggacttgtctcccccaccttgatgccaaggtggcatctgggagatatctcgaagggcaacgtcgaggggactgcaagcgtcaaccctggcgcggcagcacggcgcccctct

SEQ ID NO: 461653 - DNA, 122 bp, Homo sapiens
gtgatgggggccggggagggcccagggccgagcgcgctgcagaagggctcccagaccgggcgggaagggaggtggtcaggaaaagcttccaagaggagaagtgacttcatagacccgctgcc

SEQ ID NO: 461654 - DNA, 122 bp, Homo sapiens
agatactcatgttgtcggtggtgtagtccaggaacttggcccgggcgtagcgctcaatgtcgtgggaatcatagtccccccagcgcaactggatgtcaatccagtatttctgggtggtggtg

SEQ ID NO: 461655 - DNA, 122 bp, Homo sapiens
tcgcggtgggggagcacacgggcgaggtgcgcacggcgcgagccctgctggacagagacgcgctcaagcaaagcctcgtagtggccgtccaggaccacggccagccccctctctccgccact

SEQ ID NO: 461656 - DNA, 122 bp, Homo sapiens
caacaatttctccgcggcgacggtagcagccgcagggccaaagccggcttccgtgaggtacgtctacttccggttaacgaaccagggggctggcaatctcttccggttcgtcttggcaacgt

SEQ ID NO: 461657 - DNA, 122 bp, Homo sapiens
cagacttgacaggagtcactgctgagccctgatgctcctgttaggataggactgacttagcgaactcactaacatttccatttcccttgatctcctgtatccctcacccctttgcaaatgga

SEQ ID NO: 461658 - DNA, 122 bp, Homo sapiens
cctcctgggagaggcagtgagcatgagtcaaaggtgacatggacttgaatctccccaccccgccccgcctgcagtagccgggccaggtaggaggcaaggatcattccctgctcccagaggtt

SEQ ID NO: 461659 - DNA, 122 bp, Homo sapiens
tcctgcgtaagggcgcatgcgacactggaagtagcgagcaactggattggctgcctccgtcgcaaaggagggtgggtcttgcattctcgggcctgacgattggtctttccaagtgccggaag

SEQ ID NO: 461660 - DNA, 122 bp, Homo sapiens
ctgatttcaaataacagccccgcccactaccactaagtgaagtcatccacaaccacacaccgaccactctaagcttttgtaagatcggctcgctttggggaacaggtcttgagagaacatcc

SEQ ID NO: 461661 - DNA, 122 bp, Homo sapiens
aactaactgctagctcttttctagctagctggagtgagcgccagcactggggtatcctagcgtgaacaagaatgctattttggtctgttgtaaagcattgtggaatgcagattttagatcat

SEQ ID NO: 461662 - DNA, 122 bp, Homo sapiens
ttagcacccgggccagcggctgcggagggtgtactgggtgccccagcagtgccagcccgccggcgctgtgctcgctcgatttctcactgggccttagcagccttcccgcggggcagggctcg

SEQ ID NO: 461663 - DNA, 122 bp, Homo sapiens
cgcacctggatgacgtcacagtcacccagagtgaacaccagctccggctcctcctgcacccgtgtgccattctccagcgacgtctgcagatgtacggtgaccacctggcccttgaccgggcg

SEQ ID NO: 461664 - DNA, 122 bp, Homo sapiens
ggctccgcagaggtgcacgctttttcttctttagaccttgtttttactgttccctctctacgtttaggtatgttcagatgcgcaggtacttacagtgtgttacgccacctgcggtggtcggt

SEQ ID NO: 461665 - DNA, 122 bp, Homo sapiens
gaatccaccattgcgatgctccctagtctctattccctcccaaggtgaggattaacctgacgtttattatataaaaatcacttggttgattttctttaaagtttttattttgaaatgattgt

SEQ ID NO: 461666 - DNA, 122 bp, Homo sapiens
gtatggaggtggggtcgaaggccagggggatgtggctgcgatacaggtccacgccactcacgccccgaagcaggtgctcatagggcgagatggggtgtgggtggtgctcgggcacggtgctg

SEQ ID NO: 461667 - DNA, 122 bp, Homo sapiens
ctcaagcactgccctgcacttgcataggacctctgctcaaaacctttcaattattcccatcgtcctctggactgaacccaggatttattaggaataggaagagcatttatgttttagcctca

SEQ ID NO: 461668 - DNA, 122 bp, Homo sapiens
gggtggaggcgtcaccggggtcgggctagcaggccctggaatcaggcttttgggacaccccgaaagtgagtccaacttggggagaaactgagggcagctcgggcggtctggcagcggagaag

SEQ ID NO: 461669 - DNA, 122 bp, Homo sapiens
tgagcccacacactgagcggacattggggcaggcaggcaggcgccggggggcggggccagcgtcgccccgccccgtcctgcctcgccctgttcgcgcgtccgctgtccggcctccggtcacg

SEQ ID NO: 461670 - DNA, 122 bp, Homo sapiens
atctagtggcctggttttattgagtgggggaaggcacatattttccaagattaactgccccgcaacagggaatttcgcaggatttcagtattttcgactccccaggtgacgccaagagggtg

SEQ ID NO: 461671 - DNA, 122 bp, Homo sapiens
tgttagccatcaaagggtgtgcatgcctcagaaatgatatacatagacaaaggccctgaacggatttaaagaagctcctgccagcacctccaacagctactgcccttgtaaccactggatat

SEQ ID NO: 461672 - DNA, 122 bp, Homo sapiens
tcgatgctgcagcctcctgagagcccggagtttgggggccctcttaggcctccctgggcccgcggaccacggactcgtcctccgggagggagggtggaggctggagcactccaaggagaggg

SEQ ID NO: 461673 - DNA, 122 bp, Homo sapiens
ccccccccgccccggcccgcgcgcaccgagcccagcccccgccccccagcgcaggcgcagcgcggacctcggccccaccggtcccgcgcccggaccctgagccctgcccctgggaacccgag

SEQ ID NO: 461674 - DNA, 122 bp, Homo sapiens
cactacgcttcagctcgtggttccgtggcttcccagtgctgcacgggatcgcagtgaggccgcttgtttgaggggagacctggttcctgcctctggcttctcatccatatcaccggagtgct

SEQ ID NO: 461675 - DNA, 122 bp, Homo sapiens
gcaccaccaatccagggaagaagtgaacagcagggaagccacccatctgcctactagccacgacacccacatgcacccacacctcacaaccagctagtctgctgagcctgtgcatgctggtg

SEQ ID NO: 461676 - DNA, 122 bp, Homo sapiens
ttagggcgcggccacacctctagccccgccccaccgcaggcccaacccagaggctgctttcggttaccctagggttcctgggccctggacttcaacccggtctgcaagccccgccctgatta

SEQ ID NO: 461677 - DNA, 122 bp, Homo sapiens
acctcgccgcttggcgccattatttaaatggaacgtgcctgtctcgcagctgtacgtgcccggggcggggcttcgagcgccctgagcggggcggaggctagaggcgggctgggaaggtggag

SEQ ID NO: 461678 - DNA, 122 bp, Homo sapiens
cgcggctgccaaacacccccgggagttttgctcgcaaagggaccacgaggcagctgctggcgcgtcctgcgcgtacccgcccagaggctccccggcttgctcctcgcgggtctgtcccgaaa

SEQ ID NO: 461679 - DNA, 122 bp, Homo sapiens
tagaacagagaggcacaaagtcaaggcatgcgagtaagggccggggatccggagaggacgcgagccacgctgtggccgctcccactcagcgcctgtcccggagggcagaggcccagaggccg

SEQ ID NO: 461680 - DNA, 122 bp, Homo sapiens
ccatccttttcttccttgcagataactcgtttcagactttggtccttagtttgtgagatgcggcctttcagaaactggctcctggtagaaagagctttgataccataaggcagtgagcagtg

SEQ ID NO: 461681 - DNA, 122 bp, Homo sapiens
gtaaagaggagcaaacacgcccgcccactcccaatttcctttgctctgctgtctgccaaccgcaaagccgaccgagacggagccgctgtcaactctccaactcagctcagctgatcggttgc

SEQ ID NO: 461682 - DNA, 122 bp, Homo sapiens
cgcgggcgccgccggaagctggggcggggcgcccagcgggatgcggtgaagggcgagcggcgcggcggctgcgatgagtgcctctgcggccaccggggtcttcgtgctgtccctctcggcca

SEQ ID NO: 461683 - DNA, 122 bp, Homo sapiens
gcgggacgtgccacctgcagtgctggctagggctttttatttactagggagcagtttccccgcgcgacagttcgggagcgcgcaggcagtcgcgcgcacacacgcacgcaggcacacacaca

SEQ ID NO: 461684 - DNA, 122 bp, Homo sapiens
ctgatgagcttcctggatgcagaggaagacagcatggagcacatgcaaatcactgcatgacgtggaaccaggatcacttaggaggctgatgacacaatgaaaaggaaggtcactgctaacag

SEQ ID NO: 461685 - DNA, 122 bp, Homo sapiens
aaaccgaggtgaggcggccgtggccttagcctcgtaaaaattaaaacctgtatgtttcagcgaataatgaaaacgcagtctggatgaaagaccccatgacgcttaatcaggcatccagtaca

SEQ ID NO: 461686 - DNA, 122 bp, Homo sapiens
gcaatgtacactcagccttttcatcactcggcggggagatggatggttttccggaccgggcgtcccagcgccccggttagctatagggagacgtcagagcgctctggtccgcgatagaagag

SEQ ID NO: 461687 - DNA, 122 bp, Homo sapiens
ggaatttgcccaagtcacacatctgttagtccttctgagtgaggcttggccagagaagcccgtgtcccttgtggctctgctgccctggccaggccttcgctgaagctgcctgactccatctt

SEQ ID NO: 461688 - DNA, 122 bp, Homo sapiens
taggattgtaataggattgtgagggttaaaggaattaacatgcataaagcgcctagaacacgggctcaacaaacttaccacccaagggccaaatacaacctgccacctctttttgtacagca

SEQ ID NO: 461689 - DNA, 122 bp, Homo sapiens
tggttataaattgggctatattttctgtgaatgtctggtcccaacatctgtattattcttcgctaaagaagtcactaaatatcagcatgaaaagtgggatgaagaggcccaagatgctgcag

SEQ ID NO: 461690 - DNA, 122 bp, Homo sapiens
tgtttattcaagagggcttcatgccaacagctgtcgcataaaaccctgaataaggttgcacggtctttgagatagcacacaagattaggtttcacttgttacctgaacagttctgcagaagc

SEQ ID NO: 461691 - DNA, 122 bp, Homo sapiens
acgggcgagctacttcatttctctggacctgtttccccagatggctggtcgcaataatgacgacgaggcggatggcggcggggaggctagagcccatttcagaagcctgcagtgaggattcc

SEQ ID NO: 461692 - DNA, 122 bp, Homo sapiens
gtgcccaagaagggaactagccttggggggagggtcggggggacttccagtagctgagtccgtttttttccactgagagcttccgcatcctgtgtgacaggacaatgtgttagtgagtgtga

SEQ ID NO: 461693 - DNA, 122 bp, Homo sapiens
ggctctgcgggctgcccgtctccttgctccgtcccggaggcaggttttgcaaggagaagccgcagtacccgcggctcgggtgcagcgcgggagcacagtggagcgcagatcgcggacccgag

SEQ ID NO: 461694 - DNA, 122 bp, Homo sapiens
gcgggcctcgctgggaacagtagcccttggccgctgcagtggactctgggagttgtagtccgcgtgccctttgcggggcagagccgcggttcccgggcacaggggatggacgcgggaggtga

SEQ ID NO: 461695 - DNA, 122 bp, Homo sapiens
ccacgcgggtgtctcttcgtgctcccaatggacgcgtggcacgcggcgtggctgcgtcctcgggggcctgagatccagccaggactccctagggcttttcctgtactagaaagggaaacttt

SEQ ID NO: 461696 - DNA, 122 bp, Homo sapiens
ggcatctgcctctcagctccagctgggtagggccagacagggctgcaggtccagtgtggccggatgtcagatttttaaagagaattaacagatccagatttttttttttttttgagacaggc

SEQ ID NO: 461697 - DNA, 122 bp, Homo sapiens
gctattatcattcgtttctctttcccaaatactgggcattcctttttttagatgcttctacgtgggatttttttttttttccttaatgctgtttagaggtccttcttgagaaatttggcttc

SEQ ID NO: 461698 - DNA, 122 bp, Homo sapiens
tcatgcctcgtatcgctctcacctcctttctttttgaagtaaagccctttcccaagaaggcggccagaaagtggaccccaccgggggaaaaagaaaaatgaaacgcaaatcagcttggcact

SEQ ID NO: 461699 - DNA, 122 bp, Homo sapiens
cccagccccaggctcctcacccaacaaagttcagtcatctggtgcaccagctgctggaagcgctgcttttgagtctctacctcgatgaaatgctgcaactgcgggtccactgcacccaaacc

SEQ ID NO: 461700 - DNA, 122 bp, Homo sapiens
acctgcccagggcctcaccaccaacttcatccacgttcaccttgccccacagggcagtaacggcagacttctcctcaggagtcagatgcaccatggtgtctgtttgaggttgctagtgaaca

SEQ ID NO: 461701 - DNA, 122 bp, Homo sapiens
tcctcaacaaaagagagcaaaacgtaaagaggggcagagtcgcccagaggtgaaggtcgccgccgcgtttccagtgctgctttgacttgctggtttttattgcactacttcatttcccctcc

SEQ ID NO: 461702 - DNA, 122 bp, Homo sapiens
acatattgtgtgatgttaagatttgggcttccattgaactcatcacccagatagtaaacacggtacctggtaggttttcgaccctggcctcctctctccttccttgccttttggaatcccca

SEQ ID NO: 461703 - DNA, 122 bp, Homo sapiens
agcccaactacagcagctgcccagataccaaaaggcactcctgcaaagtttaagggaaggcgggagaaaggcaatcaatatagggaaaaatctcataggtgcttcagggtgcatatgaaagc

SEQ ID NO: 461704 - DNA, 122 bp, Homo sapiens
cttactggggaaccgcagcccaggaatctatttgcctcctgatgccattcatggccctggcgctcatccccaagcccgctccaagatctgagcaggttccaagagaggagagaagtcaggca

SEQ ID NO: 461705 - DNA, 122 bp, Homo sapiens
gcgtaagtagacactgaggcccagggaagcgcaaggaatagtccagagacacacagtctgcgctgtcaccggcgggttctcaaatttggcccgcagggtcggcggcgctggggctcccggcc

SEQ ID NO: 461706 - DNA, 122 bp, Homo sapiens
ggggcttttcgtgagctcgtctctgatctcgcgcaagagtgacacacaggtgttcaaagacgcttctggggagtgagggaagcggtttacgagtgacttggctggagcctcaggggcgggca

SEQ ID NO: 461707 - DNA, 122 bp, Homo sapiens
atgcttttgatttcctttcagaatgaacaagttcttcaagaaacggagatgcacaagaagcgattctcatctcaatgccccaagaacgcaccctgcagcctggcaatcctgtcctcagaacc

SEQ ID NO: 461708 - DNA, 122 bp, Homo sapiens
cggcccggaggagcagaggtgagccacagcccgtggggctccaaggccagagcgagtccccggggcgaggaccctccccctctccagggcgcggacgcccccagagcacaggctcccctacc

SEQ ID NO: 461709 - DNA, 122 bp, Homo sapiens
agccacagggacggaactacgctgccgccgccgctgtccttgccgccactgtcgtcgccacgggcagctgggctacttgctcctcgcagctaaaaggcggtgcctcctattaccccctcgcc

SEQ ID NO: 461710 - DNA, 122 bp, Homo sapiens
ttcagatgactctcctgcctgagctgctcagcttcccaagtagctgggactacaggcgtgcgccaccatgccaagctagtttttatatttttgtagaaatgggggttcaccattttggccag

SEQ ID NO: 461711 - DNA, 122 bp, Homo sapiens
taggaagttaaataagttgaggtggggtggagtgggatcatcagaaggctgacatgggaccgctggagttggcaatcatagcagtgtgaggttggcaaggggagcaacccccttcaagacaa

SEQ ID NO: 461712 - DNA, 122 bp, Homo sapiens
tctatggaatgaagacgggtgggcataagcgtgggtccggggccaccctctgtcgtccgccggcgtgtttctcatccagccacgtctcggaaggtctgtgactgctgaaaacattctgtgca

SEQ ID NO: 461713 - DNA, 122 bp, Homo sapiens
ttatgagtgtggtcagtcattccacatgccttagggatgagctatctgtgccatgacgagcgatttccttttcgagttttgtaatccccaaatactaaatactattatcaataaaagttaat

SEQ ID NO: 461714 - DNA, 122 bp, Homo sapiens
atccctgcgcgaagctggggcttgggtcacgtgtcaaggctggccgcttgtctaaagctacgactcgcccacgtgactctcgccggcggggaggggcgtggacccaagaagtccctgtgcgc

SEQ ID NO: 461715 - DNA, 122 bp, Homo sapiens
ccaccactcacgtcttcccaccggaggccagcacctcgaggagcagagaggagctgtccccgagtgccctgagttcctgacccacaggacacaggaacacaggaacgctgctgttggacagc

SEQ ID NO: 461716 - DNA, 122 bp, Homo sapiens
ccgacatggggatgttccaggccatgtacacgtgggacttgaagtcatccatccacacctcggcggcgcgcagggcgttgcgcttggcatagtagtcaatgtcgttgttgtagggcttcctg

SEQ ID NO: 461717 - DNA, 122 bp, Homo sapiens
cccaagaggaaaatgggatgggaatggggtttctgtctgtcttgctccattgaaccacttcggccttaagttgtggggcagcattttaaatgcaacattcctggcattagctgctgttgatg

SEQ ID NO: 461718 - DNA, 122 bp, Homo sapiens
cagcagcctacaacagggcaacaggccacaccgatgccatcatctgcatctccatctcaccgcagtctccaccatcaaggcccagcccagacacagtgacccttgagaccaaagagctcaca

SEQ ID NO: 461719 - DNA, 122 bp, Homo sapiens
agacacagaacccacaacccagggcccctcggaacggtgggtacgagtttcaggagctgccggcctagagtggggtggggactgacgaatgagccgggggcactgggaagggtaggaggccg

SEQ ID NO: 461720 - DNA, 122 bp, Homo sapiens
ggtgacagcgcggcccctcaccagggtgcggtaggggatgggttccccgcagaagtagtacgccacaacgatgctgtcacacggctgggcactcccgccgcccaccttcctctgcgatcttg

SEQ ID NO: 461721 - DNA, 122 bp, Homo sapiens
tctcgccgccgcctccacagcctgggcctcgccgcgatgccggagaagaggcccttcgagcggctgcctgccgatgtctcccccatcaactacagcctttgcctcaagcccgacttgctgga

SEQ ID NO: 461722 - DNA, 122 bp, Homo sapiens
gcagaattttccttgatcatatcggtggtacccgtctgttttcttgtgcaaactgtgatacgatcctgaccaaccgctcagaactcatctccactcgtttcacaggcgccactggcagagca

SEQ ID NO: 461723 - DNA, 122 bp, Homo sapiens
caaaatggaggcaactttggggcctgtttaccctgcgcagcaaatggctgctggcgctgccggctgcgcgattgtgaaaatctcccccggggcgcgaggccgcgtctgcctggatgacgcaa

SEQ ID NO: 461724 - DNA, 122 bp, Homo sapiens
tgaaggggaaagatagaggagatacagctgctgggattttagtagacagaaggcagctgacggcccaacccgtgtttagcagttggccgttaatttcatgggctgggtaaggcaaagaggag

SEQ ID NO: 461725 - DNA, 122 bp, Homo sapiens
gagatagcatactgggagccaggtcggggtactgcatttgctcaccagaatcagatcaaacgagatacgagtcctttggtttgattggattcatcatgaggcagcatgggtttgcacttgta

SEQ ID NO: 461726 - DNA, 122 bp, Homo sapiens
gtggaggtgggtggggggtggttccgggtccagggcgggaaacgcggctctgggaattcccgggtgacacctacttaagaaaagcacccggggagatgcagtgctctaccctccgtggctcc

SEQ ID NO: 461727 - DNA, 122 bp, Homo sapiens
gctcgcttctgtgtctcctggaacgcaggtgtcctcccaaggtcagagttgggaaagacacgcagccagtggatctcagatcagaggatgctgcagggacagacctcacccagggcagcctt

SEQ ID NO: 461728 - DNA, 122 bp, Homo sapiens
ggcttttagcatgctttgttggtaagggacattctgacgcttcctttgggatcagagagccgtctcgaggggctccactttaacacctggtgtgttgctgtgctctcccttggccgccccat

SEQ ID NO: 461729 - DNA, 122 bp, Homo sapiens
tgctggcgagggacctgcaagatggagacagacatggtcctcaggagtcttttgtgcccccgctgggggcacagggagtggcatccatggccctgcaggtgccctctgggtgcagcccctgg

SEQ ID NO: 461730 - DNA, 122 bp, Homo sapiens
gctggagatacagagagaaataaacggtgattctacacgggacagttaagtgattcctgccgcggtggggtttcacactatacgatgtggcattaaggagtagggatttggagggacatcta

SEQ ID NO: 461731 - DNA, 122 bp, Homo sapiens
gggccgctttcccgggccctccacgccctaacagcctccgccgcgcggcgttcgagcggccgccatgcttcccggccctccactcctgcagccgcccaaaggcgctgcgtcccgacagctct

SEQ ID NO: 461732 - DNA, 122 bp, Homo sapiens
ctggcctatcccacctgccagtttatagattatgtgtgacagggggcagcacccaggagccgggctgaatcctttcagctaatggacatttatggcgtgcacagcaggtgcaaaggctctgg

SEQ ID NO: 461733 - DNA, 122 bp, Homo sapiens
tgctactcttgctgatgctctgcccctccagctccggaggggagcgaggagggggcggggcgcgcctcgagagtgacaggcccggctgccctatcaaagagccccttgggagctgcgagccg

SEQ ID NO: 461734 - DNA, 122 bp, Homo sapiens
gcagaatgtggatggggtagccaggactagtgggtaaaggactagtgcagagggtgtccccgtctggccgaataaccgccgtggcccgcaggaacgccacgtagcactagtcctgtgaggcg

SEQ ID NO: 461735 - DNA, 122 bp, Homo sapiens
cagccacgcgcgccctgaggcttccgggcgttgccctggcggatgatccgagttcaaaatcgagacctctgccttctggtttcgtgtcctggtgcttagtcacttggcctccctgagattca

SEQ ID NO: 461736 - DNA, 122 bp, Homo sapiens
agtgtgggagctgaaagggtcttcgctggcggccggtaactggcggcggttgggaacggccgagtgtggctcttctggtgtttcagcttggggagagaggggtggccttcctcttgcagttg

SEQ ID NO: 461737 - DNA, 122 bp, Homo sapiens
gctccctgggcggggcggggctacaagtgcggtgggcgggggcgggggcgggggcgggggcggggggaggtgcacaactgtaggccgggttctcaagctcgcccttagcagagcagagctga

SEQ ID NO: 461738 - DNA, 122 bp, Homo sapiens
agaattgcccagcacttcactcaaatgttactcattagacttacctcttcccaggctcttcggactctcagcagctagttcctctcacagtctcaaacccccttctcctcccccaatcacct

SEQ ID NO: 461739 - DNA, 122 bp, Homo sapiens
cctggcatgtcctgaagacccacgaggggcaactgtcctaccggaatggcagaaacagcccgactctggctttgggctcagccaagggtggtcaaggtgccattggggtcccccagcttcac

SEQ ID NO: 461740 - DNA, 122 bp, Homo sapiens
ttcctgaagctgcaggtgctgggagaaagacgaggccaggccacctgggatagagtggtgcgagattccaccgccagggagaaaggaacttgtccttcagacctagagctggagctatgcat

SEQ ID NO: 461741 - DNA, 122 bp, Homo sapiens
ttccgccgccgcagcttcccatttagcttttaacgtcaaatcctacatttttgtcggctccggcctgtctagaacgcttgtgatttccctgcaggagtgattgctcttaacaaaatggcagc

SEQ ID NO: 461742 - DNA, 122 bp, Homo sapiens
acttgctaagttaccctcacttcctctgactggctgattttcagggtttccagagacttccggtgggtaaaaattttccttgtgcttcctcctcctatccctgaactcttcaggtcaggaag

SEQ ID NO: 461743 - DNA, 122 bp, Homo sapiens
agttccgcccagatgcctgcagcagagcctgctgtggggacctgctggagacgtgcagcgcgcacccagcctctcatcagctccaggctgcgctgtcaccccatggacagtgacttctggca

SEQ ID NO: 461744 - DNA, 122 bp, Homo sapiens
tagcctcacaccggcccctcccacgctgagagaggtcaacgtgagccccttgcctcacaccggcccctcccacgctgacagaggtcagcgggagcccctagcctcacgccagcccctcccac

SEQ ID NO: 461745 - DNA, 122 bp, Homo sapiens
tcaccccgggtttatgtccatttcctccgccgctcccaccgtggttgccggaggaggagccggtgctggatccctgcaggggaaagcaagatttcaaacgctgtcctaaaggacctaaaggg

SEQ ID NO: 461746 - DNA, 122 bp, Homo sapiens
ctgggggaaggcgcatccgagagtacagcgttcttgggtcacctacctggagggacacctcgtcgccagtcagggcagctagaagctctttaaagcaagcaggactccttagctctgcccag

SEQ ID NO: 461747 - DNA, 122 bp, Homo sapiens
cgttctctgttgaattaggtggaaacggccacagattctgacacggagagccgcggtctgcgggaataccactctgtcggggtgcaagtggaagatgagaagcggtaactcagcccctcctg

SEQ ID NO: 461748 - DNA, 122 bp, Homo sapiens
agtgaagtgaataactactaaagctcagttcgtgggcgatggacccatgtcagacaagctcgtgcccctcaaagagctcacccaccagtggtagggggacgagttacatcaccgactgccag

SEQ ID NO: 461749 - DNA, 122 bp, Homo sapiens
aagagtgtgcctacaaggcggttgtcacggcaacgagagggcgggattgttcgagcgctgcggccccctcacgtgatcgattcggaggcggggcgtccgcccagtgggcggggccgggcccc

SEQ ID NO: 461750 - DNA, 122 bp, Homo sapiens
aagcgccgtagagcacgcagaacacgattggctgagctcccggaagtgacgtacctcaaccgcccgacagtggaagtcccacctgcgcccgacggcggaagttccgggagtgccaagtaccc

SEQ ID NO: 461751 - DNA, 122 bp, Homo sapiens
gaatatgagcggcttcacctgcccacactgcacggtgagtcccgggggttgcagagggggcgaggcagcacctggccggtgggggctttgggcagtgctgggctcaccaccgtctcctagga

SEQ ID NO: 461752 - DNA, 122 bp, Homo sapiens
ctagagtgatagttttaggttttatggctggtttggggggaaaaggggttcttatttctacgacctgccttgggaaaagagattctattttctagggctagcctcagggatgaatgcaaggc

SEQ ID NO: 461753 - DNA, 122 bp, Homo sapiens
cgccgctgtgcctgctctgccgactcctccaggagtgtctatttcttcccacgcgagtctcgtcgcgccgctgtgcctgctctgccgactcctccacgagtgtcttctggttcccaagcgag

SEQ ID NO: 461754 - DNA, 122 bp, Homo sapiens
cgctcactactgaatggggtcctggtgcggttctcggtgagggagtccgcagctccgctgcgtgagagctaagactagaacttcgaaggtggcggtggctgcagcgggaaaaggggtggggc

SEQ ID NO: 461755 - DNA, 122 bp, Homo sapiens
ttttcccctgtcccgtggagtccacaagacaggcggcagcttcaaggccggcaagttccgcgtctggggggctgcgggccgcccctgcgggaccggggggatctgggcgggacagggcggcc

SEQ ID NO: 461756 - DNA, 122 bp, Homo sapiens
tgccggcctccgggaggtccccttagggaagcatttcttcaggggtggcccagggacctccggcatcagggcctgcatggggattctgtgccagcccagccctgctaagtcccagccttggg

SEQ ID NO: 461757 - DNA, 122 bp, Homo sapiens
cggagtttcccgggcgcctgccgggtggagctctgcgggccgctgccctgggggccgaggcggggcttgggctgagctagtagctctttggaggacccggcgccacccctttgattgttctg

SEQ ID NO: 461758 - DNA, 122 bp, Homo sapiens
ccctcccgcccaatgtgctcacactcgaaggaagttgcacgccaaatgcaaaacctccagcgagctggatttctttgcactttttttttattattatgattaaggaaagcagggggcggcag

SEQ ID NO: 461759 - DNA, 122 bp, Homo sapiens
tcttccccagccccaactgaccacagcaggggagggcacatggatgaagggcacggagcgcggccgtagctggttggccagctggcacaggatgaccccactggccagagcctcggccaggt

SEQ ID NO: 461760 - DNA, 122 bp, Homo sapiens
gacctgctggccaggcccactgctctgcagccagacactgagcaaatccaagtttcattacgtgtggtggagagtttgccaaactgccacactccacagccatttcctgcagagatctcagg

SEQ ID NO: 461761 - DNA, 122 bp, Homo sapiens
ctgcagccctccctcagacgcgatgctcacacagctcgggggagggtgtctgtgtgtaagcgagaaattaaagaagcaatctgcagaaggaaaagtggagaacgcctaacggtttttttgta

SEQ ID NO: 461762 - DNA, 122 bp, Homo sapiens
cagtggcggccgggatgtggccgagctcttctaccggaagctgacgggactgccaggagacgagtccccggttgtcatggtaaccagtggcgggaggcgggtgaggagcggggtcccgtcgg

SEQ ID NO: 461763 - DNA, 122 bp, Homo sapiens
cctgacataaaatatatatgttcatagtacaaatgcacgcaaatatttgtggccgaatctcggcaacccgctggaaaggattaaacgtgcggttgccgtgactaaacgcattcattcaccct

SEQ ID NO: 461764 - DNA, 122 bp, Homo sapiens
gctggcagctccctctgctggacccagccccaaggacgagctcagacacagggacgcctccgtctgtctgcacttgggctctggcagcccccccacattgcatgcggggcagtcacatgcag

SEQ ID NO: 461765 - DNA, 122 bp, Homo sapiens
gaacatcgtggtggagttcttcgtggtcactttcaaagtgctctgggcgttcgtgctggccgcggcgcgctggctggtgcggcccaaggagaagagcgtggcgggccaggtgtgcctcatca

SEQ ID NO: 461766 - DNA, 122 bp, Homo sapiens
agctagagcacccacaggtgctgactgctgcggcgctgaggacgctgcacacccgttcaccggctgacccagtgctgctgacaaccagcgtccgcggcccccaaccgtcgaacagagcgcgt

SEQ ID NO: 461767 - DNA, 122 bp, Homo sapiens
tagtaaggatgggttgctagccttaggaccgaggctgtgggacagcaggtcccaagagttcgttgaatcagcatatccagcatctgggaagggtcagcgttttccatgcccaggtggccaaa

SEQ ID NO: 461768 - DNA, 122 bp, Homo sapiens
ctttacatatcataaggcaagaactaactatcaaaaagaatgatttaaacaactatgatacgtcagttgtgaatagcaggaagaattcaaaaggaagttgttatctgaaatgggtattttaa

SEQ ID NO: 461769 - DNA, 122 bp, Homo sapiens
ggagcgctcagggagttgggcgagaagtccgtgagccggcgctcctgatgcggagaggtgcggccatgtcctggctgggagcgaagcgccctcgctcgggcagtcggagcgaactgtctccc

SEQ ID NO: 461770 - DNA, 122 bp, Homo sapiens
ctggatttttgtccaggcgcccacatgtgctttgaggatttcctcaggagtctggtatttcgcttcgttgacctccccaatctctgcctttgcatccgtttgtgtctttactgagaagggcc

SEQ ID NO: 461771 - DNA, 122 bp, Homo sapiens
ctgtgcagaaagttggggggcgcggccggggtgacagcagcgcttcgggggcggccgcggcggccacccggacctcggcctcccgcgcctcccgctgccccagccgcgcccggggacctcgg

SEQ ID NO: 461772 - DNA, 122 bp, Homo sapiens
cggggccacggcgtgtgtgcagcgacacctggcggtggcatgcggaactgcggacggctgcgcaggagcggacagcggagaggcggtactgaccggtgcgaggcggtgctgaccggtgcggg

SEQ ID NO: 461773 - DNA, 122 bp, Homo sapiens
gcggggccggctgggggcggggctgagctggcgggggcggcaggctacaaagcccgggggcggtgccggggcgcagagtccccgcagcgccggtcgggagcgcagcgcggcgcacgtcggcg

SEQ ID NO: 461774 - DNA, 122 bp, Homo sapiens
gggggcagaggcagccggggctgtgagagctgcggggggatcctggagtggccccaggcccggacacggatgtgtagcaaaacggggtgcggagtggagcccgcagagagggaaccaggcca

SEQ ID NO: 461775 - DNA, 122 bp, Homo sapiens
attgctaatagaaaacatgtgtagctgaattgtcattaattatgcatgaagccctataggcgtccctacacgagctccacaaaccctggagatgcaattctttgtgatgcgaggagggagca

SEQ ID NO: 461776 - DNA, 122 bp, Homo sapiens
ccctatgactgtttctcttccccccaggacaaaacaggccaaggtagcttaagtaagccccgaaggtcacacagtttagtctgggatttctgcaaattttgaattgaccaagacaaataaag

SEQ ID NO: 461777 - DNA, 122 bp, Homo sapiens
ggaggacaccaccctcgggtgctcaagaacagaccgcccccggcgcgcctgccggagctgcgcctgctcaatgaccacagcgcccccgagacccccacccagccccccaggtacatgcccca

SEQ ID NO: 461778 - DNA, 122 bp, Homo sapiens
cccagccccctccggccctcacttggagctggacaccgagtaggggccgactgcgaggggcgacgccgccggttgtagtttgcggaggacgagggcttttctctgtgtgccgtagggaaggg

SEQ ID NO: 461779 - DNA, 122 bp, Homo sapiens
gccgcgctccagtgtcagtcccggagagaacgccggtggcggggctggtagcccggcagccgcaggtggggccacgagcgctggctgagggaccgagccggagagccccggagcccccgtaa

SEQ ID NO: 461780 - DNA, 122 bp, Homo sapiens
tgtcctgaattccctcccacaaccaaatcaaaacccctggctgggctgggtgtgcgcatgcgctaggaacttaaggaaactttggagaaacctagcaagaccatggctggtgctctgcttcc

SEQ ID NO: 461781 - DNA, 122 bp, Homo sapiens
tattccttcaggaaccttaagatgccaaattagtgctatcatctatatttccatggctaccgatcaaagttctgcatacacatgattagaattcacagcaggataagctggactatgtgatg

SEQ ID NO: 461782 - DNA, 122 bp, Homo sapiens
gtacggtgcaggatttgaatgccagaccgaggagccgcagtactaggaaggtccaagcagcgtgcccaatcgctcctccggactacagaggagcccgggaacccagggaagagctccagtga

SEQ ID NO: 461783 - DNA, 122 bp, Homo sapiens
tggaaagggggtgggcggagcctctgcggccagatgggtggggattcaacatcctctttccgccccacctccacccgctccaccttcccccgcgcttcctaggcgggagccccgccctctag

SEQ ID NO: 461784 - DNA, 122 bp, Homo sapiens
gcgctctgctgactgagaggctcgggtaagctcgcggggtggcgggcgcggggatgagcgcggcagaccgcaaaaaagccgaagtcagaggacgacccagaacttggcttccccgagccgcg

SEQ ID NO: 461785 - DNA, 122 bp, Homo sapiens
taggttaaggatggccaggctcacgatggagacccggcccgaggacaggctccccagggacgctccaaagcgctgcctgacgtcctacgggagggacacagatgataagctcaagcccggct

SEQ ID NO: 461786 - DNA, 122 bp, Homo sapiens
gtgctcaccttgagctggccctggaccgtgcgcagatgcttctgggtctctgccatctggcggttggagtggcccagctgaatctccatctcattaaggtctccctccatcttcttctttag

SEQ ID NO: 461787 - DNA, 122 bp, Homo sapiens
aaaaaaaaaaaagcagcagcagcaaaagtgcacagacccagcgtgcacgcgtctccgccacgcctcactcccgtctgcgcctggatccaccgccacccgcttgtataaaaagtgggccccac

SEQ ID NO: 461788 - DNA, 122 bp, Homo sapiens
ggtgccggggaccctttgcaccaacctcttggagtaaaagcgaagctccagggcgctgggcgatgagaaatggcttatccaagtcctagggcagtggagggacttcgccctttcttaaatgg

SEQ ID NO: 461789 - DNA, 122 bp, Homo sapiens
gggagagtaagtggacaagcccatagagggatagagcctcaccaaggtcacccagcatgacggacgcgatgccaggtcccctgctaacctgcccagcgctaacacaacctgtaggggtcagc

SEQ ID NO: 461790 - DNA, 122 bp, Homo sapiens
ctgggagcaaagcccccttctctttctcctgcccctctgggataggtgggcctctgccgtcggctaccgcggctcccgcccgcacctgccctgctcccagcatgggctgcggtagaccccgc

SEQ ID NO: 461791 - DNA, 122 bp, Homo sapiens
aactcagaagacatccgaacatcagaaggaacaaactcccgtcaggctgcttttaagaaccgtaacactcaccgtgagggtccgcggcttcgttcttgaagtcagtgagaccaagaacttac

SEQ ID NO: 461792 - DNA, 122 bp, Homo sapiens
gaaagcacatccgggaaccctgccgtggttgtccagggctgacgcagcgtcaatgtggggcggggcctcctctctgaggaggaaccaccccccacctctctgctttttttccatcccttcct

SEQ ID NO: 461793 - DNA, 122 bp, Homo sapiens
ctttcccttatgatattgatttcaagttttccttaatcatatagctatttgtgtccaaaacgtggtcacagataggtcaaaaatctgaaagaggagtgagaaacactaatctagtcgaaacc

SEQ ID NO: 461794 - DNA, 122 bp, Homo sapiens
tgcccgtttgcgaggtgctcacggtggggaacgagatttcacattgttttctgaaatgaacgctcatacctccaattaaaccttacttgtttagttttcaataagaaacgcctagacccata

SEQ ID NO: 461795 - DNA, 122 bp, Homo sapiens
ggatcgcgcaggacctggggctggagctggcggagctggtgccgcgcctgttccgggtggcgtccaaaagacaccgggaccttctggaggtaagtctgcagaatggcattttgtttgtgaat

SEQ ID NO: 461796 - DNA, 122 bp, Homo sapiens
gggctggtgccccaggtgggccgtgggtgcgggcagtgccgagggtggacggggcctgcacgtggacacttcctgaacgcgtgtgtccggccctggactgcaggcccaggtcagaaggtggg

SEQ ID NO: 461797 - DNA, 122 bp, Homo sapiens
tgattggaacagattttgtgtcttggctggctttgggtgaagaccggggagaaaaggttgcgctgcgattctcaagatctctggacctgggtaagagttgggcaaactcaactccggcggct

SEQ ID NO: 461798 - DNA, 122 bp, Homo sapiens
aggtaggcacattttatttttcgagagaaaatctttctaaaggaaactagcccacaaaggcggatagcaccaacaattagtcacgttaatagtcaaatcttttggggggaaataaaaagcaa

SEQ ID NO: 461799 - DNA, 122 bp, Homo sapiens
tttgttctccacattgcagacagaactgctttccaaaatgaaaatttgatcatgccaaagcgttcttaagcatttcaataacctttttaggttaaagacaagaatacagttacgtgccacat

SEQ ID NO: 461800 - DNA, 122 bp, Homo sapiens
ccgccgccaccaccgctaccaccgccaccaccgccggggctacccgcaatgggaagctgccggcctcacagagcatgcgccactcctcgcacatgctcagtaactgccgccccttttcctcc

SEQ ID NO: 461801 - DNA, 122 bp, Homo sapiens
taggagaagctgtagatgccccactcaaacctcccagggctctgtcatttttatgttccccggcctggctcttgtctgcataaacctctctttgcctcagagctttcttttgtagttcaagc

SEQ ID NO: 461802 - DNA, 122 bp, Homo sapiens
ccggtctcctcatccaccctctccgttccggttccaggcagtttcccagctacctcgagacggtgacaaaggacatcctggcccccaatctgcagtggcatgcggggaggacagccgcggcc

SEQ ID NO: 461803 - DNA, 122 bp, Homo sapiens
gtggactctttggtggctttgcattttaaaaatgaaattttccaatgtctgccacacaaacgtatgtaaatgtatatacccacacacatacacacatatgtcatatattactagcatatgag

SEQ ID NO: 461804 - DNA, 122 bp, Homo sapiens
agctggccgacgggcggtagcatccggggactgcatctcaggggttcgggttgaggcagccgcgccccgtcccaccttccccacacggggcatgtaatgaaggggcttgtagaagcgcactc

SEQ ID NO: 461805 - DNA, 122 bp, Homo sapiens
catagtaatctgagatgcactggatgtgctccagggaacagaatgtacttggcagagacgcggggcttgatgtctgcaaaatgtcggaaacgcagccaagagctgctaactgggtcattaac

SEQ ID NO: 461806 - DNA, 122 bp, Homo sapiens
tcgcttagaaattactctcatctactcaaatgatacccatacacatattcaggtgttacccgcacactctcaaatattacccacaactactttcaattatacgcggatgccacccacacact

SEQ ID NO: 461807 - DNA, 122 bp, Homo sapiens
tgtccctggtggacctcccctggtgtggcctagtgcacatcccagccctgcctcctgccccgcctgcacgccatgagtgctgaagtcatgcctggcaggggctgctggcccaggcccagagt

SEQ ID NO: 461808 - DNA, 122 bp, Homo sapiens
atggccaacactaagcgaatgcacgtggttgtgctctggtaaaatgttatttatggacaccgagtttgaatatcatgtaacttttcacgtttcacaaactattatataaatataacaaccac

SEQ ID NO: 461809 - DNA, 122 bp, Homo sapiens
ctacggtgaattcatgaagacagacgcattatgctggctggcactgcgttgctatcaatacgtaaggagacaatggtgttctttccttacatttaaatgctaaacattacagagtacctcac

SEQ ID NO: 461810 - DNA, 122 bp, Homo sapiens
tcgagcctggagcactaccactggcgccgcagccaaccgccgctgcctgagcgccgcgcccgctctcgctcgcgcctaagccacgcccaccgccgctatcgccagccaacccgtgtattgca

SEQ ID NO: 461811 - DNA, 122 bp, Homo sapiens
cctggctctgggctcagggttgctgccggggatgcagaaggtccttgagctgcaagggctcggggtggctgtgggctgatggggtgtgtgaggcagaggcagaggcagaggccactccgagg

SEQ ID NO: 461812 - DNA, 122 bp, Homo sapiens
ctggaccagttacttaacgttctctaaatgtcagttacatccgtgagataagctacctcgcgggacttcattcagtccttcttcaaatatctgtagaatatttgtaggctgaggcctttgct

SEQ ID NO: 461813 - DNA, 122 bp, Homo sapiens
caaaagacccacaggacaaaaatctgccagcgcttcatgtctggcccaggcggtggctcccgtggtgggccgtagactggcttctctacctgtaaggatgaggggctgaggccacagacagc

SEQ ID NO: 461814 - DNA, 122 bp, Homo sapiens
gctatatttaaccagtgttctcagcaagtcaagcctgtcaacagctgagaagtttggagccggctttactcagttcctaagcagctgggttatcagtggatacagcgctgctcaccctgtaa

SEQ ID NO: 461815 - DNA, 122 bp, Homo sapiens
ttattgatggcaagacaatcacaagttatttgacaatattaagtatttcttatttcaacacgttgcagtacttttgaatttccaaaacttatcacaatgcaagttccaacttgagagcagga

SEQ ID NO: 461816 - DNA, 122 bp, Homo sapiens
ttcatccaatccgagcatcgggtgcgtcgtgctcttttctaggagcgtggggtgccttcgcgaataaaatctgaaggcatctctgctctcgcggagcttgttctttcttattttcaagtgct

SEQ ID NO: 461817 - DNA, 122 bp, Homo sapiens
gcatcgagcagactcccctataacctttagacagagcattgccaacaccttgatttcaaacgtctaacctccagaatgtgagaaaatatatttctgttgttttctgtgtctgttgttttcag

SEQ ID NO: 461818 - DNA, 122 bp, Homo sapiens
ggagaaggaacatcagccatcatctctctgcatgagctcagtgtcaggtagtagctgtggcgggacgctgtccagcctaaaaaacgtgaccattccaattcatcttcagctgccaagtgtat

SEQ ID NO: 461819 - DNA, 122 bp, Homo sapiens
gaggccctttaagacattaaaaaaactcttatctgtttaaacagagatgggatcttgctacgttgcaaggctggccttgaactcctcagctcaagcaatcctcctgtccctcccaaaatgct

SEQ ID NO: 461820 - DNA, 122 bp, Homo sapiens
attcccagctcacagccgggatggcaggagagtgcggaagcggcacatggcagacacaaccggggatgacccagctcctcaccagagggcaggtaccggaaaccagcaaacacgatttgaca

SEQ ID NO: 461821 - DNA, 122 bp, Homo sapiens
tgaggctatggaaaatggaaaagctggaaagttctttagctaacagctctccgtcgggagcgctaagagggcctcagcaccagtgggcttggttagggggatattttagacatttgctctga

SEQ ID NO: 461822 - DNA, 122 bp, Homo sapiens
ccggggtcgcggggcgaagggcagaccacggagagggacgcagagcgcgcaagcagaaggcgcccccctcagccgtcggagccccgctgttgctgccccgcaggggacgatcccgacagcta

SEQ ID NO: 461823 - DNA, 122 bp, Homo sapiens
cggccctctcccctgcctgggaggcagctgacactcctgggtgggcctctggggctcctgcgcacgccctgcggggcctgtcacacctccggacccgatgcgaacagctccccctgcaggcg

SEQ ID NO: 461824 - DNA, 122 bp, Homo sapiens
aacaaattgttcttcttttaaagccttgttttccactagtttttctttctggagtccaaccgcaacccccacgccccccaccccgccccacccacccaccctttccaccttcccggtgtcct

SEQ ID NO: 461825 - DNA, 122 bp, Homo sapiens
ttgcccaggcaaccgcgggactcctggagaaatggtgggcggtccaaacggtgagcagcacgctccttacttaggtcatgacctctgccgactaaaaaggctaaactcagcgtggattaggg

SEQ ID NO: 461826 - DNA, 122 bp, Homo sapiens
ttctcaatgagaggaggaaactgatctgcctcctccccttttatggagcctgggagcgagcgctgttggcgttgcatgccgaaaatgtaagcagtgcgccctctagggtgcccattcgggat

SEQ ID NO: 461827 - DNA, 122 bp, Homo sapiens
ttacagctcttaaggcagtgtgtctggagttgttcgttcctcccggtgggattgtgttctcgctgggctcaggagtgaagctgctgatcttcgcggtgagtgttacagctcataaaagcagc

SEQ ID NO: 461828 - DNA, 122 bp, Homo sapiens
ctctactggaccgacctggacaccaacatgatcgagtcgtccaacatgctgggtgagggccgggctggggccttctggtcatggagggcggggcagccgggcgttggccacctcccagcctc

SEQ ID NO: 461829 - DNA, 122 bp, Homo sapiens
gcaaccctgagccggggaattcagccactccagacacagcccctgccctccgggaagtctcgggagacctggctagtctggctgggagaagtcacacgttgattgtcttggaagtgagatgg

SEQ ID NO: 461830 - DNA, 122 bp, Homo sapiens
ataatggtgaaattttaaaattagttttgtacttaaacatgtccccaaagtgaagcacagcggccaacgtccgtcacggtgccgagcagtgccagccgctctaccatggccgacggcctgat

SEQ ID NO: 461831 - DNA, 122 bp, Homo sapiens
tgcccatccttccagaggtcgctggggtcagtggctggggtgaaggtgatgagcaagggccgggacatggcttttgggagaactgagaaaatgataccaggcaagggaaggatgagacaagt

SEQ ID NO: 461832 - DNA, 122 bp, Homo sapiens
ttcttgaggtcagcagttgctttttccaggttcccaagggcagcctgggcaaccccccttcggtataaggcctttaaatggccaggctcccgctccaacacccggtcacagctctgggctgc

SEQ ID NO: 461833 - DNA, 122 bp, Homo sapiens
gtggtgtgggtaggggggaagtccctgccatgcttggccaagccctgctctgctgggctgcgggctggcggcgctcacccagctcctcacctgtccctcatcttcctgtttttcttcccttt

SEQ ID NO: 461834 - DNA, 122 bp, Homo sapiens
tgaatcccgtagggtgtgtcaacagcacccaattcacatttcccatgctcatctccccgacgcaggctcccacagccaccagcttcagcagacgagtagacacatgatacgcaattcacact

SEQ ID NO: 461835 - DNA, 122 bp, Homo sapiens
cgctgatgcccatcatctccctgagtttctgagccctatctctcatgtgtcagtggtcaccgccgaatccagacactccggccctgttccggaagagccctgatatccgtggctccatggcg

SEQ ID NO: 461836 - DNA, 122 bp, Homo sapiens
gcagaggcaaaaggtgagcgtggttagcagcacagggggcccagcaagcacggccctgcccggaggacggggccaccccagcccctcaccaaaggatgagtggggccagctctgcacctact

SEQ ID NO: 461837 - DNA, 122 bp, Homo sapiens
aaacatgagaaaacaaaacaacatcagttgtagaagaacataaagaagatagcttgttggcggcagattactaaagcacataaatggaaaaggtctccctggatcaaagctatcttgctcct

SEQ ID NO: 461838 - DNA, 122 bp, Homo sapiens
gggtaggacttcaacccaggcagcctggcttcagaggccctgctctaaaaccctattgtgcgcctccccttatgagctgtgaacctaaattgaggcagtgagtggggcattgagtgggatct

SEQ ID NO: 461839 - DNA, 122 bp, Homo sapiens
aggttgctagtggtaattggcgcgctgcttctcctgtgtggcctgacgtccctgtgcttccgctgctgctgtctgagccgccagcaaaatggggaagatgggggcccaccaccctgtgaagt

SEQ ID NO: 461840 - DNA, 122 bp, Homo sapiens
cctaccatacatcagtttctgatggttgtcagcaattcttgtcattctttggctagtagacgcttcaatctgccttcacttcacacggcagcctccacattgtgtatctaaagctttctgtg

SEQ ID NO: 461841 - DNA, 122 bp, Homo sapiens
caaaactagactttctcctttttctcacccaatgtgccggacccccgcgtggagcctgggcggcagtgggctttggacccattccggtccctctctggagaggtttcctcacctgtaacacg

SEQ ID NO: 461842 - DNA, 122 bp, Homo sapiens
atagaattccattgtacttattggggggggggtaatttcactttaaatttttagcagcttcgaggacttaattggttaggctccttcaggctgtctttggaaatcttgtcctttgaaaaggg

SEQ ID NO: 461843 - DNA, 122 bp, Homo sapiens
agttctccatctgctcacgggctaaagtcggtgctttctgccgtcacttttagatcctggcgcaggccacacaattcatgtcaggagtaaatcattttgatttccacctctggtcccgagaa

SEQ ID NO: 461844 - DNA, 122 bp, Homo sapiens
aaaaaaaaaaaccacaacaaaacatgcaacggactcaaagatacacacatcaaaactgtacgcgcacacagactctgatacagaggtacagacacaaaaaggcaccgatgtaaaagcacaaa

SEQ ID NO: 461845 - DNA, 122 bp, Homo sapiens
aggatatgatgagaattctggtaacatcaagagtcagttcctatcagcatacatctgtgacgttggagttcttcaaaaatgttgttagatatgaaaagtttttcacagttgaacctcagcac

SEQ ID NO: 461846 - DNA, 122 bp, Homo sapiens
cgcttccatgggaatctggccccgggctcagagcgcgggtagctggcagagcctggggggcgcggcggcggcagcagcaggttggagggcgcgcggcgggggccaaggggacctggtcggcg

SEQ ID NO: 461847 - DNA, 122 bp, Homo sapiens
cctaaaccaggggtgcaaaccaggccgtgcgggtgggcccgcaggcggcattgtgggtaacgtagccgtggcaccattggctaagccggccgttgggggcgtggcaacacggccgagtgggc

SEQ ID NO: 461848 - DNA, 122 bp, Homo sapiens
ctcttctgctgcttctgcaagctctgaggacatagtcatcgaggagtttacgcggaaaggcgaggaggagagccagaaggctgtggaggctgagggagatgaggggagctgagcacctcgct

SEQ ID NO: 461849 - DNA, 122 bp, Homo sapiens
agagttgtaggacgtggtaacaacccagggtgctgaaacggtcagaggtgcaggtgcagacgcaggcttctgcctctgcaagggcaagggggccgttggtggctggctgcaaaggaccagtg

SEQ ID NO: 461850 - DNA, 122 bp, Homo sapiens
gcggccccggcccgcgccaggatgctgcgcccgggactccctccccggggcggggcggcgcggggcccgccccccatcacaccccttccggccgccctccgcgccccggggcgcaccgcctg

SEQ ID NO: 461851 - DNA, 122 bp, Homo sapiens
cgaacggcgcccgcgcaggcgcggagggggaggggggcggagcagcgggagccggggagccggagccccgggtccccacgacctgagccggctctcccatcagcggcctgaggacctggcgt

SEQ ID NO: 461852 - DNA, 122 bp, Homo sapiens
aggtttgaaaaacgaatttatatccccttgccggaggaagctgcccgcgcccagatgttccggttgcatctcgggagcactccccacaacctcacggatgcaaacatccacgagctggcccg

SEQ ID NO: 461853 - DNA, 122 bp, Homo sapiens
gtgacccttagggagggcttctgaggcagcccgtgcggggtccgtcctggctgagcactgcgcggacggcgcgcccgcgagactcggacccggcctagggctcagcgagctctcagcggggc

SEQ ID NO: 461854 - DNA, 122 bp, Homo sapiens
ctgggcgcgccgctctcgtctgatccctgctggggacggttgcccgggcaggatcctttacgatcccttctcggtttctccgtcgtcacagggaataaatctcgctcgaaactcactggacc

SEQ ID NO: 461855 - DNA, 122 bp, Homo sapiens
accgggttccgggcaccggaatttctagacgcttccagatgcccgtggttttggggactccggaggggcagggttggtggatttgtgtccgctacctccagcacgccgagggccccacccca

SEQ ID NO: 461856 - DNA, 122 bp, Homo sapiens
ttcactctccgctgtgcactctacactcgagttcattcttagggagttttcagctacagtcgtttttagaaggagcactgacagcgaggtaatactcaagttttctgtttgttttgtttttg

SEQ ID NO: 461857 - DNA, 122 bp, Homo sapiens
gccagctgagagagggctccgtgtggccgcctttcaacagtaaacagtgactcaccgctccgtccccaccctccctgctctccgcgaatggaagatgcctttccccgctatttatttttgct

SEQ ID NO: 461858 - DNA, 122 bp, Homo sapiens
ggcggggaggcgctcagacacggggcgggcacctacgagagggacagcgtaaggtggaatcgctgccgcaggccgcgaaacatgacgaacgaactgggcgggaaggagcgcgcagccacctc

SEQ ID NO: 461859 - DNA, 122 bp, Homo sapiens
gaggccaatcctctgcccctaagctgggactcagtttcctcatcctctgagtgttctctacggcctttctcacagagggagctggagtttgggagtgctggggctttgcaagagggtagggg

SEQ ID NO: 461860 - DNA, 122 bp, Homo sapiens
ggaccggtgtctgacttgtgctcacccttcctcactcacagaggctgcagtgatgaggggcggccagtaggggccttgagatgcctgtgggggctacgtgctgcttacctgctgcctcctgg

SEQ ID NO: 461861 - DNA, 122 bp, Homo sapiens
cccctggcacgggggcctcggagggccaggccttgctgctccgcacggtgccgctggggtcgagctgccagggcctcgcgggtgccaccgctccaagtttctgccacacagcggagggggag

SEQ ID NO: 461862 - DNA, 122 bp, Homo sapiens
gtttccttggggtttacgtttattggttgtttctgactttctctaaatggcaggagcacccgacccaatggcaccgtcttccaacctgtaaccacccaaaaaatccatattaggttccagac

SEQ ID NO: 461863 - DNA, 122 bp, Homo sapiens
tttaaggcaggctagcttccaaggcatactgacagacatccctgtgcagtcctgggggcacgagggtcccattccaccctggggcttcagggtcaggtgaggaaggtagatccctgaagttg

SEQ ID NO: 461864 - DNA, 122 bp, Homo sapiens
gtatacaggaggatgtgcataggttatatgcaaatactacaccattttatgtaagggactcgagcatctgctgatttttgcaaccagtcctccaaggataccaagatggcagtacctctaga

SEQ ID NO: 461865 - DNA, 122 bp, Homo sapiens
atcgggcccttctggggagtcccaaggtccacaccccgggctaggcccagtgacagctgccgccgccatagctccaactgcagcccacgggcgtaactttttatatttttaagttggataca

SEQ ID NO: 461866 - DNA, 122 bp, Homo sapiens
tgctttttcaatcctgggtctagtgttttctgaactggtgtgagacaggctaaagatcaacgccacacacacaccccgtccttcatgagatgagggtttgttcagttcaatctcacatttaa

SEQ ID NO: 461867 - DNA, 122 bp, Homo sapiens
actcagtgaaacaaacaggatattagtagttaacactggcccccgccacggtggctcatgcgtgtaatcccagcactttgagaggctaaggtgggcggatcatcggaggttgggagttcaag

SEQ ID NO: 461868 - DNA, 122 bp, Homo sapiens
tgcacatctagttaataatcaagttgagttgcaaaacgaagtttctttagattgcagtctcgtgctttgactcctgagatactctcctttccctgattcttttctggtagcctccttccatg

SEQ ID NO: 461869 - DNA, 122 bp, Homo sapiens
ctgtcagatccacggcagcattagattctcttaggagcacaaatcttattgtgaactacacgtgcaagggatcttggatgcgtgctccttatgagaatctgttgataaatataatgcccttg

SEQ ID NO: 461870 - DNA, 122 bp, Homo sapiens
tggtcttgatgggcataggtgagtacatcctgctggtgtcctggtccatgagccagggtgcgtacggttgccggaggtcacctttaggccatgtgggtttcctcagggagctgacctgaatc

SEQ ID NO: 461871 - DNA, 122 bp, Homo sapiens
ttcctctgggggctccagggaggatctatttgttggcccttccagtgctgtgggtgccagcgttccacacttgtggatgcgccgcctcaacctctgcccatcttcatgtgtccatctccttt

SEQ ID NO: 461872 - DNA, 122 bp, Homo sapiens
atcatccgcagcctgcggcagggcctgcgtgtggagaagcgcctcaagaccaaggcagtgcgcatgatcgccatagtgctggccatcttcctggtctgcttcgtgccctaccacgtcaaccg

SEQ ID NO: 461873 - DNA, 122 bp, Homo sapiens
cctagcaaggaaagagaaatgcctggtctcagtgctgggaagctgtttcagccagagccccgtggctgtgaagagagctctcctgtctggagccaaacagaaagctcataggtcttgaggcc

SEQ ID NO: 461874 - DNA, 122 bp, Homo sapiens
ttcagggtgtcttcccactccccggaccacaggcatttcaattcattcatcaattgccgccgcaaccatccaagttggagcagcaggtcccacagttgccagccaagacctccgctccagaa

SEQ ID NO: 461875 - DNA, 122 bp, Homo sapiens
gagggaaggaagtgaggctccagccggccaagtgacgtggccaagctccccctgccaatccgggcctcaagccagggtcgggctgactcagaagcccacaagcctcctctgtaacttaccat

SEQ ID NO: 461876 - DNA, 122 bp, Homo sapiens
tttgtttagcattaaacaagtagttttgacctagcagtcctcctgaacaagggctcactccgcagaacctttgctcctatccaagccccaccttcattagctgggtggtctttttaagcaag

SEQ ID NO: 461877 - DNA, 122 bp, Homo sapiens
cgcggtgccagccccccaggccgattcccatccagttgaccgagcttgtgctggtcaccgcggtttccgcaggacagagtccccacagccgctgggcaccccggtcccattcgcggccactt

SEQ ID NO: 461878 - DNA, 122 bp, Homo sapiens
gggccgcccagggtcaggatggaggggcaaagtccgagcagggtcagtgggttgctgctccgttttcctgtcctgggttcaagtcacccttcccccagggctaagggctcagcgcccctacc

SEQ ID NO: 461879 - DNA, 122 bp, Homo sapiens
gctttattgggaaacgcgcgctctgggggcccaggtggctggggggaccggagaggcgcgcgctttgcccacttctcttggtggcatcttgtgcgacccagcccgtcctctcccgacttcga

SEQ ID NO: 461880 - DNA, 122 bp, Homo sapiens
gtgccccgtggttctctgtctctctcctgctcacaggcggtgccctggcctcacgtggcccgtggtgctctgtctcgctcctgctcacctgccgggctttcgtctctgcccagggatgaaac

SEQ ID NO: 461881 - DNA, 122 bp, Homo sapiens
ctatgtgtgctgcttgcctgcctgctggagttctgggtgggcatgggcttggcagcccctcgctaggagctgccgggccggccttgccagcccaggcagtgaggggcttagcacctgggcca

SEQ ID NO: 461882 - DNA, 122 bp, Homo sapiens
tttttttttttttttttaaacagagtctcgctctgttgcccaggctggagtgcagtggcgcgatctggctcactgcaagctcaccctcccgggttcacgcaattctccttcctcagcctcct

SEQ ID NO: 461883 - DNA, 122 bp, Homo sapiens
attttgttttgtttttgagacagagtctcactctgttgcccaggctggagtgcagtggtgcgatctcagctcactgcaagctccgcctaccgggttcacgccattctgctgcctcagcctcc

SEQ ID NO: 461884 - DNA, 122 bp, Homo sapiens
cttgctgccataaggggctccaaagacccttcccacccaagggatgacaccctgtgccagcgcaaggccagaaacagatcagaaacgcctcccttcgcttccctggcttttacggcagcccg

SEQ ID NO: 461885 - DNA, 122 bp, Homo sapiens
tcctatgaagatggcaccagggtcttctctccccaagccttctctctgcaaagggaaggccgctactgctcacacctcgacttctcagggagccaaagctgctccgtggagctctcagtgga

SEQ ID NO: 461886 - DNA, 122 bp, Homo sapiens
gacacccacgtaagttatgttttacctacatttatctcatttaagattcacaatctttcccgctttacaggatcagaaattcagtgatttacccgatgtggcaatgtgacaacttagccagc

SEQ ID NO: 461887 - DNA, 122 bp, Homo sapiens
gggcgaggcgcaggcccacaggtccttctggaaggactcaggcaggagttaggaggctcccggggtcaggcttctgggtctagatttccagaggcccctctgcagcaccaggcattcgcctc

SEQ ID NO: 461888 - DNA, 122 bp, Homo sapiens
gcgctgcgtagtttctgcagcaggtgtggggtgaagagttgccacacagctgtctgacaccgggtgtacggcgtcacccctcacttcctggacaaggcaacattttcctaaaggtaaagacc

SEQ ID NO: 461889 - DNA, 122 bp, Homo sapiens
gggcggcggagagcgccaaggcagccaaaagaagcttgtgtcgtggagcagcggcgggcacgggggacactggggggagcagcggcgggcatctggaggcatcgggggacagcgggggacat

SEQ ID NO: 461890 - DNA, 122 bp, Homo sapiens
aagccgctcggacccatccatgacttcttatgtgtgctgtcggcagctgaccagcggccacgctatcctggacgcgtggggatggagctacggggagggtgcggtggtgactgctccactgc

SEQ ID NO: 461891 - DNA, 122 bp, Homo sapiens
agaaatgggtttcaactggcaggcctgtttacccacaccaccaccttactgtatgcacctcgtgcctcatgccatcttgcctcaggaacccatgggatgtgccagatgggctgggcctggct

SEQ ID NO: 461892 - DNA, 122 bp, Homo sapiens
aaaatccgttgaacccatttgagaaataatgctgatctggactccgtctacattgtgctgcgtgggtccctccctgctccctccacccccactctctctctggctttagaaaagtaaagctg

SEQ ID NO: 461893 - DNA, 122 bp, Homo sapiens
caggagtagggagggcattgggagcaccaccacctggccacgggcaaggagcggagacaccgaaaccaacactcccagcggcgctggccacggtggctctgtcccctccctcaacaggtgct

SEQ ID NO: 461894 - DNA, 122 bp, Homo sapiens
attagatagaggttatggatttgtgcaggaataccacaaaaagtgatgtggtatgtttctcggtgcttcctattaagaggcacatgatgctgaattgctttcttatgggataactttgttaa

SEQ ID NO: 461895 - DNA, 122 bp, Homo sapiens
gccagcgcgtctgcagcggttcccagagaaagcccgccaggcagggacagactgacagaccgacggaaaggtcttcccagcgaagacttggaacgccccagggggtgggggaggctgcaccg

SEQ ID NO: 461896 - DNA, 122 bp, Homo sapiens
ggaaggcaaaggacaccaggagccgggggagggcaccggacagaccctccctcagcgcctcgagcgggagccaacctgggactcagacatttccaccgtctggcttcccaagctgagaggga

SEQ ID NO: 461897 - DNA, 122 bp, Homo sapiens
aaccagagctccagggacccagataccagggggtcttgaggacccaggagaacagagacccgggtttctgggtactcagttatgtggggccacaagtgatcagggtcctatttgaggtcaag

SEQ ID NO: 461898 - DNA, 122 bp, Homo sapiens
gtgtgcctacacaccgccctcaccccttcaccgtgggggctgttctccttccccatggagcgctcagggctctaggttcctgacttggggcacctctgtctaattccaccagcacagccact

SEQ ID NO: 461899 - DNA, 122 bp, Homo sapiens
ggaactcacccagcaggtcttcgatgccaagaacatgatggctgcctgtgacccccgccacggccgatacctcaccgtggctgctgtcttccgtggtcggatgtccatgaaggaggtcgatg

SEQ ID NO: 461900 - DNA, 122 bp, Homo sapiens
gggcgagccaggctggatgggccgcctctgggttaccttcagcggcaagctgcgccgcatcgtggacagcaagtacttcagccgtggcatcatgatggccatccttgtcaacacgctgagca

SEQ ID NO: 461901 - DNA, 122 bp, Homo sapiens
acccggggccttatctgggacaatacttttacccttggtgactttggaacctaggcagggcgcatccctgggaaaaccccagaaaccctccaaagctctggcttgtggggactcatcattcc

SEQ ID NO: 461902 - DNA, 122 bp, Homo sapiens
tattagaaagagcaagcggagcattttatgcacggtgcctttttagatacatcaattaagcgctgaggagagagcacgatggaggaggtgcagggaaaggctgggagtgacagcaattagga

SEQ ID NO: 461903 - DNA, 122 bp, Homo sapiens
ttccccactctcggtatttatgttgcaccgacggcacttaggagagcttagttttagatgcggcattaatcttcacttgttaagagatagtctgtcagcctttaccaggctctcccactccc

SEQ ID NO: 461904 - DNA, 122 bp, Homo sapiens
ccgtggggccttagctttgaactccggcccggacaaacttaaactgcttcgccaccccaacgcgccacagccctggacctaagacccagttagcattgggaatttggggagcagggcccacg

SEQ ID NO: 461905 - DNA, 122 bp, Homo sapiens
agcacagagctgccccttgtgttctctgtagaattaatagtggcagcatcaagtacctggcgggtacagacctcctagcctttctgcaaggtcaatttctagagcccacatctttcttgaca

SEQ ID NO: 461906 - DNA, 122 bp, Homo sapiens
tacagccaacccaatatcaggaggaaaggatgtcactttgttttaggacacttgcattgacgtacaattgcaaaatgtctgagtggatagtttagtttttaagcataggaaaggtaaatgat

SEQ ID NO: 461907 - DNA, 122 bp, Homo sapiens
gattaaggaacagcaggaaagatctccacctgttgaggggtagagtaggcagttagatcacggagggcttccagggagcagcaacagtgagggttatacaaccccttcccaatgaagaggcc

SEQ ID NO: 461908 - DNA, 122 bp, Homo sapiens
cacaaatgccgttgatccaggatatgcactcaagctgaaattcatgcccacagccccgctcgttagtgaattcatgctgttgaatgctctaacgcctacttttgctggacactctgctggac

SEQ ID NO: 461909 - DNA, 122 bp, Homo sapiens
aacattaatctgaccacaagctgactggcaggtgctttaaccacaaggtgggcatcctaacgcgagcgaccgttttgaggcagaagcccgatggggcccgtgtccgagcttagggaggggcc

SEQ ID NO: 461910 - DNA, 122 bp, Homo sapiens
gtctcgttcactcagtgctcaacggtgcccaggctggagtgcagtggcatgatctcagctcgctacaacctacacctcccagccgcctgccttggcctcccgaagtgccgagattgcagcct

SEQ ID NO: 461911 - DNA, 122 bp, Homo sapiens
acaggctctcaggttagagagtggtggaggagactggcagaggaggagagcatggccggccgtcttggagaaagagcagtgctggtgtctgcttactcctgacctcaggcttttccttatat

SEQ ID NO: 461912 - DNA, 122 bp, Homo sapiens
tatcacctgaaggtccaaataaggagaggaacagaggataggcccaaacttggcagcccccgcctgggctgggggaggcctaacagattccagccacattcctgatgaccttcatgtcctca

SEQ ID NO: 461913 - DNA, 122 bp, Homo sapiens
ccagcaccaattattccacacctgctggtgaacaagcagaggcctctttacacctatatccgcatggtcttcattactggattgagaaaaacactgatgatgaagtagttttccgcccatta

SEQ ID NO: 461914 - DNA, 122 bp, Homo sapiens
cgaggcgggcggatcatgaggtcaggagattgagaaaccctggctaacacggtgaaaccccggctaacacggtgaaaccccgtctctactaaaaatataaaacattagccgggcgtggtggc

SEQ ID NO: 461915 - DNA, 122 bp, Homo sapiens
cctgtccctgaaggatttccacagagagccacaattagtccagcatacttgagccaacatcgtgtgcttagtgcatccagaaatggctcatgaagtcaactaagcggactgtggaccacccc

SEQ ID NO: 461916 - DNA, 122 bp, Homo sapiens
taactctacaacaggacattagtcttgtgttccaatcgtatctcctgttagcccttcatacgcatcctgggctccagataaactgaatcatgtgcttactttttgagcaatgctggacattc

SEQ ID NO: 461917 - DNA, 122 bp, Homo sapiens
gggcgggcagatgaggcctaggggtgccgatccctagtgtcgactatgcgaggtgactagcggcggtgatcttgggctgggacgtggaactttgaggaaagggggagcggaggccagtttgg

SEQ ID NO: 461918 - DNA, 122 bp, Homo sapiens
gagtgcagccgcggcgcgcatgcgctctgggctcgccgccggggagggcggggcggcggacgcggctgagatcactgcctgggccttaaaggggccgcgccccgaaccccagcccgccgccc

SEQ ID NO: 461919 - DNA, 122 bp, Homo sapiens
ctcgctgctgcgtgttcgcgcgcgtcccggagtgcgcatgcgcagcggcgggggttgttccggctgcctttcactgaggggacccgccagtttctaactcagtggcgtttgccctgattccc

SEQ ID NO: 461920 - DNA, 122 bp, Homo sapiens
tgggttttaaaccgcggagggaggcccaggcggagagggtgtaggcccacttttctcactcgtgtctaagcaggccttgtcctggcggcagccaaggtgaaggcagacgctgtttccgggat

SEQ ID NO: 461921 - DNA, 122 bp, Homo sapiens
tcctctgatctctgttgttaggcgtgtgtaagtaacagtaaggctgtgaaatttgtcttacgcacaagccatttagccatttagcagccaagccattaaaaatcctgagatgtgaagggctg

SEQ ID NO: 461922 - DNA, 122 bp, Homo sapiens
acctatcccagagtcctgacacagaagctctttcctgttttcttatgtaagtggggagaccggagattaattattctagggcttttaaataaggaggactttggggtgaacatagtagttta

SEQ ID NO: 461923 - DNA, 122 bp, Homo sapiens
tgccccagagggcctggccaactggttgggttgggatgaggcctcggttttgagcctctgcggtggcaattccagatataccaggaggccgaaactgctcctggaggctggggcaggagagg

SEQ ID NO: 461924 - DNA, 122 bp, Homo sapiens
aggaattgaggcgaaaagcctctgcaggtgacggtacaggccaataccaggaggtcaagtcgccggtgtcccttcggcccttaagtccagggaaacgcacggcgagggacgaggggcgattc

SEQ ID NO: 461925 - DNA, 122 bp, Homo sapiens
ggatttagggggcttactccaactgaagttaagattacttggctgccagccgggtgggcgcggtggctcatgcctgtaatctcagcactttgggaggctaaggtgggaagatcacctgaggt

SEQ ID NO: 461926 - DNA, 122 bp, Homo sapiens
ctagcttccttgattgttgtcaccttagctcagtgagacctccaggttctgtctgagttccgtctccctatgctgcaacctggaaactcttcaggccagaaatgagggctatcaaagggctc

SEQ ID NO: 461927 - DNA, 122 bp, Homo sapiens
cagattgaagtgtggagacagggaggcctgcagctccaggccccacgggtggggcacgtccgccccgggcttgggcacctgcaaggcagagggggtgtcggggcctggatcactgggccccc

SEQ ID NO: 461928 - DNA, 122 bp, Homo sapiens
cagacatggggtgtcttcaggaaagcctctgcaaaaaaaatgtatacacagagggcttaacggatgaaggagagttggaaaggtggggaaagtacaagttcatccaggggccgagagaggga

SEQ ID NO: 461929 - DNA, 122 bp, Homo sapiens
gcgtctccggtcatcacgggagaccaattggtttacaaatagtgatgataaacctgggaccgaccttggggctgtgtaaaagtctactgacagatgtaatggagggttgttagcagtcacaa

SEQ ID NO: 461930 - DNA, 122 bp, Homo sapiens
ccagccaaggaaggttctgctaacagagagggccggggtcgaggagagagagaagcaccgcgcaattcggtgcgttccgggaaatgtgcctcagtagcgcctgaggtcacagggaccccaca

SEQ ID NO: 461931 - DNA, 122 bp, Homo sapiens
tttcttagggaagatagcagagacctctccatcagaatgctccttctttggagagcctaccggcctgggggctcactctcttccttcttccctaaacgcctggcctcaggatgtcacaagaa

SEQ ID NO: 461932 - DNA, 122 bp, Homo sapiens
ctttccacactgcgagcaggcactagacgagcaggaggctggacctaggagcgcgggtcacgcccccatgccgcccattggctgcttttgaacgttctgagcccgcccctccgggggccgtg

SEQ ID NO: 461933 - DNA, 122 bp, Homo sapiens
tgatgaaggtaatcctcagatcattctttgatctctgttatgaactaaagttccatgactcggtgattctgcatgtcagcagagtagtaaaacactatttcaagctttaggtgctcatttgg

SEQ ID NO: 461934 - DNA, 122 bp, Homo sapiens
aagcatggcccaaccccagtgccctaagtccggaaacattcaaagctggacccagggtagcgggatccggggcctctggggacccgagagggacgttaagttcagggcttcagggtgcagcc

SEQ ID NO: 461935 - DNA, 122 bp, Homo sapiens
gactggcgcaggtgaggtccctgcatctgtaaggcagttggacgagagcaatgtgcagggcggtcctgctgcatggcggagtcctaggttcagcaggtgcgaaagcggggcttcgtggcgga

SEQ ID NO: 461936 - DNA, 122 bp, Homo sapiens
tctctggaccccaggcccggaccaaggcggcggaggggacgcccagcaagcccgcggggtcgtgaccttcaccggactacctgctaaggaccgagctccccggacccccgagtccgccccac

SEQ ID NO: 461937 - DNA, 122 bp, Homo sapiens
tccaccctcgtggacaggctttatcctctgcagtgcccagaggcttctttctttcattttcggctcttttctttttttaaatccagtcgcttgttggttatcatacttgcaaagcaaacaat

SEQ ID NO: 461938 - DNA, 122 bp, Homo sapiens
cgctcctccaaggaagctcgtccttttgggccctcagtggctgttgtagcaccaccaccccggcaccagacagagagccctgtcggggcttgctccttggaagcgctgcgcatcctgtgttc

SEQ ID NO: 461939 - DNA, 122 bp, Homo sapiens
ttgcctcccacagaacctggctcctggtgcgcgttgcggggtgtgcggagatggtacggacgtgctgcggtgtactcactgcgccgctgccttccactggcgctgccacttcccagccggca

SEQ ID NO: 461940 - DNA, 122 bp, Homo sapiens
ggacgcggaggccgggggaggtgagtgtcagtcccaaggttgcagacctaggacagggaccggagctgccgggcacccagaactctgtcgccttcaacccaaattcgattcagtcctctcat

SEQ ID NO: 461941 - DNA, 122 bp, Homo sapiens
tctggtcctctgaaatgtagagagataggcacattcagagaaacaaagacagaacagccacgatctgcatatgtagattagaagctactggggccattaactgcttggagtacttaaggagg

SEQ ID NO: 461942 - DNA, 122 bp, Homo sapiens
aagattcagtaacaggtccaagatgacacagcttgtgggccacactcctagttggaattccgactcttgcagttggtttgagcccacatgcttaacctcacacacacacacaccattcagaa

SEQ ID NO: 461943 - DNA, 122 bp, Homo sapiens
gtttatgtaaaatagctcatggccacgtctctaccttcccgaacgacaccggcagagtgacgcagaggggacacagaatgtcctgacctcagtggggtctcaccacgaccctccactgtagg

SEQ ID NO: 461944 - DNA, 122 bp, Homo sapiens
tcacagggcggcctgaccaggcaggcaggaaagctgacaccctggggagggctggcaggccggtgccctgacggcagggggcagttgggccttcaggctcctcttcccctgacacaaagcag

SEQ ID NO: 461945 - DNA, 122 bp, Homo sapiens
ccataaaaggggcctgaatagccaaagcaaacagcacaaagcataaagctagaggcatcacgttaactgacttgtactgctttataagctcatttagcaaagtagtgcacatagtattttac

SEQ ID NO: 461946 - DNA, 122 bp, Homo sapiens
ccttgccctggcagacccagcactggctgctgctagtcagatggggtagcgggcaggggccggaggggccaccctcccagctgacccagcctcctgggccgcttcttccaaaccagcagggt

SEQ ID NO: 461947 - DNA, 122 bp, Homo sapiens
cacacctcaaagtgttgttttaaaaattacatgagcagatagataaataaaagggctgtgcgtgccgtaggtgcacaataatgtttgctgtttttgttattgttagtggtggagaatatcca

SEQ ID NO: 461948 - DNA, 122 bp, Homo sapiens
aaaggaataaaatgacagtaaaaaaataagaagtcaccactaaatatgaatgtgtgaagccgttgtagcagttccctgtctgaagcacaaacaggaagtaactctggtgcccaatagcataa

SEQ ID NO: 461949 - DNA, 122 bp, Homo sapiens
ctcaggcagtctccgagcccgcgggcgcaggcgcgcttacagccgacagagcgcttcagccgcttccctcgagcctgcagtgcgcaagcgcgggacatctccgtttccctccctcagcccct

SEQ ID NO: 461950 - DNA, 122 bp, Homo sapiens
aggttttctttggctgctgtatagaatggcctcccccagtgactctctgacacatcatttcgtttagtgatgtctcagctctcatcagagtctatgtgtgcttgtttctttatgtgtttatc

SEQ ID NO: 461951 - DNA, 122 bp, Homo sapiens
gccagcttgctttctccagtcgggtggccgcggggacccgggcgacgtcggaggccctgccgggaacccaggctgcagcccccacccccgcgctgcgacacgccccccaccccttccggctc

SEQ ID NO: 461952 - DNA, 122 bp, Homo sapiens
ggagccacttccgggcccagtcaaccacgaccaggagaggcagcgctggagcctcaatcacgtcgacggaaaacaagtgcgctccctactgcagtcaccaggaggcgctagtcccgcctgtc

SEQ ID NO: 461953 - DNA, 122 bp, Homo sapiens
tttaaagtctgatttattcagccaaaaatgcagtgacacggatggggagtagtggcttgacggttgagtgctgaagcaagtcagtcttgaatagttttctgcaagaaaaccaacataatttc

SEQ ID NO: 461954 - DNA, 122 bp, Homo sapiens
cctttaactactgggttcaagcaatcctcccagctgagcttcccaggtagctgggactaccgacacataccaccgtgcccagctaattttttgtgggtttattttcttggagagatggggtt

SEQ ID NO: 461955 - DNA, 122 bp, Homo sapiens
gcggtgtggagcagcaccaggcagacagccacgacatcccataacttcatcttaaagtcccgtccggcggcggcacctgcgcgggcaggcgggaggtgggggagagaaccgcagaatgcacg

SEQ ID NO: 461956 - DNA, 122 bp, Homo sapiens
ctctctcaaaagagaaaaacaaaacccctaagagactgcgttctgcaagcatcagttctacggatcatcaacaagatttccttgtgcaaaatatttgactattctgtatctttcatccttga

SEQ ID NO: 461957 - DNA, 122 bp, Homo sapiens
cccacagctcctgcactgtcaggcctggggaacagggctcctccctgcctctcagcagatcgcttcatgcctatcagcctgcagcacattcctcgcattctaggattgagatacacagtttg

SEQ ID NO: 461958 - DNA, 122 bp, Homo sapiens
cctgccgcccgggaggctcggatccggggcgcccagtgccccccgctgccttccgtgagccgtcgggccccagctccacgtaggcctcagacccagccctgtttctgcttgcggggccgcgg

SEQ ID NO: 461959 - DNA, 122 bp, Homo sapiens
ttgccaaagccctacaaccatcacctccctactgtgaaatgtgaggtaagttgcttaaaccggcggaaccagtttcctcaactacatagagggatgatgattccccctagctcacaggaccg

SEQ ID NO: 461960 - DNA, 122 bp, Homo sapiens
ccttctcaatgtccattccttgtattccactggagacagcgggacgtccagctcccctctcggtgagtgagtgacgctgtctcggctcactcggttatatctgctgaacacaagagcttgct

SEQ ID NO: 461961 - DNA, 122 bp, Homo sapiens
cggacaggctgggaggggctgccgcctccgctgttcacttgagcaggacgtcagaggactcggacaccagcttcccatcgtgggtctcaatcttcttcacaatcatggccctgatggagcag

SEQ ID NO: 461962 - DNA, 122 bp, Homo sapiens
tccagtgaaggcatggctgtaggctgagagtgaatcaaaacttaacgggtaggagaagtgcgaggacccgcgtgcttccgctcttcagtgactccaaagaacgtggtcctattagtcctcgg

SEQ ID NO: 461963 - DNA, 122 bp, Homo sapiens
gagaagcggcggcggcggcggcagcggctctaggctgtaattgggatgcaaagcaggcggcggcggcggctgcggccgggaggaggaggaggaggaggcggcggcggtggcggctgcagcgg

SEQ ID NO: 461964 - DNA, 122 bp, Homo sapiens
gggatgggagtgtcttcttggctgtggaaatcgatcctcctaccttgtcctgaagccacccgccgcctttcctcgtccctcccttcgcggtgattttccggtcccggcgcccggcgagggcg

SEQ ID NO: 461965 - DNA, 122 bp, Homo sapiens
agtgtggtgctgtctcagacaaggaacatgaagaacaggaagggaataaatgctgtctaccgtagcttcaagagcacaggggaacagactcaggaggcagtgcggtatcatggcagggcagg

SEQ ID NO: 461966 - DNA, 122 bp, Homo sapiens
gtttaatagccgtgctcaggagggagaggggaggggctggacgccggctcataaactcttcgctgtggctccccaacctgctctgctcaggctccccgcgcccgtccctggtcccgcggcag

SEQ ID NO: 461967 - DNA, 122 bp, Homo sapiens
aggcactcttgggagtgtatggatgacgtgtcaggtcaccaaatggattgtcgaagggaccggagggaagaggggagagctggaatttctgagggtttcggttgcagttttcagtgatcttt

SEQ ID NO: 461968 - DNA, 122 bp, Homo sapiens
tgtccctcggtgcagatggaagatttccagatctatgagaagtactgtcagaacaagccccgctctgagagcctgtggagacagtgctccgactgcccgtttttccaggtttgtccccggac

SEQ ID NO: 461969 - DNA, 122 bp, Homo sapiens
ctgcggtgctgcggccactctgtgggtgtccccccacccccatctccactgcgagctctccggcctgggcacgcagctgctgacacacatcagcatggtgccctggccggcatctgctctgt

SEQ ID NO: 461970 - DNA, 122 bp, Homo sapiens
ggcagagcagggggcggcgcttgtcggggaggctcaggccacataggagcccatggtgggcggggaggggggacactcaagcatggcgggctgcaggtcccgagccctgccctgcagggagg

SEQ ID NO: 461971 - DNA, 122 bp, Homo sapiens
ttcgaatctgagaattccagcgaactcgggctctaccagagtttaagtcggcccctggggcgtctgtttgtttattggctcttaagggaaaaaagtttgaagatctttaaccagcctcagac

SEQ ID NO: 461972 - DNA, 122 bp, Homo sapiens
agcacctcactcgggaaggcgggcactgaaacagggccctgccagggctccttccgccctcgtccttggtattgtttctgacggcctaagaataaagggttacttctgatgattcccacggt

SEQ ID NO: 461973 - DNA, 122 bp, Homo sapiens
gcgtttctggatagaacgcgagtaggggaaaaatggggaccgtttgattcggttcaaacacgttttcgttgctctggacgccaaatggaaacacggccaaaatttagttaaaggacttctct

SEQ ID NO: 461974 - DNA, 122 bp, Homo sapiens
tgccacagcttccctggcaccgcgtgcatacagccggtgcctgaggataatgaccgtcctcggattggagatgaccttttgtgtggatggctgtagctgctcccacatctcctgcacggcac

SEQ ID NO: 461975 - DNA, 122 bp, Homo sapiens
agaggaaatcatcctctctctgaacccgtgtagcattttatccagggatttatgtcttcccgcctcagcttgtggctatttgttggctttacctcctctgatgaactgtatgctcctgagga

SEQ ID NO: 461976 - DNA, 122 bp, Homo sapiens
gaggagcggaaccgcaagccagacagcaaagctggttggtttctctccaggccgaggccacggatgcccgggaacgtcaccagaccagaaaggacccaatcctcaaccttcccagcgcaacg

SEQ ID NO: 461977 - DNA, 122 bp, Homo sapiens
tctgagacaggtattttttaatcatgcccattgtacagatgaggcaactgaggcacagcgcggggtagtcacctgccccaaggcacacaagccggggagtggcaaagctgggactggaaccc

SEQ ID NO: 461978 - DNA, 122 bp, Homo sapiens
ctgtaagtacggggataactgcaccttcgcctaccatcaggaggagatcgacgtgtggaccgaggagcggaagggcaccctcaaccgcgacctgctcttcgacccgctggggggtgttaagc

SEQ ID NO: 461979 - DNA, 122 bp, Homo sapiens
ttttcttctattctggatctttcgtattaatggaatcatatatgagtgccccattgtatccgtcttttttcacataatattctcaaggttcatccatattgtagcatgtcagtactttattc

SEQ ID NO: 461980 - DNA, 122 bp, Homo sapiens
tttctacgtcctccttttgccggcgaaagactggcaaggggggcgcaggcgcaaagaggtcgctacgcgcacgcgctgttgttttctcggctgtgcaccaggctgtcgtgcccgggcacgct

SEQ ID NO: 461981 - DNA, 122 bp, Homo sapiens
ataaaatgtctacaccaatagtcagcaccacacaccctcttgttgcctctgaatcggccacgtgggatgcttggcgtcatatagaccaaacgttcagatgttggactcattttttttttagt

SEQ ID NO: 461982 - DNA, 122 bp, Homo sapiens
gtaatcccagctacttgggacttgggcctaggaggcggaagttgtagtgcgccaaaatcgcgccactgtactccagcctgggcaacagagcaagattccatctcaaaaaataaaataaaata

SEQ ID NO: 461983 - DNA, 122 bp, Homo sapiens
cccaaggctctgctgcacccctccctgaaattctgaatccactctggattctcaaaacaacgcccctcacccactcttgttttcacctaagtcatttctagttggtgcgtttcctttacttg

SEQ ID NO: 461984 - DNA, 122 bp, Homo sapiens
ctagtcctgccttccctcgggagatgttggctctgtgcgagcagggctttgcggctgggtcgatgctgcatcccccacccccgtgcacgtggcctctgggctagcacgcaaaggcgccctca

SEQ ID NO: 461985 - DNA, 122 bp, Homo sapiens
gcccgccccgccccgctagggccaggccccgccgccaccctccgcgctgggacgccggggcgcgggcatccctgccgcctacggatctcttcccaagcacctagaactttccaaagcgtgct

SEQ ID NO: 461986 - DNA, 122 bp, Homo sapiens
agaccctgaaccactgagcaactcctgagaaccactgggctctgtggaggcagatggtgccgctgacagaatacaaagatgtgggacagaaaagcctcctatgttggaaaccattggaaaat

SEQ ID NO: 461987 - DNA, 122 bp, Homo sapiens
gcgccttccacgggcccctgtccattcattccctaaagaaaacttgagtttccaggcttccgcgtccccagaagttggcgcgggttctggggtcgctggatgagggtaatggtggactcagc

SEQ ID NO: 461988 - DNA, 122 bp, Homo sapiens
gcagccaggtggcgccgattccggacgcccagaactctgtgggaatgcagctgtactgtgcggcgtgtaaaccaccgcatctgtgggattttgttaaagcagccacgggaccactccacccc

SEQ ID NO: 461989 - DNA, 122 bp, Homo sapiens
agggcaagacaaggcaactagagggacatccccatgagaggccatgaccatggagcaaaacgagggcaaggggagagccctcggggagaggggcatgggaaagggagagaaggacatctcag

SEQ ID NO: 461990 - DNA, 122 bp, Homo sapiens
aagggaagggaaggggaggggagggaaggcgaggggagggaaggtaagattatatggggccgggcgtggtgactcacacctgtattcccagcactttgagaggcccacccgtgaagaggatc

SEQ ID NO: 461991 - DNA, 122 bp, Homo sapiens
gtgctaggaaggatcaggcgccatgggaagtgtggtgcggccgtttcccctacttctctccgcctcgtgcttacgactgagctatcaaaacaaagctatgacagttggagcttcactgttct

SEQ ID NO: 461992 - DNA, 122 bp, Homo sapiens
gccaccatcttgccacccgggagcgcgggggtcgccgggagttgcggttcggcgccggcgcgagcgcgtttttgtggcgcctgccccgccccctcgctccaagcccgcctccccggccccgc

SEQ ID NO: 461993 - DNA, 122 bp, Homo sapiens
ggcttgccacactgaggatttcagggcacagggctgccatgcccacaattccaaaggccacgcagcccgcgtgtgcccggatgcctagctacccggcacaagctccaagggcttctcggagg

SEQ ID NO: 461994 - DNA, 122 bp, Homo sapiens
ttcgctccctaatctggactgaaagattcccacagcatagcctctcagccagagaaagcacgtgaaggaggtttatacgacttcttacttttaagttgtattttaatttttatgggggaatc

SEQ ID NO: 461995 - DNA, 122 bp, Homo sapiens
gtattacagatccattgcatcatccagcaagtcatgtcaggctgccaagctctcctcttgcggcccttttctagtaactactgtttttaagagatttgaagtatctctctattttgaacttt

SEQ ID NO: 461996 - DNA, 122 bp, Homo sapiens
tgctcctcggccacttcatctaggccagaatacaaggtgctgtctgcaagaaatgctgagcgtcggggggtcgttcggtggccccagcctacagatcgcacacaagcccccgccccatccct

SEQ ID NO: 461997 - DNA, 122 bp, Homo sapiens
tggattgaaaaggaaaacaagctttaatataactttcatgataagtgcagcaaaccaccacggcacatgtatacctatgtacaaactggcacattcagcacatgtatctcagaacttaaagc

SEQ ID NO: 461998 - DNA, 122 bp, Homo sapiens
cggcggctctccccctcggtctgggacagcccagataaacatccaggtcttagatataaacgacaatgcaccagaatttgcacagccgctctatgaggttgcagttctagagaatacccccg

SEQ ID NO: 461999 - DNA, 122 bp, Homo sapiens
ccattcttcctgtggttttctactacatgccatggcaactccgtgactaagatataaagtcgattacatctcatttgaaattcactcctggtttgcattctttcttttatttaatttagaaa

SEQ ID NO: 462000 - DNA, 122 bp, Homo sapiens
cctgctcaagaagcaccaggaggtgcacgtgcgtgagcgccgcttccgctgtggcgactgcgggaagctctacaagaccattgcccatgtgcgtggccaccggcgcgtccactcagacgagc

SEQ ID NO: 462001 - DNA, 122 bp, Homo sapiens
ctccagagagaaccgccagagcgtgcaacagcaaacactaaccagcccagccgtcagccacgcaatcatcactccctggcccagtgcgcggcagaactggcgcaagcgcacgccggcaggtt

SEQ ID NO: 462002 - DNA, 122 bp, Homo sapiens
cccatgtccccgacccctcagcattcctggcccttcgtccctggaggtccttgctgtgttcggctgagcccaggcccgcactttggccttgcagccctgaggcagcaactggaataaactct

SEQ ID NO: 462003 - DNA, 122 bp, Homo sapiens
ccatcagctaaagatgctggaagccatcgtggcccccttgctgtgcctggaccagcccaccgtgtctgctgacctacctcttcacagctctctggactttggctgggtggccctaggaggct

SEQ ID NO: 462004 - DNA, 122 bp, Homo sapiens
ccagcaaggaaagccatgttctccattcagggcctggggcaggcgcggcacagcccccaccgctgctgggttagtcacattttctgggcagggtcactggcttcacattactttttcctcct

SEQ ID NO: 462005 - DNA, 122 bp, Homo sapiens
ggagcctggagggtgctgcaggcaaagtggtggcttggcgagggccatggtctccagatccgacttgtcaggttcagctctcagctgtgtgaccctgtgccagtaacctctctgagccttgt

SEQ ID NO: 462006 - DNA, 122 bp, Homo sapiens
gcggttcaggtttaatgccataaggccggctggagggcaagcccgcgaaggagagcgcaccgggcgtgggctccagccaggagcgcatgtacctgccgtccggcgccgccgccgccacgggc

SEQ ID NO: 462007 - DNA, 122 bp, Homo sapiens
atgctccaggaagctggcccgcattcacccgtgggggtggggcagagcagcctcagggagcggagccgtgtggacttccagcccagggcccagactggaggcagcctgaccttgggcatgtc

SEQ ID NO: 462008 - DNA, 122 bp, Homo sapiens
gtccccctccccttgtggagttgtccggaccgaaccaatgttcctcttacacatatgggtcgatgcctcacgtctccctaacgtgtaaaactgagctgtgcccggccaccttgggcacacgt

SEQ ID NO: 462009 - DNA, 122 bp, Homo sapiens
ggccagccacagctggggccagtgtagccgggaaagcacacgcaacgaccacggacacagcgaccctgatcattgcagtcatctgggcaggaccccgaggctgagggtggggaagagggagg

SEQ ID NO: 462010 - DNA, 122 bp, Homo sapiens
ctgactcaggtacaaagggcctctggtgcagacatctctgtgatgcacttcaaggtctggcgccccttgcaggatcagctgggactgggctgccccgtactacttcctcacccctctccttc

SEQ ID NO: 462011 - DNA, 122 bp, Homo sapiens
gttgaagatatcttccaaggcctccttccctggagttgagtggggcccccttgagtgcatcgtttctcctcactctgagaatttggcacctttcccaagttgaacagactgatacgtgtcac

SEQ ID NO: 462012 - DNA, 122 bp, Homo sapiens
ccaaagccccaatttctctgagtcacaaaaatgtacctcaacagtgtcggcagcagagggcgctgtgagcacggccccgtgaaaggcaaaccccacggggaggaactaggttgatgtggatt

SEQ ID NO: 462013 - DNA, 122 bp, Homo sapiens
tcagaacgcacagcagcccgcagggagggctcagccccattcttggttaggtttggctttcgctggaggtgccgcaagttctgtgccatgaaagcaatctccctccagctctggagacaggt

SEQ ID NO: 462014 - DNA, 122 bp, Homo sapiens
aatgtgtacattccctgtgcaacatcagatttgcaggaaaaatgaagcacttactgaaatcgctggtactctgaataaataagcatggtcaaggagtgaactattttcttttggaaatttct

SEQ ID NO: 462015 - DNA, 122 bp, Homo sapiens
ccaagactgcacagcatccgcgaggctcgcacaggcaaacgcgacgtccggcatctctcacgcatcagcgcagaggcgcgactcggctgcacgaccctccgagatttcaccccgggggtagg

SEQ ID NO: 462016 - DNA, 122 bp, Homo sapiens
ggaaattgagactgagcgagccggcttcggattggctcaaggtcacatatagtcatcattcgaacctcactcagtctgcttctttctgaagtctgtgcagcttaatcacttcagaatgggaa

SEQ ID NO: 462017 - DNA, 122 bp, Homo sapiens
gcagcagccgcgccggggccggcacagcacgtgcgtgagcgctatgcagccgtagaccgccgcggccaccagcgccaccgagaacaccaggctccacatgaaggcgcgcagcagcttcagcg

SEQ ID NO: 462018 - DNA, 122 bp, Homo sapiens
ccttgcccttaaccaaataagctcttaggtcctagaggcaggaagacttccttgaagaggcgcgggaggctggtgaggggagtggaggacgctctgggaccctctgggggtggggcgggcgg

SEQ ID NO: 462019 - DNA, 122 bp, Homo sapiens
cgcctggaggtaactgggcgagggccgcgcagggaagggctcagcaggaggtgcaggccacgggccgctgctgagaggtcctcaccccgggcccccttgttcccgcaggacgtgctgtggct

SEQ ID NO: 462020 - DNA, 122 bp, Homo sapiens
aagataggaaggtcgttgcttaagatacagagagagatttggggtaggacaggaagggcacggtgaggagggccagaaggtacacaagaagactggtagtgttggcattcggaggctgacct

SEQ ID NO: 462021 - DNA, 122 bp, Homo sapiens
tccatccctttccaaactccatgctaagggctccagctcagctttgagctgcctgtcaggcgacattcgtcactcacccatctgaaagccactggtaacccaggctccccggggctgccgag

SEQ ID NO: 462022 - DNA, 122 bp, Homo sapiens
agggagattggcgcgcggaccactgggtgagcgcccaggaacgccggacgcgcgccttcacgcccgggtgcctggcggcgttttagaaaagctgtatttgaaaagcaaccgattggggtgaa

SEQ ID NO: 462023 - DNA, 122 bp, Homo sapiens
gagcaaccaatagagcgatcggaaatgggggagagggcgggcgacgggaatctcacacagcggttaaggcccctagagccaagggcccaaggactggcttggactataactctttcctttat

SEQ ID NO: 462024 - DNA, 122 bp, Homo sapiens
tattgtgtgtgcccgtatttggtctcgggtaggcggaaagccctgccccgcccctcctcccgcctccacccgggaacctcgatgacgcccacagatgtttatcctggtgctttagcattttc

SEQ ID NO: 462025 - DNA, 122 bp, Homo sapiens
gctttgttactctgccccattttcaatgaagggtaggagggagttagacaggggttggggcggggccagtgagcaggatgcctgggtctccagttcctgccagtgagtccctaggcctccat

SEQ ID NO: 462026 - DNA, 122 bp, Homo sapiens
gacgactgtgttgcagatggtgagtgcgatgaagaaatcaaagacgtcagacagctcaggcgagaggtgggccagcaggtgctcctgatgcctcgccacggctaggctcttgtcacactcac

SEQ ID NO: 462027 - DNA, 122 bp, Homo sapiens
cgcgggcggggtttaggcccaaagtggtgtcggagcagcgcctattagtgtcatcctcaccgtcacggccggcgcctcctcctggattcattcactcgctcttttcattcacgaaggtagtg

SEQ ID NO: 462028 - DNA, 122 bp, Homo sapiens
gagatcaacacagtcccctttccccttagacctaacatgcaacttcatcctaaaacagaccgtaatatccccaccacctcaccatccatgaccataaaactctaccctccaccacaaatgtt

SEQ ID NO: 462029 - DNA, 122 bp, Homo sapiens
cctgaaataaggaaacttggagaacgcatgtgcagcttgcttattcaggaatttgtaagacgctcagagaaggaaaataatccaccctgaaaattgctaacaagggttgcttcacagacagt

SEQ ID NO: 462030 - DNA, 122 bp, Homo sapiens
tctaaatagagtttatcagaacccaggtggtcattctctacactctctctagcttggacccgaagaacaaaggcacatgagaggagaaaggtgaccagctggacgatgacggtcacgtccaa

SEQ ID NO: 462031 - DNA, 122 bp, Homo sapiens
tacttctcagctctgactgaggggctcaaagttcaggatctgctgatttttcaacagtaacgtcctctccaaggtgttttttttttttccttttttgggaaagcccccagtttaaactattg

SEQ ID NO: 462032 - DNA, 122 bp, Homo sapiens
ggtggggctggcccagagcttgaaaagttcacaggaggtgttcagagcaattgtgcctagcgcctgatctaatctgttgtcagagtgtgatctattgtcagagtgtgatctattgtcagagt

SEQ ID NO: 462033 - DNA, 122 bp, Homo sapiens
gaggccgtggggggaaccgtctttcttccccgctcggcgtcgttcactgagaggctgagacgtgtccagcaagccaaagggaaaagggattccctcaaaggtttgctcattgatgggcgaac

SEQ ID NO: 462034 - DNA, 122 bp, Homo sapiens
tccatgcctccgtctgtgtctctatgattttcatctatagtctgcagctttgtggttcatcgacgatgccacgaatttgtgaccttcgagtgtccaggcgctgggaagggcccccagacgga

SEQ ID NO: 462035 - DNA, 122 bp, Homo sapiens
ctaaattcagaccacacaggctcaggcaagttttacagacagtattatgagtttctaaatcgggagcatttgtaaacggaaagaattcagaggatgaacgtgtgagaaaaaaaaaaggtgaa

SEQ ID NO: 462036 - DNA, 122 bp, Homo sapiens
gctttgttttcctcttgagaaataaaaactaaggggccctcccttttcagagccctatggcgcaacatctgtactttttcatatggttaactgtccattccagaaacgtctgtgagcctctc

SEQ ID NO: 462037 - DNA, 122 bp, Homo sapiens
acacccatatttggccttatatgggcagccgcgtcacggacggcactcattcacataaaacgctgcgcggccggcggaatccccggcttctagggcggcgagcggccgggctggctatcgag

SEQ ID NO: 462038 - DNA, 122 bp, Homo sapiens
tacaggtgaagaaactgaggctcagggaagttagccattccagcaggcagagctaggattcgaacccagctctgtcttatttcaaagtctgccttcttcatggagccctagtttaactgcat

SEQ ID NO: 462039 - DNA, 122 bp, Homo sapiens
actggagactacagatacaatgttcctcttgggcaacctcgttgttccaaccaactttcacgtatggtctcaatacattttcctgctggctttttgttctgacctaaagcagaatcttggtg

SEQ ID NO: 462040 - DNA, 122 bp, Homo sapiens
ccggggatggaggagggtggaattaagttagtaggtgatgcgggccgagcaaagaccctccgtgctctaagaagcacgaccgaaatgcggcgacccctctttaatgaacgcccctcactaga

SEQ ID NO: 462041 - DNA, 122 bp, Homo sapiens
aaagagcttttccagtgggttagaagacctgttctctactgtcatcaagagtctgaccatcgtttgttccctctctccagagaaatggcacacattgtgttaagcaaggcagctacagtcct

SEQ ID NO: 462042 - DNA, 122 bp, Homo sapiens
agaggtaattattttaatggatgagtcttattcattatgtggagtggcttctccctgacacgtctcccagtcacacaggaaagcatgtcttcccatctgtctttgatgaggctttcacatgc

SEQ ID NO: 462043 - DNA, 122 bp, Homo sapiens
ggatcttcctgttattctccatgcagttcaaattctgtcaattattatccagttagtcatcgctccagaggtggactgtcattaaaaaaaaatagaaggtgtgtgtttgtgggtgagtatgt

SEQ ID NO: 462044 - DNA, 122 bp, Homo sapiens
aggccatttcctaataaactgagaacagaaaggggcagaaagggctgcctctgcctagcacggacttttaaaacccttctaccacggtagcatgcaaagaagaaagatattccttcagtcgt

SEQ ID NO: 462045 - DNA, 122 bp, Homo sapiens
tctgatgtatttatatgctcaagctggagaactactgtactgggaaaattggcatctattcggaaaaacttgaccacctatgagagccactgaggctcttataatagattcagagttgtttt

SEQ ID NO: 462046 - DNA, 122 bp, Homo sapiens
gcacctcagtcaccaccaccatgcgcaggctcatcaaagacacccttgccctctgagcgtcgctggatctctgggagctccttgatggctcccagaccttggcttttgggaattgcactttt

SEQ ID NO: 462047 - DNA, 122 bp, Homo sapiens
tttccctacttatgaaaattgaagtttaaatacctaaactgcatctgctcttagggcactcgtgctgtttaaccatttcggccattttgtcatcaatatagtttatgtattcctccacccaa

SEQ ID NO: 462048 - DNA, 122 bp, Homo sapiens
cctggaagcaaacaaacttagcagtgaaaaacaagcgcgtccagtaacaccagaaaaacacgtggcgggggtggggcatctggtcgcaaccgcaggtgagactctaagtcccatcattccct

SEQ ID NO: 462049 - DNA, 122 bp, Homo sapiens
atgatgcagactcctatccgcgagatacctgctgtaatttcgctgtggttcgtgaggacgcgtcctgggctgccctgagaagcctacgtctccccttcgaggcccgggaagacctccaaccc

SEQ ID NO: 462050 - DNA, 122 bp, Homo sapiens
ccaggattaactccagcagagaggagcttaacaggtggcgaagaagtgaccatcccgcctcgtgtctgtgtctgtccctcagggccagcggcccaggccagcggctccagggccagccacga

SEQ ID NO: 462051 - DNA, 122 bp, Homo sapiens
cgacggcggcgaacatccggatcccctgaccatctgcccgctgccggttagagggacgggcgtccccgaagagaacgacagtgacacctggctacagccctatgagcccgcggaccccgccc

SEQ ID NO: 462052 - DNA, 122 bp, Homo sapiens
tggcgatgccgggcacctgcaggcggaaggggtggctcctgacagcacagctccagttagcggacacaggagagggagacaggcccagcgcacaggagtgactgctgcagacgagagccgtg

SEQ ID NO: 462053 - DNA, 122 bp, Homo sapiens
tctgtgcacttggcacaggggttcatgcgggtcggggtccgtgtggcgtgaggggctccacgctgcacccaggggcacaccaggaaatgaagttttgctttgctcaccttgaaaccacacgg

SEQ ID NO: 462054 - DNA, 122 bp, Homo sapiens
ccagatataaagaatgtagtgtcccttgcaggagaagctcaaagagggtgttcaaatattcgtgtaacactgataggctctcttgccagtccaaaccactaagcatgcactgaacacctatt

SEQ ID NO: 462055 - DNA, 122 bp, Homo sapiens
acagcaagcgtcaaaagactgcacagcaggaaggcgaaaccgaacagaactgctgctgcgcggcgacagctgaagtgggtggagaacgggagggcgggggaggcggggccgagagcgattgg

SEQ ID NO: 462056 - DNA, 122 bp, Homo sapiens
ctcaggtgatccacccacctcggcctcccaaaatgctgggattacaggcgtaagctaccgcgcccagcccatgtttacattataaggctaagaaaaatactgttttctagtgacatttagtt

SEQ ID NO: 462057 - DNA, 122 bp, Homo sapiens
gcgcagcgctgtttcgtgggaccaggattgaaacaagatggcgggttcgtggtgagaagccgtcaaggtaaccgcttccctctactcctcctgtcgaggacttcctcgaaactgggcagtcc

SEQ ID NO: 462058 - DNA, 122 bp, Homo sapiens
tgagatgccggggctgcctgtcccccggttggggcacagctgatggcacctgccgtccctcggtactgtcaccagtgctccctagggagggaaagagaggagccgctcagccttcctcctca

SEQ ID NO: 462059 - DNA, 122 bp, Homo sapiens
ttctctttgagcaactaactaggtctgttactgaagccctctgcgagcttggatgctggacgagggagagggtgaggccaccaggcaatgagcgccctcggcggccgcgtgatcccgggggt

SEQ ID NO: 462060 - DNA, 122 bp, Homo sapiens
agtgggagtgcgagataagaaaagagtacatctgcagagcaggctgcgcaatgaatcacacggtgccagagttgagtagaatataattgagtccaacatctctgagcactttcaccataatt

SEQ ID NO: 462061 - DNA, 122 bp, Homo sapiens
tactcctccctcgatgttcccagggtacgacagtgaagaattgggatgtctggcaaaggccgtgagcagcagtagaaactcactccatttgtcaagcatatgtcttcatgtgggatcatgtc

SEQ ID NO: 462062 - DNA, 122 bp, Homo sapiens
atacagcccagtaggtctcagccttattttacccagctcctattcaagatggagttgccccggttcaaacgcctctgacaacagttctgttagtccaaactgcaccattttgtaagctcccc

SEQ ID NO: 462063 - DNA, 122 bp, Homo sapiens
cagcagtcatttgcctcagctgcacaaaggccaggccagatggaagagaccagccttcaccgaaggccgcagggagcccggacacccggagctgagcattccggtcacgcctcaaccccaag

SEQ ID NO: 462064 - DNA, 122 bp, Homo sapiens
tattcctgatcccaggaggtggccgattcggagggctgggagttgttcctccatttctgacgattgtgtaagttgcccatgcttgatcataaaccccttttgttaatttttgacacatagct

SEQ ID NO: 462065 - DNA, 122 bp, Homo sapiens
ggtaacacaagaaaggctgcccgggggcccagaccctgagcccaggactgtgctgtgtcccgagaccccacaccaacgatggggaggcagaagtctgttgagaacaggcagaggggactggg

SEQ ID NO: 462066 - DNA, 122 bp, Homo sapiens
gtgtcccgtcgtcggcggtctcgaggcggctagggtgccaggcactggggctttcgtgcacggggctaggacgggacgcgggtgcgttgggcccactcacgttgaatttagggtaaggaggg

SEQ ID NO: 462067 - DNA, 122 bp, Homo sapiens
ctgcgccctgctggttggtcccgcgttcaaccgctggcgactggggaagtgcggctgctgcgttcccattttacaggccagacaactgaggttcggagaggagtgattcccccaaggttaca

SEQ ID NO: 462068 - DNA, 122 bp, Homo sapiens
atgagggcctcctccggggaatgctgggaaatggagtctacaggccggaggggtgccccacggcatactaggaagtgtgtagcaccgggtaaaggggatgaatagcagactgccccggggca

SEQ ID NO: 462069 - DNA, 122 bp, Homo sapiens
ttactcattaccctgataagtcattcatgaggaatcttcccttgggacctaaacatctcccgttaggctccacctccaacatggggatcaattgcaacaggcaatttgggcgacaaacaccc

SEQ ID NO: 462070 - DNA, 122 bp, Homo sapiens
attgcccaccgaggcgggggcaggctggccctgtgcagctaccctcgggacccattgattcgcacctccccccaggctggcccggcaagggtgggggaggacaagcgcgcttgtccctgcgg

SEQ ID NO: 462071 - DNA, 122 bp, Homo sapiens
gcctcgctcagaaagctcctccaagatgccaccgcgtgtgaaatgcttggggttgaatctcgagagcagggagaccagccagacagcccacctggctgacgagacccggcctcgcttagaaa

SEQ ID NO: 462072 - DNA, 122 bp, Homo sapiens
cggccgggcggggctgcggcagggcagggccagggccagggccggggcctgggaagccgccgccgccgctgcctcggcccgggatcgcgggcggctggtcggcccggctcgcctggccccgc

SEQ ID NO: 462073 - DNA, 122 bp, Homo sapiens
gtgcagtaaactgcgccttctgctgctcggcggccaccaggcgctgcaactccgcttcatcggcttcgcccagctccgccattgttcgcctcaggctcgccaccttccgacagctgtgtttg

SEQ ID NO: 462074 - DNA, 122 bp, Homo sapiens
tggcgggaacccgagaggcgtgtctcgccagccacgcggaggggcgtggcctcattggcccgccccaccaactccagccaaactctaaaccccaggcggagggggcgtggccttctggggtg

SEQ ID NO: 462075 - DNA, 122 bp, Homo sapiens
atcctgcaagaacccaactccacagctcagtctgcactaatgacttccttcccttcagtgcgagcacagccagcccagcttcagccacacagagcaaacggtttctgggtcttagtgccacg

SEQ ID NO: 462076 - DNA, 122 bp, Homo sapiens
attatcttgcttacctaatgatgtttgcttcactgccttgctcgattgtgttcaccaggacggcaggctattaaaatgtcaaggcacattgaattgttgttatccgggagagagacctttcc

SEQ ID NO: 462077 - DNA, 122 bp, Homo sapiens
aaaggatgctgtggaatcttttcacaaggagtgtatgaaagaataggcaaaaggaaaggacgcatacttaacatggaacatgaaaacctccttgagtttgccacagtatactctccctgctt

SEQ ID NO: 462078 - DNA, 122 bp, Homo sapiens
tacagagaccaagcctgtggttgaaagatatggagtcacatggcagcggccacacctcctcgaaagctaaatccatgactgggccttggtccccgcaggctcctgcctggcctgccccttcc

SEQ ID NO: 462079 - DNA, 122 bp, Homo sapiens
gcctgagacatctgccagtccacagaggaatgcgtggcaccactatggtgccatggatctcggggtactggggccactggctgtgtggaaaggaggatccccttctaggggaaagcactgtg

SEQ ID NO: 462080 - DNA, 122 bp, Homo sapiens
cccactggttcgggagacctcaaaggctccaccgccagcgcccccagcgctcactgtgtgcgccccaccccagccctgcctgcgcgccgctcccgccaccctcgcctcagtctctgggccgg

SEQ ID NO: 462081 - DNA, 122 bp, Homo sapiens
caagggagcccacgggtgggagggtcgggggcgggctggggcatggcgaactgcaggtcccgtgccctgccccatgaggaggcggctgaggcccggcgagaattcgaccgcagcgcgggcgg

SEQ ID NO: 462082 - DNA, 122 bp, Homo sapiens
aaatatcggtgcaggcggccagccactcctcaagcccggccccgcccctcctgctcccagcggaagcttttggtgcaggacttcccgggcctcaatctcctcatctataggctgggaacaaa

SEQ ID NO: 462083 - DNA, 122 bp, Homo sapiens
cctgatgagagaagcccacaggtgtggaggggcaggccacccttcagtttccaatctcaccggtgggcacataagctattctcagctctgggtgaaccctaagggttgtttcccctgctgct

SEQ ID NO: 462084 - DNA, 122 bp, Homo sapiens
ggaggggtggacttcttgggatgggcggaaacacttacaactagggaggaagccaggctgcggcggacccagctgaccaaaggaactacagaagaggacgaagaaagcgagggggaaagggc

SEQ ID NO: 462085 - DNA, 122 bp, Homo sapiens
agcataacgctgttagtttctctcatcctcctacatctacctatctcaaccaaggtcctgcgctaagcaggggcctccaagctgggacgcagcccttactctcagggtcagcgccggctggg

SEQ ID NO: 462086 - DNA, 122 bp, Homo sapiens
gcttgccacagcgcagcctcttctgtccctttcagtcatttgctgtacttccctgtggcacgttaccatggaagccgctccagggtgggtcagggtgcaagctgctggtgaggtttggaagc

SEQ ID NO: 462087 - DNA, 122 bp, Homo sapiens
agttttctctctcgccagagcccgggctttccccgcccctgcctgcgcgcctgacctcggcgctgggctggttccaagggcagccgcgccagtccccagcgtcctgtgcctgcgggcggact

SEQ ID NO: 462088 - DNA, 122 bp, Homo sapiens
tgctcaaaactctttccctacctacacccccttgagggtgagggttcagtccgcagctggcgagtgggacgtgggtgggggcgatggaggcgcgggcgggctgcttggagggagtcagcctt

SEQ ID NO: 462089 - DNA, 122 bp, Homo sapiens
gtgtaacaccgtgtgaaaaacacaaaggcttgcagccctctcactgcagacgtgggaacacgactctgtttaaaacccttcaaagcccgccttcttgccgtgtgatgctgcctgggccagca

SEQ ID NO: 462090 - DNA, 122 bp, Homo sapiens
tagaaatcgccggtggaacttgcctgttaccttcttacaattccccccgcccctgggcaacgcaaaagccgtcctaagtgcgataagagcatggagtgaagggagttatttctggagtttag

SEQ ID NO: 462091 - DNA, 122 bp, Homo sapiens
agaaaagggacgcgaggcggcgctgtcacagcattctatgcgccccagcgccctgggccgcgctggtcttgtatcatttcagtggtccctcccgtctttgacggggccaaactcggggtgta

SEQ ID NO: 462092 - DNA, 122 bp, Homo sapiens
ccctaaagacacccggccctggctgtgctgccctctggaaagcagctctgataccaggagcggctgtcagggcacagggggaaaccccgaggccatcctcgggggtgattcctgaaaggggc

SEQ ID NO: 462093 - DNA, 122 bp, Homo sapiens
tctcttgcctgcatctcccccttgctccctctgcctcctgcccaaccccgtgcttccccacgtggcagtggtgtgcctagcctcctgcttccagggatctgtgagtatcatcagttccttcc

SEQ ID NO: 462094 - DNA, 122 bp, Homo sapiens
tcggggcaggcaaagggtttctcgcccgtgtgtacgcggagatgctgcgtgagcgtaggccgctggcggaaggccttgccacactcggcgcaggcgaagggccgctccccggtgtggatgcg

SEQ ID NO: 462095 - DNA, 122 bp, Homo sapiens
agtttcagatttatgtcctggtttatactgccacattcattcttggaggtgagtacatttcgatcttggtccggctgcgcagagagtcaaagcaggaaaatcacagattcttcccagcagtc

SEQ ID NO: 462096 - DNA, 122 bp, Homo sapiens
gattattgcttccctttcaaaggcgcacagtccatccctttaacaatttgtgtctgacaccgagataaaactcaatagattacagattgttgaatctagcttcttactgcaaactactgtaa

SEQ ID NO: 462097 - DNA, 122 bp, Homo sapiens
accggtgggaatccagctgctctgctcagtgttccgttcaataaactagcattgttgcttcgcaaagtgcttttgcttacattattcatttactccggtaactcagtaaggttattcccatt

SEQ ID NO: 462098 - DNA, 122 bp, Homo sapiens
ggcgccgacggcggggcctccttattccctcactcccgcccctcctccccttccccaccacgccccctccggcccgcggccgcctcttcccaggctctggctgtctcgctgctccagggaaa

SEQ ID NO: 462099 - DNA, 122 bp, Homo sapiens
aggggtgtcggggcaaggaggcggatcaggctaggtcagacattggcatcgtggagccgtcgcctcctcccagggaatggggagcctggaacccattttccagatgagaaagactgaggttc

SEQ ID NO: 462100 - DNA, 122 bp, Homo sapiens
ttccacagccctatgaatgcatccccaaccagtcagcattccctgttccctacccaactgcgtgccaaagccctagcctctgaatttccggggaggctgacttgagtaataaaactttagtc

SEQ ID NO: 462101 - DNA, 122 bp, Homo sapiens
aaacaccaagggcagatttgttttcagagcctggaccaggactctgggtcttcagggctccgaggatctggttgtctccccatcttcccagcacgatgcctcctcagtcacccccccttggc

SEQ ID NO: 462102 - DNA, 122 bp, Homo sapiens
caggaagttcctcccttctccagagcgccgtcgaccccacgccacgcagaggtgaagatacgcaggacgtcctctaaagcaacttccgtgggtgccaggttgtgggctgggggcggtgctga

SEQ ID NO: 462103 - DNA, 122 bp, Homo sapiens
cagggacacaggagggagctgggcgggggccgcttaagggtcagggtgcggcgtggcgggcgaggggcgggaacggctggctagggttgttcccagggcaagcagctggagacccgccccgg

SEQ ID NO: 462104 - DNA, 122 bp, Homo sapiens
cttcattgtgaatagacagatctacagaggctgaggagttgaaagactgtatgtgaagggcgtgtacaacacatgcactcagaaaggttctttcaagtgtactgtgcactgacttagcaatc

SEQ ID NO: 462105 - DNA, 122 bp, Homo sapiens
cccgcggcgcggagttggcggtcatatcccgcgtgagcaccaggtggcgctagggccccgcgcttgtcctggagccccggcagctgctgcgcttcccccaattaatctctcttctgaaacca

SEQ ID NO: 462106 - DNA, 122 bp, Homo sapiens
cccatccagcgccacacacggaggctcaggaggtcgtgtgtcccagccccactttattttcgaatttaaaactcagggtcaattcctggggttcccaggcaaccctccctcgagcccactca

SEQ ID NO: 462107 - DNA, 122 bp, Homo sapiens
ccctccccgccaatcggaaccgatccggaagtgacgtcagccgactgtctgggtccgaggcgccgtccgggccgctctgggaagctaggacgccgcgtgtcggctgcccacctccctggctt

SEQ ID NO: 462108 - DNA, 122 bp, Homo sapiens
tgagtccctgccgggacctggcgctcgctcgctccctccctccctccctccgcgggtcgccggctgctttgtctccaaaggctcttttcagggccacttaaccccgttagtgaaataagctg

SEQ ID NO: 462109 - DNA, 122 bp, Homo sapiens
tggtagccaggaccaagcacagtactccagatgaattctgcctagctcattcttacgtgtcgatcactttacaagagttttcatagaattctcacagtaaaccgagataggtgctacaatga

SEQ ID NO: 462110 - DNA, 122 bp, Homo sapiens
cacactcattcttgagccctaatttgaagccagacagcaggcaaagaagaccagtcccagcgtgttttttttccagtctctccctctgagaaagcttcagacaccaggctgggttggccagc

SEQ ID NO: 462111 - DNA, 122 bp, Homo sapiens
ggagaaagcgtccgaggggcgtggagccagggtcctgcggtgcctgctccgggaatactgcgagtcggctggagctccccagccgctccggagaactgggggagccgggtccctggctcggt

SEQ ID NO: 462112 - DNA, 122 bp, Homo sapiens
ctaacgtggtgaaccctggtctcccttccccagctcagctccggggagggggtcgcgggccgcaggaggaagccggagcgcagatacctcgattgcaactcctctgagtcgacgccggcctc

SEQ ID NO: 462113 - DNA, 122 bp, Homo sapiens
ccaggggagggcggagactgtggctgacaagatgggtggcaggcccttccctgggggtatcgaggtagggacgtttgtggctacgtctgtcctagaggaggagacgatgccaggggagaggg

SEQ ID NO: 462114 - DNA, 122 bp, Homo sapiens
cgcccctggcaaagctgactaaggcgcctgaagtgacgtcattgcctgcatcacaacaggcgtcgtccggctgatagcttatcgcaggctctgaggggcgggacccaactgattgtcaaagg

SEQ ID NO: 462115 - DNA, 122 bp, Homo sapiens
ctggtgcagccttcactgcaaaaacacaacaataaataacgcaggagatgacctagaagccgaaacgcaggtcacctgtggttaagggggaggcgtgcgccctggagggacctccaagtcac

SEQ ID NO: 462116 - DNA, 122 bp, Homo sapiens
tactgcgaagcagccctcatcttaaggtggctcaacaccacacctgagatctagcccatgcgacagtatggaagcaggaggccctactccaccacagaaagaacatttatgggcgcctaagc

SEQ ID NO: 462117 - DNA, 122 bp, Homo sapiens
gttaccttttggcaggcacattttcctcctgctcgaatgctataaacaccccagcagggacgataaatagcaatgtagacagcaagggaaaatatttgctaaaagatactcctgcactttct

SEQ ID NO: 462118 - DNA, 122 bp, Homo sapiens
atgtaggcctctggcctttagcagatgcttattaaaatgccagtgccattcattccccttcgtcctctactctatatcagaaggtatgggatgctatgatgtcttcctgttaaatttttgtc

SEQ ID NO: 462119 - DNA, 122 bp, Homo sapiens
tcagtggcgtcggagtggaaatcctccaatcgggagtagccggagagcaggggcggcttccgggatttggcggtggcctttgttggctgcagtaagagctcagtctcttcaccaggggctcc

SEQ ID NO: 462120 - DNA, 122 bp, Homo sapiens
ttgatttattcattccataattcacaataagggagctttcaagtttaccattaagtccaacggtcatcactactgaactaagttgcaataaattaagggcttccgggttaggaacatgtaaa

SEQ ID NO: 462121 - DNA, 122 bp, Homo sapiens
tcattttggacataactgatgtctcactgagacagcttttcaaagcatgtctgcaaacaccggacccccggggacggtgcgtgcgtgtaggggagggaaattccagggtttcatatatcaag

SEQ ID NO: 462122 - DNA, 122 bp, Homo sapiens
cgcctcgctggacacccaaggcagcccatgtcctgaggtacagggtttccccaaggaccgcgcaggtgctgcaccccttcccggcatcccgggcacatcccgttggctggcgaggagacagc

SEQ ID NO: 462123 - DNA, 122 bp, Homo sapiens
ccgtgcgaaagaatgaggagatcctggggccttacctactagcggaatcgactgaagagacgcctgccagtgcgggaggtaggaagctcgatccccaaagaaaagagcgagtgggcaggcag

SEQ ID NO: 462124 - DNA, 122 bp, Homo sapiens
tctgggaggcctgtaaggtgcctgtaatcccagctcctcgggatgctgaggcaggagaatcgcttgaacccgagaagtgaaggttgcagtgatccgagatcgcaccactgcactccatcctg

SEQ ID NO: 462125 - DNA, 122 bp, Homo sapiens
ccataagggacagggtggggtccgggtgctagtgtcagtgtggcgttggttccctgaagccggaggtgggactgggaggtggagatgaggccttgcttgaagctggcagagagaccagcagg

SEQ ID NO: 462126 - DNA, 122 bp, Homo sapiens
ttgatggggaagcctggaagagacaggctttaggagtaagaacaagagctccattttgtacgtatgagagagatttattaaagatctcagagaagatgtcccataagcagttgaattcatga

SEQ ID NO: 462127 - DNA, 122 bp, Homo sapiens
agaacccccctgataagccgacgtaggtccagatctcgaacttcaccagtcagccggagacggtcaaggtccaggacttcagtgactcgacgaagatcccggtcaagagcatccccagtgag

SEQ ID NO: 462128 - DNA, 122 bp, Homo sapiens
ttgttagacacagaagggtgtgtagcaaagtgagccccacgcatgcgtagactcttccctcggcttctgctctccatggaaacacaactgatcacatcatgattgatcacggtagccctcta

SEQ ID NO: 462129 - DNA, 122 bp, Homo sapiens
ggaaatcatatggttgtgatatgttttggcgcataggagacagaaatagtgattatcaggcgttgagcctttttgtagtatttttagtctttgatactctgtaagtgctagttcctaaggca

SEQ ID NO: 462130 - DNA, 122 bp, Homo sapiens
caggaaaagttcctgatgccagtcttccaaacgctcaatgaaataaaaaccagatagcaccgcagaggaggctgagatgcaacgacaaaagctgtcgtaattattaataatacctaaccctg

SEQ ID NO: 462131 - DNA, 122 bp, Homo sapiens
ccctccgcccccacggctttgccccaacccctcaaaccagctcctcaggctcagggtgaccggctctgccaggacccaccagccaattccaagtcgagcaaaagaatccagcctggcagcac

SEQ ID NO: 462132 - DNA, 122 bp, Homo sapiens
tccgggagctgggcggccatttaccaggtgcgggagcgccccggagcgtggcgggcccttcgcttaggccgcttgaacatcccctcagacctccaggccccagactccctctgggtcttgcc

SEQ ID NO: 462133 - DNA, 122 bp, Homo sapiens
ccccatctctactaaaaatacaaaacattagctgggggtagtggcggccgcctgtaatcccggctactcaggaggctgaggcagagaattgcttgaacccgggaggcagaggttgcaatgag

SEQ ID NO: 462134 - DNA, 122 bp, Homo sapiens
gtaaaaaatttcctctgatgttaattgtagagttgtgggggacggcctatttttctctaccgttgggactggcagggcattgcccaccatataccatagtggtcaccaaaaaagaaacctct

SEQ ID NO: 462135 - DNA, 122 bp, Homo sapiens
ttgatgttgtagcgccggcgcagcttccccatggcgactaggccagggtgggcgctccagcggccggaccagcagagcaatccgaaacccagcccacgtgggttcccagaccaccaactccg

SEQ ID NO: 462136 - DNA, 122 bp, Homo sapiens
agggctattcttttccttaatggtgtgaagggaaactcagccgcgccttccacttcttcccggcttctgtgggctgaacctgacccagagtcagatgaaaagtaggaaccaaatgccttcca

SEQ ID NO: 462137 - DNA, 122 bp, Homo sapiens
agcaaaacggcgaggaccgtggcgcggggtcgggcgggaaccggagagacctggggcctgcgcctcggctgctaccggcctgggttccacagcttggcgctcaaagccagcccttgcccgga

SEQ ID NO: 462138 - DNA, 122 bp, Homo sapiens
acctcccagttcaggaagtccacctgcttcagcagcttctgctcgtggaacttaagcttccgcaccatgatggcggcagccgcagccgcaggacccgaagctgagagcgcgttctggcatcc

SEQ ID NO: 462139 - DNA, 122 bp, Homo sapiens
agaaatgatgtcatgtatgtctcaattgaataactgtctttgtttcttgcttctgttatacgcttccccctgcacaaatcttcccccacccacgaaatgcttaaaaggtaacttgactcttt

SEQ ID NO: 462140 - DNA, 122 bp, Homo sapiens
cccacaagaccctagcggaaacctgggccttagtcccgcggtgcttcccaaactgaggaccgaacggctggccagatcttacccagcccacaatgctcccgcccgagctaactcctcccgtc

SEQ ID NO: 462141 - DNA, 122 bp, Homo sapiens
tgtccacagagaaacttctcagtggttaacacacagcagagagtaatccaataataatggcgtcgttattgcgggaatcctggttccccatatgctaaaccttcatccctaaggaaactcag

SEQ ID NO: 462142 - DNA, 122 bp, Homo sapiens
tgttatgtgcgctctggcacaggctgactcatgtgtgaagtttaaaggtggggcccctgccgcagacagccttcctcacctgagtcaggcaggcccgggcactgagcaggaagggcaggtat

SEQ ID NO: 462143 - DNA, 122 bp, Homo sapiens
cacaaaggaacatcattgccaatcacaggcgatctgtgctttggaaacctgaaaccacagcgttttcttcatgtgggcaaagtacatcaaatctgattaaaataagcttacactacaaattg

SEQ ID NO: 462144 - DNA, 122 bp, Homo sapiens
tcgagacttagaactgagagtgatagcacgtgacagcggggacccgcccctcagcagcaacgtgtcgctgagcctgttcgtgctggaccagaacgacaatgcgcccgagatcctgtaccctg

SEQ ID NO: 462145 - DNA, 122 bp, Homo sapiens
ggtctagttccatctatgcgatgctccccatctcttctcctgctccattcccaggagaagcgccttgagtgtgttgctgtcaccctcttgcacggacgcaggtgtatgcacccgcgtcacac

SEQ ID NO: 462146 - DNA, 122 bp, Homo sapiens
cctgccttgggcttaggtagtagagtctgcagacctgtgggcctggcccggagaggacctcgtgagtcttctgacatggactctgaagcctcaaaccaagagaggtgtctgtctagccctga

SEQ ID NO: 462147 - DNA, 122 bp, Homo sapiens
ggcctgcctgtcctgcaccctgtgcagatgcctcccactgtccgccggggctgctgggcacgccctggctggtctcttggactaggtaagctcatgagtcctctggccgctcctgctccttc

SEQ ID NO: 462148 - DNA, 122 bp, Homo sapiens
ggcggctgccctctgctgactgcaaaggcaaaccacatgcagatggcctgggcctgccagcgatggatcctggggatccggggaaccctgagattgggtggccgcccaaggaaggggacaga

SEQ ID NO: 462149 - DNA, 122 bp, Homo sapiens
gatgactttgaatcccagttgtcgcccccagggtcagccaggagactagtcagaagcaaacgcgcctgcggcaatccgcccgatgcctttggtctctctcgggcttccgtccacccgcccct

SEQ ID NO: 462150 - DNA, 122 bp, Homo sapiens
agaaagctcatctgaaagtcctcatgcatgcattcctacaggctttaacaagctggtgtacgcgacacagtagtgtttacaggcagcaaaaggattaccactcacatctagtttgtaaaggt

SEQ ID NO: 462151 - DNA, 122 bp, Homo sapiens
agatcgagtcggcttgctacaagtgggccaaaaagttggccaagttttccacagcccactcgaggcggaagtccctctcccctccccgtctcaggggcggccacacgtcccacacggacggg

SEQ ID NO: 462152 - DNA, 122 bp, Homo sapiens
gagcagcctcgtcctctgattccaccacctgctctccatatccctctcctgcccctcccccgtgttaacagcctctcccaggaaggggcctggaaactcaggctgcgctctaagtggccaat

SEQ ID NO: 462153 - DNA, 122 bp, Homo sapiens
ggtgtctcctagccggtaaagtccctgggactgaccgggctggttgcacgcttactggagcgggcacatgggtagcctgttgaacctgggagggcagcgcgatgaccgaggctcgtcctccg

SEQ ID NO: 462154 - DNA, 122 bp, Homo sapiens
caggtgcttggtgaccccagtggcccaagggaccgtcctgggcagagtcccctccccagacgctatgcttccctgcaggcactacggggtgcgcacctgttaggtcagctgcgtctcagatg

SEQ ID NO: 462155 - DNA, 122 bp, Homo sapiens
ggaggtggcagttgggtgccgagctctgggttttgtccaggtggcaacctctgggccagccgcacctcggcgcctgtcttggaggagggcggtgcccacggtggggcaggggctttggcctc

SEQ ID NO: 462156 - DNA, 122 bp, Homo sapiens
gctgcacgggggtagtagggggtggccctgaactggggcctggccctggctggcctctcccgccgcctcactgggggacaggtacgggccggggcgttatggcatggcggggtgtggggggg

SEQ ID NO: 462157 - DNA, 122 bp, Homo sapiens
ttacagctcttaaggcagcacgtctggagttgttggttcctcccagtgggctcgtgggctcgttgggctcaggagtgaagctgcagatcttcacggtgggtgttacagctcataaaagtagc

SEQ ID NO: 462158 - DNA, 122 bp, Homo sapiens
agacaattagctaactttatagagtgagcagtgaaggaggaaactctgagagaagcccgccggctcttacctgtgagctgtatgccaaggagaagaagcaccgcacgagtagagctcttgcc

SEQ ID NO: 462159 - DNA, 122 bp, Homo sapiens
caggcagcaggggcggcggcggcctggctggctgcgctgcagagcggagagcaggagcggcgtgggaggaattcggagcactttcgccgcctgcctccttttactgctggttgccctcaaag

SEQ ID NO: 462160 - DNA, 122 bp, Homo sapiens
agagcactccggctcacctgggctcctggcgtgtcatttgctggcttgaataaagatgtccgccttatccagtgcctgagtgtgcgagagaggcagatgcctccacaagtgcacctctgacc

SEQ ID NO: 462161 - DNA, 122 bp, Homo sapiens
cgttaaaattaggcctccgaccttcagaccagcctgtgggcttttttaagtcataaaactcgcggaggtggaaggccccggggaggaagaggggtgcattctagagctttcgggccgacccc

SEQ ID NO: 462162 - DNA, 122 bp, Homo sapiens
aaatgtttatatgagtacacgtataatgcattccaggaacatattttttaatgtgattgtcggcaaacagttatgaagtggcattatttcttcatgggccttcagggtagactcttaaaaat

SEQ ID NO: 462163 - DNA, 122 bp, Homo sapiens
tcatcttatttccttctctgggagcctctgggaggaagtacagcttcgggcgtttctcaacgtgtgacatagtcccattggcagaacatgacatgattttcgggatgtttcatttatctagt

SEQ ID NO: 462164 - DNA, 122 bp, Homo sapiens
atcatgctgagccatgcagcagaatgaatttctctccccctggggaatgtgttgtaaatacgaataaggggggaaagctgagtaatcttgagtgcttcatattctcatgttctctctaccaa

SEQ ID NO: 462165 - DNA, 122 bp, Homo sapiens
tcatgtgaactgaaaggtaccacagcttttatctcccctttaaaaaacattagatgcaagcgcttgtctttctttaggccaaattaattagagctcttttacagacatcacatataatacac

SEQ ID NO: 462166 - DNA, 122 bp, Homo sapiens
ctaccagtacacggtggccaacaaggtgcgcgggcggtggctgggccgagctgtgtgcggcggcgccctctgctgacggagagcagagatgacaggcggctgcaccgacgcactttcttctg

SEQ ID NO: 462167 - DNA, 122 bp, Homo sapiens
cttcttattggccggcgccgcggtgtcgtcagagcccgggtgggattccccggcgcgcgccgcggccccgcccctgccggccctctctgggccccgccccgccaccgcctccggccgaggcg

SEQ ID NO: 462168 - DNA, 122 bp, Homo sapiens
agtttgctcccccgcagaacggtatccccgcggaatacacggcccctcatccccaccccgcgccagagtacacaggccagaccacggttcccgagcacacattaaacctgtaccctcccgcc

SEQ ID NO: 462169 - DNA, 122 bp, Homo sapiens
ggcttcccacggtccctctatattcacctaaagtcagccaagctcagctggagcttcttccgggctttgttccgggtgatgtagttggtggccgagcctcgttcatactgggagaggaaaaa

SEQ ID NO: 462170 - DNA, 122 bp, Homo sapiens
gtggcgcagggcaggtctgcccggatggctggcccacaggcccgccccagaatccctgatcgtctatggcagataatgcgggcttgaattcgcacccatcccaatgttcattcacatcgagc

SEQ ID NO: 462171 - DNA, 122 bp, Homo sapiens
aggtccaagtcctcgtcatctggaatctcatccaggtgatacccatcctgaagcagctgccggctcacatcctggttcacctgctaagagaaggagaggagggaactataggccaagatgca

SEQ ID NO: 462172 - DNA, 122 bp, Homo sapiens
agtcatgagagaatcttggcatgctcaggaaccgggactcctcttcagaatgaccctgctcgcctccggaggggctgggatgctctccgtgcgctggaggatcataggcccgggcccgccgg

SEQ ID NO: 462173 - DNA, 122 bp, Homo sapiens
tcctccaaaaactccgccccctcatccaggtgactattcccggtcctgtgcgaccctctgcgcaagagcgaccctgggacacgggggtgccctgtacccccagctcagctgcccgtgcccta

SEQ ID NO: 462174 - DNA, 122 bp, Homo sapiens
gatcttcaagcatttcaaagcacagtggtgaaataagattttgttttagaagggttactccgactacagtatagaaaataattaggcaagagtgggaataggcatatgagttaggaggttga

SEQ ID NO: 462175 - DNA, 122 bp, Homo sapiens
acggacatcaatgagctgactaaccacatggacgaggtgcagatccccttcctggactaccggacttacgccgtgcgcgtgctcttcccgggcatcgaggcccacccggtgctcaaggagct

SEQ ID NO: 462176 - DNA, 122 bp, Homo sapiens
gggaagccaggctggggaatcagagctcttaaataatgtgtcacagtgcatggtggcccccggtgggattcaagttgaggttgatcttgatctacaattgttgggaaaaggaagcaatacag

SEQ ID NO: 462177 - DNA, 122 bp, Homo sapiens
cccggcagctggcaaggcgaacccatggggcggttacagtgtctgcaacgcagacacaagcgacagagacttgatcagaatatacaaggaactctgcaagtcagcgatggtaagaagcaggg

SEQ ID NO: 462178 - DNA, 122 bp, Homo sapiens
tcggagagcagcgcccccgccgaggacagagccccccgtgagtagtgccccggcccccaccgaggacagagcccccagtgagtaaggccctggcccccgccgaggacagagccccccgtgag

SEQ ID NO: 462179 - DNA, 122 bp, Homo sapiens
gtatggaagacgcctaagaaagggcttctctttccactcacgaaaatcagtgtgtgagctcgaagccatttcccagcgtgtccgcctcaactccctcattcaacagatgaggaattcctcca

SEQ ID NO: 462180 - DNA, 122 bp, Homo sapiens
cccatgtgaactagttcatcatatccagggatgtggagggtgatattacacccaatatagcggggggtgttcactcccctgtgatctggttcgaaatattcatggaaggagagggtgatgtt

SEQ ID NO: 462181 - DNA, 122 bp, Homo sapiens
tgttgctatcactcaagctccacacctagcgtcatggggccaagcggccagaacagcctccggcaggtgggcagcacagaccaacttcctctgcaagggacgacagggagggtggtggctgg

SEQ ID NO: 462182 - DNA, 122 bp, Homo sapiens
caccactcactgataacacgaatgaacctggaaggaattatacggagtgaaaaaaggctccgctcactgataacgcgggtgaacctggaaggaattacacggagtgaaaaaagaccctgctc

SEQ ID NO: 462183 - DNA, 122 bp, Homo sapiens
cagctctgttgttaaccctcaaagtgccaaggctctacagctcagagcagagttgggggacgcaacatggctcagagcagagcatgggcactgggtgggtgaggctgggtgctgggcagagt

SEQ ID NO: 462184 - DNA, 122 bp, Homo sapiens
cccaagctatcctcccgcctcagcctccggagtggctgggattacaggcccgcgccaccacgcccagcctcaatatctccttgacgatgaaatgcatagatgaatgaatgaatgaatgacct

SEQ ID NO: 462185 - DNA, 122 bp, Homo sapiens
ggtggaggtggtcatcaagcacaaccggttcacaaaggagacctatgacttcgacatcgccgtgctccggctcaagacccccatcaccttccgcatgaacgtggcgcctgcctgcctccccg

SEQ ID NO: 462186 - DNA, 122 bp, Homo sapiens
ctccgtttgcttccagtagctgctgggagcgagggaagaggatatcggtaactttgggggcgccaatgtggcttctgtgtctgccccttgaaagtttatacccggcgcttaacaaatccttt

SEQ ID NO: 462187 - DNA, 122 bp, Homo sapiens
cctgtgcgttgcaggagatgcagcagcatccatgaccgcaacccatcagaggtcagggtccgccccctagtggtggtaataaaaaatgcttccagatgaggttaagtgtccctggggaacaa

SEQ ID NO: 462188 - DNA, 122 bp, Homo sapiens
ccaagccctgggttgtgtcagattttatatcagagataagttagcgagactggaggatgccgtagcagcctacctgcctgaacacgaactgaacatcagagaggcctttctttccacaccgc

SEQ ID NO: 462189 - DNA, 122 bp, Homo sapiens
gcgagcaagccgggacctgcgcaggcgcagaccatgaccgaccccggggcgggggcgcagcgtgacgctctgggcgccgctgggatccgagaagaaacccttttaaagcaagcatggcaatt

SEQ ID NO: 462190 - DNA, 122 bp, Homo sapiens
actcctcagcgcagatgacggagagagggcagcaaaccgcgagggcccgcgaggaccgggcgggcagcgcctcaacattgacgtgggtctctctccggcctcacttgcgggaacacgtccct

SEQ ID NO: 462191 - DNA, 122 bp, Homo sapiens
aatcattttaccacgtggtaaatgtggtacttactctctgctacctcatatatgtcacctcgcttatgatcaaataaaatgggcatgtagatatgctttatgaatagtaaaaacatgaatgt

SEQ ID NO: 462192 - DNA, 122 bp, Homo sapiens
ggctccaccttccccaggaggagtggcagagtccagccagcgctcggagctggaggcccacgtgggagcagtgagcggctgtaagcaggggagggtttggggtgggctccggtgggtcagtt

SEQ ID NO: 462193 - DNA, 122 bp, Homo sapiens
ctgcaaggcacaatcctgcagtacgtgaagacgctgatggaggtgatgcccaagatctgccgcctgccccggcacgagtacggctctcctggtgagtgcgggcgtgtggagctcacagtgct

SEQ ID NO: 462194 - DNA, 122 bp, Homo sapiens
ctgacgatgggagcaacatgatggtctatcaagaggaaaaaggcaagcgtcatccacagccggcctggccgctgacagccaggcaccgtcacatccacctggcctggagaaccaggctcaga

SEQ ID NO: 462195 - DNA, 122 bp, Homo sapiens
ggttctggaggatctgggtgacatcagagaatcagagggagaaaggaaacaggaggcagacgctgtgctgggcactcaggacacaccccgagtgacctcacagcccaatggcctcctgttga

SEQ ID NO: 462196 - DNA, 122 bp, Homo sapiens
gcaggggcaaaaagccacggcggcagggagcaaaaacccgcgggggtaggcgcaaaaagccgcggcggggggttaaaaagccgcgtcagcaaaacccgcggcggcgggcgcaaaaagccgcg

SEQ ID NO: 462197 - DNA, 122 bp, Homo sapiens
cccatgcttcccagcagtcacctgcagctcctcatactggggaccaaagaagtggcagtgcgctttcaaatggccccagcccaccctcacagctggaggccccatgcaagttgagtatatct

SEQ ID NO: 462198 - DNA, 122 bp, Homo sapiens
cccagggaattctgggaagtgtagtccagacgctcagtggagtcgcggtcagtttggctccggctggcgggtcccggggaattctgggaagtggagtccaaacattcggtggagtcgcggac

SEQ ID NO: 462199 - DNA, 122 bp, Homo sapiens
aaacagcaggtggtgccagatgacagatggtgtgggagcgcgttccccggtaggagggggcgcgagcgagcaagcaggcaggcagctgccaggagctcttccctgctcgctcacgcctgctc

SEQ ID NO: 462200 - DNA, 122 bp, Homo sapiens
cttcttctcatgacttcatgatctgaatccccccgagtcattcattctccatgaagtcatcgattttccaggtgttggtgaactgcctgtgactcctctcctccccggcccctacccctcag

SEQ ID NO: 462201 - DNA, 122 bp, Homo sapiens
ttaacatggcgaaaccctgtctttactaaaagtacaaaaaattagctgggtgtggtggtgcgtcctggtagtcccagctactcggggtgctgaggtgggagaatcacctgagcccaggaggt

SEQ ID NO: 462202 - DNA, 122 bp, Homo sapiens
ctcgctgacttcaagaatgaagcctcggacccttgcagtgagtgttacagttcctaaagacggtgtgtccagagttttttcctccagatgttcaaatgtgcctggagtttcttccttctggt

SEQ ID NO: 462203 - DNA, 122 bp, Homo sapiens
cacgtagaatgctccagaggctgcccagtctgtgatccatggcacagatgtggggccgcccgcctccacctggtcccggctccagccctcactgatgtgtgatccgggggtgaggctgctgg

SEQ ID NO: 462204 - DNA, 122 bp, Homo sapiens
aggcgttgtgcgtagaggatcctagaccagcatgccagtgtgccaaggccacagggaaagcgagtggttggtaaaaatccgtgaggtcggcaatatgttgtttttctggaacttacttatgg

SEQ ID NO: 462205 - DNA, 122 bp, Homo sapiens
cagtgtttctcagcggaggagccgccactgcagctccaacatcctccccgccaccgacgccggctctgtgagtttcaatgcttcggatttctcgtgctagaagcaggcatccctttcagcaa

SEQ ID NO: 462206 - DNA, 122 bp, Homo sapiens
gactgccgggccgcgataagcgccctgcgacccggctgaaagcgcacacgtgtcctgccgcgctgagccgccagcaggactggtaccaccgccctccctcggggctagggtcaccctgccgt

SEQ ID NO: 462207 - DNA, 122 bp, Homo sapiens
cgctctgggcaggttttgttcaagtggtacccgaggggacgcaccatttaaataagcaggcgaccggtggaggaatgtgggacaaagggcaattgtcacgccttgaattttagctttccagt

SEQ ID NO: 462208 - DNA, 122 bp, Homo sapiens
ccacaaccggtcgcacacaggtaagaggccggggccgggcggcttggcccatgaagggggcgctcagctgagaccggctgggcaggtccccagggggaggggactgttaagtaaatcccggg

SEQ ID NO: 462209 - DNA, 122 bp, Homo sapiens
gggcctcgagtgccgtgcccaggcccagcctggtgtccccctgggggagttgggccaggtcgtggaatgcagcctggactttggcctggtctgcaggaaccgtgagcaggtggggaagttca

SEQ ID NO: 462210 - DNA, 122 bp, Homo sapiens
tccggcggccagcgattgggagatgcaaataccggcttctctgcccagcaacgggtgacgcggcgcccgagcgcgaggcggggcccggccgcagcccaagcgggcacctcggtgtttacacg

SEQ ID NO: 462211 - DNA, 122 bp, Homo sapiens
tcccgcgtatgtcagtaggaagcgttcttgatgcggagcgaaggctacttggcggtgttccggctctctgactctgaagggcctgcccgtgttccttcctgaggctcagacaagcccatctc

SEQ ID NO: 462212 - DNA, 122 bp, Homo sapiens
cagcagcaagatttatcgcaaggagcaaaagaacaaggcttccatagcgtggaagggaaccggagcgcattgcagctgttggctcccgtggcctgctttaattcccttaactagccccagcc

SEQ ID NO: 462213 - DNA, 122 bp, Homo sapiens
aactaggtgatcattcaaggcctccaccaaatctgtgattctgtgatttgtctgaataatcgatgatgtgaattgcagttattccctcctccagggcagacagtatgcataaaggcagttgt

SEQ ID NO: 462214 - DNA, 122 bp, Homo sapiens
cgactctcgcgataatacgggcgggctgaaggctggtcacatcttccctgcctaaataatcgcgcccggcgttgtggggcctaagactctcgcgagacaccgtctagcacttcccgcccgtc

SEQ ID NO: 462215 - DNA, 122 bp, Homo sapiens
gtgcccgtcccctgtggccccgcggacgcagacgccagcagccggggttgttcccttggccgaatggcagagtccagttggggcttcccgaggacaagtttcccggccccacggggtttggt

SEQ ID NO: 462216 - DNA, 122 bp, Homo sapiens
tagtagatggtgtgtacttcctatcacagcgcattaaggggcacataatgcctgggactccgggatttcgagcccctgacgccagcggcgcctctgtggctctgggacctgagcgcacgcgc

SEQ ID NO: 462217 - DNA, 122 bp, Homo sapiens
cagcccgcgtcagtgtggaggacacggttgtcgtgatggcactggagctggtgatgttcacgctgtcgccctgggtgctctccacctctccctgatcgctggcagcaggtggggggtctgtg

SEQ ID NO: 462218 - DNA, 122 bp, Homo sapiens
gtgattggcagtggttgccgtggcaacgccacaacgacacgccacagaccaatagaaaagcgaaacaaaatgtttcaatgctgcactcactgtggatttaggggagatattatgaggctgtt

SEQ ID NO: 462219 - DNA, 122 bp, Homo sapiens
aggaggaggaaaaccccgggaggaggaaaggcaggcagaaagctggagctccaagagtcacgcaggtacaaggacaaagaatcgtcaaatgagaataccaagaagagatagacatccatgat

SEQ ID NO: 462220 - DNA, 122 bp, Homo sapiens
ttctctaataagcctaggaagacaggattgtgctaatgactcagtcctaaggaatagatccgtgtaaacagtgaatgtggccaccctaccattggtgatgtagtgcaagtgatgggggtata

SEQ ID NO: 462221 - DNA, 122 bp, Homo sapiens
ccaccgcaccccgtgtccccactccactgggggtctgaggctgaggcctgagctgctgtgcgcccaggttgggctgcaggacccagatatggtgttggatggaggggctcagaaataggaat

SEQ ID NO: 462222 - DNA, 122 bp, Homo sapiens
tcctcctttagtcttcactctgccaagctaggcagtctcacacatgtgcactcacgtggccgggtgtcccctttgcccacagacgcggatcttggtcacgcacagcatgagctacttgccgc

SEQ ID NO: 462223 - DNA, 122 bp, Homo sapiens
tcagagtgtgaagtcccttttgaagttaacaaaaattgagtccctggctgggaggtcccccgagtgttccgctgtgggctggaggtggcgtttctgtcgtgatttatgtggagtggttcaaa

SEQ ID NO: 462224 - DNA, 122 bp, Homo sapiens
ctacagacttatatctgtctcagacggtccccgcctggggacgtggcttctggagtgtgacgaataagtgcaggtgccatcaggcgtcacccggccacgggaaaggtccttgagacatggca

SEQ ID NO: 462225 - DNA, 122 bp, Homo sapiens
caccccacgccctgggagtgaggcggcaagggacaagtctcccgccccctagacttgcctcgcaaatacttgcgggtcgagggcgcgaaggcagcaggatgcagcgatagacttggactagg

SEQ ID NO: 462226 - DNA, 122 bp, Homo sapiens
tcaacatgttgaatattctctacattgaatgtagaaaatcatcctcgcctttggatgaaacggaggcaccgcgcttggagccgcaggaaccacgatcccgccatggggctggctgcctcctg

SEQ ID NO: 462227 - DNA, 122 bp, Homo sapiens
tggggcttggaggtggcgagcgggagagtgaccacgcccctctcttgcagggaacccgagcgtcatgttagggtgaagcagaggacctcagtgctgaacatgctaaggaggttggacaaaat

SEQ ID NO: 462228 - DNA, 122 bp, Homo sapiens
ctggaactggaaaagccaacccctaaaagctcagggaagagagcacgcctgccccgaggacggacggtcggagaaggcagtaggtaagcagcaaagagacaccaatccgattggctgaaggg

SEQ ID NO: 462229 - DNA, 122 bp, Homo sapiens
accgcgtcgctccggaggcgtttacaagcgagcacaagagcctccgccggctccgcactgcgcttccgcttcacccggagtacagcggtcctggcggcctccatagtggctgccgctgagca

SEQ ID NO: 462230 - DNA, 122 bp, Homo sapiens
ccaggacccagttcgtgcagatggtggcggagctggcgactagaccccaaaacatcgagacgctgcagaacgcgggtgagcccggagcccgaacccccgtcgccccccgcgcactgagtccc

SEQ ID NO: 462231 - DNA, 122 bp, Homo sapiens
cacttaggactgctgctgggtaaatgaaagcattttcaaatcttcacctctaatattgtccgctaggaggacatttctgaatttcttctctttggccttaaagttacaacatctcaaatcag

SEQ ID NO: 462232 - DNA, 122 bp, Homo sapiens
ggagcgctagtacttgcttctcgactccccggccgccgcctccggccgccccggggattccgccaccaaacgcacgcgtcccaggtgggcacccgcctcggtccgtctttgagtctgaccct

SEQ ID NO: 462233 - DNA, 122 bp, Homo sapiens
ggggaagagagcaagatggacgagtgcaatgaaactgtgaccctccttcctatgacggggcgagcgttatcatgctaaggccaggaattaggtattcttcatgcccagagaagacagacgag

SEQ ID NO: 462234 - DNA, 122 bp, Homo sapiens
cccctccggcccccccccgaccaagaaacgccaactccgcctcccattggctgcgccgcgcgtcatgtcgactaagttgggaactttgctggagcgaccgagagcctggagggaggaggcag

SEQ ID NO: 462235 - DNA, 122 bp, Homo sapiens
tccaatgacagtttaactttcagagcctttgtggtgtttgtctgcttggtggttagatgccgctagggctgccgtctcatttccccctgctgttattgctggctgtggaggcagaagggatt

SEQ ID NO: 462236 - DNA, 122 bp, Homo sapiens
gggggcggaggaggccaagctaggtgtgtccggctcccggcctgaggtggctgccaagcccgccctgcccacccagaagcctgcggggacccttccccggtcagctcccctgtctcaggaca

SEQ ID NO: 462237 - DNA, 122 bp, Homo sapiens
ctctgggcaaggtggagcctcccgcccctcctagccccgggagggaggttgggagggaggcgggagctcccatcacaaggacagtttggaccttgcacgcatcgtccccgtcgctcgcgccc

SEQ ID NO: 462238 - DNA, 122 bp, Homo sapiens
gccccctgcccggcccctgcccggccccgccccgcgcccgccccctgcccgcgcccgccccgccccctgcccggcccctgcccggcccctgcccgccccctgcccggcctcccagcggcggc

SEQ ID NO: 462239 - DNA, 122 bp, Homo sapiens
ctgaggcattaacctctacgagtattataacctaagtcagaattctgggggtaaaggcagcggcaggggaaggagaaatcactcttctaggtcatcagaaaccttagtccagacccctcggg

SEQ ID NO: 462240 - DNA, 122 bp, Homo sapiens
atgtggagcaggtctggacataaagagtcttcttctcatttcctctgccaccctgcccaccgggattaggtgctggcacactcaggaactgcttgtcttcccatgtttcccaagactggccg

SEQ ID NO: 462241 - DNA, 122 bp, Homo sapiens
tcacaccatatataaaaattaattcaaaatgcaccaaagacttataggtaagagctaaaacgatgaaacttagaagaaaacatagggataaatcatcatgaccttggattttgcaatggctt

SEQ ID NO: 462242 - DNA, 122 bp, Homo sapiens
accctctcaccctagacagatgggagcctcctggggtgtccacgtgagcgcgcgtgagtccgcccccccagtcacgtgaccgctgactcggggcgttctccactatcgcttacctacctccc

SEQ ID NO: 462243 - DNA, 122 bp, Homo sapiens
tgtgctcacttttccctgtctgctataccagctaacaaagtcttctgtgacctagaagatcgaatgcaattacattgcccatatatatttgctatgctgtttgagtctcccaagggcagcat

SEQ ID NO: 462244 - DNA, 122 bp, Homo sapiens
gggggctatcttctgcttccctgactttatcaaacccctcacctgcagttggcccctcctcgcctggttctggaagacaaagttggatccagtcagaaaggaagacttcgggttgagagagg

SEQ ID NO: 462245 - DNA, 122 bp, Homo sapiens
gggcactcgctctccgcccttcccggaatccaaacttccctctgcagcggccgcgcttcacggagggcaagaaaagccgcccactggcgctgattcacactgaagtgtgagtgactgatagc

SEQ ID NO: 462246 - DNA, 122 bp, Homo sapiens
cagcacatgtttattgagcacctactgtgtgccaatcactgccgtaggcgtgggggatgccgcagacagtgaaacgggcaaggatacctacacttggcggggtgcacattctgctgagttcg

SEQ ID NO: 462247 - DNA, 122 bp, Homo sapiens
gggcggctggccgggtgggggctgacccctacctccttcccggatggggtggctgccgggcggagacgctcctcacttcccagacggggcggctgccgggcggaggggctcctcacttctca

SEQ ID NO: 462248 - DNA, 122 bp, Homo sapiens
tgtcaggagcaacctggcgtccccatgcctcgccctggctgggagggaggccgggaatcacggcagttctcagggaggtgcctccccaggaacaaaggggactttctccagagggcgggggc

SEQ ID NO: 462249 - DNA, 122 bp, Homo sapiens
tgcactgcactgtgactttcttccaaataatacatttggaaaggcggtaaaagcgtaacccgatggtggaaggacccggcaaacatcactctcagcaaatgatcaaggtcagtgagccgtgc

SEQ ID NO: 462250 - DNA, 122 bp, Homo sapiens
caatcacttctactctagtgtcattttcttcagggagaccacaaaaataagtccttgaagcggcacagcatgtgggctgtaaacttgctttcccaaatgtcactgaagagtttcaaaagaac

SEQ ID NO: 462251 - DNA, 122 bp, Homo sapiens
cccctatgctctgacaagggtactacatgaagtggagccaagatacgtggttctttatgacgcagagctaacctttgttcggcagcttgaaatttacagggcgagtaggcctgggaaacctc

SEQ ID NO: 462252 - DNA, 122 bp, Homo sapiens
ggtgctgacccaacccagtagatggggcagaggccctggacagaatgaggggctgtggtacgcctgtccccaccctgcgtggttgatgccgtggtggggcctggggagtctttcaaaaaccc

SEQ ID NO: 462253 - DNA, 122 bp, Homo sapiens
ccctccacaccgcttcttgcctgaggatctgaaggaaattggcactgagatccacctatacgtgtaggcaccccaggaggaagcaggtgtcacccggcctccgagggctggctgagcctctg

SEQ ID NO: 462254 - DNA, 122 bp, Homo sapiens
ggggctgctcacagcaaaagcatgactcactctgagaggagacccttctcaacaaaggctcggtgagcactgcaaatcacttcctgtagcagaagaaaaaaaaggaaaaaaagaagaaaaaa

SEQ ID NO: 462255 - DNA, 122 bp, Homo sapiens
cctccttcttggcctagcataggcgcctcagcagcgaatgcggcttgagcctcagcattccgccacaggccgtggttcagccgccgcagctggcgcgcgccgtacagctgcctcagctgctc

SEQ ID NO: 462256 - DNA, 122 bp, Homo sapiens
gaggccaggcagagacacgcccctcgcggagagcccgccccagctgggcgccgctccctgcgtgaaaatgggcccgggggctgagctagaagcccgctccccaccaccatcgcaggtcactg

SEQ ID NO: 462257 - DNA, 122 bp, Homo sapiens
agggtgatcagagatgttagaaagtgcgcctgtgttgtgtgttcactcgggacaggtccacgctctccaggcggcacccgaggcaccgcacacgccatccgcacgttcgctgctgtgcccag

SEQ ID NO: 462258 - DNA, 122 bp, Homo sapiens
cacgttctttcccttcatcttaacagcatccagtgtgtgcagctgccactcccctggccacgtccatcttccacgtcctcccacgcagccccctccgccctcctccccgagtttcttcttct

SEQ ID NO: 462259 - DNA, 122 bp, Homo sapiens
cacctctgaatacgggatgctggtgcgaagaccccatgcctcggggggcaagtgaagtaccggacaccgaagacagagccatcatgcttgcctgtgggctggtccagctcaatgccatacca

SEQ ID NO: 462260 - DNA, 122 bp, Homo sapiens
tcttggcattagctgtatattttgctacttaaaaactgagctgccgggcgtgttggctcacgcctgtaatcccagcactttgggaggctgaggtgggcagatcacaaggtcaggagatcgag

SEQ ID NO: 462261 - DNA, 122 bp, Homo sapiens
tgctgtggaccaggtgctggtgggcgggcaggtgctggtgggcaggcaggtgcaggtgggcgggcaggtgcagttgggcgggcaggtgctggtgggcgggcaggtgcaggtgggtgggctgc

SEQ ID NO: 462262 - DNA, 122 bp, Homo sapiens
gtggattcagacggcctcctccccacagcatcccagacaaagccgggctaggccccggggcgctcctggtgcacctgcaatgcggatccctcgccctgcgatcccaccccggggcagacagg

SEQ ID NO: 462263 - DNA, 122 bp, Homo sapiens
gctcaggggagcaggagtctaagccggaggccctcagcggggcggctgtgccctccccaacgcccaggacatcagcagtgtctggagacaggttggattgttatggccaaggagggagcagt

SEQ ID NO: 462264 - DNA, 122 bp, Homo sapiens
agtcagtgactgcaagaacccaccaattccggacatacttcctcttggtgggtataacctcggggccgagcctgtagcatcaggctgtgaacggagcaaaagttgaatgagagcgctcagga

SEQ ID NO: 462265 - DNA, 122 bp, Homo sapiens
gggtgggcctggctcagctcggaggaaagcctgcctgaaaaggctgcagctaggctgtcacgcttcattctgcccagcaactgatcaccctctgtcactcagggcctgagagggcgggtctt

SEQ ID NO: 462266 - DNA, 122 bp, Homo sapiens
tgttttggctcacgcctgtaatcccagcactttgggaggcagaggcaggagaatcacttgcgcccaggagttcaagactggcctgggcagctaggggtggtagtcctaaatatttgggaggc

SEQ ID NO: 462267 - DNA, 122 bp, Homo sapiens
cctactgtcaaatattctgcttcagtgtttgggcaaatatgtttatcttttcaggccttgcgtccttgcatttttattatgtccatgtaatgcctaatttggagaaaatcttcaagtcaagc

SEQ ID NO: 462268 - DNA, 122 bp, Homo sapiens
gcacacctcaggcagatgcgaaatatgccgctcctggggagcaaagatgacccggaggaccgggggagtaccttcccacgcgcacgactcgcgatcttcccagtgccccagagccacggacc

SEQ ID NO: 462269 - DNA, 122 bp, Homo sapiens
cactccacttccgcagattagggggctggcacgagtcacagcacctcgtgcgtcacttggcggcgccggacgttgggctgcgcaggatttgagacgctcccctgaccaccacttgctctgcg

SEQ ID NO: 462270 - DNA, 122 bp, Homo sapiens
tcggcctgcgtagctgctctgtgcccggcttagaggagaaggaggaggagccacttgccgcgcatgccagaggctagagtcatctaccgcgcatgctggaggctggagcctacagtggctca

SEQ ID NO: 462271 - DNA, 122 bp, Homo sapiens
tccctttagccagggggacggctccgggagggcccctgctccactccacggctccggcgtcgtttccacctcgtgctgtgctgggccttccgggagactgagcacaccctgtgaggagcctg

SEQ ID NO: 462272 - DNA, 122 bp, Homo sapiens
ggcaggctggtcggccggacactggcctggaagtggggccgggatcgagtgtcggccaggcggctggatggtccaggaaagagtccggtgtcagcagagtgcgtctcccgggagccggcaga

SEQ ID NO: 462273 - DNA, 122 bp, Homo sapiens
ggcaccctgagataggaagggctcacaccctgacaggtgcgatcagtcagggcagggaggcgggcagcaggactggccactggccccgataggtgctggtgagctgggcagacactcggggt

SEQ ID NO: 462274 - DNA, 122 bp, Homo sapiens
cccggcccggttactccctctgccaaggctcgcccccaaacccttctcgaaggagcaggacgtgaaatctcctgtcccgtctctgcggcccagttcgactggaccttccccctctggggggc

SEQ ID NO: 462275 - DNA, 122 bp, Homo sapiens
gatttgctacagcaatgccagcacacaaaaacaggggtatccataaagcacaggacttgacgccaggcacagcaggacctcaacagagggagctgccgctgctgcctctggggttgctattg

SEQ ID NO: 462276 - DNA, 122 bp, Homo sapiens
ccgcgattgggggtgaggcgggcgcgcgggacgggagtgagtcagggagccgccccctcgcgcccatcctcaccgcagccgtgtgcccgcagcccgggtcttctcgacggtgacggctgtct

SEQ ID NO: 462277 - DNA, 122 bp, Homo sapiens
cttggaggttatcagtggttgaccattagagggaggccacgccaaagtgaacaagcaaaccgctagcataggccacagccacagggcacagagggagggcaggacacaggagacaagtctgg

SEQ ID NO: 462278 - DNA, 122 bp, Homo sapiens
ccagaccccggccaccctcgattcgacaaccccagacccctgccagctgccgcgagtctccgctgctggaatcttgttagcggctgtctttttggagggttctggtttcccgacatttttgt

SEQ ID NO: 462279 - DNA, 122 bp, Homo sapiens
ctccttattcctcccatcccagagccccctagacctggacctctcctctcagggctcagacgtggaaagcctgagttcaaatcccgacctaccactcgggttctgtgtccccacaccagcta

SEQ ID NO: 462280 - DNA, 122 bp, Homo sapiens
cctgttccaggttttagccaagtttctttgttttgttctacaagatgttcaccaggtaaccgtttgggggtttttgcttttgagaaataaacagcccacggcatcctgacagtctcctctcc

SEQ ID NO: 462281 - DNA, 122 bp, Homo sapiens
tggcttaatttaattcgattggaactaagagcgctggtggtaatgtttctatttctgctccgtcattcatttcagggctaatctaatccttcagttaacacctccatcctgggaagagcatg

SEQ ID NO: 462282 - DNA, 122 bp, Homo sapiens
ccaacctcccagcagcccctggtgcgggctgtgtgcctcctatgtcgtgaggccatcaaccgggcccgactgcgggatgctggtggcttggatctactgatgggcctgctgcgggaccctcg

SEQ ID NO: 462283 - DNA, 122 bp, Homo sapiens
cgccctgtctgggaagtgaggagcgcctctgcccggcagccccgtctgggatgtgaggagcgtccatgcccggccgccccgtctgggaagtgaggagtgcctctgcccggccgccccatctg

SEQ ID NO: 462284 - DNA, 122 bp, Homo sapiens
tggaagactgctgaagataggcgcatgtctgacctcacctgtgtgctggagtggctggagcggaggcaggggaagaagaaacaagctcccgaggtgggtaccatccaagagaaatggcagga

SEQ ID NO: 462285 - DNA, 122 bp, Homo sapiens
gtgagcgggcaggaacctggcgccgccaccgagactgagcctcctgcagacgggcgaagccgcctgctgcagcccaggaagccagccctctgctcggcctcgccggcctccctgctgcaggc

SEQ ID NO: 462286 - DNA, 122 bp, Homo sapiens
cactcagggtgcgggaagcggcgtgggggaggaacggggcctggcccgggcgcccctcaccgtggcccgcccgcctgcctttgccagcagttctcgatgcagatggacctgatccggcagca

SEQ ID NO: 462287 - DNA, 122 bp, Homo sapiens
ttggggacggctttctttgctttatttaagcttgaaacccagagttcattgactggaatgcgctggtgtaacggtgggggtggagtaagcgaggtttggagggccccccaccttccctaccc

SEQ ID NO: 462288 - DNA, 122 bp, Homo sapiens
gtgccctccacgccagggcatctgagccgaacaagctgctcaccaaacgtgactcagcaacgaaaaccactatacagacgaaccattctcccagaatattttccacactgctgaacatcaca

SEQ ID NO: 462289 - DNA, 122 bp, Homo sapiens
gctggagaccgggagaccacacagggagacagtgcacagagctgccgcagccatctgccgcgacttcatatgccgccccggaaactgacagacactgcttcagcaaggcccagcccgtcaga

SEQ ID NO: 462290 - DNA, 122 bp, Homo sapiens
tgcaagaacagaggtggtgtggtccagacagcaaaccactccgaggtgagggagtgcttgcggagggcttccagtggaggtgatgtctcagtggggttcaaagggcaagtagaaatgggaca

SEQ ID NO: 462291 - DNA, 122 bp, Homo sapiens
tgccgcgggactcgcgcgtggggcccacagtggagccaccttcccaatcggaaagattagcgtgtgggaagctgtaacaaaaaagcagggggagtgcgggggtcggcacacaaagaaaatct

SEQ ID NO: 462292 - DNA, 122 bp, Homo sapiens
ccagcaggtcgacttcagcaggaagccggggcgcatgagctccaagcccatcaacttctccgtgatcctgaagctgtccaatgtcaacctgcaggagaaggcgtaccaggacggcctggtgg

SEQ ID NO: 462293 - DNA, 122 bp, Homo sapiens
aatttcacattaagacagcattttcccaaacacaatccttgtcatcaaaatcccccaggacgctctcatctactctgggccctgccctctcctcaggattcccaccccatagcttgctatat

SEQ ID NO: 462294 - DNA, 122 bp, Homo sapiens
aagtaagttgagaggcttcatctcacagactttcggggatggccgttgatgttttgtccacgagcctgtgtccccagacacacactccggcccatactcaggtgcacagaaagacaagcaca

SEQ ID NO: 462295 - DNA, 122 bp, Homo sapiens
ttcgggccctgccttaatttgttcttccttttccatttctcctttggacaacttgctgctcggcgacgtttccttcccctgcagagaccaaaaggtcaaggaaacaaaggtaagtcccgctc

SEQ ID NO: 462296 - DNA, 122 bp, Homo sapiens
cgccatgggggtcgccacgggggccccgccggccactcacacgtaggcgtggtagatgaacgcccagccgcgcggccgctccagcacgttgtagaggaaattctgcagcttgcggtagaagg

SEQ ID NO: 462297 - DNA, 122 bp, Homo sapiens
cactgtgagaatatggaagagataagctgcttgcccctggggagcttccagtctggttggcgagattgggtaccccgcagaccctgtggggactggcagacaggaagggacaggccctagag

SEQ ID NO: 462298 - DNA, 122 bp, Homo sapiens
tggagcggtcctggctgtggctgctgcctgtctggcctggctttcgagggtgcggtcttgcgctgtcccctccaggagtgaggagagactctggtcctgccaagaggaataagggctcagaa

SEQ ID NO: 462299 - DNA, 122 bp, Homo sapiens
ctccatccagtattgggggtcatcctcctccatccaggacctgaggggtgtccttttctgcgcttccttggatggcaggctttcctatgcagtcattcagaaagtcaggctgacacatgttg

SEQ ID NO: 462300 - DNA, 122 bp, Homo sapiens
ccccacccctctcttggtgccgccgcagctactccctagggggctttgctcttggtggtacgcacccgagaccttcttattcccctgcgtcaccatccacataaacaagagagcaccctgct

SEQ ID NO: 462301 - DNA, 122 bp, Homo sapiens
ggggaggcctggctgagcgcccatcccgtgtgcgtgggagaccccgttggggacatgttgcgctaccccctcaccagcaccagctctccatgcatctcctgccgggccagctcgccagccag

SEQ ID NO: 462302 - DNA, 122 bp, Homo sapiens
ctggctccgggaaggggcgcctcgccccacacctcctcgttgcagggggacaaggggcgacggcggcccccaagcaggtttcctcctgtgcagaccctcacctgcactgaaatggtgcacgt

SEQ ID NO: 462303 - DNA, 122 bp, Homo sapiens
acgtgaccacaccccctcccacactggaccgccagggacctgggcaccatgcctcggccacgccagcctggggagcccccactttgcgctcagcccatctggccttgcgccccacctcctcg

SEQ ID NO: 462304 - DNA, 122 bp, Homo sapiens
gtttgcatccccgttccagacaattccagggcttttgaatagtgcctcaaccttactggccggtctcgactccaaaaccctaaaacaggcgctggagcgagggtgacggactcacaggtccc

SEQ ID NO: 462305 - DNA, 122 bp, Homo sapiens
ccgctcttggcttcggcggcgccgctgtagcttgaaggcggtacttcctccagcatttgccgcaagttattggcaagttcccctgcagttgtttgggctgtccctgtggctggttctggggt

SEQ ID NO: 462306 - DNA, 122 bp, Homo sapiens
aggtggagaggatgatatttcttccaatttcgccgggggtgtacaccacccctgtgatatcgtttctaatatccagggggcgagaggatgatattagtctcaatatcgcaggaggtgtacac

SEQ ID NO: 462307 - DNA, 122 bp, Homo sapiens
tgggcaacatggtcaaaccccatttctactaaaatataaaaaattagccgggtgtggaagcgcgtgcctgtaatcccagctacttgggaggctgaggcaggagaactgcttgaacccgggag

SEQ ID NO: 462308 - DNA, 122 bp, Homo sapiens
attctcacccaaaacaattaaatcttttaacagaggcctgaatctgggcagtttgagccccgagaatcactttagtggcatggagtccgaatctcatttcagtgtgaaaatgagatggttat

SEQ ID NO: 462309 - DNA, 122 bp, Homo sapiens
ttaccatgtctgtggaggttgatggcaattcattcgaggcctctgggccctccaaaaagacggccaagctgcacgtggccgttaaggtgagtgtggccagcatcactgtcttctaatagcag

SEQ ID NO: 462310 - DNA, 122 bp, Homo sapiens
gccttgctgtaggacctgggcaagtgccgccatcctgggtctcagcagacccacctgagccgcagtccctcactcctgcctggctccctctccctgagtcagacacagatctgcctatttgg

SEQ ID NO: 462311 - DNA, 122 bp, Homo sapiens
tatgtaaatcaaatccatgtcatgctgaaatagttggctctaatatacctgtatcaaaggcgttctgttttctttgtcacagatatcaatctggcattttctgttaaccaggagagtgacca

SEQ ID NO: 462312 - DNA, 122 bp, Homo sapiens
gaggccggccaggcgggatacctcaggagcccatggcggtggcggcgtctgcggacgatgcgcggcagccggactctgcgggcggggcgggcggcgccgcagccccggagtctccgccgccg

SEQ ID NO: 462313 - DNA, 122 bp, Homo sapiens
tttttaattctccattcacttttaaacaaaacaacaatgaaaatgttgatgtttagataccgacacctgatgaagaaaaaattccatggctacatgatccattgtggggtttttccctgttg

SEQ ID NO: 462314 - DNA, 122 bp, Homo sapiens
atcatctcactccagttaatgcagctcttggctgggcacagtggcttgtgtctgtaatcccggcactttgggaggccaaggtaagcagacaatttaagttcaggagttccagagcagcctgg

SEQ ID NO: 462315 - DNA, 122 bp, Homo sapiens
agaaacgtgttgtgccaggatcctccaggaatgtgcaaaggtgtgtcccccccgaatgtgcgaaggtgtgccaggccccccaggggtgtgtggaggtgtgccagccccaccaggggtgtgtg

SEQ ID NO: 462316 - DNA, 122 bp, Homo sapiens
gccagagccaggactcagagcgcaggggcgtggagaagactccgcgggctctttgaacgtcgcaccctcctccctgcagcgtgcctgattgacagttctcacaatccccgccccctcatccc

SEQ ID NO: 462317 - DNA, 122 bp, Homo sapiens
atctcccagggtcctctgagccttcaccgttcatttctctgcctggcctcaaacagaaaacgtcaggagggaagcacacagctgcacaggtcgtgccccgaggctcctgctgccggcacctc

SEQ ID NO: 462318 - DNA, 122 bp, Homo sapiens
ggatccctgcctcgacacgggctctgctggatgccaggaacacccttgtcattggatcagcggatctccccttcgacgtctgaacaaattctgccaatgttttcagattaaagcaaaataca

SEQ ID NO: 462319 - DNA, 122 bp, Homo sapiens
ggagcctgtgtgagcgcgcctggagcagaggcggcgtggggagcacgtggttggccctgtcgcttaactaatctgaaatgtgttggtggcatgcttggcctctcaggaggttcagcaaatac

SEQ ID NO: 462320 - DNA, 122 bp, Homo sapiens
accggcatattcagcgtgggacttcttacttcagcccctttccttgtcccagttctccttcggcaggcagatccaacccctctgcgcttgttaacttaccctcccaaaagcctttcctggca

SEQ ID NO: 462321 - DNA, 122 bp, Homo sapiens
tgaagtgccccaagtatttttgaaaaccaagacctcaaaaaccttggattctggagtatgcgctgctgtagttataattattcacctccttggcaaatctgtttcatttactatcttaatgg

SEQ ID NO: 462322 - DNA, 122 bp, Homo sapiens
actctccgtgctcttgcaaagttgcagggtgtttccttgcacgcccacccaatcatctggcggctccttgaccagaggcagattgtgcggcacaccgagatgttggccgggatcacaaatga

SEQ ID NO: 462323 - DNA, 122 bp, Homo sapiens
gatgcatgcgcatctctgagcgcaaatgtgtcaatgctaattggacatgcgcattcgagacggctccatacggaacggaatgggaccgtggccccgaagcaacactccctcccagcaccata

SEQ ID NO: 462324 - DNA, 122 bp, Homo sapiens
tgtcaacttggtgaaaagcattactcttctttccatttctgaggactaattgtgcttcttcgctagacacgagttcaaaacagtgggttgaaagagggcaagtttatgccaaagaatcagaa

SEQ ID NO: 462325 - DNA, 122 bp, Homo sapiens
ttacacttccgtaaactgctcctacttctggagtcctcgcacgggtttatggtccacctacggcggccgaggagaacctaaaatgtttaaaagagcaaggacaagcgcatttacggcatttc

SEQ ID NO: 462326 - DNA, 122 bp, Homo sapiens
gccagaagtgttactacttctgcatggccattggcacaggcccagtgtagagcagtcctacgagagtgagaagccttttaaggaaagtttagtccactgtctcaaaacatagaatgatttat

SEQ ID NO: 462327 - DNA, 122 bp, Homo sapiens
gtgaaggtggaatcagagaggggccccgcgggggtctgcagaggcctcagtgtggctgtgcgtggcccgtgtcctggaagccacccggacctggacgcagggccaggtgctgtgggaaggat

SEQ ID NO: 462328 - DNA, 122 bp, Homo sapiens
ccacagccagcctcccaacagacatttccaagcaaagctcttgcctgagtccatgcctcccgctactgccctgagaatcctgagctgcacacaatgcttccctctccggagcaggcttcatt

SEQ ID NO: 462329 - DNA, 122 bp, Homo sapiens
tgagcaccttttcatccccagaaaaggagcacgtgaattgagtcgcctggcggctctgtacgcgctcagggaagcttagcttcttggtgcccatctacgtgcactggatgatttttcttttg

SEQ ID NO: 462330 - DNA, 122 bp, Homo sapiens
aggatcctcacaggaccctctgtatcctctagatcctggccctcaggcaggcgcggcggccggtgcccccagaagtggcccagcagtaccaggacatcatgcaacgcagccagtggcagagg

SEQ ID NO: 462331 - DNA, 122 bp, Homo sapiens
atatacacagacccaggattatgctgtgagcctgcaggctttggaagtggccctgtcacccgtgctgcacgggattcacagccccagccccatggcccctctccacacctcaaaactcctgc

SEQ ID NO: 462332 - DNA, 122 bp, Homo sapiens
gggcattcctggatatccatactgactttctgggggtggccgatagtgaagttcagccggcggccagtattgataggctactggtggttgggtcttattttctttaacctgcttttgaggtt

SEQ ID NO: 462333 - DNA, 122 bp, Homo sapiens
cctctcggaagccggagtgggcagttgctggcgattctgagaaaacttggccgcatccaccggggccctgcctccagtcggccgctgccgagtctctgcgttctggccgcttcccggcttaa

SEQ ID NO: 462334 - DNA, 122 bp, Homo sapiens
cctcttctccaagctccactcccgacttttcttccccgcccccgggaagctctggaaacccgcacccccggctctgaggtcagggctggcaggagtaatccaccctttccaggtgtgtggcg

SEQ ID NO: 462335 - DNA, 122 bp, Homo sapiens
tttcccccactttaaaaaaacttttgaggttttttttttttttttgtcttttaaaaacatcgtaacattaacacatggccgttcaccgtcccccagcgatgggagctggcctggggcccagg

SEQ ID NO: 462336 - DNA, 122 bp, Homo sapiens
aaaacaaaaacaaaacaacagcagaaaacagcccgatttcctcccagctgcgcctgcccccgggtctacaccaagccgactagcttccctggccggccgactccccgggctctcccggccgg

SEQ ID NO: 462337 - DNA, 122 bp, Homo sapiens
tgacacagtaggaaacagactgatccctggaagatcaatacaaaaggcaacgcggcagttcgacagctgaaaatacaggcggcggcagccagccacgcctgtgggcaggggagagggagtag

SEQ ID NO: 462338 - DNA, 122 bp, Homo sapiens
gtcagggcttcgataggcctccctgttcactgcacctgtcaggcctcagataggcatccccgtccacctgtcggagctcggataggcctccctgtccacctgcacctgtcagagctcggaca

SEQ ID NO: 462339 - DNA, 122 bp, Homo sapiens
gtcctttagcacagtttgagatgcactgatacagaaggttacagcacattctcagtacttcggcgaatgaagttctgagattctggttccacgccacattccaagttttgaatactggtaat

SEQ ID NO: 462340 - DNA, 122 bp, Homo sapiens
ccggttcatgtgagccaggcaaatgtttgtgtctgtgtgtggtatggggagtgtgccacacgtttaggcttggccggtgagcatcagtcatgagtaataactgccctgtgaaaccgagagag

SEQ ID NO: 462341 - DNA, 122 bp, Homo sapiens
ggtcagacaaaggcagaagggttggctggattctttcccgggccgcgaaggcctggggatcgcaagttgaggaggagaagaccgcaaacccctttggttcaagcaagctctgcggcaggtaa

SEQ ID NO: 462342 - DNA, 122 bp, Homo sapiens
gttttttaaaaagataagcaaaattaacaaacatttagccagcacattgggaggccaaggcgggtggatcacctgaggtcaggagctcgagaccagcctgaccaacatggagaaacaccatc

SEQ ID NO: 462343 - DNA, 122 bp, Homo sapiens
tgccacagcattccccaccaacggtgcacaatgatggaataaaagcttcgggtaggggttcgcggccagtcagaaccacacgggggcagatgtttatgacaatgaagacaaaaggaaaggca

SEQ ID NO: 462344 - DNA, 122 bp, Homo sapiens
tttggcattattattgtaactgctccagaatgtacacagatggcataatggattcaaaggcggttttacaggaacataggggcaatctatgaagtaaaaatccatttccaggatggccgcat

SEQ ID NO: 462345 - DNA, 122 bp, Homo sapiens
ggcccctccttcagccccactcggcaaagggctgtgggctcttgcctgggccggggtctccgggggaggagtttaaagtgacacactagacccgcccccagactcaccccggaccgcccgcc

SEQ ID NO: 462346 - DNA, 122 bp, Homo sapiens
tcctcgcttgggaggggttctcccactttgggacccctcgtggagcagcccataaccgaccggcctgctgtacagaggccatgcttaatggattctcgcagataaaagggcctggctacctt

SEQ ID NO: 462347 - DNA, 122 bp, Homo sapiens
ctcgccggtaccatctcctaggatcctggcgctatttcatggatccccagagaagacaggcgagagtacatcgctgacgacgtccacagagtcctccttcccctccatgcctcatggacttg

SEQ ID NO: 462348 - DNA, 122 bp, Homo sapiens
caaaaacccctgaatgctttagggcccctgttattaactttattattaattttcctagtccgtgtcacacccagtctttccatttttttttcttacatcttttccaactctgagactcattc

SEQ ID NO: 462349 - DNA, 122 bp, Homo sapiens
ggtctgcgcgcccggggccgcgcggtctggcggggccgcgcggtctagatcacgctactccgggtcccaaggccccgccctcaggccccgcccacagaccatgtcctcggccccgcccctca

SEQ ID NO: 462350 - DNA, 122 bp, Homo sapiens
tctggtgcttatggtttattttttcccaaggctgcttttcctctgtgtcttctgaataatcgctctccctgcttccctttcagccttttctgggagtctccacggccttttcttttccttcc

SEQ ID NO: 462351 - DNA, 122 bp, Homo sapiens
accgagccccagtccgggagcggcgctcagtggcccccaatagagcccagccccttccagcgctcaaactcttttgttttaaatgaactggatggagcagcatgaaactgacgggagggggg

SEQ ID NO: 462352 - DNA, 122 bp, Homo sapiens
ggctgagactctgggatttacccagccaggaggagtggggggaagggcagacggtgggggcggtgacctaggcgccccggcttctcatcagagccactcgggccgggcctgtggtccacagg

SEQ ID NO: 462353 - DNA, 122 bp, Homo sapiens
tcgaagccaaaagaatttttgtatcccagaaaagagctctgctcacttaagagatcttctcgatattggaagtggtgtctatttcccattttagttgcaaaatttgcaatagagttccctgt

SEQ ID NO: 462354 - DNA, 122 bp, Homo sapiens
tcttctccttcttcgacaggggaggggctttggtcttctttttcttcttccccggtagaacgagcgcgttgcttgcatcaactcccttcaacgtgtccttgtctgagagagcacagttatta

SEQ ID NO: 462355 - DNA, 122 bp, Homo sapiens
actcggccaggctcagctggctcggcgctgggcagccaggagcctgggccccggggagggcggtcccgggcggcgcggtgggccgagcgcgggtcccgcctccttgaggcgggcccgggcgg

SEQ ID NO: 462356 - DNA, 122 bp, Homo sapiens
agtgcgcttctccgggttgccactagatggcatcagagctccatcacggtccctgcccaccggcgcctcaactcagactggattcctgctggggaaaccgaaaacaaaaggaggggaggggg

SEQ ID NO: 462357 - DNA, 122 bp, Homo sapiens
tgttggaggtggcacctgttggggagtgattggatcttggggcagcttcttatggttgaacgccatccctcttggtgctatcattaggagagtagtgagctctcctaaaatctggctgttga

SEQ ID NO: 462358 - DNA, 122 bp, Homo sapiens
cgatccaaatccacagtgaaagtgagggagggatcatatgaaaatatccgcccagcctgacgcagcaaaaggcgggtcagcttttgctcatccacgaagggctctttaagttttctggggcg

SEQ ID NO: 462359 - DNA, 122 bp, Homo sapiens
ggcatgggttgggaggcagcagctggactgggacccaggactcggagtgtggccgggctccgggccaggcctccgcggggcgtcagttcccgggcacgctgaggatgaagcccgagcgattc

SEQ ID NO: 462360 - DNA, 122 bp, Homo sapiens
gtggaagaaattccttccttacctgaaaggttcaggtaggcgctggctgagggcggggggcgctggacactctctgccctgcctccctctgctgtgttcccacagacagaaacgcctgcccc

SEQ ID NO: 462361 - DNA, 122 bp, Homo sapiens
gggatcttcacgctcttggtccctttcctttcatttgggcttttgagccttgggcaggtccgcatgacactaacagtgtttgtacagtttcgtactagcgtactttaagtactgtaagtact

SEQ ID NO: 462362 - DNA, 122 bp, Homo sapiens
agcaggagccacagaacacacagttctggggtttctgcacaacctctacaagcaggtagccgctaaatatattctccaatctcttttactgagcacaatgtgggtaaaactgctctctatag

SEQ ID NO: 462363 - DNA, 122 bp, Homo sapiens
ggaaaagttttaaaggaccaccccacatcaatgtaggatccgagtctgcacctcaaaacacgaagccagtagcccaggggtaatatcaggacaccaggaaaattggattgattgagacacca

SEQ ID NO: 462364 - DNA, 122 bp, Homo sapiens
cctgggaaggctgggctgaccacgggaggtacaaggcacatgcagacacctgggcatcctcgtaaccagaggccttcctcaggtgcagtctcatcagctgcgcaggggcttactccgcaaag

SEQ ID NO: 462365 - DNA, 122 bp, Homo sapiens
agctgctggaaaaggtgaggcgagggctccgtcgggccgggaggcgagacgaggttgccccgcgcgcgtgcgcattgcgcgccttctgacccttttcgctctcatccgcagctccagcaccc

SEQ ID NO: 462366 - DNA, 122 bp, Homo sapiens
gctgagttgcactgtgcgacgcgacagagactacatttcccagcattccagcggcgcactcgggggaccacagatcccagcgcaccacaaagaggcccggggactacaaatcccagcatccc

SEQ ID NO: 462367 - DNA, 122 bp, Homo sapiens
gggtccctcggggtggggatggccggggcgcgcaggggctccgggcacagtgatgccacccgcgcactgcgcttccgggaagccgggggaccgcgacccagtccaggagattcctgccttac

SEQ ID NO: 462368 - DNA, 122 bp, Homo sapiens
tctgccgtggatcatgaatagcattcccgcgtgagtctttttttgacacagcctccccgacgtccttcgagacctggtctgctagacaggaacagaaaatagctggacagggaggttggggt

SEQ ID NO: 462369 - DNA, 122 bp, Homo sapiens
aaccaggcagagtttattgagggcatcagggacgcccagaagggctgggaaacataaatgcgaagacctggtgtttggcaccaccgtgtggccagttcaagctcctacacctccgcaccctg

SEQ ID NO: 462370 - DNA, 122 bp, Homo sapiens
aacattgcatatttggagatgacctcatccagccgactcatggccaaactccggttttcccgaaggcgccgggccaacacaggatctgatagtgcagggtcaacgcctacgtgggaagacat

SEQ ID NO: 462371 - DNA, 122 bp, Homo sapiens
tcgctgctggcggagaagaacactacgtccacagaacgccaccgggcactgcctctggagcgtggcttcaacccacctctgaagcccactggcccgcatccttcagtttggggaacctgccc

SEQ ID NO: 462372 - DNA, 122 bp, Homo sapiens
cagcagctgacccccttctcccatacacacacatgaagattgctataccttataaaggtacggcaggttttataggtatagcaattaatttatggcaggagcctgccataaattgctgactt

SEQ ID NO: 462373 - DNA, 122 bp, Homo sapiens
ttcatcaacccttttggttgggcacagtggggagtgaggtcagtgtagaacatcaatcttcgttagctagaactgggaactgagaggtgcagagaatcctggaaatgcaaggagaacttgcc

SEQ ID NO: 462374 - DNA, 122 bp, Homo sapiens
cgtttttcattagggtgattaccctgccgtcattaaaagccggtaaatagcacccagggacgaggccgcgcggccgcgtctgaaccgcagcccgggttcacaggcgccccccgccgcccggg

SEQ ID NO: 462375 - DNA, 122 bp, Homo sapiens
gggcaagcggccgctgccattggggacctggggcacaggggacgggagtcggggtcgaggcggatatgggcggaggaatcgcctggtgcctcacattcaggctagtgaattggaccgctccg

SEQ ID NO: 462376 - DNA, 122 bp, Homo sapiens
ttcatgtgactctgtttccttggttggaccctggtggatacaattcctttcctccctttccgaaaagttactcctcaactccaaactcctgtgcttccccactctctgagccccctttgctt

SEQ ID NO: 462377 - DNA, 122 bp, Homo sapiens
gctggtgtgagcctgaatgagacaatgcatgtgttaggggttggtttgtgtcccagaaaacgtgttgaagtccaaacacccagtacctgtagggtgaccttatttagaaatagagtctttgc

SEQ ID NO: 462378 - DNA, 122 bp, Homo sapiens
tttcagcctaaagaccttaagacagcatctctaagatgtaaaacgtcctgatgcacagctcggagaaaaagccctaccctacagctatatgtgaccttgcacttttctaaacgactctcaaa

SEQ ID NO: 462379 - DNA, 122 bp, Homo sapiens
gttaagattaggccatgctggagcagggtgggccccaatccaacacagctggtgtcactacgaaaaggggaaattttggacaccagcacccacacagggaggacacaggtgaaggcagagat

SEQ ID NO: 462380 - DNA, 122 bp, Homo sapiens
tggtttccgtttctgaccagtgtaccagtccttttagaaatgtgtctcccaaagaaaggacgagaaaactgcggagcagggaggagaccagcagaagtctaacttgtgattgtacctctctg

SEQ ID NO: 462381 - DNA, 122 bp, Homo sapiens
agactgctgtgctagcaatcagtgagactccctgggcgtaggaccctccgagccaggtgccggatataatcttgtggtgcgccgttttttaagcccgtcggaaaagcgcagtattcgggtgg

SEQ ID NO: 462382 - DNA, 122 bp, Homo sapiens
ttcattcattcattcattccacaaactttcgtggtgatttttgcccgctttgagtatgggcgggaggagggaagaggagctgaccagacccaaaaaggggcgacacacgccggggagggacg

SEQ ID NO: 462383 - DNA, 122 bp, Homo sapiens
ggcgtctgggacggatgcctatacctgcacccagcagcactggaaggggcccaggcccttcgcagcacagcctatccccagaccgcttagtccttcataacatatatctccacggaaaaggg

SEQ ID NO: 462384 - DNA, 122 bp, Homo sapiens
ccgagccgggaaggggtagtgggcgggagggaccaggacgccgccccgcgccctcccctccggatgccccgccgcccgccgccctctgcccacgaccattccagccagtgcgcggggacccg

SEQ ID NO: 462385 - DNA, 122 bp, Homo sapiens
gttttatgcagataaaggaagggcccgaatggcctaggtacacacattcccacaggaacgcgcacaggcactacctcggacagctaaccagtagggtgggaccttgataccccatagcattg

SEQ ID NO: 462386 - DNA, 122 bp, Homo sapiens
ggtaaagtgcattcatgttcttggtgtgtcaggaactagctgagaacctagggctcatcacgcaactctctgaagctcagctttcttcttcatcagtaggaacagtaactaacccctgcctt

SEQ ID NO: 462387 - DNA, 122 bp, Homo sapiens
gcgccacgccgcagggccgccgcctcccagcgccctgctccacgcggcgccgccatgcctcgggcactcctcttagcaaccctgctaggcagtcattatagtcaccttttacagggccacct

SEQ ID NO: 462388 - DNA, 122 bp, Homo sapiens
gagctgcttgctctcccttctgtctggaggccagcacagcctggcactcgtggtttggggcgtccatggccttgtggtggcgaggcgcagaaggcgtcacctgaaaaaggtgtggccaaggg

SEQ ID NO: 462389 - DNA, 122 bp, Homo sapiens
agtctggattcaaaccaggaggtcagaccctagagctgtgcgctaaccagtgcactgtcccgcctctgctggactttgtgtctcctgcctcctagtcctggcccctgccatgttcctgggga

SEQ ID NO: 462390 - DNA, 122 bp, Homo sapiens
gaaactcttctacaagtgacagctgtcctaggaaggcactctggtgcaacaaaaacagcccgttgctgacttgcctgggagtcaagaggaatctttgggagacaagagctgtaagaccagaa

SEQ ID NO: 462391 - DNA, 122 bp, Homo sapiens
tgatataacatgttttaaagtctcccttattgtttataagcttttgactttggaatcctccggtttagacccttacacattaccttctgcatcccaatccaagctcaggtacccaaggtggt

SEQ ID NO: 462392 - DNA, 122 bp, Homo sapiens
cctatggaatcaaacatcatgctgcatttcaaacacattttaaaaattcagaactgtggtcgagaaaaaatgttagatgctggctttctctttacccaaagtgaggggaatgttttaattta

SEQ ID NO: 462393 - DNA, 122 bp, Homo sapiens
tgtcttcctgtgatgtgtatgcgatagaatttcacgtgctcgggcctggtgccatgaggacgcggagacactcctacaggaatgcggtggtgctgaacctgggcacacatcaggatgccccg

SEQ ID NO: 462394 - DNA, 122 bp, Homo sapiens
cctgtggcccatgttcctgagagcagctcagttcaggagggtctctcctcctagacaccacgcaaggcaccctgagggccagacacacccatgcataaatcccctttcatcctgagactttg

SEQ ID NO: 462395 - DNA, 122 bp, Homo sapiens
agcttgagagtcaggagccccatagtccccacagcaataggaagcaccagctcctggtcccgaaaaaaggagggccccaactccagggactgcggcccgccctggagctgagaacacgcgga

SEQ ID NO: 462396 - DNA, 122 bp, Homo sapiens
cggagcaggcccccactgagcgtgattagtatcaggagtggggttccactggaacacttccgaagattgcagccctgctgcccttgtgccccaccccagggagacacagtaggaagggagaa

SEQ ID NO: 462397 - DNA, 122 bp, Homo sapiens
cgggagcccccgtctgcctgggacgctgggagtgtgtgagcagatttggtgccagaggcccgggcaggcctgagggtccttgatcccagcgtgatggtgcgttgctggtccagggcccatcc

SEQ ID NO: 462398 - DNA, 122 bp, Homo sapiens
tgtttaattcttgccgaccaggaggtgctggagctaatggtgacagcctggaacatactccggaagcaggtggtacagatggagagccctcatccctctatgcatgtagaataccttacgct

SEQ ID NO: 462399 - DNA, 122 bp, Homo sapiens
aagaaccagaatccagactcttgagtcaggaaactgggttctaatcctgactcttaatcacgggcttaacgtcgcctcttcattggtaaagtggagatgataatgatacctttcttccagtt

SEQ ID NO: 462400 - DNA, 122 bp, Homo sapiens
ccactctcaacacccccgcgtgcgcacacacagccacatcaggtctcccctcctagaccccgaagtcggcacctcactagcccaaaactcaagaatgaggaacccgtgtgatccacgggtta

SEQ ID NO: 462401 - DNA, 122 bp, Homo sapiens
gggagatgtaacagtgagaaaaactaggtgtggtccaggccctccaggggctcaggggctcgtggaagaagtagacattgaagtacttatcacacaaatgagtataaaagtacaatagcgat

SEQ ID NO: 462402 - DNA, 122 bp, Homo sapiens
cccggcaagcagggctcagcccgcatccaccggtgctgccggatctgggcgatggtgatgcgcctggcggggtccaccaccagcatgcggcggatcaggctctcacagtctgtggaggggcc

SEQ ID NO: 462403 - DNA, 122 bp, Homo sapiens
cagcaaggacagaactcacagctcactgctggaattctttgttactgtacaataggcttccgagaacctgctacagaatcttctgacatcactctggcagtgagaggaagaggagtgtgttt

SEQ ID NO: 462404 - DNA, 122 bp, Homo sapiens
catctcaaaaatacatatatatatattcaacgaaaaaaagagatgggagaataggtgacacgagactagttgttttgcttgataattgaaactagctggtgatgggtgtaaagggtttgtca

SEQ ID NO: 462405 - DNA, 122 bp, Homo sapiens
cccccaggactacattttttctgggtgcacatctgcttgtgtgtgtggcagtggttggggcgggaggtggggtgactacatgaaaggttgaggcaggtcagaggtcagtttccaaaccactc

SEQ ID NO: 462406 - DNA, 122 bp, Homo sapiens
agtctcactctgtcgcgccagctggagtgcagtgccatgatctcaggtcgctgtaacctccgtctcctgggttcaagtgattctccagcctcagcctcccgaatagctgggattacacgtgc

SEQ ID NO: 462407 - DNA, 122 bp, Homo sapiens
ttggtggggccgggggcggggcgggggtggggccgagaatcgagcggtcccggagatggccgcgatccgggtgggcttgccggttgcgctaggcaaactggaggagggttctatttattatg

SEQ ID NO: 462408 - DNA, 122 bp, Homo sapiens
gcacgagttccgggtgggcgtgggctcacgggccccgcactaggagcagctggctggccccgcaggccccgggtagtgaggggcttagcacctgggccagcagctgctgtgctcaatttctc

SEQ ID NO: 462409 - DNA, 122 bp, Homo sapiens
cacacgcgctccccgcagcgggctctgggctgagggacctggcgagggaggcagtggccgcgcaggttggggctttggccgccctccgcccggcggcgtagcgggtgaaggttccaggggaa

SEQ ID NO: 462410 - DNA, 122 bp, Homo sapiens
ctgggctggggccggtgcgtcttagctaagtgcccagcgctccggtgggggcggtaggggcggagccgcgctctccagggcctaaggacagtgacgtggcccctgcctcccaccttcaccga

SEQ ID NO: 462411 - DNA, 122 bp, Homo sapiens
gcgcggctcccagagcctagtgctgcagggggccgagccccggcctctcgtgcttagtgccgcggtggccgccgcctccccccgctacacttccgcaacggagctgcatggagcgggccgac

SEQ ID NO: 462412 - DNA, 122 bp, Homo sapiens
tctcctaggctccagcaatcttcctgccttagcctccagaataactggagacaacatgcccggctaattttttttttttttgagacggagtcttgctttggactgcagtggtgtgatctagg

SEQ ID NO: 462413 - DNA, 122 bp, Homo sapiens
gctgccagcctcagggaggtagatgcggctgtgacagcagcaaagaatgacggccaagggcgacagcaggggctggccatgctgtaaaggggcttcttgggagggtccagcctcaggaatca

SEQ ID NO: 462414 - DNA, 122 bp, Homo sapiens
aaacaacagaaatttattcttctgcagttctgcaggctatgagtctgaaatcaaggtttccgtgaggttggttctttctggcaagctctgagggagagtttattccaagattccgtaggttg

SEQ ID NO: 462415 - DNA, 122 bp, Homo sapiens
gtgccatgctttacaaacagataagcgcttcaaatgcgctacaaactggcgcttcagatgcgctacaagcacgcttcacgcgggcgacaaactgatgggagctacaactggcgcttcattgc

SEQ ID NO: 462416 - DNA, 122 bp, Homo sapiens
aataaatcagttttgtctataacaagggttccacactggagtatctctgtccctacaggacgctgggtgatatccggagacatctgtggttgtcacaatgcggggagctcctggtgtggagt

SEQ ID NO: 462417 - DNA, 122 bp, Homo sapiens
ccggccgctgcgtcccgcggcttctgggaaccgtgcgcgctcacaggcggacttgggcctcgaacaaggttcctgctaaattgagttgtgccttaggctctgctggacagagcagctccact

SEQ ID NO: 462418 - DNA, 122 bp, Homo sapiens
ctccctgcccccacttttttgttggccagggaggctgcagatgccccaggagccctttgccgcttctatgaggccaagccttttttccctgggcccagcacacaccctgattagcaagtgat

SEQ ID NO: 462419 - DNA, 122 bp, Homo sapiens
gcccccctcagagacccctctcctgccccaggaacttacagatgcggaaataatcctctccgtagctgtcccgggtctcctgaggcagcctctcccaaagctttcgcatgcgtgactccagg

SEQ ID NO: 462420 - DNA, 122 bp, Homo sapiens
aaagttactttaatcctctggttcctatcagcctaattacagtttcaacagacaacggaccgggctctaaatgagatctgaggacactggaacacattatgttggcgctaataatggtctgt

SEQ ID NO: 462421 - DNA, 122 bp, Homo sapiens
ggtccggcacctcttcaccacggaggcctcgggtacggaactggagggagtcctggtgctcggaggagggtggaaggccaagatccctaggtcctggagcagggagccgggcccacgccgcc

SEQ ID NO: 462422 - DNA, 122 bp, Homo sapiens
tccccgcgccccacccctggcccctcgccagcccgggctccaggacttcgccttaattggcgattagtcttagctggagtcccggggcctggaggaaagaagggtcctgagagagggcggca

SEQ ID NO: 462423 - DNA, 122 bp, Homo sapiens
gaaatgctggacttgaacttgttcactgtaccttcccactccgcctagaatgtccacagccggagcagccccagaacacacaaggaggggttaactcctggctcctgaatgaccgtgtggaa

SEQ ID NO: 462424 - DNA, 122 bp, Homo sapiens
gggagttaaggaggtttgttcagtccctaggcacggcaatcaggaaactctctgcacttgcggtggtggtctggcgagccccaggtggggactggcctctgctccctcgcctggggaggaga

SEQ ID NO: 462425 - DNA, 122 bp, Homo sapiens
gctgccactggggaggggggccggcacagggtgtggggagcatgcggggctcagggggcccggcctggtgtgctctgctcaagtctcagagcacagcccagatgactgacaggtgaggctgg

SEQ ID NO: 462426 - DNA, 122 bp, Homo sapiens
gaaaaaaaccaaacaatttccaaggcgctcaagtggaaaggaatgtaaagtccaacatttcgggcacagggctacagcagagaaggcaaactgagttgatgaaggcaggcaggggccgtgac

SEQ ID NO: 462427 - DNA, 122 bp, Homo sapiens
ccgttagactgcccggggccctccacccagcctcagttctatgggggacgtggagtcaggcgatgatgtcctctgaggcagcgtccatctccccttaacattaaggaataaggccagagggt

SEQ ID NO: 462428 - DNA, 122 bp, Homo sapiens
ggctgaggcgactgaaccgccccagtacgccggggccctccccaagccctgctcccaagccgaagccccgcccccgcgtctaaggcccacctccaggccccgcccctgaccccgactccgtg

SEQ ID NO: 462429 - DNA, 122 bp, Homo sapiens
acgggcaggagctcaggttggcgccgccggtgcagtgggcattacaggtagctcaggtgacgcgcggctggagtaggggggcggttgccttgcggggctcagaagcgaggcggttggcgagg

SEQ ID NO: 462430 - DNA, 122 bp, Homo sapiens
agaagtccactgaactgcttattcgtaaactacctttccagcgcctggtgcgcgagattgcgcaggactttaaaacagacctgcgtttccagagctccgctgtgatggctctgcaggaggcg

SEQ ID NO: 462431 - DNA, 122 bp, Homo sapiens
agcctcggtaaccccgcccacgccatccaggccctccttcccttggctcggcctcacacccgcacccgggccacacctttgcgacggccacgccctccgaaggccacgccccatgctcctgg

SEQ ID NO: 462432 - DNA, 122 bp, Homo sapiens
cgcggccagagtgggcgcggaggtcgaggaggcgccaagagcgagcgagggctgccagcacgctgtcacctctcactatgaacaattggcaggacagtcatggtctggacctaaggaaggtt

SEQ ID NO: 462433 - DNA, 122 bp, Homo sapiens
tcctcccccgtgcccgggaccccgcccgccgcgcgtcacaaagcgccgccgcctcaccctcgtaggacgagcgccactcggccttgtgcttcttgtgcttcttgcccatggcggcgccggcg

SEQ ID NO: 462434 - DNA, 122 bp, Homo sapiens
tggctgcggcctccgcggctcttcccaccccggctccgctgggtgcttggcgcttgtttacggagttacaccttgcggtagaggctgagcaggagcttgtccttcagacttcccagcggaga

SEQ ID NO: 462435 - DNA, 122 bp, Homo sapiens
tgcgaactggagtctgagcctgcccgagcggagctgggagggggctggcgggcgggcgcgcgcacacccgctgatctatcactctcgttcttgtagctcccagccgaggacgtcggatgtca

SEQ ID NO: 462436 - DNA, 122 bp, Homo sapiens
aatttaagggaatgggatccagtgagccaaccttgctattttcaaaccaaaataaatggccgtagatctgcattttataatttcagaaatgactaatgcttggactatttttgagcattata

SEQ ID NO: 462437 - DNA, 122 bp, Homo sapiens
ggcacagggatgtggactacggtgcttgccatcagcagatacaagctgtacgcagtgggccgcaggcgctccctgggccggaacacatggacgtccaggtgtggaatggcccggacagcaga

SEQ ID NO: 462438 - DNA, 122 bp, Homo sapiens
ccgcagaagccgttcagaggacaccacaggagtctcaacccgatatgacacgcacctgctcggcctgggccctgggacgctgggcgcacggacccgcggcggctgcacgaagatcaggggcc

SEQ ID NO: 462439 - DNA, 122 bp, Homo sapiens
tcctaccagctactatctgcagaatgcctactgatcccaggcactctatgggcagcatctcggggatggaaggcactagaagggagagcagggagccaaacagagcccgcgctgcgggaggg

SEQ ID NO: 462440 - DNA, 122 bp, Homo sapiens
gagcagttccaaatcatccccttcctaggatcacaaaaagcacctacctacagtgcattccgtgctaattgggaaaatatgtctccttcctccaaggcagaggcaaccctttaggcaggtcc

SEQ ID NO: 462441 - DNA, 122 bp, Homo sapiens
ttcgagctgctgagacagacacagcttaaaatatacctgtcagtgcagtgcctgcaaacacgtagcaactccatggagaaaaggaaaaagttcagatacatacatgtccccttaagggttct

SEQ ID NO: 462442 - DNA, 122 bp, Homo sapiens
tccttccctccccgcctccttcccctgctccttccattccacaaacatttattgagcacccgctgtgtgccagccactgttctaggccctgaagacacagaagtgaacaaaaaaaaagagtc

SEQ ID NO: 462443 - DNA, 122 bp, Homo sapiens
tagaacaccacctaggctgcagtgagatcccatgacagcgtgtggggagagcacagtgtgcgcggcacggaaggaaggaagggcaggaatgatgataattttcctgcagcggctgctgtctg

SEQ ID NO: 462444 - DNA, 122 bp, Homo sapiens
ctagggacagagcaggaaggcctcgcagcctcaccaagcagcagccctggggtggagctgcgtttccagggttaagcggaccaggcaggagtagcggttactcaagagcaggtcacaggctt

SEQ ID NO: 462445 - DNA, 122 bp, Homo sapiens
gggctacacgctgggcaccaaccagagcagccaggtcttcagcctgggccgacagatatacgaccccaagtactgcctgggagcacagtggcccacggggctccctcaggtgcaggcgactg

SEQ ID NO: 462446 - DNA, 122 bp, Homo sapiens
tgtggaggccaaaggtcctttggaggcggggctcttgaagggatcaggaggtgcgggcggcgtcgggagtggctggcctcgggccggggtcttggcgcccgctgcatggttgcgctggtgct

SEQ ID NO: 462447 - DNA, 122 bp, Homo sapiens
atcacagttgtagtgccagtgtccccagctgctccggttccccagcaactcacagacaaccgtggtctggagggtgtgtgactctgaaaagccaaaaccccagaactccaaagttacaagag

SEQ ID NO: 462448 - DNA, 122 bp, Homo sapiens
atgaagtatacattaaaaagtggtcatgccaggcatgatggtgcacatctataatctccacgctttgggaggccaaggtgggaaggatcacttgaggccaggagtttaagactagcttgaag

SEQ ID NO: 462449 - DNA, 122 bp, Homo sapiens
catcctaagggggccagcctgacttccttccctccatgtcccacagcctcccttcttaggcgcctgggtgagcacattcagcagtttcaggagagctctgcccagggcctgggcctgagcct

SEQ ID NO: 462450 - DNA, 122 bp, Homo sapiens
ggggaggggtcctttcaaccgggctcaggttgctcctggaggccagggctcatcggaaatcgtcggtgcgggggcggtggggggaagggttgggggcgaggcccgggcgctggccacgccct

SEQ ID NO: 462451 - DNA, 122 bp, Homo sapiens
cacctggcagccactcacagagcccgtggaactctggcccaaggctctctgactccttctcggcttagcggctaaagactgacactgcccgatcgcctcggaagccccgtagaccatcacgg

SEQ ID NO: 462452 - DNA, 122 bp, Homo sapiens
actcccaatttccgacctccctggcccgcgaggggcggggccttcctctcggggcgtggccgtcaaattgaattttcccaatggggcacgagagtgggaggtacccaatcgagggttggctg

SEQ ID NO: 462453 - DNA, 122 bp, Homo sapiens
agttattgataattaggctaactcttttcacgaatgaagaccctgtgatttatgtcaagtcgtttcttttcaaatcaggcaatatagcataatgcttacctatcaaggcatttggaaaagac

SEQ ID NO: 462454 - DNA, 122 bp, Homo sapiens
tgttccatggaacatactttgggaatatgcagttctaattaaagggggactgtgacaccacgatgtgtgcattatagtgtttgtgatgatttcagagctaggcaaagacaagctctatttgt

SEQ ID NO: 462455 - DNA, 122 bp, Homo sapiens
aaaaacaaaaataaaagtgcaacctgctatcgacacaatttgtttctattttaattgttgcgctgggtctattttcacagttcaaaatttttatttttttaaaataaaggcagcagaaacca

SEQ ID NO: 462456 - DNA, 122 bp, Homo sapiens
ctgtggcccctagctcacccggcccatctcccgcagcttggtcagcatcaccacgatcgtcgaattgttctcccacagcatgcgccagaagtcttccgtggtctccgccagcggcccctgtg

SEQ ID NO: 462457 - DNA, 122 bp, Homo sapiens
ttccctggcccaccgggaactcccactccctccttaacggtcccgcgggaagcttcgcgccgcagcgcccttaccggaagtgactgggcagacacttttcatagcgcccagatcccgaagcc

SEQ ID NO: 462458 - DNA, 122 bp, Homo sapiens
cccacttagcatctttgtggccttaaacatgtcacttaactctcttaaagtttcctcatacgtaaaatggggatgatattcctatcacctcataggattgttggaggggtccgtgtttggtg

SEQ ID NO: 462459 - DNA, 122 bp, Homo sapiens
ggccctccccacctatgctcaccccagacacggggctggatgggggctgtgcgcaaggcccggtgtcggggaaggcctgggctgaagctacaggagaaggtgggacggggatctcctccccg

SEQ ID NO: 462460 - DNA, 122 bp, Homo sapiens
gcagcggagtttggtggagctgcgggaaatgttgaagcgccaggagagacttttgcgcaacgagtaagctggggtcccgcggagtctccgccaggctccttcagctcgagctccctgggcgc

SEQ ID NO: 462461 - DNA, 122 bp, Homo sapiens
tgggctagagtttccttatccagacagtggggaaggcatgacacacctgggggaaattggcgatgtcacccgtgtacggtacgcagcccagagcagaccctcaataaacgtcagcttccttc

SEQ ID NO: 462462 - DNA, 122 bp, Homo sapiens
tcgcggccgcggcgcaagacgggaggactggctgggcgggccgagtatcccggcaggcagcgcgcgccgcccggccgggcgagggctccaggccgggacgcggggacgtggggcggggccaa

SEQ ID NO: 462463 - DNA, 122 bp, Homo sapiens
ttctccccaggagggaggtcgtggtgcaggcgagcagacgccagactcctggacacttgccgcctgcgttatggaggcttagctaataaccttgcaggggtcttcaggcttttccactggct

SEQ ID NO: 462464 - DNA, 122 bp, Homo sapiens
cttttaggttatgcgagacagacctgtctcactcctcgcacagactcaagtccgcgcccccgtttctgctccctgtgcagaagcaaagtcttcaccactgtggcttggggtgtgaggaaaga

SEQ ID NO: 462465 - DNA, 122 bp, Homo sapiens
gaacgcgccgtccctctgcgcaggcgcagtcggcggtcggcgtggggcgctatgccggggcggcacgtttctcgagtccgggcattgtacaagcgcgtcttgcagctgcaccgtgttctgcc

SEQ ID NO: 462466 - DNA, 122 bp, Homo sapiens
ggagttggccgctgtggaaaggccctgtcccacgtggcgggagtcccacatttctttctccgacaacctgataagcatctccttggcccaaagtcctgggagctgaaagcagcgcctcagtg

SEQ ID NO: 462467 - DNA, 122 bp, Homo sapiens
ccagggctctccccaccctccccaggctctcctcttgcatgttccagcctgacctagaagcgtttgtcagccctggagcccagagcggtggccttgctcttccggctggagactgggacatc

SEQ ID NO: 462468 - DNA, 122 bp, Homo sapiens
cctccttctctctaggtttggctgccgccttctagccgggcgttcgcggccccgccggcccgactctcaagcctcagctcccaggctaggctgtggccgccggtggcctggggagagtgcgg

SEQ ID NO: 462469 - DNA, 122 bp, Homo sapiens
ggcaggcgtcttctccgagacccgcggcgctgggagctccgcgtgcgaacttgcccggggcgaaatctgttgcccaccctggtcccaccgtgcgagcacacctaggcaggtgcgactaaggg

SEQ ID NO: 462470 - DNA, 122 bp, Homo sapiens
ctcaggccgacctcttggatctggtgacttggagcaagggaccttcctgcggcatctgggcggctcaaggcccgcggccttccctaggcgggctccagcccactccccgggactgccgccgc

SEQ ID NO: 462471 - DNA, 122 bp, Homo sapiens
gagaggacggagatgagtgacaacgcgtgcgcactggggcaccgagcacagaccagagaacggggatgtctgtgcgtgcggagtggaggaggggggagttcctggtgactggccgccggccc

SEQ ID NO: 462472 - DNA, 122 bp, Homo sapiens
agtccttggccccagcctgggcttggcaggttcctggtctccccaggacacccccactttcgctcctcccacccaggcaaggagatctcttaaggggtagcgctgttcttcaccttggcgag

SEQ ID NO: 462473 - DNA, 122 bp, Homo sapiens
aaacccctccccggacccacccccttccccgaaggcggccgccgcagcaggcccggcctccggcctcttttgttgtaattcgagagcggccactcccagggccagagggagctccgcggggg

SEQ ID NO: 462474 - DNA, 122 bp, Homo sapiens
gaaaatgagtgagactcaaaattcaacaagccagaaagcaatggatgaggataacaaagccgcaagccaaacaatgccgaatacacaagacaagaactacgaggatgaattgactcaagtag

SEQ ID NO: 462475 - DNA, 122 bp, Homo sapiens
ttgcagccaaacctctctgcttaggggaatcctgcagatacctttttattctttctctttcgttctccagaggatatcatcatggcagtctgagttcaaagtgggtttttgtcatttctgtg

SEQ ID NO: 462476 - DNA, 122 bp, Homo sapiens
ctcacggcaaagggatgcgagagctggaactcttaccaggcctgcggaaactcagccctccggcagctaatcccgcccgccagcccccgtcctctctctctttctccctagctgaaggcgcc

SEQ ID NO: 462477 - DNA, 122 bp, Homo sapiens
ggtgatgacgatggacagggtgacgaagatcatggtgaacagcaggtactcgccgatgagcgggatgaccagcgaggtggacgggatgatctcagtgatgagcagcaggaagacggtgagtg

SEQ ID NO: 462478 - DNA, 122 bp, Homo sapiens
ggaaaggcaggcctggaggaaaggtcggtgagcaaaacgcaaacatggacgtggtttaaccgggtccccaggccaagtccccgtgagccgggctccccaactccagctggaccgtgccactg

SEQ ID NO: 462479 - DNA, 122 bp, Homo sapiens
aaagctaatttacactagcaaaactgggccttcctagtcttattctcctgtctcaattaccggtttaaaatagtaaaacaacagtaataattgtagttataagagtaatgttaatcagtgat

SEQ ID NO: 462480 - DNA, 122 bp, Homo sapiens
accaccccaccccaggggaccccaggctcctaactctcagaatcccacagtctgtattggcggaagacgggctggcacccttgagttaggcccccagtcgttggcacagataaggggagctg

SEQ ID NO: 462481 - DNA, 122 bp, Homo sapiens
tccctgcacctgctgtggaggaggaaggtgacgctgcactgtgccaagctctgccaatctcggtttaagtctgggcattgccactaatttgctgtgtgagcttgaataagtcacatttcttt

SEQ ID NO: 462482 - DNA, 122 bp, Homo sapiens
tcagttgccttgcctataaagtgaagattactatatttatcacaaacacaagcagtatttcgaatgctttaactatactaactactttcatccccataacaacgttgtgaggtgggtattat

SEQ ID NO: 462483 - DNA, 122 bp, Homo sapiens
aactgctgggctctgctctcttcatcttcatcgggtgcctgtcggtcattgagaatgggacggacactgggctgctgcagccggccctggcccacgggctggctttggggctcgtgattgcc

SEQ ID NO: 462484 - DNA, 122 bp, Homo sapiens
gctgcgcccagcggagcggagacccggttggctgggcccgcgcccccggccccactctcgcggcaggacacctcccacggggctgctcccactccagaccgcaggcctagccccgcgccgcc

SEQ ID NO: 462485 - DNA, 122 bp, Homo sapiens
ctgcacaggttctcatgatgtacaggtctggattaatacaatcacctgtttttccctttgcggcccagggaacatggaggccattggacaaaatctgctacatgtgtttgaattcaaccttt

SEQ ID NO: 462486 - DNA, 122 bp, Homo sapiens
gagcagggaacgtcaacaagggaggagaccttggcaatgcctgcacagcccgctcagccgcgtagcagagccctcacagtcgctggcttcatgcggtgtagagaaagctggttaaattcatc

SEQ ID NO: 462487 - DNA, 122 bp, Homo sapiens
aggaccacgaagaccctgggatctcatgctgagggtgcacagcccggcaagggtgcacagcgacccagccatggttacagcaaagaccgcgggtggaggtgggggcgtggtcaggcaaggtc

SEQ ID NO: 462488 - DNA, 122 bp, Homo sapiens
ataccccatgctgaggattaatggtcccgccggacctttgattcaccagtgccttttcttcgcccttgacaaattggatttttaggaatgggaaggtcgcctggaccattgtgtgctagcca

SEQ ID NO: 462489 - DNA, 122 bp, Homo sapiens
cccacgtccacaccttatccaggcgacacccacgcccacaccttatccaggcgacacccacgcccacaccttatccaggcgacacccacgcccacaccttatcccggcgacacccacgccca

SEQ ID NO: 462490 - DNA, 122 bp, Homo sapiens
actatctttaacacctgaaagtggggtgactattggctggaatgaaaggctacatggtttcgaagaaagccccagtttctgaactgtgagttggaggccacacttcacaccaggcaccccgg

SEQ ID NO: 462491 - DNA, 122 bp, Homo sapiens
acaagcgaagccaaccagccaagccgcgccaagcgaagccggtatgcccgaccgcgcatgcgcacctctgacagctcgtcactgcgcgtgcgcacaaccgacaggtggccaaccgttctcag

SEQ ID NO: 462492 - DNA, 122 bp, Homo sapiens
cggaggcttttggatatggggagtgatggtgtcctgtctgtctcccccctcggtgtctgccgttgacataggggccagccagccctagacgggatgacttccgttcctgaggacagacacag

SEQ ID NO: 462493 - DNA, 122 bp, Homo sapiens
aggttgggaagactgcctctggccttgacactgagtttcaaactgaggtgctggactttgcgatggtgccctccagtgctggttgtagttggttttccaccacatgtgcctcacctgagagg

SEQ ID NO: 462494 - DNA, 122 bp, Homo sapiens
ccgactgtcaaatacagtcaagtacaagttccgtctgcacgctcccattttgagcgggggcggggggaattcacaaaaaagccaggccactcccacgaagcatttgctttagagaaaaggag

SEQ ID NO: 462495 - DNA, 122 bp, Homo sapiens
gaaagaggttcggccctggtcacagactgggcataaaatctgcatatttatagcagggtccgccgaaagcctaaaacaacagtgagtttcagggcaggatctctcttgcttgtgttgcattg

SEQ ID NO: 462496 - DNA, 122 bp, Homo sapiens
gaaaagagagtgcgttcccacctccagctctggtgcagttcccacggagcaaagcaaactcgactgaatccaagtgatctgtatctgccaaaaaggagaggacaagaaagctggtcacttag

SEQ ID NO: 462497 - DNA, 122 bp, Homo sapiens
agattagtcacacagtataagaaagaagcattaaaaatggccagaaaaattcccaagtcacgagattgaggcaaggagtttctaaataaggtcagtaactgcatactggggaagtgggataa

SEQ ID NO: 462498 - DNA, 122 bp, Homo sapiens
acaatttacctgtttgcatatgtctctcatacctcactataccataggctattggagagacgataccatatgttactcatttctgtaatagccccagtgtccctggcaatgaatggacaata

SEQ ID NO: 462499 - DNA, 122 bp, Homo sapiens
tacctacgagctgagcttgcacgcacattcctggtgtgtacatgcatgcgtgcacgctcacgcaatgtgctaagtgcacaggaaggagaccagagccctgaggcgttcttttgaagtctaag

SEQ ID NO: 462500 - DNA, 122 bp, Homo sapiens
cctccttcgtgtgggcctgggctttgcatccgtgccacaggtagatgagggccttgttgacgttaagcaccaccatggaagttctggacctcaggctgctacagtgacaggccacttccagc

SEQ ID NO: 462501 - DNA, 122 bp, Homo sapiens
ctgagaggctttacgggcaagctgccatgccagcaggtcctagagatcttaacaaaggcacgggctccagggaaggagaggacagccagagcgccatgcgtgtgaacacgtccacagtgacg

SEQ ID NO: 462502 - DNA, 122 bp, Homo sapiens
tgcaggaggtatgcacacagtaggtgtgcaggctttgagtagaccttggaactgttcccccgcactgccgcctgctctctcccttacttcagcacacagctccaagctggggcagtctcttt

SEQ ID NO: 462503 - DNA, 122 bp, Homo sapiens
aaataatctaccgctgacactcaacaagaaccgtcgtagaatggacaagtcttcggatcgcgctgtgcagatccctcagcaaattgtgacagtattatggcactttggcctaagctgttaaa

SEQ ID NO: 462504 - DNA, 122 bp, Homo sapiens
gcgattgcaatacttacatggtgcaagactaactttctgaatgattatgacaaatgaaagcgtaaatgccattttcggtttttggaatatgaaaatacatggaatgaggcgcacctcatgct

SEQ ID NO: 462505 - DNA, 122 bp, Homo sapiens
agccccggccgcagggggcagctcactggtcagggtgtgccagcgctccagggctgcgtccggctgctgcaggcagtcactccagtgcttccgagcctcgcctcgggcacctggccccaggg

SEQ ID NO: 462506 - DNA, 122 bp, Homo sapiens
gaccggcggcgcccacgtggcctccgcgggccccgccagagcctgcgcccgggccctgaccgcacctctcgccccgcaggaccatggccaacctggagcgcaccttcatcgccatcaagccg

SEQ ID NO: 462507 - DNA, 122 bp, Homo sapiens
gatgcggactaggtggacaccacccatcaaccttggtgacagtggcggagtgacaacaaccgagaggcaggggcaggagaccaccctgtgccgggcacagggcagcacagacccctactcag

SEQ ID NO: 462508 - DNA, 122 bp, Homo sapiens
ccagagggacacacagacagacaaacgttttgttgtgaaaaccaacaacttacttccttccgggtttggtgcagaaagaatgatgctgtggtttttctttacttcttcaacatattgagtta

SEQ ID NO: 462509 - DNA, 122 bp, Homo sapiens
tgccccccgggctctgggatggaaggcggtgtgcgcctgcgaaggtcagaggcccagcggcgccagggctcctcggcggagagccgcccgggtccggcgctttgctttcgccttctgcccca

SEQ ID NO: 462510 - DNA, 122 bp, Homo sapiens
gaacgccacgtgaacgctccctgggaagaacttctggtgaacgcaggggaggaagaacgccgggtgaatgcacagtggggagaacaccgcgctaacacacacgggtaataactccacatgaa

SEQ ID NO: 462511 - DNA, 122 bp, Homo sapiens
acagctatctaaccagggtttatgcacaaggcacagagtttggctctaaagagcatggtgcgtgcatgactttggtgactcacagtcgggggtagatctaatggatgaatgtaaggatgggc

SEQ ID NO: 462512 - DNA, 122 bp, Homo sapiens
cccacactaaattccctgggcagaattcttccgagtgcagtgaatccagcctggagagaacgccttcaacatggtcagtgttggctctggcgctttgcaatctcctcctggatacgcaactt

SEQ ID NO: 462513 - DNA, 122 bp, Homo sapiens
cgtcgtcgacgggggtggccgtgggagctgagcacggagaagactccctctctcggaagccggatcccgagccgggcaggatggatcaccaccagccggggactgggcgctaccaggtggtg

SEQ ID NO: 462514 - DNA, 122 bp, Homo sapiens
ggagctcccgcccccacccctgtggtcaaggagggccaggatcggggtgagcagccaaagcgaggggggagtgtggaggcagtgctgctgtgtttgaggacagtgttcatctcttgacaggc

SEQ ID NO: 462515 - DNA, 122 bp, Homo sapiens
gagtagagaagatgaccaggctcatagccttctgtggttcctcgcacagtgccctggggacgtggctaggtgtttacacactgccacaagcagggccaaattctgtctacacattcagtgtg

SEQ ID NO: 462516 - DNA, 122 bp, Homo sapiens
cgccgtgcgccaacagaataatgcacgtcgattgggcagctccaagggacaacccactaccgcttgcccgcccaccacccacttcccgcgcagttccaaaccgcgaccagagagtctggcgc

SEQ ID NO: 462517 - DNA, 122 bp, Homo sapiens
cctgcaggagttctcggtgggtcagaagtccggtaccaaaagcaggatgtcagacagtgccggctccacatgtgggccctaccttaggcaagtcacttaccctgattgagcctcagtttctt

SEQ ID NO: 462518 - DNA, 122 bp, Homo sapiens
gaggacagggaccaagtctgtcatgttctccattttatgcaatgtgtctgtcacttgacacgaggttaacagatatttgctgattgaacagatttttgtaagagtctccctttgtctctgtc

SEQ ID NO: 462519 - DNA, 122 bp, Homo sapiens
gtggggaggacgtggcttccccaccaggagatacgatgtcactatcagcatcgtattggccgtcctaagagacagcttccccctcactcaccttagaagtttcctgtcctatctgactgtag

SEQ ID NO: 462520 - DNA, 122 bp, Homo sapiens
gctcttcctactctcctcctgggcaagtttgtaagtttagggtgagggtcggtctctcctcgcgccctgcttctcggcttagcttgctcagatccgcacccccccactccccacctcagacc

SEQ ID NO: 462521 - DNA, 122 bp, Homo sapiens
gggctggagttttgcggtttcgtcggcatccaggggtaagagggcgcggcagggcagcaccgcacctgaccggaagttcagggaaggtaatcctacagtctttcagaaagtttcctctccca

SEQ ID NO: 462522 - DNA, 122 bp, Homo sapiens
agctcctccaccgcctgtgcgtgtttctgcctcatctcctggacctgagcctcatgggaccgcgtctcttcatccagggccttcttcagcaccgtcacctcctgctccctcttggcccttgg

SEQ ID NO: 462523 - DNA, 122 bp, Homo sapiens
cgctcggcgcggctggtccacgccccgcccacgcccctgcccattggcctccccgagacccgctggcagaactttccatactattggctgcgaaacctgccactcatatgcgactccacctc

SEQ ID NO: 462524 - DNA, 122 bp, Homo sapiens
acgtacatggacaagtcgatatagacagatttattacagtcagtccaacatacacagggacgctgtaaacaggggcgcgggccggagagcgggtgtgcaaagtgggcgcagggccctggggc

SEQ ID NO: 462525 - DNA, 122 bp, Homo sapiens
cctgggccatgaggtgcagcgccaggccgttcttgatgcctgtggctttcttgatcttggcgcgcttgttctggaaccagatcttgatctgggactcgttgaggctgagttcctgggccagg

SEQ ID NO: 462526 - DNA, 122 bp, Homo sapiens
agttaatagctggcgctcttccactaataaagttttattgaaataaagcatttaaaaaggcgcccgtcattcttcccccagcgaccaatcgaagagtagaatgcctgcgtccctcactggag

SEQ ID NO: 462527 - DNA, 122 bp, Homo sapiens
cctctgaaaggctccagccctggacaatattgttgttaaccagggatgtagcattagtaacggcagactctttctgtggccctcatttttatcttgatgctttgttcccttcttttttattg

SEQ ID NO: 462528 - DNA, 122 bp, Homo sapiens
accttttcaaatgtgcaataccaagatcaccatctactttactgatagttgttactatatcgtagaaccctttataaccagctaaggtaactttctcctcaaaaatccaactttcatttttg

SEQ ID NO: 462529 - DNA, 122 bp, Homo sapiens
ggcatctgggtctggagcaatggcaagctgctgtagtaggaaggcttcaaaagctccaaacggggcctccagatgctgtgagtcctctcctaggacgccccatgtgggaggccccatatggg

SEQ ID NO: 462530 - DNA, 122 bp, Homo sapiens
gtggcctcatttttctctttgcaaagcatgaggactgggagcagagatcagcagtccccacgactggggccgcctgggacgcgctaagccggacacaaggcattttctcagacccagccccc

SEQ ID NO: 462531 - DNA, 122 bp, Homo sapiens
gaccccggcgctatttgatatttgcctccttgacactcatttaggagctcgcagcggtaacgtagacattggacaagtccagcctgaaaccgaagcctcttgaaaggggggagacggggaga

SEQ ID NO: 462532 - DNA, 122 bp, Homo sapiens
ggaggcggacctccgcgcagagccacgagggaaccgctagccagtcctgggtgaaactgacgctgccaggcaagtggcgcgcggggatcccggtttcccagcccccttccggcaggcagcag

SEQ ID NO: 462533 - DNA, 122 bp, Homo sapiens
gtgcagatatggggcggaccgactgacatcaacgctgtagcagcatctgtccctggtccgcgctgactgggcccatggagaagaaggaagtttagggttgctcggccatatttgcctgttcc

SEQ ID NO: 462534 - DNA, 122 bp, Homo sapiens
gaagggagaggggccggcctggggcggggttaggcaggtgagtgacaggctccagggggccggcccctgcctggtgccccgagcgagccgggagtagctgcggcggtgcccgccccctctct

SEQ ID NO: 462535 - DNA, 122 bp, Homo sapiens
cttgtctcaatttaaaacacaggcccaggtggcacctcaggacccatcttgaaggattggcgcttttagtgcacattcattcacatgggaatatatcatttttataaagttaaaaataatga

SEQ ID NO: 462536 - DNA, 122 bp, Homo sapiens
ttacctaatacctactgagaatttaatgtgtcccacagagtgtgctcagagctttacatccgctgcctcactgactagctggtgcccccattcggagacagatatttttattatttcgtagc

SEQ ID NO: 462537 - DNA, 122 bp, Homo sapiens
ctgggccacaggtgctgtgtctgtgggagctgggggcacgcgggatggctgggggccgggcgtgtggtcaggccaggtgtgtggtcaggccgggtgtgtgatcaggcgtgagtttgggaagt

SEQ ID NO: 462538 - DNA, 122 bp, Homo sapiens
gttcctgtggccaggaggttggtgactgaaacattcacacagggctctttgatggacccacgaacgctcttagctttctcagggggtcagcagagttattgaatcttaattttttttaatgt

SEQ ID NO: 462539 - DNA, 122 bp, Homo sapiens
cgcgcagctgacgactgcattgccatctgcacatacagaaaacccagccccagtaagttccggcttgggcaggtcagtgtgttgtctgaagatgctggatctgggaagaaggatgaagcagg

SEQ ID NO: 462540 - DNA, 122 bp, Homo sapiens
tgtgctgtggccccaccccagccacgtaaatagggacaagttccacctgccataggacaccgcccgccccctctccagacacctgcctcttctcttctgcagctgacagcagggcttctcct

SEQ ID NO: 462541 - DNA, 122 bp, Homo sapiens
gtcctagccaatgttcaaggacatctcattcacatcccaacaggacttacccagttgttgcggagacacctagctcctgccccaccagactgtgtaaccatcaaagtccttgtgactcttca

SEQ ID NO: 462542 - DNA, 122 bp, Homo sapiens
tccgccatcttgaagtgactctgtcggggactacaaatcccggcatacaaagcagctacccgcttttgttgggcgttcaggggccagagctatctcagggtccctgtttgtgagtaaatcga

SEQ ID NO: 462543 - DNA, 122 bp, Homo sapiens
gagggcggtgcaggggctggggggcttgccagggtctcctagcacaagccacccagctcccggcaggtggagtcaaatagacgtgtctcctccaccgcctccaccctcccagccgagggccc

SEQ ID NO: 462544 - DNA, 122 bp, Homo sapiens
cgtcacaactagtgggggagagcatgatattacttcaaatatgacagtggctttacaccccgtctgtgatactgctcctaatttccagtagctaaagtaagatgtgcctcccaatagagtag

SEQ ID NO: 462545 - DNA, 122 bp, Homo sapiens
gcacagggctggacagatgggagggtctgcagggataaagtgggagggggggcggtgcaacggagggagccgggcaaacaaaggctcagaagcagaggagcccagcccagggacacaaaagg

SEQ ID NO: 462546 - DNA, 122 bp, Homo sapiens
gcctgggctgaccgcagtcgctgggaatgggtctcacacccttcaatgggtacacagctgcgacgtggactcggactgcagtctcctcagtgggtatgaacataccctatcacggcgccagt

SEQ ID NO: 462547 - DNA, 122 bp, Homo sapiens
gctcgctgtagtcatagcctgaccggtacaggtcgcgctcactcaggacggccctcgagtcgcaggactcataagagtcatacctgcagaggcatggggtgagcatcaggtggagcccctca

SEQ ID NO: 462548 - DNA, 122 bp, Homo sapiens
tagcatatagaagtcattaacttaatgcttggtctcttgcagtcattccaaacataaatccggaagattgggatgatatatggataaaaaatcccaaagttttgtttgctcatttttgagac

SEQ ID NO: 462549 - DNA, 122 bp, Homo sapiens
aaggtggggctggaggcatgtgcacatgcgtgcacacacgtgcatgcacacacactcacccgggcatccacgtgcacacctggccccatgcacacgcctgcaggagcgctcgcatgcacaca

SEQ ID NO: 462550 - DNA, 122 bp, Homo sapiens
tacgatatctgaaaaggggcttaaaaactcaaacgcagcgggtagctgtgattcaaaacccgcgctagatacgcctcctcccggccctcacctccgttggtccagccccgtcagaccccgcc

SEQ ID NO: 462551 - DNA, 122 bp, Homo sapiens
caaatgcacagaaggtcacagaatatgcaactcatgagctggacggactcaccttgctgtcgccggtcctcctgcagcttcagtttacaggtgtgcaaactgccaggcaggtggctgctgcc

SEQ ID NO: 462552 - DNA, 122 bp, Homo sapiens
tgcttcgaaaagcctggaaagagcaactcagttgtaacttggggaagttaacgatccgcccgagtgcagaggaaaaccagaaacgccttgccttcagctgaaccaccgtttgtgcgagctgg

SEQ ID NO: 462553 - DNA, 122 bp, Homo sapiens
agcgagcgctgccctcgccgccgggtctctcagaggctgggagctgggggtcgccgccgccgccgcccggtgattcccatagagaagacaactctgtgctgcctctccaagagctgccgctc

SEQ ID NO: 462554 - DNA, 122 bp, Homo sapiens
ctctcacccaggtccagtgggcgacaggccggacttagactcggatccagacggggaaggcgcagcatctcttgcagctgcagagagattgccaccgcaaactggagccatgtggttcgaat

SEQ ID NO: 462555 - DNA, 122 bp, Homo sapiens
cgaactcctaacctcaggcgatcctcccgtctcagcctcccaaagtgctaggattacaggcgtgagccacggcgcccagcctggattttttttaaaattttagattcatgaggcatatgtgc

SEQ ID NO: 462556 - DNA, 122 bp, Homo sapiens
gataccgagagccagccaactctagctaaaaacgaaactcaagccaggcggggtggcgcgcgcctgtagttccagatactcaggaaggtgaaggggtaggatcccttgagtccaggagttcg

SEQ ID NO: 462557 - DNA, 122 bp, Homo sapiens
acaaagagtgttccactgattctgggatgggggtgacatggaccaagtcagacctcaggacgggccactgcccaggcaggacctagcttctgggagcctatctaggctgatggagatcaatg

SEQ ID NO: 462558 - DNA, 122 bp, Homo sapiens
gggtatgggctgcctcgggttgttgctgttacaaggaaagaaaagagttcccctgcccaccgcctcccagccactgggctacctcctggcaggaaatttgcaaactgagtttaacaagttag

SEQ ID NO: 462559 - DNA, 122 bp, Homo sapiens
ggactcggccacattgacatagagggctttggccagcacattcaggtggttcatggtgtccggcgggcctggggccccggctcccgtgggggcgcacaccgagctgcccgggccgcgtgccc

SEQ ID NO: 462560 - DNA, 122 bp, Homo sapiens
gcagccgcacagtgaaattactgcagggtcagagccaagtgctggctgagattttaacagcgaagacagcagagcaatggggataagctgaacaaaactctattgcagcacagacggaaatc

SEQ ID NO: 462561 - DNA, 122 bp, Homo sapiens
actcagggcgattttagttttatgctcaccatctgattggcctaggtaaggtgcagagctcgggtgacgtaatagcagagaagggctagggagcggttgccgagcaggggctctaccgcggg

SEQ ID NO: 462562 - DNA, 122 bp, Homo sapiens
acaaaaaagggtcttttcacgaattccccctttccattcttcttctccctgagatctttccgttcagcaataagtacctttgtctgcctgcccttctggagcaagggtcctggggcaaaggg

SEQ ID NO: 462563 - DNA, 122 bp, Homo sapiens
ctgcgaggctcggtgcccgcagaggctccggcggaaacggctccatcccgggcgggctcccgcccccggcccgcccccgtccgccccgcgccatgtatggcgcttcctccccgagccctaca

SEQ ID NO: 462564 - DNA, 122 bp, Homo sapiens
gggcacgtgcgtggagtggctccacagatacctggagaacgggaaggagatgctgcagcgcgcgggtaccaggggcagtggggcgcctccctgatctcctgtagacctctcagcctggccta

SEQ ID NO: 462565 - DNA, 122 bp, Homo sapiens
cggccccggccccgccccgcctgccccactcgcacacgggctatcactcagcctgcgccccgccctagctcgccagaggctccgccccacccgcctgccaacacgctgtcactcagccttag

SEQ ID NO: 462566 - DNA, 122 bp, Homo sapiens
cctccttccgggcctcctcctgcagacgcctgagttcctggctccgctccttttcctgggcggctctgcgctgaatctggcgtaaggagaccactacagagaggccaaggcacagaggaggc

SEQ ID NO: 462567 - DNA, 122 bp, Homo sapiens
aaggtgtttgcagcccttggggccaggcggcgggaaggcctgtagacgccagagggcgctcgtgctacatgcaactcaggagctgctggcacccgccaaggagtgctgagcgcggggagccc

SEQ ID NO: 462568 - DNA, 122 bp, Homo sapiens
gggacgtggagagaaaggggcattcgggctggacaggatatttaacgtatttgtgctctacgtggcttgttttcatgagtaccgtatgtttacacaaagtaggtactatatataatatatcg

SEQ ID NO: 462569 - DNA, 122 bp, Homo sapiens
cctcctcaggtaccccctgccccccacagctcctctcctgtgccttgtttcccagccatgcgttctcctctataaatacccgctctggtatttggggttggcagctgttgctgccagggaga

SEQ ID NO: 462570 - DNA, 122 bp, Homo sapiens
agccgcatggagaagaccccagtggcgctgttttaaaaagcccccaagaagtgaagagcgcgcggcgcggggccggggcccgagcgaggggggcggatcgcgccccgcggggtcgcgccagg

SEQ ID NO: 462571 - DNA, 122 bp, Homo sapiens
gcctctattttcctccttccccagactggcaaaagagaatctgagctcccagccccgccccgggagctctagaaggaagccaggaggaacctccaggcctagggctaactcagaagggggat

SEQ ID NO: 462572 - DNA, 122 bp, Homo sapiens
ggctgacaggcctcgaccgcgcggcccaggcggccggctcaggggagaggcccgggggcccgcgctgtcctcgcagcctcaacccacacggccactgccgccgccccctagagcatccttgc

SEQ ID NO: 462573 - DNA, 122 bp, Homo sapiens
gacttgaggagcccgctggtgctcccggtaggcagccagcctccgcaggaccgcgaccagcgacacgatggattctgggcaatacagcacgtctacggtgaaagcttcaggttactgaaagg

SEQ ID NO: 462574 - DNA, 122 bp, Homo sapiens
gcttctgagcactggggacaagtcgcggaggccctgccattccttcctccgggttctgcacgcaccgcggtgaccacctccccccgaggtcctctccccgcaccttcccaaaacgtgttccc

SEQ ID NO: 462575 - DNA, 122 bp, Homo sapiens
cataaggcaaccatccccgccccgcaggcaaaacaacccctcagcatttctaaaactgcccgtaattgccctaaattgctccaaaggcctttagagcactcccgaaatctctccatgcgctg

SEQ ID NO: 462576 - DNA, 122 bp, Homo sapiens
tttcctgagattccccctaagcaaccactagtcctttacgtcttgaaatctttaggccttcgagtttgctgtgaaaatacaaataatgtgtttacagttaacaccgcaaagggatggctttc

SEQ ID NO: 462577 - DNA, 122 bp, Homo sapiens
ggctgtaggacggacaagaaccgaactaaggaaagtcctgcaacatttttggtgtgcaaccgcggggactcaagaagtggtgagtgaaatggggattcaaaacctctttctgttgctcctaa

SEQ ID NO: 462578 - DNA, 122 bp, Homo sapiens
ctgtcctcctcctcttcctcccctgtgccttcacttctgcctttatttcatgttcctgggcggcaaaggagggagccaggcatggcccctgctcaggctctgcctgtggcgcctgccgcctg

SEQ ID NO: 462579 - DNA, 122 bp, Homo sapiens
cccctagtgtgtgtttattcagatcagccatagcctagtcacacacagccagggattccccggaggggtttcccatggttctaattagatgaactatttgccagaagtgtagacagcctcac

SEQ ID NO: 462580 - DNA, 122 bp, Homo sapiens
aatgcagtggccagaaaggtgccctgctcactgcagagggggtcctgcagcatgtgacagcggggctaggaacgagccaacttgggcctcacacgctcgcaccaaatgcatctggaaaaatc

SEQ ID NO: 462581 - DNA, 122 bp, Homo sapiens
gaatatgcgggctggccccgaggaccggctgagtattttcccagggagttaataacgtggcggccgagctgtcttgtccaattcactgaagccaggcctctaatcaggaccgagtttcttat

SEQ ID NO: 462582 - DNA, 122 bp, Homo sapiens
tttatagagatgttgggaaaggcttgcttgaaattacacgtgggacttttaatagataggcgctttgaccagctaagcaacagggctcccctcgtgtgggacttttagaatgtagcaaccac

SEQ ID NO: 462583 - DNA, 122 bp, Homo sapiens
tatattggttcttcaatgtctgcggcaggcttttgtaggttttgaatcttcgcagtggcccggagctcttgccctccctgtatataccctcctggtgacaaggcaaagccacacccttgagc

SEQ ID NO: 462584 - DNA, 122 bp, Homo sapiens
aggcaggctgttcttagagaagccagcaaatactgaagggaatacagatgtgtgtctcttcgaccactaggtggccacagaagcaaagcattgctcatttgggtggttcccaacacagacac

SEQ ID NO: 462585 - DNA, 122 bp, Homo sapiens
ctgcgcgcggtgaggtagtttttgcgtttggctttgccgccgcggtgtagtccgcgggggcgtctcgcgcgggcagactgccgcccctcaagcgtggttcctgccgggaatgactggggttg

SEQ ID NO: 462586 - DNA, 122 bp, Homo sapiens
gctgtcccagcatcacgggctgcgtcggctgcccttttggcttgcaggggacaggcagagcgactcagagaaaagtcacctgaggactagatgcggctaatggccagatgagcagctacatt

SEQ ID NO: 462587 - DNA, 122 bp, Homo sapiens
cagagcctggctcccctccgccaccatgagcggctgctccaaaagatgcaagcttgggttcgtgaaatttgcccagaccatctttaagctcatcactgggaccctcagcaaaggtatggaaa

SEQ ID NO: 462588 - DNA, 122 bp, Homo sapiens
ttgtagcaaactgcaaaaatacaggaaagtagaaagtgggaaaaggtgctgcgaatctgccgtccagacctaaccgagaaggcatggcatgttgccgccctcagggcatgtgccgatggctc

SEQ ID NO: 462589 - DNA, 122 bp, Homo sapiens
ctgcagagaaggagcgcgaccgtctcccctcttagtgtttctacagagaaggagcacaaccgtctccccgcatgtgagagatgcttcctgcagtggcgctggcagtcagaggcgctgcggga

SEQ ID NO: 462590 - DNA, 122 bp, Homo sapiens
gggaagacctcagggtctccccccaccaaggcgcttcccccaagggccctccctgcagcccgggacccgccacaccctgtcccagctgccgccccgtgctcggtgatttcgaaggacactgg

SEQ ID NO: 462591 - DNA, 122 bp, Homo sapiens
aggaggacagtcggggaggacagttccagaggaggacagtcccgggggaggacaatcaggcggaagacagtcctggaggaagacagtcaagaggagcatagtcctggaggaggacagtcgag

SEQ ID NO: 462592 - DNA, 122 bp, Homo sapiens
actgaggactagagagactgatatgggggagacaggaggatgtttatttaaggtacacagcggctcagcagatttacatctaaaaagctgagcatttcaacaaacacagagtgggttttttt

SEQ ID NO: 462593 - DNA, 122 bp, Homo sapiens
ttgcttacttttcccatgagctttggtgtcctttctttttcttcttttgatacagggtctcgctcttttgcccaggctggagtgcagtggcacaatcaaggctcactgtagccttgacctcc

SEQ ID NO: 462594 - DNA, 122 bp, Homo sapiens
agtccctttcaagttccctgacctccacaaccacagcaacttcccctctgcctgtagttccgctaggaaaaaaaggccactggacagctaccctgggggtctgggtatgagtttctcctacc

SEQ ID NO: 462595 - DNA, 122 bp, Homo sapiens
gatggcagaggcgatgggacaggctttctaacgatgaggggctggggatcaacgctctcacggaagctaaaagagccccagcaaccacccgcctgggccctgagctctctccaaagcgggag

SEQ ID NO: 462596 - DNA, 122 bp, Homo sapiens
ccactatagcctgcgtgttctcatgtgctaatggctaggagctgtgactttccattgagccgggacccagccagatctcaaaacaaggagccaggagagacacctcaactatgttctccttc

SEQ ID NO: 462597 - DNA, 122 bp, Homo sapiens
tgcagccttgtgcccatgagttaaagcctcggaatttgcctgaaactttccctgtcaatccgagatggtcatgaccaagccactttgcttccatacatcttcagtgcctccttccacacaca

SEQ ID NO: 462598 - DNA, 122 bp, Homo sapiens
cccacgccctgagccccgcagtgtcccagcagcctagttctggcctgcgggagaccctgtcggacaaggaggaaaagcagtgcgcactgggccctcagatcagccccctgaagcagagcagg

SEQ ID NO: 462599 - DNA, 122 bp, Homo sapiens
cagacgtccccgtgcagccccggtcagcaccccgtggggacagctccgatcagcacccgacggcggacagctcctcccgcgcctcccgcctcgcccgccaccccgctccgggccgcacccgg

SEQ ID NO: 462600 - DNA, 122 bp, Homo sapiens
ctacctccaaccgtcatgactccagttctgtgctggatagagttcggccctgcccctcctcggttcctgccaataggactgccaccacccaagagcagagaggaggtagggagagcagggct

SEQ ID NO: 462601 - DNA, 122 bp, Homo sapiens
cgcacaccgcactcacccccatgccacccatgcagtgctgagcgtgtgcagttgaatttgcggatgctgaggtcccatgcatctgagtggcatcagtaagcgcagcccgtggtcagcaaagc

SEQ ID NO: 462602 - DNA, 122 bp, Homo sapiens
agatgtttgatgctaagaacatgatggctgcctgtgacccccgtcatggccgctacctaacggtggctgccattttcaggggtcgcatgcccatgagggaggtggatgaacagatgttcaac

SEQ ID NO: 462603 - DNA, 122 bp, Homo sapiens
aatagaaaggaatgtgtctgggttaagataaggtggagaccaaggttcttattatgtagacgaagtctcatacgtaacaggcttcagagagaataattggcaaatgtctcttatcatgtgta

SEQ ID NO: 462604 - DNA, 122 bp, Homo sapiens
cggtgcatgtcctttctgcagctgcctttcagcacaggtggttccactgggggcagctaacgctgagtgacaaggatgggaagccacaggtgcattttactcaagtcttctctagtcaatga

SEQ ID NO: 462605 - DNA, 122 bp, Homo sapiens
gttctgtgtttctgtcactctgccccccctttcctctgtgtttctgctattcttttcctgcggcaacaaaagtgtttaataagcatatgtgtatgtggcctctgtgtacctgtgacttatga

SEQ ID NO: 462606 - DNA, 122 bp, Homo sapiens
ccacccccgactccaggtcccggaaaatttgccaagggtttgggggaacattcaacctgtcggtgagtttgggcagctcaggcaaaccatcgaccgttgagtggaccctgaggcctggaatt

SEQ ID NO: 462607 - DNA, 122 bp, Homo sapiens
tggcccggagacccctttgcctggatcccgccatcttggattctggaacgcggaggagggcgggagagggaggggcgcggatggctgcggatggccaacagggcgctcgctgattggcagag

SEQ ID NO: 462608 - DNA, 122 bp, Homo sapiens
ccgcgagcagccgcctgtaccagcctggccgcgcagcctgacgtcacaaagccagccacgcgcctgcgcggcccacaggccccgcccctggacacgcccttgccacctttctttttggcagg

SEQ ID NO: 462609 - DNA, 122 bp, Homo sapiens
acaggccgctgcaggttttccatgtgaacgtggaggtgaaggacattaacgacaacccgccggtgttctcgctcagagaacaaaagctgctgattgcggaatctaagcaatcggactcgcgt

SEQ ID NO: 462610 - DNA, 122 bp, Homo sapiens
gctgagctaggggttagccaaccgggctggggtatcttactggtgatgacagcatggcctcgtcaccttcctgagggagggagtggcaggaaaccccagtcttacctcttttagcaatagca

SEQ ID NO: 462611 - DNA, 122 bp, Homo sapiens
ggcttcaaattcaaattacctttccacttaggggaaatggttggcagaggagaaaataaacgattgcgacatgttacgaagaatgaggactagcaaagaggaaggagcttaggtaaacagtg

SEQ ID NO: 462612 - DNA, 122 bp, Homo sapiens
tacgggccgtgcacaaagcgccctcgcctccctagtactccaccacgctttgaggaaggccggaagaagacggccacccccatctgacagatggagaagctgaggcccaagagagcaaagcg

SEQ ID NO: 462613 - DNA, 122 bp, Homo sapiens
tgctcagcctgactttgctgctcagaggggccaactgcacaaaagcagggctgcggcccccgggctcccgtgccatgctcggcccaaggagtgggccggccgagcacggggccccggtggcc

SEQ ID NO: 462614 - DNA, 122 bp, Homo sapiens
atctaccctgagccagaattccagaactggttcccctcctcatccatgatgaagacgctgcggctcatgtggtcacaaaggcttggtgtttcctatgtggagataccattgctgttctacct

SEQ ID NO: 462615 - DNA, 122 bp, Homo sapiens
cctctcatcccactcccggcggcccaggcacagaagggcagggccatagggagggagattcgctacggatccaggccattcctgggtgagcccttgggcaggcatgtttggagatgagagag

SEQ ID NO: 462616 - DNA, 122 bp, Homo sapiens
tccctggccgggtttggactgaacagtggattcagaactgcagcgttcaaagcccctgcccgccttagattctcatggctacctcctctgacccatccacatccttgcggctggcaggcagg

SEQ ID NO: 462617 - DNA, 122 bp, Homo sapiens
agctgctgggctggagttcctccaggggcgagcaaagggaatatgaatctgccggtggggcgtgagcgagaagccaccaaaacatgagctaggacagccttctcaagaagattctgccaact

SEQ ID NO: 462618 - DNA, 122 bp, Homo sapiens
agaaggaatttagagctcaaagggtcctttgagagcatctaatctgctcttttattttatcggtgtaccgtcccatggtcgtgaggtgagttatgtctagtcacccccgcagttatttcccc

SEQ ID NO: 462619 - DNA, 122 bp, Homo sapiens
tagctgcctgtctccgcacacccttccttctctccccttcactagcagatccctgggccacgtgcccacctgtggcatggctgagtggccgcacggctgcactctgacctgggggaggggag

SEQ ID NO: 462620 - DNA, 122 bp, Homo sapiens
gtgtgtagtcgatgcccaggactggaaaggccttgcgcggcttcatgccatgatcagtgacggaatgattaacagggcggctctctggggtgacctccggtggagcggtggtgacatcccca

SEQ ID NO: 462621 - DNA, 122 bp, Homo sapiens
ccttccaagcctcagcctagatcaggcccaggaacccagtgtgaatgtgtgtgctggggtcggggataaggtgcttctctcccgttggaaggagaaggaacatctgggctgggattccaaaa

SEQ ID NO: 462622 - DNA, 122 bp, Homo sapiens
cagttgatgccatgccctaggcagggtcagaactgaggttagtacactgaatttcttactcgttgttcttgttcagtccttcgaatacacagaagatactgttctcctggaaggcagtaata

SEQ ID NO: 462623 - DNA, 122 bp, Homo sapiens
atctccgtcagtctgcaactgtctctcggtctttcttggtgtttgtgaccttggcactttcgaagactacattcggcccagttgatctgtcgaaggtatttccctgtggctagattcaggtc

SEQ ID NO: 462624 - DNA, 122 bp, Homo sapiens
cgtggagagtcttgggtcccggtccaagcacgggcagagggctgggtgcggtggggctgccgggggctgcacgctgagcggcaccagctgaggcttggtggggagtgacgaagagcaggcca

SEQ ID NO: 462625 - DNA, 122 bp, Homo sapiens
ctcccttctcctttgacctggggcacaaaggtcccctctgtgtaggactcactgactggccgctttctactcctcacacagttcccaggccctggaactttccatccgtcttgtccttcttg

SEQ ID NO: 462626 - DNA, 122 bp, Homo sapiens
ctgttcctccttctggcccttaaggacaactccttgtctcctgctttctcggtctttccgcggcccgcgctcccctgctctgcccccgaccctgcctggctgttcctgcatcctttactctt

SEQ ID NO: 462627 - DNA, 122 bp, Homo sapiens
agaagaattttagtaaatgagcctgcttcgggtctcctcccccaagtctgtttaacatcacgcgccggcaagggccggacgcagctgaggctgcacctggaagtgggggcctccgcgaagct

SEQ ID NO: 462628 - DNA, 122 bp, Homo sapiens
gcaccgcccagaccaccctactctccctgccccggaagttacacactgccgacaccgggacgtaacttccgggaagggcttacttccaagacagacacggaagtgctgggaggcgccgggag

SEQ ID NO: 462629 - DNA, 122 bp, Homo sapiens
accttccctgtacgttaccagctcgaggtctcaggatgcgttggaccctattttggtctccggaatttgtcatcatgcagtgctattttccccattatgcagaggtggagagggattaaggc

SEQ ID NO: 462630 - DNA, 122 bp, Homo sapiens
ctgggaggcggagcttgcagcgagcccagatcacaccactgcactcccgcctgggcaacacggcaagactcagtctcaaaaaaaagaaattagttgatatatcctatggtggtgaaaatgga

SEQ ID NO: 462631 - DNA, 122 bp, Homo sapiens
ccccgagtcaggattttcccctgacgaccctcccgtggtccctgcacaatctgagagagacgcggcgctgcgggtgcagagctgccaagagagggctccaggccaaggcacagtcactacgc

SEQ ID NO: 462632 - DNA, 122 bp, Homo sapiens
cacgtaggcaaaagatgggccttgctgtggttgaacaacacagtataaaacaaatgtcagcgttatttccatcacatggacatcaggggctggagaatatatgactttgatccccccaaaca

SEQ ID NO: 462633 - DNA, 122 bp, Homo sapiens
gctctcgcttcacctctgccgggggactccgccctctcccccagcgctccaagcggagaccgcaggtcagcaagaactgaaaacgcgtctactgggccaggtctcatgtttatcttatttcc

SEQ ID NO: 462634 - DNA, 122 bp, Homo sapiens
cccgctggctgaggtcagggagccgggagcgagccagtggcccgggagtgggcggcgttgcgtttgggtgtgtcctcggcggcgacagcagcaggtgtttcttggccggggccccggaagct

SEQ ID NO: 462635 - DNA, 122 bp, Homo sapiens
gggccaagggagcgtctctgcgagggcaggcgtgcatacacaccagcggcccccagccaacgccctgacccagtacacataggcagcaaaggaggtgagcctttccctttaattatgccaat

SEQ ID NO: 462636 - DNA, 122 bp, Homo sapiens
cggtggcaccaccatccgtcgctggtccaggccagaaaataatcccctcacctcccattccggtcatatgcggcctcgtgcattgcacaaatatttaccaagcaactactatgtgccaggag

SEQ ID NO: 462637 - DNA, 122 bp, Homo sapiens
tggcctgctttatttcaaaatggaaataatatgcagccagggttcaagtgcacgatggtgcgtgtgcagagctctgtaagctgcccaggaatgcgcagccctacttctaggagccttccttc

SEQ ID NO: 462638 - DNA, 122 bp, Homo sapiens
gattacatgcatacgcacttcaacatatatgtgtgcacacacaactttgatccctaaatccggacattggcctgtttgtctgatattccatgagagttattgcccactgcccaagatgtcag

SEQ ID NO: 462639 - DNA, 122 bp, Homo sapiens
cactcctcttctaaaaagatacacaggccgcctttctcggcagtgaggagatctaaacctcgatggttttgaagtgtcactgctgcttaaagagtcttttggaattggagagcaagtctatt

SEQ ID NO: 462640 - DNA, 122 bp, Homo sapiens
tgtggcctctagggatcagggactacttacctgcgaatcccggttgcccgcccgccagcacgtccgttccctaagcagaccgcctggcctcctgcctgacccgtcttctcaccgttgcccgg

SEQ ID NO: 462641 - DNA, 122 bp, Homo sapiens
ggactgaagctgatggggggaggacccgcatcgcgctgcggttgggagagaccgtcccttcgtctagctttccttgttaggaagtccgggttgtaggtgcgacttccaggatatcccgctgt

SEQ ID NO: 462642 - DNA, 122 bp, Homo sapiens
agtcatgtattctgagcccagtgttgggtcctgcgatgggtgataccagggacccagtggcgaacaagacagttctggccccgttctgctgggactcaaagttcagggggggacacagatag

SEQ ID NO: 462643 - DNA, 122 bp, Homo sapiens
gacctgcagaacttagccaagagtctgggtctccgggccaacctgagggtacggcgctggcggtgcgggtccctgggcgggcgcggcgggaatagcggcctcggggagatgcggtgcgaagg

SEQ ID NO: 462644 - DNA, 122 bp, Homo sapiens
ctcacctctcctctcctcggcgttgccgcctttgccacaagatgaccccaatgagcagggcggctgtccccaggcctcccaggatccccagggccagggctagagttcccagccctgatcct

SEQ ID NO: 462645 - DNA, 122 bp, Homo sapiens
ggagtgagcctgcagcgagggattagcgcggtaatagccgggattagcgcaggctgcgagcgcgttagtcactaaactgcgcgttcgcatcccgagccacctcccctggcccccgagctcca

SEQ ID NO: 462646 - DNA, 122 bp, Homo sapiens
aatttgtatttcctataattttattgtgtcttcttcttttgctttttcaaaaaccatttacgcatatatgaaaccatttttagttcatgggctatagataaacaagtggccatagtttgcca

SEQ ID NO: 462647 - DNA, 122 bp, Homo sapiens
tttccagccagtccactaggggccactggtttcctttctgcccccacgctccctctctatcgcaattcgtcgcttgctagcagccgttgtctcgctggtgcctacgctgtcaaaggagccgc

SEQ ID NO: 462648 - DNA, 122 bp, Homo sapiens
gttggtcttgtacatgcgcagtgtcctagtgcccatcgtctgtttccccggccttgcccccgcccgccccgtgccgtggacatctgggcccactcatcgcccctccaggcccccggcgcccc

SEQ ID NO: 462649 - DNA, 122 bp, Homo sapiens
ccgcgccaaggaggggccgttgcccaggaaccgtccctccctcccgcgcgtgcttgccctcgtgcgcgcgcccgcccaatgctcccgaccactgtttgccagccgacccccaccccaaccgg

SEQ ID NO: 462650 - DNA, 122 bp, Homo sapiens
gcgttgtacaggtccagcatgaacatgggtgccgagttgtgcttgccctggaggtgcgggcgcgggcggtggggcaagcccaaaatggagaggatctcgcgctgcatctcccgccgctcctg

SEQ ID NO: 462651 - DNA, 122 bp, Homo sapiens
tttgtcggtagaggtctaggaagccgcaagagtagtggacgccttgacagctgcccttctcgcgggccccgcggcggcgtgcccgtgtggttgcgtgcgcgcggacggggcggggctgagga

SEQ ID NO: 462652 - DNA, 122 bp, Homo sapiens
tcttcgccgagagtcgtcgaggtttcctgcttcaactgtgcttggacggaacccggcgctcgtcccccaccccggccggccacccatagccagccctccgtcaccttttcaccgcgccctcg

SEQ ID NO: 462653 - DNA, 122 bp, Homo sapiens
ggaaaaaattagaggcctgcctctgaggcctaacacactcaacataacagaagactataacgagggttatgggagttacaagccagaaaccacagatgaaaaccaatatatatcgtaacacc

SEQ ID NO: 462654 - DNA, 122 bp, Homo sapiens
cctcttcaggtaacgggcaagctgagcagcagtcctgaggcctcagcagtatggagtggccgctccccacaggcaggctcttcccacaccaatctgagcaaaacccagcaactctgacttga

SEQ ID NO: 462655 - DNA, 122 bp, Homo sapiens
gcgcgggcggcaccaggaggcgggtctgaggccaggcaatctccgattggtgcagagcggcgtccataggggtgggcctcccggaggggcgtggaaggggcggggctgctcggcgcggggcg

SEQ ID NO: 462656 - DNA, 122 bp, Homo sapiens
atagattattgcaattgtgataagcacactaaataaatacagggaataaaagacgcccatcgttgtctaggttgaggaagatagaatgttaggcagggaaatttcagtggagacttgaagga

SEQ ID NO: 462657 - DNA, 122 bp, Homo sapiens
tatgagtatatgagaaggagtttgccaacctaaggggaagagcattccaagatgaaagaacgccaagatcaataaatagtctggaggtggctatcagtttgtaacttttggtttagataatt

SEQ ID NO: 462658 - DNA, 122 bp, Homo sapiens
catttctgttgacctgtccttggtttacctattttatgctccaggagggacctttagttccggtatgccaggattggggggctgttcccccagctcctcccacaggctcagccccaagtcca

SEQ ID NO: 462659 - DNA, 122 bp, Homo sapiens
agaacggtccttactgcatgatttctgtgatatgactcaaccccgaagtcaaaaggaagacgcaatctaggatgacagtgatggaaacagaggtgacccttgggcggcaaagggagtctgct

SEQ ID NO: 462660 - DNA, 122 bp, Homo sapiens
tccctagcagatagccagaactgagaatgccaagcgtggagggggcagttctggataaggcgggtcaggcctggccaacaaaacatccaggccaggccaggcacattcttctgggctcctca

SEQ ID NO: 462661 - DNA, 122 bp, Homo sapiens
caggttcagcgtctcacgggtcctgcaccacctgggacgccccgcaagcagcgggcatgccgggcccccagaagactccgaaagccacccattccctaaacggggagggcctcgtccgcgcg

SEQ ID NO: 462662 - DNA, 122 bp, Homo sapiens
gaagggctcaccagtcgcgtttcccaaagaaatcccgcaatttgctctaggagctgcccgcgcctttgacattcaggaacccgaagtccctagacccgccgagccgcgagcgggttcccacg

SEQ ID NO: 462663 - DNA, 122 bp, Homo sapiens
tcagcccaaaagcccacttatagatgggggacctgaatcttcaaggtcacctggctgatacggatcttgtccacttcgacatttggctgtcccagcatttccccactggcctgcctctaggc

SEQ ID NO: 462664 - DNA, 122 bp, Homo sapiens
ttgacagaaagggtttgtcacccctgcctggacgcccattgtttgtgttcacgtgtgaagcgcatcccctcctcccaggggcttttgacgaatcttcagggctgccctgaggccttttgctt

SEQ ID NO: 462665 - DNA, 122 bp, Homo sapiens
ccgagttctccctgacctaagttcggtgaggttaagacaggcaccaccaaaaccacaacccgcaatacacgaagcccaaatcttgccccaaaacgctgtgcacaggaggtttggattaagca

SEQ ID NO: 462666 - DNA, 122 bp, Homo sapiens
gtggttccgtttaacccacccggtaactggcaatcatggccctaggacaggcttctccaccggggcgatgctgcctccaaggggcgcaatgttactttttatgcatcaagcacggataacac

SEQ ID NO: 462667 - DNA, 122 bp, Homo sapiens
tgctgatcaacgaaggatttctcggagaaaattcctcctttgcggaaatgtccgtagaaacgcaccttttttttttcctgccaggacaaaccgccggcgatatccgttcatgtgaaagtgtt

SEQ ID NO: 462668 - DNA, 122 bp, Homo sapiens
ctcgatctcctgaccttgtgatccacccgcctcagcctcctaaagtgctgggattacaggcgtgagccaccatgcccggccaaaaatgctttctgtaacttccacaatgaaatattattctc

SEQ ID NO: 462669 - DNA, 122 bp, Homo sapiens
cagcacgctgacacccagaggggatgtggcttccttctgaaatcaggtcttcaagggagtcgttgtaaaagagaacgatgaaggtgctggtggcccagacaggacaaccactgggaaggcag

SEQ ID NO: 462670 - DNA, 122 bp, Homo sapiens
acagatgtgtagggtctggggctggccctaattaacttagggaggccacgtacacttgaccgaactgcggaggtcatcggcaaacccgagttgcccctgtgctatttttagccttgagggcc

SEQ ID NO: 462671 - DNA, 122 bp, Homo sapiens
gatgaggataatgataataataataatgattcatttaacccttccaaggcgaatccgaaccgaagggagcctgctgctcgcaccaggcggagtgacccaaggcacattccccgctccccaag

SEQ ID NO: 462672 - DNA, 122 bp, Homo sapiens
gcgcctcagaccactggtccccaggagaggttagaagtctacagggtcctgaaggggccccggaaatgtcggcgtcacgtggagaaaccagatcccccacccagggcatgtgggaattttca

SEQ ID NO: 462673 - DNA, 122 bp, Homo sapiens
ggagaggaattagcagcggaaactccaggttcggttcaagaaagatgacacagagcctgtcgggcccgcgcactcttggcaaagtttcagtgcgacgagaggcgccgggcgctccatggccg

SEQ ID NO: 462674 - DNA, 122 bp, Homo sapiens
gggggatggaagcaggcgcccattggacagaatacaaaggcagaaacctaccccgaaggccggggcccggcggggcgctgggggtgggcgctccccgcggcccccggcgcccttcgccccga

SEQ ID NO: 462675 - DNA, 122 bp, Homo sapiens
aaggccaagtgcctcggccagggcggtggggtcagcgctgagcgggtcaagagcccgcgccgggggccatccccctgcgctttctatcgagttaaacggaccccacaatatctccttcctct

SEQ ID NO: 462676 - DNA, 122 bp, Homo sapiens
gggggtccttgctggttgttgcggctgagggggcccctgggctcgggcggggcgcgcagccgccacctgccccagcaggaggagccggccacgcggcgcttggagcctcagccagatcccga

SEQ ID NO: 462677 - DNA, 122 bp, Homo sapiens
ccaacagacaggaaagggcactgcaggcgagtgggcagccggaaggcctcccgacagagacgggaaaaggcaccacggctggaggcagagcctgagtgacagagacaggaaggggcaccaca

SEQ ID NO: 462678 - DNA, 122 bp, Homo sapiens
tccgtgttcccagcaaagcagggagcacggagagtcaaagctaacatagagcccaaccgacgcttaaaggaggtgttttgggttttgttttttttttttctatttgcgtacggtctattttg

SEQ ID NO: 462679 - DNA, 122 bp, Homo sapiens
ttccgcctccccccgcctcgaggcgggaatccctgcttaaatcacatttttaaacctagccgtttaaatacagggaagagctttcccacaaaaggtttttgaactcagtcccccttaataaa

SEQ ID NO: 462680 - DNA, 122 bp, Homo sapiens
gagttctccaaggaggacgacgagtacgaggccttccgcaagaagatgatgctggcctaccgcttccggcccaaccccctgaacaatcccagacggccttactactgagcgttctggaaaca

SEQ ID NO: 462681 - DNA, 122 bp, Homo sapiens
cctaggtatgtgagtttccttggactcatgcaagaagcttctctccaagacctttttccccggacagtctgtcacccaggaaattccaattccagggctactagtccctgtccaatttgctg

SEQ ID NO: 462682 - DNA, 122 bp, Homo sapiens
gaagggttccgtccagcgtatccttcagatcttgctgtaggcctctggtgtctgtgcgcgcgcggcaggggcggcggcggcgacggccggaggtgtacggtgagaagccataaagacggggc

SEQ ID NO: 462683 - DNA, 122 bp, Homo sapiens
cattgatccattcctggagtggagtctgtgagaatccgggtgacctccacacctcaaggccgccttgccaatgctgagatacctggatactggccagaaccaccagtcactcaggatcaggg

SEQ ID NO: 462684 - DNA, 122 bp, Homo sapiens
catctgtgttaaggccaaaccttttctgcacgtccaagaaaggcatggcgttctgatgctcgtgcccttgtctcttctctggccgctgcttcaggacgattctacttttcaaatttttatat

SEQ ID NO: 462685 - DNA, 122 bp, Homo sapiens
tgcccagtgttaactttaaatgcagtcagtaaggaagccttgtttctttccaaaatgctccgaaaaaaaatgctggctgtctgcttgacttgttaaatgggaaactggtttttgtctctaag

SEQ ID NO: 462686 - DNA, 122 bp, Homo sapiens
atccccagaactaaatccagggagtgggttcatgcttatcagcagccaaatggtttccatcgtgagcttgctagttcctctttgtgtctaaccacctgcctacgttccacctctcgagcttc

SEQ ID NO: 462687 - DNA, 122 bp, Homo sapiens
aaccaccacacccggcctatcccacgcttcttaccatgcaaaaaacaaaaacaaacaacccgaaaagaagatgccctcacttgaatagaccctgaattcagagggtcaatctacaagaaaac

SEQ ID NO: 462688 - DNA, 122 bp, Homo sapiens
cgggaggcgtgggagcgcagggcgccccgggtccggatccggctacaggggcgaacagagcgggttctccatcccctggggtgaaatctctgggcccaggctttgagaccctctaactcgcc

SEQ ID NO: 462689 - DNA, 122 bp, Homo sapiens
ttaaagaagaaagtctttatgtggctcagcttccactctgtaaaatcatgaaacctgtcacgtaagatttatgtgcgggtaaaatgaaatagcacatgtaatgtgctgagcacagttaatgg

SEQ ID NO: 462690 - DNA, 122 bp, Homo sapiens
gtcaggcatgctccaccccagcagggactcagctgccctgggatgtagggggtggtcagccggcctgagggtgaaggccgctagtcctaggggactgtgcccaggggtgtgacttggggagg

SEQ ID NO: 462691 - DNA, 122 bp, Homo sapiens
tattgctgaacatttagattatttaccaagctgctgtttcaataatgataataaaaacggcgaacaattatcgaaagctttctgtgtggcaggcagtgtaccaagtagttaaactagtcttc

SEQ ID NO: 462692 - DNA, 122 bp, Homo sapiens
ccaagggcggccctcggaagtctggtcgcagtggcaaagccagcaccatggccagcagagcggtgagcagcactcccaccagcagcccggtcagactgaagtgttccaggtaaatcgagcga

SEQ ID NO: 462693 - DNA, 122 bp, Homo sapiens
agcagcccgcgcgcccttccaggggccagacctgctccatcctggacggcgaaacgacctcgggagaccccggttaggaccttactccagggatcaactggaatcaaaatccaaaggatcca

SEQ ID NO: 462694 - DNA, 122 bp, Homo sapiens
gctcctgccagaattctaaaggccgggccagaagacctccctggctacgagaaaactgcgcggctgggccagcagggggagcaaaggccccacgatgaagcccgctgcctgcacacacagct

SEQ ID NO: 462695 - DNA, 122 bp, Homo sapiens
ggtgaatctgatcttgtctgatgttgtcacttccttgttcaaaattctcgaatggacaaccgtaatccagaaggtagtatccaaacctgtgattgtggcacttcagtatccttcataaccta

SEQ ID NO: 462696 - DNA, 122 bp, Homo sapiens
gctactgatccttcttgctgtctcttggactccatgtagtaaccatgtacaagttatcaccgccattttacagatgagtgtagattaggaggtgtcacctagggtcacgttactgctaagtg

SEQ ID NO: 462697 - DNA, 122 bp, Homo sapiens
atgctggattggtggcctagagacttgcatggagcctgcttcaggcttagggcatttactcgacatttttaatcctcacaattctgagagaacagtatcattcccactttacacatgaaaat

SEQ ID NO: 462698 - DNA, 122 bp, Homo sapiens
agacgggggaaacaaggatcaagaatggccaggcagctttctggggaccaccggcaccgccgccatcagaactttggggtgtttgagcctctggcaatgcctggcacagaaaggggagttag

SEQ ID NO: 462699 - DNA, 122 bp, Homo sapiens
ctcctccgcacacaccgggggcggggcgaccggagacacacacctcacggaggtagcccccgccagcacgtcccagtggttagggactgtgcgtgctggtccagctctccatgtcttccagg

SEQ ID NO: 462700 - DNA, 122 bp, Homo sapiens
atccggtcgggttctaggcgcccgctgcttgggtttaaatcacccgcgcttcgctgcacgcgatgggccctgagccctgcccagtgcaaggctcattcccgcccaacaaacacaggtgttgc

SEQ ID NO: 462701 - DNA, 122 bp, Homo sapiens
aagtatatcactttaagtttgagttacactgggagtattcatatagggagaccaacctagcggacatgagaaattaggtctgaagctcacaaaattggtcagagccaggtatataggtttga

SEQ ID NO: 462702 - DNA, 122 bp, Homo sapiens
gttgccatggggacgagcggctccggctgaaggtttccgtgcttggaaaccgcgcctccgcggaggtagccgttccctgacctagccatggcacagaacactgaaaaccacgaccctgtcgg

SEQ ID NO: 462703 - DNA, 122 bp, Homo sapiens
tcctcggccctagccaggtatgagctcccaggcgagccttccaaacccaaggcggagttccgtgcgccaatcatcggtgggagacagggagggggcgtgtccatccccgccccccgcctccg

SEQ ID NO: 462704 - DNA, 122 bp, Homo sapiens
agccccgcgcgcgcggctgtgggcttggggaccggggacttctcgcgccatccccaggaacgccaggcaaggtctgggggaacaaaagaggaagctgcccccagagagccggagcctgcgac

SEQ ID NO: 462705 - DNA, 122 bp, Homo sapiens
gcccggcctagcctagtagtccagttctttaggactcctagaacctggagatacagaccacgttttctcggagacgggaccagtgggctgtaaagcaaaacaatttttctttcttttccagg

SEQ ID NO: 462706 - DNA, 122 bp, Homo sapiens
aactgctccagtttcctgatcaagaggaataagcagacctacagcactgtaagtggggcccggatgcgtggctcctgcgggaggagggtcctgagtctcttgactctgggtcagagggcggg

SEQ ID NO: 462707 - DNA, 122 bp, Homo sapiens
ggctacaaacttctggttaatggtgggaaccccatacatgtttgtggaatgagtcttgaacggctacagacacctgcagtgacccagatgatgttgaagtcaagcccgaagaagggagggaa

SEQ ID NO: 462708 - DNA, 122 bp, Homo sapiens
ttttctcttggtgctttcaaaattctctctttatctttgatttgtgtgtgtgtgtgtgttcgtaatcttttattggagtttgattctatgtcttggtaaagtcttctttggattgaagctta

SEQ ID NO: 462709 - DNA, 122 bp, Homo sapiens
cccccccccccgcccctccccggctttttactctccgagacttttcgccccccgtcgccgcggcattttgccacccgccaccgtggctttttgctgcccgccgccgcggctttttccccacc

SEQ ID NO: 462710 - DNA, 122 bp, Homo sapiens
tccgcagagcccgttcccagcggcccggccggccggcccgggacccccacccgccccccgcggcccaaccaactattattaatggagattgatgaggccggacacgccgctttgtgaaagtt

SEQ ID NO: 462711 - DNA, 122 bp, Homo sapiens
ttgatttatatttgtaggtgcaggaagctgtttggagactctggaaaaaggaaagccactcgtagtggttataaacgaaaagttgatgaacaatcatcagctggaactggcaaagcagctac

SEQ ID NO: 462712 - DNA, 122 bp, Homo sapiens
cttcccgggctccctgataatcttaaactctgattggccagtattctgggactttagctccgccctcgttccatcagctccaatcactatcgaggttgtcgtttcgccttttctggttgcct

SEQ ID NO: 462713 - DNA, 122 bp, Homo sapiens
tgggatcctgggcaaaagtatttcctgaatcatttctttgcttctccaaatactcagaaccgtcatattttcatctggatacacaaagcccaatacattgtgctcacacacttgccttcttc

SEQ ID NO: 462714 - DNA, 122 bp, Homo sapiens
tatatacattccttggaaagctgaacaaaatgagtgaaaactctatactgtcatcctcgtcgaactgaggtccagcacattactccaacaggggctagacagagaaggccaacatccgtttg

SEQ ID NO: 462715 - DNA, 122 bp, Homo sapiens
gataaggaagtttcaagtgcaagatcgaggccagtatatgtgcaccgccagcaacctgtacggcctggacaggatggtggtctttctctgggtcaccgtgcagcaacctcaaatcctagcct

SEQ ID NO: 462716 - DNA, 122 bp, Homo sapiens
gcacgggccctgtgctatgctctaaacactgctcctgtcacccctccaagacatgggtcccgcattttacaaacatgaattctgaagacaacgaataactgatcttgcccagctcagttggg

SEQ ID NO: 462717 - DNA, 122 bp, Homo sapiens
aagtatgtaggtgaggagggaccagccagaaggcggtttcagctctggagtgacactgaacgtacttctcttccagggatgtcacgaggtgtcaatttctctggccttacccaggtccatgc

SEQ ID NO: 462718 - DNA, 122 bp, Homo sapiens
gcccaatcccctgaagccttccccacaacttgtcttggggaccaaggctgaagcagacgccgcttcacctcacctgtcctcgggtttccttgggcatgtggtagcgattggtggcctccagc

SEQ ID NO: 462719 - DNA, 122 bp, Homo sapiens
ttttctccatactatgagttacctagacacaaacgtaaacaggaaacatcacaatccttccgaatgccacaaaaaggccaagggaatccatatacaatggccactaaggacaggaaaggtgt

SEQ ID NO: 462720 - DNA, 122 bp, Homo sapiens
actgggccagtggccgacatggtgggttggatgggcatgactgcagtggcaaagcctggtcggcctttcagacggctctgatcccattcccgaacctgggctgcacttctggagcggaagcc

SEQ ID NO: 462721 - DNA, 122 bp, Homo sapiens
cgcgtgacgggcccgccgggcactggttcgtggagcgtggcggttacgggcggtgcacagcgcccgcagcccgctcctagcgagctggccccacgcgggccctccgcacccgctgcccacag

SEQ ID NO: 462722 - DNA, 122 bp, Homo sapiens
cagtcggtgctcgtagcatttcagctgtatgactctaacagcaattacagtcatggccttcgccgccgccaccattcccgttccggttggagaacacaatgcaccgcgcacaggctgtgcca

SEQ ID NO: 462723 - DNA, 122 bp, Homo sapiens
ggcctgtcagccatgggcttgacagaccttgtacgtaacaagttcccggaaaggatcaaccggatatcgggaatgaaaaagtgggggcaccccgtcccatagacacaggccaacccagcctt

SEQ ID NO: 462724 - DNA, 122 bp, Homo sapiens
gccttcgtctaccacgtcttcatgtgagtttgcgaccccgcgcccttccgcgtttccccgcgcaagcctggcctcccggggcacggccgccccgccctggctccgccttctacccccctgcc

SEQ ID NO: 462725 - DNA, 122 bp, Homo sapiens
ctcagcacactggactcccttggggcagggctgaggtgcagcccagacagcaaaggccgccgcgggtcctcggtcgcatccctcccttcagcctcctgcactcagccaagcctctgctcccc

SEQ ID NO: 462726 - DNA, 122 bp, Homo sapiens
cctgcgagggggcgggctctggccgcacgtcattcccggcgcgacgctcctccgcgctcccgcctcctcctggtcggagaccctcggccagcctagcgggcgctccacctgcgcgccggctc

SEQ ID NO: 462727 - DNA, 122 bp, Homo sapiens
acagattaaaccttaatctgtttaaccttaaggaaacaactaccctttgagaatcacaaacggactgtggaaaacaagataaacagcaacaaggaaaagtcctgctgattggtggaaacttt

SEQ ID NO: 462728 - DNA, 122 bp, Homo sapiens
gagggggcgcggcgcggaagggccggcggaggcggcgggagcgccggcgcttggtgtgcgcgccttgggtggtgtcccccgcctgcggaatgggtaatgaggcttttctccgcagcaacagc

SEQ ID NO: 462729 - DNA, 122 bp, Homo sapiens
gaacacaggcttcctgtggccggaggtgacagtaggcccgccccgcgaacacctccagtgcggcccacatagtcagcggtctcttccaggtcggagtttgtctccccgaacccaggcgtccc

SEQ ID NO: 462730 - DNA, 122 bp, Homo sapiens
aagaaccttcttattccttcagggattctatccctcagacaatccagtaggtttgagcatcgggactccagtttttagggtggagacacaatccagctaggaaatggcttttctcattcctg

SEQ ID NO: 462731 - DNA, 122 bp, Homo sapiens
aaaaaagctcagtttcttttttaggaaactggtgccgacatccctgtgcagctgctcaaacgcccccgtgtgcacacatgacttagattggggggatccaggtcacctgtgaccctgagggg

SEQ ID NO: 462732 - DNA, 122 bp, Homo sapiens
gagcagagacaccagggttttctttgtgactgcactgttctggtgggagatgcccagttccgagcgcaccgagctgtactggcttcatgcagcatgtatttccacctcttttacaaggacca

SEQ ID NO: 462733 - DNA, 122 bp, Homo sapiens
atattcctgcattttgtgttgttttatttaacaagtgactcttacctttgttcttattggcggctgtgtaagagtatccaggggcctgacctgtcttccgcccaaagagaccatggagattt

SEQ ID NO: 462734 - DNA, 122 bp, Homo sapiens
gtcatcagctcgggacggctacgctgcgccctcccggcctcagcccctcagcggcggaaacgccagtcttcgctgtcccgccttttccgggagggaaatggaaacaaaaatctagtcggttt

SEQ ID NO: 462735 - DNA, 122 bp, Homo sapiens
tgttttcaaatacctactagattctagataatccatgtaacaattgtgttctgaaatttccgaggaaggcaattgattaattaagagagacctcagaagagctccttaatgccttgttcagg

SEQ ID NO: 462736 - DNA, 122 bp, Homo sapiens
gctgcaggctgggaacctaccccgtagggttattggaaggattaaatgaattaatgtatgcgaagtgcttagtacagtacctagcacagagcaagtgatcaataaatatcagttagtactaa

SEQ ID NO: 462737 - DNA, 122 bp, Homo sapiens
aatgagttagaaaagtgagaaagaagatacaccaaaaatgtgaaagagtaagactgcaggcgtgataaaggacataggacatcaggagatgtatttatccctgctgggccagaaaccaggac

SEQ ID NO: 462738 - DNA, 122 bp, Homo sapiens
gctgaagtcggggtgctcggccagcgtcgccgcctgccggggaggctggcccagggtccccggcgcatagcggccaacgctcagctcatccgcggcgtcggcgcccagcaggaacgagtcca

SEQ ID NO: 462739 - DNA, 122 bp, Homo sapiens
ctccagggtcctggacggcagggaccgtacaggagtcatctttgtggctcccctgtggtccggcacaccataagcacaccgttttcatattcttttttttttttttttttttttttgagacg

SEQ ID NO: 462740 - DNA, 122 bp, Homo sapiens
aaacaaaatgacagcacagtttagagtcttcagaagtgatgggttcctgggttgctaatccggaatacgtacactttcgtgcctttgtctccatcagcagttctgacttcaagcagcagaat

SEQ ID NO: 462741 - DNA, 122 bp, Homo sapiens
tcccctaccctcccctttccggcctctgcagactttgcaccattccactccctccgctgacggagaaaaggaaactttgtgtctgcggatggagagcctcccttgccaacgcggtgggaaca

SEQ ID NO: 462742 - DNA, 122 bp, Homo sapiens
aaagcacgttgctcttacctcttttaaagaacttatcacattatattgcaatttgttttgcgtgcttggtctgtccctcactagacgatgtactccttcagggcgtgtcttattattccttg

SEQ ID NO: 462743 - DNA, 122 bp, Homo sapiens
gggcttcggtgtcaatggtttggtgctgtcggccgtggacagccgggcctgccggaaggtcgctgtgaagaagattgccctgagcgatgcccgcagcatgaagcacgcgctccgagagatca

SEQ ID NO: 462744 - DNA, 122 bp, Homo sapiens
caaacaaatcacatttacattcaaaatggcatctgcaggggtgagatgcagttttccactcgatcctggaatggcaagaagaggcccttgtgcctcaggggcactaacaggttgcttccttc

SEQ ID NO: 462745 - DNA, 122 bp, Homo sapiens
ctacctcccgggttcaagcaattctcctgcctcggcctcccgagtagctgggattacaggcgtgtgccaccacacccagctaatccaggggtttcaccatgttggccagcatggtctcgatc

SEQ ID NO: 462746 - DNA, 122 bp, Homo sapiens
tctctgggcagcgttgagaaccagcgaccctaaacttggctgcgtttccatggtgtcgatcgcggagccgtgggggcgggctcacgcaagcgccaagggaccggtgggaggagttcgggtgt

SEQ ID NO: 462747 - DNA, 122 bp, Homo sapiens
ccagcgaccgacggttgagccccttgcgttgttctcctcctcccggccgtgtcgcaccgccgggaccggcagcctgaagggacaagaagttcacccatgtagccaactcccccgcggcctca

SEQ ID NO: 462748 - DNA, 122 bp, Homo sapiens
cagggccaggggaagggaccgtctcggggtgggggtggcggcggtgggggccggggaggccgctcggagagcaagtaggtgagctgcaattggagatcagaggctgaagggcgctgggcagg

SEQ ID NO: 462749 - DNA, 122 bp, Homo sapiens
caaaggcagtattaggtggcaccagcagaggccagtggatgacggcgggccaacaggggacggggtgcaaggggtctgcagctccagggaggaggggcaagaggcagggcctgcaggaggcg

SEQ ID NO: 462750 - DNA, 122 bp, Homo sapiens
agagagacgagagaccctgaaacacgcgccacctatctttgtggggagggataattgaagcgccctgagcgtgagcatcatgtgaaaacgtgatcgccaagtttctctctgggaaaggatct

SEQ ID NO: 462751 - DNA, 122 bp, Homo sapiens
ccagtgtctggagaggctgcactttactctctcgaggaagccattctgcacttccgctctcggggctgcttcccgggatggtccctccctttgggtccgcggcgcctccagccacaaggcag

SEQ ID NO: 462752 - DNA, 122 bp, Homo sapiens
ctgcgatcttcccgtgcctgaatatgaggcttggaacagacccagaccttcctgcctgcccgtcctgagtggccccgggaccccgccccatctttggcccccagcccctgcctctctgccgc

SEQ ID NO: 462753 - DNA, 122 bp, Homo sapiens
ctgtttgttgagcgaattattttcttcctggctccgagctggcggctgacacggctcacccgcgctaattagctaagccagctggtgcgttggtaaggtttttctgtgctcctcggtgtgtg

SEQ ID NO: 462754 - DNA, 122 bp, Homo sapiens
gggcgacagcgggctctcgagagggtgtatccccaggcttcgggacgaggtcgcgcaccgcgcagaaaccggaaggctcctggcggtggactgcgccctcacagccctacgctgagagagaa

SEQ ID NO: 462755 - DNA, 122 bp, Homo sapiens
ggcgcccatcgtcctgcctgccgcagtggcccagccccttctctccctgcaggtgacccgcgccgcccccgcccgcccgcccacgctgtcctccacttaggctcctccacaaacgctggcgg

SEQ ID NO: 462756 - DNA, 122 bp, Homo sapiens
taatgataaaattaaatttactataatcattattggctgatacttgaattgcccttggaacgagttaaaggtatcataaactttctgggctgggcacggtggctcacgcctgtaatcccagc

SEQ ID NO: 462757 - DNA, 122 bp, Homo sapiens
gcgggctccttccactctcgcagctggtaggcagggccacccccattgcggaaggcatggcgcttgtcctccagggcccagggcgggctgatccgatcataggccggcatggaacagatgct

SEQ ID NO: 462758 - DNA, 122 bp, Homo sapiens
ttcaaaaggtctgacagataaagttttaccacataagagcaggatactgtctgttctttccgagggctgctatccatggggctctatctgcataacaagatagcctttgctcaccatgcctt

SEQ ID NO: 462759 - DNA, 122 bp, Homo sapiens
aggacgtgttcttcttcctcttcttcctcggcgtgtggctggtagcctatggcgtggccacggaggggctcctgaggccacgggacagtgacttcccaagtatcctgcgccgcgtcttctac

SEQ ID NO: 462760 - DNA, 122 bp, Homo sapiens
agataactacactctttgtctaaaagggccaagttctcatcagaacactttgctgagccccgggtgaccgaatccctagctctggggtgagcgacatgcctccaaggagctgcagccaggag

SEQ ID NO: 462761 - DNA, 122 bp, Homo sapiens
ccccgcggccccagcccaggtaagccgggcccaggtgaggggcggcaggtgagtggccaccgaggtccccatagccctgcaggtggggaaggaagtatcgggttgcgcgctcccccttcccc

SEQ ID NO: 462762 - DNA, 122 bp, Homo sapiens
tgcgaacacgactgtgcctccggcggccgtgtggtcaaatgcgctgccgtttgacgcaggcgcagagctgcagactagacctgttcgctgttactttggggaaatgtggttctgcgccacct

SEQ ID NO: 462763 - DNA, 122 bp, Homo sapiens
cttcctgggtctctactcccggggaactgcactgcttctggggggcttggacttctcttacgggtcaaagcgtagcaacagccgggcggctacgtacacagcacagtaaatcctcaatgcct

SEQ ID NO: 462764 - DNA, 122 bp, Homo sapiens
agtgtcccggccgggattcccgatgccaggcgcgttcggcagcagtgcttgagggcgaaacgggcctcaaagtgactcagcggaggcaggaaatccactctttgctaccccttggactttgt

SEQ ID NO: 462765 - DNA, 122 bp, Homo sapiens
gccccggctttttgccaccccccgcccccgggcgacgcggctttttgccccctgtcgccgcggttttttgccggacgcgggtttttgccccccgcccccaggactttctgcccgccgcggct

SEQ ID NO: 462766 - DNA, 122 bp, Homo sapiens
acacagctcacctgtgttgcccatgccactgtctgcccaggatgtgtgactgaccccttccgcccctttggggttgactttccctccatctgggtagctgggcttctgacacagtctggcct

SEQ ID NO: 462767 - DNA, 122 bp, Homo sapiens
caaaagctattgttgcacagcacaacacgaaggctgagtcaccgatacgcctcagcttctcgagatctcataggtttctgtggctggcacagccggtgagctcagcgccctgcgggggccgt

SEQ ID NO: 462768 - DNA, 122 bp, Homo sapiens
tctcttctgtctccaaccttagtcacgatgggcccccaccttccgcctgggctctgagggcggaaagtgtctgtatttctcatcgcacacattgactgcatgcctgctgtggacaaggctcc

SEQ ID NO: 462769 - DNA, 122 bp, Homo sapiens
ggggtcctggcaatgggctttgggtctgggtttccccccagcgactcccatctctatccccgcagcctctaactgccgtcagatgccctcggccctcccgtcacctcacacatcccccgggg

SEQ ID NO: 462770 - DNA, 122 bp, Homo sapiens
gtccacccacctcagccacccaaagtgctgggattacaggagtgagccactgcacctggccgggcacgctttcacatcacaggaaaagagagttctctccaggactcctgcagcttctctgg

SEQ ID NO: 462771 - DNA, 122 bp, Homo sapiens
tgtaaaccaacaagccctgaatctaatgaggtgaattcacctcagtagataaaaatgggtcgttatcatctgactgagggggcaatggacttttttatcctgtatgcctgtagttgcagaaa

SEQ ID NO: 462772 - DNA, 122 bp, Homo sapiens
aaaaaaaaaaaaaaaaaaaaaagaagaaaaagaagaagaagaaactgttcatctgaaatccgacaactcattcttgaaggttagagctcagctttgaagtttcacttcacgagcttggctca

SEQ ID NO: 462773 - DNA, 122 bp, Homo sapiens
ttctacaaatattccttggcagttaaagaaataactccccaggaggtgctagacatcgggcgcatgttagaggcacaaagatgagaatgttaaaagacataaaatacaggtctgctctggga

SEQ ID NO: 462774 - DNA, 122 bp, Homo sapiens
accatctctgctcatcacacagacagaaagaagactaccggcgaccctactgggaatctgcgcaagaaaccacagtaccttggaagcccgcagttctcctaagtaggaatcatcgttatcta

SEQ ID NO: 462775 - DNA, 122 bp, Homo sapiens
acagctaacctagtcccagttcggttcttcctcttggccccagatgtggtccctggaaaccgggcagggcctcaaaacaagatacagccttggtcagaggcttcaacacccaacttcagatc

SEQ ID NO: 462776 - DNA, 122 bp, Homo sapiens
tcagggagaagagaggaattagcaaggccaagcagaggctcctgagggcagggccaagggcggcttggtggggtggggatgggatgcacaaagataactccaacccttaggaaggtgtttcc

SEQ ID NO: 462777 - DNA, 122 bp, Homo sapiens
tcactgctgatttccacaaacatttaaagagaactggtacccatcctactaaaactattgcgaaaaatagaagaacagaaaatacttctaaattcattatatgaagtcagcattaccctgaa

SEQ ID NO: 462778 - DNA, 122 bp, Homo sapiens
gggccgtccccgggggttgggctgtcgcacttggcctcacactgctgcgtggtgggcggccgcagggcctccgtgcactcgtgcgacgcctggcccgtgtggctggtgcagcgcaccgagcg

SEQ ID NO: 462779 - DNA, 122 bp, Homo sapiens
cccaggccccgccctggacccacctctctgcatagcaggcccctccctttatcccagacccgccccggccctccgtagaccacgcccctccgattccgggcccgccccaatccttggtttct

SEQ ID NO: 462780 - DNA, 122 bp, Homo sapiens
tatggcaggtggaagagaagcaagactggaggcaagaaaccagttagagggctgttccagcgtccaggaaagagactacgatggctttaattttgacagtagcattggagatgagggtctgg

SEQ ID NO: 462781 - DNA, 122 bp, Homo sapiens
gcggcagcggcggctggagcctctgattgggtttcggagtccggtactggagccaatcagcgcgggcagcgaaccgggggagcgaggcacggtgagtgtgaggagccaatatccagcggccc

SEQ ID NO: 462782 - DNA, 122 bp, Homo sapiens
tgcgagctcctgctaagctttggggccatgcagtctcttagttaccagtacatgccattacgtgccagcaaagttaatgagattgcatgttactcgtgcctgtgtagtggaaggaccgatgc

SEQ ID NO: 462783 - DNA, 122 bp, Homo sapiens
tcccagcctttctgggatgactacacgtcacagtggcagccattgtaatgcctcacatcccggaatgtggcatccctgaatgagtcaggcaggagtgccggctgtgagagaggatagcctgc

SEQ ID NO: 462784 - DNA, 122 bp, Homo sapiens
acttccaaactttggatgtttttgggatgaattccagaggttgtctttatacacatgcagcggagttcagcatacaagtcactgtctagactttcctctagggtagaaaatgtgacctattg

SEQ ID NO: 462785 - DNA, 122 bp, Homo sapiens
ctccgagacaagaggcctgcacagacctcggccagggctcaccgcgggcgcaccccaccccggccctcagcaaagtcagagagaggcctttcatggcttcgaaagttcctccaggtcctcca

SEQ ID NO: 462786 - DNA, 122 bp, Homo sapiens
agtctggtgtttgcaatagtgtagggtccatcccatctgagttcaaggttagtcttcctgcgatgtcttttccggaggactaaattccctgtttggaaattatgaagaggccgtgatggagt

SEQ ID NO: 462787 - DNA, 122 bp, Homo sapiens
cgcgtactgggtgctcggctgaggcagggcgcctagtgggtgctcggctgaggcagggcgcgtagtgggtgcacggctgaggtagggcgcgtagtgggtgtgcagcagaggtgggtgactgt

SEQ ID NO: 462788 - DNA, 122 bp, Homo sapiens
ccgccgggcgttgcagaggcgcgccgcaaccaatgggcgtggaggaggtgggtcggctggcggctgtcaccctccaggggacgggagcgcggagaccgggagcgcgcgagctgtcgccgcgc

SEQ ID NO: 462789 - DNA, 122 bp, Homo sapiens
tgtggagcgaagaaacgacggatagggcgtaatgagcacgacacacgcaatcagagaggacgcagttaggaggctattggcccggggcaggcgtgaagggggaagatcgggctcggggtggg

SEQ ID NO: 462790 - DNA, 122 bp, Homo sapiens
cctgtgtgatgagggcctgggcttccggcttcagagagcggagctcagggaccacagtcccggggccgagcttcagagcagagacgatgtcgtccacggcttcctgcaaggagggagggcgg

SEQ ID NO: 462791 - DNA, 122 bp, Homo sapiens
aaccatagctcccggaaccagagataaaagaaattctttcctctggcagtgtccctccggcgccctctactgagaaagcttaatattgtgctggctgcgaaggagaaccgcttaattcaata

SEQ ID NO: 462792 - DNA, 122 bp, Homo sapiens
aatgaccttgagtccctgggttgttgccttcaaaataatttcttagctttccttcaaacccgcaagcaaaacaagtaaactacagggaactgcggccagagaaatatccttccttcaggtgg

SEQ ID NO: 462793 - DNA, 122 bp, Homo sapiens
cttaggcactttcctctcccagcgcgtggtggtgtcaagacaagggccagaggactggggcgtttctaaacttgggtctctgtgcttggtaatcacctcttcctacgtgtttagtttgtccc

SEQ ID NO: 462794 - DNA, 122 bp, Homo sapiens
cgaacggggcggggcctggggcgggtggccggggggtgacgaacggagcagggcctggggcgggtggccggtgggggggtgatgaacggggcggggcctggggtgggtggcgggggggggtg

SEQ ID NO: 462795 - DNA, 122 bp, Homo sapiens
ccagagcgttctgcagtccctgccctccagccagtggtcggtgctcgttgtcaacatgtccgcacaggtgtgtcggggatccaggggccaggctgccggctcccttgggatccaagtgcctg

SEQ ID NO: 462796 - DNA, 122 bp, Homo sapiens
ctgacaaggccaaggtcagggaggcgatcactagggccaggggccacatggctccgggatcgggaggggagggcagggcgggcggggcctgaggagaaggtgaagggggtgttgagggcgtg

SEQ ID NO: 462797 - DNA, 122 bp, Homo sapiens
acggtcatctacacgtgtggacacatgtgcctgtgccacagctgcggcctgcggctcaagcgacaggcccgggcctgctgccccatctgccggcggcccatcaaggacgtcattaagatcta

SEQ ID NO: 462798 - DNA, 122 bp, Homo sapiens
tagacctatatcttcctggcatctaggcaggtaccacatctgaaacctttgtatactctccgcattgtgggtgacagcaatgaccctgaagtcagatagattttgttcacatcccagtttca

SEQ ID NO: 462799 - DNA, 122 bp, Homo sapiens
agtggccctccacgtctgtgccacaggctgtgtggatcccgacatggtggtgggggtcggcggggagctgctcccaggccccaataagctttctcttaatcaccaccaaggattaaaagcca

SEQ ID NO: 462800 - DNA, 122 bp, Homo sapiens
ggaggggcaactccgagggtggcagggcccagggggcactggaggagctctcttgctccgcgcatctctctgcccccaccccggtgacccagttccttggaccttgaggagggcagtgcggg

SEQ ID NO: 462801 - DNA, 122 bp, Homo sapiens
tcacttaggtacatgcaaaagtatcccttctcccggagcgccattggcccggggaggtctcgagctcattactatgcagagaggagagccgccattggccaagaggaggaccagaggggcgt

SEQ ID NO: 462802 - DNA, 122 bp, Homo sapiens
gcgaccccaactttgcagccgaggcctccagctccgaggtgcatagcaaccctagggttccggtaggcgttcctccgtccgcgaccctggcagagccgcagagccctcctccagacccgacc

SEQ ID NO: 462803 - DNA, 122 bp, Homo sapiens
ttttatttgttgttgtttaaactcacactgagaggcacagaacgcccggggagggtgctgcgtgcagagccgggacctcacttcccgggttccgattccgcctcgaggacgcgggtgcggca

SEQ ID NO: 462804 - DNA, 122 bp, Homo sapiens
ccagttcggcctgtcccaaaccggcaggggcccctcagaccacaccggcgggctggaccccggctctgaggcctctgttcccagggctccgcccagatcttctgggccccgccccccggctg

SEQ ID NO: 462805 - DNA, 122 bp, Homo sapiens
gaggaggaaattacagctgtaaagaaaattcaaccttgagtatttgatcttcatttgactcgtggggattgatattgttcaaaattgtggagtaccttaatcttgaaaatgccagcttgcgt

SEQ ID NO: 462806 - DNA, 122 bp, Homo sapiens
tctcagaaggtctgagaatcttataggcttactgcctggtaaataaaacattcctttccacggtatttatttttctgtctgttacctgctgtttgcttttagctgatttcctggtgggaaac

SEQ ID NO: 462807 - DNA, 122 bp, Homo sapiens
agacccctaccagcctgtggcccagctgggggcaggactccggggcagggtgagtccctgcgtgacctgattctctgtgggcaggccgggcagggtggctgcagggcggcggagcctgtgct

SEQ ID NO: 462808 - DNA, 122 bp, Homo sapiens
gggtttctggccattacattataattctgcagacagcctgaagctgggttatctgttccacgcccccggcattttcctttttgagtactttatcctgcgctctgtctcctgccataaggggc

SEQ ID NO: 462809 - DNA, 122 bp, Homo sapiens
cctgagcaccgtggctgggcctccatgaccgtatgtcaagtggatcgcctgcatcggccccgttcaacacattttagggcactgttttatctctgtgactttgtggcttctttattttcctt

SEQ ID NO: 462810 - DNA, 122 bp, Homo sapiens
ggatttcagggcgaggattgtgaggagctaggtgctcagggtgatgggggcaaaaatcaacgtcttgtagttcctgctgctagtctttaacatgggggtgtgggggggttcgcggcagccga

SEQ ID NO: 462811 - DNA, 122 bp, Homo sapiens
gttgtgagggaagcgaggcagcaagccctgagcttgtggtagaggcccctgcagcagtttcgggtgcagagagaccaggaatctgggcactgattgcagtgccaccaatcagaagctgtgtg

SEQ ID NO: 462812 - DNA, 122 bp, Homo sapiens
tagagggaatgggtgtccagaacggtccctgacagagtatagggagagagagaaacacaccgacgtcctcgccccaaaagaggtttcagagacaattaccgataaatcagaacgacgcgcct

SEQ ID NO: 462813 - DNA, 122 bp, Homo sapiens
cgctgcccagcctctgtcccacttccatgcacttgacctcgaccctccggcctccgtctgcgatcttcccgtgcctgaatatgaggcttggaacagacccagaccttcctgcctgcccgtcc

SEQ ID NO: 462814 - DNA, 122 bp, Homo sapiens
ggggttgctggatgggagaggagcttcccaggagaaaaccatgggtgaataatctcaaaacggttgttgcagctacactcgcatttggaggttaatttagaaaaagaaaagcaagattggac

SEQ ID NO: 462815 - DNA, 122 bp, Homo sapiens
gcgcgcctctccctcctggccctcactgcctgccagagggctgggaaattgcggctcccgcggctcctctaaacaccgcaattaccccagggaaattacttgcgccctcctcccgcgctctg

SEQ ID NO: 462816 - DNA, 122 bp, Homo sapiens
ggctgggctggggctgcaggagcgattctcccagggccaggagagccagtgagggtggtccgcactccgatgggacacagtatggccaggccaggcggagcaacccctcctcagtgctgggt

SEQ ID NO: 462817 - DNA, 122 bp, Homo sapiens
tgcggttggtgccaacgttcatcccattttacagatgagtaaactcagcttcagtgaggccggggccttcctggagatcacagagcaagtgagcccaggcctcaacacccctctcccctccg

SEQ ID NO: 462818 - DNA, 122 bp, Homo sapiens
cattaaagaaaaaggcgggaactagtcaaaagccggggactgatgggacgctaggatctgcgcgtcccgcccatttcggcctctgactggtgaatgtcttcggcttatggcagaggagcccg

SEQ ID NO: 462819 - DNA, 122 bp, Homo sapiens
agtcatataattgcttagatagcatttaatgagaaagttagcattgttctcatatatacacgtaatatagtgtatttcatagatttaaatagtcaaggaggaaaaactttctctactctctt

SEQ ID NO: 462820 - DNA, 122 bp, Homo sapiens
tgttgcggtattggcccaacaggatttgaccctgaggcccactctcaccctaatcataaccgcaaaaccacagcgcctggagagagagtgagagagaaacagaaacggagcgagtgtgtgtc

SEQ ID NO: 462821 - DNA, 122 bp, Homo sapiens
atgctcggcggtccatgctcggtggtcctgctcagtggtccatgctcggcggtccatgctcggtggtcctgctcagtggtccatgcttggtggtccatgctctatggtccatggggtgctcg

SEQ ID NO: 462822 - DNA, 122 bp, Homo sapiens
ggggcaccatggacagaccggctggacctggctgggtctccggtgcacagggagggggcccgagctcatgcttgtgctacagcctcaaagacagcagcgcaggccgcgccgcgggctggagc

SEQ ID NO: 462823 - DNA, 122 bp, Homo sapiens
gcagcactgagaatgaaggtgcctccagtcctctaccaacagagatgtaatgaaaaactccgggatgtgttgatgctgggtcattgtgaggtcagtttctaaaatagaattattccctaaaa

SEQ ID NO: 462824 - DNA, 122 bp, Homo sapiens
ctggctggaagcaagccagtcactggattctgatggcacaggatggcctgttgcaccagtcgagcgtagccgtccagccggaccccggagttactccggctcctcatggcgacatgttacta

SEQ ID NO: 462825 - DNA, 122 bp, Homo sapiens
ccctgcacttcctcatccggggcccgagccagccatgcggactcgcccaaatcccgcccccgcaccgcgcgcgcgcactccaagggaaggctcttcctgattctgacctcccgccctctgct

SEQ ID NO: 462826 - DNA, 122 bp, Homo sapiens
gccagaggtcagatccatcccaggccagtcttggtactcagtcccagcctcggctggctccggccttcatccgcccgccctgcgtgctccatgagcaggaggcagcaaggccccgctccttt

SEQ ID NO: 462827 - DNA, 122 bp, Homo sapiens
ttttggcatttatgttagtttttaactctaaaaataattttttaaaatatagaaacaacacgtttgcccagaaaaatcagaaaacccaagcagaagaaaactaacattttcacgcaagtaaa

SEQ ID NO: 462828 - DNA, 122 bp, Homo sapiens
tggctctcaggatctgccctcagcactcagatggctcctgtacctgaagacacaggcggccgggcttggccttcactaccagcagatgcgaccaagaacgttctggtcaaagacacgtccaa

SEQ ID NO: 462829 - DNA, 122 bp, Homo sapiens
cttcatcactcgtctagattggagaatcctccagtgaatggggcttgagctttgatccatcgtgctgggcactagtaggtgctcaataaatgtttattgaacaactgaaaaccgggaagtga

SEQ ID NO: 462830 - DNA, 122 bp, Homo sapiens
gttccagcacatgcatgcaccccctcactgccccccatccagagccacagcctgccctgtcggaatatgtccagccctaatgagggaggcgttgtcttcagatcacacactccgcagcggct

SEQ ID NO: 462831 - DNA, 122 bp, Homo sapiens
cggcaccaggggctgcctggctttgctcgttcaccaacatcacctgggctggccagggcgcgctcacttctgccaccaccgagggccctgggcgaaggagtgaataccaggctgccttggca

SEQ ID NO: 462832 - DNA, 122 bp, Homo sapiens
tatactttttgagacactgaaatagattggcttcttttttctctagggcagccagtctgccggggagggacacagaggccttgttataaagtcatttacttccatgatacttctcgaagact

SEQ ID NO: 462833 - DNA, 122 bp, Homo sapiens
ttctggcctacgtgcggggcggagatgggggcctctgaggcgggtttgagcgagtgtgaccgagtttgtcctcaaagtttgacctgatgtttgggattgttgagtgaatgtgaaactgggtg

SEQ ID NO: 462834 - DNA, 122 bp, Homo sapiens
gccgtacgcctcccggtccccgtgacgcagcccgcggtccggccggcggtgttcagagcccgagcacaaactacttcccgggtgccagaccgccccgaggtcgccccgctgcccgggtcacg

SEQ ID NO: 462835 - DNA, 122 bp, Homo sapiens
acacatatatggaagactttccttggttttattaattgagcccaagttactattgcagtacggtagaaggtgataaattccaaggtgagtaataaggattccatccccctccaccccctgcc

SEQ ID NO: 462836 - DNA, 122 bp, Homo sapiens
cacagcctttcatgcccccccacacactcctgcccaggagctgaaagagccccacactgccgccagcccctacccagccctaagactcttggcagcacatcttgctgccgggaagcctctga

SEQ ID NO: 462837 - DNA, 122 bp, Homo sapiens
gctgccgcaggtgcggagtgaggcgccgccacacgggcgggggcaggagtctcaggaactcggcagccgccagcagagcccggtgcgggaccgggagctgccggggcctcagctccgctctc

SEQ ID NO: 462838 - DNA, 122 bp, Homo sapiens
attctggctgctggggaaaagagcaataagcagaaagccctcgtgcagaggggatccgggcggtgcacttggtgtgggaggctgccttaaacgccgatgaccctcccggcctccgcgtgtcc

SEQ ID NO: 462839 - DNA, 122 bp, Homo sapiens
cccagccctattcctgccacccacaggtcaccgtccatgctttggtctggagtgtcctgacgtgtgtgtgctggactctgctggcacctctttctgtagggtccatcctggggcaggggggc

SEQ ID NO: 462840 - DNA, 122 bp, Homo sapiens
tggcggcgcgagggtctccgccctctgctccgggctgaagcgctctgagagaggcggcagcggcaactcgagccccaacagtaatttagtgttggtagttttggcagcagctgccgaggccg

SEQ ID NO: 462841 - DNA, 122 bp, Homo sapiens
gagtacaattcttgcatctccttggttaaatttattctgaagcattttattcttttcgatcgtatgcttatttttatatctgtatgagagctacggatttagctttttctgaaagtcatctt

SEQ ID NO: 462842 - DNA, 122 bp, Homo sapiens
tattcctgagaaaggaggatgtgcagacactcacagaacaaagcctttgtaaaggaaaggcggccgatgagatggagtgcttccttcacctgtggtgggtctgtatccatgaaatcgcccac

SEQ ID NO: 462843 - DNA, 122 bp, Homo sapiens
ggggctcgagcttaggataacttcaggttcagctgaggcctctgaactgtgactccgccccgtggccgcatgcgtcggaactcctacctgccctttgcccttctcgaggccggtgcttgact

SEQ ID NO: 462844 - DNA, 122 bp, Homo sapiens
tgtggtcgcgcaacttggagcgcagcccctcactcaccgacaagaagaacgggtgcgacccgatttaagatagtaacagagtattaaaatagcagcctggaatctcatggggagctgataag

SEQ ID NO: 462845 - DNA, 122 bp, Homo sapiens
ggagtcacacgggactggcttagccctggcgagtgtttcgcatcaggtgacaagttgtgccgagtgtctgccaccctgcatgcccacactgaatccgtgcagggccctcccggccgcctgct

SEQ ID NO: 462846 - DNA, 122 bp, Homo sapiens
tatatagcatgtgttttctctcagactgcttttaagactttaaaagcccctgaatttcaacgactcttttctagactttggaatttgagaggtcagtaatctttttagttagaagagttacc

SEQ ID NO: 462847 - DNA, 122 bp, Homo sapiens
cacccggacctggccctgctggatgcatttcccacggctgttgaaacaaatcacctcaaacgcagtggcttctcctgaccagatggagtggcggatgtagatgagacatagcactataaacc

SEQ ID NO: 462848 - DNA, 122 bp, Homo sapiens
tgtgggggttggggggcagtggttggagaaaggtgagtcaaaaagcagcactactgcctccggagcaaatgaatgggaataaaggttgatgataccaggtcagtaggagtctaaggtcaggg

SEQ ID NO: 462849 - DNA, 122 bp, Homo sapiens
gcgctgctgtggggcgagaggggacagccccgctctccctgtcctgggcggcttcaccagcgccacctccccacacactctgtgcactgctgtggggcaagaggcgacagccccgctctccc

SEQ ID NO: 462850 - DNA, 122 bp, Homo sapiens
cgaacactccctggagcgctacctgcacatgctcctggccgaccgctgcaggctgaggtacgtggccgggatgcgaactgggatgggatggagcaagaggtgaagatcttggagtctggaat

SEQ ID NO: 462851 - DNA, 122 bp, Homo sapiens
gacactcgatgctacggggcgccaggagagcccaagctggcgcccctactaccacctgcccgttcccaagcgaatcctcagtcgcttggcccagcccagtgcgtgcacacacacacatgcgt

SEQ ID NO: 462852 - DNA, 122 bp, Homo sapiens
caacaggatatgacagatctatgctggagggaatgtgagaccgacaggtcccggaggagacgaggcactcacggtgggggctgctccgctcctcccgctggccccctagtgctgcagcttgg

SEQ ID NO: 462853 - DNA, 122 bp, Homo sapiens
caactgtagtcccagctatttaggaggctgaggcagaggattgcttgagcccaggagttccgggatgcagtgaatcacgatcctactctaacctgggggacagagcaagacctgtctctaaa

SEQ ID NO: 462854 - DNA, 122 bp, Homo sapiens
gctgcatagggaccctgcactctgggtttcaatgcattccgttaccctcgtttcctcctccggaagccgccacaacatgctaatccttcagcagagctgcaagggacagagagggaatggaa

SEQ ID NO: 462855 - DNA, 122 bp, Homo sapiens
ttgcagcttcctccaggtatgttgataaccctttccagccttgtctgtcggtccagctggcggcgacgggaaaattcgcagctccagattgctcctaaaaaaactgagccacgggaacattt

SEQ ID NO: 462856 - DNA, 122 bp, Homo sapiens
ggtgctgagtggtcattgtgacagtatcattacacaaaggaagctcttggggtcacaatgcgcagggctggaccacccttggatgcagcctgggaaggaacatgaggatcctctgagagacc

SEQ ID NO: 462857 - DNA, 122 bp, Homo sapiens
acgctgaagccaccgcggggtgtgggggggtgacgtgtgggaagagctgggggcttccttcgcacccaccctcacgcgccctagaatgtcctctggggaaggggctgcccataacttggagg

SEQ ID NO: 462858 - DNA, 122 bp, Homo sapiens
ggcagacagcacgtagaggtccgtgcgtctcgatcccgggcagccccggcgggcacctgtcggacccagggatcgaactctgtgaaggacccggccgctggtagcccttctgttcccaggcc

SEQ ID NO: 462859 - DNA, 122 bp, Homo sapiens
cgtcgtaagtctcagggtcagcaggaggaaaccacgcactacatgctgggagcggcgcgacggaggaccgcgttgtatgctgggacttgtagtctcgcccttagccagacccctcggaccac

SEQ ID NO: 462860 - DNA, 122 bp, Homo sapiens
tccctgacctccttcccttcgcgctgctttgttgttttttttccttctccaaagttttaacgctgcgccccgtgcgtagccgctctgtgactccccctctctccgggagccctggggattcc

SEQ ID NO: 462861 - DNA, 122 bp, Homo sapiens
cgaggcccggaaagcaatcaactgcatgtccctgagcaagtgcgaggaccgcctggccatcgcctatgacaacatcgtcctggtgctggacatcacctccggggacccctgcccggtcatcg

SEQ ID NO: 462862 - DNA, 122 bp, Homo sapiens
ccggcgagaggcggcggcgggagcggcggtgatggacgggtccggggagcagcccagaggcgggggtgaggcgggaggcagacgggcgggaggagggcgagccccctcgccggcccgtccgg

SEQ ID NO: 462863 - DNA, 122 bp, Homo sapiens
cgcgtcctgtcacttccagcgaggcacacaaaactgaccgtagggatggccaccagggtccggacagcttctatttgggtgagtaggggttttctttcattcttgaaaagctctccctgaat

SEQ ID NO: 462864 - DNA, 122 bp, Homo sapiens
ggcctccgggtaggtgccgaggactgccgcctgggatggcgcggggcgggctggggtgcgcgggctgggtcccggcgcggggcgggcggcgtggggcgttcggccgcctgcgcctgtcaacg

SEQ ID NO: 462865 - DNA, 122 bp, Homo sapiens
atcgacttcttgcgatggggctttccttccacgaggggtaggaactgtcttgaaatcagacgtcagcatcacctggttcaagggataagggactggctctccagcgacttggcaacttacaa

SEQ ID NO: 462866 - DNA, 122 bp, Homo sapiens
tttatttaatttaaatttgaacttaaattgtcacatgtggtgaggggctaccatactgtacggcaaggtttataacgagaataaatgaaataaatacaaaatccagaatattggttacttct

SEQ ID NO: 462867 - DNA, 122 bp, Homo sapiens
gtggtgtctgggaggacctgcagaggagctcctgcctctctgctcaggccccttctccagcgccatcttgtggcagcagagagcaggccctctgcagaagagagccaggggcatggagagct

SEQ ID NO: 462868 - DNA, 122 bp, Homo sapiens
gtgagaatagccctgagtggcacttggcatgaccaggatttctgagctgcccttccctggcgctggtgactttctatgtgcctcaccacccaccaccacccacacagccagagcaatggagc

SEQ ID NO: 462869 - DNA, 122 bp, Homo sapiens
ggaacggtgggcggcaaccaggagagcccggcagggaccccccccatgccaggcccagtgcggccaggaggacccaagaggggtgaatgaatgaatgaacgaatgaatgaatgagggaagga

SEQ ID NO: 462870 - DNA, 122 bp, Homo sapiens
gccgccgctcgcaccccttctccgcgcgagaacccgcgcggactgcgcctgcgccgaatccgaatcaggccccctccgcctaaccccgccccgcgctggtctgtcgtcggcgaatgcctgaa

SEQ ID NO: 462871 - DNA, 122 bp, Homo sapiens
caaagacctgtacaccaacatagggctatccagaggcaccaccatgtacccgggcatcaccgacaggatgcagaaggagattaacgccctggcatccagcaccatgaagatcaagctcattg

SEQ ID NO: 462872 - DNA, 122 bp, Homo sapiens
caaacacagatggagaagctgagggcaaggaagggaatgacgtgggaccccacccgttgtcgggggcaggctctgctctccaggaacaggtaacacagtcacttagagaacagtcactactt

SEQ ID NO: 462873 - DNA, 122 bp, Homo sapiens
aatctcacccctctgcccatctatgggcaaaatggagctgaaataaaatgagaagacactcggtggcgacctgctgggcagcaccctgtaccctagggccccttatcagtgggctcctgatc

SEQ ID NO: 462874 - DNA, 122 bp, Homo sapiens
aagctgttcccagagtcaggggaggaaggagttctttggtcctcgacttgcaggaacctgcgccctggctacgtggaggtggctgagcctccagacctgcaaggaccacatgagacctggaa

SEQ ID NO: 462875 - DNA, 122 bp, Homo sapiens
ttcttggtctctgcgacttcatgaagccgcggaccctccaggtgttacagttcttaaaggcggcgtgtttggagtttgttccttctgatgttcggcagcgtcttcctcctggcgggctggtg

SEQ ID NO: 462876 - DNA, 122 bp, Homo sapiens
accacaatgaccattttgagtaccgtgataaatgccatagagacgtagggcccctggtagcggacccagtagctgtaggcgcgtgggaagcggctggccatcttgaaggcgcagacgatctg

SEQ ID NO: 462877 - DNA, 122 bp, Homo sapiens
acatcaacctgttgtaggtatctaatctcattgagatacccccacctctggcttgcagatcgattactctgtggtagctgggtcttatttatcagttttttgggtgttcatgtatggggatt

SEQ ID NO: 462878 - DNA, 122 bp, Homo sapiens
cctaggcctggctctctgtgttgctgcattgaaattagagatttcactggttgggtagagcggtgctgctttttctagatcatttagatagactctgatttaaatatgttacatgaaggctc

SEQ ID NO: 462879 - DNA, 122 bp, Homo sapiens
ccgccaccgccgccgcccttcgctcggcgcgcactccagccgggcccagccgccgccgcccgcccccggcccgccccccgcaccgccccccgcaccgccccccgcaccgccccccgcgccgc

SEQ ID NO: 462880 - DNA, 122 bp, Homo sapiens
gctcctcagccccggtagcccccacgccaagtcccatttactcagggtttctgctggtgacggctctaataggcacttcacctgctctgcggaggcgcctgcggaatggtggtcgctctcat

SEQ ID NO: 462881 - DNA, 122 bp, Homo sapiens
gagcctcggcccggagtgggtcaccggcaggggcggggctccccctgcaagggggcacggcgtcgaggacttctcccttccagacccgggaagcgggtgtccctcaaagggcagccggcaca

SEQ ID NO: 462882 - DNA, 122 bp, Homo sapiens
tctcctgcacggcttcgcatacaaacagccggggctcactctggtcccagaagtggttcacgggaacataatttttcagtccctcatccacaaagaggtggctcctaaaagacaaaggaaga

SEQ ID NO: 462883 - DNA, 122 bp, Homo sapiens
gcgcagcttcgcggtatgaggaagagggtcctgtcaggcgcactcttgttgcatcatcagcgtgcacctccacgatgaaacaggtctgggctacaaaagtatggccgcttctgaggcggcgg

SEQ ID NO: 462884 - DNA, 122 bp, Homo sapiens
tgggcatcggcctgtgcagcgttccctacttccaatgcatctctggcattttcgtccacacgctgtcaccaggatccgtggcgcacctggacggacgtctccggtatgtcctcacttctgtt

SEQ ID NO: 462885 - DNA, 122 bp, Homo sapiens
cctgaagttggagggcactgggtggccgggcctgagaattaaaaccatgaaaaactggggcgtgataaacctgtgaactcgctccagctcacaagccggttagggacagaacgactttagaa

SEQ ID NO: 462886 - DNA, 122 bp, Homo sapiens
tgtgtgcaacatcagcagatgcagtgcacccagaatgaatttcatcatatcctggaaaaacgtttgaggaagactcgattgacaatgtcaactctgcacaccactgttctttatctcttggt

SEQ ID NO: 462887 - DNA, 122 bp, Homo sapiens
cacagccaccaatttacgatgcgccaggtgccttcgagtggcacacacgccataccagcacgcttcacaaacccacccagatgggaaaactgaggcctgcaaaggacgttggcaacaatccg

SEQ ID NO: 462888 - DNA, 122 bp, Homo sapiens
attaaaaaaacatgctttctgcaaaactgcagaaaagtgacaggatttatggggaaaatacggttaaagggtggactattttaacacctacacaactttgtcactagagcattattaaaact

SEQ ID NO: 462889 - DNA, 122 bp, Homo sapiens
atccacccgcctctgcctcccaaagtgctggaattacaggcgtgagccaccgcgcccggccgaaagtttcgaatatccctttggcattgttctgtttcccgttggagctttcctgaggaagg

SEQ ID NO: 462890 - DNA, 122 bp, Homo sapiens
tttattgatggtttaccataggcatccagttgttcttctttacgtcagggtcagcagtgacggtgtcaggcatggacagatgtccaggcagggaggagtccttcagagccgcccacaactag

SEQ ID NO: 462891 - DNA, 122 bp, Homo sapiens
tctcatgcacggccccgcttctacctgggccccctccgggcggcgctcacctttgtagtccgacagcttcacctctttgaaggcgccatcaaccaccgctgtggccttgaagtcaggggctg

SEQ ID NO: 462892 - DNA, 122 bp, Homo sapiens
cgccgcgcctaggccaatgagcgcgcggggagcggcgatggaggctggggcggccgggagcgcccgggacccccgccgccgcgccgccgccgccgcgcccccgcgccccggcgcccgcgggg

SEQ ID NO: 462893 - DNA, 122 bp, Homo sapiens
actaccagctagaacaagggccctaaagtgagggccaacgtatataatcagagagcctgacgtcaggttgatactgaaaatatgagaactaaatggcattactaccagtctttagtttagaa

SEQ ID NO: 462894 - DNA, 122 bp, Homo sapiens
ccaccacactgcccaacacctgaccctaaaatcatctctcgggtctcatctgactcgatccgtcagtaacacctggcacagccgaacgagagactggacctagcgtgacctctgcggctgcc

SEQ ID NO: 462895 - DNA, 122 bp, Homo sapiens
gaagccgggcccgggtgtggctgcctgccacgcgcgctgccataggatccaccaacgtttcgcctggtcgatcgccatttcgcctaacgggctgcttccatggaaaggtcagaggcagggga

SEQ ID NO: 462896 - DNA, 122 bp, Homo sapiens
atgtgacccatctatcctctggaggactcagcaaggactaccagtcaccagacaactttacgcgcacgtggtcgcaaggtgaacttgctattggttaatggcagtaaagcccgcccatcagc

SEQ ID NO: 462897 - DNA, 122 bp, Homo sapiens
acccctgtctccccgcagccccgtgaccctgggcggcgcgcagggccaggccgtcccaggcgggctgcacagtggaaatcacaatattgacccagcgcgcaggaagtggggaggacaggccg

SEQ ID NO: 462898 - DNA, 122 bp, Homo sapiens
gtgcaccctgtgatggtgtgggggtgttaacccatgtgtctctggtgggggggcgagggccggtgctgagctctgtgcaccctgtgatggtgtgggggctttaacccacgtgtctctggtgg

SEQ ID NO: 462899 - DNA, 122 bp, Homo sapiens
agaaaacatcatccttttatctgatcctgtgcaaaatgagtggagcagacactgtaccagcgataagatgattgctaaatgactcttctcacattctatcgatgggctgatgaaagaaatta

SEQ ID NO: 462900 - DNA, 122 bp, Homo sapiens
gaagagacacctgagctgacaggctcttgctcttgccatgtgatgtgctccaccatgtaacgacatagcaagaaggtcttcaccagatgccagcactgtgctcttgatttgctatcagagag

SEQ ID NO: 462901 - DNA, 122 bp, Homo sapiens
tccaccatggagggggtgggggagccccgggagcatcccctgggcttcggtggctgtcagcggaatcagggcctccatagaagaccctctggacacagcgttaatgattccctgccatccac

SEQ ID NO: 462902 - DNA, 122 bp, Homo sapiens
cccagtgagcatcacatcttatttctccaaattgctctttcccacacacatatgattgaacgattaacttcttttggaagaaaaaaaaagttcttatgtaattatgcattcttgtctcttct

SEQ ID NO: 462903 - DNA, 122 bp, Homo sapiens
atcgtctgctgcccacagccccatatctcagccagcaggccctcgtttcctcgggcgcttcgaggtttctatgcctgggacgctcagcccagtagctcctccgctaagcggtagaggagccg

SEQ ID NO: 462904 - DNA, 122 bp, Homo sapiens
tcttacaatgtaagcaacagaccccgaggaaagacatccatgctaattaactaatgacaccggaaacgtcctgaggtgcgggacgggctgccgcctgcctatctctcagaaattaaccaccc

SEQ ID NO: 462905 - DNA, 122 bp, Homo sapiens
taacagaggcccaggttggagccatggaccatggagtcatgagaatggaagggaagctgacgccatgtgggatggggtagaactgtccgcaaattcgtcccgcctctggagtcttcagacca

SEQ ID NO: 462906 - DNA, 122 bp, Homo sapiens
aacagtgtatgggggcccctatgtgcatctcacccaaaaaggtccatttttagaaagacccgaggatctcggcagagacttttacacccacaaaatgctccagcccagagacccagcctcca

SEQ ID NO: 462907 - DNA, 122 bp, Homo sapiens
ccctcttttaccaggaatttcaagtgtgggttccaggctagaaagggattgtgacaatctcggaagaactcacttctagatgggattctgatgcatttgcccatttaaaataaactgaaaag

SEQ ID NO: 462908 - DNA, 122 bp, Homo sapiens
tttagaaattagattctctcctcccctccaggatttgttgttgtcctgcttgcggtagtccgacacaccttcccttgtcaacgccctgcacgtgcggccacagtgacctacgtatttcacga

SEQ ID NO: 462909 - DNA, 122 bp, Homo sapiens
cagggtcagattttgactcaacatagctaattcctgggaacatttgaaggaatccaaccccggaacaagtttcacaacaaaacagtacctccaccaatggaggcagccactgctaggaagag

SEQ ID NO: 462910 - DNA, 122 bp, Homo sapiens
gactcctgtactttcacaccctaatagtctctatatcgccggaagcagttggtgcactcccggcctttagattagagaaaatactaagcaggattctaataaaaagaatccaagttaataag

SEQ ID NO: 462911 - DNA, 122 bp, Homo sapiens
tcgggaccccaggagggcgctcaagcctgtcggcccctacttgtgtgtagagaataggcccgggtacaccacctcagaaatgcagaggaagccggggacactgaagcccgggtggttgcagt

SEQ ID NO: 462912 - DNA, 122 bp, Homo sapiens
cgccgccttgcagtgaaagagagagagaaaagccccccgccggaaccggaaatacccgctcgaccatgcaaaatggcgagccccatgatacatttctgctcaagatggcggcgccatgtaat

SEQ ID NO: 462913 - DNA, 122 bp, Homo sapiens
tgagatccggacccctttccagtagcaaaaggtcttagactgaagtactgactccacagtcgttgttaagaatcctagttgtttaatagaggcggtcttgggctcttgctgggccgcggtgt

SEQ ID NO: 462914 - DNA, 122 bp, Homo sapiens
ggctccagcgcccgcccctgaccgggatggggaaaggagggagtggggctgcttggaattcgatggaacagctccagaatggctgggtcagacattcctcgatcatggagtcttagcctctc

SEQ ID NO: 462915 - DNA, 122 bp, Homo sapiens
gaacgcgaacgcggcgttcccattggtggcctgcggcttattcgcccgtccgttgagtgacgcacttccggttctccgtttgcgccattgccctggtggttccgcctcgtgggttagatccc

SEQ ID NO: 462916 - DNA, 122 bp, Homo sapiens
attttgactcaattccaggctacttagcttatgctcccatccaatattctattattattgcgctggaaatgacatctctaatctatccacatgaacaggcctgttaaaatgaggcttaatct

SEQ ID NO: 462917 - DNA, 122 bp, Homo sapiens
cttctgggcattgaggataaagcaatgaataaaacagataaaatccttatcttcttggagcggaaacagggttcctccaaataattcaagaggggaggctggaagacagctcatggaggagg

SEQ ID NO: 462918 - DNA, 122 bp, Homo sapiens
cccagcgcggaccgtgcggggcgctagaaccgctcagggttgaggcttggagcaggagagcgcgcgggccccggagcagagcagagcagagcagaacagagccgcggcccccgcccctcctg

SEQ ID NO: 462919 - DNA, 122 bp, Homo sapiens
cggctcatcctgcttttggtttcaggtctccatgccagtgaaatgtcacctcaactccaccgtccctggtgtcaggcaagcccgagggacccaattctgcctttcttctggattttcctaac

SEQ ID NO: 462920 - DNA, 122 bp, Homo sapiens
ttgggtcctaagcctcattcttttctctccctcatgctcagttctgtttccgctgtttctcggcttccagggctggggggaggaggctggcccgagtcctggggctgagtctgtaccaagac

SEQ ID NO: 462921 - DNA, 122 bp, Homo sapiens
catagtacaggacacagccagagactgctctcgctgcggatgccctcccacacgctggcacgcagcagcattcacaagccaggacacagatgggctgagggctgcttcctctctgactacag

SEQ ID NO: 462922 - DNA, 122 bp, Homo sapiens
agggcagctctcacgacactaagccccgcgtactcactcccactgcgccgcctggggaggcgggaggcaaggcgtcatctcaagatggtctaaaaattttaagaagtcttttcttacgggca

SEQ ID NO: 462923 - DNA, 122 bp, Homo sapiens
accccgctaccctgacgtaaggagtccggggctgagcggcggaggcggcgaagcagcgcgcgctgccatcactcgggagacggagccctcatgtcatcagcctcctatctggcggcgtcctc

SEQ ID NO: 462924 - DNA, 122 bp, Homo sapiens
acagatctggaagctgcaggtccaacttcgaggggtgggtggggttgtttcctctgaggccgctccttctggctggcagggagtctcttccagccgtgtcctctgtggcctttcctctatgc

SEQ ID NO: 462925 - DNA, 122 bp, Homo sapiens
ctatcagcatgtggcagagggagtgccggacaccacacaagtggggcaatttagagctcacgccttgcatgcttagagatcaggaggcagggaaagaggagagagggtctcaccaaacccag

SEQ ID NO: 462926 - DNA, 122 bp, Homo sapiens
ggggaagccctgagcttatctcacacactctaactctgtttttttttttttttttttttgcgtgttctccaaggcaatgtctcaggagcccctttaaaatcaagcttgaaatcttatagctg

SEQ ID NO: 462927 - DNA, 122 bp, Homo sapiens
caggggaagcatagtgagtcctcgggctgatgttcagcttccaagtgtttccgtaatatccgtcaatgaaagcatctccttttacccacgtagagacaggtaaaaagacagctgagtaaatc

SEQ ID NO: 462928 - DNA, 122 bp, Homo sapiens
agggcctgtctcatttggcatcactctaagcagagtccctgaggggctgccaggagctcccgggctactcacaagggggagtgcctattaggaacctctgctttctttccagatgcgtccag

SEQ ID NO: 462929 - DNA, 122 bp, Homo sapiens
gcgggtcacggcgctcccgtccccgcctcctggacccctagcgctcagcgatccccgaggcgacaccccctaagaaggggaagggggtctctgctccacagaggggacagcgttcgtggcgc

SEQ ID NO: 462930 - DNA, 122 bp, Homo sapiens
tgggtagaaggcaggctgaccaggagacagaatctggtgccaactcctaaggtagaaattcgagctcctgccccctggatgagtcccaagtctgacctagtggcacctctgggtttctggat

SEQ ID NO: 462931 - DNA, 122 bp, Homo sapiens
ctgcccttcgccgtcggccctccgcctagccgcgcacttcccgccctcccaccttcctttcgcccttccaccagacctccctcgacgcccgacagctgctctgggtactgtttccgggtcag

SEQ ID NO: 462932 - DNA, 122 bp, Homo sapiens
gggaagggtcggggaaacagggcctaacctcacttttcaccccgaaagtcaagatagccacggaaacagggatgaatggggagcacagacacctgcctcgaagtgtctcttcactttcactc

SEQ ID NO: 462933 - DNA, 122 bp, Homo sapiens
atatctgctttggaagcaaatgatggaaagttttgtccaggttgccttccctcacttttgcgcgtgggtgtgagtttgtgtacccgattctactgtgaggagttcaggttgctttacctgct

SEQ ID NO: 462934 - DNA, 122 bp, Homo sapiens
gaggaaaagagtgaactcattattatttgtcttgtcttcgtttcagaggcggtacatctacgaaagccctaatcatagagggaaagactcctcgttcctggcccagaaatgagatgagaaat

SEQ ID NO: 462935 - DNA, 122 bp, Homo sapiens
atggggctgcagggccgtccacgcggccaccggaaggacaaggtgttcaggccgctaggccgctccctggcaagcgattcccactcgcagcgcggcctcgaccctcgcccaagacgcgccct

SEQ ID NO: 462936 - DNA, 122 bp, Homo sapiens
agggatggggtgactcatcaggcggctgtaacctgatgaaacagagctatccaatttcctcgctccaattccaggcaaccaaattatcttaatatggttttccaaagcagtttccccaggca

SEQ ID NO: 462937 - DNA, 122 bp, Homo sapiens
ttctccagtcctgttctgccaaatgcagcctttgttttcaatcaagaagcccccagaaaacgtgtatttaaaactggcaaaactttttataggatgcccttgccctggtttgaattagttaa

SEQ ID NO: 462938 - DNA, 122 bp, Homo sapiens
gtgatgtcgaacctgatttttccctccaatcctacatagaattcaacagcagctgcaacccgcccagcctcccaaggacatcatccagattagccagtgtacccacttctgcgtaggccaat

SEQ ID NO: 462939 - DNA, 122 bp, Homo sapiens
caggtcattttgcttgagtagtcttcaatttttcttctcagtagatgaaacacatagactcgaaacatttagaagttccttccacggtttgcgggactctggggattgagattatttatttc

SEQ ID NO: 462940 - DNA, 122 bp, Homo sapiens
aaaagcaaagtatttctgcgaggtcaccctacaggatagcgaagcagcccacagcagacccgtgatttaggtgtcgatcttcagctgccgagtgtcctgttccgttcaccgagtgtgtgatc

SEQ ID NO: 462941 - DNA, 122 bp, Homo sapiens
acttcaacaatgaagccgcggaccctcgcggtgagtgttacattacagctcttaaggtggcgcgtctggagtttgttccttctgatggccggatgtgttaggagtttcttctttctggtggg

SEQ ID NO: 462942 - DNA, 122 bp, Homo sapiens
aaagaaggctgggagacaatcggggaaaaacacacacctttggtctggtttgaaagctggcgcccgaaaaggaacaagaaaaaaaacacgcttcggaagtgtctgagattgctgcggccata

SEQ ID NO: 462943 - DNA, 122 bp, Homo sapiens
cctctttcctccaaaaagatttcgggcactaaaggaactaatattgaaactacacagcaacgttggttccctagcctactcatatactgccaccatacattaccacaaatggaaaggtaaat

SEQ ID NO: 462944 - DNA, 122 bp, Homo sapiens
gcttcccggagctgacagtgaggcagacatcccggatccctgttatcacaggtgcagccacgcaacttttgggttaccttcccgccacgaaatggaaatgatttcctgagggccggaaagat

SEQ ID NO: 462945 - DNA, 122 bp, Homo sapiens
tgtaaagacataactcatatcagtcgcatcattggacccatccacaccttccaggaacaccgccttcagctgggcccagactgttgcccactccatattccaaaagtaggggagggccagca

SEQ ID NO: 462946 - DNA, 122 bp, Homo sapiens
agtgtgtgaccttccagcgatctgtcctaccaaggacaacagcggccctaagacttttgccgggatggccaagaaactgggaggctgaagagagctcgaagtatggagcatccctgccctca

SEQ ID NO: 462947 - DNA, 122 bp, Homo sapiens
gccagccaggcccgccgagggcagcacaggtggagcaaggttgcacccccgggggatccccgcccaccgcccgcggcagcttctgcaggctcggggaaagcgcgcgccagtgattcagcgcc

SEQ ID NO: 462948 - DNA, 122 bp, Homo sapiens
cagcgggccgcgggagaaagcagcagccgcaaggcggcggagaggctgatggtggggggccgagcggccctcgtggggagctgggccggcggcaggccctcagtccgttcgtccttcttttc

SEQ ID NO: 462949 - DNA, 122 bp, Homo sapiens
ccctccccgagcgccctgcctccgagggccggcgcaccataaaagaagccgccctagccacgtcccctcgcagttcggcggtcccgcgggtctgtctcttgcttcaacagtgtttggacgga

SEQ ID NO: 462950 - DNA, 122 bp, Homo sapiens
ggctcaagcgatcctcctgcctcggcctcccaaagcgctgggattacaggcatgagccaccgtgcccagccaacaaatattttgagaattgttaaccacaatggaataaacaattttagggg

SEQ ID NO: 462951 - DNA, 122 bp, Homo sapiens
ggcttcggacgcggagttgtgggtgtgggagagaggcgacccagaagccgaggcccgaggcgggagggggctgcgccctggcaagaggctttccggagtatcttccatctgtcaatacaggc

SEQ ID NO: 462952 - DNA, 122 bp, Homo sapiens
cggcgctccacgcggtgcacggtggccaatcagagctgccgcttctgatggaggctgagccggctggggaggcgtcttggccaagaaccagccccagcctcgctcagggccccaacccgcag

SEQ ID NO: 462953 - DNA, 122 bp, Homo sapiens
gcgcgttcccgggcccggaaccggcacacgatgcacccggctgcgttctgatcgccgccgcgcctcagcctctgccgcgatgatcccccctgagcagccgcagcagcagctgcagccgccgt

SEQ ID NO: 462954 - DNA, 122 bp, Homo sapiens
agcagggcgggagaggcgcgccctgagtagggctcgggggaggacgatggctgcctcctgcggtcctccccctgcctcgggggacggcccttggcagaccgtcccggactcctaattcatcc

SEQ ID NO: 462955 - DNA, 122 bp, Homo sapiens
gaggaaaaaaccggaagcaaaccggaaagagtgtgcccctctctcctccgcagcctcgcgcgctttctctggcgcccctagtgggaaagcctagcatggcaccagctggccaagcagaaaaa

SEQ ID NO: 462956 - DNA, 122 bp, Homo sapiens
aagcaatttcccacagcacatagggacttaggtggttatctcctgactaaatcagatcatcggtatatagtgtgtatatatatatgtgtgtgtgtgtgtgtgtgtgtgtgtgtgtgtgtgtg

SEQ ID NO: 462957 - DNA, 122 bp, Homo sapiens
cccctgagtcttggaggagtgacctcctcctcgcccctgtgggcccatccaatcactacacggtcaccagagcccccttgctcagggaggatcacaagccggatgagggaaggtgttctgtc

SEQ ID NO: 462958 - DNA, 122 bp, Homo sapiens
gggcctagagcgagaggcaggcggcaggtaagcctggctgtgctggacaggacttgcacccgctctgcacgccagcggctcagggctgccgcccttttcgtggtcccagggcccttccaaga

SEQ ID NO: 462959 - DNA, 122 bp, Homo sapiens
ccctccccctaccaggtacctggtgcgtagaagtctaaagacctgtgaggtctagcctggcgcctgtaatcctagagaataaggaggttgaggccaggagttagagaccagcctgggcaaca

SEQ ID NO: 462960 - DNA, 122 bp, Homo sapiens
ggtgccggacgaggaccactcctgaaagagagtttgtctcaggcctgggggaaatgagagcgcagccccatccccacgttaggccaggactgaggcaagctgtccttcaagctgacgaggtc

SEQ ID NO: 462961 - DNA, 122 bp, Homo sapiens
agtactatagataacaagggctccaggaattctagtgaaaaggcttccttctttttctgtcgcttcctttccattagttcctgctcacctgaagtgttctttacctgactgttttgttcatt

SEQ ID NO: 462962 - DNA, 122 bp, Homo sapiens
gagaggcgatgcactccatagagaggaaagagtgagactgcgaggttaggggtccgatggcgctcagcaggcgcagcgtgctccaccaccgcgaccagtggtggaatgtccacatccagctc

SEQ ID NO: 462963 - DNA, 122 bp, Homo sapiens
ccctacctccaggagggctgctctgcccttccttcctctgttctttggccttatgttccccgccaccacagaccttcccccgccccacccctctgcagacttagccgtgcattgcaggcatg

SEQ ID NO: 462964 - DNA, 122 bp, Homo sapiens
gtagaaaccacacttcaagtacacatacaaccattctgttttttatttcagcatagcattcgataaatacatgagacatttaacactttattataaaataagctttgagctagatgattttg

SEQ ID NO: 462965 - DNA, 122 bp, Homo sapiens
agatgtaacaattcgacacaacagggatcctagatgggtgctctaccagaaggaaaagagcgtcgtgaaggattttatggggtcagtcgacaagaatggaataccccgggagataaaagtgc

SEQ ID NO: 462966 - DNA, 122 bp, Homo sapiens
gccgcagcccccctgccggggagggcccagaggcagccccgggaagggcgcgcgcggcttcgccagctacaaatactgagcggaggcccttgcggtggtggccccgaccccccggccgctgc

SEQ ID NO: 462967 - DNA, 122 bp, Homo sapiens
acttgaacttcatcttgttatgagcatccacccgtcgagggcaggtcttgtgttactgagcgcagcctgacaatcgcatctgcaccgaggccctgccacggcggttcacggcaagggtctgt

SEQ ID NO: 462968 - DNA, 122 bp, Homo sapiens
agcttgcagcttccggggaaatgcaaccgacctctatgccatctctagctgggtaatcttcgaggccctgaaatgcaattttctgaacctctaagtcacttttattttatgtcatgtgataa

SEQ ID NO: 462969 - DNA, 122 bp, Homo sapiens
aatggcaccaactcctgagacagaggacctgacacatggtgcagccaccgcctgtggccacggaaattccagggaatgcagaccccagttgcctggtgcagccaccgcctgtggccacggaa

SEQ ID NO: 462970 - DNA, 122 bp, Homo sapiens
ggaaacgcccaaagcgtgaaggacacaccgtttgggacacttcatccatcagcccacatccgacaggggttgaggtcccggtggcatttcacaccacgttctctccgtaaatgaattccccc

SEQ ID NO: 462971 - DNA, 122 bp, Homo sapiens
ctaaattttcgggccacttggaggtttctcggatttctattttgaggacaaagacgataacgctagcctccatgaccctgctgaatatctaggaaaacccaagaattcgagggaggccgtgt

SEQ ID NO: 462972 - DNA, 122 bp, Homo sapiens
ttttaaatttttttttctaggagattatttcagaattcctcccggggttcctccaggacgcggcccttccctctctgccctcctccaactagttagaaggagagagagagagtcagcataga

SEQ ID NO: 462973 - DNA, 122 bp, Homo sapiens
gacgctgggcaccggggaaacgtgaaccgcaactgagcgagacacggagccgcctcgcgccgacggccactgagagcaaccaccatgagctgctgggtcgaggggaatcagaccctccgcgt

SEQ ID NO: 462974 - DNA, 122 bp, Homo sapiens
cctgcagtgccccggcgccagcagggggcgctggcgaccactgtaagcaagagagccctgcgcctctctgcgccggcgccggcgcggcgcgcctctctgcgccggcgcggcgcggggtgcct

SEQ ID NO: 462975 - DNA, 122 bp, Homo sapiens
ttgagagtttgagcagtgagctctgatcttgccatttgtactccagcttgggtgacagagcgagaccctgtctcaaaagaaaaaaaaggctagtttttatgacttcaacctgaactttgaaa

SEQ ID NO: 462976 - DNA, 122 bp, Homo sapiens
tcacacagttacaggttatcagaagctagtaagactacactgtataaatggaagggacttcgtgacttgcctctacgtgcaccctaagggtgtgagctggaaacaggttttcataaattggg

SEQ ID NO: 462977 - DNA, 122 bp, Homo sapiens
ggggaagacccgccacaggctggcgtgcggagccccaggccggcggccttccgtgattaacgagtgtttacaagactctattagtaatgacacagacaccaatggttggagacgtcgaggcg

SEQ ID NO: 462978 - DNA, 122 bp, Homo sapiens
aggttaaatgcttttcggttatttcaaatattcaggctttccctaacccgtggccatagacggaattgggaactagacactggcatgatgtaaaatgggacttccatgcacagacttccaat

SEQ ID NO: 462979 - DNA, 122 bp, Homo sapiens
gttcctcgagactctcagaggggcgcctcccatcggcgcccaccaccccaacctgttcctcgcgcgccactgcgctgcgccccaggacccgctgcccaacatggattttctcctggcgctgg

SEQ ID NO: 462980 - DNA, 122 bp, Homo sapiens
ccgcatccggcccgcaccaggcaggtaaagacaggtaacataccttgctgtgtgttctgccgttctttctccagatcgcctgaaagctcctcttgaatgtgggggtctcccctcccggctcc

SEQ ID NO: 462981 - DNA, 122 bp, Homo sapiens
tcctctctgccagcagcgatttttcctccgaccggcagaagtctggtttttcctgtggctcgggcctcagcttcgtatcacctctgcagagaggctctccgtggtaggagacagagtgctgg

SEQ ID NO: 462982 - DNA, 122 bp, Homo sapiens
ctcctggagccggggacggcgggaagacgtctcgaggtggcggctcccatactcgccccacgtcccgcctccagacttgctccaccgccccagacagcccagagatggttcccggaatgctc

SEQ ID NO: 462983 - DNA, 122 bp, Homo sapiens
acttttaggtgttcctgtggcaacaccctcttttcccccatccaggaagggaactcatgacgccgtgtcataatcacctatgggatccttgaagatggggacagggcagccaccaattcaac

SEQ ID NO: 462984 - DNA, 122 bp, Homo sapiens
acatgtatttatgatcgtgcttctgcctcgcctcgttcacctctggcttgtaccacagcacgcaggctcgaaccacttcgggcctttgtgcttgccgatttctctggcagaacatttcctcc

SEQ ID NO: 462985 - DNA, 122 bp, Homo sapiens
ggtcttctcaccccattccagggacctgtggcattgggagacatcccattctatttctcccgggaagaatggggcaccctggaccctgctcagcgggatctcttctgggacataaagcggga

SEQ ID NO: 462986 - DNA, 122 bp, Homo sapiens
ctgctgtcggcactccttgggcccgccttcaaacaggctctttcctagggcaatggaagtcgaaataaagtggcagaggatacgagtacttcttttaatgtaatatcactattttcatgaaa

SEQ ID NO: 462987 - DNA, 122 bp, Homo sapiens
ttatcccaggacctgcatatgcagatgactgctaagtactataatgaagattgactaccacgtgatttgttaatcaaatgaagccaattttagtcttatgggtcactggatttttttttttt

SEQ ID NO: 462988 - DNA, 122 bp, Homo sapiens
cattgggaaacagaagtaacactcagcttttaggctagcaatgctataaaagggaaataccgaatgaaggtatctttcaggagacagaacttgtaaacaaatggttgcataaaggtaatctc

SEQ ID NO: 462989 - DNA, 122 bp, Homo sapiens
gatggcaggaggatgggggtgggggaagcaagggaagaactggaaggaagtgtgactttgcgctatatgtgagaattcgcctttttagggaagacccctcaaaatcaagagacttatctgtc

SEQ ID NO: 462990 - DNA, 122 bp, Homo sapiens
ctctccctcgcctctctctgcttctttggtgggctcacgaccacctgtcgcatccctacgcgtgcctgcgccccttcccaggcaccaaaagccttgcgctccggactaggggcttgagatcc

SEQ ID NO: 462991 - DNA, 122 bp, Homo sapiens
tgtgggaaagtccccaagccacctgctgctgggggacccattcatccaagcccgaccacccgaggccaggagactgcagcttagcccacctttcccgtggtttattcactttacagaattag

SEQ ID NO: 462992 - DNA, 122 bp, Homo sapiens
gccccttcgtcttctggctgctctactgcttccctgtgtgcctgcagtttttcaccctcacgctgatgaacttgtacttcacgcaggtgagtttcagagaggctcctggaggcgctcacctg

SEQ ID NO: 462993 - DNA, 122 bp, Homo sapiens
cgcgcacacaccccgcgcgcttcgctctcggcctcgcccggccaccgtcgctctctagaacgccgcgcccgtgacccggaagagcattctccttagcaactgcgggactgcggcggcgccgg

SEQ ID NO: 462994 - DNA, 122 bp, Homo sapiens
tttctgatactcaccaggacaatatgcctcttggggattggactttgttctggcttaaatcgaaggcctgccatcccaaacctctgaacctcagaggtcctcctgctataaagtaggaataa

SEQ ID NO: 462995 - DNA, 122 bp, Homo sapiens
gaagttggtccccggagggagacaggacggggaggtggccggcaggggcgcagggactcacgtattggagcactttgagctgcagggaagaggcatccaggtcgtagagttcccctgcaagg

SEQ ID NO: 462996 - DNA, 122 bp, Homo sapiens
gagctgggacataacacgtgggctgtgtgagcgctcttgggggctggaaacccaaggggccgatcaagggttcttgattcaaccaaacctcccccttgccatcctccatgcagaacgcgtcc

SEQ ID NO: 462997 - DNA, 122 bp, Homo sapiens
agcctcccaggctgcacttctccctgcctgtggggccctaaccacaatggaaaaccacagcggccctccctctttcccaccctcaccaggttccttcctcctttccacattctactgacttg

SEQ ID NO: 462998 - DNA, 122 bp, Homo sapiens
cggcccgggccgccagggaggaggcgcagggagagcgggaggcgcggggccgccccggcacgcagcaaccaacgcgcggatctcagcagggctgccattgctcgaacgtccccgcagcggga

SEQ ID NO: 462999 - DNA, 122 bp, Homo sapiens
ggaggtggggcaggagcacggagaagtctcgaagaagtggaggaagcacgcactggctgccgcgggaaaagctcagccagcaactgtatcagctttacattcgaccctcctttgctgcatgg

SEQ ID NO: 463000 - DNA, 122 bp, Homo sapiens
cccctgctggaagccttcgcgtccgggggcggcgcgcgggggaaggggtctctggacagtcggtggaggcggcagccctacagagacagccgaaagccagcaacttggaaaaccgcccgaat

SEQ ID NO: 463001 - DNA, 122 bp, Homo sapiens
ccacgctccagaaagcacgttcaccatgctccagaaagttcattcaggctccagaaagttcgttcaccacgctccggaaagctcgttcaccacaatccggaaagcgcgttcaccacgctcca

SEQ ID NO: 463002 - DNA, 122 bp, Homo sapiens
cccgctcctcagttctggttgatcggaacttaagtgtctttgagcctagcacaggccatccgccctagatatggctcctaactcgagaggccaccctttgcggcagggaccaggtggcaagt

SEQ ID NO: 463003 - DNA, 122 bp, Homo sapiens
tgtcagtggcggaccggcgctccctcctggagccctttgtctacttggccagcaagatgacgcaaccccagagcaagtctgccttccccctcagccggaagaacaagggcagcggctccttg

SEQ ID NO: 463004 - DNA, 122 bp, Homo sapiens
tggattaatgaggttttgctgtactgcctccccttattcctcaacatgaagttcccacctcggattggggatgggtgggagggggtttcaagaggaggagggtgggatgggcaaggaatata

SEQ ID NO: 463005 - DNA, 122 bp, Homo sapiens
ggcttctccaggacggtgctttcaacaaatcaccagcccagggtgcagctagaggctttgcgctgcgtctgtctgagcctgtgttggagtagagtgcatgggtgtcctccaggtgccctgag

SEQ ID NO: 463006 - DNA, 122 bp, Homo sapiens
ttgatggactaaatatcctgtcttattttcccaatttgacagagtaaatatgcttattaccgattgcatttcattgtcatcttttattgtcatacactctctgtgtatgaatgatatcgctt

SEQ ID NO: 463007 - DNA, 122 bp, Homo sapiens
tcctgtcgagttttcctaagactctagagggaagtctctgctccaggggccccaaagccccgtcctgtccacgtgaccactcccgccatccgtaacactcttccccacctcccgggggagcg

SEQ ID NO: 463008 - DNA, 122 bp, Homo sapiens
cgattccgtaatttccgcttccggtagtgagaacccttccggtgggctaggtactgagcgcgcgaggtgaggagttgtgcagggtttggggaaaggaaggctggcttggcgagagggcaggt

SEQ ID NO: 463009 - DNA, 122 bp, Homo sapiens
gtgagactggtccaggtgggaagcctcaaacattctccctttcccaatgtggttagggttcgggtgaacatttcagagtacttttcagcctgggtggcccaaccaaaggaccagcctctcaa

SEQ ID NO: 463010 - DNA, 122 bp, Homo sapiens
cctgagctttggggagtttgggggcagatactgggctcttttcttcctctttgaaaggtgcggcaatgtgaggtttggcagtatctgagagtgacttgaagtgtacagtagatggcgctggt

SEQ ID NO: 463011 - DNA, 122 bp, Homo sapiens
gtgcggtgcccaatacacgtttgctgcacgaaagagcattgagcacgtgcctggtggtggcgaaacacggtctgtcatcctcttggtcgccccagccactcatgagctaggcgttctgcaca

SEQ ID NO: 463012 - DNA, 122 bp, Homo sapiens
accccctgccccggaagtgagcactgaactcacttaagagaggccagtgaccaaaggcagcgattcccaggtgcagaggctcgggcaggcgtgcccatgagcttgtccccccgcgcgccctc

SEQ ID NO: 463013 - DNA, 122 bp, Homo sapiens
ggggggctctcagcccatgtttatagggatccagaaatgcaggcctccaaccctgagagtcggggtccccaccccccggaaatccgggagagggcgggcagccccggaggcgggcgggggtc

SEQ ID NO: 463014 - DNA, 122 bp, Homo sapiens
tgtgtctgttggctcaagcgacagcacttctctcacatcaaagctcttgcttcatctaagcgtccgccctgctacgggggtgggaggctcatcgggaaagaattctcgttttgtcagaggtt

SEQ ID NO: 463015 - DNA, 122 bp, Homo sapiens
gcttctcgtgaagtgactcctggcgacagcagcggagaggactaccgaagcttgcagtcgcggtttgaaaactgcagccgcgtctggggcatcgccgttcgccagatccctccccctaggtc

SEQ ID NO: 463016 - DNA, 122 bp, Homo sapiens
gatgaccctgggcgtgcctgcctaggggagatgtgtgttggggggagcctgggcatgggccgtgtggctctgccctggacatcttaccatctagtggtggaagtggaggggggtgttcaaac

SEQ ID NO: 463017 - DNA, 122 bp, Homo sapiens
ctggccgctggcctccctgatccctgcccgggttggggctccaagggcaggaagtcaaggcgtccacgcttggtgacagtgctgggccggcctggagggggcaggcatgtccagcatggaga

SEQ ID NO: 463018 - DNA, 122 bp, Homo sapiens
agacagtcctgtgtgatgtgagtcatccccagagtgacatcccatcacctttgctgtagccgttggttagaagtcagtcaccagtccttctctgtgactcaggggagatgactacataaaag

SEQ ID NO: 463019 - DNA, 122 bp, Homo sapiens
aacagtgattgcatcagctttggtttctcatgggtgggcagccttggctgtctgccggaacgtaaagagcatggagcaaggacatgggaatccgaatcccgctgaggtcccaggaccacttc

SEQ ID NO: 463020 - DNA, 122 bp, Homo sapiens
gcagctgatttccgagatctggcagtaagacgccgcgcgcaccgggcgggctgcactcgacgtctaagttcagctaccaagcccaggagcggtttccctaaggcgtgtcccgggcgtgcgcc

SEQ ID NO: 463021 - DNA, 122 bp, Homo sapiens
ttgttcacagtcaaggcaagcatggcatgcttgctttggccagcacatgtactaaaaattcgaacaacagagacgattaccatagcccctgtgcaatgatgacatgcaaatttgtgaagcat

SEQ ID NO: 463022 - DNA, 122 bp, Homo sapiens
tgcctgcagcacctgccgctgctcctcctgcgaagttgtgcccaggactgacctagaagccgccccgggcgggaccacggacgggcgtggtggcgtgcgctagcgtgagcttgcgggggctg

SEQ ID NO: 463023 - DNA, 122 bp, Homo sapiens
gtgcagaaggttatggtgcagcccatcgtatcctacgcaggatgtcaggactaggaggttcgggtcagaatacggggtgcgaaggcgcaggctgagggcaggcctgggatagtggagtacgg

SEQ ID NO: 463024 - DNA, 122 bp, Homo sapiens
caggccctaggattcctcccccagagccactacctttgtccaggcctgggtggtatagggcgtttggccctgtgactatggctctggcaccactagggtcctggccctcttcttattcatgc

SEQ ID NO: 463025 - DNA, 122 bp, Homo sapiens
tttgtgcccagcctccggcctgctgtggtggcgccccacgtcccacatggctgtgtcctccgtccccaccccgcccagcacacggtaggtgcccggcactgagtgggcacttgctctgccgt

SEQ ID NO: 463026 - DNA, 122 bp, Homo sapiens
gaattttgaaaagacaatgtcctctcaggtagcaacgccccatagaaataaaatgtgagccgcgtgtgttccagtagcaatagaaaagaaaacaacacgtgaaattgattacaatgatttat

SEQ ID NO: 463027 - DNA, 122 bp, Homo sapiens
taaggttctagatcctccatctttgtgtttgttgtgtcatgggccagcaggaacggcttgcggtgcagagccagggcaggaaccacaccctgtgtgacagtgtgctggggtacctggaatcg

SEQ ID NO: 463028 - DNA, 122 bp, Homo sapiens
ttcctactcattttgtttctaggcctgacgcgtctcctccatccgcacctggagtcagagcgtggatttttgtatttgctcggtggtgcccagtctctgccccagaggctttggagttcaat

SEQ ID NO: 463029 - DNA, 122 bp, Homo sapiens
gaactgtgttcctttccttcaaaggcatactctggttgattatattaataatttctgtctcgcccattagaaagtaagctccattagaactgggatcatgcctgtttccactcatcactata

SEQ ID NO: 463030 - DNA, 122 bp, Homo sapiens
cgtagctggtgctccacctggtgccctggctgtgcctcggggcccggacacaggactgagcgcccggcgagccgccaacttttaaatctcgcgcacaagtgggctgggctgcgcggtccccg

SEQ ID NO: 463031 - DNA, 122 bp, Homo sapiens
tacacgctttctcaagcctagccgattagaaggggctgccgggcttccaccacacctcatcgaggcaatgttttctggtagagatgctcatggaaatcactgagccaatgccactcacgttg

SEQ ID NO: 463032 - DNA, 122 bp, Homo sapiens
gagctgggcctgagcagggccttcttaaacgctttgtgcctcggtgaccagccatgctcacgtgcgcatacacagaataggtagtatacacggtctgcaatgtcactttgcttattttagag

SEQ ID NO: 463033 - DNA, 122 bp, Homo sapiens
gatgctcctttcctccaggtaccagcagaaagcaggcgttttctcatgtgggaaagatgccggcccccgctgtttggggtggaaatcctctaacccgctgggcctgtgcgccagggctgagc

SEQ ID NO: 463034 - DNA, 122 bp, Homo sapiens
aagttagctttggtttcttgatttatcatttgttgatgtagatcttattctgagagttgtcgctctgggtcagggatttaatatgttcacatatgtttgatatgaacatatgcagaaaagtt

SEQ ID NO: 463035 - DNA, 122 bp, Homo sapiens
tgagcctcgcatccacattcgcagagtaaacccaacaagtgttgaatgaatgaggttccccgggccccggctgtcactgggctctgcgccaggccaagagccgaaggcgggggaggaagatg

SEQ ID NO: 463036 - DNA, 122 bp, Homo sapiens
ggagaggagcgcgtgtcctgaccttctgagggctgtgctgagggacaactgcactgtccccgaaacaagacacacgttaaagccacaagagacaataggcacgatctctctgagcccccaca

SEQ ID NO: 463037 - DNA, 122 bp, Homo sapiens
agtcgaaggacaggaggattcctagaggtgtcgcggagggtggaggagaccctctgaggtcgtgcagacaacactgttcctcaaccccaccagaaagctgaataggggagtgtcatgcctcg

SEQ ID NO: 463038 - DNA, 122 bp, Homo sapiens
atcggagacaaatttcttttcttcactcacctgggttcctctcaagattcgagccccagccggcctcagtggctcacgcccgtaatcccagcactttgggaggccgaggcgggtggatcgcc

SEQ ID NO: 463039 - DNA, 122 bp, Homo sapiens
gactcctgagagcgtggcctggcgtccgcacagggtggaattcgtatttggccaggaatccggactccgatcatcccaggagacgcggaccgggggcctccagagctctccggagcgtgctg

SEQ ID NO: 463040 - DNA, 122 bp, Homo sapiens
gcaaataggaaattgtcaagtaggagacaaggagcaaagtcctatcacagcgggaggggacgccagcgcctgcagaggctgagcagggaaaaagccagtgccccagcggaagcacagctcag

SEQ ID NO: 463041 - DNA, 122 bp, Homo sapiens
ccctccacgtccccgaccaaggtctgatccttccactgccccttccccacgtacccactgcgcttcccaatgcccctgggaaggatgcataccctggagtccccagcagcgtctgggaggag

SEQ ID NO: 463042 - DNA, 122 bp, Homo sapiens
gctccacattcatttacataagaaatacacaggaacatatctaacatgccagccatggtgcgaggtgtaagagatattgtattgaaccaaactgatgccttttttattggaacttataatca

SEQ ID NO: 463043 - DNA, 122 bp, Homo sapiens
tccgtccagtcaacatcctgaagccaggactggcaggtcctgaccctccctttttgcacccgtaaggggaagggcccgggaatctggaccttgtctagagtcccggcgccagtaccagttcg

SEQ ID NO: 463044 - DNA, 122 bp, Homo sapiens
agcccgtagagcagaaacttgtatttcttgccaggctccaggtcctctacggtgactgtgcgctggtctgcggccacaggcactgccctgggctgcccgtccgtgtccctgtactggaccac

SEQ ID NO: 463045 - DNA, 122 bp, Homo sapiens
tacttctgatttcccaagcagtgtgggagctgcatcccttcctcaccgttgttcctgttccgggccaccattcatcggaaagcaggccagcttggcagcagccccattcctattcctgcccc

SEQ ID NO: 463046 - DNA, 122 bp, Homo sapiens
gctgcgctgcctgggtcggcgccgtttccagttgagagatggcggccgccgcaggtagatcgctcctgctgctcctctcctctcggggcggcggcggcgggggcgccggcggctgcggggcg

SEQ ID NO: 463047 - DNA, 122 bp, Homo sapiens
ggagacagccccgcaccgccctcgcgctctcacctttcaaagcgcctccacctctgcctccgcctccgcccctgccccggcaaccagctcaggacaagcgatgctcctcccccccttccggg

SEQ ID NO: 463048 - DNA, 122 bp, Homo sapiens
agcgcggggaaacgcgagcttttgttttttatgacagccgggctgcgcagctctaatcagcgcggggatttatctcccggcctgtcagcatgtgtgcttaaactttgcggacttcctagccc

SEQ ID NO: 463049 - DNA, 122 bp, Homo sapiens
tgttccgggtcatgtcgtcgtcgctggtcacgtcactgttgttgtcgtctaagaggacaccggtcgccaagttactatctctggcccacattctcacaatagttccccccaatccctgagcc

SEQ ID NO: 463050 - DNA, 122 bp, Homo sapiens
tttcattgccacagatcccaaaacttctctccagcacttcatcttcccaatttaatgactcggttattcagtatttattctattataatgatctctttcctgtgctagactgtgggctctgt

SEQ ID NO: 463051 - DNA, 122 bp, Homo sapiens
tgggacacccctccaggctgcagcctccaccgtccctgacgtgcactcactcaggccggacgccagcgcctgttcgttggcccacatggcccactcgatctgccccatggcgacacgaaccc

SEQ ID NO: 463052 - DNA, 122 bp, Homo sapiens
tttcttctttcagggaataagaaaccctggttgacagaggcttcatcaggctgtggtgggcgggggtgttggccactaggcaatggtatgggcagggcttcacctgacattatggacctcag

SEQ ID NO: 463053 - DNA, 122 bp, Homo sapiens
atgtgagtgcggcgcgcacctgtgtgtgtggaagcgcatggatgggagcctgagtgtgcacgcgcctggatgcacagtggatgtgtataaggtgtgagcggcaggtgtgtcctcaagcacgg

SEQ ID NO: 463054 - DNA, 122 bp, Homo sapiens
ctgggggagttgttgcctctggtctccaggcctctgcacccgagagggtcggggacagaccggaggctcaagaacactgtcccatgtgggtgagaaaccagccgtgtccctgttcagacacg

SEQ ID NO: 463055 - DNA, 122 bp, Homo sapiens
gggattacaggcatgagccaccacgccaggccaaccttaacattttaaaggcaggctctgcgttctggcctatactcagtgaggtaagagtattgaaatcagtatcaacaaataatatccca

SEQ ID NO: 463056 - DNA, 122 bp, Homo sapiens
aagggggaaggacaagaggtttcaccccctggttagtttggcctcgctaaggcagggagccgccctcacgcaatgagcttgctttcagttggtggatttttgttgttacaaaagtgataata

SEQ ID NO: 463057 - DNA, 122 bp, Homo sapiens
tactggagcaaagaggagagaaagcagcacctggttagggccaaagagcagcgccgtcgccgtgagttcatgatgcgaagcaggttagagtgtctcaaggagagccctcagagcggcagtga

SEQ ID NO: 463058 - DNA, 122 bp, Homo sapiens
gtaatatttacataaacgatgttgcttgattcattatcgaagcttttcttttccgtcttccgtctccgatctgggcatcgtgttcattcgctgcacccctgcactcctctgttggtagagcc

SEQ ID NO: 463059 - DNA, 122 bp, Homo sapiens
cctggccaggccaagaagttctttactttcttcctcaatgatgtataaacaaagccatcacgatccacttgctaggcgacttgcacaatgagtttcacttctttgtcaatagaaacccttgg

SEQ ID NO: 463060 - DNA, 122 bp, Homo sapiens
aaaggtgagagaggacttgcttgctgggagtcagcctagggcttccccctttacaggagacggagggtccctgcaggaacaccggtgaaggagagggtgtcccacacaccaggttctgctct

SEQ ID NO: 463061 - DNA, 122 bp, Homo sapiens
agtttcatgcaaactccaggctcgcagagacgcccggccggaccctcccgcagcccgcagcgcgcggagcccacacaatatttgcaaacaccggactgactgcaaacgtaacccctgcaaaa

SEQ ID NO: 463062 - DNA, 122 bp, Homo sapiens
gagcagtgaggatgaccagagatcactttcatcaccatcttggatttggtgtgttttggccggcttgtttagcgcatcctgtttatcagcagggtatttatgacctgtatcttatgatacca

SEQ ID NO: 463063 - DNA, 122 bp, Homo sapiens
ccaggttggcaaggcccccagtggccaaggcatgagcctggatgccctgcaaattgagtacgtgttagggatgggggccattctttatagtttgactctggagagctaggaccacctttccc

SEQ ID NO: 463064 - DNA, 122 bp, Homo sapiens
tggtgtccaaagacccgcgagctgcgcgccccgcggggagggagtgaaacagagacctagcgcagagcccaggtggaagttccaggttaccccagacctggcctaggactcggcgctctgag

SEQ ID NO: 463065 - DNA, 122 bp, Homo sapiens
caccccagggtcactggccaccacttcctagggtcagtgatgtggtcaccttgggatgaacgcacaggatttcatggagatcaccaagtcaggagagctggaatttgaaaacagtgggacgg

SEQ ID NO: 463066 - DNA, 122 bp, Homo sapiens
ccgcgcagcctcgcgccgcgcctgctaccctagctcctggcccagcagcccgcggccctgcgccacccccggctcaccttggcaatgctgctcaggtagtagaaggcataagcgacgctgaa

SEQ ID NO: 463067 - DNA, 122 bp, Homo sapiens
ccggccggtgacgtgagcccgccagtccggggcccgcggccaatggcggcgcagacagggcggccgagccccgccttcaccgagcagggcccgccccagggttccgccccctccgggctcca

SEQ ID NO: 463068 - DNA, 122 bp, Homo sapiens
caaatggcgtgataaacaaaagaaaccgtgatcatctcacacaaaaggccagattcgagccggtcactggtcaagaatggatctggttgggagttctgcttgagagaacagagatctgcaaa

SEQ ID NO: 463069 - DNA, 122 bp, Homo sapiens
gggcgggttccggaagccgaggggccgggagtaggtgggcgcataggggctcctgggaggcgggaccaagacgcgcgttaccgggaggccaggcccggcgctgcaccctccgcggcccgggg

SEQ ID NO: 463070 - DNA, 122 bp, Homo sapiens
gctgccctgcaaccctgggctggagtattgctgtggtcctggatttctggactttatttgcgttctcaagtggcgaagtgttcctcaacctggacccacatcagaagcaggttctccgagcc

SEQ ID NO: 463071 - DNA, 122 bp, Homo sapiens
cttatttattcaataaaactgttgtgtagagccgatcagctcatgagtgagatgatgaaacgggttagatatgggacaggcttaggacactgcctcataaatgcttgatcttgtcattatca

SEQ ID NO: 463072 - DNA, 122 bp, Homo sapiens
ccgtcctccgcggccactacgaccagctgcggtccggggcccggggtgggagttggactgcgtggctgcgcgtccccatggcgaccgggcgggtgcgcgcgtcaggggctggggcctgaggc

SEQ ID NO: 463073 - DNA, 122 bp, Homo sapiens
caaataataagtgttggtgaagatgtggagaaactggaacccttgtgcacggttgagagtcgaataaaatggtggagctgctatgagaaacagcatggaagttcctcaaaaaaattaaaaat

SEQ ID NO: 463074 - DNA, 122 bp, Homo sapiens
tgggcaggatcctggggcaactcctcgcacgatgcaatgccaccagttccggccaggtggcgctgcgcggctactgttccgggcggtagcgtccgactcgcgcctccagcaacgggcggggc

SEQ ID NO: 463075 - DNA, 122 bp, Homo sapiens
cttctccttgagaaccctggcagcccagaaagccgcctcccagctcatccctgccggaagcgctcccagcagcccgcctctcgccctgctcagctctggccccgcggggctgttggacatgg

SEQ ID NO: 463076 - DNA, 122 bp, Homo sapiens
gagcgccctccccactccctggcttcggaacccacccgggcccaccgtcccagtaggcctcgctgagatgaatgaggcattgctttctgagctgcacacaaaacatgcccctggtagaccca

SEQ ID NO: 463077 - DNA, 122 bp, Homo sapiens
ccttcagctgtggtgcaaggtgctaagagctgtgctgtctagtatggcagctgctagtcacgtgagcacttaaaatgtggctccttggccgagaactggatgtttcattttgtttaactgac

SEQ ID NO: 463078 - DNA, 122 bp, Homo sapiens
gaaaggggagggagacgactacaaccccgcccccaacactcaggaccggggacccgagcccgccagagaccctccacaagtgagggtcccccggggtggcccctgcccgccctccaggctcc

SEQ ID NO: 463079 - DNA, 122 bp, Homo sapiens
gagtgggtacaaaccgcacccacctacccagcattctgccctcgcctcccgggctggcaccggcccttgccagtccagctctgagcctgcccagggctgagccgggctgggatgaaatccaa

SEQ ID NO: 463080 - DNA, 122 bp, Homo sapiens
tatatcttgtactgttgggtgaaaaataaagaggggaactctagctcaggagccattagccggtaccaagaaggaaaatggagcttgtcctgcagtcaggtgaacaagacagtgattttggt

SEQ ID NO: 463081 - DNA, 122 bp, Homo sapiens
agcatcctagaagtaattccctcctccttggaaaacgcccactacaatccttaaagctcccggagtgagcccttttaaaaatgaattgtatctggccgggcgtgctggctcatgcctgtaat

SEQ ID NO: 463082 - DNA, 122 bp, Homo sapiens
gcaccgaggttgtgaatcacctgcattttacactcaagttgcacagctgggtgacatttccggaaagcatgcctcataatgcattgattctagactttttaccaaatgcagttctaaagtca

SEQ ID NO: 463083 - DNA, 122 bp, Homo sapiens
gcgtggccccaaataattcccctgtgaagagttcctaagggcacagatgccatgtcggggcgtggaggtttctgactagaggcagagcccgagtagaaacaggtctgaacggatggaactgc

SEQ ID NO: 463084 - DNA, 122 bp, Homo sapiens
ccacctcgtccctgcggagaccccggctgcctcctccctgccccgccgcacagcccacctcgcgatctggggcccgcagacactccccctcggctgaccctggctgacccccagcctcaacc

SEQ ID NO: 463085 - DNA, 122 bp, Homo sapiens
atggtgtcctggatcatctctcgcctggtggtgtgagtgcggcggcggcggggggtgatgcgggctgtgatggagggcgggggtgttaaagcccgggtggacttctccgaagcttcgtgcag

SEQ ID NO: 463086 - DNA, 122 bp, Homo sapiens
cctgaactggtccactcccttctgaccctccactctccacttccaacaaagtaacgaactcggtcactgatgcagccaggcaaccctgctccgggggttctgaacacgaatgccgtgtgggg

SEQ ID NO: 463087 - DNA, 122 bp, Homo sapiens
agaatttggctggctggatctgggcttacttccagctcaagcgtttcggtaggagggtctcggggctgctgcctaatctgaataactgaatcaaggttctcccgaaggttcttttcccactc

SEQ ID NO: 463088 - DNA, 122 bp, Homo sapiens
aggctcctggcacaaagctggacagtcgccatgacaagtaagggcaagtaatccgcctgccggaggaagcaaaggaaatggagttggggaggagggtgcagagtcaggattctcgccgacct

SEQ ID NO: 463089 - DNA, 122 bp, Homo sapiens
agcacttgcttgagccacggtgagatccagaacccggccggagccaggcttcggccaagccgcggccacgctgccatctgacaagcccggggcctgtcccaacaagactgaggcccgtgtgg

SEQ ID NO: 463090 - DNA, 122 bp, Homo sapiens
ccgccgcagcggagtctgcgcgcccccagccctagaccgccaggccacgcccccgtcacgcgccgccagcggccatgtgccaggccacgcccagccccccatggccacgcgccaggccacgc

SEQ ID NO: 463091 - DNA, 122 bp, Homo sapiens
ggctggcggatcactcgcggttaggagctggagaccagcccggccaacacggcaaaaccccgtctccaccaaaaaaatacgaaaaccagtcaggtgtggcaggctgaggcaggagaatcagg

SEQ ID NO: 463092 - DNA, 122 bp, Homo sapiens
ctagggctccggaggcagatgcagggtgggggtccgtggctctcggcgttaggaggtgaccggtggtcgtgtagggaggcaggtgagggcctccccgggggaagtagggggacaggacaagg

SEQ ID NO: 463093 - DNA, 122 bp, Homo sapiens
gttctgactctatcaggtctgttatgtgcctaaaatattgtattaggctacagattccatcgtttttacttatataagacaagttctctttgccagattaaagaattaaggtaaatcccctg

SEQ ID NO: 463094 - DNA, 122 bp, Homo sapiens
tggtggataagcccatggagctaaaggcttatgcagattggttccagccctctcaaaatgcgtctaattgcttaggaatgaggaagaggatgaccgggcacagtttcaaaatcattcctctt

SEQ ID NO: 463095 - DNA, 122 bp, Homo sapiens
tccatctagtttctcccaggacaactaggcccaaccccacgggaatatacagagaggcctcgggtcacagacttaaagctgtaaaagggaggaggcgacggtctggtcccagtcaccgacca

SEQ ID NO: 463096 - DNA, 122 bp, Homo sapiens
gcttggagctgggggatgcgggcgcagcggggcagctggttcttacggtgagggcgcccccggtgaggtctgggctcaggccgggcacggcctcggggctcctgggaccctggcccgcgggc

SEQ ID NO: 463097 - DNA, 122 bp, Homo sapiens
tacaactgaatagaactcggaacaaaggcatcagggccacggtgcaagtctttgttcatccgttccccgactgctcaccctgtctgataccgctcttttccacccagaaaagcagccactca

SEQ ID NO: 463098 - DNA, 122 bp, Homo sapiens
ccccagcccgggtctctgcactgtcacggcctccccggggacgccaagggtgcgggcaggcggtgttggctggcgtccctgacggccacgctccttgcagactgcctgctgatgctggtcta

SEQ ID NO: 463099 - DNA, 122 bp, Homo sapiens
ccaaaatgtctccggacagtgataaatatcccctggaaggcaaaagtcacctctggttgacgcgcgctagcctgtatgaaacaaaatgacttattctccactagtgaaggaatgaccctgac

SEQ ID NO: 463100 - DNA, 122 bp, Homo sapiens
ctgtccccaccacggaggctcgtccagctgcccgggcatgagtcatgggccagccctgggcgctgctgcggattcagaagctcgagccgtttcctgcagataagcgacaagcgccagggaaa

SEQ ID NO: 463101 - DNA, 122 bp, Homo sapiens
cagaaaccctgggatcccggaggtcgaggcctccacacagacgggaacccgggctggttacgttccccggcgcaggccgagggtccccgcgttcccgccgcgctcgggccgataaggacggg

SEQ ID NO: 463102 - DNA, 122 bp, Homo sapiens
tataattttcctttacagggaggtcacttagtaaggacaatttggcatctcatactctttcgtaaaaaattatttttagtcagtcacagtggctcatgcctgtaatcccagcactttgagag

SEQ ID NO: 463103 - DNA, 122 bp, Homo sapiens
tgcctgtgtctccctggaagttgagccagcgctgggcattgcaaagggcagagccatacacgccacacatggtgcccacagccagcgtggcagctgcagggacgcgcacacggctgcaggag

SEQ ID NO: 463104 - DNA, 122 bp, Homo sapiens
ctagatgccagatcatttcattctgaccttcttcagtttgctttcctgttttgaaaaattcggattttcttatataattatgatgctattaacacctaacataattaacaattctttgaaat

SEQ ID NO: 463105 - DNA, 122 bp, Homo sapiens
gcttggtccgttcagcccttggtcagggctgaatggatttctgttggatgaatgaagggacggcagttaaagagccaggttgccagctgacattgcccaatcttgctgtgtggcctcagacc

SEQ ID NO: 463106 - DNA, 122 bp, Homo sapiens
aagcacccagtctgtggtatcttgttacggcacccctcacagactgctccactgctcttccgatggcagttcaggtctcctcaatgtcacaggctgatagaattatctgctataccctcacc

SEQ ID NO: 463107 - DNA, 122 bp, Homo sapiens
atcaagataaaagactgaagtggaaaatgagagtccagagaagccccggacggctcggggcgctaatggaaacacatggctgccggctgcgggcttgtcagcttcccccggcgctgccattc

SEQ ID NO: 463108 - DNA, 122 bp, Homo sapiens
caagttaccaattccagtggggctgttcgcgtctgccaccaactttcctaagactgacctcgccagccgctcagaaagcagcgttcaccactatcggcgtgcgtgtgttaagctgacttgac

SEQ ID NO: 463109 - DNA, 122 bp, Homo sapiens
gtacgttcctatgcaaccgagagccccggcaaatacttcatgagcttagcagcctgggctcgagcagctatgcaaacgcgcttttcatttggagcacggggctgatgtgaagataagaattg

SEQ ID NO: 463110 - DNA, 122 bp, Homo sapiens
agagggcgggttcagcaaacacgtgctcccccttgcggcgggaccgcgaagctcccactgcgtcgtcgactcagttgtctcgcgaggtttgttgcttggtcttggagccacaatttgagaat

SEQ ID NO: 463111 - DNA, 122 bp, Homo sapiens
caccgctgcggagaaggctccgaggagggttggtggggactcgaacctcggagtctctcccgacccgggggtcccagcaaaccagaacggccacctagacagcctgcggacgggagaggacc

SEQ ID NO: 463112 - DNA, 122 bp, Homo sapiens
cacacgcgggtcaccgtgcagggcgacagcttgcagagcgaggccttcatggccaggatccgggtggagaggacctgagggcaggaagccaggtcaccccaaggggccggagcagaggcgcc

SEQ ID NO: 463113 - DNA, 122 bp, Homo sapiens
gcgaattcatggaatgaagcgcagctgcatatgcagccagggttccagcccccacggccacgtggaaagactggctggcccgggtcttacagcgctgagggtcggtcttccagcgccttagg

SEQ ID NO: 463114 - DNA, 122 bp, Homo sapiens
gcgcaactggcacagatcgtgacgacaaccctgcggcaaggcaggagtggccttcctctccgccagggttaaggtgagtaccaccgcccttgggcccagcagcccgggtgagagcctccgcc

SEQ ID NO: 463115 - DNA, 122 bp, Homo sapiens
atattgtgaacccggtcctaattcccttttataagtgctagcaattttattattattcaccgcatatttgcaacatctagaacaccggaatatagcagttgcaccttaagtatcagtttaat

SEQ ID NO: 463116 - DNA, 122 bp, Homo sapiens
cggttttgccaacgcatgcccacgtgctggcgaacaaatgtaaacacggagatcgtgtgccgggcacttggtttcgtggtgggcaactgtgctgctgtttcttttggccgcggacaaggtcg

SEQ ID NO: 463117 - DNA, 122 bp, Homo sapiens
agggtcagatgtggaaggaaagtgggtgctgggttttcacggagtatgcctgccctgccccgggaggactgtgtttgagcttggactcgctcgctgctgaattcctgtttgttattcttttt

SEQ ID NO: 463118 - DNA, 122 bp, Homo sapiens
tgcaaagtggtgagtcatcgcagtagagaagaggcccgagcaaggagcagggcaagagctcggaggtccttctgcccaatcagcagcagcccccggctgggaggtctcttcggggtccaagg

SEQ ID NO: 463119 - DNA, 122 bp, Homo sapiens
attagggcatggcgtgctgtgtgtgtcagtgattgcctctgtggactcatgactttccatcgccatggctttctcttacgccgctgtttggctttcagatgtaatcctgtcttctcctctct

SEQ ID NO: 463120 - DNA, 122 bp, Homo sapiens
aattacaataacagagataggttttcatatcaaggtcatttaaacgctaggcatcctcttcgcttttgcatggagggagataacctaggctagcttgaactggcaatttctttaacaccaaa

SEQ ID NO: 463121 - DNA, 122 bp, Homo sapiens
tttccatgtagagaactcacaggatgactacatcacaaataaacccaactctcaggcagtcgaaagctttaactggatctgcagaagcccatcttcctccacatgaagaagtggggctcctt

SEQ ID NO: 463122 - DNA, 122 bp, Homo sapiens
actggtacgttcctatccagagcgtcttccttcacgttctgcacagaggcaggtggtctgcgttggttctgaagccagccagacctgcattcacattccggctccaccattcaactcttacg

SEQ ID NO: 463123 - DNA, 122 bp, Homo sapiens
cctcgcctggtggtaccatcgcgcgcggccgtgggtggggcgccggggcggggcgcgaagcgccctgggaaatgtagtcctagaagaaccagcgcatgtctcgggtccctgacacggaggga

SEQ ID NO: 463124 - DNA, 122 bp, Homo sapiens
cctcgcccgctgcttggaacagcacagaagcgcaaccttcctcctcgtcctggtaatactcggagtctggcggataagccgtcacagggctggaccacacgtccggggaatacctggtctga

SEQ ID NO: 463125 - DNA, 122 bp, Homo sapiens
aatatgccccaaaggttaagcatccatactctaagtaaatttggaggccaggcacggtggcgcacgcctgtaatcccagcactttgtggggccgaaacaggcagcttatttgaggtcagtag

SEQ ID NO: 463126 - DNA, 122 bp, Homo sapiens
agcaccatcccattggcatcgtgactaccaaccaccacatcactcagctgctttgctttccgggagaatccctgcgccgtgggttcgctcgcctttccatgcctgccgtgcaggcgtccttt

SEQ ID NO: 463127 - DNA, 122 bp, Homo sapiens
tcccatatcaccagtagaagcggaagcgcttgtctctgtggcgcaatcggttagcgcgttcggctgttaaccgaaagattggtggttcgagcccacccagggacgcttattggaacttttga

SEQ ID NO: 463128 - DNA, 122 bp, Homo sapiens
gagggggcggctgcccggtggtgtggcctcggtgccagggattagtctcggcaggagccacgaagtcacagctcccggcctctgatgcgggatctcaggacggcctgtgatctcccagtggg

SEQ ID NO: 463129 - DNA, 122 bp, Homo sapiens
tccagcctccagggagcagcacggggtggcccagccccattagcaggcagctcactcggccgcctgcacacagccagctcctccagcacgacccaaactccctgtgctgactggctagaaca

SEQ ID NO: 463130 - DNA, 122 bp, Homo sapiens
gagggtggatctcgggagcgtgtgtttttgtgtccacgcgcgtctgcgggccccaaattgcgtaactccaaggacttttcggagacttttgtaagtataatgctcagctttgtttgcccggg

SEQ ID NO: 463131 - DNA, 122 bp, Homo sapiens
gggcaggaacccgaggagcaggaggtggcggcggcggcagtggctgttcctcccagagggcgatgtggccggccggcgcgggcaccaagctgccctgtccccgagactctgcgctccggcgg

SEQ ID NO: 463132 - DNA, 122 bp, Homo sapiens
tcgctcccgagtctcgctctgctggacccgagagccggactctcccgggcggccgccgcgcggctccgacctgatgcgcgcggccacaacgaagcccccaggcccagcagaggcggccgcac

SEQ ID NO: 463133 - DNA, 122 bp, Homo sapiens
cacctgcgtcctcagcactgcgcccttgttgcaggtatggcgtcatcattgtgggcaacccgaaggcactatcaaagcagccgctctggaaccacctgctgaactactataaggagcagaag

SEQ ID NO: 463134 - DNA, 122 bp, Homo sapiens
acgaaagaacacagcttccacaccgtggaaacggatgccagcaggttgccactgttggctcgggcagcctgcttttattctcttatctggccccacccatatcctgctgattggtccatttt

SEQ ID NO: 463135 - DNA, 122 bp, Homo sapiens
cgggtcctcattttttttcaaggggtcctgcgcagcaagcacttccggggtcagagggtacgcggggttgaaagcgggcttcccgccccgcccagaccgccgaggctgccgccggagtcgcc

SEQ ID NO: 463136 - DNA, 122 bp, Homo sapiens
cccgcaggggtccagctcgtgtctgtgagaagcaccttcccttcagggtcgcacgtggaccgtggctgctaccacgctaccgttgccttcagtgctcttttgcaggagtgcagacgggcagt

SEQ ID NO: 463137 - DNA, 122 bp, Homo sapiens
ccgcctagcccggcaaatctgcccggcagtgcggggaggggctgctgggagtcctggtgccgccggctgcacttctgtgtgtctttcaggaagccacagggcagggggcgtctgtgcagaga

SEQ ID NO: 463138 - DNA, 122 bp, Homo sapiens
tcaaagcctccaaccagaaaagcccgaggaaaacccgagatctttaacgacggcggcctgcgccagccttgagacacttcctcgtcaacgtctcccatcgacaagctgtcgtatttgaagca

SEQ ID NO: 463139 - DNA, 122 bp, Homo sapiens
atcgcgcaacacacccccttcaacatgcgcggccaccctttcattgccctgcgccccgagcggtcccaccgcccggcaaaacactgagcaagccgctgctctcaccttgcttgacacacttg

SEQ ID NO: 463140 - DNA, 122 bp, Homo sapiens
attcaagagcgcgcaagggccaagaaccacccgtttccgggaaatgagcgttgctgccaccggaaaactgtctgctagggctctgccctaaccaccttgcaaacgagaaactggcgcgttga

SEQ ID NO: 463141 - DNA, 122 bp, Homo sapiens
cacccagccttcccaggcctattgcaaatacggctcttgtcccctgccaggtgctgccagcggtgtttctgctgtcttactgctctatcctgtgcaactagaaggtcatcaaaatgacctcg

SEQ ID NO: 463142 - DNA, 122 bp, Homo sapiens
gccctcgccgctcctatcctgccaccgcagggctagcggcaagcagcgctaacctccgtgcggtgcttactcggtgccaagcactgttgtagcacctcacacacattaaatcattagatgct

SEQ ID NO: 463143 - DNA, 122 bp, Homo sapiens
aggcctctcacggcacaaagcttcccgtctacacgtcacgccttctgcatctagactcggcggaccaactgagcccgatgggttatgagaaaggagtgaatgtgccatcccagctagagctc

SEQ ID NO: 463144 - DNA, 122 bp, Homo sapiens
ccggggaaacccacgggtgcagcaagccgggaaagctgcagacgaggcaggcggaagaggcgggacttcgcgggtgacgtcatcggggcgccggaggcccggggcgcctgggaatttgaagc

SEQ ID NO: 463145 - DNA, 122 bp, Homo sapiens
gaaaggcctgtgggagctgatgctatggcactggggtgccggccaggagctgcagagctacgcatgaataaaaagaggctgtgctcaggcggcggcgtggctgtgaactggccatggaggag

SEQ ID NO: 463146 - DNA, 122 bp, Homo sapiens
gaccctgacgctgtcattccaggcaggtggacacgaacaccaaaaatgtctttgggcaaccgaggttgagggcatccctccgagacctccggtcaccacggaagaactacaaatccaccatc

SEQ ID NO: 463147 - DNA, 122 bp, Homo sapiens
tgcacaccttaataaaatcctcctgctccacccattggtctttctggtcctctgctttcccgcaacaatgggagtcttcaagcggccagtgcctttttcgttcttaactgcccaatccgtgc

SEQ ID NO: 463148 - DNA, 122 bp, Homo sapiens
ccccagagagggaagggccttccttgcccaatatcacacaggaagttgaggggatacagccgggtctcctgactcctagtcacagctctcttcaccattccacattctctccctaattttga

SEQ ID NO: 463149 - DNA, 122 bp, Homo sapiens
gtggacacatagaagtcaattaaatatttattgcgcaactgattggcctctaaatgaaagcgctgtaccctattcagtgattagtgttttagaagccatggtgcaattaataaaatcactgc

SEQ ID NO: 463150 - DNA, 122 bp, Homo sapiens
tcatttgaaagagggcaaaatctatttcctgggtaattttgcagagcaaagatattaatacgttggggtttaattgtatcctgtgtttaaatacactgtgggtgaaaccccagacctctgct

SEQ ID NO: 463151 - DNA, 122 bp, Homo sapiens
gaagttctgcaaaccaaagcctgatgaggatttccgccgggtgggacaggtttaagaggacgaactcatgagaaagaagtctgagcccaaaccccagaagccggccaggaaggtgtaaaggg

SEQ ID NO: 463152 - DNA, 122 bp, Homo sapiens
gccatgacaagcttcccatgaatgtaggaggcagggctcagccttgtccagcagcctgtgcgacctaagctgcctttctagaaggctctcggccgcgtgcgaggcccaagagctctgcggca

SEQ ID NO: 463153 - DNA, 122 bp, Homo sapiens
acggcacctggaaaatcaggaaaatcgggtcactcccacccgaatactgcgcttttccgacgggcttaaaaaacggcgcaccacgagattatatccccgacctggcttggagggtcctaccc

SEQ ID NO: 463154 - DNA, 122 bp, Homo sapiens
agtgatcctctcatctcagcctccggagtagctaggactgcaggtgtgcaccaccacacccggctaatttatttattttttgtacagatggggtcaggctatgctgccccagtctactctca

SEQ ID NO: 463155 - DNA, 122 bp, Homo sapiens
tggggctgccacagccctgcggagctgctttccggggtccctttccctggaccagattttcgcgggaagccggatcctctccgttcccttggagtgagcaagcgggacagttctgcggaaag

SEQ ID NO: 463156 - DNA, 122 bp, Homo sapiens
tgctaaaagtttccactttgctttaagtcttgctgattagagaaatcacatgatgaaatacgttttagtgatattatccaggcattagtgtgtgcaagaatggcttgggtccaggagagatt

SEQ ID NO: 463157 - DNA, 122 bp, Homo sapiens
ttgaactcctaggcaaaagcaatcctcttaaatagctaggactacaatcatgaaccactacgtctgcctaattttaaaagaatttgtagagacagagtttcactatgttgccctggctggtc

SEQ ID NO: 463158 - DNA, 122 bp, Homo sapiens
atttaacatatcttagagaatacttgtttcttgttaattcaggcattttaaaatctgtggcgcttccagactcatatcaacattccctgatggaagcctttagcaatcctaaccaggaagtg

SEQ ID NO: 463159 - DNA, 122 bp, Homo sapiens
caaattatcttctaagttctagaaggggtttgtaatcaaaacatatttgataggaggctacgggagagttgtctagaagaggtaagacctgaaactgtttgttctctcccactagaattaaa

SEQ ID NO: 463160 - DNA, 122 bp, Homo sapiens
gcaggggcccacatatagttgtgcaaattgtacactgcacacagacctctaccgagtgagcgaatggggcaaaactctaacccatgctactgtccccaagctgtgtatcctgggaaagtgct

SEQ ID NO: 463161 - DNA, 122 bp, Homo sapiens
gccacaaactcagcccagtattgacgcccacgagtcgcttgtaaagaccgtctgtgacgccggaagtgacgcgctctcgggcactatgtgcttccggtctccaataccgcaggagggcggtc

SEQ ID NO: 463162 - DNA, 122 bp, Homo sapiens
cgtggtgggcatttctgcgggtgtgaaattggaactcctcacggctgagcacagtgggtccgggcggagcagagcgcgcggtcctcctgactctgcccccttctcctgggcacgaggagtcg

SEQ ID NO: 463163 - DNA, 122 bp, Homo sapiens
ggcgtagccccggcccgcggctagtgagacggggagcgcatgggacaaaattctcctagccgcgggccgcgcaggctcctttggaggcaagtcgctttctgtacactgctggttaactgctt

SEQ ID NO: 463164 - DNA, 122 bp, Homo sapiens
aggtggagcgccgagccaatgttgacacctccatctgttgtacataccctggcattttgtcgcaggttgcatgatttgtgagtcctctttagattttagccctctccttctccactctgcat

SEQ ID NO: 463165 - DNA, 122 bp, Homo sapiens
ggctgcccggaggtggcggcaacggggcagctgaatgggcctcttgttcctggccacacccgccccttggggtcaccctgggacatgcccaggcagcgtggctaccttaaagggccagtgct

SEQ ID NO: 463166 - DNA, 122 bp, Homo sapiens
gggtaccgaggtaccgcagtctcttccacctgctttgaaaccagcgcggagatcctgccccgctatccgcttcaggcgcgacatgttcaaagtcctaggtccagaagctgcagccccacccg

SEQ ID NO: 463167 - DNA, 122 bp, Homo sapiens
ttaaaaccccttatttcatctgtgcctttggctgattaacattgaattgacggccgacagcgctgcaactcaagcctgaacgaagcgtcactgtcgcatgcattttctgcacaaggcacatc

SEQ ID NO: 463168 - DNA, 122 bp, Homo sapiens
ctgtccccacagtaagagaatgagatcaggaggcaaacagagaagtcgaagctatcctcccgttcctgtgggattccccagccacctgacagagcaggccaggcagtcctctccagacaaac

SEQ ID NO: 463169 - DNA, 122 bp, Homo sapiens
ctgaggaaggagcaaacgggttttcgcggttaaacccgtgggttttggaatgtgtgttcccggctgtgtgatcctgggcaagaacttgacctccctggacgcagcggcacccctcggttatt

SEQ ID NO: 463170 - DNA, 122 bp, Homo sapiens
cctccaggttcccatggtcagcccaccctgcagggggcacactgagtgattctagtgcttcgtgcctgccccggagggcatttggggacctgcaataaaatgctgacatccttatttctgga

SEQ ID NO: 463171 - DNA, 122 bp, Homo sapiens
gagatttaaaccgcgcgacctggcgtccgcgttcgcccccctcgggcgccggcctgaccccgccaccggcccgactcgggatcggagcatctctcggtctgctcttgaatgaactcggggac

SEQ ID NO: 463172 - DNA, 122 bp, Homo sapiens
aaagcagaagcagctttatagcttggtttgttagttgcctgccaaaggagcagtaacctgcgatgaggtttgtttggcacatttttttttttttttttgccatttattcacttgttatactc

SEQ ID NO: 463173 - DNA, 122 bp, Homo sapiens
aggcactcaacctctctaagcctcattttccttgtctataagatggaacaagtaataacacgaatcatctcttaggactgatgtgaagattaactaaaagattgtctgtgaagggcctagtg

SEQ ID NO: 463174 - DNA, 122 bp, Homo sapiens
gagaggctgagcgaagacgggttcgcggacgtaagaggggcgtgtcgggcctgtcatcagcgcacgcgcaacactgccccagacgacgcgaggtgtgcggccgccactagacccggcccagc

SEQ ID NO: 463175 - DNA, 122 bp, Homo sapiens
ccagagtaacacctcttcatcctcatgagatgggaatcaacccagacctggggagaggagcgccatcgggagacagctaggggctaaggcagccaagcccctcaatatccaagctgccagcc

SEQ ID NO: 463176 - DNA, 122 bp, Homo sapiens
ggggagcccatcctggaggccaagccggatcctcaggtttggccagggggcggctggggccggcgtgccggcggggcgccggcggggccgcgggggtttgcggcgctggctgggattcgcgc

SEQ ID NO: 463177 - DNA, 122 bp, Homo sapiens
gggtcagggagttccctttctgagtcaaagaaaggggtgacagacggcacctggaaaatccggtcactcccacccgaatactgcgcttttccggcgggcttaaaaaacggcgcatcacgaga

SEQ ID NO: 463178 - DNA, 122 bp, Homo sapiens
aagtctctcgactttggaaggaaagttttgttaacctttttttttttaaaaggaagaaagcggattttggaattgcattttttaaagcaccactcttgattttctgggattggtgaagaaac

SEQ ID NO: 463179 - DNA, 122 bp, Homo sapiens
acagcgactcggcgtgtccgaggatggagccgcgggcgccgtgggtggagcaggaggggccggagtattgggaagaggagacacggaacaccaaggcccacgcacagactgacagaatgaac

SEQ ID NO: 463180 - DNA, 122 bp, Homo sapiens
taaagacaaaggaatttatttcactggatgaaaatcaaaggtcatataatggcaggcaggcggtttatttacttcagataattaatagagagttcaccactggggaagcagcagagatattg

SEQ ID NO: 463181 - DNA, 122 bp, Homo sapiens
gagcccagggcatggtccctctgggcactgagtttcctcgtgcccccctcccctggagctcgggtgtgtgtagatgcatgaccaaggaccagggggcattttcacttctgtggggtgggcct

SEQ ID NO: 463182 - DNA, 122 bp, Homo sapiens
gtcagtccggagtcacttaccgggcaccactagaagaacccgggatgaaacattttctcccgtgtcttgactctctcctttctttcaccgctgctttaaagggctgccagaaagccacaaag

SEQ ID NO: 463183 - DNA, 122 bp, Homo sapiens
cctggcagcggcagcagcaggtgggctgggctcctcctctggctccccaggtctaggagtcgtgcctgacaccaccctcagcactcccccacggcccctttgtctctcagccccttcacagc

SEQ ID NO: 463184 - DNA, 122 bp, Homo sapiens
aattagagaagcagagccggcttggtcacgtgcccagggcgggaaatctgacgaccaggccgagctggaaacctccacggaatcgtggctcggggctggaaacagacctcacggaatcctgg

SEQ ID NO: 463185 - DNA, 122 bp, Homo sapiens
tcatgtccacaccttagagctgggacataagcgcagtgcgcgctctgcagaaattctgcccgcctctccaggccctccttccagctcccggcagagcgggctggaagtaacggggaagagcg

SEQ ID NO: 463186 - DNA, 122 bp, Homo sapiens
tgatctcgacaatgctttgtaggcggagagcgctgccctctaattctagagtctcagtgtcggatgttctgatttccacttgtctaagcgcagctcttctccgagttcacctgtctggagtt

SEQ ID NO: 463187 - DNA, 122 bp, Homo sapiens
cttccttttatttggaagacgtaagtatcaattctttaattgtgagaccagaacagcaagcgttttaaaagtccacataaacacagtgttacacaaatgtttggtacgaccttatatgtgat

SEQ ID NO: 463188 - DNA, 122 bp, Homo sapiens
agacctgcctccgtgggcctctgtgctgggctggaggtgccaggaaaccagtgtccctgccgggtgtgcagcttgggaagccccaacagtgcacgtgggggcttctcagaagaggcatggtt

SEQ ID NO: 463189 - DNA, 122 bp, Homo sapiens
aagcaatcgttcctccttgacctcccaaaatgctgggattacaggtgtgagccaccacaccggcctataatgttcttttgagaagaaaatgagtgtgaaggatagtgggaatctggcttggt

SEQ ID NO: 463190 - DNA, 122 bp, Homo sapiens
cttgtttttctctcccaggctcttgtcaggatggtgaagctgttcatcggaaacctgccccgggaggctacagagcaggagattcgctcactcttcgagcagtatgggaaggtgctggaatg

SEQ ID NO: 463191 - DNA, 122 bp, Homo sapiens
ttaccccgcctgtcggggtgggggagtgggggagattagaaacaaggggtagaaattcctcgaaagggaataaagtgcctaattttcaggaggaggtgccatttaaaagattcgcctagctt

SEQ ID NO: 463192 - DNA, 122 bp, Homo sapiens
gcagcagaggctgctgctccgcgctcccgctcgtctcagtggtctccttacaaagacgggcggctaaaagctgccagctcactttaagagcagctttgtgaaaaacaaccccagtgcgcagg

SEQ ID NO: 463193 - DNA, 122 bp, Homo sapiens
cctccataaatgccctatctccaaacacagtcacattatgacatcctgggggttggacttcgacgtgtgagtttggggggatgcaacccagcccacaataaacagcaaatacgattagagct

SEQ ID NO: 463194 - DNA, 122 bp, Homo sapiens
taaagggtactgggagagacagctgatttttttcaattgtactttctcctggccacttatcgggaaactatttagggcttccatggtatttgaagctataacttaataacttctttgccaaa

SEQ ID NO: 463195 - DNA, 122 bp, Homo sapiens
cgccccctcttccccgttcccggctcagactgtcgcttccgagcgacctgggttctcgcccggcctgctgctgccgctgcctccaggaagttcgccctgaccacctctgcaggctcagcgcg

SEQ ID NO: 463196 - DNA, 122 bp, Homo sapiens
cgaggcagggagctggctggtttgtgtcggggttttccacatgtctagatgataaagccacggccagcagagggacttgacaaaggggaggagtgcaagagggtgcacaggcaaaaatgctg

SEQ ID NO: 463197 - DNA, 122 bp, Homo sapiens
atgctgatacaatggccatgtgcagatacaatttattctaaagctgcagttatcagaactcgattgcagagtaagatagactctttgcaaagtatccaggcattgggaagaaagtgagaagc

SEQ ID NO: 463198 - DNA, 122 bp, Homo sapiens
tataaaacaactattagcaggttttcttcaagaatttactccttattttgtagacatccacgtgaactaaaatatgaatcaaaataacaactctaaaggagaaataatttcccaaagtagta

SEQ ID NO: 463199 - DNA, 122 bp, Homo sapiens
gaatgatgtcatcacattgattggcgtcaagaggggacatcagtcatatgggcctgttggcgctgtgaggcaacggtctcaagagtcctcgagagaaagagaggtgttgcccctccctgggg

SEQ ID NO: 463200 - DNA, 122 bp, Homo sapiens
aaaggcatgaatgtgagaaggagagaggtaattgccatttctatatcacataaataaagtcgtattgaaaaagtaaaaatctagaaggtaacatcgcaaagaaagcttcctaaggactgagc

SEQ ID NO: 463201 - DNA, 122 bp, Homo sapiens
cccggtgagatcaggcctcccacgcgtcacgcctgggagaacgccagccggcggggaggtcgtgccaggatagcagactttagttgttgtcgttgttccgtggactttttagcagcacaggg

SEQ ID NO: 463202 - DNA, 122 bp, Homo sapiens
agctgggggtatcaacaagcctgcctttcggatcctgcgggaaaagcccatgtagttaagcgctttggtttaaaaaaaaggcaaggtaaaggcagggctttccagacacatttaggggttcg

SEQ ID NO: 463203 - DNA, 122 bp, Homo sapiens
cccagccccaggcatgccggctgccctcacatccgttcacaggtctccagaagcagagcccgacgctctgctgatcccaacccacctccagccaggagcatcagaccggcaccttccaagca

SEQ ID NO: 463204 - DNA, 122 bp, Homo sapiens
cccctgacaggaggcgctgagccccgtcggtcactggctggccggtcccctgacaggaggcgctgagccccgtcggtcactggctggctggtcccctgacatgagcagcacagccactcggg

SEQ ID NO: 463205 - DNA, 122 bp, Homo sapiens
tacatgaaaagttttcacacggaaaaacaagttgatgtgttctgcgtagctctggaaaaacgaccagggccaacggattgaaggcagatttcatctcagcctgaataatccaaaattaaatg

SEQ ID NO: 463206 - DNA, 122 bp, Homo sapiens
agcagctgcaggccgtcctgtgcagcaccatggagaaggtgggcggggcctcgggaggggcggggcctgaggctggggtcagtcctggccagtgggggtgagtggcccccctccagcacacc

SEQ ID NO: 463207 - DNA, 122 bp, Homo sapiens
gctccaagccttctctccaaacatccaagtacttttctccgccgccaccggcccggagcacggagcagagctggccgcactcggcgccttactcccggttctccatctctcccgccaacatt

SEQ ID NO: 463208 - DNA, 122 bp, Homo sapiens
agcgccccccgggggacccgcaggtgcaccaggcagccgcggagagaacaccagtgcaaacggagggacgaggacgcgcgcgctccgtgctcctttcactttgctatccaaggctccagtgc

SEQ ID NO: 463209 - DNA, 122 bp, Homo sapiens
acaaagtcagggagaggtagaggtcctacacctgccaggtccccctgggcaggcattgagcgtctcaacgggttccaggtggtggaaatggagcgggacagggacaccaaggcaggtgcagt

SEQ ID NO: 463210 - DNA, 122 bp, Homo sapiens
tgttggccaaacacttttttcttttttgaatataattctctctggaaattgtgctacctgcggctctaagattcatttgggttacaaaggaatgtaattaactaaaaacacaaatgaattat

SEQ ID NO: 463211 - DNA, 122 bp, Homo sapiens
taggagaccaaaggaagggggaagggtggcggcatgcggggaggctgctagtgctgtaggcggcagagggatattaatagtacctggggcccttccagtctcttatcagtcttttcaagctt

SEQ ID NO: 463212 - DNA, 122 bp, Homo sapiens
ccaggtttgagtgtggaggtttgattatcacggactggctcggggccggcttggttctcccgcgaaggttccagggtgtgtgtgtgtgtgtgtgtccgcgcgcgcatgcaaatcccagagga

SEQ ID NO: 463213 - DNA, 122 bp, Homo sapiens
agagccaccaaacctggtactatgcgaccatggtccttcccctggtcactggatagtgatcgcacccaacacaggcacccccatctacagggtggctggagatctatgaccattgtggcgta

SEQ ID NO: 463214 - DNA, 122 bp, Homo sapiens
ttgcaggaatgagtacccagggtgagtaacaatagtatgagggatgataacaccataacacggtgcgaaataatagtgacaactggtgagtctgaatgagtaaaaatggctaagaaagcaaa

SEQ ID NO: 463215 - DNA, 122 bp, Homo sapiens
tagagcccgggggtgtcgggccttggcaggcagcaggagtgcggggagaggaagccttgccgggctgctcaggtgcctttcctgtcagctttcctacagggcccgggagattttcagtaagt

SEQ ID NO: 463216 - DNA, 122 bp, Homo sapiens
tgcagtgaaccgagatcacgctgcactctagcctgggcgaccaagcaagactttgtctcccgctaccaaaaaaaaaaaaaaaaaaaaaatttatacctttttgaaaatgtcataagtgctga

SEQ ID NO: 463217 - DNA, 122 bp, Homo sapiens
acctcaccccaggggactgggactcaagtgacaccctgcgaaatcctgcttggcctttgacgttcagattaagtgcccatgctgcctcctccaggaagtcttctcggatgatgctctagcct

SEQ ID NO: 463218 - DNA, 122 bp, Homo sapiens
ttccagacatgtcccacccagattctccctaggctgcctgccacatgagtgagttttccacgttatatgtggggcagtgaggtccttttcatggctctccataacccttaggataaagctta

SEQ ID NO: 463219 - DNA, 122 bp, Homo sapiens
ttttaatccaacatcggcagcacccgaagtggtccccgctcccccggcggatgcagcccccggatggccgttgccacgcatttttgtttaggaacctggtttttattaaatgtaattgcttc

SEQ ID NO: 463220 - DNA, 122 bp, Homo sapiens
tcccacccatctaccttaggacctggaggctgtaaatattggtctatgtttgtcactgttcgttgcaagccatttcttcctctactacctccaaaaaccccaattcttttgaagagcctgcc

SEQ ID NO: 463221 - DNA, 122 bp, Homo sapiens
cgggctcctggccgcgaagcaggacgggagatgtagtcctcaagagtgaccagggtggcacgactgcagaactcggtttcccgactggctttcgaggcgcgtgcgcagatggctgccccggc

SEQ ID NO: 463222 - DNA, 122 bp, Homo sapiens
gggaccgtcccacaattactcttgttgctgggctcggaaatagggagcggtgctaggttgcgcgtgcgcagattgagaatggagctttccggtcgggcgggaggaggtgacgtcaggagtgg

SEQ ID NO: 463223 - DNA, 122 bp, Homo sapiens
ctagagaaatttaacaacttcccagtgtattagaatcttgggcatactctcagatggagccggcctttctagccccatgtctttaataaatctacttgattagagaagagacaattccctaa

SEQ ID NO: 463224 - DNA, 122 bp, Homo sapiens
tttagagagtagtctaataaagaaaaaatgtagtggcagagcagtgattgtgaagggtcacggtgtagaaagggcatcaaaaaaagagcacaaaagaatgttttggaagtaacggaaatgtt

SEQ ID NO: 463225 - DNA, 122 bp, Homo sapiens
ctacccacagcccagtttcttcacccaaatcctttgaatgcagttggtaaagccagagagcggagggcctccacctactggtcatccttctcaactctcctttcagggttgttggccaaggc

SEQ ID NO: 463226 - DNA, 122 bp, Homo sapiens
gccctttacgatgacctagtccaacccactcattgtacagattgggaaactggggcccagcgagattactatttaacagctttgaaatgactgcaggagggagaacacgaggaaacatccaa

SEQ ID NO: 463227 - DNA, 122 bp, Homo sapiens
cactcacctgtctggcgcggtagctctcgaaggccctcagggcactgtcggtgagcttcacgtggaacaccgacaccttgctgccgtcgctaacccgcccgcacgacagcccgtagctccta

SEQ ID NO: 463228 - DNA, 122 bp, Homo sapiens
cgggggcctcgggggcttctggctgtggtttctccgtggctcgcccctcccccaggtcgccgaaagttcaaacattaaaggggcaggtttagagttctccgggcacaggcccggcccggtgg

SEQ ID NO: 463229 - DNA, 122 bp, Homo sapiens
tgttaataggacattcccttcgccaaatggatgaccagagttagactgtggccactcagacgtaacaaatttatgctaggggtgcagtttgatgacgttagacttaggtgctaacaaaatgc

SEQ ID NO: 463230 - DNA, 122 bp, Homo sapiens
gtccccaggaaggctagcccaactaagtttagaaaggagaagagcagttgggcaatgtggcgtcctggccagtcaatgtgtgccgattgtttatgagcaacactcaagttgatgttacaagc

SEQ ID NO: 463231 - DNA, 122 bp, Homo sapiens
gtccaccgtcctgatcccagatgtgagtctgtggcccacggacacactcaacagctctggcgtggtcagggcgcagaccccacggcctccggacggtgtctgggccccgacagtgcggggct

SEQ ID NO: 463232 - DNA, 122 bp, Homo sapiens
cttccagatcactaaccagtgtcagagagcagcctatgcaactatgaattcaaaagatgtcgaacacagggtcaagcctagaataagaagtcttagcgaattaagtatgctttttcccccaa

SEQ ID NO: 463233 - DNA, 122 bp, Homo sapiens
ggcaagggctgcagctgcaagtggtgcgccctgcccagccggggattttcaggagggtcccgcctcagacggggcggacccggggcggggcaagggccaagaaggtttaaaggcgccgcagc

SEQ ID NO: 463234 - DNA, 122 bp, Homo sapiens
aagcctgtcttttaaccaacactgaaacgttgctgctgaacaccagggaagactcctaaacgttttccttggtaaccagccttggcatctcaaaatcctcccaagagtgaatgcggggtgtg

SEQ ID NO: 463235 - DNA, 122 bp, Homo sapiens
gcccacagctggccttttctccactttcggtctccatcgtaacgcggctggctctctcggcgccggcttaggccttgcaagtagggaaatggtgagtctttcccgccccctcatttttgcga

SEQ ID NO: 463236 - DNA, 122 bp, Homo sapiens
cctatctattgcgtcacacctcccccgtgtgtgacgtcaaaggcaatcccagcccagacacgtgggttggagcagcgtcgcgtttctgggcaattgctcctgagacccaacaggcagcaacg

SEQ ID NO: 463237 - DNA, 122 bp, Homo sapiens
agggggatgcggagcaggctggctgggctgcagggcgagcagggtcccagtgctgcgcggcgccggctgggtgcgctctgagcccgtgactctgctcgcgcctttataatccaacctgccgc

SEQ ID NO: 463238 - DNA, 122 bp, Homo sapiens
cctatgagagccagtgggagtgaggtagatagggcaatgacgtaacgatctaccaatagtcgccgtctaaaggtgggctctatagaggcgaccggcaagctggaacaccaacctggaaagag

SEQ ID NO: 463239 - DNA, 122 bp, Homo sapiens
gcacccggcatgggggcctgtggggcacagtcacagccacggcgtcctgggcctgaaccgcggcctcagcttcctgctctgcggctccatccccgaggcagagtcaggttcgggaagttgga

SEQ ID NO: 463240 - DNA, 122 bp, Homo sapiens
atgagaactagagatggggaaattatatgcgcgccaaagcaaggggcacgggcgcagcaacgcgtcccgacatcgaaacacgtgattcctcccccccatatttatcgtatgggcagcccaag

SEQ ID NO: 463241 - DNA, 122 bp, Homo sapiens
gctctgtcagccctgatttgcgggctgagcccagttttgtggccctgcctgtaatctccccgagttcaaagagtgcttagctgcttgtctttgtcaagagcgcagttggggatcttttatgt

SEQ ID NO: 463242 - DNA, 122 bp, Homo sapiens
tacgcctcaaaaaaataaaaaataaaaaggcccacaaccttagaaagctctctcctgtctcgtcccttgacctatattgaccactgaccagtaatcgcctatcgcgcttttttttttttttt

SEQ ID NO: 463243 - DNA, 122 bp, Homo sapiens
tagaaagaaagctttaaatttctctctcggaagcactttgtcagccagggttttccctctcgcccaccctgcagttaaggaaatctaagaggtggaagtggggcgggctggagggccacaga

SEQ ID NO: 463244 - DNA, 122 bp, Homo sapiens
cccttcttctcgctctggaatgcgggggctgtgcccctggcctgtgtccgcatcctggggcggtgtcccgtgggcagtgtcctctggctgcagaatgcatgttgcagaattggaccagccct

SEQ ID NO: 463245 - DNA, 122 bp, Homo sapiens
ttctcctcatcccttcactgaatctctctctggagaggtcagggaagcctgtgacatccccggagggcactgcctaactaaattagcatgagataactttggactctctcccaaacatgaaa

SEQ ID NO: 463246 - DNA, 122 bp, Homo sapiens
cccctcccctggtccctggggagccctgggcttcttttcctcctggtttccagcatgacccgcccttccctcgggggcatagcttctgtctccactacccagggccacttctcaggcactga

SEQ ID NO: 463247 - DNA, 122 bp, Homo sapiens
cagcagccagcgctgagcggcacctctgccccgcaggtacagcaggcagacacaccaaggcgaaagggagtcgggcattaggaagtgctaagtgcgcgttaactttgctaacctaaatcaac

SEQ ID NO: 463248 - DNA, 122 bp, Homo sapiens
aagagctgggataccagttgaggccatctgactcaaaagccctggtcatagtcatatggccgcctccaccttttttataggcttgagaaagtgaggctccaaaaagtgccttgcccaatggc

SEQ ID NO: 463249 - DNA, 122 bp, Homo sapiens
ctggacggtgctctcctgctgaaattcgggagctacttagcagccccaccttggcaccctcgtttccgaggggcaggccctgggcgcgcgtctcagtttcaagcccgcggcccgacactaga

SEQ ID NO: 463250 - DNA, 122 bp, Homo sapiens
cgcccgaccctacccatattaggagaacagctctccagacgtgtctccagggccaggctccgcccttaaaagtctgtggaagaggctggctaatcacgttcgttattcggcttcgagacccc

SEQ ID NO: 463251 - DNA, 122 bp, Homo sapiens
ccgcccccggaggccccacagattctcagagggacggcgccgggactggggaggccaaggcgttgacgagcggggacgccggtgtgcacaggtgacctggcggctggcggggcttgactgtg

SEQ ID NO: 463252 - DNA, 122 bp, Homo sapiens
acagcggtcaccagtggcagacactactgggaagtgacagtgaagcgctcccagcagttccggataggagtggcagatgtggacatgtcccgggatagctgcattggtgttgatgatcgttc

SEQ ID NO: 463253 - DNA, 122 bp, Homo sapiens
ggtcaaggcccaggccctgccttccagggtcccctccgaactccaggctggtgcagtggccgctgctcgagccgctttgcagacttcctttatgccctccaacaggaacaaagcaaaaaagt

SEQ ID NO: 463254 - DNA, 122 bp, Homo sapiens
ctcattagagtcaaaaaaaaaaaaaaaaaaaaaaaaggaaacaacccaaatgtacttctgcgggtgaatggataagcaaactgtgatggatcatatttcctatgagggagtactactcagca

SEQ ID NO: 463255 - DNA, 122 bp, Homo sapiens
ttcaacgccctgggctctcccctcgctttgttgcatgagagctgctttactcactgctctcgacgaacagtcacagccacgagcaccgtccgaaacagaatcacagcctccctgggaaggaa

SEQ ID NO: 463256 - DNA, 122 bp, Homo sapiens
attggccgaaagagtctcgttttgatgccacccgggctcagattggcccagcgggtccagcgccgcatgaggcactggctgggtgtgaggtggcgcgagccgccgccctccctgcccccacc

SEQ ID NO: 463257 - DNA, 122 bp, Homo sapiens
cttcaccaacgccacacagacgtacgaccgcatgcagtgcgagtcgccgcccgtctactccggctactacctcctgggccagggccgccgcggccaccgcagcatcctcagcaaactgcagt

SEQ ID NO: 463258 - DNA, 122 bp, Homo sapiens
tggggggagctccgtgggctggctacccagcctgcggtgagggcttcggggcggcgggggcgcagattggaacgccaggacatcctcgaggtgttccgctgcctcgctgcgagctggaatgg

SEQ ID NO: 463259 - DNA, 122 bp, Homo sapiens
gcccgcctccttgcggtcctggaccgcgacttgaaccggcagccgcgcatgcgcagtgtgcggagaggctgcacaacctccgtgcctgcatctctgagcatcccaggctggtgcattgtccc

SEQ ID NO: 463260 - DNA, 122 bp, Homo sapiens
tttcaaccccacattgcttcacatgcttccttagactaccccataaatcttgtcaactagcgcctttgcagaaagaatgtgaggccatgaccggaacagttggactctcaggctacagttat

SEQ ID NO: 463261 - DNA, 122 bp, Homo sapiens
gacctgtctgcaggagcagtgtccgcagtccagtgtatagcaaatcccattaaacttgctcggcttgtcatggaaaaggtatatgtgactaaagcagccttttcctaatgaattgttattgt

SEQ ID NO: 463262 - DNA, 122 bp, Homo sapiens
gtaaaatggaccaatcagcaggatgggggcgggccaaataaggaaataaaagctggccaccgccgcccaacagctgcaacccgcagctcgggttcccttccacgtggaagctgtgttctttc

SEQ ID NO: 463263 - DNA, 122 bp, Homo sapiens
tatagaaataaatatgaggcagagtcctatgcttttacaattccaaggaaacctacagagcgaggctgtggaaactgattttccactttaccggggcattatccaacatgttgggtgcaaac

SEQ ID NO: 463264 - DNA, 122 bp, Homo sapiens
ccgcacgctctcctgccccagccttttctgggaggactgcaaatgccccctctcagcaagcggccgtttcccatcttcgcttcgcgtccaaagtgttgggtcataatctggatttggaggca

SEQ ID NO: 463265 - DNA, 122 bp, Homo sapiens
taaaaagtgcacgtggtgaactttctagaatattagtaatgctggcacatataatgactccgataaactacgccaaaagagtaaatgaacttgtgttggcaactttagtgtaagtcttcacc

SEQ ID NO: 463266 - DNA, 122 bp, Homo sapiens
acgccattctcaagcaagcgcatcaatatatttagttccggcctctttgcacgtcatttccggcaccggcatggccgggtgagctgcaggctaccttatttaagaccgggaatttagtcagc

SEQ ID NO: 463267 - DNA, 122 bp, Homo sapiens
ctagtcttcttcccaaataatggcgcccacccacctcattggtccgatgcccacagttctcgcagttggtagccatgatgataacctccttaaagtgagggatttctggaaaacggagttaa

SEQ ID NO: 463268 - DNA, 122 bp, Homo sapiens
gccagagcccagactggaaatgcctgcgcaagcagtggccagtgaggctttccccagcagcgttttcaggttgaaaggatgatctgacaagatctggccctaaaatgggaactcaggacagt

SEQ ID NO: 463269 - DNA, 122 bp, Homo sapiens
cagatctctgctccaaggggctgtcttccttagtattatctcctctggcattgccccaaacgctgggtgaggccttcatccacaggccagggcccttgatacacacaagcccctgccaagat

SEQ ID NO: 463270 - DNA, 122 bp, Homo sapiens
agagacaagcggtatccctgcaaatctgaaaactggaagaggaattggaagtaaccttttcggataccgtctggagcccacgaaggcattacaattttgcaagtgagaagcttctcctctaa

SEQ ID NO: 463271 - DNA, 122 bp, Homo sapiens
atgttctatattcctaggcccactgttattcttaatattacccaggaaagggtggtgaagcgagtaaataaatgaataggtgaatgaataaatgaatgaatgaatggcaccctagccccact

SEQ ID NO: 463272 - DNA, 122 bp, Homo sapiens
cccggcaggagtatgacagatgcttcgtaatgcagtctgctcgaggcatgggctgcagcccggtccctgcgtcctacagagacaccgtccacgcggtgcccggaccccggaccagccacggg

SEQ ID NO: 463273 - DNA, 122 bp, Homo sapiens
ggagaggacttggggcatggcctctggggccacccttcctggaactcagagaggaaggtccgggccctcgggaagccttggacagaaccctccaccccgcagaccaggcgtcgtgtgtgtgt

SEQ ID NO: 463274 - DNA, 122 bp, Homo sapiens
gatttggtagtggtaagaaaggaagagagaaggaagtaggagatttttctgagcatgagtcgcttagaaaaaatcctgcactgcaagggccttcaaataaccaaatgttaccagagagcaga

SEQ ID NO: 463275 - DNA, 122 bp, Homo sapiens
ggctgttccccgaggcgcgtggggaagcgggcgtgacctcttctgaaaaggcggtaggctcgctccacccaggccctagagcccacccttagagctgcgcgctttagggtgagccaggcacg

SEQ ID NO: 463276 - DNA, 122 bp, Homo sapiens
tcagactgggcgagtggccatgaggggaaaaccagtgcaaattccccaggcccaattgtccggaagaagacgaggcaagtccgcgtaaagatttttagacggtgtaccttggctagggaacg

SEQ ID NO: 463277 - DNA, 122 bp, Homo sapiens
cccaggactgtagaagagccttgtcagcagcagtgacccgggagatgggcaatgcaggaccgggaatttcaggttaaggttgatcaccaaggtcattccgagcacctcgatgtctgcagcaa

SEQ ID NO: 463278 - DNA, 122 bp, Homo sapiens
ctgcactagtagaactgtctcagagtagctttaactggtaattactgaggctgggtggggcggggtgggtggggggtggatagacacgtaccaggatgctctcagtgtttggaggcccctga

SEQ ID NO: 463279 - DNA, 122 bp, Homo sapiens
cagtcccaaagcaggtgaggaggcagccgtgcagaggccctggggcagcggcgaggacagcggggaggtgagagccgtcctcactgcctcccagatgcctccgagatttaaaccacaatgga

SEQ ID NO: 463280 - DNA, 122 bp, Homo sapiens
tacagggagatacgcgcattgccgtctctggatgggcggctggcactttcagttcaaaggcgctgaggctctgaagttggcaaggaagaggataacccggagaagggaggactaagagaatt

SEQ ID NO: 463281 - DNA, 122 bp, Homo sapiens
caccgtctctactttcttccttctaagagatcctgaaacctctgtcatggaaaagtaccacgtgttggagatgattggagaaggctcttttgggagggtgtacaagggtcgaagaaaataca

SEQ ID NO: 463282 - DNA, 122 bp, Homo sapiens
ctccacccgcttatctgttcccctccctccctcgatggcagtgttgtgggtgctgctccgcggtgctgctgtctcccgcactctggtcgcctgtgtctttgctttcccgtctgtgggtcagc

SEQ ID NO: 463283 - DNA, 122 bp, Homo sapiens
gaggctttagtgatgcagagaattcagcatgcatacagtgcctctttctcattcatatgacgatacctatcgtgctgtagtggcactttgtgctggtgctatacaaataacaagattccttg

SEQ ID NO: 463284 - DNA, 122 bp, Homo sapiens
ccggaacacccgtggtgaccgccgggaccctgcctgtgactctccaggactctgcgaccccgggatggatattgcgatgctggtctcgaccctgaaaccctccctcggatctgtgacctcgg

SEQ ID NO: 463285 - DNA, 122 bp, Homo sapiens
ggtgatccacctgccttggcctcccaaagtactgagattacaggtgtgagccactgcacccgccagtttgtttgttttttaatgctgagttttgagaattctttacatattctaaatactcc

SEQ ID NO: 463286 - DNA, 122 bp, Homo sapiens
tccaaaagggcagggcctcctgtccagggccctgagatgtgatatccctagtgctgggaacggtgcctggcacagaacggatgctcaaaaactatttgtgaatggatgagctaatgaatttt

SEQ ID NO: 463287 - DNA, 122 bp, Homo sapiens
gcactgccatggcagggctttagagggcgacagccctggttggaattccagctcaggcaccgagccgctgtgcgagagtcactcctctggtcctcagcttctgtcaaatgaagagtgaacag

SEQ ID NO: 463288 - DNA, 122 bp, Homo sapiens
taacagtgctctgtgccaggccccaagctaggctctggggttggggcgggctgggattcccgctcactgagattcccgctcactgggattcccgctcactgggcttggtgtcgcggaaaaaa

SEQ ID NO: 463289 - DNA, 122 bp, Homo sapiens
cacctgcctcggcctcccaaacaaagggacttcaaaggtaagaatgagtcaagctggccacgaaaatggagaactggaaaatctcaagattagaggctagaagaccttcccaggcactgatg

SEQ ID NO: 463290 - DNA, 122 bp, Homo sapiens
tccccctggaaggaaacccaggctctaacgcggtccctctgaggaccctgctaggcgaaacgcgccggccatagaaagactgtcccgcaggagagggcggtgttcggcccggggtttgaggg

SEQ ID NO: 463291 - DNA, 122 bp, Homo sapiens
cgccgccgccgccgccagaggagcagcagcgcttgtgcaaaccgggaagatggcggccggcggcggcggaggcagcagtaaggcctcctcctcgtcggcctcttcggcaggggctctggagt

SEQ ID NO: 463292 - DNA, 122 bp, Homo sapiens
cttttaaagtgttgtggtttaaattactttaagataaaaaaaattcatctgtaaggatagcgttcatttaaaagatgctaaaactgcaggatctcatcatgaaataggaggttgtagcttct

SEQ ID NO: 463293 - DNA, 122 bp, Homo sapiens
aagagttttctaataagcgagaagcagcgggttcccagcgcagctgagagacagtccttgcggctgagagtggcagcaggggcgggcggtcccaggacctacctgtggccctgggcactggc

SEQ ID NO: 463294 - DNA, 122 bp, Homo sapiens
gggaggattcctgggcccccacccaggcagggggctcatccactcgattaaagaggcctgcgtaagctggagagggaggacttgagttcggaccccctcgcagcctggagtctcagtttacc

SEQ ID NO: 463295 - DNA, 122 bp, Homo sapiens
gactgatgctggtttagggataattacaatgaagtcacttttaaatatttatgattgaagcgaaagttcttatggaacatttcagcaaaatcaggttgcccagtctagattattggggctga

SEQ ID NO: 463296 - DNA, 122 bp, Homo sapiens
ctgcgacctcccagagtggggatccctcacaatgggaagacgggacccgcagacttcagacgcaatttccctaccctttaagaaagggccctttcatatacgtatgaaagaaaccgcaaagc

SEQ ID NO: 463297 - DNA, 122 bp, Homo sapiens
agagtgttaacccacctcagagacttcaaacattatttccataaagcaccattccaggcacgttgtcggggaggggcgggacataaatggctactgctgttgtcacttattgttgtcaacaa

SEQ ID NO: 463298 - DNA, 122 bp, Homo sapiens
tggaaaggaaggaggagagaggcagagagagagagagagagagagagagagagagaagcgcgagagcggccctgtaattgagcagaaaggaaagggagaaaaatgaatcccaaactttgggc

SEQ ID NO: 463299 - DNA, 122 bp, Homo sapiens
gacagctgcacgggtggcctcgtggtccatggcctccggctgggccggggaaagccgtttcgcggagcacgcccggcgggtaaggtgagaccacagccagggccggggcggggcaggcaggc

SEQ ID NO: 463300 - DNA, 122 bp, Homo sapiens
tatttctctacaaatctcctccaaacttaatgcttgcaaaataagttctatttgtagcaccgtggcacaaaaatatattctcagtgctgactgtatgccaagaactacacatgaagtaactt

SEQ ID NO: 463301 - DNA, 122 bp, Homo sapiens
gctgtggataggtgcggcgctgcttccctggagggaaacgctccatcttgcgggccgaagcgcgagtgctgctctgtgacagcctccggccgcggccttcccagctgctaccgccgcttttc

SEQ ID NO: 463302 - DNA, 122 bp, Homo sapiens
cttggtgataattaaaacaactctttccacccatcagattggcaaagcccccgctctccccgccttcaccaatgtcggccaccctgtctgggatgcccctggccgtgttttctccaagctta

SEQ ID NO: 463303 - DNA, 122 bp, Homo sapiens
ccttcccaaagtaggcgagccggaaaggcccagcctggccactttccgcatgagtggccacgactttgctggattgaaaggcaaagggaacaggccagctttggccccttcagcctggcctg

SEQ ID NO: 463304 - DNA, 122 bp, Homo sapiens
agtccacctccgagcctggagacgttcccccctcgctgagtccacctccgagcctggagacgttcccccttcgctgagtccacttgcgagcctggagacgctccccccgcgctgagcccacc

SEQ ID NO: 463305 - DNA, 122 bp, Homo sapiens
cgcttctcgtggacgtgctgcgcgcaccctagggagatgcgcggcgtccgcgcgggtcagcgccccagtaccactccccagtgtactccccaggtacacgcttcccttgcgcggcgagtttc

SEQ ID NO: 463306 - DNA, 122 bp, Homo sapiens
ctgttttcctggacggagaagacaagatgcccggagactgagcagggtttggagggaggtcgcctgatagtgacccggtggagctccctggaattctcagagggactcccatctcttgggca

SEQ ID NO: 463307 - DNA, 122 bp, Homo sapiens
ggcgatttcttcagttctatgaaatgcctttataagttcccatccctctggacagtggtgcgagggagggttggatgattggatgggggccatattttagtctaatctatgaagcatagttg

SEQ ID NO: 463308 - DNA, 122 bp, Homo sapiens
gaaagttgtgctttttatcctactgaaggcttactccagggcaatacagtttaggtcaaacgtgaccaaataaagagtgccttgtttcagtctttaccactggcatctccgttgaggctgcc

SEQ ID NO: 463309 - DNA, 122 bp, Homo sapiens
tgtgcataaacataccaacccatgttaatacaatctctacttgtctctaggtttccattacgagaatgtctctgttacaaggcataacattatggtgctataactgtgattatcaaaggcta

SEQ ID NO: 463310 - DNA, 122 bp, Homo sapiens
ggctacggtgtccctaggggcccccagccctggcataatgcctggcacattgcaggctctcgtacgagctccctggagaaggagaagaggcgtgagagatgacggggagggggccttggcct

SEQ ID NO: 463311 - DNA, 122 bp, Homo sapiens
atatttggatagctttgtggatttctttggaaacgggagtatcttcatataaaacctagacggaaacattctcagaaactcctttgtaatgtctgcattcacgtcacagatttgaacattcc

SEQ ID NO: 463312 - DNA, 122 bp, Homo sapiens
gcggccggccgacctgcctttcagccctgaggccctggtggaccgcaaggaattctgggccgtgtgccgcgtgcccgggcccctgcacagcggcgacatcctgggcctggtggtcaacgccg

SEQ ID NO: 463313 - DNA, 122 bp, Homo sapiens
cagtctctgcctgggaagggaggaaccgccttcactgctgtatgaaggcttataagctggcgtggcttaaaggaagggaaactccttgtgttcaaacatgtttaccttccttttttgtcttt

SEQ ID NO: 463314 - DNA, 122 bp, Homo sapiens
tcttcttcaaattggcagattctgttacttaaaccttgtgttagatctctcagttgtgaacgaatgcataaaaatagcattccagtctatagttgggtctaagccaattaatgggaatgagg

SEQ ID NO: 463315 - DNA, 122 bp, Homo sapiens
gacaatcaagagcaaaagacgggaagcaagaaagagatggagacccgccatcgtggccaacgttctggtccacgcacgggattcagcctctgatcaagccccagttcccgcccacgcctctc

SEQ ID NO: 463316 - DNA, 122 bp, Homo sapiens
aaagtgtcaatgggagtggcagggaacaaagccctcagctttctattccagggcagccttcgggcttcgggacattcaggggccagcacccacctgcttgagggcccccctggggtgtgacg

SEQ ID NO: 463317 - DNA, 122 bp, Homo sapiens
aggtcatgtctggggagtggggaagccttcagggtctggccacagtgcagctccctgtggcggggctggggttccagcctctgctccctctgagccccggagctgggctgctcacatgggga

SEQ ID NO: 463318 - DNA, 122 bp, Homo sapiens
catgggaaggggcctggagccgtccctcggggggtggggaggagctagtttcccagtcggcgcccgtgcattcaccggtctgagaatccactcagcaggcttgctatgtaacctccgccgtt

SEQ ID NO: 463319 - DNA, 122 bp, Homo sapiens
taaacaaggtattgaggccagtgtccaggctgcattcagttcacagaactgtcctcaggacgttgcatggaactggaaatgtgtataattacagaagaaaacagggaggacttagtgcagag

SEQ ID NO: 463320 - DNA, 122 bp, Homo sapiens
accctcatacgcacacacttgaacgcttagcaagtcttttccaaggctgttccctctttccggggaaataaagcctagattggaaccttctgcccagcttcctcatttggccgtctggtctg

SEQ ID NO: 463321 - DNA, 122 bp, Homo sapiens
tgaaatatcaaacaacaacaaaagcatatttggactcagacttaaagtcaaaatgcctttcgatctactcctgcattccagggctccatcctcccttttctgtttacattgttatgtgatgt

SEQ ID NO: 463322 - DNA, 122 bp, Homo sapiens
tcccacagtggcgatgtctttctcttacataacctgtgttgttgagcaagaataaatcctcgcttatacactcacacacacatgttggtgccctatcctgatggcgctaaggacactaaatc

SEQ ID NO: 463323 - DNA, 122 bp, Homo sapiens
ttttcccaacgactgctcatccgccgagtcctctcacagctgtgcaccgcttcgagtaaccgcaaacgcggtctgtttcattatttcatgtctttgcaagaacagcatcggatcctactcta

SEQ ID NO: 463324 - DNA, 122 bp, Homo sapiens
cgcttggccacatacacacacagagacacaaacatacaaaggaaagatccagacattcaacgtagaaaagatatggatgtgctaaaaatcgcacagaacccgcttaatctccaaacctcaga

SEQ ID NO: 463325 - DNA, 122 bp, Homo sapiens
ggcgcggctagagaggaggggctggccaaaagcccttgaaataaggcccaggcagaaccgcggttctagtctcccagctccagctcggcctttgggtttgctgtggtgtccttgtctcctgc

SEQ ID NO: 463326 - DNA, 122 bp, Homo sapiens
agagaacgagagaggcaccgggatcgtgaccgagaccgtgaccgagagcgtgaccgagagcgcgaatatcgtcatcgttagaaggtgggtattccttgttccctgttaaatgtgtgtgtatt

SEQ ID NO: 463327 - DNA, 122 bp, Homo sapiens
cctgttagttccagatttttctgcaagcttggaggacagctcgcgaaaattcagctggggcgccatctgctggacgcgccgcgccgctgcaaggccctttccggaaaggtgtcggggttgca

SEQ ID NO: 463328 - DNA, 122 bp, Homo sapiens
tcctcatccttgtcttgtatgcttcctgacaggcctgcggcgagggtctggcatgggaagcgttgcagggatgcagcagggtccctggatgtgcctagcagtgtagccgctgtggtcacgct

SEQ ID NO: 463329 - DNA, 122 bp, Homo sapiens
cctcccaccgtctgccgtgcaggccgtgctggctgagctgcctgccctggtcaacgagagcgacatgcatgtggcccagctggctgtggacttccttgccacagtgacccaggcccagccag

SEQ ID NO: 463330 - DNA, 122 bp, Homo sapiens
tggactccccactttcacggccatgtgggtctctgcagggcacccttcctggaggaggaccggtgcagacccctgttgagtaggggacagccgcctggagaaccacccttggccgccttagg

SEQ ID NO: 463331 - DNA, 122 bp, Homo sapiens
aggtgcctatgggaaaacttaacttcctcccgcaatggacaaatgggggaagaacaggcccgcctcatccacaagtttgcccctagtgtacttcttccgaagtgggtgaaatcatgagggtg

SEQ ID NO: 463332 - DNA, 122 bp, Homo sapiens
actcagcacacattcccatatcaatcagactttgccgcctgttaattcctctttctaatgcgctcttatttttatcctcagttgagatgaaactttctctcataggttgtctggtcactgag

SEQ ID NO: 463333 - DNA, 122 bp, Homo sapiens
aaaacaagaagtggcgtgagctggcaaccaacctaaacgttggcacctcaagcagtgcagcgagctccctgaaaaagcagtatattcagtacctgtttgcctttgagtgcaagatcgaacgt

SEQ ID NO: 463334 - DNA, 122 bp, Homo sapiens
ggtttcctctcacctttcctgatcatgcaattgtgtctttcactctcggatacggttttccggctgactctcattctcaggaccaatcgtattcgaatgagcagactggctttcctctgggc

SEQ ID NO: 463335 - DNA, 122 bp, Homo sapiens
acaaaacctgaattcactgcctaaggtcagggcctttcttttgtgtgtcgctttaagcatcggcgcgtgggctgggggcagaccgcgcgtacccgccctctttctggggcgtcggcggagcg

SEQ ID NO: 463336 - DNA, 122 bp, Homo sapiens
cgccagcccggtggagagaggtggctgggccaccgtaggaatgccgctggcccggtgccccgcaggagaccgtctgctgggaatctggcttcgggaagtgggtgcagaggccaggctggcca

SEQ ID NO: 463337 - DNA, 122 bp, Homo sapiens
cttcctcccgagccgattagaaagccgcggtctggaaatcccacgggcaaggcgataatccggggccagcggcgcgcgctgaggggacggtcggcggcggcgggtgtgcgcggcggcccctg

SEQ ID NO: 463338 - DNA, 122 bp, Homo sapiens
agaaaggtgctttcttctgggagatctgcttcctttaataacggtgcaagaccagtggttcgtactcgcattaccctgtgaagaggaagggctggcatttcaagccatctttgaagatgatg

SEQ ID NO: 463339 - DNA, 122 bp, Homo sapiens
ggaggcgggacgacctgggcgggtgagagctggacctgcctggccgggctgatgggatagcggcggactccgccgccgtcggcccttgctgcagcagggcgccatgtgctggagcgcgcctg

SEQ ID NO: 463340 - DNA, 122 bp, Homo sapiens
tgtggctttgccctttggcctttgctggctgtgtggcggctccgcggttcgcaggtcgttcgctgagcgtctctgcttagccgcggtcatgagccggcacagccggctgcagaggcaggttc

SEQ ID NO: 463341 - DNA, 122 bp, Homo sapiens
aggcaggagccagaggcatcgtaaggtagatttgcccattttcagggtgtgacacagagacgagaaaagtggagccttagaatggggtttgtggaggtgataatcttgggtagtgaagtctt

SEQ ID NO: 463342 - DNA, 122 bp, Homo sapiens
cctcggcatattctattggctggaaggccgtgggaagcggctaccagtaaccaatagtaacgcacaattggcccgtgggggcggggcgagcacggcttgctttctcaggagccaatagggaa

SEQ ID NO: 463343 - DNA, 122 bp, Homo sapiens
cgccaggtgccccgaagcccggcctcccctcccacccccgcgcctgttcccggcgcagcccgagccgtggcagtcacgtctccccatccggccccaaagtaagagccagccgcagccgcgcc

SEQ ID NO: 463344 - DNA, 122 bp, Homo sapiens
aaacttatacttggtgtgccttactctacctggaaaggaactagtgacatataatctgggcgactgacacatttctgggcagggcactgcacacagcatggctgattgtggaggtactgccc

SEQ ID NO: 463345 - DNA, 122 bp, Homo sapiens
agagcgcgccgcgggccgctgctttccggcatccagcgtgcggggccagccggtgcagcgcggccattggctgcggatgagctcatacttgagccttagaataaaccaccaatcaccgcccg

SEQ ID NO: 463346 - DNA, 122 bp, Homo sapiens
catcttaacttggatgtgggtggccaggacccagctgggtctgtgagtcctggctggggccgaggtctgtgcctgctgtggctgtgtgccaacagggtttgcagaggaaaggaacctgacat

SEQ ID NO: 463347 - DNA, 122 bp, Homo sapiens
cgataacactccagaagcgaggagaagatcgccgcgactggcggcctccacggcccgccccggcgaccaggccactttaaggcttccggccacacccccgccaggccacgcccctcatggcc

SEQ ID NO: 463348 - DNA, 122 bp, Homo sapiens
tccccgctttctccgaaactcgcgtgaggctagcggggcaggggctgcagcttgccagtccgggccgacccgactcggccgctagaagtctctgcgcttggattgctcagtacctgcggcta

SEQ ID NO: 463349 - DNA, 122 bp, Homo sapiens
aaaccgcgtcgcctggagattcatcaggaaaaattaaagttggctgtgagctcccggatccggttttctcgattcattttcttcagtttcatcctgcggttctgaaaccagattttcacttg

SEQ ID NO: 463350 - DNA, 122 bp, Homo sapiens
atgaccccgagggcccagcgcctcactgggcctcaggtttccagctgctgaaatacaccgcggtgctgacaccatcccagcgccactcctggctcagccctgtgttctggaggcgcgcccag

SEQ ID NO: 463351 - DNA, 122 bp, Homo sapiens
aacgcatggcgggacggcgtggctgagaagcagaggagaaccgtgccccgcagttctccacgggttcaaacaaccggatgttacctgtggcctccgtggatcaggaacttgtggcagaggca

SEQ ID NO: 463352 - DNA, 122 bp, Homo sapiens
ccccttgccagcggaaggctcatggtgccatgtgctggctgctcagactcctcagcagcccggggaccccgtgccccagggtccttcatgcctccactctctgcgcactgccctcacaccct

SEQ ID NO: 463353 - DNA, 122 bp, Homo sapiens
catcaccgctcacgttcagtatctcctcatcgcggcaatgatcagggaaagccgcgttcacgtttaccaaatgtgccattacagaggtaggctttgaaatgggctcagtgtccctgacagta

SEQ ID NO: 463354 - DNA, 122 bp, Homo sapiens
gcgtggcctgtcctggcctctgagagtgggatggttggtgctgtacctcaggggacagggcggggcgggaggaggcggggccaggcctggtctctgataacgggatgggtggtgctggacct

SEQ ID NO: 463355 - DNA, 122 bp, Homo sapiens
cacctgtatactctccagtctattgtctagtggaggcacgggcggcccaggggccttccccgatgcttatctcattctgtaactctgcattctcagtggaggttttcttgactctagctcca

SEQ ID NO: 463356 - DNA, 122 bp, Homo sapiens
agaaacgctgaaggcccggcctctactctctctttagggccacttggccatggctaatgccggtacctcgcatcccctctgtcagccgctctctcgccgcgccgccggcagctgccgggctg

SEQ ID NO: 463357 - DNA, 122 bp, Homo sapiens
acagtgactagaactctcgttccctactgctgggagtgcaaaacggaacagccactctcccgactgcccagcgaccacactcccgggtgtttacccaagagaaataaaaatcgtgtctgtaa

SEQ ID NO: 463358 - DNA, 122 bp, Homo sapiens
cacgcctgagacctccatgccaggcattacaggcgctgccaggcattataggcacagcgtcggcagactctggcagggggtagcccctttcatcttcatcacagccccagaggtacataggg

SEQ ID NO: 463359 - DNA, 122 bp, Homo sapiens
tgttggagggctgagttttgacaccaatgagcagtcgctggagcaggtcttctcaaagtacggacagatctctgaaggtgaggctgctgctgggcccgcggccctgggcgggggggcttgtg

SEQ ID NO: 463360 - DNA, 122 bp, Homo sapiens
ttcccatctcctctgttatacctgtccccaggcacctgaaatgacaaaggtgcacaaccccggtcctctgggcgtggacttcaaacctatacacatgtgacaatccccgagttagacagccc

SEQ ID NO: 463361 - DNA, 122 bp, Homo sapiens
tttcctaccctttttcataccatgaagacaaaacaagtcagaggaggagtgttgtggggacgcccgtcatctcaagtttttgaaataggggcagccatcaagaaagttgcttcaaggatggg

SEQ ID NO: 463362 - DNA, 122 bp, Homo sapiens
ccagccccttggtgctgcacacattctccaagggaagccggaggctggggtgcccaaccacgcactccatgacccacagctcagtcccccaggaccacacaaggggcaaaccaggcagagca

SEQ ID NO: 463363 - DNA, 122 bp, Homo sapiens
ggaaaacaaaaactaaagtgggatgtctcaggcacagcattcctgtgacactggaggatacgaagcagcaatagccacttttcaggcagagataagggattgggatcccctgggtctgcagc

SEQ ID NO: 463364 - DNA, 122 bp, Homo sapiens
ccaagggtatcaaaacaggatctctgcagatggagctcagtgttatgtgttttggatgctcgcaataagattttcatgcaccataaactttcctgagtatctcaaccagttttgttgatgcc

SEQ ID NO: 463365 - DNA, 122 bp, Homo sapiens
caggttgcggtaaatgcaaatgccctgtgaaggagctttgtccttagggcctcaacactgcggccactcaggctgttctctccagattagggggcagtttgtctatctggccccctgtggat

SEQ ID NO: 463366 - DNA, 122 bp, Homo sapiens
ctcccaccccaaatccgctcgcgggcgcaggaccggttcaggtgtgaacacttatgtaatcgtcctcggggccacgcctttcccaccgccccacctccgccagaacaaagtgaagtttaaaa

SEQ ID NO: 463367 - DNA, 122 bp, Homo sapiens
ctcgcccgcccagcgcggaacaacttcggggcccgcccccttcctccgcccgcccccggccgcccgtaaccgcccccggccgcagcccccgcccagcccccgcccagcccgcggcccgcact

SEQ ID NO: 463368 - DNA, 122 bp, Homo sapiens
tgactgttctgaacccccagaacccaaatgcaccttcttgtggtctggcctgggtttcctcgcaaggtgggcattgcgctgctgggaggacgcccccacccccatgtcccgcgggcctcacc

SEQ ID NO: 463369 - DNA, 122 bp, Homo sapiens
actgagctggtctcggcaagtggcttctattcctgggggctcgaatccaggtcaaagggtcgcaggagcgacggttggaatggaaaactagctggaggacacctgagtactcttaaagcaat

SEQ ID NO: 463370 - DNA, 122 bp, Homo sapiens
aaaaaactacactacaccataaggcacagagtgaatatttatttatcacagaggtcaagccgaagctctaattttataaatcctggaaaagctggccagaaaagtacagagacttgcccaaa

SEQ ID NO: 463371 - DNA, 122 bp, Homo sapiens
ggggggtgactgtgcccgagcgggggggtgactgtccccgagcgggggggtgactgtccccgagcaggggggtgactgtccccggttggaaggtgactgcccactacagcaacaaacgttct

SEQ ID NO: 463372 - DNA, 122 bp, Homo sapiens
ggatcctggcaaccactgtaaggtcagttgcacactccctattttacatgtattggtgctcgaactgttaaagtgcttagccagattgttattcattctcaggaaattaatacacgttaatc

SEQ ID NO: 463373 - DNA, 122 bp, Homo sapiens
ttttatttctttaatccaagaaaattaatattcaagggatccgtaaaaattcaggccccccgagatgtagagcgctgggatggaggaggcagggcggagctcgacgtcatgtgactggttgg

SEQ ID NO: 463374 - DNA, 122 bp, Homo sapiens
ttggagctgacaatgtttagtactgaggggaaaatgcttgaaacattgcaggatgccacacgccacatgccccccaagtcggaagggcaccacccaccccagcctccggtggtgtccccctt

SEQ ID NO: 463375 - DNA, 122 bp, Homo sapiens
cacacgcacgcacactacccggggtcaggagcctcttaagtgagccggttagatccagtgcgccccctatctcctctgcccctacgcctcgcgcaaggccctcgcagccggaatagtcgcgc

SEQ ID NO: 463376 - DNA, 122 bp, Homo sapiens
gggttttaaagatgacggcgaacttaaatttggggcgcctgtccgtatgcaaggcgttagcgttctgtaagtcaccttggagaatgcgaagaaggacgggatttgtcccctacccatgctga

SEQ ID NO: 463377 - DNA, 122 bp, Homo sapiens
tatacttttatttgttcttgttttgttttttgaggatgtatagagaaagatttaggcagccgcatctaccaggtagtccagtagatgtattttgagtgatatgctagcgatatcagttattg

SEQ ID NO: 463378 - DNA, 122 bp, Homo sapiens
tgaatccatagatttttttgaaagttcatttaaactgggttttcctgggttcccatgtaacgctcccagctccatggctcccaagggactggaaacattaaagtctcccattaatgttctct

SEQ ID NO: 463379 - DNA, 122 bp, Homo sapiens
ccttgggattccttttcctagaccagctcttatgccggctgcctcacctccaggctcagacgccttttccagtttcagctaaatgtgaaacttttcagaggtatgaggttgtgtgctcttcc

SEQ ID NO: 463380 - DNA, 122 bp, Homo sapiens
ctcgcgctggaaacggccgctgcccagcgccacctgccagagagccagagcagctctgtgcggaccagcgacaaggccatcctggtgtccaaggcggaggagctcctcaagagccgctgctc

SEQ ID NO: 463381 - DNA, 122 bp, Homo sapiens
ctggcagtcagtcggaactacctctcccagcctcgcctcagtgagtatcagagagtaatacgtctccggtctttgctccctagcctagccctttgctcccagtcacctgcttagccagcggg

SEQ ID NO: 463382 - DNA, 122 bp, Homo sapiens
ttctgtctttcagatacacacaaattcattgtctcaattcctttcaaagacccatgtatccgaaacttcaataccttttatttacaaatgcttcttttactctcgtttcagttttcatacct

SEQ ID NO: 463383 - DNA, 122 bp, Homo sapiens
tcgccttaactcgttttccatctcagttaccgtcctcggcagggcactgtcacatcctaacgtgaggacgaaatgggcttgacctcccagcagcagccgccccggtggctgcaggtaccccc

SEQ ID NO: 463384 - DNA, 122 bp, Homo sapiens
attgatcacatactgtgggcctctcaatcagcaaaacctgtatatgaatggctttagctgcgctacagactatgaactaaaaccatttaagagacctgctacattaaaaatgcattcagtct

SEQ ID NO: 463385 - DNA, 122 bp, Homo sapiens
ccagctcacttagccagctcactttgagggcatcctataaacacccaactgttcttttatcgtctcggttttagccaaaagtgaaattagcatgactgcatctttcaaacaaaaatattgat

SEQ ID NO: 463386 - DNA, 122 bp, Homo sapiens
ccacgagcctccagggtaatggagcatcagaacgattccgctcttaccacaagtgaggcacgaaaaagtacttcacagaaaaaagacaaaacccaaagacgacactgggacacgatgcgaga

SEQ ID NO: 463387 - DNA, 122 bp, Homo sapiens
ctgagcacacaaccagacccctgatcccaagaggccaatgcccctggcagggcaaggagccgagctgagggtcaggcagcctcccctgggtgtaaaaggaacagaggctcatcagggccgca

SEQ ID NO: 463388 - DNA, 122 bp, Homo sapiens
tgtgtcctggctcagaatgcttctttagtgacacgtgacaccatgtcctgctgacaccatcgcttgcaatagtaaattggttgtaggaaagccagtgaactctgcagaaacaccccaaacaa

SEQ ID NO: 463389 - DNA, 122 bp, Homo sapiens
cactgggtctttgtttttcttggctgactttccagcgtccttcttctcgtcgtccttgggcggcattgcgaagctcggagagtagcagcagacaccgcagccttgcaaagatgtcggacaaa

SEQ ID NO: 463390 - DNA, 122 bp, Homo sapiens
ttttaccaaggtaacttttaataacccaactgttggatgaataaagctttttgaaaaattcgaagcaaatgttactcatcatttggagtctggatgtcccagttcacagggttacttctgaa

SEQ ID NO: 463391 - DNA, 122 bp, Homo sapiens
aggtctgggactgtcatgtgctttatggctgctcgttgcccaatctttcctgatgtcaatcgtggtctggactggacaagggcaggcttgccaagtgacattgggaaagtagaacatggctc

SEQ ID NO: 463392 - DNA, 122 bp, Homo sapiens
acaatgagctgagtgaggagcccaggaacccgggttccgaacagctgcgtagaatgcgagcggccaaatggtggagaatctggccgggtaaaaggagacggaggactggggatcgaacggat

SEQ ID NO: 463393 - DNA, 122 bp, Homo sapiens
tagtacctatgctaagtcaatgtttaacttgttgaggagccaccaaattatttctattgccgcaacatcattttacattctgatcagctatgcacaaggtttctaatttctacacatcttta

SEQ ID NO: 463394 - DNA, 122 bp, Homo sapiens
atgtggtccccagcgcctgctaagcagggctccacacccaaggcccagttgtccccaaaacgctgcaaagctggggggcgcatcctggagaatggaaatctggggtttccccagctaggaga

SEQ ID NO: 463395 - DNA, 122 bp, Homo sapiens
gcgcatgtgcacgtgtgtttgtgtgcgcgtggggctttctgacagccgataattcacaggcgcctccagagccggctcccgctcccacccgctcactcctgtttatgaagcgaagggtaagt

SEQ ID NO: 463396 - DNA, 122 bp, Homo sapiens
cggggcgcgggggcccggggaggaggggggaggggagagagaagcgaggcaaaaaataaccgaggaaggaatccaggcaatccccagtccacccactccggaaaaaaaaaaaaagagacagt

SEQ ID NO: 463397 - DNA, 122 bp, Homo sapiens
gagctctgcgctggcggctgtggggggccggcgctcaggaccccaactccatccaagttgcgccgcggtgggggcgggcggaggcggcgccgggcaggtggcggccgcttgcccgggctggg

SEQ ID NO: 463398 - DNA, 122 bp, Homo sapiens
cctcccgccgcctcaagtccttgggttgctgggactgcaggccgccgcgaagacagtccccgcccgccgggtgggcgggcccaaggagaccgccccgctcttccccccgggccttgattggt

SEQ ID NO: 463399 - DNA, 122 bp, Homo sapiens
aggagacccgaaggaagcttctaacttttcttctggttgccggatgctggacaccggaagcgagccctagaattatggcgacctccgcgacgtcgccgcacgcgcctggttttccagctgag

SEQ ID NO: 463400 - DNA, 122 bp, Homo sapiens
gtgagagagtggacacagagccaggcacggagggcacagttgtcatggccagtgagggaacgatgagcttggaactcatgtctaacaagaaagctttgattgcattggactccaggccacct

SEQ ID NO: 463401 - DNA, 122 bp, Homo sapiens
gtcactcagggactcaagacagtcactaagttccacgataataaaatgcaaggagaaccacgccatgacttcagctgagctactgcaagtcagagatggagaagattcctggaaagcagcgg

SEQ ID NO: 463402 - DNA, 122 bp, Homo sapiens
gacaggtaaatcttgctcagcgtctccacatattcatccctgatctcctttgctgttgctcgttcattgcccagcagaaactgatagaagaacctagggggtcaggaacatgtcagtctacc

SEQ ID NO: 463403 - DNA, 122 bp, Homo sapiens
cgcccatctgcgtcccggaaggagcgagcttgcggagcgtgaaccagtgagtgaaagcggcgccgcccgccggccgcaggtgcggcaaagccagtgtcatctgccggttctcttagggctcc

SEQ ID NO: 463404 - DNA, 122 bp, Homo sapiens
cggaggcaaccgcttgggagggcgccccgaccccgaagctgcttctccaggcgcccgaggcggagagaaggcactggggtctccgtctccaccagtgatttctggtgaaacaggaaacaaaa

SEQ ID NO: 463405 - DNA, 122 bp, Homo sapiens
cagggaagcctgacacgccagtcccacgttggacgacgtgcagaggaagggggaggtccacggggacgacgaagatgaccttatacgtgcactcggcatatcctggagtaacgcgcagtggg

SEQ ID NO: 463406 - DNA, 122 bp, Homo sapiens
cctctagccatccccagctgggaggtaggccctgtacacagcaggagtggggctgcccaccgccagttctgctccttgccccagggtgtggaatttgagccccaccatgggagcctgcctct

SEQ ID NO: 463407 - DNA, 122 bp, Homo sapiens
agtgttctggtggagccttttgagttttttcacgggctctccatagccccaccctgaggacgggagccctttggatggggccggtgtcagcaaaggaggcacaagagtctcagctgctcgac

SEQ ID NO: 463408 - DNA, 122 bp, Homo sapiens
gctttgtttgtgtctgcgggcatggccatggctgctcccgtcatctgctcctgcatcattcgtgattggtcagcggctgtagcataagacacacttacatgagtgccaggactcagcaagca

SEQ ID NO: 463409 - DNA, 122 bp, Homo sapiens
ctgtcaccccattccttcaccaggaccaatgaggagctggtggcattcctatccaagaaccgggacaagaatttcctcaagtcacatggccgggacaactccaggtgagggggtggggaagg

SEQ ID NO: 463410 - DNA, 122 bp, Homo sapiens
tcttttaatgtcaatggttacagtgaacttaatcctgtcctctgcagtttttccttacttcggaagacaaatcaatcaatcctactgccatcagttcacttcctgaaatttgttcctaaaca

SEQ ID NO: 463411 - DNA, 122 bp, Homo sapiens
ggcggcagccactgcgactcccactgtgcctggctctgtccatattagttcccaggcggccgtcgccgttccagcagcggcagcggcagcggcagcggcggacatgttgtgaggcggcggcg

SEQ ID NO: 463412 - DNA, 122 bp, Homo sapiens
catgtaatccttccgtctggtgtaaggtttatgtttgacccaatccccagtctggcttgacgagccttcgacttgaatactaataataattggccgaattaggattttgtcaaaataccttt

SEQ ID NO: 463413 - DNA, 122 bp, Homo sapiens
tgcccctccgaggcaccagggggtcggggacgtcactgtgtccttggggaccgtgacgaccgcagtgccgacacagtgagccccagaatcgccctgtagaccagctcactcaagcaaagctg

SEQ ID NO: 463414 - DNA, 122 bp, Homo sapiens
ttctctgtcagtcttcaggccccaggtcagtgagtggcaagccaggcccagagatctctgcgcccgttggaacatccccttctcgggaggctggaaggccatggtcattcacctctccccag

SEQ ID NO: 463415 - DNA, 122 bp, Homo sapiens
aaaaagaaatttcaggaagaaacacccagaattccactcaaaaaaggttttccttgagaacgccatccaaataaacaggatcagctttatagactcctctctgagacgcccgtgtttcagtt

SEQ ID NO: 463416 - DNA, 122 bp, Homo sapiens
gttcccagagtgggggacatggtggcagtgggtatctttaggccttgtgcatgaacagggcgctaaataacattgaattacacattgtagacaattattaccctttcagttaccttcagatc

SEQ ID NO: 463417 - DNA, 122 bp, Homo sapiens
ttccagtgcagtctcagatgagactcttctatgattggccagaaaagtcaagcgggaacccggaggttggcaggtggggggcgggaacaaaacaaagttgttaccctagcaacggagagacg

SEQ ID NO: 463418 - DNA, 122 bp, Homo sapiens
accatttccagctctcccagtacttcaggcatatgctgtgcccttgacagtggccctaaccgcatccttatgaataggtactcttaggatccccgttttacagaggaggaaactgaggctca

SEQ ID NO: 463419 - DNA, 122 bp, Homo sapiens
gctgcagtgagctgagatcacgccactgcactccagcctgggtgacagagtgagagactccgtctcaaaaaaataaaagcaagcaagcactgagcatgaatcctggcacacagcaagtgctc

SEQ ID NO: 463420 - DNA, 122 bp, Homo sapiens
actccagaaatgcctgggccttactcatcctctccccttcagaatgactgatgacagggccgtgccccctcccattttccacaaagacaaactgaggctcagcagtgttcagggagggagct

SEQ ID NO: 463421 - DNA, 122 bp, Homo sapiens
ccaatctactcagccacagttaagagatacttgtactgagaggccttcacctgactttcgcgctctggcatccagagtgggccaaaccaggtcagcagcaggtttgcagaaaactgccttag

SEQ ID NO: 463422 - DNA, 122 bp, Homo sapiens
gctcatttagctaagaaataaatacatctcatctaacacacacgacaaagagaagctgtgcgtgccccggggtgggtatctagctctgagatgaactcagttataggagaaaacctccatgc

SEQ ID NO: 463423 - DNA, 122 bp, Homo sapiens
ggtgtttgctgagaggtccaggcccccatccacccacacgaacgggggactgaccttcaccgccaagcctcacccgagccccacttccctgagcctgcagagtgaggacctggacctgccgc

SEQ ID NO: 463424 - DNA, 122 bp, Homo sapiens
gaccgcacagcatcctgggagcagagtaaagtgtttggagaacatgatcagcactgcagccgcgcagcatcctgggagcagagtaaagcgttcggagaacatggtcagcaccacgaccgcac

SEQ ID NO: 463425 - DNA, 122 bp, Homo sapiens
ggcggaaggcggcggcgggagcggtcatggaggcgggcgccggagccggcgcgggagccgcgggctggagctgcccgggcccaggtcagagccgcccctccgtcacctgtctaccgcccctc

SEQ ID NO: 463426 - DNA, 122 bp, Homo sapiens
ggaggagatggggctgacaagccatcttcctcctcacttaggtgactgactttcaactcacgaaggactctggcaggttttatctgtattacacagccaaaagggattaaaataatcttaca

SEQ ID NO: 463427 - DNA, 122 bp, Homo sapiens
ggtcctgagcctggccttcagactgggcctcacctgagtgcaagatgacggtggcagacacgtacaaagacttccccaccaggtcttctgctcgggggttctgcaccccgtccagcagtacc

SEQ ID NO: 463428 - DNA, 122 bp, Homo sapiens
ggtgtcagggtaacgtgttggcatccccttttgtttcaaaccttctcctataggtgtcaccgatgctctccttggggaggactgtggtcattgacctcccagtccccttcatggtaaacctt

SEQ ID NO: 463429 - DNA, 122 bp, Homo sapiens
gccaggcggcccttctggaggaggcagccctgctggctgagcgcttcccggcgcaggcggcgcggctgcaccagggcgcggaggagctgggcgccgagtggggcgcgctagctagcgcggct

SEQ ID NO: 463430 - DNA, 122 bp, Homo sapiens
tggatcgtcttcaacgtattgtctgatactttcttcctactggatctggtgctcaacttccgaacgggcatcgtggtggaggagggtgctgagatcctgctggcaccgcgggccatccgcac

SEQ ID NO: 463431 - DNA, 122 bp, Homo sapiens
cacctctcgcccagctcaggggctggttgtccgctagaacgaaatatcccccactgactacggagagctctgcagggagccgaggcccccgcccgggccaagggaaggcgctggcgccgcgg

SEQ ID NO: 463432 - DNA, 122 bp, Homo sapiens
gccgtttcctcccagaccccttgggatgttatttccaaagcaagcactgtggaaggagctcgatggggcctccccaggtcccgccaggctgctccatctgcacgcaccgagcgtaactcgcg

SEQ ID NO: 463433 - DNA, 122 bp, Homo sapiens
ttcagaagaggacaagaaccccttctcctgggagattagaaaaaagctttatggaggagacggcatacattgttgataatcagaaaaaagcaatggattaagctacgattatgaagattgac

SEQ ID NO: 463434 - DNA, 122 bp, Homo sapiens
cccttgggttccagacttagtcctccttgccctgttgtgtggcagcaaccaatttccgctcggtaatgaagatcagtcatgcagccagtgtattaactctttatttttcctgctggttgagt

SEQ ID NO: 463435 - DNA, 122 bp, Homo sapiens
caatggaaaatccaggacttttatccgagacatctacagttgctaaggcagttactagagcgcagcacttcacagcaaaaaaccaacataaaatctgaatggtccaaatttccttcagggaa

SEQ ID NO: 463436 - DNA, 122 bp, Homo sapiens
gatttccactaagtgtcttcaaacctccccctccccggcttcctggataatagaagttcccgaaggccgccgattccagaagatactgtctggcgtgaaattagtctcagtagaaacataag

SEQ ID NO: 463437 - DNA, 122 bp, Homo sapiens
tacattttagggagacatgagacatcaatcaatatgtgtaagatgtacatctgttcacttcggtaaggcgagacaacttgagggagagcttccaaatcctaagtagataagagacagaaggt

SEQ ID NO: 463438 - DNA, 122 bp, Homo sapiens
gaatccttccgcactaggaagccataaaaattgggccttgagagacagtttgaggtaaggcgttgtatatattgcagatagctctgaggtttttggagtgtaccatgctgtcttcctggcaa

SEQ ID NO: 463439 - DNA, 122 bp, Homo sapiens
gagcgggtgcccgcacctctggaggctgaggcacaactgggctgggagttgagcgcataccgagtaggggctgcgggggagcgggggcagggccggcggggcggggccagaagcccggcggg

SEQ ID NO: 463440 - DNA, 122 bp, Homo sapiens
tttttatccatcggttgccaattagtttctaaggaagacattcccattacaaaataatagcgaaataaaaataagcaccacgttaaaaagaggtcagcagggaagcacctgaaggctgttcg

SEQ ID NO: 463441 - DNA, 122 bp, Homo sapiens
cgggcggaggcctggggctcttggggtgggggcgcgcggcggcgcctgcagggcgaggggcgggggaggcaggacgtcccgagccatgcttggtcgtccagctcttctaagcctccctgccc

SEQ ID NO: 463442 - DNA, 122 bp, Homo sapiens
ctcctcggtgataacagccacttgggtttaccagggtctgtggatgaactgcgcaggtaacgcgttgggttctttccattgccgaccgcattttactatcttcaaagtagcaggtaaatata

SEQ ID NO: 463443 - DNA, 122 bp, Homo sapiens
tttacaaatttccgttgggttgcattcaaagccatcctggcccccatgcagcccacaggccgtaggttggacaagcttggtctacagtttctctccattccaatctgcctgctccattgtga

SEQ ID NO: 463444 - DNA, 122 bp, Homo sapiens
tcccttccttcctctcctcctcttgggaggtggccagggacataggtcagtgcctggccccgaggaagacacatgcagtttgtggacgggtcttgggatgcggacacccagagtcttgtgca

SEQ ID NO: 463445 - DNA, 122 bp, Homo sapiens
acaaccacaggggctgcaggggcgtctgccgggcgagcgggtctcacggccaaacaggcccgggctcttccagatgctctcagctgaggcaaataccaccctctccgtctcagtctctccca

SEQ ID NO: 463446 - DNA, 122 bp, Homo sapiens
acccctcccatctcccacacccaagatagaccagatcctttaccaaactgttaaagcagccgctaaaatctatattccttttgtttcatcctggagaaacaggctagcccaggtagcttttt

SEQ ID NO: 463447 - DNA, 122 bp, Homo sapiens
tctaaactcttttttgcttaagagctcaccctatttgctgagtagctgtgattgacaaaccgtcgtccaataaatgattagatccatcacattactagtgccactcaccttcctggcggtag

SEQ ID NO: 463448 - DNA, 122 bp, Homo sapiens
cctggctgtattcagcgctttcatgattaaaattcagttactcgtagatcgttattaaggcgacctggatatacatacaccagggatcttctccttcaaactgaactctctgcgcggaaatc

SEQ ID NO: 463449 - DNA, 122 bp, Homo sapiens
aggagtgcagataagattcggtgcatctttcaacggaccctgagcaaagctaaagggctccgactcacgcacatagagggctgcccctcgtatcctgccctccttgagagcttgtgctaagg

SEQ ID NO: 463450 - DNA, 122 bp, Homo sapiens
ctggggtcaggccctgggtgaggcacaggaggctgcacacaggcacttggtgggttctgccgggtcagggtgggaaggcaggagaagtgtctgtggcaggacgggaagaagcttcagtacat

SEQ ID NO: 463451 - DNA, 122 bp, Homo sapiens
ttcagcgtagtgagaagctgggagcacagagagtaggagggagcagggtgaaaaggacagcggagagcagaagcctccagcccacgcagcactcggagggattttaaggagtttcatcttca

SEQ ID NO: 463452 - DNA, 122 bp, Homo sapiens
gcaggaatcgtggggcgcgggggttcccgaatgcgccaaggggagcttggagaccagtagcgaggccaaataaattagcatggacgaagccctcctgtatatttcaggggattcctagtact

SEQ ID NO: 463453 - DNA, 122 bp, Homo sapiens
tcctagagggtcaaatttcctccccataaatccaaaacattctctttagggagttccctccgtggcgcgcaaacccgggaagccgcgcgccctggggtttcttggcgggccgtgcgcgcagc

SEQ ID NO: 463454 - DNA, 122 bp, Homo sapiens
gaaccgtgggaggaagtgttgttaccatagcctggaagtcagaccatgcaaagggaactgcgatcatagcagaggctgccctgtggagactggaccctggaagagatgcagaagcacagaga

SEQ ID NO: 463455 - DNA, 122 bp, Homo sapiens
ggaagttcagggtttttctctccaccggactcgtctgccctcggggccaaatccgcgaagcgaggaggagctcccaccacacagcctgctgtccctatgggccactttataaaagacacaaa

SEQ ID NO: 463456 - DNA, 122 bp, Homo sapiens
atctcctgaagatgatatatagaaattgttttaaatgccttgtgaaaacccttaataacccgaattctgttccccagttgagctatattttccttgctccaaatttaccatgtcattccagg

SEQ ID NO: 463457 - DNA, 122 bp, Homo sapiens
aggcgcgatgatctctgctgccagtagagggcacacttactttactttcgcaaacctgaacgcgggtgctgcccagagagggggcggagggaaagacgctttgcagcaaaatccagcatagc

SEQ ID NO: 463458 - DNA, 122 bp, Homo sapiens
ggaactggaagatgaacgggcgaaagcagagtctgcgggagctcgtccgcactctgaacgcggccaaggtgccggccgacaccgaggtggtttgtactccgcctactgcctatatcgacttc

SEQ ID NO: 463459 - DNA, 122 bp, Homo sapiens
gttagcacacgtgggaagctgcagagagcaacgagaaaaggaactctcacctcgatctgccgtgccgtcccaaagaataccgtttgcaggactacacacttgaaaaccagagttttcaactc

SEQ ID NO: 463460 - DNA, 122 bp, Homo sapiens
aactttggcctgagctctgcgatggtatctgcaaacctagcattagctttgcagcattttcgtgtgggcaggtggttgcttaatttgcactttaacatgccagcagcagatcctggcacaga

SEQ ID NO: 463461 - DNA, 122 bp, Homo sapiens
cgggaggctgaggcaggagaatcacttgaacctacccgggaggtggaggttgcagtgagccgagatcacacgcctgggtgacaagagggaaactccatctcaaagaaaaaaaaatacatgca

SEQ ID NO: 463462 - DNA, 122 bp, Homo sapiens
tgctttctctcggcctcccagtgcaaagcccatctttaagaaaaataacctcctccaggccgccttctaaggcctttcctaaccacgagccgcacgtgagcacctccacagggcagcctggg

SEQ ID NO: 463463 - DNA, 122 bp, Homo sapiens
atcgggtcactcccacccgaatactgcacttttccgaccggcttaaaaaatggcgcaccacgagattatatcccgcacctggcttggagggtcctacgcccgcggagtctcgctgattgcta

SEQ ID NO: 463464 - DNA, 122 bp, Homo sapiens
tagaaagggagatctagtgctgcgatcagatgcagagagaggtcatctttgcccatttcacgattccatagttgtgatttttccttgccatttcttttgtcttccagtcaaaggtatgcagg

SEQ ID NO: 463465 - DNA, 122 bp, Homo sapiens
tcaccgtggactgtatctttaggatggtagacgaggtctcagaatgccaggctcactcaccgtggactttacctttaggatggtagacgaggtctcagaatgccaggctcactcaccgtgga

SEQ ID NO: 463466 - DNA, 122 bp, Homo sapiens
taaataggaggattgcttgaggccaggagttcgcgaccagcctgggcaacatagtggcaccgtgtctctacaaaaaaaataaaacataaaaaaatttaaccgggcgtggtggcacctacttg

SEQ ID NO: 463467 - DNA, 122 bp, Homo sapiens
cgggggtgtgggggctcccgcgggtatctgggggcgtctgcggggatgtgggggcgtccgcgggtatctgggggcgtctgcgggggtgtgggggctcccgcgggtatctgggggcgtctgca

SEQ ID NO: 463468 - DNA, 122 bp, Homo sapiens
cagaggcacagccctaaagcccagagcacagcagccaccagtggccggccccacactcaccgctcttgccaggactcttcctgtctgaagtctttctggccccatcgaaggctgtgtggagc

SEQ ID NO: 463469 - DNA, 122 bp, Homo sapiens
gaggacgctccaggagcgcaaaagcagttgggccgaacgaagcgtgcgcgctttggtaaccggctagaaatcccgcacgcgcgcctgcctcctctccccaggcctgagctgcccctcccact

SEQ ID NO: 463470 - DNA, 122 bp, Homo sapiens
tttcattgcatatgtaaaatctgcatttattctagcatctattgcactccagtgtcctttcgtttgcttcgttttgatccgtaagggcctgcagccttcttgagatcagggatcctgttcat

SEQ ID NO: 463471 - DNA, 122 bp, Homo sapiens
tgaatctccacggtgccatctccagtttctgggcatcgcgttcctctcaagaatgaacggcgatttcaaaggaccccaacactgggtgatggcgtgcaaagtgttaccgagaaataaacttc

SEQ ID NO: 463472 - DNA, 122 bp, Homo sapiens
gttggcttccctacttttgaggatttgggactcagaatggcttctttgctcctcattttgcgacgggcctgttgtgagacctcactttgtgatagtatgagtcaataatcttaagaaactcc

SEQ ID NO: 463473 - DNA, 122 bp, Homo sapiens
aaggaggagcccctgggagagcctgaagacccagaaaacaggcgggattggagatggctccgctcactgccgtgttggcccctttgctttacttcagacacaggtcccagatcagctggact

SEQ ID NO: 463474 - DNA, 122 bp, Homo sapiens
aaggccccgggggaaggcgtgtccccgcgccccgccccgccccgcctcggaaagcccccgcggtcccgcccaccccaggggctcgctcagcctccggagacttttttctttgagcgcagccg

SEQ ID NO: 463475 - DNA, 122 bp, Homo sapiens
ggcggaaggatctgggacccgcctcataacgagccaggcccagcctctaatgaggcaagacgcactccagacctgggaaccttgaaatggcccgggaggctggacttgggagtcatagtcta

SEQ ID NO: 463476 - DNA, 122 bp, Homo sapiens
cggcattctcactcgcctgactcagacttgttagttttccagagcaactcatgtggccgccgtctagggagtttattcagagggtgcctctacatgcacagcagccaggtacagaagtcatg

SEQ ID NO: 463477 - DNA, 122 bp, Homo sapiens
aaatgcaaagttttaatcagaataatgagaaacactagccctggtgtgcagacagcctgccggctactccctaccccattttcccttcttcccaggatgacagcattctaagctgctgcatg

SEQ ID NO: 463478 - DNA, 122 bp, Homo sapiens
gggggaggaactggggctgttgcgcccttaaggttgctaaggcgacggttctggccagagcgaggcgcattgacgtcagtagccgaacgctgattggctgcggccaggccgtttccggtgga

SEQ ID NO: 463479 - DNA, 122 bp, Homo sapiens
actggggtctgcaaatgtgactctgggcatttacctcactgagtctgtttcttcatttatcgaatggggatgggaatagctacaccagagaattctgaggattaaatgatatgaggtgtgtg

SEQ ID NO: 463480 - DNA, 122 bp, Homo sapiens
acaactatgatggaaatccttacttacgttaaatatctggtttctaggtcacctccctgacggggacggtagggaccgtcttctcgttcatcagtagggaagtagctatggcagtgcctgat

SEQ ID NO: 463481 - DNA, 122 bp, Homo sapiens
caacccaaatcagctagctagagatgttggatgtcaacaattccgccttgggcttggacacggcgtgagcttctttctccttcttaaaaagaacaacaacggtcatcctttttcctccttct

SEQ ID NO: 463482 - DNA, 122 bp, Homo sapiens
gaggagaggcatagtctaagttgcctgaggtgggcctgtcacgggaagagggagccccgacgcggaacctgagatagtgctgctgcatctctggctttttattcactctcttcctgctgtgt

SEQ ID NO: 463483 - DNA, 122 bp, Homo sapiens
ctcgccggtaggtgcctgcctgagtctaatcgtaggcgtgtctgtgtgtcccgcagcacccgtgccgcatcgcctgatgctcaccgcaggcccagcccagtcccgcccccggaacagcccgc

SEQ ID NO: 463484 - DNA, 122 bp, Homo sapiens
cgtgtgcctgtagtctacttgggaggctgaggtgggagatcacttgagcctaagcagtcgcggctgcagtgaacaagatcgcgccactgcactccaccctgggtaacggaacaagaccctgt

SEQ ID NO: 463485 - DNA, 122 bp, Homo sapiens
gctgttccccttagtgaccggcgacgcgggcaagatggcggcgctgggggtggcggaggccgtggcggccccacacccggctgagggggccgagacggctgaggcggtggagctgagccgcg

SEQ ID NO: 463486 - DNA, 122 bp, Homo sapiens
ccagacggcccagtgctctacccctagcgtgatctgaactgctgaagtcagagaagtccacgttggataaacaaagccagcccagtagtaacctggctgtcacagtgaccgtgtgtccgtct

SEQ ID NO: 463487 - DNA, 122 bp, Homo sapiens
ctacaaaaagtacaaaaattagctgggggtgttggcacacacttgtaattccagctaatccggaggctgaggcatgaggattgcttgagctcgggaggtggagtttgcagtgaggggagatg

SEQ ID NO: 463488 - DNA, 122 bp, Homo sapiens
cgagggagtcgtgcagggggcggggcggccacctccaaagaggcccattcagagggcggccgagagagctcaggcccgggaaagaatcccgggattgttgagctgctgctggctgtcgcggg

SEQ ID NO: 463489 - DNA, 122 bp, Homo sapiens
cacttcctttaccgtgaactacaaggctcagccaaccacaggctttacgtcatttctcggcgccgggaaacctgccattcttcgctgctgatcgcgggattctttttggatagggttgacgt

SEQ ID NO: 463490 - DNA, 122 bp, Homo sapiens
aacctacatgaatagggtcggacgtttctcaaagttaagaggataatttcaattctcctccgatctccttaccctcaacccagaaaagaggggcaaggcatgtgacagggacgcttggggag

SEQ ID NO: 463491 - DNA, 122 bp, Homo sapiens
ctctacctccaggcttcttcctcggggttagcaggggcctggagtggatgtttagtctaccggtcagactccaggtcttatatcttgaaactgtaagtccctgaattcacagacaattcaga

SEQ ID NO: 463492 - DNA, 122 bp, Homo sapiens
cgcctgccttcctgctgcccgcccgcgaggagccagacggggctcagttaatttgggatccggctttgcaagggaccaagcaggaactgcccccggtgggtctggggaggtagatgtaggcg

SEQ ID NO: 463493 - DNA, 122 bp, Homo sapiens
tcccaaccgggcttctggctagtcgagggcaggctcgggggcaccactcacccagcctgccgcccacacctcattcttcccacctaaataggtattctgttgcgagagcaagaagttagcag

SEQ ID NO: 463494 - DNA, 122 bp, Homo sapiens
agaccttggcggcgagtgttacagctcttaaggcagcgcgtctggattttttgttcctcccggtgggctcgtggtctcgctggtttcaggagtgaagctgcagaccttggcggtgagtgtta

SEQ ID NO: 463495 - DNA, 122 bp, Homo sapiens
ggttgctggctcaagggtactcgggacgtcttctctgaacacatgcctgttcctgggtttcgccttctccacgtttggggcctctgagggactaatttcctcatgccgctaggaacgtgttg

SEQ ID NO: 463496 - DNA, 122 bp, Homo sapiens
tctctgccttcttaggattcagcttggggtggtccattgacttctccagggagctcctagcgtttgcggccgcgtcacatctccaacctttgcctcgccctgcctgtcatcccggttttctt

SEQ ID NO: 463497 - DNA, 122 bp, Homo sapiens
cctgcggccctcaactacctgccttgggctccgggatcctcctcctccgctggcgctgcacgcgcctcccggctccactggcgacgctggagctcttggccgcttccctttgcccccggccc

SEQ ID NO: 463498 - DNA, 122 bp, Homo sapiens
gggagctggattagtcgcctatctaccaggctccaagcaaccggacggtcatccaggccccgcttacttctggttccgcagactagaatggatgggagtctgagtaggataccagaaagcga

SEQ ID NO: 463499 - DNA, 122 bp, Homo sapiens
taaagaccacggtattgcagttaaaaaaaaagtttaataaacactaggccagctacgatacgtgagagacggagttactactcaaattattctcatccaaggtcctctggtaggggtttttc

SEQ ID NO: 463500 - DNA, 122 bp, Homo sapiens
taggggcagacgggtgggagctccgaaggggtgccggggcggtgatcgggaggtctccagcggcccgaaccagggtgaagaagaaggtggagtctgcggaggccccaggccggggagggggc

SEQ ID NO: 463501 - DNA, 122 bp, Homo sapiens
actggggtgacagagattactagttttccccccagtatctgttctcccctcttgctatagcgataaagttttagcaaggcatgtggcatcccttgaaactagatgtggccattgactaggtt

SEQ ID NO: 463502 - DNA, 122 bp, Homo sapiens
gggggaagggggcgcaggcccaggatgggggcgcacggctcgcgggaggaggtgccgggccggggaccccacaggaccaagccaggggactgaaggccgcgaccaactgccccggccctgcg

SEQ ID NO: 463503 - DNA, 122 bp, Homo sapiens
ggtgagaagcccttctatacaggttccctccccgagctaagcaaaagcgttgaggtgacacgtgtcacctgttcctagaggatctgcactgaaggcggggcaagcaggacctgctgtacaca

SEQ ID NO: 463504 - DNA, 122 bp, Homo sapiens
atttttttttgagacggagtctcgctccgttgccgaggctggagtgtagtggtgcaatctcggctcactgcagcctccgcccactgcaatctccacctcccgggttcaagtgattttccagc

SEQ ID NO: 463505 - DNA, 122 bp, Homo sapiens
ggtttcaggactttattttttttagcaatatggggtgacatctggtttcttcctgtctcacgtctaaacatcaatcatagattctaacagtggttccaccaattatcagtgggtcctataaa

SEQ ID NO: 463506 - DNA, 122 bp, Homo sapiens
cagactccgccgaagctacgggcgctgagggaactgagctcctcaggccacctccaactacgacagcacccaggtggtccgctggtccgctgggtccgccccgcccccagctctagggactc

SEQ ID NO: 463507 - DNA, 122 bp, Homo sapiens
gacaccgagtggcaggtcacgtgacgcgggcgtcacgtgtccggccgagttgggtggaggcgttgccccggcgactgcagcgcgctgggggcgggctgcagcgggtgccgccgcgcggcctt

SEQ ID NO: 463508 - DNA, 122 bp, Homo sapiens
gcagttctccacttctttggccagattgtctgactattcacgtatctggcagcttctatacgacccctcatatagtaaaggaattaatattccccacttcctcctagtttgtctcccctcct

SEQ ID NO: 463509 - DNA, 122 bp, Homo sapiens
cacagccaggcctctggggcccccagaaggccaagggcaaacagcagggttgcagtgggacgggatcgcctgtgcccggagtgtgcagcctagatgtgtctgtgatgaggacctggaaaagc

SEQ ID NO: 463510 - DNA, 122 bp, Homo sapiens
ccgcggcctctgcctcgccccctccacccctcccgagtcccggttgcggcgcttcctgggcggatggcttgaaattgctgcagcagctgcggttctgctgtgtcatgcaagaaggaggcggc

SEQ ID NO: 463511 - DNA, 122 bp, Homo sapiens
catgcagaagcatggcaagttcaaggaatactgagagatgtaaaccctaatacagcaatccgaacaccagcgcactaatggtatcttatgtattcaggtccaccagtgagtttgccctggat

SEQ ID NO: 463512 - DNA, 122 bp, Homo sapiens
acgccactgaccttccccggtagacaaacttcatgggttctacggccagcgcagtggccacgatgtcgtcggcgttgtgcctgcgcccgctgaccaccatgaggccatccatcttgcccacc

SEQ ID NO: 463513 - DNA, 122 bp, Homo sapiens
gagaggcgaagaggcccagttccagggccgggggcgaggggtgggcggtccaaagggcaccgcccctgcgggtcacgtgctcgccgaccaccaatggccgcctccgagcccaccttggggac

SEQ ID NO: 463514 - DNA, 122 bp, Homo sapiens
cagggtcacacgcataagcacgttactgagaagatttatcccaaagcacgtacggggctccggcccgtgcaaacacttgcctgctggtttacagtgatttactcacagattaccctctgacg

SEQ ID NO: 463515 - DNA, 122 bp, Homo sapiens
ctgcaccacgcccaatacctgggagcacacagtggccaccaagtggaagacattattctccgccgctctctccaaaccctccgacgtcttctgtgccgctgactcgaccgcgtcgctccgga

SEQ ID NO: 463516 - DNA, 122 bp, Homo sapiens
agtgtgccctgggcagcgccgcgccgggagcacccggaaccgcgcaggcggcggcgtgcccgcccccgcccccgccctgtcaggtccccagggccgcctcccttgtgccggcctcgcagctc

SEQ ID NO: 463517 - DNA, 122 bp, Homo sapiens
ctcagcactgcgcagacccgcgagctcctcatttccccggaagatgaacgagaaggttcgcgcgagattctctgcaaagccctggcacaggccccgtccctgcagctgtttattgacgctgt

SEQ ID NO: 463518 - DNA, 122 bp, Homo sapiens
agaggacgagaagacccgaggcctctgctacgaacactggcagccgatggaaaattcagacggatttgggacagtatgcagagttctccaagcgacagattaacagaggctcttgaagaata

SEQ ID NO: 463519 - DNA, 122 bp, Homo sapiens
gttagataaacaactcaggatgcttatgtgtttattgtgtgcatcccactgccaagcccacgtaggaacttaatacttaggagtcaagtgttgcaaaagaataaatgaaaaagcagcgctga

SEQ ID NO: 463520 - DNA, 122 bp, Homo sapiens
actgagctgggagaggtactgtctgctttagggttatagagggtcctcagagcagacccccgacggggatgtgttcctagctgcatacactgtcaactcccttctcttttcctggtgctctc

SEQ ID NO: 463521 - DNA, 122 bp, Homo sapiens
acagggtaagagagagcatgtcccccctgagagcgtgggaccaggctagcccaagtgcagcgcccaggtccagcctccctggtgaggcctgtgcccgcggagccagtggctgcccctgccgg

SEQ ID NO: 463522 - DNA, 122 bp, Homo sapiens
gggcggggcagcgttttacaaaccgaaccgtgaatctttgcggtttctctttccagccagcgccgagcgatgggtgagtgtcgctctgcattgaggcgggtgaagggaggttgagctcaatc

SEQ ID NO: 463523 - DNA, 122 bp, Homo sapiens
cgggctcatcgtttctttttaaaatggtggagcttactgcagtagagtgttttccttagccggggtcagctctggttttagaactcatttccctgttcgcgaggtccctgggcagagttcgg

SEQ ID NO: 463524 - DNA, 122 bp, Homo sapiens
gtgcacacacggggatgaacacacataggtacatatgtgaatccccatgtgacagtgacacgctgccatggcagtgctgctgctcacccccatggctgtgtcatccatggccagaagaagcc

SEQ ID NO: 463525 - DNA, 122 bp, Homo sapiens
ttaagcagaggagataaatgatcacattttttttttccttttaagtgaggacacctgcgccgtgtggcacacaacttagaagaaggcaaaagtggagattggtcagaaggcccactgggaaa

SEQ ID NO: 463526 - DNA, 122 bp, Homo sapiens
agttacggaagtacaaagtaatgcattattgtaatcatgtttgtcttccccaaacatgcgcgcctcgcaagaaagaagtgtcttactcaactttttaggcactgctcctatgtaacagcaag

SEQ ID NO: 463527 - DNA, 122 bp, Homo sapiens
acgctgcagcaggtacaggcccatactaaacacggtgtgtgcacctccacatgggcactccgccagcccatcatctagagcctgtctgcagagccaggatgcagactctccgagcagttgtg

SEQ ID NO: 463528 - DNA, 122 bp, Homo sapiens
tcggacgtcctgagctgccagcctctccagtcccagttagcagaggaagtcaatagggcacgagtacctcgtgctcgtaaggaaagcagggtgggctggcctcactgggctcgggcagcagt

SEQ ID NO: 463529 - DNA, 122 bp, Homo sapiens
ccccagtggattcgtggacatctgggacaggtctcacttggcttagaaaagcccaggaggcgagcagcaggcccgtgtgggcacctgatacttgttaggggtggagtggaggcaggggctga

SEQ ID NO: 463530 - DNA, 122 bp, Homo sapiens
cgagtgcccagtgagtgtttggcacgtaatagagcctccataaatagttgtagaaattagcgtcattttacagtatggaaactgaggctccaagtgggagtggcttgccctcaaggtcccat

SEQ ID NO: 463531 - DNA, 122 bp, Homo sapiens
cataaaaaccgggtgccggcaggcgccagtcgcaggtgtgctgctgaggcgtgagaatggcgtcccgcggccggcgtccggagcatggcggacccccagagctggtaagtcccggggcccgc

SEQ ID NO: 463532 - DNA, 122 bp, Homo sapiens
accctaagatatcagaaccggccgtggtccgcccaagaattaaaggctgctggctggttccggaactgttcgaagacccctatacacaaccccaactcagagaagccaaagcgctgggaatt

SEQ ID NO: 463533 - DNA, 122 bp, Homo sapiens
ggaaatggatgcttttgagagtcacgtcacatgcacggagcacaggtgtgcccgaggccgcgccccgcagcagagctgggattagaatctagctgttttggagccatcgtcttttccgtgat

SEQ ID NO: 463534 - DNA, 122 bp, Homo sapiens
tcattatcaaaagagtagctgttacatgtaaatactgataatctcacacagttagatcaacgttattggcttgactcagtccacattctgtaagggactttataactctagccaacttttaa

SEQ ID NO: 463535 - DNA, 122 bp, Homo sapiens
gtccacacccctgtgggtggcgggtgtgcgtgtgtgtgcttgtgtgtgcgcacgtgtcggcgctcacacacacatgctagcccactgatgcacccagcccagggctggcagtctttgcagcg

SEQ ID NO: 463536 - DNA, 122 bp, Homo sapiens
tgaagggtggtataggttacttctatagtcctatccaactcttagaaaacactccttcttcgggggctgtatattttaacagagaccaaagcttggaagcagagtggttaagtccaattgta

SEQ ID NO: 463537 - DNA, 122 bp, Homo sapiens
gggtccgaggcgggccccgaccccgcgtcggcgctgcggaccgtccgggagctgcagccgcgggtgcccggtgctcggtttgtaggcagtgtcattagctgattgtactgtggtggttacaa

SEQ ID NO: 463538 - DNA, 122 bp, Homo sapiens
gggccaccggcctcgagtttcctttcatccccacagaaccagctctcgaggggccctgggcgtggggaccaccccgccctgcctcttgctgggcaggccccgggagatcggcctttgagcct

SEQ ID NO: 463539 - DNA, 122 bp, Homo sapiens
agcagctggctccaggctccaacgtgccttccagctgcctgactgcctcttcgcctctcccgtcatttcttggctcgaaatggaccccaactgctcctgcgccactggtaagggaaccccgg

SEQ ID NO: 463540 - DNA, 122 bp, Homo sapiens
gcagaaactcattcagcagcaggtggtgaccacggcgtcggccccgctccagactccaggcgctcccaacccagcccaggtgcccgccagctccgacagcccaagccagcagcccaagttac

SEQ ID NO: 463541 - DNA, 122 bp, Homo sapiens
ccctgggacccccagcagcaccaggaccgccgccgccctgagcttttccacgcctttgcccgggactcagctcctccgcccagcatgtaagaccttttgtgatccgacctccgcttccttcc

SEQ ID NO: 463542 - DNA, 122 bp, Homo sapiens
tttccatttacttcacggaaccaccatagtattctgtcctcttaagaaatgtttgtgaaacgccaagggtcaagcacagtgcttggttcacagaaaggggttcaatatttttgaatgaacaa

SEQ ID NO: 463543 - DNA, 122 bp, Homo sapiens
gctaagctaagtctttcctgaagacgtgggagcccgtgtgtttgatttttctgtcctcttcgggccagggaaagaatgagaatctagggcctggaggtcctggggtgaattggtccagcatg

SEQ ID NO: 463544 - DNA, 122 bp, Homo sapiens
tggcccccttcagaaggggtgacttaccatgggggtgctaaaagtgggacccacagaagccgagctgtatcagaagccgagctaaagccacagccctggggatcacgcccacccctcggagg

SEQ ID NO: 463545 - DNA, 122 bp, Homo sapiens
gttacaatagcagacatgtgcttactgcacgctcgctgcgagcttactaggtaggtactgcgctaacaattcctaatcctcctcggtccctaggaagcaggtagtgttattaatgcctagtt

SEQ ID NO: 463546 - DNA, 122 bp, Homo sapiens
atcctatctgtgtatgcaatgtgcaggaagtcttggtaaatcctgcagtactggggagcacgtggtatttccaagccaacagtgcaacgaagtggcaatagaaatcctcttcatgaggcaca

SEQ ID NO: 463547 - DNA, 122 bp, Homo sapiens
cacgtatcagctggagcagaatcctggcttccttccggatgggcctggggtccatgcccgcgctcactgccaagatctttctggcccctacggacacgagtttgcgacctctgagtcactgg

SEQ ID NO: 463548 - DNA, 122 bp, Homo sapiens
gggctatgggggcgggcacaagtgctgttactgtgggtggggagggggtggcaccgcagccgagagtgctggttcaggagttcatgctggctgggtttctcgtgagtcctcctatttaatcg

SEQ ID NO: 463549 - DNA, 122 bp, Homo sapiens
gtgcggggtgagcctgatgcattggagaactgagcaggctgctacgcctggctgtgggtgcgggtgccgaaagcgtggacaccaggggattctgttggaaataagctggctcacatgatggg

SEQ ID NO: 463550 - DNA, 122 bp, Homo sapiens
ggcatccagagggtagaggctccattcagctgctgacctgtggttccactgtggagagcacgtgagaagtcccatttcctgcagctctctctaaggccgcagtggctgacacagagctgctc

SEQ ID NO: 463551 - DNA, 122 bp, Homo sapiens
ataaaacagcgcttgctcaggtccaggacgccagaagaaacagcccggtgagcgcacttccgacttcggcgcgggctgtgacgcaggaatcgggactccgggggagcgacgcccacttttgg

SEQ ID NO: 463552 - DNA, 122 bp, Homo sapiens
tgacctggtgatccgcctgccttggcctcccagagtgctgggattacaggcatgagccaccgtgccgggccaggtcgtggctttttataaaactctcaacaacaataatagcacacatttcc

SEQ ID NO: 463553 - DNA, 122 bp, Homo sapiens
aatcagtttcagtctttgtctcttgctgagatcgggggcgatttttaaacatttttaccacggatcttctatgccacctgctctgctgttattgatggatgggaaagtcactttggaatgtg

SEQ ID NO: 463554 - DNA, 122 bp, Homo sapiens
acaaccataaacacagattccagaaggcagtcacaaattaagataagtcataacggaagacgctgtccagttcctgggtgctatgagaggggactaattagattggggttcatggacagcct

SEQ ID NO: 463555 - DNA, 122 bp, Homo sapiens
tactttggccacctcccggcacggtgctcagctgtgacgccgaaataagttagggctggccgggcggtgcggggcagggactagggctgtacacacaagtgctgggggctcggggcctcact

SEQ ID NO: 463556 - DNA, 122 bp, Homo sapiens
gaatcaacctccttttccccagggttgtgtctaatttatagggtgggatgggtccaggtccgggaactcattgtcacctattacagaggcatcctctgagacctccatcagtctgcctcgtc

SEQ ID NO: 463557 - DNA, 122 bp, Homo sapiens
cttacttcccctaaaaaggggaagaaatgcctgaagcccttgtactttgctcccccgaatcgcaggcatttctgtgccgtcccgcccctgggcatttcctatgcaaccacaggacgcgggaa

SEQ ID NO: 463558 - DNA, 122 bp, Homo sapiens
tggcggctgtagctgctgttcgctggctggggctctgcagcaggcttgaccagccactgacgggtcagccagcaggtctatgtgaacaagcacacagctgagattttattctggaagtgcaa

SEQ ID NO: 463559 - DNA, 122 bp, Homo sapiens
gccgttcccgtcacggcgccacggtcgcagttggccacacagtgcaagtgcagcccaagccgaacgcccaagagggctccggggtcctaccgatcaccgcttaccatgtatgcgataaaagc

SEQ ID NO: 463560 - DNA, 122 bp, Homo sapiens
gcgaacctgatctcttatactagtatccttaatcatttttattgccacaactaatcttctcgggctcctacgccgaggccgccgccgccgccgccgccgcccggccaggccgaggccgaggc

SEQ ID NO: 463561 - DNA, 122 bp, Homo sapiens
cttttgcatccaccaatggggtttcgagtgctgtgtggccaggctggcccggccttgcgtcgtaagagaatgccaagcccggggagaaggcgttccgggcctcaactttggcgtcgtgagat

SEQ ID NO: 463562 - DNA, 122 bp, Homo sapiens
tcgcgtcactcaagctgtctggagtcccccacagggacgctccacagggcaggtttaagccggccgtcagtcacctcgcttcccggtcagggaaccaagaaatgtagcaggacaagccgcag

SEQ ID NO: 463563 - DNA, 122 bp, Homo sapiens
ccaggagggcctcctggtgttgggagcgcccttgccaaatccaccttgtatgacttttagcggtggatcactgggcttctgtgtcgatgaagaacgcagctagctgtgagaactaatgtgaa

SEQ ID NO: 463564 - DNA, 122 bp, Homo sapiens
ccctccgcagaaagccgtgtcccgctcgctacccatctgaggagggccccgccccgctggcgctttccacctgtggccttgcccgactgtcctcagcactccatccacccagccgctcctcc

SEQ ID NO: 463565 - DNA, 122 bp, Homo sapiens
ctgcccccaataccagcccatgttgctagttacctgggtgggttttcttttcctctccggcgacaccctctcccacctcaactcaagtttttttcctggcatataggtctaaaatctcacat

SEQ ID NO: 463566 - DNA, 122 bp, Homo sapiens
ggatggcaaacccctccccggacccacccccttccccgaaggcggccgccgcagcaggcccggcctccggcctcttttgttgtaattcgagagcggccactcccagggccagagggagctcc

SEQ ID NO: 463567 - DNA, 122 bp, Homo sapiens
gtacctgccgctgccgccgagggcagcgccctctgtgttccctgccttcctacgggccgacgcctggcatagttgaggtttcgctccaactctgtcctgcccctgatgtcacaggcacaact

SEQ ID NO: 463568 - DNA, 122 bp, Homo sapiens
ctccgagggctgtggggataagtacattgcggagggtgaccgaggagtagaacctgggtgcgacaaaggtgtcttttataacagcctagtgtggccagacctttgggtgtgtgtggggaaga

SEQ ID NO: 463569 - DNA, 122 bp, Homo sapiens
ataaaattccccagactgagcagagtggtattctcaattaatcatcattctagatgtcatcgttcatcattcattgagaaggaacatttaccttttacccagaatgctctgtctcaggtaag

SEQ ID NO: 463570 - DNA, 122 bp, Homo sapiens
ttcaagcgattctcctgcctcagcctcccgagtaactgggattacaggtatgtgccaccacgacctgctaatattgtatttttagtgtagatggggtttctccatgttggtcaggctggtcg

SEQ ID NO: 463571 - DNA, 122 bp, Homo sapiens
tcaattactaaactatatttctagtccagtcatttcttctgagctccagctccactagtccgaggcctatcagacacttccacttgattatctataggcacctcacatccaataaactaaaa

SEQ ID NO: 463572 - DNA, 122 bp, Homo sapiens
ccacagagaaaattactgagactcgcattttagacccgagggaatggaggccgagggcagcgaggcgacagctccaggttagagccagagacagggacctctccttacaactcctgtcctgg

SEQ ID NO: 463573 - DNA, 122 bp, Homo sapiens
ccaatttgggagcagagggggtagtccccactctcctgtctgatccctccctctcctccccgagttccaccgccccaggcgcacaggtttccgccagatgtcttttcttcttcgcagtcttt

SEQ ID NO: 463574 - DNA, 122 bp, Homo sapiens
ggtgtgggatatagtctcgtggtgcgctgctttttaagccggtctgaaaagtgcaatattcgggtgggagtgacccgattttccaggtgcgtctgtcacccgtttctttgactcggaaaggg

SEQ ID NO: 463575 - DNA, 122 bp, Homo sapiens
acacacgtggttgagaacctgtgcatgtgtgtgtatcatcacaagcacacatctgggaaacgtcaacactgcaagatactggtcagattcttcttcactcatcactggctgcgcttgttccc

SEQ ID NO: 463576 - DNA, 122 bp, Homo sapiens
aaacaaaggttattacacttgcaggtcctagagagaggagatattctgcatgggaagacacgattgtggtcatgaggcagaagacaagagtgagtgggaagcttagattacttctgtattgg

SEQ ID NO: 463577 - DNA, 122 bp, Homo sapiens
gtattggtgcatgtgcatgtggtgtgcatacgtgtgtgtttatatgtatatatgtatatacgtatatgtgtgtgtgtgttcctacgtgtgtgtgcgtgatgtcaagtagcttctggaaatca

SEQ ID NO: 463578 - DNA, 122 bp, Homo sapiens
gggatcccgtgagcctcagcagccggatgccgagcacttctgttctccttgtgtcctgggcgctgctgcaggggagacttctgcctcgattgaagtccgactaggcctcccagagcaggggc

SEQ ID NO: 463579 - DNA, 122 bp, Homo sapiens
aacaccacacctctcacctgcaggaggaacagcagggccaccccaccccgcggacgtccgcggtgagtgcggtttagacatcagcagaagtggctttcagagtcagaacagccatgacgtgg

SEQ ID NO: 463580 - DNA, 122 bp, Homo sapiens
ccgggcgttccaccagagctgtggccaacagctgccctcacgaggcccaggaggggacagcgcctccttgcatttgcgagacctgggaaaggtgcctggccgtgcccacctgtccactggga

SEQ ID NO: 463581 - DNA, 122 bp, Homo sapiens
cagcgcctttctcactgtagatggatgttgggtgtgggattcgcaggagtcttccttcttcgggtttggattaagttcctaacgccacttgcacaaactagggtttgggctcggctgttttt

SEQ ID NO: 463582 - DNA, 122 bp, Homo sapiens
ggggtggccgcgggtgaaaagggtcaaaggagggtttttgtttttagacagcatttatcacgtcatgtttacatgcagagaaacgacttcagagacaaggaaacgctggtgatgtcagaggg

SEQ ID NO: 463583 - DNA, 122 bp, Homo sapiens
gaaaactggtaactttgtttctcaatttatcactgtcattcctttaacacgtgtgtcatccgatagcatttgcttgagatagttaaccttcatgatacagactactactaaattttgggtta

SEQ ID NO: 463584 - DNA, 122 bp, Homo sapiens
caatcacaaactgcaccttgccctcctgctcgtaggtggagtcccggccgatgcgttcctcgcctgtcctagggatgcccagagaaagtgtgcccggcccccatgcaccgaacccggcctcc

SEQ ID NO: 463585 - DNA, 122 bp, Homo sapiens
acttcccattccccctcccctgcccctgagggccaccattctgctttctgtctctaggcacgtgactactctagggacctcagatcattggaattgtacagtatttgtcattttgtgactgg

SEQ ID NO: 463586 - DNA, 122 bp, Homo sapiens
caggtatttagtgcttaagtaggttctgatataccattacattaacatcattttaaaaatcgctctgaattatatgtattttaagagtgactgggttttaaaaaaaatagaagtggtagagc

SEQ ID NO: 463587 - DNA, 122 bp, Homo sapiens
gtagccgccaccacggcggggcggggcacgggccgggggcggggcgccgggcgggcgcggcgctatttccagcctcgccggaggcttcgctctcacttcgctgggagccttcccggcgcgca

SEQ ID NO: 463588 - DNA, 122 bp, Homo sapiens
gctgtgtaaattgcagctactggtaggaactctcatattaaaagggaacccaaaccagggcggcttgaggaggcagcttcccagaaaggatggctttttgagctgccttgtggggagaccct

SEQ ID NO: 463589 - DNA, 122 bp, Homo sapiens
gaaaaagtgttttaccactcccggacaaacacttaactgagagagatttctccttcacttcgcacactcccatgacttaaaatattctatgttcaattttgcacgtttttaaacttaaggat

SEQ ID NO: 463590 - DNA, 122 bp, Homo sapiens
tcagtccttgaaagggaacaggacagctgctgtatgccttgagaatgggcaaaagacaagcgacaaaaagagcaccgaaggcacctacttgtccctctgggccagggcctcagtgtattggt

SEQ ID NO: 463591 - DNA, 122 bp, Homo sapiens
tacaaggcaccactctttcgctgtttcccgggtgggtaactgtttctcttttcctagacacgggacaacgctgagtcagaatgcttagtttgatcaattagaaaagaaaggtgagtggaggt

SEQ ID NO: 463592 - DNA, 122 bp, Homo sapiens
tgctgtgcatgctgggagctgtatgtagtctcttcaccgctcccgccctttcaagagcttcgggactacaatcctagcatgccccaggctcgggagcctggtgaagttctcggggggaggag

SEQ ID NO: 463593 - DNA, 122 bp, Homo sapiens
ggacagcacagcttccgggatttggcggggcctttgtctctcgctgcagccggcgctccacgtctagtcttcactgctctgcgtcctgtgctgataaaggctcgccgctgtgaccctgttac

SEQ ID NO: 463594 - DNA, 122 bp, Homo sapiens
gcagatgcatcacgagagacaaagaaaatacacaaaaacaagtcattcaccaggggagaacgtctttacacgtggggcagtaccttaagaagttaaaaaaggaacgctagccgggcgcggtg

SEQ ID NO: 463595 - DNA, 122 bp, Homo sapiens
cagatgacctcatggaagcaacggtggtgaatcatggcccagaccacattcacatttccccgggggtgggcaagcgtgttgatcaccggaggggcagcttcaacacccagagagatgggggg

SEQ ID NO: 463596 - DNA, 122 bp, Homo sapiens
agccgagtatcgcgtgagagtccggaggcgctgaagggagggtcgcagcgccgtgactttcgctttactaggaatggaggcacattgttttcaaaataaagattacattatactagcaaaga

SEQ ID NO: 463597 - DNA, 122 bp, Homo sapiens
tttctttttttgtttttttttttttgagacaagatctcactgttgcctaggctggagtgccgtggtggtgttcccagaccaaactaagtgttgggctgctatttctcgtggcccaataatga

SEQ ID NO: 463598 - DNA, 122 bp, Homo sapiens
tgaaccttgaggacagtatgttaagtaaaacaggccagtcacaaaaggacaataaccatacgattccacttatacgaggtatctaaagtagtcaaatgtatagatatgaaaatgcagaatgg

SEQ ID NO: 463599 - DNA, 122 bp, Homo sapiens
cttgagcctcacgtcagcctcaagttcttgaagattggtaccctctgcaaactgtgaagacgaccaaaatacacaatcctacaaggttgttttcccaagctctctagagtggtgccattgag

SEQ ID NO: 463600 - DNA, 122 bp, Homo sapiens
ccaaagtgctgggatgacagatgtgagccacagcgcctggcaaactaaggatttttagaccggggattaccctggattatccaggtggatacaatgtccagtgatcacaggggtcctagaag

SEQ ID NO: 463601 - DNA, 122 bp, Homo sapiens
cctattctgacaccaggaacatgattcttcaacaaacattgacggaagcttacatgggaccggatcacagcgctgagaagcactggggctaaggggcggcacaaagtctagatatggtggca

SEQ ID NO: 463602 - DNA, 122 bp, Homo sapiens
agctcttcccattttccggatgggaaaattaagtcctgtcgggacttgtccagggtcccacgccagtcagagactgagtccgaactagcactcaggacgctatttctcaccacatgttacca

SEQ ID NO: 463603 - DNA, 122 bp, Homo sapiens
cggctgggacgttccaagctgggagccaaacgcaggcgcaaaaggcagccgttgtttgatcgtgaagtcgtcggtcctagggggtctctaagcacgtcgctctcccacccactttgagatgt

SEQ ID NO: 463604 - DNA, 122 bp, Homo sapiens
cctacaccatcttctctctgggtcacagggcacgtcgctccctccacacagactcccgcacgtggcacacgggagctcagcgggatccgagctcagtgtgtgcttctctcctccaggttcct

SEQ ID NO: 463605 - DNA, 122 bp, Homo sapiens
tgaccacctcgacaatgcccggggggaagtagcctatgcggtctgtgcccctctggctctcgtggatgtggcccttccagcggccgtcgggatgctgttctagcacctgcggccaggggtgg

SEQ ID NO: 463606 - DNA, 122 bp, Homo sapiens
tttttaaaaatcttcctttgcgccttctgcgcagcctcttgcaagtcctggcggaagccacgtggacaccagagggcgccacagcaccagctcattccccggaggctccatcaccaagggtt

SEQ ID NO: 463607 - DNA, 122 bp, Homo sapiens
tagctatgaaggcttcactatgcctaatgaaataagagatttatgagagtgttgccttggcggtgttagcggtcaacccaaaataattcataataagagcaacattgcctgtgatttgccac

SEQ ID NO: 463608 - DNA, 122 bp, Homo sapiens
tctcgatctgccccttgcctttcctggcactggggcccgagctcttgcccttctctgggacgccgtccggctcctcctcgtcacgctggggcggcggtgcagccgaggcagaggcggctggg

SEQ ID NO: 463609 - DNA, 122 bp, Homo sapiens
gaggctgttcaagagacttactagcgcatgagacacaatgtaccattgacgctgcaatcgcggctccacggcggctggaatgcaattaactgagctggaaggcgtccagcatgcgctctcct

SEQ ID NO: 463610 - DNA, 122 bp, Homo sapiens
ctctggtggcagttcttggaacaagacctgagagccgctaccttggctctcagcattgcacgggagtttagaggttattaaagaaatccccctaaagtcccatcccaaggtcacatagagaa

SEQ ID NO: 463611 - DNA, 122 bp, Homo sapiens
caaaatattgtctttgacagaatgactattttttcagacccttaatagtgaccaggccttcgcaagcctagaagggactcctgggggtgttttcatgaaaggcctgtggaaccgacttggta

SEQ ID NO: 463612 - DNA, 122 bp, Homo sapiens
ttatttgtagttgtttggagtttatagaatggttttgtgtcttgtagctcttgggcagtgcggccaccagagcagggcaatattagcttttagttgttcagtttgtcaagtgggcataaata

SEQ ID NO: 463613 - DNA, 122 bp, Homo sapiens
cctcgacggctatccgtccccaccgtgagtgaggtgcacccctcaacggccacctgtccccgccctaagtgaggtgcacccctcgacggccacccgtccctgctgtgagtgaggtgcacccc

SEQ ID NO: 463614 - DNA, 122 bp, Homo sapiens
taaaagaggaaaaaacccagtagcaacttaaggttagtttgaagggtttcagaaagcagacgtaaaaaaaaaaaaaaaaaaaaaagcagcagtgattcaaattttgtgactaacccaaaaag

SEQ ID NO: 463615 - DNA, 122 bp, Homo sapiens
ggagcccccttttaaagaagactcattcaatgtccctctctcagacggcctccagcgtggcgattaagcgctcagatgctggcaggttccgcggagtgcccggctgccctcggcaggggctt

SEQ ID NO: 463616 - DNA, 122 bp, Homo sapiens
tctccttgccaactgcctttccaccacaatgttaattgaaacagaactcagagccaggcgcggtggctcacgcctgtaatcccagcactttgggaggccgaggcgggtggatcacgaggtca

SEQ ID NO: 463617 - DNA, 122 bp, Homo sapiens
ctctggccccaaattcctcccccatgctcagttctctgtctcactggcagaggagccggccgtgtttccccctaaagcccgcttggccctcccagttccgcagctgcgcggcccgcccgccg

SEQ ID NO: 463618 - DNA, 122 bp, Homo sapiens
cgaagtcaactcgccggctgcaaacgcggggctcaggcgttgtccgcaattgacttacctcgcaggctttgacctttgccaggtgtagttcctggactttggagctggtgactggcttcttc

SEQ ID NO: 463619 - DNA, 122 bp, Homo sapiens
cccgccggcagcgtgccccgccccggcccgctccatctccaaagcatgcagagaatgtctcggcagccccggtagactgctccaacttggtgtctttccccaaatatggagcctgtgtggag

SEQ ID NO: 463620 - DNA, 122 bp, Homo sapiens
ggcaggacagcatgtctcctggacagaaatagccctggccaggcatgaccgcggcattgccgtggcgacgggggagcggctgctgccgggtgccctggggcccaccccccacagacacccag

SEQ ID NO: 463621 - DNA, 122 bp, Homo sapiens
gctgccttctcgcggggcagggctcgggacctgcagcccgccatgcctgagcctcccacccgctccatgggctcatgtgcggcccgagcctccctgatgagcaccgccccctgctccacggc

SEQ ID NO: 463622 - DNA, 122 bp, Homo sapiens
cgggggcactgggaagtccatgtttagtctcctgacgtcgaccacacaaaccagacggaacggtgtccccggcccaggctgagcggagcacaccatgagggcagaggctacaggtgactccc

SEQ ID NO: 463623 - DNA, 122 bp, Homo sapiens
cactgcattttgctattgcacatattgcagagagagttgtgtaagtgtgccccctccctccgttccccttctcttccttagtctctcagattcctgtgctattcccacgttcccctctccca

SEQ ID NO: 463624 - DNA, 122 bp, Homo sapiens
atttcgctccacgtcctggacggccgttggggccgccatagagacggggcacaggcagagcggacgagcggaccggcgcctctaggcggcgggaggccgccctctcgactgctccagccccc

SEQ ID NO: 463625 - DNA, 122 bp, Homo sapiens
ggcttgctagcaactgatatttccctccatcccagggaatagcacttcttatctttgttccgttgtggtttcttatcttatcctggcagaaataagagactaccttcctgtgaatgaaggcc

SEQ ID NO: 463626 - DNA, 122 bp, Homo sapiens
cgcccccatcccgccgtcgctaaggtgacggggagggggcgacaggcgttggatccggaccggccaggggtccttggggggaagtccggagcaaactccccaaactaggctggcgtggggga

SEQ ID NO: 463627 - DNA, 122 bp, Homo sapiens
ccttctgggtaagtcatagaggacaagctgggcccagtccgcaggcgcgttacgtcacatcgcgaacagagaaaggccgcttgcgcaggcgcagttctgacgactgccgttcagcacctgcg

SEQ ID NO: 463628 - DNA, 122 bp, Homo sapiens
tgctgctgcccacagggaaccctcctagagccgtcacggggcataaggcccagggggcctcgcgagctgatctttcctgtgcggagccaaggatgcagcagagggtgtgctcacggcgaggt

SEQ ID NO: 463629 - DNA, 122 bp, Homo sapiens
cctcaccacatctccgcaaggtcagaattaatgtgaaaaatgcagccgagagagatcaagcgatttatctaaactcagctgttaagtggcagagacaggcagaattttaacctccaggttca

SEQ ID NO: 463630 - DNA, 122 bp, Homo sapiens
acccaacccctcacacacacacacacacacacacacacacacacacacacacacacacaccggtgagtggacagacatcgtttttcaagtcatgatgcagcagtattggaattacagttttt

SEQ ID NO: 463631 - DNA, 122 bp, Homo sapiens
cggtcagatgctcagagaccttccaccctgtcccccacccctcagccttgcccatctccacgagcatcttccgcgccctcgcccgggactcggagcccaccaccctccgcctccgcctggcc

SEQ ID NO: 463632 - DNA, 122 bp, Homo sapiens
ctcacgattctcccccaagctgcccttacaggggaaggcggcacagagagatgcagaccccgctgaggcaagtcgaggtcccccagggtatccccaaaccaaagcaaaaccctaagggccgg

SEQ ID NO: 463633 - DNA, 122 bp, Homo sapiens
ttatatagtccctaacagtttttaaactgttccaaatctttaggattaaaacacctaactcgtgcgtatgtgttcacttctattgcatactatcgggtccctacgaagtcccaaaatggaaa

SEQ ID NO: 463634 - DNA, 122 bp, Homo sapiens
ccaacctggcctgacccctgtggctgactcagcctctcttcttcccatcctacagtatggcggaagaactttctgcgtgtgggccacctggtgctgattgggggccctgatgatggtgttat

SEQ ID NO: 463635 - DNA, 122 bp, Homo sapiens
gaggtgtcgctccacaacatttcctttacagattagtgggatattcgagtataagatacacgagctataatcccccttctagatgtctgagacccagctgcacaaagcacttcctttaagct

SEQ ID NO: 463636 - DNA, 122 bp, Homo sapiens
gaggcccagccatctttttctttaccaaaatggcggcggtactgaggcgcaatgagtgcgcgccgccaggagctcagcgcgcaggccccatgatgacgtcacggaggcgcgaccgggccggc

SEQ ID NO: 463637 - DNA, 122 bp, Homo sapiens
ttctcctttcggttcagccccaggtttggttccttcaggtcaaaggtcactgcagcatcccgagacaggtctcttgtggtacctgccttcccactctttctccctcctccttccacttcctt

SEQ ID NO: 463638 - DNA, 122 bp, Homo sapiens
cttccacagtcttcatctgtgtaatgggaataacgatccgtacctctagcaggtgcgaggcgggttgtaaatggccacgcccgggagccgcaagaaccacggtgatccgcgcggccgcaggt

SEQ ID NO: 463639 - DNA, 122 bp, Homo sapiens
caaccgcaaggcgggggaggtagtgggtgcaagccaccagctgcagggcaggagaacgctcgcaggaggaccggtgcaaacctcctctcggcccgctaacccgtgccgccccagcctcccct

SEQ ID NO: 463640 - DNA, 122 bp, Homo sapiens
ggctccgcgggactgacaatgaggggcggggccaaattgtgacgtcagcgttctggaaggcggggtctttgtgatgggcggggttgtctgtaggccccgccccctccgtcctttttttccct

SEQ ID NO: 463641 - DNA, 122 bp, Homo sapiens
gtgacaatattggacaagttgttagctgctctgagtcattaccttatctgtaaaattaggcgattgcattaggttagggagtgaactgctcaacaatgggacaaatttaattctcagatcag

SEQ ID NO: 463642 - DNA, 122 bp, Homo sapiens
ctgctgcattacctactggcgttagttccagatcttgaggaagctatcccaggaccctgtcgccacagccatgccatcgtcagtcacgcccaggcagctgacgcggttgtcatgcccagcca

SEQ ID NO: 463643 - DNA, 122 bp, Homo sapiens
tctgctgtgaccatggggcttggcggccgcaggacctggggtctgggctcaggagggccacggcccctcccactcctgagtgtgtcgggaggctctgcccccatcgtgcttcacacaggaca

SEQ ID NO: 463644 - DNA, 122 bp, Homo sapiens
ggctggtggggagggggagcacggggctcgatcgcccgtggcgcctgttcctcagccgggcgccgcaggacccagcagatacacggtctgttgggcacagtgataaggtgggggacaaggtg

SEQ ID NO: 463645 - DNA, 122 bp, Homo sapiens
cgggtctggccctcctccgggcctctgcccctgcgggtccccgcttgggtacccttgctccggtccctccttggtgaagttgatctgatgataagcatcacctgccgtcccttttacaaata

SEQ ID NO: 463646 - DNA, 122 bp, Homo sapiens
ctgcccaggccaccccggaagctgctgctgcccacttaagagaagctcgaggagttgatgcgggcaccgggcccacatggtggacaccttgtaggacttctgggtcatcctgatggacatgg

SEQ ID NO: 463647 - DNA, 122 bp, Homo sapiens
ggtgggcgatgtgtgggtgggggacttgtggcatggcccacggtgttgtttctgtgcctgcgatgacacacgtatgtcttgagctgtgggctcgccttcctggaggtgcgcccgaccgcatc

SEQ ID NO: 463648 - DNA, 122 bp, Homo sapiens
atgaaaataatgataaaaataattgtcacgatcaccaccatcacgataatcattttgtatcgaccctgttccaaacactgttctaagcacttgacatttaatacacacagcaaccccataaa

SEQ ID NO: 463649 - DNA, 122 bp, Homo sapiens
cagaccctacaggccccatccaagcctatcagttccatcaggtaccccccaaaattacttcggttaacagtggtggagcacagtccttcctagatttgagtaaggctcactcctcgcctttt

SEQ ID NO: 463650 - DNA, 122 bp, Homo sapiens
tatcaaagtaaaatcacttccagtgagtccagggtagtagtctgcaactatcaactcaatcggccccatctcttccattcatgaaaaaaaaaaattcacatctcattgaaacatacataagc

SEQ ID NO: 463651 - DNA, 122 bp, Homo sapiens
agactgacaagcatgaacggaacggaattattccctcttctaactgcagccacgatttggcgttttaacaccgggctcaaggtagcctgggtctctcttggccaaagagcccagggatgcct

SEQ ID NO: 463652 - DNA, 122 bp, Homo sapiens
caaagactgtatcctagacccttggggctgggaaggggcggaggggccgggcgggaggggcgcccagggccagcctgtgtcgcaggatccttcactgagtccttccacccgccagtccgcgg

SEQ ID NO: 463653 - DNA, 122 bp, Homo sapiens
gctccttagtacaggccatggaatcacaggacagtagagtttcagagaaccttgggaggccgggtgcagtgactcacacctgtaatctcagcactttgggaagctgagatgggaaaagcgct

SEQ ID NO: 463654 - DNA, 122 bp, Homo sapiens
cccactcagtcctctggccactgggtttctggccgcagatctcgctgccgcctcctcctccgggcgcggccacctggagaaagatccagcaaaaccctgattcccggcgcctcctccctccc

SEQ ID NO: 463655 - DNA, 122 bp, Homo sapiens
ggcacatgcctacgtggcccgccccctccaactgcagggaggatacagtgagcgagaacacgaagagacccgaaccaagcaggccgccctggatggtgagccactcggtggaggccagctga

SEQ ID NO: 463656 - DNA, 122 bp, Homo sapiens
cccgacccccctaccctcgctagggtaaggacaaccgcggggtttgaacggcagagaaggcggtggagccagcgtagcgcccgcagagcaacgcaaagaggaagaacagagaaacggctatg

SEQ ID NO: 463657 - DNA, 122 bp, Homo sapiens
gaaaataaataagacattcttcaatttttgcccacgaacgtgccccacgcatgggagctgcgtgcggcccgtggtcaggcagaaacacccgcacacaatggctgggttcaaatctcgcccta

SEQ ID NO: 463658 - DNA, 122 bp, Homo sapiens
ttccatcgacccagcctttttctgttgaccgatgaggactttgaatgacatccttgcccacgctcccccaactggccagcggcggaagcagagcagaaactgagtctcctgactccatgccc

SEQ ID NO: 463659 - DNA, 122 bp, Homo sapiens
ccttggcggggctgcttgtccttgtgggcctgagttttttgtctttctgtgttttgagtacgacatacagcgagcagcccagggtctccacaggcgtccgcctccctcccgcccctggttcc

SEQ ID NO: 463660 - DNA, 122 bp, Homo sapiens
ggccgcggcaggcaggcgagcaggcagggccgcctttgatgtgggctgggcgcacccaggcgagctgagcgcccgtccggccgcgccccgaggggggagcccccaggccccgcatcctcatt

SEQ ID NO: 463661 - DNA, 122 bp, Homo sapiens
ggccacatggccctgctgaaatggccgagtcgctcaggtgaccatttgtcatccatccatcgatgtcactcaaggtgcagctcagagatgaacttggggatcactgtgatttttctttcagg

SEQ ID NO: 463662 - DNA, 122 bp, Homo sapiens
cttggtaacggagagagcactcgacagagaagcaagagctgaatataatatcaccctcaccgtcacagatatggggactccaaggctgaaaacggagcacaacataacagtgcagatatcag

SEQ ID NO: 463663 - DNA, 122 bp, Homo sapiens
agacatccatgctaattaactaatgacaccggaaacgtcctgaggtgcgggacgggctgccgcctgcctatctctcagaaattaaccaccccgctacaattctgtggatgccagagcggaga

SEQ ID NO: 463664 - DNA, 122 bp, Homo sapiens
catatcagacatggtaaaaggtttaacacacatataatcaaattttcctagctctgttcacggaaagggcctgggagctgcaacacctcaacagcaacgagcacacctgctacctagaactt

SEQ ID NO: 463665 - DNA, 122 bp, Homo sapiens
caggcgccgagaggggcgcgcagtgcctttggggattggtagttttttccagggcgtctccgctcgggaaaggaagtgaagaaagccaccaggactacaaggcccggcgtcctccaagatgg

SEQ ID NO: 463666 - DNA, 122 bp, Homo sapiens
catctcggttcgccgcgagccaggcccagcacacacagccccgtcgggtggagcagagcgcgcgactcagccagctccacccgggacattccccgcgccgggaaccccactgggggctgggc

SEQ ID NO: 463667 - DNA, 122 bp, Homo sapiens
gaccgcgtgtgtgcttgcttctacttccccgggtcctccctctctgcgcctccctctctccggagcttcctgccctaaccccaaccacctgtgtaccggagaaatccaactcctcccgctcc

SEQ ID NO: 463668 - DNA, 122 bp, Homo sapiens
ccctccggtccccgtgccagtttccacagcgggacaggggggtcccgggggccgggagtccgcagccccgaagacctacgctgccgccagccacacccctgggggtccgaccctcctgggtc

SEQ ID NO: 463669 - DNA, 122 bp, Homo sapiens
cgccaagatgcacccatttattaaatccttctccaagatacacctgtttattaaaccttccgccaagatacacccatttatgaaacccttcgccatgatgcacctgtttattaaacccttcc

SEQ ID NO: 463670 - DNA, 122 bp, Homo sapiens
tctaggaaggtgaaaaaatatattaacaccatttagcagttaccgattatcttggggaggcggtcatgcacggaactaggaaatcctgaagaacgtattttaaattcatacaaaataagatt

SEQ ID NO: 463671 - DNA, 122 bp, Homo sapiens
ggccgcgcctcggcgctcacctctcgcccgcgccgcgggctgcagcctccgcccgcctcgcgctccgggactcgtctcctgagctctcgcaaggcgctggagcgcctcctttctctcccggg

SEQ ID NO: 463672 - DNA, 122 bp, Homo sapiens
cggccctccgctgcccaggtaacaggggcaggaaaaggaaggcagaacagcggcttggagcggccccagctgtgcgctcatcacagaaaggaaaagagagaccctccaagaccgcagccctg

SEQ ID NO: 463673 - DNA, 122 bp, Homo sapiens
cacattttggcagatgacaattacatgaggttttccctcctcctccatagtttaagcaaccgttttcctgacagagacagacaaagagacagctctgggcttgaagtagctggttcaaatat

SEQ ID NO: 463674 - DNA, 122 bp, Homo sapiens
gaaagtcagtctggaacctgaggactgcacacacagctcttctctctcagcactgcacgccgtgcacgagccgggcggtgtccccgtgtgcacaggcccgcttctcggggctgctgctgatc

SEQ ID NO: 463675 - DNA, 122 bp, Homo sapiens
ggagaagccagagctgggggtcccctcgcttccccgcagaccaccctagtgccgctgttccggaactcgcgcctggtccagttccacttcaccaaggacctggagacactgaagagcctgtg

SEQ ID NO: 463676 - DNA, 122 bp, Homo sapiens
ctttaagtagttaatattttcccaaatgttaatccaatttgaggttattaggcaaagtgccgagaaaggttgcacatcagagttattccagtaaatctccgtgctctggatgtggggaaaga

SEQ ID NO: 463677 - DNA, 122 bp, Homo sapiens
aggtcagtgcggggcgaggtgagcccctcccagggccctctggcccaggaggatgaagcgcgccggcttcgctcttgcacgccggcttgccatccgggtaagcgcgggaaaggcggccacag

SEQ ID NO: 463678 - DNA, 122 bp, Homo sapiens
ggctgggtttacccttcgaggtgagcgcgtccttgttttcagggacgcccggacgggaggcgtttgttgctttcgcagccgagtggtggaaatgtattggctcttcagggcgggtctggtag

SEQ ID NO: 463679 - DNA, 122 bp, Homo sapiens
ataaaaagtccgatcctttaggcagcccactgcatttgatccacagggtctgggcaatgacgaagctccaggactggtatggcatgtccctcactgccgtattcagcagcaagcctagctgt

SEQ ID NO: 463680 - DNA, 122 bp, Homo sapiens
ccctcacccccggcgatgttgcgggccccaaaggcaggggcactggcctgttctgaatggcggatgcgatgctgaggacccagaactcgctcaggatgcagccgaaagccaggtgtgtgtac

SEQ ID NO: 463681 - DNA, 122 bp, Homo sapiens
aactctagggccctatctctgcaatgggacggcctccaggtcatgggagggcccagcctgcgggttctggaccccaggggccacactgggcgggaccccgttcacaaggcgggaaggaatcc

SEQ ID NO: 463682 - DNA, 122 bp, Homo sapiens
tagattttattgtattatacttagcagattttcaaagtcttagctttgggcacccacttgcgcgcgcgtacacacaaacacacacatacgcacactcactcaaacacacacactcgagtccc

SEQ ID NO: 463683 - DNA, 122 bp, Homo sapiens
tcctaaaacaaggacaaacatccaactcagacacaatccaacacacaatagacatttgttcgttattaagttcctactacaaatcatctgtgtaccaatgctggggatataagaaatatatt

SEQ ID NO: 463684 - DNA, 122 bp, Homo sapiens
cggggagggcgggcgcctcggcctccccgccccggaaccctgcaccgcccagagccgccacgcctcccggctgtaggctccgcatctgtaaaatgggccgatgaaccccaagggtcggctca

SEQ ID NO: 463685 - DNA, 122 bp, Homo sapiens
gactctaagaagagaggaccaacttaagttctttcacactttaatatggaggtttctgcacgctcagcatttttttcaaagcccttgtgacatccttattcctgaaactgtaaatgatagga

SEQ ID NO: 463686 - DNA, 122 bp, Homo sapiens
tgcgtcctcgctcctccctggtcctctgcgtcctcgctcctccctggtcctctgcgtcctcgctcctccctggtcaagggctgcatccttgcgttctgtgagctctgcccgttgggagcatc

SEQ ID NO: 463687 - DNA, 122 bp, Homo sapiens
gcccacccgcacggctgtattagtgcacggacggctgctaaggatggctatattagtacacggctgtattatgcactcgacggggtcctggatggctgttaagaatataagtgaccaaggta

SEQ ID NO: 463688 - DNA, 122 bp, Homo sapiens
ggggcccagtgttttacccaggaggccccggccacagccgagacgaggtgggggcctgggcggcccactgtcaggccctgggtgtggcttgggacagcgggaatcaggcgagcccacccaac

SEQ ID NO: 463689 - DNA, 122 bp, Homo sapiens
gagagctggccccagcaagtctggctctgctgggcctttgtaggttgccacggggcaccccgggcctgtgggaccagtcactttcctgggctctctcaccagggcctagggttggccacttc

SEQ ID NO: 463690 - DNA, 122 bp, Homo sapiens
gctctggggatgtgtaggaacccggacctggtgtggcaatggtgtggggctgtcacgaggcgtgaggaggctggggtggtgttggggacagcacacgatgctggggctcaggccaagtgaag

SEQ ID NO: 463691 - DNA, 122 bp, Homo sapiens
aacaattggagtgcctcagctccctcctcggaaggaggccagacgtatatttattgttgtcgtcattaactttttggggctgtctcagcattgtgtttattggtgtagtttgtcagtcagct

SEQ ID NO: 463692 - DNA, 122 bp, Homo sapiens
gacaggagaagactgccaagccaccaccggtcctgcgacatattcaccagctgccggcggcgaggtcagaccccagattcgggtttgcccagcaggcgctcggcttccatgctcgctctcca

SEQ ID NO: 463693 - DNA, 122 bp, Homo sapiens
gagaacaatggcggtcctgtgggcggccggagattttggttctgtgcagaaggaatgtcccgacctgtgattattcatagatggatggtccccatggaggatggtctgccagcgatgggtta

SEQ ID NO: 463694 - DNA, 122 bp, Homo sapiens
cgcacggcggggaggagtggcgtcagggatccgcggatgagtcaagtggcaggttctgcacgtcccggagagcgggggcggccggggcgcaggcactggcgagggggcgcagcccggggggc

SEQ ID NO: 463695 - DNA, 122 bp, Homo sapiens
cagccaacacagtgggcacaaccctggaccggcgctccgctgagccctcgctggggtttgcgtggggatgtggggttttgtgtgaacacgggtcttttaatgttgattgaaactcccctccc

SEQ ID NO: 463696 - DNA, 122 bp, Homo sapiens
tttggggacttctctcccacagatgtgcataaacaggtacccagggctagggcccgggcccgggctgggggctaaattaggctaaggactcactgacaccctgtgtctccctgcacccccca

SEQ ID NO: 463697 - DNA, 122 bp, Homo sapiens
cgcaagcgcagattgcgcgatgcctatcgagggactcttggtccccgaggtgggggaggacgactagggctgtttctcaaggggaggaatctcaggtttctttccaagggtctcttagggtt

SEQ ID NO: 463698 - DNA, 122 bp, Homo sapiens
ctgcagctctcgcaacggaaggcgctttgcaatctgcaccgagaggtgtgcgcggaggggcggaggagggggcaggaggaggcggccgccttgaggcgtggccaaagcaaacttctttcgcg

SEQ ID NO: 463699 - DNA, 122 bp, Homo sapiens
cccacccactatccccggttctagcagtcgcagtcttaatgagagagtgagccaggcactcgagcagtggagataggctatgggtgtttgcgtctggggtccagagacctctccctccccac

SEQ ID NO: 463700 - DNA, 122 bp, Homo sapiens
agtccttgatatttaccacggttcaagcctacatccctgagtaagaagaatccgcctccacggaaggaacaagagaacatccaccaagcgagcacctgtccagaacattctatctggttgcc

SEQ ID NO: 463701 - DNA, 122 bp, Homo sapiens
ttggatttacagcatttcttacatcctataaaagtccttttctgccaacagcctggagcgcgctggattgaatgacgctctcccagcacagccggcatttgcagtgcattagaatcttgccg

SEQ ID NO: 463702 - DNA, 122 bp, Homo sapiens
ctctctattggggccaaatgttggtcttatgtaaaagtaagtattttattaaaattatcgcgtgtgtctttacaatgccaaagacataaaataaattagatatcatctgtgtaactaaagca

SEQ ID NO: 463703 - DNA, 122 bp, Homo sapiens
gcgggtggcgcggtgtctacccgggcgggttgagggcggtgccagggtcagtcaaaagtccgccccgccccctgcctggcccggcttcggggttggggaacagcgcagggaggtgggtagcc

SEQ ID NO: 463704 - DNA, 122 bp, Homo sapiens
caggtgctcccccagctcccccccgccccatggctcctcctcctccaccccctctcagggcgacagttacaggcaaagaagaggaagtggtagcactagctgtcgctccacaggcgagcagg

SEQ ID NO: 463705 - DNA, 122 bp, Homo sapiens
cacccgtggtgaggaagcctgtgagaggctcactctcctcaaagcctcggaccgagaccacggtcacctcatagcgagcgcctgggatcagcccctggagtttctgggtccgggcctggcca

SEQ ID NO: 463706 - DNA, 122 bp, Homo sapiens
cgccaatagcaccctgagaggctacatttgcagaagcagcagcagcagaagacacagcgccggtccaggaggcggctcgagctgttcgtaaagtcgcccgacagctttttctccgtagtatg

SEQ ID NO: 463707 - DNA, 122 bp, Homo sapiens
tccaggaaatgtacattctcaagagatcaggtggttttataaaatatagtctttttctctcgtagaggggaattgagagcaagggaggcttaaatccttaataaagatcatgtgcatatttg

SEQ ID NO: 463708 - DNA, 122 bp, Homo sapiens
caggtgggagccatcgtgccaggccaagagtacaagcatttattggcccaaactcagcaccgggcccgggactaggcatcacccgggctgacagatagagggatgagggaagaccttgtttc

SEQ ID NO: 463709 - DNA, 122 bp, Homo sapiens
ttctcagtcacttacatgatgaatctgggcgttaccctagattcattcatctgcctttcccgtgtcatccagctggtctcctggcattatctatcctgtccttattcatttctgaacacctc

SEQ ID NO: 463710 - DNA, 122 bp, Homo sapiens
ctaggccagcatgtccacacacacgtgacacaccagtaggccagtgtgtccacatatacgcgtgcaacacagcaccactaggccagtacatccacaaacaatcgtgacaccacacaagtagg

SEQ ID NO: 463711 - DNA, 122 bp, Homo sapiens
tgcctgcctggtagccccggggaccggcccctccttgctggcgcctggccgagagtcagacgctgaggacctctcaggacggggcccctggccagagccagtctcctcggccagccaggggc

SEQ ID NO: 463712 - DNA, 122 bp, Homo sapiens
caacgtcgaggccggcagcagcggggctgagctggtgcggccgcagggtttgcagagctccgggggggtggggggcgggaaacgctctccccacacgtaaccccactaaagccacaagcagc

SEQ ID NO: 463713 - DNA, 122 bp, Homo sapiens
tgcaggtcccactgctggccaacagagggctgaaattaaaatccaattccgggcggggtgcggcggttcacacctgtaatcccagcacttccggaggccgaggcgggtggatcacctgaggt

SEQ ID NO: 463714 - DNA, 122 bp, Homo sapiens
ggccggtcctggcgcccgcgtcccgcacggcctctcggcgccgctcccgccgccgctagtcgcctccgccaccgctgtcctccagtcccagccgccgagctctgccgccccgcccccctacc

SEQ ID NO: 463715 - DNA, 122 bp, Homo sapiens
aaacacccctttcatgcgcctctgaggccttgccaggaaccccgcagcccaaagaccctccgttccgcagcatcgttgcatgaacctcgcgctgctcccagggctgatggtgccacctggtg

SEQ ID NO: 463716 - DNA, 122 bp, Homo sapiens
ctcctcttctaattcttggatgacaggcagagttggcccctgcctgctgcgaagagcaggcgagaggctcctggaggagcctactcaggctggtgggctttgtgccaggctggttactctct

SEQ ID NO: 463717 - DNA, 122 bp, Homo sapiens
ccggcggggcgaggtcggggcggggctcgcaggacctgggcggggctcgcaggggctgggcggcctgggggcggggctgggcggagcgcgcagccgcgcagcggtgggaggactgcggggct

SEQ ID NO: 463718 - DNA, 122 bp, Homo sapiens
taccccttcctcttaatcgccagtttatttttcttaataccgtctctcccgctcccgactcgcactaaagggcgtgtgttttgttcaaggactggactagcacccaagtgaggggcattgcg

SEQ ID NO: 463719 - DNA, 122 bp, Homo sapiens
tttacccgaagcctctcaccttcctcccgcatctcctcgtacttccggacagccacgtggcgccgccaggccttctggatggttcgggcaaagccatcgaactttcgctctcgcacctcctc

SEQ ID NO: 463720 - DNA, 122 bp, Homo sapiens
gtcgctcttggtgatgccactgtcacacgagtctgtcttcttcagtgtggcctcgcctgacgcttttgtcctctcgggaagtgtctccatcgactcagccttggacaccttgttccagtcct

SEQ ID NO: 463721 - DNA, 122 bp, Homo sapiens
ccatccttctgttgtcatttcaagctagaggctcaagcctggaggagtgaggatcaagatcgagaactcaaagctgtttagaggaagaagccaagttcaaggaggagtgaggaacggtaggt

SEQ ID NO: 463722 - DNA, 122 bp, Homo sapiens
gcctcggcgtccgggaggggctgagacccgccgcgccacctcccttcaacttcgggtgggcgcgaagaaaacacaacgttgatctccacgttccattggatcgctacatatcttcccccgag

SEQ ID NO: 463723 - DNA, 122 bp, Homo sapiens
taaactggggcaaagtatggtcaccagactaaccattgtccttttttacccctcctgtgacggggctactacaggttacaaaatcgcgctcttcctcctagctactgtgttactctgagata

SEQ ID NO: 463724 - DNA, 122 bp, Homo sapiens
tttcctcactgggctccagacacactggcttccttccttcctgaagcctccatctgctgccgagctcagggctttgttagacgctcaccctgcctgtgttgcttcctgcagtgtgctgaatt

SEQ ID NO: 463725 - DNA, 122 bp, Homo sapiens
aggaagcagatgtgcagagaggcggagatggaggagtggctgggaaggtcgcctgtgtcccgccggcttccaagttccagagccttccggagcctcttctgaaatcctgccccctggcttcc

SEQ ID NO: 463726 - DNA, 122 bp, Homo sapiens
agaacatgaagtgcagtgtgaagaacgaccactcagcgtacaagaggtgagcacccacctcgcgcactgcgggccctcccgagagcacccagctcagtggcctgccttgtgcacagcaggtg

SEQ ID NO: 463727 - DNA, 122 bp, Homo sapiens
acatgctaggattacaggcatgagccaccacccagcccaacccttaaaacttttaactgacgcttagcatggcaccaaaataatatttattgaatgtattctggtgccaacctctggatgca

SEQ ID NO: 463728 - DNA, 122 bp, Homo sapiens
ccttccattatgtacagtgtcgagggtcccatccagggcaccgggcacgtctggtggacccggatctcagtcccgagcggtcgcgagcacgtccctgtccccgtcccccggccgccgcctga

SEQ ID NO: 463729 - DNA, 122 bp, Homo sapiens
cactggatacatattttatggaaaagggtaagattgtatcacagtgttaatccagaaactcgaatcctctgattagaatcagaggagaactgagaagaacctgccggcggatgcacgagtgg

SEQ ID NO: 463730 - DNA, 122 bp, Homo sapiens
ggcgtgccaaggcgagacagctcctcaggggcttctgggtaaataatggctgtgtcactgcgctgaaggtactcctcgatgctgactgcatgaccatcgcgttcctccagttttcttttggc

SEQ ID NO: 463731 - DNA, 122 bp, Homo sapiens
gtcaacttacatgttctggcattcttgggaggagccaagacggccgaataggaccagctccggtctacagctcccagcgtgagcgacgcagaagacgggtgatttctgcatttccatctgag

SEQ ID NO: 463732 - DNA, 122 bp, Homo sapiens
cttggtggtgggtggtgagccagaattccagccaggtctgtctcatttctcatctttgtgcgtttccagaaggcttgttcttttgggaggattaaatgagaatgaatgtgtaacatctttag

SEQ ID NO: 463733 - DNA, 122 bp, Homo sapiens
ctggtggataagaatggggtctctggagtccgacgcctggattcacgtcctggctagtcgcgtgaaccttggtgctctcatctgtgcagtgggaataatgcaggttctgggcagggatggga

SEQ ID NO: 463734 - DNA, 122 bp, Homo sapiens
ttactcatggcagaaggtgaagccgctgcaggcacatcacacagggagaaccggagccagcgggggcggtggggagtgccacacgcttttaaaagacccgatctttcaataactcactcacc

SEQ ID NO: 463735 - DNA, 122 bp, Homo sapiens
cccacagtttaatagcccctgggcacagcaggagaacgagttgaccaagtccccggccagcgtactggcgaaccgagagcagcgggcagctatgcggcctccaggacagcagggggcgatgt

SEQ ID NO: 463736 - DNA, 122 bp, Homo sapiens
ggtgccaagcaccgtaagcctggacaaagcttctctgacccaggcattccttgcctaggacgtgaggcagcacctcgggacaatgcttggggacattgcaaacagcaaagtcacccacaaaa

SEQ ID NO: 463737 - DNA, 122 bp, Homo sapiens
tgaatgactaatagcattattattcctctgttatttgcattttgaagtcttgccccagagcgaattataccagttcctgctttcacaagttcctttctccacgtttatactccacatccagt

SEQ ID NO: 463738 - DNA, 122 bp, Homo sapiens
caggtacagagggagcaaaccagacagctggtgccacatgaaacagaaagatctgtgcttcgccgtaaggaaaaaaaaaaactgtgggaaacagtgcaagaacaaaaataagcaggcaagtg

SEQ ID NO: 463739 - DNA, 122 bp, Homo sapiens
gagggcgagagcagcagctgctggctactgcaccagtccaggccggagacagcagtgtctcggaccaggtggccggggtggaggccgtgagaagccatcggatgctgggtacttgcagacaa

SEQ ID NO: 463740 - DNA, 122 bp, Homo sapiens
caccaggaggctatggagaaggcgctgaaagaggaaacgatgacctgagaccggcaaccccggagaaaacctctacctgaactgccacgaacaccctcccagagctcagccgcctgggaatc

SEQ ID NO: 463741 - DNA, 122 bp, Homo sapiens
cctgggggccagaggggcaggcctgcgcacggggaggctgttgtggcagcggaacagagacgtgcacggtgagaggcctgggggccggctgtccagggctcccgatggcttttctcccagcc

SEQ ID NO: 463742 - DNA, 122 bp, Homo sapiens
ttacttctctcttccttctttacatagcggttaatcatattgagcttctgaaattgtgcgcgtgggcagattagccatttttgggttccctcttaccccccggactaagccgggacggaaaa

SEQ ID NO: 463743 - DNA, 122 bp, Homo sapiens
ctctccctccctcctacttcctctctaggaatgagcacacctggctcctctccacagcaccgcccagctggcgtcagccccctgtccctgagcacagaggcaaggcgtcagcaggcatcgcc

SEQ ID NO: 463744 - DNA, 122 bp, Homo sapiens
tggggagagcgtggagagccgtggggagggcgtggcggagctgtcggggagccgtgggggcgcgcgtggtcagcacttggggagcgcattgagagccgtggggagcactgagggaggatgcg

SEQ ID NO: 463745 - DNA, 122 bp, Homo sapiens
acctgggatgatgcccctctagcggtaggcgaactggggagtgtgggcggcgggggaaggcgaggccctggaggacctgttgtttttcctgttgcaagtgaaaaggaaacaaagtgggaagt

SEQ ID NO: 463746 - DNA, 122 bp, Homo sapiens
tttctgagtgaaggaaggattgggctcgcgggggctggctgaggtctgagcaggatgctccgtctctgctttggtgccgggttgtttatggttttcaggtgacaggtcctgcagctaaggcc

SEQ ID NO: 463747 - DNA, 122 bp, Homo sapiens
cccctcccccggccccctctatttaccgccatcatcagcacgcgcgagctgtcaccagggcgcgagacaaccgaacacggccccgccccctgcccgtctattggcccgcccgctggagcccc

SEQ ID NO: 463748 - DNA, 122 bp, Homo sapiens
tacaagggaagctggttgggcatttctgtatttattcaactagataatagaggggaaagccgcagaacagtcagaagaatatttgcaatgcaattagggggaacaagtgcatctgagtgagc

SEQ ID NO: 463749 - DNA, 122 bp, Homo sapiens
ttctggtcgccgggatggaacgtgggtggcagcacagagaagcgagctgcaatatagggccggggcacctccagctgacgcgagtgccgcaggctgcgcctctgtagccgtgagatgtcctg

SEQ ID NO: 463750 - DNA, 122 bp, Homo sapiens
gccatcccacgcacatcccacgcaggagatgcaagagccaatgggcgggtctgctaagcccgcgaactctgccgcgttaaattgcctagaagctcccacccttctgactgttgccacgtagt

SEQ ID NO: 463751 - DNA, 122 bp, Homo sapiens
aaaaggggagtgattcagctgacagtgtccgctttcggcggggtgtggaatgggccagagcgggagggcgcagcccaccccggtccccacccctccgcctcccgcatgccccgcggcctcgc

SEQ ID NO: 463752 - DNA, 122 bp, Homo sapiens
agtgtcattgcctaaatcaatctttgggcattaaaggtagcttctggggagcttctcagtcgccagcctgctacttgtcgggggcatcggctatgaactgcagctggatggatgcctgtctg

SEQ ID NO: 463753 - DNA, 122 bp, Homo sapiens
ggagaaacgtggcaggcgtgaacagacaccacgtgagacagggaggagaaacgtggcaggcgtgaacagacaccacgtgagacagggaggagaaacgtggcaggcatgaacagacaccacgt

SEQ ID NO: 463754 - DNA, 122 bp, Homo sapiens
ggaaaggcttgtaaccacacgtgtagctctcgcctcgtgccagccgggggtggggctgcccgcttttgcagtagacacaggagccccccggctccgggtgcttctccttcatgtgtgcctcc

SEQ ID NO: 463755 - DNA, 122 bp, Homo sapiens
atcatcaaagaattacttcattgcagtggcaccaagtgctgcagagaaaaacaacaagagcgtctagccagggaccgtcctggttagaggggcagcaaaggcccctataagtctcattgaac

SEQ ID NO: 463756 - DNA, 122 bp, Homo sapiens
agccgcctcaacccaccagcctctggggagcctctcatctcgcaagcacctgcggaggcccgcccggcgccagaccagtccaggcacccagaggcctctgctctcctggagctcatgacaag

SEQ ID NO: 463757 - DNA, 122 bp, Homo sapiens
gttcatgggccggacccggacggcaacttttaccttggtatccgacatgttggctgcgctcgcccggccgctcgccgcgcccgctcggccttaggcggcccctcacgcgcggcgccgccgcc

SEQ ID NO: 463758 - DNA, 122 bp, Homo sapiens
agcactttttatttttttccttcatcaactaaaataacattgctgtctccccaagacgctcgaattctgttctattgcttgagattccagaatcgctggagggcgccctgttgtaaaaatag

SEQ ID NO: 463759 - DNA, 122 bp, Homo sapiens
tcgatggtttttgtaatatggaaatagggatcatcattaggaatggcagtcaggatggaccggagccaagcatctcgggcctgaagaaacttcaccctcaactcagcctcagtgaagacgtc

SEQ ID NO: 463760 - DNA, 122 bp, Homo sapiens
ggatggggtcaatttatggaacaactatgctgctctctttttggcaacttgagtcagctgcgcaaatccatctgacatttcagtacagctgctatgtttgccagagactagcagagactaca

SEQ ID NO: 463761 - DNA, 122 bp, Homo sapiens
gtccaggacctgtcatttaaaggtgcaagaaagcagagaacacaaaagcaaatgaatccacgcacagagtgctcagatgcttgtgatggcaaagaagagacggccacaggcagggacgaggc

SEQ ID NO: 463762 - DNA, 122 bp, Homo sapiens
ccttgaagggcttgccctcgcgcggacagtcctcccagaagcagacgtggctgctctgctcggggcctcccacgtgctccaccgtgacgtgattcaccagctcgtgcatggtgccgaaagtt

SEQ ID NO: 463763 - DNA, 122 bp, Homo sapiens
ctggctgcagactcactactacatcacctaccatcagtggaactccaagcccgagttcatcgtgtgcacacactcggtggtcaggtaccgcgcacgggcaggggtgcggctgcgtccttgtc

SEQ ID NO: 463764 - DNA, 122 bp, Homo sapiens
aggtgacccagtacccccgaagggtccacctggataaaagtcgtttggtctggcagcatccgggtcatatatctgagaggtcgtttagaagtcttttttttttaagcgctgacaagtgattt

SEQ ID NO: 463765 - DNA, 122 bp, Homo sapiens
agaaacatttgtcatatgctctcaggaaaatataggcaagaattactaatcagttattcacgatcaaagaaacattattctccctgagactttttgaatcatttatctgtatttctgaagta

SEQ ID NO: 463766 - DNA, 122 bp, Homo sapiens
gttcctcctcaaaactcagttagtcatgagctctttatctggcaccttaggaactgccagcgatggcaggaatgccttgtagacagcagaaagcacaaatgctaaaagattgggtgaagtga

SEQ ID NO: 463767 - DNA, 122 bp, Homo sapiens
tttcactcttgagccagcaagaccatgaacccaccagaaggaagaaactctgaacacatccgaacatcagaaggaacaaacgccggacatgccgcctttaagaactataacactcaccacga

SEQ ID NO: 463768 - DNA, 122 bp, Homo sapiens
tgaaaaactaagaaggagacccaaagtcagagtccagggctctagtgatctggtcattcacgaatgagaaaaccaaggcccacacagggaagtgatttgccccaggtcaagggcagagctgt

SEQ ID NO: 463769 - DNA, 122 bp, Homo sapiens
caacaggcatcggctggaaggggtctgaacgcccagctctgccgccaaggtcaaggggaccggcatcaacgccaccgttcttccatgtcttaggccacgttgtcttgagtcactgtggtcat

SEQ ID NO: 463770 - DNA, 122 bp, Homo sapiens
ttcccctcccccgcctcatacaaaaatcaggaaaaggagttgcgggaggaatcgagaagccggccgcagagcccaggtcccccatggctactgtgaggcattcgccgctgcaaatttcctgt

SEQ ID NO: 463771 - DNA, 122 bp, Homo sapiens
ggttagcaagatcacccttggtgaggggaatttcatgttgttgaatccatgaataacctccgtccctgctgccgtatttactttgtacctgagcccactaagcaagcactggggtgctaggg

SEQ ID NO: 463772 - DNA, 122 bp, Homo sapiens
gcggagacggagaacaggttatgtgggagccggcgggggcatttgccggcgacacccgagcgggggccggaagtggggccacagctcgcagcaggagctccgggctagaccgtggcgccggc

SEQ ID NO: 463773 - DNA, 122 bp, Homo sapiens
tgcatgcctgcttcatcctgagcttgagggcttgcctctgaccctgtgcttcatgggagccgtgtcttcatgcctgtgcctctttcccagagggagactcctgtgggccctggttagcccta

SEQ ID NO: 463774 - DNA, 122 bp, Homo sapiens
ataaaccctcaaaaatacaggcttatgcctctggattttaagagctgctaacaggctaggcgcagtggttcacgcctgtaatcccaggcctttgggaggccaaagcatgtggatcacctaag

SEQ ID NO: 463775 - DNA, 122 bp, Homo sapiens
agtaataagaccacaagaagagcagtctctaaaacaacccgtctctgaaaacatcacacgcggggtaggctcaccgcgttgcccggcaacagcggcggcgctccgctcccagaactggaggt

SEQ ID NO: 463776 - DNA, 122 bp, Homo sapiens
cgggcgagaagcgggggcaggggcttgtccctgtcactcttcagctgcctccgggattgtcgtcgtccacctggggagcagcccgccacagttcctcaggtgggagcccagagattcctgat

SEQ ID NO: 463777 - DNA, 122 bp, Homo sapiens
aggttatttatgcccctatagattcaaagtgggtcaagaatgtaagaagcagactatgagcgtgttgagggaaaggactgtatcttgttcattgttaaatcctctaaacattaagcaaagta

SEQ ID NO: 463778 - DNA, 122 bp, Homo sapiens
ggccggggttaaagttctggtcctggtgagatgctggaagctgcggccgcagccgcaacccgtcccggaggtgtcctgtctcctgtcgccgccgccgccgccaccaccgctgccactgccgc

SEQ ID NO: 463779 - DNA, 122 bp, Homo sapiens
tgcacatacacaacttagcggcacttggggtggctgcgtccatgtagaatcggcttctgacgagttaactaaaaaggataaaggggccaggcgccatggctcacgcctgtaatcccagcact

SEQ ID NO: 463780 - DNA, 122 bp, Homo sapiens
agatgtgggcacctgcggtgaccggctgcgtgcgttccatcccattcacaggcattcagacgtggccacaatgagcggcctttgtgtgcacagagtcactaaatatattaatctgtactccc

SEQ ID NO: 463781 - DNA, 122 bp, Homo sapiens
ttggctcctcctcccaagtgggagaacttgcttctccaaaggagaagcgctcacgccacccgcccactgccccactgtgcaggttgacacctggttggagggctcactctcattagtgcaca

SEQ ID NO: 463782 - DNA, 122 bp, Homo sapiens
ttccgtatctcaatgcgagacaatcaaatcgtacgaattacgtgtccaccgtgttcccggcggagtcttaaagctgaaagggatattagagagcatctagaccagggcagcatatgtcattt

SEQ ID NO: 463783 - DNA, 122 bp, Homo sapiens
cacctcgctgctaccgcgctgttgggcgccggctaggtttgaaggcttcaaacttccaaccggttaggggcgggcgggagaggcggagagacaaacggtggctccctggtgattggccagaa

SEQ ID NO: 463784 - DNA, 122 bp, Homo sapiens
cccagccctagacacacttcagtctggtggggaaactactgctgcgaatgtgggggtccccgatggcctggctctcactccttctgggtgggttgtgggttcacatttctccccccactgga

SEQ ID NO: 463785 - DNA, 122 bp, Homo sapiens
gagcaccagagtgtgcaccaagtgtgaatttaggcctgccaagtggatttacacccagcacgtcccaaatgtgggtgagtgcatgccaaccctgtaaacatgtaggaaggacaggtcaacag

SEQ ID NO: 463786 - DNA, 122 bp, Homo sapiens
gtttcaggagccgaggcacgaacccagggcctaccccgaggttctggttgatggattttgcgggccggggtcaggggatgccctgagagaaagtggggtggtggtgagaataaagccaggcc

SEQ ID NO: 463787 - DNA, 122 bp, Homo sapiens
tggggccgactttgcctcccctcccctggcctcgagcgttggggacggcgcccccgcccgcgcccgccactgggattaagccccagggccttgcccggctatttgttttccgaggccgttgc

SEQ ID NO: 463788 - DNA, 122 bp, Homo sapiens
tccactgtaccgaggtagcatttcttctcattatgactcctggggctgtccgcctgcctccggttcccaaaaccctgtgggtgtggaagctgtgaggtaagcagaacatggcccagcccccg

SEQ ID NO: 463789 - DNA, 122 bp, Homo sapiens
gggaggaaaaaaaaaagggagccacagatgtcccctcgacaggcgaaagtgccccccaaccgcgcattaccatgcccagagcattgtggacatccctggatcaggctgaaggagtttctcag

SEQ ID NO: 463790 - DNA, 122 bp, Homo sapiens
tccccccaccataggtgtccaaggtgatagccccctgggtctccagtaaccccccaacctcgcaccacactctgcgcaagggacgcgcgaggacattgactcccggtgctttcctgtagagc

SEQ ID NO: 463791 - DNA, 122 bp, Homo sapiens
ggcatgtgggcttctgggccactaaacccatctcctactgcactaggtaggtccggctcccggagcccccagtgcaatcttaatgccagaacgctgccttttggagattaaatcacttaatg

SEQ ID NO: 463792 - DNA, 122 bp, Homo sapiens
gtgcgcttcttcggcgtctgcaccgagggccgccccctgctcatggtctttgagtatatgcggcacggggacctcaaccgcttcctccggtaccagcacctggcctcagcgctggccccggc

SEQ ID NO: 463793 - DNA, 122 bp, Homo sapiens
gtcgctggtctgtctgtgacttccattcatgaactctctgaagtcgctgctccgcaagtccgccacacaagcctggttcaggggatcacacacacactctccttcctcccttcctcccttcc

SEQ ID NO: 463794 - DNA, 122 bp, Homo sapiens
gcgagcgggcggccccgccagacagcgccacttgccggcgccgagagtggcccctcgccgcggtgagcccctcccgggatgcgaaagccatcgcctagtccccgccgcacccgcccgcccat

SEQ ID NO: 463795 - DNA, 122 bp, Homo sapiens
ccgagcccagcgcggagcagccgggtttgaggatgtcagcgagcagccaatcagcgcccgcggcctaaggtaagagatgagtctgtagttcagcctgtcaatcacgcgcccctcccgcccgg

SEQ ID NO: 463796 - DNA, 122 bp, Homo sapiens
ccaaggggattaagggggattaactacctgaatcacaggaccaggaggagggcctgggaacgttgccctggctcagcccacagtgggcagcccaggcccagaagctggtggctctggcctga

SEQ ID NO: 463797 - DNA, 122 bp, Homo sapiens
tcagggagcagccctgcggaggaggtggcaggagccatcaatgtgagggccgctcccagccgcctgccccgagcaccctgccctgccctgcccagcccgcataccctgcgccatctcccgct

SEQ ID NO: 463798 - DNA, 122 bp, Homo sapiens
gtgtagggcccaaagagtgcacctgcaagctgcctggtagatgagaaggccatgagggctcggagactctggaaagtgtgatagatgggggttctgtcccttctcaaccccctgcggagact

SEQ ID NO: 463799 - DNA, 122 bp, Homo sapiens
tgggggccacatgaagcccccttccatctccccatgtttctctgtttgggtatttctctccggtagccgaatctactggggtttatttggcattggggttccagtcctgtcatgacagggct

SEQ ID NO: 463800 - DNA, 122 bp, Homo sapiens
tttttttgggtcagtatccagagtgcttcaggtcactgttcaccgtcaaggcgtggccctcggaatgaaggcagcaggtgcccgttttctaacacggtttaaagtctatttgtgggacctac

SEQ ID NO: 463801 - DNA, 122 bp, Homo sapiens
cacttcagccctctgagcctctcttcatgagggtagaggtcgggcgaggagctctcctcccgggtaacaggcttttttttttttttttttttttttttctgagacaggatctggcagtatcg

SEQ ID NO: 463802 - DNA, 122 bp, Homo sapiens
aatgatattttgctaccatgtataaaacacacagatgcagctcaaagaaactttggtcatcgctccatggctcggttccctcatatgtaaaatgcaaataataatgtatcttcctttgagga

SEQ ID NO: 463803 - DNA, 122 bp, Homo sapiens
tttctcactagtttattaagctctctctacggcagtgaacacaaaggaatttgtggagctcgtaactgaagatgtatcttcacacaacaaccagaacagatgagcaagggaatgaaaacaca

SEQ ID NO: 463804 - DNA, 122 bp, Homo sapiens
ggtgggacctgggaaaggcccgatccggtagccctggccccactcactgcagattcgcggcgggtcacacactgaccctgcgggtgcccgccgcaaggtcccagccggcagcggccttcgtg

SEQ ID NO: 463805 - DNA, 122 bp, Homo sapiens
agtgaggcaggggcatttagctattcccatcctcatctagctccccactctggcttctcccgccagcggatgtgaccctggaccctgagacagctcatcctaacctagtcctgtcagaggat

SEQ ID NO: 463806 - DNA, 122 bp, Homo sapiens
actactgcaaatcaaagtaggcagcctcatgcatagacttcatgatattagttgagccatcgctgccttcattatcatttttatgcctttggggtcactgtgtggtttggtccaggctgttc

SEQ ID NO: 463807 - DNA, 122 bp, Homo sapiens
gatttgctcatgcctcttacctgggagtagaaggtgggaagaaatggaccgaggctgtgacgagaagacaaggcacagtgcagcttggtgaagccacacgctgactgcgttctgccccctct

SEQ ID NO: 463808 - DNA, 122 bp, Homo sapiens
cctcaggacttttgcctttgctgtttcctctgcctggaattggcttttcccatacatctacgtgacttgttccttgctcccttttccttgctgccttctggtctctcctcaaatggtccaga

SEQ ID NO: 463809 - DNA, 122 bp, Homo sapiens
cccccttcggcgttgtgctgggaacgctcagggctggcgccagtcgcctggtccctcgctcgccgcagcctagacggcggacgctccctgtcaaggcctaattcctgcaactcgccggcccc

SEQ ID NO: 463810 - DNA, 122 bp, Homo sapiens
gcatgaccaaaaaaaacaaatccagttatctaatatgttgaaaaatctgccatcttaagccggggtcagctgtgtgatctcctgagtacagatgaggtgttcacttgcaagggctgaggagg

SEQ ID NO: 463811 - DNA, 122 bp, Homo sapiens
ttcaaattagtaatattcaaattatagagggccacagtaactgcataaatgttctacaatcgattttaaaaaacggttaaaatttttattgcttctgtgtcttgaaagctattttaaatttc

SEQ ID NO: 463812 - DNA, 122 bp, Homo sapiens
atcactctgatcgatgcaagctttagggcactgatctcattttctctctccagttctggccgccaaagcagcagcagcagcagcagcagcagcagcagcagcaggctctttaatttattgca

SEQ ID NO: 463813 - DNA, 122 bp, Homo sapiens
ctcgcgcccgccccctcgcgcccgccccctcgcgcccgccccctcgcgcccgccccctcgcgcccgccccctcgcgcccgccccctcgggtaacaaacatggcccccggcggggcggaagcg

SEQ ID NO: 463814 - DNA, 122 bp, Homo sapiens
ggcgccacacgtggcaaggacagtgcctaacgcagttgctccagggggacagggacggaacgcgcacgtggcaacccagggcctaaggggacgcctgcaacgcttctgcccccagcgcttcg

SEQ ID NO: 463815 - DNA, 122 bp, Homo sapiens
ccccgaccttcttctctccctctctcgccccaccaggtctgcagctgttcccatggagcccggactggaggtccctctgggattcacagccacaccccggatggtggcacagacagatgcag

SEQ ID NO: 463816 - DNA, 122 bp, Homo sapiens
gtcctcagctaggatatactaaacatagctctccatggagctgcttggggttcccttcagcgtggctgttggattctaagagcaagtgtcccaaagaaaactaggtgaacaactttaatgat

SEQ ID NO: 463817 - DNA, 122 bp, Homo sapiens
ggaaggactgatttccatttcaaactgcattctggtactttgtactccagcaccattggccgatcaatatttaatgcttggagattctgactctgcgggagtcatgtcaggggaccttggga

SEQ ID NO: 463818 - DNA, 122 bp, Homo sapiens
gcaggggactctctgaatcccgtgaagggatcagagggggttgctctggctccttgagagcggcgtcagcactctcctgagaactgcctatttcgggttgggtttctttggactggtgcggg

SEQ ID NO: 463819 - DNA, 122 bp, Homo sapiens
agagagtttccctttaagccggagatgctgctcggacacccccccgcgtccaacaggaggcgatgacgtctgtagcctcgttgccagaacagtccccaggctaccgctgccgttcattgaca

SEQ ID NO: 463820 - DNA, 122 bp, Homo sapiens
tacgtggccaatgaagagccggagactttctcccagtatgccctgaaaccatggagtttgcgtactgggacttgtagtttagcaggcggtataggcaaattggatactgttttatccgtagt

SEQ ID NO: 463821 - DNA, 122 bp, Homo sapiens
ctcacacgccgttttccaccttgaccgagcgcaccctgggcaggcctccgcgctcgcagacgttcgcacagtcgcttagcagccgacagcgacggccctggaagtcctcctcgtcccagagc

SEQ ID NO: 463822 - DNA, 122 bp, Homo sapiens
accaccgccttgttgcgccaggtgtcccaggacgcagcacccctggctggctcccatgcgcggttccacgattggccaccaaccacaccagcgtccgcggggccctggagtatagtggagtt

SEQ ID NO: 463823 - DNA, 122 bp, Homo sapiens
tgagctttaagctgggtagaatttcgtgatgagtcactcctatgactgtaaaatcagtatcgatcaagccttcctgttcatcctgtgagcagtttagagacagatgagacaggcttatggtt

SEQ ID NO: 463824 - DNA, 122 bp, Homo sapiens
tgccccgcagcactttcaagctccacggcctcgagagcctcccaccaaagggcaagtgtccgctccggcccggaagacttgggcagcctgagcccaagacttgctctcctttcctgtcgcct

SEQ ID NO: 463825 - DNA, 122 bp, Homo sapiens
gcttccgaccttgtgcctcagttcgctcatctgaaaaatgaggatgatcatggtccctaccggatgcttgttttgaggatccgtgcttggcataccagaaacgctccacaaatgttaggtat

SEQ ID NO: 463826 - DNA, 122 bp, Homo sapiens
aggaaggatgctgctgccaatttgtgggaccgctgctgcgaggagtgggcgtggcctcggcggtgtggatgcttgttaggaaagatgctgagtgcttttcagtgaggagtcagggaggtgtg

SEQ ID NO: 463827 - DNA, 122 bp, Homo sapiens
gagggccactccagagatcccatgggggagtgatgcccatctgtgctgcctcctgtgcaccgagagccacctgcactctctgcagagctgggctgaatccccttctccctccctcctaggtc

SEQ ID NO: 463828 - DNA, 122 bp, Homo sapiens
accgaatcccggggctggacgggagggcgccacagcggggctggactgagggaggctgttcgcccggaggtgccgctggctcccttgctctggagtgagctcacagctccaactcacctttc

SEQ ID NO: 463829 - DNA, 122 bp, Homo sapiens
taaaaccgcgactcttctggaaagaatcaacgttatcgtccacctgctgggccagcttgccgccggcagtgcagcgagcagcaatgccgttcagtgactgcacagagccgtgtcccagacac

SEQ ID NO: 463830 - DNA, 122 bp, Homo sapiens
gcccgaagtctcggccatccatcctccgcgggagtgccgcgatcagccccccacccggcccgcaggcctagctcagtgggacctaaaagttcggcctcggcgtagtcccagagtcctcgggc

SEQ ID NO: 463831 - DNA, 122 bp, Homo sapiens
gatgggggcttcctatcattctggcttggggcatgcggggcctgtgaggctggcggagggcgcaggtgggctgtcaagagcttagggtggaaagttaaaggctctcggaggtgaaaaggttg

SEQ ID NO: 463832 - DNA, 122 bp, Homo sapiens
cctcaaggtcgtgcgtctgaagcttacaagaaagtttgcctatctggagcgcctggctcacgatggtggctggaagtaccaggcagtgataaccaccctggaggagaagtggaaggagaagg

SEQ ID NO: 463833 - DNA, 122 bp, Homo sapiens
cagtcaccatccaggagagatgcagggtgtgtgacgtggcctcctccactgtcaactccccgaggtggggctcaggcgctggaggggtcggggccgtggtctcagtttccgtttcttccctg

SEQ ID NO: 463834 - DNA, 122 bp, Homo sapiens
gaacgccgtcgaccatagagatgagacattctaggaaaagcggcggaggtcggctaagaacgtgtggagtttgaccgcgcaacacccttccccttcttcctcgccatttctgaggctttggg

SEQ ID NO: 463835 - DNA, 122 bp, Homo sapiens
gtgtttccaggtttttgtttttggttatgagaggaggcctggctctgtcgcccgggctggcgtccagaggcgcgatctcggctcactgcagcctcggcctcccgagtagctgggaccgcagg

SEQ ID NO: 463836 - DNA, 122 bp, Homo sapiens
tcctaggaatccacactgttcctctccaaacttcctgctccccgctaaggcaaaagaccccgagccttgtaaacccttttgtcagaacgcgaattaatgtttccaagattttttctcaaaag

SEQ ID NO: 463837 - DNA, 122 bp, Homo sapiens
acgggtacattgcaaacacctgcagaggtgggggaccagctggatgccagagcccactgccgcctacgggctggggtgcctataggtatgggtgggagcggcccgggccacacggcttcagg

SEQ ID NO: 463838 - DNA, 122 bp, Homo sapiens
tctgtggggcagtgtggacacggcagagtgcaggaatgtgctgggaggaagtcagacagccgcgagatgaagagttggccagggcctgatttcccattataagtaatccttccttatttacc

SEQ ID NO: 463839 - DNA, 122 bp, Homo sapiens
tgggagtagagcccatttcaaaggaaaagaaactgaggcttaccaataacatggcaaggacgtggggaaagaggggtaggagcccaaatctgtctgctcagaatcctccccccactccagaa

SEQ ID NO: 463840 - DNA, 122 bp, Homo sapiens
cctcaggtgatccacccgcctcgacctcccaaggtgctgggattacaggcatgagccacccggccttcctcatcataatgtgtatgtccaaaatgtatgcatcagcagtaaaagtgaaagcc

SEQ ID NO: 463841 - DNA, 122 bp, Homo sapiens
accacagtactcctgcttccctttgtctggcggccccgcgggattggccagagctggcgccgagggactgcagagccacccacccccgtggctcctactgcgcacgcgtgaaaaaagccagg

SEQ ID NO: 463842 - DNA, 122 bp, Homo sapiens
ccctgcgccccagcgtctgtggaacggggacggggagcggggctggggccacacgagggccgcacagggtgggtgccactgagggtctgggggccgagcccgtgggagcggacccggcaacg

SEQ ID NO: 463843 - DNA, 122 bp, Homo sapiens
cagtttccccaccagaggactggagggagtacttgggtgggctgtgatgcaatcccggcacgaaccccccagcactggcattggagtcggaggtttgggcatagtcgccaacatcgcactta

SEQ ID NO: 463844 - DNA, 122 bp, Homo sapiens
ctaaagttccaggagcagcaaaatccaaattctctttgtgaggtgggcgaaggaaatagccgggaggcttcactcattgatagtccaggtgttattccaccagcaatcaatccaaattggag

SEQ ID NO: 463845 - DNA, 122 bp, Homo sapiens
ttaacccgttaccacctgttgacttggcctccttgcacttccatttcattatttgccaaacgcagcttgcttactttacagagaaaaaccaagagagcgggcagacagattttatgtgagag

SEQ ID NO: 463846 - DNA, 122 bp, Homo sapiens
ggcgtctctctatatatgttagcacaccggccaccggctgaccttttcggtctgtgactccgcgtgggtgcagcccgcaggagctcatcggcctgtgtcacgcacgggggcctctagtgcac

SEQ ID NO: 463847 - DNA, 122 bp, Homo sapiens
ctggggtgaagcctgggcagctctatccccgggagccgcccttttgcctccagcagctgccggtccagccacagcccctccaggagacccaggccgggttcctaactccgctgctctttggc

SEQ ID NO: 463848 - DNA, 122 bp, Homo sapiens
attctcgaatttctgaactatttcactttcctaaaatgacccatcttcccctaagtgttccggagccgctcgtggcaatgtacacaaacccttgcacgtgcgcgcacacaggcccacaggta

SEQ ID NO: 463849 - DNA, 122 bp, Homo sapiens
taattttctcagttataatttttgcaaaggcagttgcagcttgatgctgaagaagctgctcgtgctataggagcccaccaagggaacattccagaaccagcaagcaaatcaatctcttttcc

SEQ ID NO: 463850 - DNA, 122 bp, Homo sapiens
ctgcccactgttcctccagacactgagggggtcgcattccttacctcacctttgtccctgcgcgggctgcggctgggatccggtctttccagccccgagagggacctggttcctctgcccag

SEQ ID NO: 463851 - DNA, 122 bp, Homo sapiens
ttggagggttctgtgtatacctctgggccttgcctccctcgccttcctcctcctcactggcgtggagcgcattctctgagtgggagccagggatgacaccggagtcctctgactcatccatg

SEQ ID NO: 463852 - DNA, 122 bp, Homo sapiens
ggagccaggcgcggcgcaggatggtggacagcgtgtaccggacccgctccctgggggtggcggccgaagggctcccggaccagtacgcggacggggaggcggcgcgcgtgtggcagctgtat

SEQ ID NO: 463853 - DNA, 122 bp, Homo sapiens
aatggcttgaactggacaaagtaacaccttttgtctcgctactcgggcgctgcctccatccgtaaggaaaggagaagtggcagagacagcagctgtcctcttcagcctccggtgatgaaatt

SEQ ID NO: 463854 - DNA, 122 bp, Homo sapiens
ctgccacaaagatgccgatgcttggacatctccagtttcgaggaactcacgtaggagacacgccttcacttccacctttgccaaaccccgaccccttcacaccgctcccctgcactctcaat

SEQ ID NO: 463855 - DNA, 122 bp, Homo sapiens
aagttaacttccaactttctaattatgccaaatgcattaataattagtggccaggccaggcgcggtggctcacgcctttaatcccagcactttgggaggccgaggcgggtggatcaccaggt

SEQ ID NO: 463856 - DNA, 122 bp, Homo sapiens
attctcccaagtctcagcttcctcatcatggaatgggacctgtagtaactatcctagaaacgtgttgtgaagaataaatgcaaaactgtacatgaaattgccctggaaaattctatgatata

SEQ ID NO: 463857 - DNA, 122 bp, Homo sapiens
tgcgcgccggcgtcacagcgctaaccgcttccctggccgtccggctcgcgggtgattttgcggttgtattttctagctttatgttggcgcatatattattttaactcaataggcatatgtcg

SEQ ID NO: 463858 - DNA, 122 bp, Homo sapiens
gggaggcctggtcagcacagctcctgggcagccgccccaggtgcacgtcctgtgacagcccgccccaccccaggggccttcagtgcccccacgctcctggatctgaccgtccccaacctctg

SEQ ID NO: 463859 - DNA, 122 bp, Homo sapiens
gccgcgttcggtcgccgaatgttacccggttctgaatgttacacttacacattccattcccgacacgacagcgctgacctcatccatccacgcagcccgcgctgccattggccgagcgtcac

SEQ ID NO: 463860 - DNA, 122 bp, Homo sapiens
cagtaaatcaaccactatactgataaaccaactactacacaagtaaatgaaccactataccggtaaaccaaccactatatgagtaaaccagccactataccagtaaaccaaccaccacacca

SEQ ID NO: 463861 - DNA, 122 bp, Homo sapiens
cccaacacctaacccagccaggtaccggggaccacagcagcgtcccctgccgcccagcgccgctcatactgggcagggttggccccctctgaggctgccccgcattagggagctgcaccccc

SEQ ID NO: 463862 - DNA, 122 bp, Homo sapiens
ccagggatgagtgcttttgtttgggtagttgctttaggctgcgggagttccagaggacagcgtgtgtaggagggagggagggagggaggtggaactggcgcctgcagtggggccttcctgaa

SEQ ID NO: 463863 - DNA, 122 bp, Homo sapiens
ataaaaacgctcttcctcctcagttcatctgcatctcgtcattgggccccgagaaatagccgccccactctcagtttggtccgagaacagcgcgacagtggagttggagccgccccgggcgg

SEQ ID NO: 463864 - DNA, 122 bp, Homo sapiens
gagaggtgagtggggcgaagtgcgcctgtgtgcagtgaagcgcgcctgtccgcggtggagcgcacctgtccgcggtggagcgctcatgtgtgcggtggagcgcgcctgtgcgtggtaagtgg

SEQ ID NO: 463865 - DNA, 122 bp, Homo sapiens
tttcgagcgatagtgcatgatcaggactctgaaatttttctagctctgggcggagaaggacgcctagggattgtctccatagttaacaggggaaggccaccggctgcctgtaagagagaaac

SEQ ID NO: 463866 - DNA, 122 bp, Homo sapiens
ctttccaggtatagcatgaagctgtttggtgtgtatacaaagctgcaggattcactcttccggggcacagatgcctgagaaacttcagagaggcagaaggcgtgagtctgagcagccatcat

SEQ ID NO: 463867 - DNA, 122 bp, Homo sapiens
catcgcgcccggcctggattcacatcattgaacaaagcagacgagtccttatcctcttagcgctgacgagctgggcagttagtttgaaattctgggctagagacgcaaattattattaattt

SEQ ID NO: 463868 - DNA, 122 bp, Homo sapiens
actgagtcatgagaccaactcagagaccacagatgcaaatgagccttgtggtttctggtacgctgcatacacatctggacctacccaggaagccacaagagggaccaagtccaaggtctagc

SEQ ID NO: 463869 - DNA, 122 bp, Homo sapiens
ggaacatgggagaggccctggtggaagcaggaaatacacgatttgcttttcacaactacgcgttaatgaatagggcagcccacctcctggtttgccccggaatgcccagtttcaggcctgaa

SEQ ID NO: 463870 - DNA, 122 bp, Homo sapiens
ctgaatccctctgctgcggtccggccaggcggaaggggggcagtcgccaagcacagttaacgctgggactccgctggcagggctggtcatgggatgagtcagctgacatagcccccaaggcc

SEQ ID NO: 463871 - DNA, 122 bp, Homo sapiens
tcaggctaccctcttcctcgggccctggaagctgcgtgcgcctcagctgaggcctgatttcgccgtggctgggggctggggccggagttgggcccggcttctctccggctcccccattacgg

SEQ ID NO: 463872 - DNA, 122 bp, Homo sapiens
gatctgatggttttataaggggtttcccctgcttttgctaattcttctccttcctgctgccgtttgaagaagcacatgtttgcttccctttctgccctgattgtatgttttctgaggtctgg

SEQ ID NO: 463873 - DNA, 122 bp, Homo sapiens
tcttgccccaaacatttatacctcagggttaagaagccaggtaagtgagggggtgtgactcgcccagtctttcgttggaaaaaagtgtagacctgtcaggaagacacagcatagaaaggctg

SEQ ID NO: 463874 - DNA, 122 bp, Homo sapiens
actttgggggatctctgcaaatgcatttcccccgcaattctgggcactgggtgtgcgcggcggcggctgcggttattcattattaatgacgctgcctgcccgcatcattatgatgataacta

SEQ ID NO: 463875 - DNA, 122 bp, Homo sapiens
cccaaagtgacaaatgtatttgcaatgacaaagggtaccctgggaagggctcgccctcttcggaatttcagtttacgtgggccttggtgcttccacatctgtccaagggcctttcaaatgtg

SEQ ID NO: 463876 - DNA, 122 bp, Homo sapiens
tgatgaggtaaatgagtctctgccatgatggccgggagaagccaggacagagtatcagatcgtgtttcaccaggaaaacaaggttgatttactgtgttacacgagggtgaagtggacccagc

SEQ ID NO: 463877 - DNA, 122 bp, Homo sapiens
tcccccgcccactaactgggcccgcccatctcccgccaccccaatggctcatatggctgccgctcatttgatgagtctcatccattggttagaatggtgtagccattctggctgagagcccg

SEQ ID NO: 463878 - DNA, 122 bp, Homo sapiens
ccgatcccgctctttgcacctcatcagggcaaggggcaggctcgggctggggagccggcgcgggcacggcggcagcccgccgagggggacgcagggcacgtcgccccgccccggcccgcccg

SEQ ID NO: 463879 - DNA, 122 bp, Homo sapiens
attggtgaggtcctaggggtcagactcacagacggggaagacactggcatctgtgaacaccgaatgggtgtcaccaactcgtacatcaacaagatccaaacagtgtcagggaagtggcaggt

SEQ ID NO: 463880 - DNA, 122 bp, Homo sapiens
gcgtggcggtaaaggaccgcaggtgtcgtaaaagggccgcagtggcagcgtcctggccgacggctagtagcccattttggataccgtcctcgctgcggaaagttggggcaacctgttgctag

SEQ ID NO: 463881 - DNA, 122 bp, Homo sapiens
aggatcgggctctgggggcgtgggaggccgcgagtccagcgaccggggcagctggggcgacgcgggtggctggagcgagggctgcccggacagcggcggcggtgaggagtcatgcaggcttg

SEQ ID NO: 463882 - DNA, 122 bp, Homo sapiens
cagggtaaggcacaggcagacttggtgtttggtgatggagctttctcactgtctgtcacacgggggaaggggcggggggactctggggtcccctctataaggatgttaatcccattcacgag

SEQ ID NO: 463883 - DNA, 122 bp, Homo sapiens
gaggagcatgcaatctcgtgttggcattgatctcctctcttggcatccggggtttgagatcgcggtgaaaactcacggatttaaggcagatagatcagattcggggttgaaggctccccact

SEQ ID NO: 463884 - DNA, 122 bp, Homo sapiens
ttccctgggtcccgccgcccgagcgtcttcgcgcgcgccgcagcctgggcgcccggccctcggaggtggctccgcccgcaccacgccccctccggctggtcccgcccccccagccggcaccg

SEQ ID NO: 463885 - DNA, 122 bp, Homo sapiens
aggaggggctggaggagctgggcgaggaggcgggcaggacgggcctgacactagggacctcgggccccgggaatgcctctgggggggcgtgtacacccgttgctcccaggaggcacacactg

SEQ ID NO: 463886 - DNA, 122 bp, Homo sapiens
ggtgatccgcccgcctcagcctcccaaagtgctgggattacaggcgtgagccactatgcccggctgtggttcatcatcttaatgaggctttctactgaaattcaatccatatcctccgagtt

SEQ ID NO: 463887 - DNA, 122 bp, Homo sapiens
ttcaagaaacaaaataataattgcaattaaaaatgaaacactgccaaattcttgagttgccgtctagggttttagtggtttggttatttgtatcttcattacttctacactctggatacaga

SEQ ID NO: 463888 - DNA, 122 bp, Homo sapiens
acgcctgtaatcccagctactgggaataatgaggcataagaatcccttaaacctaggaagcggaggttgcagtgagccgagatcgtgccactgcatgaaaggggagactctgtctccaaaaa

SEQ ID NO: 463889 - DNA, 122 bp, Homo sapiens
aggcagtccctgcatcctggacaagggtgagtgtggcccacatctcaacagccacatcctcgtcttgctgttgggatggacagatggacaactccgggccgcaccctccaccccaaccccag

SEQ ID NO: 463890 - DNA, 122 bp, Homo sapiens
gaggagcaggctctcccttgcaaatatttctgtcctccttttaatcctaggaaaagaaagcgtgaccccctcacactggcattctgatctggggtcatctcggtgacaggcctagaaaagaa

SEQ ID NO: 463891 - DNA, 122 bp, Homo sapiens
gcacattcagcagctaactccacatcaccaggtgggcacctgacacctggagggcaaatgcggggcagtgcccaccctcccttggtggagttttcacaggtgatgtcagaaaaataagaaca

SEQ ID NO: 463892 - DNA, 122 bp, Homo sapiens
acaggtgctcacaaggcctcccatagaccccagcactaacccccctccaatccccagcaccggggctggtgaagggactgcagacaccaagactcatcctggctccacatggcctcacccct

SEQ ID NO: 463893 - DNA, 122 bp, Homo sapiens
cccctatctcatgtgccttggtgaattttcagctgctgcaaattgagcagccaggtggcacgctattgatttaaaaggatttcccaggtgctacaaagaagagttaatgatcttttaacctc

SEQ ID NO: 463894 - DNA, 122 bp, Homo sapiens
cccctgcctctctcccaggacctggccagggctctaccagaagactgatcctgctggagtcgatttgatcttgggaagggagctattggactgttctctggccatcctcacactctgctgga

SEQ ID NO: 463895 - DNA, 122 bp, Homo sapiens
gtgccccggctggccccctccctcgccccgcagcactgcccctcctttcacagcaacccacggcctcccccgcgcttgacccagctggcgagctgccccttatacctggatccgcccctcgg

SEQ ID NO: 463896 - DNA, 122 bp, Homo sapiens
ccctaccaaccctcagaaccctccctcccagccaaactgcctgttgcttgccattccagccgattcacagcaattcgggagagtcctaacctgggagtctgctgggtgaccttgggcaagct

SEQ ID NO: 463897 - DNA, 122 bp, Homo sapiens
aaattttaaaattacttaatgtagtaatttaatgtttgcagtatgcaagggaatgtattacgtactggaaggagagaggagacaaacaccagaccctgtactcaaggagtactggtagtatc

SEQ ID NO: 463898 - DNA, 122 bp, Homo sapiens
tcatctacatcgccacagtggtatgtgacgcctgcgggactcccggctccttagggcagccgggagacaagttctgtaacgtgaatggaacaacttacaaagactagtggatcctgaggtca

SEQ ID NO: 463899 - DNA, 122 bp, Homo sapiens
gaggctctgaggctgcaacagtctccctcctattgaagctagaacagcaccccgagcctgcgccataagtgcccccagaacttcagcgcccaccatggcgcacaaggccggtgcccagcgcc

SEQ ID NO: 463900 - DNA, 122 bp, Homo sapiens
gcatcccaagcccttctaaatcgtgcggcctgagtgtgacggccaagagcggatgcagcccgggatcgcccgcaccttcccgtgggcggaagcgcaggagccggctggggagggggcgccct

SEQ ID NO: 463901 - DNA, 122 bp, Homo sapiens
ttcccccttgtccctggaggccccagtgaggccctgcggtgcctggacggcttcccgccccgtttcttacctggacccaagagccccaggagatgtggcacaacgtccatgttgcgattcgc

SEQ ID NO: 463902 - DNA, 122 bp, Homo sapiens
tccgcatcgtctcccaaaacatttctcagaatgtgcttccccagacgtccctcaccagggcgtctgcagattcccagatccctgagtccgactttttcctttcggtaattcttaatacccag

SEQ ID NO: 463903 - DNA, 122 bp, Homo sapiens
tctcatctaaaacatggttggtcaacaactttctgatttcctgatacacattttattaaccggctccttaaatatatccatgttgcatatcatgtttgacatgctttcattgtagcttatag

SEQ ID NO: 463904 - DNA, 122 bp, Homo sapiens
acgcggggctgagcgcagggaaggcagcatcacggagttcgctcggctccacagaacacccgtgttgctcgcggagactttttgtttttgtgcttcttatgaagaggcaggttttctttctt

SEQ ID NO: 463905 - DNA, 122 bp, Homo sapiens
gcatgtggaggcttagaatagattcattggcagctgtaattaaggttgtgaactgcaccacgatgctaaaaaaaacaaattctctgcagctgttttactgactgagaaattacccctgtcgg

SEQ ID NO: 463906 - DNA, 122 bp, Homo sapiens
cagcccagcaaggatccagaacagtccttgtaataatgaggccgaactggccccctggcccgcccccggccctctgcagccccgcacacacgacactcgcgatgtcgccctctcgagctcat

SEQ ID NO: 463907 - DNA, 122 bp, Homo sapiens
gtgtggtggtatgtgacccagcctgtgtttgctcctggggcaagcattccagggtgtttacgcttttgtttgttatatctacatttctcatgttatctttctgtctttttgataggatatta

SEQ ID NO: 463908 - DNA, 122 bp, Homo sapiens
ctagctaggcgctcacagaatacgcgctccctccctcccccttctctgtcccccgcctctcgctcaccccggcccactccagcggcgactttgagggattccctctctggcggcctctgcag

SEQ ID NO: 463909 - DNA, 122 bp, Homo sapiens
tgtgctggccgaagcagtggtgcctctttgaactctcgggcatgccggggcttttggaaacgctacccggccgtcttccgagctccgctgctggtggtggagttggcatctcagttcgcagg

SEQ ID NO: 463910 - DNA, 122 bp, Homo sapiens
aagaagcaaaatcagaacttagcaacgaccttcctcgctgggaagacctggtccccaggacgatgattcctctcatgacaaagaaaacacccaggtggcttgagaggaaggagaaaggccac

SEQ ID NO: 463911 - DNA, 122 bp, Homo sapiens
cgggcatgggtgatttagggaaaggcaacactcaggtgggaaaacagggatacaaattctcgctttgggctgcagtttcaggcttttcagcttgagggtggggttttcaccagggacctgcc

SEQ ID NO: 463912 - DNA, 122 bp, Homo sapiens
ctgatctcgaactcctgacctcagttgatccacccgcctctgcctcctggagtattgggacgacaggcttgagcccccgcgcccggccgtgtgtttcataactttctttgctttacatgtgc

SEQ ID NO: 463913 - DNA, 122 bp, Homo sapiens
actgattcatggcagggagccgggctctcggggacccccgtgtccctcccccgcgcctcccgcccaggaaaggctgcgtgaggcttttagacccaggatccgttccaagggaccgctgcccg

SEQ ID NO: 463914 - DNA, 122 bp, Homo sapiens
gtgggattggctctgggaagcagcttagggcctggtccaggtggcccaggctgggggcatcgcctcgaatgacacccaccgccctcaggttctgccaatccccgtgcccaccgggtgggcgc

SEQ ID NO: 463915 - DNA, 122 bp, Homo sapiens
tctcgtggaggggaaggtggagcccacacccacacctcagcgagctggagagggagttttcgagggggaaatgcaagcacattctccagcatggagtccctagaggcagtgcattttaaacc

SEQ ID NO: 463916 - DNA, 122 bp, Homo sapiens
gagtgctttcaatgggtccagctgccacttgtttaaacaagcctgactccccccctaccccgcccttccagctggggagaatttgctctgcaagaaaaacagatctgcgctgcctccagcag

SEQ ID NO: 463917 - DNA, 122 bp, Homo sapiens
acccaaggcaggaggagccgactcctttggcactggacccagctttatccttgcccaaggcgtgggtttagttgtgtcctccaagacctccctggtccagatggttggtcacatgacaagtt

SEQ ID NO: 463918 - DNA, 122 bp, Homo sapiens
atgggaaatctgggaggacgaggcttatgggggcctggagggtgtcaccagcctcagctgcggacgtcgtctccactccccgctaacccctaacagcccttcctcctcctttccgtgctcca

SEQ ID NO: 463919 - DNA, 122 bp, Homo sapiens
cgcctcccgggttgaagggactctccggcctcaggccgcggtgttcttgtaaattagaaccggcctatgcgccaagcgcgggtctcgcggctgcggagagaggcccagcagggggcggggac

SEQ ID NO: 463920 - DNA, 122 bp, Homo sapiens
cctggctcgcccgcgggcggatggctccgggtctctgctgctgaggatgtggctgccgggcggaggtcgtccactcccctgggcctttctccgcgagccctcccacgccgcccgctcctctc

SEQ ID NO: 463921 - DNA, 122 bp, Homo sapiens
taaaaatcagtgacatgattttctatgaagatgtctaatgtttaattttccaaagttctacgtaatccacaaggagagacgtaataaaatggatatgatttaacaggagcggcttcatgatt

SEQ ID NO: 463922 - DNA, 122 bp, Homo sapiens
aagcccacactggtgaggctgcttagagtgaagtacagtgccgcgatgtaggcgctgcgccgtgatgggccgcccaccgagccattgacatagggcacctccagacgcttgcccaactcatg

SEQ ID NO: 463923 - DNA, 122 bp, Homo sapiens
agtagggagattatatagggggttcgatcttctccctgccccctccactcgagatgttcccgcaaattcatcggagaagacctgagcagactgatggcaggaactgcgggacagagggattt

SEQ ID NO: 463924 - DNA, 122 bp, Homo sapiens
ttacagaggagaattctgcctaagccaactcgaaaaagccgtacaaaaaataagcaaaagcgtcccaggaggtgagtattttagtagtttcagaaatgtgtgtacccctcttattaacaact

SEQ ID NO: 463925 - DNA, 122 bp, Homo sapiens
acgcgctggtcacaggagctggcggaggacgctgcggagacagagcccgagggttgagagcggcgacgcggccaggggctccccgcggaccccgcgtcacccggcgggctcggattcgcaac

SEQ ID NO: 463926 - DNA, 122 bp, Homo sapiens
tgtctgtaatgggtcccggtttcctgtaacccgtgtatgtcccgtgtctgtaatgggtcccggtttcctgtaacccgtgtgtgtcccgtgtatgtaatgtgacccggtttcctgtaaacccg

SEQ ID NO: 463927 - DNA, 122 bp, Homo sapiens
gacataagtgtgcctaagaatggaagtaagtttcatgagaacataggggcctgccaaccacgtgaagttcctgggtgttcagtgatctggatccctgcaaaatgaaagacaacttgctgggc

SEQ ID NO: 463928 - DNA, 122 bp, Homo sapiens
caatggttgatgtcaggattttgcccgtaagacaggtcgaccaaggcctttgtaagccaccgatttaatgtttcctagctttaacagcaaacactaaaactgtaggagatggccttctctag

SEQ ID NO: 463929 - DNA, 122 bp, Homo sapiens
gcggagcccctctgccaggccgtgacctcgtgtgggaactgaggagtgtctctgcccccccgccccatctgagaagtaaggagcccctccacccagcagccgccctgcctgggagggaggtg

SEQ ID NO: 463930 - DNA, 122 bp, Homo sapiens
ctaagtgctttacaaatacagcatgtccccttagttcatcctcccaacagccctttgatgcgggtgatcttattatccctattctcctggcatataatcagcactcagtatatggcagttac

SEQ ID NO: 463931 - DNA, 122 bp, Homo sapiens
tggactaaagagtctggtttcaaattctagctccactgtttatttactagttccattcaccgtaacacatcaggcaaattaacctctctgtgcttaacatttctttatctgttaaatgtgca

SEQ ID NO: 463932 - DNA, 122 bp, Homo sapiens
atgcctttcaaatgaacaggtctgtgtcgctgctccgggagcgcctgcgctcacataccccgcggtgcacagttaccaaccagatcctaccacgccactgcggacatcgcggtttccgggaa

SEQ ID NO: 463933 - DNA, 122 bp, Homo sapiens
cgggaatgctaccagagacctgacacttcatcagaccgccacacagcacatggtgaccaacgcgtccgctgttccttccgactgtcccagtgaagacaaagacctcctgaatgaaaacgtgc

SEQ ID NO: 463934 - DNA, 122 bp, Homo sapiens
caggctcaggaccgcctgggagtggtgcccatttgcatctccacagtgaagtctgtgtgccgcggacatgaggtgtgcccgggggtgcccaagaggcgctggtgcccccagccgctggcagt

SEQ ID NO: 463935 - DNA, 122 bp, Homo sapiens
ggggaacccgcaggggttgggggcaggtttgtctgtcccagagccccaggctggtgatgacgcctcctggggataaacctcatctctctgttgtttaccccatgtgcggtgactttgtcatt

SEQ ID NO: 463936 - DNA, 122 bp, Homo sapiens
gaaggaagcaactgacacaaataacctactcgacgaggggcagagcctccctcagcaaagcgtcccactcaggaaacggggacgaggggcagagcctccctcagcaaagcgtcccactcagg

SEQ ID NO: 463937 - DNA, 122 bp, Homo sapiens
ccaggcagcgcgggtgcagacctcgaagagaacaaaggccgggcaggtgggagggaggggcgctgagcccccggcccgtcctcctaggcaatgctcgtctgtctcggctccgcggccaccgc

SEQ ID NO: 463938 - DNA, 122 bp, Homo sapiens
ccctcggcgggctgcgcagagcgcgggagcggtttggggctgggcatgctgggagcccctcgggcaacggccgccgccgccacagccacacagccgccgccactgcgtccgtccccggtgag

SEQ ID NO: 463939 - DNA, 122 bp, Homo sapiens
taattgggataatttaattaacaagattgactagaagtgaaactgcaacactaacttccccgtgctgtggtgtgacctgagttggtgacacaggccacagaccccagagcttggcttttgaa

SEQ ID NO: 463940 - DNA, 122 bp, Homo sapiens
gcgggggagggccccgctggaaggtggctgggaaaagctgggtgcaccgtggaggtcctccgccctccggggatccagcgcgccttagctctcgtggccgctgccccctctcccagacccgg

SEQ ID NO: 463941 - DNA, 122 bp, Homo sapiens
gcacgagagactggatgtctgcagactccctcacatctctccccctcacctacagggctgcgcttacgcctaactggaaaccaggtgacccgcaagagggagggagaggagcagaaggggct

SEQ ID NO: 463942 - DNA, 122 bp, Homo sapiens
caaagacacgcgagctgtccacctttctgggctgcaggggtctgcagaacctcggaacctcggaggggctctctgtctgcttcagcgtctctttctcaagtgactgaaagcagaggctccct

SEQ ID NO: 463943 - DNA, 122 bp, Homo sapiens
aataggtctggagataagcaaacaacgcctcctttctggaaactactccttcatcccagacgccatgactgccactgagaaaatcctcttcctctcttccattattccctttgactgcctcc

SEQ ID NO: 463944 - DNA, 122 bp, Homo sapiens
aagtggggcaatcacgctgcatacgccagacactgacaccataaggcacagccacaaacacgattgcagtttcttaataatggccagctattcatgtcactcaagctttgtgtgtttggaat

SEQ ID NO: 463945 - DNA, 122 bp, Homo sapiens
gctgccaccatcgctgttgcccctgccattgtttcctccaacacggctgttcttgctggacgccttcccccctctacccttcttccccaccacagctctccctttccctcccgctctcctta

SEQ ID NO: 463946 - DNA, 122 bp, Homo sapiens
tggccaggctggtctcgaacttctgaccaccttggcctcccaaagttctgggattacaggcgtgagccaccacgccctgcctgagtcactaaattcttacactgttccctcctatgttagtc

SEQ ID NO: 463947 - DNA, 122 bp, Homo sapiens
aatctagtgcaatcagcctatcacatctaagctgcttttgccagatctgatatctactcccgaccttaagccaggagactttgtaaacttactaggttataataaaacttaagaactatcga

SEQ ID NO: 463948 - DNA, 122 bp, Homo sapiens
gtgtccagccagtgtaggggtcaagggaccgcttgacgagaccaacgtaaattgaagaggcgtaaggagatgaggccaaagaggaaaggggaccaggtcacgtagaacctcgtagaccactg

SEQ ID NO: 463949 - DNA, 122 bp, Homo sapiens
gagctctgcatctgtagattcagcaacagcagatggaaaatattcagaaaataaattggacggttatgtttctattgaacatgtgcagagtttgttcttgtcattattccctaaagaatcca

SEQ ID NO: 463950 - DNA, 122 bp, Homo sapiens
gggggctggggggacacttccctgtccctgccggtgggtccctcattagcggcccattaacgtgcatgacttagaaattggccattgggctgtgaaattccaggcaatggggaaaacctctt

SEQ ID NO: 463951 - DNA, 122 bp, Homo sapiens
agtcgcagagctccgcctcttagaaaccacatatcccaggaggcaatgcgcaggggagcacgggtaagagggcaggtgttagaatcgctggaaaggcgggcgccctttgtttcaagaccatt

SEQ ID NO: 463952 - DNA, 122 bp, Homo sapiens
tgtgtgtgtgtgtgtatgtgtgtagcgggagatgtgggcggagcgagagcaaaaggactgcggcctgatgcatgctggaaaaagacacgcttttcatttctgatcagttgtacttcatccta

SEQ ID NO: 463953 - DNA, 122 bp, Homo sapiens
tagagatggggttttaccatcttggccagggtggtcttgaactcctgacctcaggtgatccgcccgccttgaccacccaaagagctggaattacaggcgtgagccaccacacctcgccagat

SEQ ID NO: 463954 - DNA, 122 bp, Homo sapiens
ccagcttcaagcccgacagcttcaaatgccgcagcttcaaacacgcgcggcagcttcaaacgcgccagcttcaaacagccttggggcagccatcttgcacacgctccaaggagcacaacctc

SEQ ID NO: 463955 - DNA, 122 bp, Homo sapiens
cccccatctcataatggtcctccacgtcctcctgcctgaacgtggacatggcggccggtccgccttccagcagcttccactccagggaaagtgcagtcaccgcagcctggagataggacctc

SEQ ID NO: 463956 - DNA, 122 bp, Homo sapiens
gatggagttcgcttaggcgaacctcgggaaggcagtcttggtttcctgctaatgttttgccggtaacaggcagtagtcaatcccagactagctttgttggtttttattcctcccctctttac

SEQ ID NO: 463957 - DNA, 122 bp, Homo sapiens
gacctgtcctcgacatcacaagggcaccacttttggggagactcaccggcacaccgtccgcgcactcctgaggctggattcccgcgctgcctccccggcgatctgtctgagatttcttgctg

SEQ ID NO: 463958 - DNA, 122 bp, Homo sapiens
gcggccctcccagactgaccggcgcgagcatgctcagtccccgcggcggggctcccctctcgagccaagaccccaggcctcgggcaggaaaagggtccctgcagatatccgggggcggggcg

SEQ ID NO: 463959 - DNA, 122 bp, Homo sapiens
tagagaatggaaggtatgactgaaaggtttctgtgctgctgggctgcccttttcccactgcgttagctagaaagagcagccttttttggggattatttttaatctctgccaggtggcattta

SEQ ID NO: 463960 - DNA, 122 bp, Homo sapiens
gaacaggatcagagctgcaggtttagtcaccgaaatgggggtgggggcagcagaacccagcggtaagaacaggccacccgccttgctcagcacaagggcaagtgcacaaaggccggaccgca

SEQ ID NO: 463961 - DNA, 122 bp, Homo sapiens
cctcgttcagtctcctctggagagagccgccaaaccctttgctgatgagctgagactgaccggggaactgtgatctcggatgtggttgaggatcaaaatcaaaattatagtcgactcttaaa

SEQ ID NO: 463962 - DNA, 122 bp, Homo sapiens
ggcagcatcatcaggatgaggctgagctccccaggggaccactttgaaagtggcaacgctcgcctgggcagtgcgggttctgtttatttgttagagaaacccgccggcccggggcgcggcgg

SEQ ID NO: 463963 - DNA, 122 bp, Homo sapiens
ttccccgcccctcggcgtccagacagatagacagacgacctgccccgccccctgcgccaccgactgactcagtgacctcggggtcgttaggcctccacgtcctcgctggagctgcggacctc

SEQ ID NO: 463964 - DNA, 122 bp, Homo sapiens
acaaggacgaaggccttaggttgcgcaaactcggatgtcactgaagtttttctgcctttgcgctgcaaacgtgtctcacaaatgtgaacaaacagaattcctcgggcgtcgcccgttcgccg

SEQ ID NO: 463965 - DNA, 122 bp, Homo sapiens
cggcggggagggcgccttccgcccgctcggtttctttcttccccgctggctcccggagaccgcgttatagagaactgccccctcgctgccccaataccagcgccggggccgcgagcccgccg

SEQ ID NO: 463966 - DNA, 122 bp, Homo sapiens
cgcattttattttcccaattcatgtttttatttttcaataacaaggatagtatttttaaacgagagaaaaataaacatttaaaagtccttaagaggctgaggatggagggcgccttggacgg

SEQ ID NO: 463967 - DNA, 122 bp, Homo sapiens
aacgaaaaatgctgccaagacatgcatctgctccccaccccatataggaggggatatatacgtaagcctgaaggttcctgattaactacagaaagagtgccccagccttaagcattgttaga

SEQ ID NO: 463968 - DNA, 122 bp, Homo sapiens
ccctctctagggtttcctggtgggaatggctcttggttatctcagtggcataaatgctagcgttctctgcaaagcagggatcttgatgactaccaccacatggctgatactaattgcctcaa

SEQ ID NO: 463969 - DNA, 122 bp, Homo sapiens
tcaggttatagcatatctgcaggatccttaaggacaagtacgttgtgatcttgcctttcccgtatcccaactgggtagacgtgctacatgagatactttcagcagccttacaaacgtttctt

SEQ ID NO: 463970 - DNA, 122 bp, Homo sapiens
aggctgggcagaggggacagtcatctttgtggaggggtggggcatcccaagtcagcttctcgcgggcctggctgtcggagggcacggccgaacccttgcccctcttggcgtacgtgctgctc

SEQ ID NO: 463971 - DNA, 122 bp, Homo sapiens
acgtggccgtcctcggaagtacccagtgagcgctcccatggctccccctgcagttgggggcggggagccctgtgcagctccttgttgctgcctgccccaggaagagacagtggcctgggttc

SEQ ID NO: 463972 - DNA, 122 bp, Homo sapiens
cgggaaacagtgatttggggtgatctgaaataaatacccttccctctgccagggcctgcccgcctcacctgccctctgccaggacctgcctcactcgccccttcagcacctaacgcagagcc

SEQ ID NO: 463973 - DNA, 122 bp, Homo sapiens
ccggcgcaaggacccggtccccccggcgccgtacgtggagtgagcctgcggtccgccccgcgcgctccgattggctctggggcctggcccgccccttcccgacactgtcattggcctaggca

SEQ ID NO: 463974 - DNA, 122 bp, Homo sapiens
gaaacgacaagaacacaacttctagataatgccaccttgcagaccgatgctacttgctgtcgcctcacccgtgccctggagaagggctcacggtggccatctgcatttagctaatctcagtg

SEQ ID NO: 463975 - DNA, 122 bp, Homo sapiens
cccccacccccagctggaggcccggtccacccagccagccagcccagcactcagcatccccggcccacccagccagccagcccagccctcagcatccccggcccagtcacccagcttctcaa

SEQ ID NO: 463976 - DNA, 122 bp, Homo sapiens
ctgggaggggaccgaggtaagagtggctcttcagagccaggtgaagagtctgtggcctaacggaaacagaaaggagcgcccccaacccccactcctcttggctcatcactagtggccctgag

SEQ ID NO: 463977 - DNA, 122 bp, Homo sapiens
tgccgttgctagcccgtggctgcaggccccacagcggtgcctggccagaggagaatggggcgggtggcgctcactctgaccacccccacccaccacagagcagaaccccccgccccgtgttc

SEQ ID NO: 463978 - DNA, 122 bp, Homo sapiens
tattgttgaagtaaggcagctaccatgcccaggacttaggcccccttgcaactaactggtcgtggccatatgactaatcttaccaattgaatgcattactctgggatagagttttatataaa

SEQ ID NO: 463979 - DNA, 122 bp, Homo sapiens
tttcttcttttgagatagggtcttgatctgtggcccagctgtagtgcagtggtgcaatcacggctcactgcaacatcaacctccccaggctcaggccatcctcctacctcagcctccccagg

SEQ ID NO: 463980 - DNA, 122 bp, Homo sapiens
taaagggctttcccgtcaccactcagcaagtcagaggagcttgagaactactgagtgacccgtatagacagcccccgaccaccaacagaggtgtgcctcttagtgaaggatggggaccttgt

SEQ ID NO: 463981 - DNA, 122 bp, Homo sapiens
tgggtcgatagcaaggctgcggtgatctggctgacctgagaactgcgtcaaccggaacctcggccaaggctgggcttgtgctcagcagttccggctcccacctcactgcactgctccatcta

SEQ ID NO: 463982 - DNA, 122 bp, Homo sapiens
ggctttattcaaaagaaacagttgaaaacatgggactttttctacccaatgcccatttcacgactcctctgagactaattgggaaacggggaaattcttggaattttttttttaagaaactt

SEQ ID NO: 463983 - DNA, 122 bp, Homo sapiens
ccctaccacccccatggccacagcaatgcattcattcaaccaacatttcttggttggtcacggtgtaagtgctgcctgtaatcccagcactttggaaggccaaggcaggaggatggatcact

SEQ ID NO: 463984 - DNA, 122 bp, Homo sapiens
tgggcaacatggcaaaaccccatctctacaaacaaaaaaaattagctggctgtggtggtgcgcgcctgtggtcccagctacttgggaggcggaggcaggagaatcacctgatcacccaggag

SEQ ID NO: 463985 - DNA, 122 bp, Homo sapiens
agtctcactctgtcacccaggctggagtgcagtggcacgatcttggctcactgcaacctccgaaggccataggatgtttgggtcattccctggggagtcctgtcaggccaggaacgagggga

SEQ ID NO: 463986 - DNA, 122 bp, Homo sapiens
caaactcctgacctcaggcgatctgcctgctttggcctcccaaagtgctgggattacaagcgtgagtcaccgcgcccagccacacatctgtgctttgactctggggtatgcctctgtgtgtc

SEQ ID NO: 463987 - DNA, 122 bp, Homo sapiens
gctccgccattcattcattcagccagtcggttggtcagtcatcttctcctcgttgcaatccgaccaaggaagcctccgcaaccgccgccgccaccgccaccgggcgcaccatcgccacctcc

SEQ ID NO: 463988 - DNA, 122 bp, Homo sapiens
gaagctgacctcagaatccagtgattccctggttctacccgttgaaccagacaagaatgccgacctacaaagattccagagagactgtggagatgcaagccaagagcagcatcagagagacc

SEQ ID NO: 463989 - DNA, 122 bp, Homo sapiens
ctgcgcggtccagacgagggtttcaggctgcaaagcgggaaagtcttgggggccgctctgcgctccaagacagacgcccacaatctcttctacgtcgtgcaacattcaagcaggcggcctcc

SEQ ID NO: 463990 - DNA, 122 bp, Homo sapiens
gtggggctgggctggtggggccactgctaccgactaagcagtacgggccgcctggaagaccgaaggcggagttcgctgatgcggaagccaaggcacagggcaataaggatccgcgccatttc

SEQ ID NO: 463991 - DNA, 122 bp, Homo sapiens
aggttgtggggatgggcaaaaatgctcccacacttggctccctggcagcctaggtatgtgcgctgggagaaattctttccctgcctcaattttctcaccagtaaaatgggtccagttgggag

SEQ ID NO: 463992 - DNA, 122 bp, Homo sapiens
tgcgaaactggtcttgacgtttgcttgacttgagggggccccacctggtgcccaagcccacgtaatgaactactaccaaccacaaatacttgaggcaagtccaggttccctatgactcaacc

SEQ ID NO: 463993 - DNA, 122 bp, Homo sapiens
aagtccctggggctcagcctggacatccagctccctttgttcctctcccagaagtggctgcggtggaaaattacccagaatagcggcgccagaagtcataggggtcgccaaaccacatctcc

SEQ ID NO: 463994 - DNA, 122 bp, Homo sapiens
gttttaagcagggagtgacttgatcagacttacagtgcaaaatgatcaatctgactgcttcgtggagaatggattgtagaggggatgtggggagaactacatcagtccaggcaggagatgat

SEQ ID NO: 463995 - DNA, 122 bp, Homo sapiens
gcctcaagtgatccgcccgcctcggcctctcaaagtgctgggattacaggcataagccaccgcctggcctactgcattttaattatgcattcatcagtcatttggattgttttcaccttttg

SEQ ID NO: 463996 - DNA, 122 bp, Homo sapiens
attgaaataaatacaatttcaaattctgctgccccattaaagattgcttttatttatttgcgggtttgagatgaagaaatagttggaagaggctggaaataggaactgagactcgccttctc

SEQ ID NO: 463997 - DNA, 122 bp, Homo sapiens
gagattctggagtcagagagaccagggttctaatcctcggctccacttacgttttagctgcgcaatcccaggcaagtaacttaaccaccctgagcctcagtttccttttccttagaataatc

SEQ ID NO: 463998 - DNA, 122 bp, Homo sapiens
gaaacgaaaattaacccagcccggcgccctcacactcgtccctgggtggtcatgctctgacgggctgcctcaagcctgtctgctgcctgtggccccagagtcacacaggcccggccacaagt

SEQ ID NO: 463999 - DNA, 122 bp, Homo sapiens
agctcggattataggcatgcaccaccacgcctggctaaatttttgtatttttagtagagacggggtttcaccatgttggtgaacacaaagtatttgagagctggtttaatatacagccagct

SEQ ID NO: 464000 - DNA, 122 bp, Homo sapiens
ctttaggtgatttgcatgcactgtaaactgtgaaagccatcagtgtagtggaaggagcatcgaatttagagtagagagacatggttttggaccctggttcctgctttccttgtttcatctgt

SEQ ID NO: 464001 - DNA, 122 bp, Homo sapiens
ccgcctgcctctcggtgggagtccgcggtcactctctctcgtgggtggcgtcctctctgccgcctgctactgtggatgtggagggcaggtttctgtggccctaaaaatgggagagagtgact

SEQ ID NO: 464002 - DNA, 122 bp, Homo sapiens
gaaatgtcagtctcatgaagttcaaaagatcgagaatgtttgctatcttggtggagcagccgcagccaagcaagtaacttgtaaaatgaggaatgccatcacccctcgagtgtccatcccac

SEQ ID NO: 464003 - DNA, 122 bp, Homo sapiens
cgccctcgtccgcttccaagcccagcacagacttcggtttctccgcctccatcccctttacgagaagaggagatcaaaaaatattgccctttaggtgctcgtgatggtcctgtgggttcgtt

SEQ ID NO: 464004 - DNA, 122 bp, Homo sapiens
ggcgctgctcgcctggaggcatcagatccttggaccctccccatctgattggctgctacccggtctagccgaactcctctgccttaaccttctgctgcgttcaatacattttccctcgggat

SEQ ID NO: 464005 - DNA, 122 bp, Homo sapiens
ggcaccctcgggggtgaagagggcttaccctgtggggctgggcggccttctccatgaggacggccgtgtggggcctgtgctcccgggactcccggcacatcacgcacagcagcttcccgtcg

SEQ ID NO: 464006 - DNA, 122 bp, Homo sapiens
cggccgcttatcattcacaacctttcccctgcattatttcatttaatcctgagccaacatcgccaggcaggcaccgtgcttattcccatcccacaggtgagaaaacaggctcagagaagcca

SEQ ID NO: 464007 - DNA, 122 bp, Homo sapiens
aatcagccgagaaatccaagctgaatttgtgggatacgaagccctaaaatgaatagcatgcgactttcctaagtcttttaagcagatggtctattttttaatactatgatgaaaatgaacct

SEQ ID NO: 464008 - DNA, 122 bp, Homo sapiens
tctctttggccatctatacttcagccaagccatttaaaaatatttcttgctaacatgattcggctatggaagggacccaaggaatgaatttcaaaggagaaagtctaattagtcttagggca

SEQ ID NO: 464009 - DNA, 122 bp, Homo sapiens
ggggaagcttctccttccaaaacagtgggagcatctcataaaagatgctcttgagacaagcgtgggaagatgacacagtgagacccgactcacggctgggacgttccaagctgggagccaaa

SEQ ID NO: 464010 - DNA, 122 bp, Homo sapiens
ccaaacagcctcaaggaaaaattcagcagctgagccgtgcgggaggcctgggctcaagcccggagtctccttggcccgtccaggccgtcactgaccaaacgctaggctgacgacacggtccg

SEQ ID NO: 464011 - DNA, 122 bp, Homo sapiens
tacacacagagcagaggtttgagtgacatggacactaacccgtttaccgggtgccactggcgatctggccttgtcgaggaaggagggaggctgtgctaatttgctctcccacctgtgtggct

SEQ ID NO: 464012 - DNA, 122 bp, Homo sapiens
cccactgggttgctcactattcaatttttattatcacatcaccaccacgagaaggtaggtcggagagcaatcatttcattctatagatgatgcaactaaggtcccgaggttaagtgaggcct

SEQ ID NO: 464013 - DNA, 122 bp, Homo sapiens
ctgtcagagtcaaaggaaatgcaggaggaggctgccagcacacccacgccccttgcaacgcgttccccatggcagcagccaatgctgcagagaagtgggcatgaccggaactaagtgggctt

SEQ ID NO: 464014 - DNA, 122 bp, Homo sapiens
cctccccgatggccagatcctggaccaccggcggccctgggaggagggcaaccgcgaggacggctatttgctggggctggacaatctcattggcatcctggccagcctggctgagagatgag

SEQ ID NO: 464015 - DNA, 122 bp, Homo sapiens
ccctacgtaatcattacgttttaaatgtttgaggggaaaggtctgcgctggcctccggggcgtggatgaccatgtggcacagccccgtggccgccgctggctctggttctgccatgtggcct

SEQ ID NO: 464016 - DNA, 122 bp, Homo sapiens
aggagagaggagctgtggcgcagagcacgcggagagggacctggagcgcgggagccaggacggcgcaggcagctggggaggccgcggggctgcccagcgagtggagtgcccaagaattggcc

SEQ ID NO: 464017 - DNA, 122 bp, Homo sapiens
ccaggctgaagtcgtgctgcggaaagaaggcgacgtaaagcccagggcaaaccaggaccccgggggcacaacactaacccctggcctgggggaccctgttcagccagagactctctaagcct

SEQ ID NO: 464018 - DNA, 122 bp, Homo sapiens
actgcgtttatgagctgtaacactcaccgcgaaagtctgcagcttcacacctgaagccagcgagaccacgagcccacccggaagaaccaacaactccagacgcgccgccttaagagctgtaa

SEQ ID NO: 464019 - DNA, 122 bp, Homo sapiens
ctaaagtcaccaacttgcccagaggacactgtgtctgcaggggtgtggatgtgatgggggcgcgcctgtactggtgagcgcgatgcttcgcctaggtgaacgggacaggtacacgcgtgggg

SEQ ID NO: 464020 - DNA, 122 bp, Homo sapiens
tcttccttaatttgctccaggatctcaaaccaaaggacccctacttgttaaccttcctctcgtctctgcaggccacaagctattatgctttcacatagtaaccatgcactgatgatttctgg

SEQ ID NO: 464021 - DNA, 122 bp, Homo sapiens
gtatcctaaacaggaaataccaaaaaaatccccctcgctttcgtgacctacaccggtaagcgtcaggatctttcgctatgcgagaaccttttggctctcgtatgtgcgcatgcgtctggatc

SEQ ID NO: 464022 - DNA, 122 bp, Homo sapiens
agttgtgtgaccctgggcaagtcatttactcctcagcctttagatttctcatttttaaagcgaaagggcagggagttggtttatatgatgtctaagatctccagtgcttcaaataaatagtt

SEQ ID NO: 464023 - DNA, 122 bp, Homo sapiens
gctctcggaggggaggggaggccagggcgacccccgaagcaatggcccagtccgctagaacggcactgcgttaaggcacctgggatcaggaagaaatatctaaacaacaacaacagaaaacc

SEQ ID NO: 464024 - DNA, 122 bp, Homo sapiens
tcccgcccccgtgactcgaggcgcagcgtgcgtggtgatcccggcccatggggacttccccgcttgctcctcgccaagatggcggcctcatcagggaggccccaggggccacggctgggcag

SEQ ID NO: 464025 - DNA, 122 bp, Homo sapiens
actccctatgttagcttacaaactcaacgtcacctctaatgtcttggaagcttctggacgcgattttacaagattgctttttagaggaaaagacatggtttctcattcatttttgaatcccc

SEQ ID NO: 464026 - DNA, 122 bp, Homo sapiens
ccgcctgccaagggctgtgtctggaacctgttcatcgcgctccactcagcacagtgagatcgcctcttctgttactcggtctccagggggcgggacctggagccgtatccaatcagggccat

SEQ ID NO: 464027 - DNA, 122 bp, Homo sapiens
ctcgcagtgaaccccaactacaccggtggggaacccaagcggtcccgaacggcctacacccggcagcaagtcctagaactggaaaaagaatttcattttaacaggtatctgacaaggcgccg

SEQ ID NO: 464028 - DNA, 122 bp, Homo sapiens
gggcacagagccacgtgaagggagctgctcgagcgccccggagcctcacctgggaggagacgcaagaagtctcccggtgcgggagcctacagggctgagcgcggagaccgctacgccccaac

SEQ ID NO: 464029 - DNA, 122 bp, Homo sapiens
tagtaggtacgcggcggcgggcgggaccccttccgggccccctcctcgtgctccgcctcgcgacctccccgctgccctccccgcgcgccttccccggcccgcggccctgaccgccccgtgtc

SEQ ID NO: 464030 - DNA, 122 bp, Homo sapiens
ccagagaaggctgggaggttgctcccaggccggctgaggagagaccctcggagccttcaacgcagccaggcggcaagtgggggcagggcgtgggcgcggacacaccccccgcagtgcccccg

SEQ ID NO: 464031 - DNA, 122 bp, Homo sapiens
acaggccacctcccacctcgccttacaaaggactagcaactgcttcccggcctgtcggagcgtcgatcgatccagaagctgctgccaggaggcgcacaccctcccgccctcacatattctct

SEQ ID NO: 464032 - DNA, 122 bp, Homo sapiens
ggtcccaccctagacaagccaagtctcactcagcccccctaaggttccaagtgtcctcagcgcttctggggcacttggtttccagcccaagtaacctagtctaggcctgagtcccagcccat

SEQ ID NO: 464033 - DNA, 122 bp, Homo sapiens
attccagcccttttattccgaccccaagaagaaaacactgccgcccgctgattggctgagcggggctggaaacaggcgtcgaccaatcagcagccagccccccgcccgccccgccgcgagca

SEQ ID NO: 464034 - DNA, 122 bp, Homo sapiens
cagcgcgcagccacagcaaacaggcagcgtggcgctgaggggcacaggtttgctggggggcgtgagccgggagcatcgccagcagcaggctcgcccccctgcgagggcgcgcacggattcgc

SEQ ID NO: 464035 - DNA, 122 bp, Homo sapiens
agaagtggcagtgggggaggcagatccttgtccttcctgggaactcctgttcttagttgtcgagtgtcctaaaccactgccccaccccttgaggaaaccaggagcaagtccgggggattggc

SEQ ID NO: 464036 - DNA, 122 bp, Homo sapiens
gacggcgtgtcctttcctacacatatggagacgcaggccggagcaacggcacacggaccacgcacacgcggcggacgcaccaacgcctacgcagaagagaacaaaagtcgcttctaactggg

SEQ ID NO: 464037 - DNA, 122 bp, Homo sapiens
caacatggggacctgaggagggtgggcttgggctgccccacggcaggagtgacttgctctcgtcctcccgcaggtgagtgggggaccccgtcccggctggatccgtgtggcccgggtcccag

SEQ ID NO: 464038 - DNA, 122 bp, Homo sapiens
cacaactcagagaaaagccacacatcaaactcaccttcagaaaagtcagcttccacttcccgggaattttaagaatagtcagttgtattctacaggtggctgaattcttctgaaaataacat

SEQ ID NO: 464039 - DNA, 122 bp, Homo sapiens
cccagctccggaggtggtgaagaatgaacggtacacgttcagccctgactggtgggcgctcggctgcctcctgtacgagatgatcgcaggccagtcgcccttccagcagaggaagaagaaga

SEQ ID NO: 464040 - DNA, 122 bp, Homo sapiens
aatggtttctggtctgagccgggtgtcagaactgaggcccccgggtatctgtcccagccgcgtgtggcatgacctagccatgtcactgggtagtcttccccaaagcatccacacccacctca

SEQ ID NO: 464041 - DNA, 122 bp, Homo sapiens
ctggagtgatgggaccccagctatccttgttttttaccgccttgtctggcactgtgaccacgcttcagggctgcttctgggggtcttggtccctggatgtgccatttccttgcccttctgac

SEQ ID NO: 464042 - DNA, 122 bp, Homo sapiens
cgctcgccaatttggggcagaggaggaaaagggagaatgaggtgaagccatttaaagagacgcaaaggaaactgtgggttcccgaagagcaccccccaatacttgtccccacccaccttcat

SEQ ID NO: 464043 - DNA, 122 bp, Homo sapiens
agggaaatatttactcagaggtctattcaaatttgcttagtctctgacgttttcctgtgtcgtacaaatccctcgtgcggcaaaagtagtttgtctttactaggccaccgtctcgtcagcgt

SEQ ID NO: 464044 - DNA, 122 bp, Homo sapiens
agaggcaccgcggagggttaacgcggatcaggcgtcctcgagctggcagctgggagacgccgggaggcatgagtgagctcgagccccagttatccaaggaaactcgggctggtgctgggcgc

SEQ ID NO: 464045 - DNA, 122 bp, Homo sapiens
gcctaatctgcagagaaagagcatccaaacctgagtcacaaggcactggggaaaaactcccgaactgagggtagagaaacaaggccaacacccacatttttgcacagatgcatctcccataa

SEQ ID NO: 464046 - DNA, 122 bp, Homo sapiens
tcagacactgttgtaagaatttcacattagtaactcatgtgatcctcacagagaaccccacgaagtgggtaccactagtatccccatttcacagataagataacttagtctcagaacaatca

SEQ ID NO: 464047 - DNA, 122 bp, Homo sapiens
agcagagggtggggccagtggaaagctggaagggcagatgggcttaaagggaggggggaccgctacctctcagggcatcctgcgtttgagctgggaaggggcctgcaatgagacaccctgaa

SEQ ID NO: 464048 - DNA, 122 bp, Homo sapiens
gccaatcagtggcgccagcgtgaaactgtccaatcaagtgcgcagctacagaggaagaggcggcctcttcaatatggcggggcctttgtctcctagcttccgggctctgatcctagttcgcg

SEQ ID NO: 464049 - DNA, 122 bp, Homo sapiens
cgagcggggaggccggaagctccgccgccccacagtcccgcccgctcggccgcggcctcccggcctggtgcccgctcaccttgagctgccctaccagccgcaggaactgcagtagggaccga

SEQ ID NO: 464050 - DNA, 122 bp, Homo sapiens
cagtgattaacactggccttcccctcgctcgcagcaacgccaccacgccctccctccacgcgccatcgcagagatgaggagtggcctcgacctgcctgtgactcgtcttgggccagtagggg

SEQ ID NO: 464051 - DNA, 122 bp, Homo sapiens
ggaatttcctgaccccttgcgcttcccgggtgaggtgatgcctcgccctgcttcggctcacgctgggtgcgcggcacccactgtcctgcccccactttctgacactccccagtgagatgaat

SEQ ID NO: 464052 - DNA, 122 bp, Homo sapiens
ggttgggtgtctggcggaaacgaggctttgcgcacagagggctgggctgctggatcaccacggaattggctgccttgtagctgtgatgagtcggaaggtcggcgactctgatgcgttcctgc

SEQ ID NO: 464053 - DNA, 122 bp, Homo sapiens
gagtctttccttttgaacagactggattctccttctgtgtggctctgggaaaactgccctcgagtcagagagaaaggaaatctgtctcaagttctgaatattgtcactatcaatgaatattg

SEQ ID NO: 464054 - DNA, 122 bp, Homo sapiens
gaatacagctttatattattagatttcttatgtcataatataaaaaaccggtaaacttagcgctgaactattcatgatagttgaaagttttaagctaattcaaaatatgaaataaaccagaa

SEQ ID NO: 464055 - DNA, 122 bp, Homo sapiens
acacaaactgaagaatttagagttgtcacagacactgaaaactttattaatctggaaagccggtttgctgcactacatttgttgccagtccattcctgactcctaccaaattttaaaactgg

SEQ ID NO: 464056 - DNA, 122 bp, Homo sapiens
tgcctaggctggtcttcaactcctggccttaagcaatccttctgtttcagcctccaaaatcgctaggattacaggcaggcaccactgcccccagctcatttttaaacttttttttttttttt

SEQ ID NO: 464057 - DNA, 122 bp, Homo sapiens
aggatgggcgacgggggtggctgacccgggagcacggcagggaggacacccagccaggcccgcgagcagcgccgctcccctcctccaggacgggcgggaacctgcgatgcccccgccgcgtg

SEQ ID NO: 464058 - DNA, 122 bp, Homo sapiens
aggctggcccgtgaccggggcaggcggaccttctccgggagccctgtgcacagttggcttcgcagcaggcctgtgtggtctgctagaaaaggggaggttgcagaagattttaactttgttaa

SEQ ID NO: 464059 - DNA, 122 bp, Homo sapiens
gagacaggcaccgcccctcttccctctgggacgcgttactgacgtatctactgatctttccgaccctgcgccaccaatcccctgcctacatccggaaggggcatggacctgcgcccgggaga

SEQ ID NO: 464060 - DNA, 122 bp, Homo sapiens
tcgctttattgcgggggtctggaacctaacctgcaatatctctgcgttatgcccttatagcgccgggagtgggtgccttccgccggctgtacagagcgccggcaggtggcgcccagcggcga

SEQ ID NO: 464061 - DNA, 122 bp, Homo sapiens
cacaaaatgttatttttgtatcccccagtgccaactgcagtgcctggcacattgcagcttcgcagtaaatataaacttgcttgtgcccattgagattcattcttccatttatttattcaaaa

SEQ ID NO: 464062 - DNA, 122 bp, Homo sapiens
ttcgttcgttctgcagggggaggggaccggcaacctgcccgcccgcacgatgctgttcctcgagtgtgccggatgcacggtctgcactgacaataccggctgaaccatgtgaaacagccacc

SEQ ID NO: 464063 - DNA, 122 bp, Homo sapiens
cgtgggaggcgcgcgccctccccatagactccccggtaggagttcttttaacagcgcatgcgtgcagtgttgcctcgcccaaagaagactacaatctccagggaaacctggggcgtctcgcg

SEQ ID NO: 464064 - DNA, 122 bp, Homo sapiens
ggcgtgtctcagggccggcacagtgacagcctgaccgctgcatcctcaccccccagtgagcgtcctgggttgggaggctcagtacccagagcagcccccaagagacgcctgccctcaacagt

SEQ ID NO: 464065 - DNA, 122 bp, Homo sapiens
caatatcgcctatagttgttggcggttttctgctgaggctgagccgtttgctccagcctccgactaaactcattaagttgggagatttttttcaattggacgggtgtttttaaagtctcgtc

SEQ ID NO: 464066 - DNA, 122 bp, Homo sapiens
ggagccgtgtgtccgtggggagccggctgggctcgcagcacatggctctggaacctgagccgtgattccttcgactccttttcgcgctgctgagcacagaacgattcttgctggctgtgcag

SEQ ID NO: 464067 - DNA, 122 bp, Homo sapiens
gagttatgggaagcgggagagctatcgcgagactttcaaaggcccggcaaaaacaaggaccgcctaggagaaggacgagggtgagggaaaggcggagcctcctcaggggttggcagttgaga

SEQ ID NO: 464068 - DNA, 122 bp, Homo sapiens
atggctccagggctctctgcgtggacatccagcccaaagccaagcactacccggaaagcccgggtgtctcactggctgtcacagctgccagctcagactggtttctgtttgttcttattttt

SEQ ID NO: 464069 - DNA, 122 bp, Homo sapiens
accccctccacgcctccctgtcctatgctcttcatgcccacctcctggggcaaatggcaccggatgcccctgtcttaagtgaacaaatggagactctaaccaccttctgagaatcccagccc

SEQ ID NO: 464070 - DNA, 122 bp, Homo sapiens
actgaagcaactgccaaaccaaagagaagtttttatgctgccagggatttgtacaagtaccgacaccagtacccagtaagagtatagaatgctatgttttaaactgtaaactattttccttc

SEQ ID NO: 464071 - DNA, 122 bp, Homo sapiens
aaagcacaatcgcacaggacagctatgaggcaagacaaagtggctggcgagttcagtttgcggggcggtttcctaaggatcggataagcctatctggactatttaggcaaccagggataata

SEQ ID NO: 464072 - DNA, 122 bp, Homo sapiens
ctgatcgtactttctccacggatgtaagtgtccgggctctagtgggggaatgatactcttcgtgcgaaattcacttttaaaaaaggcttagaaaactgaccaccggctctcagctgcagctt

SEQ ID NO: 464073 - DNA, 122 bp, Homo sapiens
gcatgaagaggcccccatgaggtcaaatagagcttttatgcaattggacaagcgcagacacgcaggatgtgagggtgtttccccagggaggggaggaaccaagaggcgtattctgagccctg

SEQ ID NO: 464074 - DNA, 122 bp, Homo sapiens
aagaaggtgccacccagcagaacccctcttttctcaattcaagcctttaaagagaagctgcgcccaataggtaatgagaacaaagttgcagatatttgaccttgaaatcttaagtttcattt

SEQ ID NO: 464075 - DNA, 122 bp, Homo sapiens
taacctttaaggaaggagaaagccatagtcattgagaggtatctcaagtgagccttgttacgtgttggtaatgttaaatgttttgggtatactgatatactctgcaataactcactgaactg

SEQ ID NO: 464076 - DNA, 122 bp, Homo sapiens
tcttatgtttcgggccttaggtgtaggctactgccttcctttctgccccttctactttatcgacttgttctttcaggttgaaataataaaatgtagaaaggtggaaaaattaaagcttgaga

SEQ ID NO: 464077 - DNA, 122 bp, Homo sapiens
tggaagtgacactgacagggagagcttagaacgccgtggatatcatggaaatggcaccgacggggagagttcagaacaccgtggatatcatggaaatggcaccgacggggagagcttaggac

SEQ ID NO: 464078 - DNA, 122 bp, Homo sapiens
gtgacttcctgaacatcagcttcaatcctccatcattaatgtgaagcaaaacacaaaaaccgccccaatccctcaggattccttggcatccgaaaccagcatctgcacctaaacccataccc

SEQ ID NO: 464079 - DNA, 122 bp, Homo sapiens
aagatcccaatgcctgcctcctcccatgcaacttaacacagtgattcttaaccctggctacgcattggaacttcctggggagctttttaaattattgatgcccagattcctcttgagagatt

SEQ ID NO: 464080 - DNA, 122 bp, Homo sapiens
gcgggggagatggtcatcgagtactctggcattgtcatccgctcggtgttgactgacaagcgggagaagttctacgatgggaaggtgggctcccagtggctgtgggaagacagtgggtgaag

SEQ ID NO: 464081 - DNA, 122 bp, Homo sapiens
agggccgttcccgcagccacagtccgactacagagtgacaccatgggctggagtgaccgccggggagggacggagcctggaaccatcagtgcctggcctcccccaaccctgtgtgggcagct

SEQ ID NO: 464082 - DNA, 122 bp, Homo sapiens
cctcgctcctgcaccaggtccaggaggcgcagacctctgggtttctcagccccatcctgtcgtatcccatcccgcttcccactgctgccctggccatgtccccttgcccctctgctccaggg

SEQ ID NO: 464083 - DNA, 122 bp, Homo sapiens
gcggacagcgccagccccggggtggcgggcgcggggctgggggcgctgggaagaggggtccgctgtaaggccctcccgccgcctcggggccagtctgggtctagccacttcacctgtgtgct

SEQ ID NO: 464084 - DNA, 122 bp, Homo sapiens
cgagtgcccggctggctggccgcaatgccgagcgaaaagcgagcaggcgagcgacagaagcgtttctttaaggagcccctccccggctcctccactccctccctcccgcccgcccgcccgcc

SEQ ID NO: 464085 - DNA, 122 bp, Homo sapiens
ggacctgcggtacaagattcttggtgccaccattgagaactccaggattgtcctggagatcgacaacgcccgtctggctgcagatgacttccgaaccaagagtgagacggagcaggctctgc

SEQ ID NO: 464086 - DNA, 122 bp, Homo sapiens
aggcccgtttgcagccttgccaaacaagcgtggtttgtggacttgaagcattatcctctccggggagcttaagagacatgcactgtctcctcctgccccatcagaatctgcattttcacacc

SEQ ID NO: 464087 - DNA, 122 bp, Homo sapiens
ggaaggcaggaaagcactggcgtggtgtccttaagctttctccacgggagctgggcacctcgttcccattccgacttcttagttttaattaacaaaagggggaagtggtgggggcggggagg

SEQ ID NO: 464088 - DNA, 122 bp, Homo sapiens
cgggagggggaggggtgcgagtgtgtgtggcgggcccctaggggctccagctcgcagcgacgcgcgcaccgtccgcacctcccgccccgccgccacctcccctgcctccgccgccaccccgc

SEQ ID NO: 464089 - DNA, 122 bp, Homo sapiens
gactggacgcttctgatggtgtgatgtgtggtgagattagtgctgtggtcacgtccccaccgtcacgtctccgtttttataaagtgggtccctgggtatgacgtgatgtcacatgaaatgcc

SEQ ID NO: 464090 - DNA, 122 bp, Homo sapiens
acaaagtccggtgaccgctgcccagacacagactggcaataaactcctactaaatccctccgacctcttccggcctggtttctgcaggctcacgcatggtctgcctgcgtccttcagtgagg

SEQ ID NO: 464091 - DNA, 122 bp, Homo sapiens
tcatgcttctatgagaatctaatgcttctgctgatgtgacaggcagtgatgcccacatgccggctgttcacctcctgcgtagcccagtaacaggccacggactggtactggtctgggggttg

SEQ ID NO: 464092 - DNA, 122 bp, Homo sapiens
gactggactagctggatatttcctggtttcattagcatagcccagcccacttccaacacacgcccagaactacctcattaaccattgggattgcagccaaaaacataagactacagtgaata

SEQ ID NO: 464093 - DNA, 122 bp, Homo sapiens
acacatctcttcattgaccggttcatctgcgccctttgcaataaaggggtaaacataagtcgagcgtttctccgagttctgtgagccgagctagcaaattaaccaaacccaaggagagggtc

SEQ ID NO: 464094 - DNA, 122 bp, Homo sapiens
aagggggagcgatggagagaggaagcagcagactctacaaagtctctctgtgtgtgcaagcgtgcatgtgcctgtatttgggaaagtggtgtatgtttgcatggccacatatatgtaaatat

SEQ ID NO: 464095 - DNA, 122 bp, Homo sapiens
aaaataggagtgagacatgttttgctcaggaaaatgcagagcagcctgaggagcgtgggccggtcacttgctatagcagccatcccgggaagtcactgttcatcacggcatgctcctgtcac

SEQ ID NO: 464096 - DNA, 122 bp, Homo sapiens
tgagcacgcaggacagcacgcctgaggagctggccccccgcggagtctccggtcaggcagcgccctcgtcttggatgctgtgaattcagtgacagggaagccggtgttgctggtgggcttcc

SEQ ID NO: 464097 - DNA, 122 bp, Homo sapiens
aaacattgtgctgatctaatatggaatccattctcagctctagcatttgcccccaaggaccgcatagatgtatgatgttccctgaattatcttttcaaaatgcaagtctaggcttgtggttc

SEQ ID NO: 464098 - DNA, 122 bp, Homo sapiens
attggaaacttttataatgttcacgtttaagactctcatactacagagtagaggaaggagcgggtgtgcagagggggtgatgcttcagattaaaactaaagagttgattgaaaattcaagtc

SEQ ID NO: 464099 - DNA, 122 bp, Homo sapiens
gacaaggccatagcatttgcctcctgggagatgtaaatcccttcttgggcatgaaatcatcggctttgagcaaaggggtgttacccagtgagccagtccgtcatcagcaggtgttggagggc

SEQ ID NO: 464100 - DNA, 122 bp, Homo sapiens
gcacacagccgtggcggcgggcggctcgggttatctgagccgcttggtgttgggtggctgcgcccagatctccgggcggcggcggcggcgaaggcgagacgcgttgtcgggccgcggaggag

SEQ ID NO: 464101 - DNA, 122 bp, Homo sapiens
gcccttcagctgcagcacaacccgctggctctgtggggggactccggtcatgaggccaaccgcccactgccacgggtcacgggcatgggccggagaagcgggtcctaccatgcttccaagta

SEQ ID NO: 464102 - DNA, 122 bp, Homo sapiens
cccggttccggagggtattcttgctgtcctctaagctacagaagaaggtggggtggaaagcgctcccaacctgagaaagtgcgaaagactctctaaatccagtagccaatttcctacctgcc

SEQ ID NO: 464103 - DNA, 122 bp, Homo sapiens
gcaggcaccactgagttatgcaacatcataatttctcaggcaaatgtgatcgctgcgtctcgcctgccaaagtgaagagaggtctgaagagagcctgctttcggagacataagtgagcccat

SEQ ID NO: 464104 - DNA, 122 bp, Homo sapiens
agaatacgcctaaccccggaggttcttccctttccattcccggatattagtaacacttctcgcgggaaaatgccgagataaacattggttggctctctgacggccgcggggattgggcgaga

SEQ ID NO: 464105 - DNA, 122 bp, Homo sapiens
caacgggtagagaacgcagggatgcggccctcgccgaagagagccaagaagggaagagcgcgctctccaaattgcttttgtaacttgttttcagtgagcattttattgattcagaatctatc

SEQ ID NO: 464106 - DNA, 122 bp, Homo sapiens
tgaacagggccggagtcgtgggccgtctcgggccagggcaggaaacacttctatgctgttcgggaggacggaggacagacagcgaggctctcaggtcaccggcaccagtggcaccacccaca

SEQ ID NO: 464107 - DNA, 122 bp, Homo sapiens
ctccttccccgctccgcagcagccaagattcacagtctgtctattaatgaaatgcctccccgtctctttcccttggtccatttggcctggacggtcactggtggaccaccagagggagccac

SEQ ID NO: 464108 - DNA, 122 bp, Homo sapiens
ttcatgaatacagtgtttttctttcttttgaattatttctttaggataagttcccagaagcggaatttctggttcaaagggtatgaatgtgtttttttcatgaccctctgcatattgccaaa

SEQ ID NO: 464109 - DNA, 122 bp, Homo sapiens
cagcactggccactggcaggtctgctgaagccacaaccacacggacagggacggctgggccgggcttctctggcactgacactgaacctgcgcgcgtggttctgggtgccctggcagtggct

SEQ ID NO: 464110 - DNA, 122 bp, Homo sapiens
acgccgcggcccccgccgggctccgggccccgcgctggtccccggccgcctcgccctcgccgccccacgcccggccccggccaggccccagccccaccgccgccgcctcacctgggcctcgg

SEQ ID NO: 464111 - DNA, 122 bp, Homo sapiens
gcagccatggagaaagtagggtaagaaagggtggaaaccattcctgaaatactccccacccgccagaactggaaccatgggaagacctggagctggagaggacagcataactgctgggagca

SEQ ID NO: 464112 - DNA, 122 bp, Homo sapiens
gagccggatgcggattactgtggtgccctaggctcagattctgctgagtcactgtgactgcggatttggaaggctgagagtcctggggagacatgctccgtggagacgaatttgtttcttcc

SEQ ID NO: 464113 - DNA, 122 bp, Homo sapiens
gaacccgctgcctccacgcggccgtgccctctggcagcctgggctggagggaggtttgcacggctgctagacatcttccttgcaggatccctggggaattctaaatttcagtcacactctct

SEQ ID NO: 464114 - DNA, 122 bp, Homo sapiens
gctccattgtcatgccttaatcacctcctaaagaccccacttccttatactatcactgtacgttaggtttcaacatatgagttttaggaggactcaaacatccagactgaagcacctcatac

SEQ ID NO: 464115 - DNA, 122 bp, Homo sapiens
aatgggatttttatttcgcgagtcttgtgggtttggttttgttttcagtttgcctaacaccgtgcttaggtttgaggcagattggagttcggtcgggggagtttgaatatccggaacagtta

SEQ ID NO: 464116 - DNA, 122 bp, Homo sapiens
tctgggccccttccctcacctctgggtcctggagtaggtgaactggaagcaactctctcccgctccatgtgacaagtacactttcttgggtcgcaagtccgagccctcccctcctgttcatc

SEQ ID NO: 464117 - DNA, 122 bp, Homo sapiens
acagccttcaatcagccatggctactagttcttagtttctgataacatttttacgaggatcgggtcttgagtaaacggcttgcctagagccacgtgcaatcccacttcccatccgcgttctc

SEQ ID NO: 464118 - DNA, 122 bp, Homo sapiens
acgggcgggtccctttaatgggcgcgccgagccctcctggctggttttcactgctgcctgcgtgtgctctgttcgtcctgcttcctagagttgggggctcctcctccacctgcccaccagtg

SEQ ID NO: 464119 - DNA, 122 bp, Homo sapiens
tgctgcctggaagaaatggggagaggacttggttgggggtccctcccttggtctccctctcggttcattgctgccttctggggaagggagggcctccagtcaccatgcatggtctccatggg

SEQ ID NO: 464120 - DNA, 122 bp, Homo sapiens
tgaccccgtggtgatggctgcggctgcctgatagccctttcatggcggaccggaagcagccgccagggtcatggacacccggaagtcaggctccagacccgtcttgggcagggatctggggg

SEQ ID NO: 464121 - DNA, 122 bp, Homo sapiens
gccgccacacctgactggttttcgtatttttttggtggagacagggtttcgctgtgttggcggggctggtctccagctcctaaccccgagtgatccgccagcctcggcctccggaggtgccg

SEQ ID NO: 464122 - DNA, 122 bp, Homo sapiens
aggattttaattagggtctgcatcctgaagcaggaagcactggtgtcagttcctggaggccgtaaagaagaccactctaatgagtttctaaacccaggagactgctactcccttctggcaac

SEQ ID NO: 464123 - DNA, 122 bp, Homo sapiens
gtggtcagacctggtctctggagggccagccgggggttcccgtccacctgtcagggggttcgacgccactttgagatgacaagtgaggccacctgggcacagcgctggtgtgagaaggaggc

SEQ ID NO: 464124 - DNA, 122 bp, Homo sapiens
agatccaccagatcgacttgatcgtgcagctgctgggcacgcccagtgagaacatctggccggtgggcgtcctgggcagacccgcagcccccgcccgtgcccacgccctctgcgcccgcagc

SEQ ID NO: 464125 - DNA, 122 bp, Homo sapiens
ttggcatgaattaatgtttgtcttgagccataatgtgaggactgtttccaaatgggtatacgtgcatacatacatgtgtttgtgtatgtgtgtgtgcatgtgtgtgtgtaaagacagcattg

SEQ ID NO: 464126 - DNA, 122 bp, Homo sapiens
cgtgcgccgctgcgaacccgggccgaccgcgcccgggagcgccccggaacctccggctggcgcacccagagacaagggcaccgccggtcccagcctcagcggccacgccagacgagcgcctg

SEQ ID NO: 464127 - DNA, 122 bp, Homo sapiens
cggagcttgtagggggcggattctgaaggaggggcttcagggcgcatgcccgggcagctgcgcgagtgaggggtggaaagaggtggctttttactccggggaacggtggcgagtgggggctt

SEQ ID NO: 464128 - DNA, 122 bp, Homo sapiens
caggaagcctgggggctgagcggtcctccgaaaccgagaggcaggtcctgggtgcgccggcggtacagcggagagcgtggagagaccctcgccgcagccatttcctgccctttgtgtgacag

SEQ ID NO: 464129 - DNA, 122 bp, Homo sapiens
gggcgagcaggagggtgggtgtgaggcgggagctggccgcggagcccagacctacccgggcgaagcgggcgagcggtggtttggacgccggcggagacgcgggcgaggtacggagcggacgg

SEQ ID NO: 464130 - DNA, 122 bp, Homo sapiens
ggcggtgaggggcgtgggggcaggccaggagccgagctgaggtgcccaggggctgttgaccgagggacaatgccctgtgtgtctggtggggctctggccggtggcacctccgcctgtggcct

SEQ ID NO: 464131 - DNA, 122 bp, Homo sapiens
ctggttgtgagttgcttcccaggctgcagacctcagatgctgtggcttcctcaggggctccgagcgtccacctaatacgtttgctgggttgcgctcaggactgtgatccctagcagagtgcc

SEQ ID NO: 464132 - DNA, 122 bp, Homo sapiens
cccaagtccaggctgccgcgcaagttcaagagcctttttctggtagctgggagcgagcttcgtctggcactggctctcagggccctgcttgccagagcctttcccgaccgatgaattcaggg

SEQ ID NO: 464133 - DNA, 122 bp, Homo sapiens
ttccacagaagacccacttgtgggcattctctttctgtccgttatcagtgggtttacatccgaaggccggcggcaagacacttgaaccacaaacaccagacatgcaggtgtctcaatggcat

SEQ ID NO: 464134 - DNA, 122 bp, Homo sapiens
tggaacctggacctctgcttcttggcccgctttccactgcgccgggctccgagttaatggcggagagggcagggaggtcctgggccccgcccaccaggcttccaatcaccagtgccccggcc

SEQ ID NO: 464135 - DNA, 122 bp, Homo sapiens
ctgcaccctggagatcccaaacctagccccctagtgggacaaggacctgaccctcctgcccgcatacacaacccatttcccctggtgagccacttggcagcatatgtaggtaccagctcaac

SEQ ID NO: 464136 - DNA, 122 bp, Homo sapiens
ccctggagagctccgtgtctaaggcctcagggtcccatggatgagggctgactgggatgccggcctctgttccttgcacagagtttaccggatccaggggctgccccaggctctgaggttta

SEQ ID NO: 464137 - DNA, 122 bp, Homo sapiens
tggaagtcaagatcttctcctggtgataattattgaaaagttcagcacagaagcagacagcgatgctgcagggggagggggatattaaaatgcatgtgcacagcttggctttgcagcagatg

SEQ ID NO: 464138 - DNA, 122 bp, Homo sapiens
acacggcccccgcgggtgttttccagacgtgttcgtacccggagcctctgcgtggaagagcgcgttcgtcgcgaccctgccgctgctgttggtcctcgcggcgctggcgctgggcgtcctcc

SEQ ID NO: 464139 - DNA, 122 bp, Homo sapiens
agtccactctgtctaatattaacatgaccacaccagctttcctgcctttcgagtttccatcgtacacattttccatcctttaggtctaagttgccttcttcgcccaggcttggatctgggct

SEQ ID NO: 464140 - DNA, 122 bp, Homo sapiens
ccgttgagctgcagggcccagacgccctcctcgggagtgaagggcgtcaggccctttcggcgcacgctctcgcgggccacgccaaaggcccagccgtccttagagcccacctccacctccca

SEQ ID NO: 464141 - DNA, 122 bp, Homo sapiens
attggaggcgagggaagtgcagggcgcatcccaggcggcagggctcccagcatcggcagtcgccatcaccgccagaccgcagagacaggttcggatccgcggtcctcttgcctctttccagg

SEQ ID NO: 464142 - DNA, 122 bp, Homo sapiens
gtcactgcctgtttactcatgtatactgtatagcttcatttctttctgttccaattcctgcggttactacagtaaacaagtctcccagctcagggagcacacattataatagagggagcaga

SEQ ID NO: 464143 - DNA, 122 bp, Homo sapiens
gcggtcggaaactgttttaagcctgagaaaactttaatgtagaagagcaaagaaatgaggcgagaggtgtttttataggccagaaacgtgactcaaagccttatatttaaatacgcgaacaa

SEQ ID NO: 464144 - DNA, 122 bp, Homo sapiens
tggcgcggagccggcgagattttggtggggtctcacctgttgcgtgactcccccacagtccggccgcgggagtccgaccctgaatgcccagggagtgttgagagaaatctggacgagtttcg

SEQ ID NO: 464145 - DNA, 122 bp, Homo sapiens
caatcaggaggcgggcgggagggggcgcggtaccgggagggaacggggcgggtcgggcttcgaggtcagctggtccgcagggaagcctttggcttccccaccggcaatggagcggttgacgt

SEQ ID NO: 464146 - DNA, 122 bp, Homo sapiens
atggccgctgcgcacgtgctgggtcctggggcagcctcccagcaggaggagctccacagccgctgcgtcccgggcccgccccctgcactaatggctcctggccgcagctgagggcgagcacg

SEQ ID NO: 464147 - DNA, 122 bp, Homo sapiens
ccctcccccacaacccccaggagaccccatgttggagaagcgacccactgggccccgccccgacccccagcattgttttcggccctacggaggagcctcattaggaagaggacgcaaaaggg

SEQ ID NO: 464148 - DNA, 122 bp, Homo sapiens
cggtcagaggacacagcgtacacaatccccttgaagtagcggtccccattgcggtagaaacgtaccttcttggctttcttctcattactcagtgcctgcaaggttctggttcggtagaagct

SEQ ID NO: 464149 - DNA, 122 bp, Homo sapiens
caggttgctctttttccagcagccttcaggggactcctggctgggcggagtctgtagaggcgcgcggagtcctgggagagcgtcagatgtatttcctttcccttttttcgctcgtgtcccgc

SEQ ID NO: 464150 - DNA, 122 bp, Homo sapiens
gccacctgggcctcccagagccaagaactagcagcggagactaacaggaagagccggctccggcgaaggagagacaaagcaaccgccaggcagatcccggaagccgccctctcctttccggc

SEQ ID NO: 464151 - DNA, 122 bp, Homo sapiens
acatgcacatctttttcttcagcaaatgtcactgtggtttcaaagcctatgtgtgatgtgcgatcgggcagcatttttaaagtatttcctgctcaaccatagggtgaaatgatgcaggtagt

SEQ ID NO: 464152 - DNA, 122 bp, Homo sapiens
gctggctatctcttggagttaaatgattttttttctcgccccgttcgcatccataatagacgcgaacagagtcgtgattgttccctgttgcgggacattctgcgcctgaatgagcgggggct

SEQ ID NO: 464153 - DNA, 122 bp, Homo sapiens
tccattggtctcgggcacatttacccgggacgtagcctgagagacacacagcgaattccccgaacagagtccttcgcccttccgggcaggcatcactcaggacgcacactgcagacagcttg

SEQ ID NO: 464154 - DNA, 122 bp, Homo sapiens
ctgaagaacctgtgggtgtctcagaagagacagcaagccagcttccctggtgaccgcctccgtggcgtggtgtcccgcctcttcccctacagtaactacaagctggagatggttgtggtcaa

SEQ ID NO: 464155 - DNA, 122 bp, Homo sapiens
cagcagccccacgtccccagccatccatcaccgccacttcaccccagactctaaatcctccgccttgaaagaagtctaagaagacctccactagcccgagtgaagctgggggaggtaagaca

SEQ ID NO: 464156 - DNA, 122 bp, Homo sapiens
cactttttgtagtgaaggggtctgcttatctagcccagggtattctaggactactggcctcgagcgatccttccgcctcggcctcccaatgtaccgggattacaggcgtgagccaacgccct

SEQ ID NO: 464157 - DNA, 122 bp, Homo sapiens
gtatacttggtagaagtcattgccattctccagtctcaataaaccacgggtgcaatgcaccgtggaaagccacagggacctctgcccttgaaagcagggtattgtccaaggtttctccccat

SEQ ID NO: 464158 - DNA, 122 bp, Homo sapiens
cggggaggcgcgtgcgcactggcgtgcgagactcggcgggcgctgttgagggagtcgggccgcgactgtggtcgtttttataccttcccgcgcggacgccggcgctgccaacggaagggcgg

SEQ ID NO: 464159 - DNA, 122 bp, Homo sapiens
aggattcctggagaaccaagaggaccccagctcaccccatcatggtctgggtagcacccacgtcctccttggaacagcccctttagacaactctcctccttactctgcagactatcctgtac

SEQ ID NO: 464160 - DNA, 122 bp, Homo sapiens
ctcgggcggcacaccacaggcttcctgaggcagggcccatggggcaggctggagagggcccgaggggaggacccaagaggggcctggagcagtccctggagcgctgccccgacgggcgcctg

SEQ ID NO: 464161 - DNA, 122 bp, Homo sapiens
aagaagggggtggggccacgtttgcgtccgcgccatcaggcccgagatagcggcgaggtccgctttcagtgtatggttttccctgccaaacggttctgcttggtgccatccatggagggcgt

SEQ ID NO: 464162 - DNA, 122 bp, Homo sapiens
cccccatgtattacttcttgggtcacctgagcctcgtggacgtctgctttaccaccgtcacggtccccaggctgctggccggcctgctccacccgggccaggccatatccttccaggcgtgc

SEQ ID NO: 464163 - DNA, 122 bp, Homo sapiens
tgatgccgttctgctcaacgtggtttctttacaatattgataagaaacaaaatccatccccgaccggcgctgtgtgtggtttgcaggttctccctgggtcggcatgggttttctctgagtcg

SEQ ID NO: 464164 - DNA, 122 bp, Homo sapiens
cccccgtagctggccttgggggatccccgcccgggggggttccacatggagaggggacgccgctccaccacaggcagcagttgtggcaggagcaggcggcttccgcttcaggcagcacaggc

SEQ ID NO: 464165 - DNA, 122 bp, Homo sapiens
taccggaatctacttcatcacctttccttggtcaaattgttttacattgcagtggtaactcgagaatgccattctacatgggtgattagaaaaacattctggggttggctctctgaattgtt

SEQ ID NO: 464166 - DNA, 122 bp, Homo sapiens
atgcacattgactaaaagaaagcatacctttctctctctccttcggtgatatcatataagcggttggcacctccatcggcacaggctcttaaaagagcttcaaatagaaagaacaaaatcat

SEQ ID NO: 464167 - DNA, 122 bp, Homo sapiens
ctgaggacttggcaggaggcacaggcgtggagaggcagggcctaacccaggtgtgtgtgtcgcgggggggaggggggcggtggttaggcagggctctttggggaagagatacctgacagggt

SEQ ID NO: 464168 - DNA, 122 bp, Homo sapiens
caagatcaccaggcaatttctacacacaatcaaggtttagaggacctggtctaacacatacgaatcatagtagtagtaatagttaataatacttactaggtattgataatgctccaggcatt

SEQ ID NO: 464169 - DNA, 122 bp, Homo sapiens
ccctcctgagactctatgcccgtccacccgcggccccaggcccacctgagactctatgcccgtccacccgcggccccaggccctcctgagactctatgcccatccacccgcggccccaggcc

SEQ ID NO: 464170 - DNA, 122 bp, Homo sapiens
tccaactcagcaagacacaggcagatccatagcatggctgagctgtccttggtgctgaagcggcatccgctggctcttacctctgggtcctgggctgggatgggctacttcttgatttcgag

SEQ ID NO: 464171 - DNA, 122 bp, Homo sapiens
tgttcatttcatcctgtgtagttcctttcacaagccccactggagtcatctgctcttccccgggacccatttgtgaagttcctgtctcccttgacctccccgtagggaaccagagaccagtg

SEQ ID NO: 464172 - DNA, 122 bp, Homo sapiens
ccagcctcctgtccttcccattccaggtgctccgggtgctagcaaagctggggtgggcggcgccgggcaaggtctgaagactgcgaggacccagctgccaggcgcattgtgaagtggcccga

SEQ ID NO: 464173 - DNA, 122 bp, Homo sapiens
tagcatttacactatagtttgaacgtattttaaatagcatgatgtgtatacaatgtctcccgcgcccattggcaaccagggtcgtgggaagcttggtgaggagttaaccaggtcctgtggtt

SEQ ID NO: 464174 - DNA, 122 bp, Homo sapiens
gcccacggtgggcgctgtgtctccgcaggggagtgaatgcccaaaccaagaacggtgccacgcccctgtacctggcgtgccaggagggccacctggaggtgacccagtacctggtgcaggaa

SEQ ID NO: 464175 - DNA, 122 bp, Homo sapiens
gatgcctgcaggctttataaacggcatgttcctcttcactgtgaggaactgtccaccgtgcggatggacccgtttgtttaaccagtttgttaaaggacattttagcagggatttccctgctt

SEQ ID NO: 464176 - DNA, 122 bp, Homo sapiens
ctctggccgctagagggcgctgcctttcagccaaagccgagtgaccccctacctgccccgcgttggcccgcgtcactccagccatgggccatccagcgagcatgggggctagccagggaaag

SEQ ID NO: 464177 - DNA, 122 bp, Homo sapiens
atgctgtactcataccagacttgagttttccctgccctttgttcttccttcttttttattcgattcccattatctttagtgatcattcccttagcatttcagttttctctctgaagtccttt

SEQ ID NO: 464178 - DNA, 122 bp, Homo sapiens
cagaggaagggctgagctacctggcagcctcagaggctccgctgccacctgggggccctgcggaggccatcaaggagcatgaacggtggctggccatgtgcatccaggccctgcagcgggaa

SEQ ID NO: 464179 - DNA, 122 bp, Homo sapiens
cacctcctggggaagaagcgcgcagtgctttgcctggtaacacccactgcacccctgccccgcggcagcctgcggtccctaactgctctccgagggcctcaagagttcctgacagcaggcat

SEQ ID NO: 464180 - DNA, 122 bp, Homo sapiens
taataatgaagtgaagagaccagaggtgaccagaaacaagtatgagaggaaacgagaagccgttattcatggatttcctgcagtgtgctcagcacagtactactctaggagttggaggattt

SEQ ID NO: 464181 - DNA, 122 bp, Homo sapiens
cgcactcacaaagccactcagtggcggggctggggctgaaaaccaggtcgggctctaatgcggtggttccccagcctggcctcacctttcattcacctgcggagctgttcaaaatcccaggg

SEQ ID NO: 464182 - DNA, 122 bp, Homo sapiens
aacctcaacagacctggttcgacctcccctaggcagtgggtgctgcctggagggcagggtcgctcgagactgtaggagactctgcacgtggtgaccatagcacccccataataaagcagccc

SEQ ID NO: 464183 - DNA, 122 bp, Homo sapiens
cttctccaccgccagcttggccttgtctgggctgctggggtcgggaccgcgggcgccaggcgtgggtgcggccagggagggtcccggctcccccagccccttcttgggccgcagcagccccg

SEQ ID NO: 464184 - DNA, 122 bp, Homo sapiens
tttcccctccggactctggcagggcctttccttggctcggtgcccagctgcctgctcacccggcctggcagactctgcatctgctccacttcacaggccggggaggctggcagcacgccagg

SEQ ID NO: 464185 - DNA, 122 bp, Homo sapiens
ctgcaggcccaaccgaaacaggcctgaagctccaggatgggcgagaggatcctctttgagcgaaaccagccttctgcctggctggccctggtcaacaccctgggaagaggccgatttggcgg

SEQ ID NO: 464186 - DNA, 122 bp, Homo sapiens
tgtggttcctctcattcattcactgagccagcatttaaacagaagtgaggtcccggcactcgggtagcgtgcctgatcatgcaggagacagacaacagacaagtgaacagatgacaggtgac

SEQ ID NO: 464187 - DNA, 122 bp, Homo sapiens
ttgaaaacattatataaatgcaatgcccaaagtgtgtaatcttttgagattggctcttttcgctcagtataatttcctggagatttacagaagttgtattcactcctcctattgctgagtgg

SEQ ID NO: 464188 - DNA, 122 bp, Homo sapiens
ggcggtgaagcagggcctgctctacagggggcttttcttcgccgcggtttcttcccctgtcgctgcccggcccccacctcctctctcctcccgcgcgcgctctgcccgccgcccacgcgcgg

SEQ ID NO: 464189 - DNA, 122 bp, Homo sapiens
gaggaaggtcaggcccaggtttccagccagggtgactgccaggaggctgtccaccatggtcggtggggacttggctttggcatctggcaaggaagcttggacatctggacagccttttgtag

SEQ ID NO: 464190 - DNA, 122 bp, Homo sapiens
ccagcttggatggagcttggcaccaagcaagtgctcagtagactacctaccgcatgggcccgcagagtctccccatcctcagacgtggcctcttgcaggcagcagccctactggatgctctg

SEQ ID NO: 464191 - DNA, 122 bp, Homo sapiens
tggcaaacaaatgcagtattgcctcacgaatcgattgcttctctggtatgggtgggggggcgttggcaggtgtgagaaggggctgggtggctgggtggggaggcttgcaaccatagcttcca

SEQ ID NO: 464192 - DNA, 122 bp, Homo sapiens
cccatctgagaagtgaggagcccctccgcccggcggccgccccgtctgggaagtgaggagcgtctctgcccagcagccgccccgtccaggaggtggggggtgcctctgcccagccgccccgt

SEQ ID NO: 464193 - DNA, 122 bp, Homo sapiens
agtggggttgcaggtactcaccggtcacgacactgaaggtgagactgtctacactggcctcgtagttgcggccctcaaagtgcagggtcagccagaagggctggccccgtcgcaccaccagc

SEQ ID NO: 464194 - DNA, 122 bp, Homo sapiens
atatgttagtcaatttttcttttgtattatttttaattacttcataatgccagtagagtgcgttggctgtgtggtgatatcaattaaaatttaagaataaaaaaaaaggcatatacacatct

SEQ ID NO: 464195 - DNA, 122 bp, Homo sapiens
gcggggcgcatctcccgctaggagttcctagtaaagtggcgggagccgcagctatggagccgcaggaggagagagaaacgcaggtgatggggcgggaatggggatcgttggcctcctggaaa

SEQ ID NO: 464196 - DNA, 122 bp, Homo sapiens
ccaatagggtgggggttttcctgtggctgcgtgccctgacacggtggaggccttcggctccggtcccgccgtgtgcctggtgccccgtgacgtcccttagcctctgacagaccccctgtttt

SEQ ID NO: 464197 - DNA, 122 bp, Homo sapiens
ggaagccttctttggcagcattgaaggctgacaaatttgcagttttatccttgagtgttacgaacttcagaaacaactctctgagggctaatattttgatttaggaaaaggaaagggggaca

SEQ ID NO: 464198 - DNA, 122 bp, Homo sapiens
gtcccgcccgccgccccgccccgcgtcccgcgccccgcgccccgcgcccggccctcggcgcgcaggccctgtcacttggccccgccctgtccgccggccccgcccctgattccccgtccctg

SEQ ID NO: 464199 - DNA, 122 bp, Homo sapiens
ccccactccccgcctccggtcctcacccccttcctctctcccagcctcggtgtctggttacggctcctctgctcgcattgtgactttgggccaggctgggggaaatgacccgggagggtccc

SEQ ID NO: 464200 - DNA, 122 bp, Homo sapiens
cttcgcctccccggtctatactgccccgtagctctggcggagccagcctgcctgttgcgacggagtatgtaatagagggtaagggacataccatcaccccaagggatcctcgacccctgcgc

SEQ ID NO: 464201 - DNA, 122 bp, Homo sapiens
tttactctgtgacattccatttgtccttggctgtacggaataaaagccctttgacgatggcggcctccaatatcataatccgtatgggtgcggccatgccgtcctccctaccaagtttctga

SEQ ID NO: 464202 - DNA, 122 bp, Homo sapiens
cttgtgcggggctgtgcggcagctgtgtggggcccgtgaggagctgtgcggggggctgtgcgaagggctgtgtgaggcgctgtgctgggggctgtgcggagaccttgaggcgctgtgcgggg

SEQ ID NO: 464203 - DNA, 122 bp, Homo sapiens
atttggaggctgaattctccgagcacctgtgagtgacagcccgtgaatgggaaggtccttcggcaaacgccctttttgtgaataaaatacataaaagccagtttctttattttacctttctg

SEQ ID NO: 464204 - DNA, 122 bp, Homo sapiens
tgcttggggtggagggcggctgtccacagccctggggtctggaggaggtgtgggtgagcccgtggccccgtttgggtttttgggggtgggtcgagtcgccccttttgctggtccctggcttg

SEQ ID NO: 464205 - DNA, 122 bp, Homo sapiens
ccccgcactcgaagcagctggtccgccctgcaggccctgggcaataaggggcttagcatccgggccagcggctgcggagggtgtactgggtctcccagcagtgccagcccgccggcgctgcg

SEQ ID NO: 464206 - DNA, 122 bp, Homo sapiens
gttacctgcagcagatgcagctgggccacgagacgccgcggcaggtggaggaagcagtcgcgagcgttggtgaaggccacagtcactgccgccccgcctcccccagcacccgccaggcgatc

SEQ ID NO: 464207 - DNA, 122 bp, Homo sapiens
ccctgagtgtgagcaaataaaggctccttcctgcagcccgagccagcgctcagcgcagcccgtgacccctggcacctgacaacctgcttcagccaaaatcttaataggctttattattttta

SEQ ID NO: 464208 - DNA, 122 bp, Homo sapiens
tggcaaccccgtctgattgtgcttatcctagaaaggagacagctgttgggggtgtggaggcgagctcggtgctgctcccttatcaacctcgcgcagcccggaggcattgtgggatgcctacc

SEQ ID NO: 464209 - DNA, 122 bp, Homo sapiens
cgggcaagagagcgcgggaggaggaggaggagaaaaaggaggaggaggaggaggaggaggcggccccgcatccctaatgagggaatgaatggagaggccccctcggctggcgcccgcccacc

SEQ ID NO: 464210 - DNA, 122 bp, Homo sapiens
aggggctgccatgcacagtgagcgctccctgtgtggggcctggagatgtgccagacaccccggtgaaggtcctgggcctgccagctgagtccccaagaccctggccagtgccgctgggttcc

SEQ ID NO: 464211 - DNA, 122 bp, Homo sapiens
acgtcgcaaggatgaaaacgatgcggacaggctttccagcagtgagcctggggaaatctgcgtcacatgggcgacagaaggtccctcgaatccctcaatccccgtggcccgcaccactgtgt

SEQ ID NO: 464212 - DNA, 122 bp, Homo sapiens
ccccaccccaagtcatgcccagaattggttctgcacacagccttgtttttttcagtaacccggctatgggactgcagtgcccaaggaatttctgctctggttagaaaaaggactctgcttca

SEQ ID NO: 464213 - DNA, 122 bp, Homo sapiens
tctgggaggagagagaatggtgggacggcagcgggggcgccggggaggacatgtggacgccgaggaatgggagccgcaacaagcctggagggactgttgtgacctcgctgcccgtgtgtgct

SEQ ID NO: 464214 - DNA, 122 bp, Homo sapiens
acgctgtccacagccggccatcgtaagagttacggcgactgtcacctctcagccactcctcggcatcggacctcttggctcctggccatggcattgaccacagaatgtcataaacagcccag

SEQ ID NO: 464215 - DNA, 122 bp, Homo sapiens
cagacccgtaggccaacgggtggccttaagtgtctttggtctcctccaatggagcagcggcggggcgggaccgcgactcgggtttaatgagactccattgggctgtaatcagtgtcatgtcg

SEQ ID NO: 464216 - DNA, 122 bp, Homo sapiens
catcacagtcccgggggctagagttgtatctatctgcaaagaccctgttccccatagggacgtcacagtcccgggggctagagttgtatctatctgcaaagaccctgttccccatagggaca

SEQ ID NO: 464217 - DNA, 122 bp, Homo sapiens
agccaacatatgacagtccacatatgcaaaggaaaaaacccttgccatgcttacgtctaccgtggtgaatgccagcaagactctggggaaagattatctgtccaagtttatgaaattaaatg

SEQ ID NO: 464218 - DNA, 122 bp, Homo sapiens
tgctccgcgtaccacctgcttcatccccgccctgccctctcgtgctcctcggcagggggccgccatccttatgccccgcctgccctttctgcagctgtgggtgcaggctggccgttgtgctc

SEQ ID NO: 464219 - DNA, 122 bp, Homo sapiens
ccaccctctccaaccaagaagtcgcgtgcttggtatccaaggtgaccacgcagctttacccgcgttgccccttccgtgcttcccattggccagtggactcccatgtaccgcccctccaatag

SEQ ID NO: 464220 - DNA, 122 bp, Homo sapiens
aaatgctgggattaaaggcatcctgttactaatttcacaggattttagaaacgcaagcagcgttgtggagtcaatgggggagggcaaagaacaggaggagagatctgtgagaacgggatcgg

SEQ ID NO: 464221 - DNA, 122 bp, Homo sapiens
gtcctggccaccattatctctcacagtggcctcccaatttggtttctcctccctcagtttcgcctctgcacacagcacagtcaacagtgagtgacagctctaaaacgtaagtttggcgatag

SEQ ID NO: 464222 - DNA, 122 bp, Homo sapiens
cactcatttaactggtattgcggagccacgaggcttctgcttactgcaactcgctccggccgctgggcgtagctgcgactcggcggagtcccggcggcgcgtccttgttctaacccggcgcg

SEQ ID NO: 464223 - DNA, 122 bp, Homo sapiens
gctccattttgaaatgtgttggcgctttggtggggccgctgcggtgggcaaggccgggggcgctgttaatggaggaacctcagggggacggtccttcgtaggaaactctatcctggctctgc

SEQ ID NO: 464224 - DNA, 122 bp, Homo sapiens
aatcaaagcagttctctgaggagaaggcgagtgcctcagtttccctcccggcctcactgccgttctgtctctgtccccaagcactgggccaggaggcaaccagactttactaagggtggatg

SEQ ID NO: 464225 - DNA, 122 bp, Homo sapiens
gcctcctgttctcagccaccatttcctcctcctctttcccctcatctccgggcacgagctcggccgcggtgggagcgccaaaaatacaccccaagcttggacggttccttttggggagagac

SEQ ID NO: 464226 - DNA, 122 bp, Homo sapiens
gaagacgtttaggagggagggtgagttttctgctgagaaactcaatctgccatacagtagcggccccatctgggatctgtcactgctgacagcaccagagggcacagccgtgatcttctgca

SEQ ID NO: 464227 - DNA, 122 bp, Homo sapiens
ccgggggccgtgcgcccggcccaggctcggaggtccagcccagcggcggctcaggctgcgcgcctggctcccagcctcagtttccccattggtaaagcattgacggtggttgcggacggctt

SEQ ID NO: 464228 - DNA, 122 bp, Homo sapiens
ctggagatggcgggggctgcgccccggcgccgggcatcctggggatgtgctgagagtgtgcgcgaccccggagccacgtgccaggccgggctcagaggcggagaagcctgcctggtgcccac

SEQ ID NO: 464229 - DNA, 122 bp, Homo sapiens
ggggaccacctacatcttccggcttgctgccaagaaccgggctggcttgggtgaggagttcgagaaggagatcaggacccccgaggacctgcccagcggcttcccccaaaacctgcatgtga

SEQ ID NO: 464230 - DNA, 122 bp, Homo sapiens
gccatggcagtgcgaaggtgggagcaagaagccttcagggaagctgcttattatctccgccgagcgtcccccaccatctctgggcacccacagaagtgagaacatagcacgcccgggcggcc

SEQ ID NO: 464231 - DNA, 122 bp, Homo sapiens
caaatcctttaaccatgatatttggtacacccaaagctctgggacccagacaccttgagacgttacaaccttgaaacctcaagacccggaaccctgtaatctggggaatcttaacatcagtt

SEQ ID NO: 464232 - DNA, 122 bp, Homo sapiens
tgtccgggcccgggtgggcggggggagctgagccaccggaaccggaaccggagtgtgtaccgccatcttgaatgtgtctaactgtagaacagggctcaatgtgtcgtcatcttgagtgtggc

SEQ ID NO: 464233 - DNA, 122 bp, Homo sapiens
ctagcacctcctcccgcctgcgggatggctcctgcacttctggtgggcgctggtatcagccgccgcccagccgagcacagcaggaaccgcagcagcagccggagcacccgcacccagggtcg

SEQ ID NO: 464234 - DNA, 122 bp, Homo sapiens
aggattggaagagatgagtaaggctactttcagcttcactgctctacaagctgggggggtcgctagcaagggagaggggcaaaacttgtccctttttaacttccaaccctgccagatttgag

SEQ ID NO: 464235 - DNA, 122 bp, Homo sapiens
acaacacaagtttattttttcacagttctagaggctggatgcccaagagcaaggtgccgtcgttgctgggatctggggaagcctctcttcccggcttacagatggtaaatttctccctgggt

SEQ ID NO: 464236 - DNA, 122 bp, Homo sapiens
accgcaggactactcagtatctgtgggatgcctctgccaccctcactggagctgtggccacgagatgtgctctggatgcctcagcgggtccctcaggacctgcagggacagtatccagcaca

SEQ ID NO: 464237 - DNA, 122 bp, Homo sapiens
caggagtctgctttcccacgagaccgtgaggcagtccttttctcataccacgatggaggccgagtcactgtgcgctccacgatgaggctgcaagtcactatgcgttccacgccctccgtgca

SEQ ID NO: 464238 - DNA, 122 bp, Homo sapiens
gtgcacgtcacaacggtaaaatgctgcaaggttggctaatcagctaagacagaaactagccgtttttcttcctttgtggttttcctgttgtcccagactttctggctccaggaccttctgga

SEQ ID NO: 464239 - DNA, 122 bp, Homo sapiens
aagcttctctctcgagctacgtggtgctcttggcagaccttgactaggttctttttacagcgtctcatcttcacccaggaaggagcaaacaagacagcttctgcgtagatgtgtgcgggcat

SEQ ID NO: 464240 - DNA, 122 bp, Homo sapiens
tatatgaccttcctctaggaacgttagattggtaatagaagaacgtctcaagtgagcatgcgtataactcccgtaaacacactgcgcatgcagcccttcccaagcactggtagggcactggg

SEQ ID NO: 464241 - DNA, 122 bp, Homo sapiens
gtccggtggaatatgtgctgccttgctccaagtaactagttgctgctgttgttaagctggcgtctttccagaaaacgaagtgcacttcctttgaaaagaagtcagagtccccactaaaaatc

SEQ ID NO: 464242 - DNA, 122 bp, Homo sapiens
gaggaagctgtattatggctgtatcccctgccaccagctggaagtgtctaagtgattcctcggaagggggaatgctgcaaaggatgcttctccaaaggggaagaatcaagagtcaccacaca

SEQ ID NO: 464243 - DNA, 122 bp, Homo sapiens
cgaagtgaaccttttcctttagttctaaattcctgaccacaccggaccctggcttctatccgttgcaggcaaccacctcctcctagagctcaaggagaatcagcgggagaggagtgacgggc

SEQ ID NO: 464244 - DNA, 122 bp, Homo sapiens
aaaaaaaaaagttttccaagcacagtggctaggccttactgcaatcccatctacggctcacgtgtacttttaaaactcattactgtcctgcatccaagtcctcagtggtttcccactgacct

SEQ ID NO: 464245 - DNA, 122 bp, Homo sapiens
gatactcaaccagtattgacattcttcatacttctttgtccttaatttttcacttgaaatcgctacttatcaccattctattagggatttatcttcttgttgttttggacttgttccacaga

SEQ ID NO: 464246 - DNA, 122 bp, Homo sapiens
tgaattggggagagaaaggaacaagagcccagcccaatggaaggaggctgcagccaagagcgaagggggcagtgagtcactgccttcaaggggcggaggatgaataccactgacatgctgtc

SEQ ID NO: 464247 - DNA, 122 bp, Homo sapiens
tttgctcagaggaaggatgcgatgcaggcgcggggagcgagcggcactacagaggaaacgcgggagcagcagcacctaggcgcatccataatttataaaatgccagcagcaacaaaggcaaa

SEQ ID NO: 464248 - DNA, 122 bp, Homo sapiens
cacagacatgatgtccaaatgccaggaataaagtcctgaagctaagatcagaaaggtccacggtgagctatagttaaatacgtattggcccgtgatgccatcccaagggtgttgatgggcta

SEQ ID NO: 464249 - DNA, 122 bp, Homo sapiens
tggtctcagggagctcctggagaagatttgtaaatcaacaaaggcactaagggaatagaacgctatgtgggggagaggaagcattgtcaaatgtgaaatggtgtttaactttctttgggtta

SEQ ID NO: 464250 - DNA, 122 bp, Homo sapiens
ccgctgctcgccgcgcagctcggtgcactcggagtgcgtgatgatgccggtggtgctgggcgaccacgtgtccagcagcaccttcccgcggatgcactacagctcgcactacgacacgcgcg

SEQ ID NO: 464251 - DNA, 122 bp, Homo sapiens
gccaataggcgctcggagcggagagtttaagaggcgtaagccaggcgtgttaaagccggtcggaactgctccggagggcacggtgagaggtggtggggctgagccgaggtggggccgtggcc

SEQ ID NO: 464252 - DNA, 122 bp, Homo sapiens
atggcagcaaaagaaaaattgaacctttaccatgaaaaacaaacagaacgcagcttcccccgcagagctctgcaggctgctcccggctgcagctgcccttggctcccagggtggcgagggca

SEQ ID NO: 464253 - DNA, 122 bp, Homo sapiens
gcgatgcgaaggggaggggacccttgggctgggggctccgtgcttcctctgagtgacagccggacccagtggcagctgcggctggggcccctggggctatttcggggcgtgagctcacggca

SEQ ID NO: 464254 - DNA, 122 bp, Homo sapiens
gggcgaggggcggggggcggggcgggaggcggctccgaggggcacgaggcgggcccagggcgggcgcggggcgtggcctcgggcgctgagcctcgagagcagccgcacccctgccggggtag

SEQ ID NO: 464255 - DNA, 122 bp, Homo sapiens
tggtgtgtcaggcagcggagctgacactcccagaaagcaagatcttcgaactacagggtgcgcgcaggctctcgcttctctccaccatggggggccctgcagtactcgccaagagcgtagaa

SEQ ID NO: 464256 - DNA, 122 bp, Homo sapiens
caggggtcctggagaagctgaagctaatccaggaatgaaaacatgtaactctgctgaaaacgaaaggagccctgctcgtctcataaatcacaccggagggagagtgccgctcttggtggctc

SEQ ID NO: 464257 - DNA, 122 bp, Homo sapiens
cactgggtctcccaacacagagaggaccctccatcctcacctggaaagccatggagttggcgacagccagaaatatcctcagaggcagcttggcccggtaggacctgtggctccacaagcga

SEQ ID NO: 464258 - DNA, 122 bp, Homo sapiens
caatccagttttggagccaaaaaataatctgtgtgcacatgtgttttgataatactgtttcgacttaggtggggaaattaaattcaggagttttatgactttcttttgttctgagtatcact

SEQ ID NO: 464259 - DNA, 122 bp, Homo sapiens
aaacccaagagtaggacccttccattcatcttgtggaatttaactaccatagtctcagctcgagcagtgagaagtccagctagactgtcttcacctcacctacacttcctagctttcttcta

SEQ ID NO: 464260 - DNA, 122 bp, Homo sapiens
cacaggtgtagtgggtgcactcagggccatgtgtgtgtgcaggcatgtgcacaggtctggcgggggcactggggccatgtgtgcagtgtgtgtgcaggtgtggtgtacttggagctgtgtgt

SEQ ID NO: 464261 - DNA, 122 bp, Homo sapiens
ggcgtgtggccagcggcaaccaagagggtgggaaagatgggaccgtcgctctcgccgccgcggccaccacagacactgccgccgccggctcctctcagccacggaagctgcgggcccgccca

SEQ ID NO: 464262 - DNA, 122 bp, Homo sapiens
gggtccgagtggccacgtgtccggcagggaagtccgaggtagcgagggagtccacctggccgcccgctccccctcccgggtataaatcttggggaccggaaatacaataaaacttcaccgtg

SEQ ID NO: 464263 - DNA, 122 bp, Homo sapiens
catcagtttgtgcagtcgggtggggctcagtgagtgcctcctgtgtgccaggcacaatgacgcacaatgtgtgcacaccaggctcatgtgcaggtggctgcgagacagggcgacccatcaag

SEQ ID NO: 464264 - DNA, 122 bp, Homo sapiens
ctaacttgctgctgagtgtcaggttgaggctgccccgcagtagatgtcacccgccagccccgctgcaaacctttgctctgagaggggcgggcccgtgccctcaagcgcggggcggtctccgc

SEQ ID NO: 464265 - DNA, 122 bp, Homo sapiens
cggccagagccactcctccagccgtgctacgcggcccgccgccccggccgtcccgtcgcccggggcctccccgagccgccctctcggctgtccgcactccctctgccggcactgcgcggcgc

SEQ ID NO: 464266 - DNA, 122 bp, Homo sapiens
gcttcctcccggcgccgccctcccgccccggcccccgcggaacaaacaaggccctggcctcggagctgccccgccgcccagcgctcacaggtcgtttattccaagtaagaaaacggagactg

SEQ ID NO: 464267 - DNA, 122 bp, Homo sapiens
agattcaaaaaatcgaagagtgaagcggtgatgagagtccatctggtcgctcttcggatgcggcgctagcaggcagttgcatgaaagcagatcccagatcacgttgcactggcacacagtag

SEQ ID NO: 464268 - DNA, 122 bp, Homo sapiens
aatggaaaataagatgtttcgttaacttgagcttccccagcattttaccgtagagatgaacggagccccaattactgccaacaatggagacacacagagagagagaaagagagagagagaga

SEQ ID NO: 464269 - DNA, 122 bp, Homo sapiens
atagtgtccttcctcaagctggggcggcaggcacgcagcccggcccctcccaggacgactcgcttcccagcgctgcagagccagagtgcggacaccccatccccacccagctcccaccccgg

SEQ ID NO: 464270 - DNA, 122 bp, Homo sapiens
tgggagggcagggctagggggcggttcaggtgcgtcttggcacaagcatgtctgtgcccccgggcgtcctgagcagagcggggtgtcagggcggggcgcgggcatttcgctcctctctccct

SEQ ID NO: 464271 - DNA, 122 bp, Homo sapiens
aaccgaggtggcaaccgacatggaacgggtggcaggtgctcacggaattatgagcacacccgtctacagcccgagctgggagagtcacaggtggtggtgcttcctcatttggtcaaatgaaa

SEQ ID NO: 464272 - DNA, 122 bp, Homo sapiens
cgatccacgcgtgagccaccgaccctccgggcttgtagctttgtgtcgggctgtgagctgcggcaaagaccccatagttaaccgggaagtcctgatttccttaactacgcagctgaaatttc

SEQ ID NO: 464273 - DNA, 122 bp, Homo sapiens
tccttttctagttcattctctgtctctctctgtttgtttgtttgtgtttgtttttgctggcgaggtgtttattgacaggttgtggtgccgcacaggtcctcaaagcccagccagccagcagg

SEQ ID NO: 464274 - DNA, 122 bp, Homo sapiens
ctgccagggacaactcataatttctagagatgacagagctgcaccgaagagtacttaacacgtgtgtttgtgaaaactcattaagctgcgcaattacgacttctacgcttcgtgtgttttaa

SEQ ID NO: 464275 - DNA, 122 bp, Homo sapiens
tctactggcgtcctggcaatggtagagctgaggggcactcctggtccagctctcccggctcggggcttccttgcctaggcgcccgagccccgggctccctaccttggccgctgaggcctgca

SEQ ID NO: 464276 - DNA, 122 bp, Homo sapiens
ggactgcccccgctccagagtaccagtgccggcagtgcgagctatgacgcaatcggagctcggtcggtcctttgattggctagtcctggccactttggattggccgcgcgggctggtgggga

SEQ ID NO: 464277 - DNA, 122 bp, Homo sapiens
gtaaaagaagggtccagggtgaggttagcattgtctggaagagagctttaaggaagatgccggtttgggtgaaaaaagagtttagttttgtgcacttaaagtctgagatgttctttgcacct

SEQ ID NO: 464278 - DNA, 122 bp, Homo sapiens
cacggtgactcacccaggcggcgtccgcccgaccctctgaggccgcgctcttgccacttccgtctcccgcagctgctgaggccgcgcagtcccgaccccaccacagtgcccctctcctgaac

SEQ ID NO: 464279 - DNA, 122 bp, Homo sapiens
ttcccctgtgactccaccctgtttatgccccacctcccggtttaggaggtgaccagaacacgaggtctctcagcaggtgacacagggggacaaggatgtttttgaagatttgtgcagagtat

SEQ ID NO: 464280 - DNA, 122 bp, Homo sapiens
agcaaatcacacgtgagaccagggcacgccgggaaatgtagttctagttgccgctaatcacgtgtggcgtcgaagcatgccggaaactgtagtctctgggtttaaagccgctttcgttctat

SEQ ID NO: 464281 - DNA, 122 bp, Homo sapiens
ccatggaagggacacgtgggaaggggcacgtgtgcagagcacaggctcggacaggaaccccgggaacacagggaggtcagtgcttctgtacccaaaggacccctctcggcaggggccagtga

SEQ ID NO: 464282 - DNA, 122 bp, Homo sapiens
ggggggaaggaaaattcccgtcggcggccagtagggaggcagaacatgggccagaggtgtcgtcgggtgagggtactgagaatcagccgggtaagcgctgggatgagaaagagcgggaacgg

SEQ ID NO: 464283 - DNA, 122 bp, Homo sapiens
tgccgccccgtgtgctcgtgcaggtgttccggggatttgttttccatccatttcctgaagcgtcggcagtctttgctgtggctttcgcggtggcaggcgcgtcctgaggctggtcatgtcag

SEQ ID NO: 464284 - DNA, 122 bp, Homo sapiens
ttgaagatgcacaagaggaaaggacccccgggacccccgggcagaggcgccgcggccgcccgccaggtgagtttgcgccccacggcccgacctggggatccctccccacccccgtcactcgc

SEQ ID NO: 464285 - DNA, 122 bp, Homo sapiens
aagcgcgtggagagccgaaaggtgcggtgggcgcagagggcgggctggctgcggggcgaccgcgcgccggggccatgccgcgctccttcctggtggactcgctagtgctgcgcgaggcgggc

SEQ ID NO: 464286 - DNA, 122 bp, Homo sapiens
caagtcctcaggcctggcattgggatgggagcatccaaggtcctgtccacaacaaccgatcgtatttcctggggacagctcgacccccaggggagcacgtggccaccagctctgccgccttc

SEQ ID NO: 464287 - DNA, 122 bp, Homo sapiens
ggaagcacagggccgagctgtgtgcaggccccaagcctctcaggtagggccggtgcaacgcgggtccgcagccatcacagctcagctccaccgtcgctcagctgcttggtgtgaggggaagg

SEQ ID NO: 464288 - DNA, 122 bp, Homo sapiens
caggcatgagccactgcactcggcctctttctttctttcaaaggcagaatcttgctctgtcgctcaggttggagtgcagtggcatgatcataactcactgcagcctcgacctcctgagctca

SEQ ID NO: 464289 - DNA, 122 bp, Homo sapiens
aacgatgcgggttgggagagttaaaagggtcgcgcaaacggtccccgcgggaatgcgaagcggattctcgagttcttgagcctagagcaatgcttggggagcgacacgagggcgcagagcgg

SEQ ID NO: 464290 - DNA, 122 bp, Homo sapiens
caccaggttcccccagaccccgaggcccccgccagccccagccatgcctccagacactgccggggacccaggagtcccaggcctagtccttccacctgctggactttacactcaagaatttc

SEQ ID NO: 464291 - DNA, 122 bp, Homo sapiens
tgaggccgaccaagcaccgtgtgaccttgaggaagtcgcctgaccgctccaggtcatgtgcgaggccttagggtgtgaacagagcacttcccggttccttccacttctacacgctttcattc

SEQ ID NO: 464292 - DNA, 122 bp, Homo sapiens
agctcagaccccttagagcttgaaccaagctcatagatcacagattataaaatgggtgtccgtgggaacagagcgcttattttggcataggctttgtaattcatgaaagttttctcgtttta

SEQ ID NO: 464293 - DNA, 122 bp, Homo sapiens
ctaccgaaaagcgcatgcgccacggggtggcacgaagctagagtaagctgaggaggtgggcggaaaccatggcaaccatgggtgatgacgacatggggagcgtctctagcgctggattatga

SEQ ID NO: 464294 - DNA, 122 bp, Homo sapiens
cctccagctccctaaaagctgtgcctttgcacgtgtccctgtgcctgaaatccgcctccccggggcactggggaagccccgatctgccatcgtgcctttggtcctgctccctttcatttgac

SEQ ID NO: 464295 - DNA, 122 bp, Homo sapiens
tatttatttattttttgagacagagtcttgctctgttacccaggctggaatgcagtggtgcgatcttggctcactataacatttgccttcctgattcaagcgagtctcccgcctcagcctcc

SEQ ID NO: 464296 - DNA, 122 bp, Homo sapiens
agtaaggcccgagaggctgtggcttcagaaatgaaggtcatgggcgactcgggccaatgccgcgtccttgacctgggcgaagtgagcggttgcactcacgagtgtggacggcccttccctac

SEQ ID NO: 464297 - DNA, 122 bp, Homo sapiens
gtcgtcttgattgagctctgtggcagaggaaaccaaccgtaaaccgaaccaagagcgaagcgcaggggctcttccgtccaataagcggacccgaacggggggaggggcggggcttctggttg

SEQ ID NO: 464298 - DNA, 122 bp, Homo sapiens
aaatgaggttaacctcgccaacatttatttgatgtgcgtgtttgtgcgctgagtcagggccggaggtcgtgtcttcgtttaacaaatagaccacatgttgacaagcaaaaaacggctttctt

SEQ ID NO: 464299 - DNA, 122 bp, Homo sapiens
tagtttgggcctttaaagtcggccatcccagattgagggggcctgacccctgggcgaggccgccgcctctcagttttggggcggtggcgaccccagtccgggagtggccccggtaggtcccc

SEQ ID NO: 464300 - DNA, 122 bp, Homo sapiens
tgagggcgagctcatccctacagtcacaccctggagggatcactcatcttgtaccactcacgacccgtctgggaatagtcaaccctgtttgtggcctgctgaccaaaaccactgaagacgga

SEQ ID NO: 464301 - DNA, 122 bp, Homo sapiens
ccgcctttttgggctccgggacccccgggagtgggagcggcagtcggggacgcctcaactcgttcactcagggaatcctgcccatcgccttctccaggccgacttcgcagaactactgctcc

SEQ ID NO: 464302 - DNA, 122 bp, Homo sapiens
tggaccataaagccctagtgtgctgctcctaccttgccagtaggactcctgtctcagctccgtctcctgaagactgaccctacaggagagatacaagcatctcctgttacctgtgcccagat

SEQ ID NO: 464303 - DNA, 122 bp, Homo sapiens
tcggcccccagctccgccgacacctccaccgccctctgcagcaggtagcgcgctcgcttgcgcgtcagggcgtccgcctggcccagccccgcctgcaccgtcctccagaagcgccagcagcg

SEQ ID NO: 464304 - DNA, 122 bp, Homo sapiens
agccgactatgactactcagaagagtatgataacgaaccacaaatacctggctatattgtcgatgattcagtcagaggtgagtagaggataaagcaaaaatatggcctgtgagatgtgggtt

SEQ ID NO: 464305 - DNA, 122 bp, Homo sapiens
tttactgggcgaagaattcctgtaaatgcaaccaagtctcaaagtgaaagtccagggtcccggggccgggcccgggaccctggtgcgcggctgtccgagggattcctccttccagaaggttt

SEQ ID NO: 464306 - DNA, 122 bp, Homo sapiens
tctgactccacctatctactgggtacccctctgcaggggggaggcaggggctggtgcccacgaactctggaggcccttctgggagcacagtcttgccatgacctctctaggtcagctcagct

SEQ ID NO: 464307 - DNA, 122 bp, Homo sapiens
aagtgcaaaacatctgagaaaaacttatgttagaaataatatgcatactgattcctgcaacgacagggggtctgcattgctgacacagtatatatttctatttcttttggtccaacagaacc

SEQ ID NO: 464308 - DNA, 122 bp, Homo sapiens
tgaagaccatgtatcatataaaatggcccatcaactgtccagcacatttttttcaaaacccgtattaattattaatgctcattatcataaaatttcaaaatcagagataatgaaaagatact

SEQ ID NO: 464309 - DNA, 122 bp, Homo sapiens
tcaccttctaagaccctcgtaactctagcaggtagtactattatcttacccattttccagcgggagaaatagaggcaagagcagactaaatcacttgcccaaatcgcatagctactgatggt

SEQ ID NO: 464310 - DNA, 122 bp, Homo sapiens
ctcaggtcagtttcccctgagttaggcagactctaattcttatgccccttgggctcccagcgcgctcggggttaggcgaccccccagtgtgcctccagtgcacttaggcgctgcaagtcatc

SEQ ID NO: 464311 - DNA, 122 bp, Homo sapiens
tgatttatccaaaaacagcacctcccgtgatgccagtgctgcgcagaggttgggatacagcgggtgggtgcctagaagccaactcccgccttccaggaagtatggttaggggacatactcac

SEQ ID NO: 464312 - DNA, 122 bp, Homo sapiens
aactacagacattggcatatataaagagatactctgagcttttttgttgtcgtttaactgcgaagtttcaaaatgcacataactttgtgtttaagttctgatgattgactgaggatatgagc

SEQ ID NO: 464313 - DNA, 122 bp, Homo sapiens
ctcaggccagtcgcctccaggccaagagggatccttcacccgtgtctggtgagtgaggagcgctgttggccggcgcgggggtggccgcggggagcagcaacagtggaggatggatgagtgac

SEQ ID NO: 464314 - DNA, 122 bp, Homo sapiens
ggatttgctaggaggtggagctatcactgcctctggcttttgtcctcactgtgtgtgtatcggcagcctgcctgccacccagctcgctaacggcagcagtacctgggcaccagctacctgct

SEQ ID NO: 464315 - DNA, 122 bp, Homo sapiens
gggaacctcttcccctgggcgggaatctcccgctccgtccactaagtccagggccggcagcgaagggctcaggagcgcagttagagagaaccaggtcattttattacttatccctaattaaa

SEQ ID NO: 464316 - DNA, 122 bp, Homo sapiens
ccccccgggcgccgccgacccttcctagacgcctccgctgcggccgcctaggcttttacccggaacccgccagcccaggttacctagctccacccggcgccctgggagctgtctgtggtgct

SEQ ID NO: 464317 - DNA, 122 bp, Homo sapiens
gtctgggagaggctgggcctggattggggtcccctcccttctggcctcctgatgggtgaacgccagagcagcctcggttcctgtacagcggagggcatgccgcggccagagacagcccgggc

SEQ ID NO: 464318 - DNA, 122 bp, Homo sapiens
taattaccaagctgtaatgggatctgatatttatattagtcacgagcctgacagagaaaacgtgttgttttctcaggcacagccatggagacaacatctcgataattcattacacgcagacc

SEQ ID NO: 464319 - DNA, 122 bp, Homo sapiens
acctcaggtgatccacctgcctcagcctcccaaagtgctgagattacaggggtgagtcaccgcgcctggccaatgttgttgttgtttttaagacagaatttcactctttgttgcccaggctg

SEQ ID NO: 464320 - DNA, 122 bp, Homo sapiens
tcccaggcgtccttccttacagccctgagcctggtccgggaaccgcccagccgggagggccgagctgacggttgcccaagggccagattttaaatttacaggcccggcccccgaaccgccga

SEQ ID NO: 464321 - DNA, 122 bp, Homo sapiens
tttttttttttttttttttggtcttgctctattgcccaggctggagtgcaatggcacaatcgtggctcactgcagctttgaccacctgggctcaatcaatccacccacctcagcctctcaag

SEQ ID NO: 464322 - DNA, 122 bp, Homo sapiens
gccacctcccgagcctcgggttgggcaagcggccgccgtcttccccgccccgacgcctctcgcggttttccattggctttggctcccctggggtactccttcacatacggcgggcctccgcc

SEQ ID NO: 464323 - DNA, 122 bp, Homo sapiens
gggaggcatcactcacagccgcttgcgacaccggggccgcctgaacctccgccagggctgcgccgcacaagtggctccagccagccagccctggcccgggagcaggactttccgctccccca

SEQ ID NO: 464324 - DNA, 122 bp, Homo sapiens
aaagttcaagagccaaaggggttatagaaacaatctgtttaacttatgactcaaagcaaccgagacaggccagatctacaggctagttgagttttttccaaagccactacccacaaagatga

SEQ ID NO: 464325 - DNA, 122 bp, Homo sapiens
actttacacctacccctcaccggaaagctagacccgcttcagggccaggagtggcgtttccgcacaggatttcctaagacgagagggatttagccaagagcacagacttggattccttctgt

SEQ ID NO: 464326 - DNA, 122 bp, Homo sapiens
gcagtatcatgctggccaagaagatcatcattaaggacggaggcacggtgagctgagttccgcgccggcgagcgtccctcggggcccccatccggtctctccttcagacccccacactgccg

SEQ ID NO: 464327 - DNA, 122 bp, Homo sapiens
tccgggggcggagcaaccccgccccgccccgccagccctctcctcccccttcgcccacctcgacccctaagggtgggcgagatgggtcccttccagcaacggattccccaagatggacatcg

SEQ ID NO: 464328 - DNA, 122 bp, Homo sapiens
tagatctatttgtggatttgtatctgtttttgttgtgattagggtagtaatcttggaaaacgaattattttcataagttgaatttggttagttggttggttgaagcagaggataatgagcaa

SEQ ID NO: 464329 - DNA, 122 bp, Homo sapiens
gaactgcagtagtggaggcccgggactgggggataaaggcttaggtggtggacgaggctgcgggcccagcaacaggccttgcgtaccatcctgggggccggggaactgacaacaacaggcga

SEQ ID NO: 464330 - DNA, 122 bp, Homo sapiens
agttactctagcgcgccaggccgaaccgcagcttcttggcttaggtacttctactcacagcggccgattccgaggccaactccagcaatggcttttgcaaatctgcggaaagtgctcatcag

SEQ ID NO: 464331 - DNA, 122 bp, Homo sapiens
gatgccgcatgtggcggcctcggcaccctgtgtgtgggcatgcgctgcaagctcagtccccgagccatgttcacacggctcccacactgaaggccctgggctcctcccctctctgctgttag

SEQ ID NO: 464332 - DNA, 122 bp, Homo sapiens
tttggaggcctcgggtcagagccagagatccatgttctttgtgagcacagacagtggctgcgaggaccaggctggcctcagacactaatgggactagacagtcaattcagcgctgcacccgg

SEQ ID NO: 464333 - DNA, 122 bp, Homo sapiens
cccaacggtagaggatttccccatagcatttcttaaagtcatcaaattgctgggtattggcggggtccaggagcctggataaagttaaaaagatttcctgtcagttcctttaagaaaaaaca

SEQ ID NO: 464334 - DNA, 122 bp, Homo sapiens
ttgttatttcaaaaataaattaaccgcctttcctccggcggagacgcgcaggtgagagggcggcgcctgacccagcgggctctaggtgctacgccagggccccgagggtcccgaactcggct

SEQ ID NO: 464335 - DNA, 122 bp, Homo sapiens
agagtttgaggctacagtgagctgagatcacaccactgcactccaacctgggtgacagagcgagatcctgccttaaaaacaaacaagggctgggcacagtggctcacccctgtgatcccagc

SEQ ID NO: 464336 - DNA, 122 bp, Homo sapiens
tcgacgcctcctgcgacgccagcccctgagcgatgatgcgaacgtgcgtcctactctccgcggtgctctggtgcctcacaggaggtggggctccctccacccggtccccaggcctctccctc

SEQ ID NO: 464337 - DNA, 122 bp, Homo sapiens
cccccttcacacacgcaccacgcatgcgggcgcgtggccccgcccccaaacaaggccacgcggcgtgcgctcacccgcctctcggggacagtaccaccagccccggcctgaggccccgaccc

SEQ ID NO: 464338 - DNA, 122 bp, Homo sapiens
tagcaatcagccagactccgttggcgtaggaccctccgagccaggtgcgggatataatcccgtggtgcgccgttttttaagcctgtcggaaaagtgcagtattcgggtgggagtgacccgat

SEQ ID NO: 464339 - DNA, 122 bp, Homo sapiens
ggtggttctgcccctgcccagcctgtcttaaccatgctgcctggtctgtgccgggctctgcgcattcagggtgtgattccatttaattaaacttaaactaaaccttagtgcacaaaggggaa

SEQ ID NO: 464340 - DNA, 122 bp, Homo sapiens
aggaggggtgaggtctggagttctagtattggggtagagggagggcagggggtctggtgccggtgggagcaggacttacgtcttttcaggcatgggtacccaggagttgagttcccatctgc

SEQ ID NO: 464341 - DNA, 122 bp, Homo sapiens
tcgggtgtttccggcaggtgacgctgccgagtccccgcagcagggggcgagcaagggactcgcggttgacgggacacggatcctctaaggcccagagtgtcccgagtagcggcagtggggag

SEQ ID NO: 464342 - DNA, 122 bp, Homo sapiens
ggcccgagcgaggggagagcgcagttctggaatggcgtgtgtgcagatgtgggccatgcacgtacgtgcaggcacgggtttgcatgcgtggcggcggcctgtgtgtcagcctgctggatgca

SEQ ID NO: 464343 - DNA, 122 bp, Homo sapiens
tcctgcgaggctcctaccggaagtagctgtggacagcagtgtcctctgggaaatgcagtccgaggggagagcgcctggggtggagcgggtgtgttccgccgggctccgggatgcacttgcgc

SEQ ID NO: 464344 - DNA, 122 bp, Homo sapiens
ccatttggccaggcagagccccttccattcacacggaggtgagagccgggaaggggaagccggccccagctggactcccagcagccttggttaggctttgaagccagaggggggtgggagtg

SEQ ID NO: 464345 - DNA, 122 bp, Homo sapiens
tttacacggattcgcaggtttaattctacttgtctacagagcatctttgtttgaatctaccgcatttagagaaggtcacattgtacgcacttgtacagtttaacgtctaagtagaatatgtc

SEQ ID NO: 464346 - DNA, 122 bp, Homo sapiens
cggcgtcctcaggctccggaatcggaatctccttaatttgcactgggctctggcggtgtgcggccctccggggaagcgcagcccggggcacgcagcgagggagggcagcgcgctgggggccc

SEQ ID NO: 464347 - DNA, 122 bp, Homo sapiens
tctatgagttttccgggtggctcatacgatgtcctctttgctcatgcctgcattcatggtcggtggcaggtaatgtggctgtgctgatttaggctggactctgacatgttgggggttggcta

SEQ ID NO: 464348 - DNA, 122 bp, Homo sapiens
cccaccgggcaggaccactgagcaaggccttggaaaaccagagagattagagcggtgagtcgcgccggtcacgttggacgcctgcgtgttaggagattctggagccagaagaacagcagaat

SEQ ID NO: 464349 - DNA, 122 bp, Homo sapiens
gctcagagcaaaatagtaaagaaaaaggggttggcctgtttataggtctcctccagggtccgccattcattctgacagatgacagctcctcatgagtcaatgttatgcaggagactcgagga

SEQ ID NO: 464350 - DNA, 122 bp, Homo sapiens
cctcaccatcgctggagttggaagccatcactcagtcctgttctcagggcaccggcactacggtggctgggaaggctcatgagacctgccgtgtctgttcggctgtctgtccccagaaccct

SEQ ID NO: 464351 - DNA, 122 bp, Homo sapiens
catgagttgacctgctccactacgtgacactgcatggagcgatgtgtagtgtgcggactccgatcttagaggtcagatgtggatgctcagggattcaccgaactagattcctgactgattga

SEQ ID NO: 464352 - DNA, 122 bp, Homo sapiens
tggtagttggacttgccggccttagacacgaaacgctcgtcgttcaccacggtggccaggcgctgggcggcctcatccagccggtcacttgacttgaggtactcaatgtactcctctgcact

SEQ ID NO: 464353 - DNA, 122 bp, Homo sapiens
gtagaataggctatgtcagaactataatcaccaatgacctcttcaacacgtacatatgagcgaaataaatgaaaaaaaatcttagtagaccttaagttttcactgtattttaccctgcagga

SEQ ID NO: 464354 - DNA, 122 bp, Homo sapiens
ctccaagtcaccgagtggtttcatgtgaaaggggtctgggcaggagtgagccgaggttagcggtggtatttcagtgatttggcaaatgtgcacagatggctcataaaccgcccccccacatg

SEQ ID NO: 464355 - DNA, 122 bp, Homo sapiens
cttgggcaacgtaggagacctccgtctccacaagtaaaattaattagccggctgtggtggcgcgcacctgtggtcccagctactcaggaggctgaggtaggaggatcacctgagcccgggag

SEQ ID NO: 464356 - DNA, 122 bp, Homo sapiens
caagaagctggtggagcagagcgttccctgactcctccaaggaaaggagactccctttcccggtctgctcagtaacgggtgccttcccagacactggcgttaccgcttgaccaaggggccct

SEQ ID NO: 464357 - DNA, 122 bp, Homo sapiens
cagacagggattggactggattttgtaggtatggacacattccagcctggtaaccaggtacgaatggactagcagggtcagaggcctgagacagcaagatccatccgaggactgggtgaaat

SEQ ID NO: 464358 - DNA, 122 bp, Homo sapiens
gttagtcccctttctccgagctcttgctttccccgtttcctatcaagtgttttcagcgtccgtacttccaagcgtttgcaagttgaatggctgcaaaaatatccgtctgaggagggcccctc

SEQ ID NO: 464359 - DNA, 122 bp, Homo sapiens
tgtgcctgatgaagcaacagcactgcatattctagtggccccacctgctttcactttggacgccaagaaacgagtgtgtcacttcctctcccaatcagactcggagaagacccacattggcc

SEQ ID NO: 464360 - DNA, 122 bp, Homo sapiens
gttcagctcccccatcctagctccgcccctggacgccgccgtccaatctcgggatggccccgccttttccgtgagttacgtccccgcccccatgcgctgacaggccaggcctgcggctcggc

SEQ ID NO: 464361 - DNA, 122 bp, Homo sapiens
aggctggagaacagctgtgtctgccctagcccagccgccgtccctgcccccactcctgggcgacctcattagggattctgcctctgccaccagctaattagtgtcacgttaattgagcattc

SEQ ID NO: 464362 - DNA, 122 bp, Homo sapiens
ggggtgagttgtgttctgggagcaaagagcaataacaccccccttctccccgcaagcacacgggagacgtctgtcttcccaagagacagctgggggtaggtggccacatcccggatggtgcc

SEQ ID NO: 464363 - DNA, 122 bp, Homo sapiens
tatgattgcaccactgcactatagaaatctgtgtaactttgggccaggctcggtggctcacgcctgtaatcccagcactttgggaggctgagatgggtggatcacaaggtcaggagtttgag

SEQ ID NO: 464364 - DNA, 122 bp, Homo sapiens
tgcggggtgctcctcctggctcctcgggacaccgtggccttttatcctggagctgagtgtcgggcctgccctgccatgcagggttatctctgatttatcagccacattccgggcctctgaga

SEQ ID NO: 464365 - DNA, 122 bp, Homo sapiens
agttcacattaagagcttacattttgatgtcactcaatatatggaggtcacatgaaaaaccgaaatgaacatacgacttgaaatttataatgcatgctctaaccagataagagggtttgcaa

SEQ ID NO: 464366 - DNA, 122 bp, Homo sapiens
aatcgggtcattgatttgggagtcgcagaatgtggggcggtgggggcggcggtgatctcccgatagcagtgtagccaagtacacaagctctggactcagatttcacttccaccgttttagct

SEQ ID NO: 464367 - DNA, 122 bp, Homo sapiens
ggaaataaatgagagaatatacgcataaaatttttaggagtcagtgttccaatcaatgcccgctgcagctgttaggacttggcttttatttatgcacatttccaaagagatagtcgcaactg

SEQ ID NO: 464368 - DNA, 122 bp, Homo sapiens
aactcaggactgaaatccaattgaaacccagaagaaggagcacaatgagcctgcagatgtcggggcacacccaattctggccatgtttcaggaaagagcaaaaaacattcactccagaatat

SEQ ID NO: 464369 - DNA, 122 bp, Homo sapiens
ttctcttctgaagacaggccctctgtccgcacagttccagtctccagtgaatcctaatgacgactgtcaggagactgcttatgtagagctgacataagttaaaatagggtccactgtgcaaa

SEQ ID NO: 464370 - DNA, 122 bp, Homo sapiens
gagcgtgctgggggcgggtcgcgccgggccgggccgctagtgcgcatgggcgggcgtcctcggctctaactgccgccactttccacacgctgggagggccgttacctcagagatacccgtgg

SEQ ID NO: 464371 - DNA, 122 bp, Homo sapiens
tgccgagcccgtgaacttcccttgcggcctgtggttggagacaaatagctgtgctggctccgttggcagagttggtgttggttttggtgccccaacctcctttttctggaatctgccccata

SEQ ID NO: 464372 - DNA, 122 bp, Homo sapiens
gtggttggcattctgctggtcgtggtcttgggggtggtctttgggatcctcatcaagcgacggcagcagaagatccggaagtacacgatgcggagactgctgcaggaaacggaggtgaggcg

SEQ ID NO: 464373 - DNA, 122 bp, Homo sapiens
acagtgcagaggggaggcaggcaggcttccaaactgggcgcgaggtgggctcctgctgagcgaggaggatgggaatctgtccctagatccaggcaaaagattgagtctcaataaatctggca

SEQ ID NO: 464374 - DNA, 122 bp, Homo sapiens
ctgccgcagttgggggaggagcgatggacccctaggtctccggaggctacacgtgttccccgatcccgtttccagggggagcccttccttcctattgcgctggtcgtgctcctggcccgcgt

SEQ ID NO: 464375 - DNA, 122 bp, Homo sapiens
acgagtgactgcaggaatgcaggccacctggcgcccttacggatttaacgggccggcttccgaccccctcctgcggcgcgaccactgttcctcgcctgtgtcccccagaggggaaactgagg

SEQ ID NO: 464376 - DNA, 122 bp, Homo sapiens
cttttccaggggaaagagttgtaataataacagtgggcgcttttgagcgctggctagtggcgagttactcttctaagtgcatacatttctttcacagggatactggcctgtgagtttcagca

SEQ ID NO: 464377 - DNA, 122 bp, Homo sapiens
cccgcctccccagccggaggcactgctggctcttcctctctttctccatcacagttatcacgccaacatacgatgggaagaacttgtctgtctggacagggatctctgggtgttctgtgcac

SEQ ID NO: 464378 - DNA, 122 bp, Homo sapiens
gtgacagaggcagagatgctgctgcaactggaagaagctggaaccagtcccagagaggctcggcctggaaacagtcccctgcccagagtcccctcagcctccatgacaggtccctccctggc

SEQ ID NO: 464379 - DNA, 122 bp, Homo sapiens
gagatgggcggtcaggggccggcctctcaggtcacttgcctggccaccccccatgccccacgcctcaccgaggccagtgctttgccgagggcatccccggagctgccagctgtggtccctcg

SEQ ID NO: 464380 - DNA, 122 bp, Homo sapiens
tgtatatgaatattatgacttggaaggaaaattacaaatacataagggaattccaagactcggaagatgaatttttgttgtgaacacagtgaacaagaaaacatatcacttttaacataaaa

SEQ ID NO: 464381 - DNA, 122 bp, Homo sapiens
aaggcaagctggttcggctggcccgcctggcacattcccgcgcatgctctgcgtggaggccgctgggaattgtagtttctagagaagaaggctccattttctaggtggttgtggcttcctgt

SEQ ID NO: 464382 - DNA, 122 bp, Homo sapiens
ggtgtgtggagagataaaagaatagaaaacgctgggaacaccagcatttcaagatcaaagcgtcaagaaaaaaaggtagaaagaaaagaaagattcaagactgagggggttggtctttcact

SEQ ID NO: 464383 - DNA, 122 bp, Homo sapiens
gacccccagttccagaagctgcagcaatggtaccgcgagcaccgctccgagctgaacctgcgccgcctcttcgatgccaacaaggaccgcttcaaccacttcaggtgcgggcgggccggagg

SEQ ID NO: 464384 - DNA, 122 bp, Homo sapiens
gcagcatgggggcacggctctgcaccctgggtcatctggggtcagcagtctgggcaaagccgtagtcaagattaaatgtcccacagcatcccagccatattgcctttcatctccttcagctc

SEQ ID NO: 464385 - DNA, 122 bp, Homo sapiens
gcagcccccgcgaggacggcgtggacgggctgcccaaggaggcggtgggcgccgagcaaccgccctctcctgcatccaccagcagccaggaatccaaggtaccgagcacgcttgcccccaag

SEQ ID NO: 464386 - DNA, 122 bp, Homo sapiens
cctccgggcgagtccccaggagcgcggcccaatggatcgctccgggcccgccccctcgcgcgctgattggccgccgccccgctggcctcgccttattagcaagttctctggggagccgcggt

SEQ ID NO: 464387 - DNA, 122 bp, Homo sapiens
aagccttttctcaggccactgaatataggcttatgtaaacaggcagtataactcagtaggcggagatgaaacatttgcacttctctccaagcattataatgagaaagcaaaactctttatac

SEQ ID NO: 464388 - DNA, 122 bp, Homo sapiens
tgtaggtgccatcgctgtctgtggtgatgagccggtccttctcagcgtcggcaggacagccgttgacctggtgtttccggcgaggcttgggagaacgttttatccgtgagctgccaggaaaa

SEQ ID NO: 464389 - DNA, 122 bp, Homo sapiens
tcttcaaatgaggaggccccccagtcctgttcctccaccagccccactacggaatgggagcgcattttagggtggttactctgaaacaaggagggcctaggaatctaagagtgtgaagagta

SEQ ID NO: 464390 - DNA, 122 bp, Homo sapiens
ttaccttggtggcccccgcttcctccccacggagcccggcgctcacccccgggccggggtcggggtcgtgagcccacagctcagccaccatctccgtgtgaagaaactcaaacaacacagta

SEQ ID NO: 464391 - DNA, 122 bp, Homo sapiens
gcgctgaaaatcagatgatggcagccacagaggcgctcagcacagcgcccagcgcagggccgggacccagagtggactctaccgtggggctgcctcaaagaaatctcagcaaacacaggaag

SEQ ID NO: 464392 - DNA, 122 bp, Homo sapiens
ccctaccatgaggataaccttaatccagcacaaaagaaaaatatttacaggaactgaggccggtaagttgttctcccctgtgtgatgtgatatactgactactctgattatgcaacagtttg

SEQ ID NO: 464393 - DNA, 122 bp, Homo sapiens
gggctgttccgggcctgtggttgctcagctgtcttgtctctcgggcctccgtcatcccagcggctccgcgggttcttgacgttcaggacctgtgacttgaaaatcagaggccggtggctgtg

SEQ ID NO: 464394 - DNA, 122 bp, Homo sapiens
ggcagcggcagcggcagcggcagcagctgcaggacgccccggcgcggccccgcagcgccccggctcccggacgcccagcgcctggcttgcagccccatgccgcctgcagccactccagggtc

SEQ ID NO: 464395 - DNA, 122 bp, Homo sapiens
cagagtggggaagcaccccaccctctcccagggcccaactgagcactgcagcgggaggtacggggttgtcaaatgacagttttgccattccagattgccaaaagagccagtggccagtctag

SEQ ID NO: 464396 - DNA, 122 bp, Homo sapiens
cgaacgtttgctgagcggcatccaggcctcagggaccaagtgtgtcgcgcggtgccataccgtgaccgggacctgttatttctaatgtccagatattgtaattctatgctgtaactcctata

SEQ ID NO: 464397 - DNA, 122 bp, Homo sapiens
tagaagtgggaaaagggatgctcccagcatctggggctggagacaagggacgctgcggaacgtccctcagagcacagggtgggctccataataggagtctggctcaggatgtcgccgtgttg

SEQ ID NO: 464398 - DNA, 122 bp, Homo sapiens
tttctgggacaccctcgcagtcatgcctctgagttctttcctctattccactgagatggtcggatcttcttaactaaaactcaaaagaaacctctgcaacttttcgtaaaattactattcaa

SEQ ID NO: 464399 - DNA, 122 bp, Homo sapiens
tcagggaagctctcaccgaggctcggttccatcagctcttcaggggcgaagagcaggaaccggagctacctgaagagcgcggctttccccggctcttcgggctgtggaggctgcgggctcgc

SEQ ID NO: 464400 - DNA, 122 bp, Homo sapiens
acctggacatctggtacaggcccctgcgccatgcagggcggcggggatgcacaccttttgcgggggagcaggacggactcagggcccggctgcgggctccagacaagccaggtcctcccctg

SEQ ID NO: 464401 - DNA, 122 bp, Homo sapiens
tgctggactaagaggtttccgaatgccatatatcacgtgccaataggtatccatggcatacgcatatcataccccttgcacagatgacaagacagaggcttgggctgattaaactgcttaag

SEQ ID NO: 464402 - DNA, 122 bp, Homo sapiens
aggaccgtgaatagagacactgctttggggcatcatggtcttgtgaaggtggaacaggagcgtgtgggcaggcagatgacctgggagaggaggcgtttggagctgagtgtggggaaggttct

SEQ ID NO: 464403 - DNA, 122 bp, Homo sapiens
cctcatctcccagacggggtggcagccagtcagaggcctccccacatcccagacgatgggcggccgggcagagacgctcctcacttcctagatgtgatggcggccgggaagaggcgctcctc

SEQ ID NO: 464404 - DNA, 122 bp, Homo sapiens
tatttccgcaatctccataaatcccactgagaaaactacttccaagctacacttgagctgcgcagacacatgagtatgagtagacacactggcttgaatggtgctgtggcaccacacacaca

SEQ ID NO: 464405 - DNA, 122 bp, Homo sapiens
taacaccaatctgttctcaaaacgtgaggtcctcttgctcagggctgtgttcctagcacgcggcccttgcctgacacacggctgacattcagcgcacatttaaacgagtagatcaactgctc

SEQ ID NO: 464406 - DNA, 122 bp, Homo sapiens
tgcaagatccatgaaggcagggattcttttctgctttgtcatcatgtgactcaaattcctcgaacagtgcctggcacatactagcagttctttttcttttttttttgtttttgagacagagt

SEQ ID NO: 464407 - DNA, 122 bp, Homo sapiens
gaatggaagccatttgggatttgataatggaagccatttgggatttgataggggcaaaaacgtacacaaatcaaacccagagactttggaatcagttttagaatcagacagacctggatttg

SEQ ID NO: 464408 - DNA, 122 bp, Homo sapiens
agttcgcggaggtggactgaggagtgttgacagccaccgctttgaaacccctacttaggccgcggccccacagcacgctcccgtggggcgcgttcgtgcttagctgcagcgcctcctctggc

SEQ ID NO: 464409 - DNA, 122 bp, Homo sapiens
ttttggagaagccctgtcttcacagaatccatgagcttttcttgacgtgatcagggcggacgtgtgttctgggctggcctgtgtagggtttccctttctcttggtaacagctccctggtttt

SEQ ID NO: 464410 - DNA, 122 bp, Homo sapiens
cagcaggcatggtttcattccaaacccagagctgttttaattagtttaacgtctgttaaacgctttgaagattggaagcaacagataagtactggatgatgttattaacaactgcagttaat

SEQ ID NO: 464411 - DNA, 122 bp, Homo sapiens
gccttccggacggtgtaccagctcaacggcctggccggctacttcaaaggcatccaggcgcgtgtcatctaccagatgccctccaccgccatttcttggtctgtctatgagttcttcaagta

SEQ ID NO: 464412 - DNA, 122 bp, Homo sapiens
ggcatatctggtgctcctgatgggccggccagtctgggcccagctcccccgagaggtggtcggatcctctgggctgctcggtcgatgcctgtgccactgacgtccaggcatgaggtggttcc

SEQ ID NO: 464413 - DNA, 122 bp, Homo sapiens
cggttgggatacagctgtccagctagtgacctcattttcctgctcctttgctgctagctacggtcatgaaactaagttctggccattgggatatgagcaggtgagaagtgggtcaccactca

SEQ ID NO: 464414 - DNA, 122 bp, Homo sapiens
ctgagttctgcttggattccagaggtgtgcagaggacctagggtccaggttcccctcccccgcaggggtggggcattttaacccctgagtggatgctgacagaagtgctcaacttcagatat

SEQ ID NO: 464415 - DNA, 122 bp, Homo sapiens
gcggggctggcgggcccggcgcactgcgggtgcgcctagaaggcggtgcccgccagggggcgctcgccagcctccccgccagcccggcctcccgggacccggcacctctagccagggacgcg

SEQ ID NO: 464416 - DNA, 122 bp, Homo sapiens
tgcctggaggtcgcgcgatctggccgcctccaggaagaagacgcggccacctctccctgccgggggcctgagcagatcagaccacaagcacaggctgcaaaggtaccgaccgcagcagtggg

SEQ ID NO: 464417 - DNA, 122 bp, Homo sapiens
ctgtgagcacctttggggatgacgcggccgtctgggagcacaaagtcctgcgtgcaacatcgggagatgaccgggactgggggatgcaaccgcaggctctccttaatgcacatggtcaggaa

SEQ ID NO: 464418 - DNA, 122 bp, Homo sapiens
cgtggagctctccttccgggccaggaagctggacgacaaggtgagtgcaggtgccgggcacgcctggctcaggctgaggtccgggaaccggttcgaaaacccggtccctgcccagcgctgac

SEQ ID NO: 464419 - DNA, 122 bp, Homo sapiens
ggttggggaagaagggtcctttagtcccaggttacccggaggcgcagttcctggggagggcggccacctgatctccgtccctgccttccgcagaagcctcgtggggcgcgtggggcccgtgg

SEQ ID NO: 464420 - DNA, 122 bp, Homo sapiens
cgggcgacgagggcgtgggctgcacctgcgaagatgcttccttgtgcaagaagcgcctgtcgggcgcgggattcggggctggcatctgggacgcgggctgaggtgggaggcgggcctgcatc

SEQ ID NO: 464421 - DNA, 122 bp, Homo sapiens
ctttctccagtgcgaggggtgggtgggaatgggaggatggcgctggagaggaagggttagcgtcctcacaaggaaatctacaaaactaggagtgctaaatgggtttcatttcaggggccact

SEQ ID NO: 464422 - DNA, 122 bp, Homo sapiens
ttcttaataattgaattacaaaagcatttctccctgttacctcaattctgggacccaatccggatcgaaagagtggggcgagtgctattgattgacgtgcattccaaccaacctacgacgca

SEQ ID NO: 464423 - DNA, 122 bp, Homo sapiens
gcccctctcccttggctcgtaccaaagcgcagaggaggagagggaggaaggaaccattaacgtcaagcaaagttagaaacggaaaaggaaagggtaaaagagaagaccgaataaaaatctct

SEQ ID NO: 464424 - DNA, 122 bp, Homo sapiens
catgatgtcgctctttaccgcaaattctttcgtaatcagcaaaaggaagtcattccttttcgcactggaaagacgctccactctctttcactctttggatgcacaacaatggccacacatcg

SEQ ID NO: 464425 - DNA, 122 bp, Homo sapiens
gagaagaccaagagggcagcgtggagagccagcctgtggggcagatgtcctgccacctcccgccccaggcacacacccagggcaccatcagctaaccccctgccccaaatgtggtaagaagg

SEQ ID NO: 464426 - DNA, 122 bp, Homo sapiens
tttctggtttgggtgattgtctatatgaaaacgggataaacaaaggagggcagggcatgacgatacaacagatcagaaggaaacactggggaaacttatctgagccgtgttccccaacaaaa

SEQ ID NO: 464427 - DNA, 122 bp, Homo sapiens
aggttgcagtgagcctagatcacgccactgcacttcagcctgggagacagagtgagacttcgtctcaaagaaacaaagggcaaaggacataaacagatgtttctcaaaggaagacacaagaa

SEQ ID NO: 464428 - DNA, 122 bp, Homo sapiens
agaacacctgcagcgcaagctgggtgccaccaagcaggtgcggcccatgtggtgccctcgcgtcggagcgcagggagttcccttcataccctgtttggtgcctctagtgcctgcaggacctt

SEQ ID NO: 464429 - DNA, 122 bp, Homo sapiens
gcggccgccgcgagccgggccgggaggtgggcaggcggggatccagtggcagcggggaggcgcggggggagcggggggagcgggggcggcacccgctgctggcgcagccagccgggcccggg

SEQ ID NO: 464430 - DNA, 122 bp, Homo sapiens
ctctggccccctgtcccgaggcacctgtgtgtgtcttgagtatttcctcttcatccttcacgtgtccctgacagctgaacgcgcaagccagcttccgtctgccaagagagaagggcgggatt

SEQ ID NO: 464431 - DNA, 122 bp, Homo sapiens
tgcccaggccagcatcctctttacactcttactgcttcttgtgtccttcccaaagctgcccgccccactctgatgggcaccctgttccttagtcaagggaaacgccagccgctgggcttccc

SEQ ID NO: 464432 - DNA, 122 bp, Homo sapiens
cctccaccatgcattcttggccacaggccagcctcctgctgccctggggctgtgctgggccgtcgggagtgttgcctattaaccaggcggtgtcacctccaggatgcaggggataatggcaa

SEQ ID NO: 464433 - DNA, 122 bp, Homo sapiens
cagcctaaatgaaaaaaaggtactggtcaccacaagattttattcatccactggaccacccgctggtgggggtgttttcaaaaaagtgctagcattttcaatcagggcgacgatctagagtc

SEQ ID NO: 464434 - DNA, 122 bp, Homo sapiens
gagctcgttttgcctgggacgcgatttgcttccggacgtctggggagagttgcggaactccggagttcttgggcttcctagaaggataagaagaggcgcagtgccggctttgcttttcaggg

SEQ ID NO: 464435 - DNA, 122 bp, Homo sapiens
tcctggattctactttgtgagtgttcagccaaatggaagagcagtggtgatgaagagaaacgccacttaagagagtggggcgggccaggtttcctgttggctgttccaccacaaagctgtgt

SEQ ID NO: 464436 - DNA, 122 bp, Homo sapiens
atctccactcagccatgggtcttaaattccacagcatacgcttgccaagctccagaggcccggccacatgggaggcctgttcctcccatggaaaggggttgttgagtcaaccttccctttgt

SEQ ID NO: 464437 - DNA, 122 bp, Homo sapiens
acaccctccccccgccccccaccccggccgcctgcgacccgggccgtgcgtgctgccgcccgcgccccggccccgcgtcgctgcctagctcttatcctataccggctgcagccggtctccgc

SEQ ID NO: 464438 - DNA, 122 bp, Homo sapiens
gcagacgcccgagccgagcgagaagagcggcagagccttatcccctgaagccgggccccgcgtcccagccctgcccagcccgcgcccagccatgcgcgccgcctgctgagtccgggcgccgc

SEQ ID NO: 464439 - DNA, 122 bp, Homo sapiens
tgtcccgcacctttgtctgctgggtcctttttcctcttccgatggaaaggccccagggagcgggcgacagaggctcggccaccccacgtggcccctcagtgcccgggccttaataggggcgc

SEQ ID NO: 464440 - DNA, 122 bp, Homo sapiens
ggacagagggggctggccatcttgacccatgtgtgtctctctgccctcagaacatcatgccgttgtcagccgccatgttccaaagcgagcgcaagaacccggccccgcagtgcccaccgcgg

SEQ ID NO: 464441 - DNA, 122 bp, Homo sapiens
atggcccactgctactatcactctggggattacatatcatccagcctttaaaaatcgaaccgttgtcaagggtcagggtgggagggggtggggggacagtggaaagatagtacagagaatta

SEQ ID NO: 464442 - DNA, 122 bp, Homo sapiens
gcctggtgttaacccttaaccacatcaaaattctcttaagtttcagctcaattttttcttcgcttttatttttgcctatgaagtgacttccaagtcatatctttaaaaatatttgggtggct

SEQ ID NO: 464443 - DNA, 122 bp, Homo sapiens
gctgggcagcttcaggcctgttacagcgacggtgcggcttccctgcctgggttgttgggacggaagggattccaccctggggcggtgtggggtggcttccctgctctccctgctctctgcgt

SEQ ID NO: 464444 - DNA, 122 bp, Homo sapiens
ggcccagcgccaggccagcccaagggtgccccgggggcccccgcgcccgcccgagccaggcgtaccttgttcttgacttcggccgagagcccataggaagggcccttgttgaagtgggtcat

SEQ ID NO: 464445 - DNA, 122 bp, Homo sapiens
gacagggggctgaggctggctgtgtcacttccccaggggaggccacgtgcagctggcggacggctctgacctgagctatgtggaggatggcacagcctgcgggcctaacatgttgtgcctgg

SEQ ID NO: 464446 - DNA, 122 bp, Homo sapiens
ctaattcattccagaagccccagttctatgagatactataatcttataaattatttaggccggttccaatgggcttttcttacttacaaccaagactcctaactaatatatgcacaaaatcc

SEQ ID NO: 464447 - DNA, 122 bp, Homo sapiens
tgactataagagactcataatgtgtaaaacaaacaaacaaaaaaacccttagtttgcaaccgaggaaggaactctagagagactacagtgtgactgcaaacattcatcagcccttcacatac

SEQ ID NO: 464448 - DNA, 122 bp, Homo sapiens
ctccatgagtacgtgcacgtgtctgcggtatttggcacacgtgtgtggcgtgtgctcgtgcgtgcctgcatgtgctgagtgtggtggaggagaaagtccccctaatcagtccccaggtctct

SEQ ID NO: 464449 - DNA, 122 bp, Homo sapiens
caaggaaaagtccagcccccttagggtcttgttcagcgacatgaaattggaagtgaaagacgcaaaagtaagagggcagcggtcacaggtgcatcccatgaacccacagggcctgaaactcc

SEQ ID NO: 464450 - DNA, 122 bp, Homo sapiens
tccacgcgttctcacagggactcgcccttagaacaagacagctgtatctctgtacaaatgcgggcggtgacgagtggggatgacgggactttctggggtgacggccactccctataccttga

SEQ ID NO: 464451 - DNA, 122 bp, Homo sapiens
attcttttgctgaattagaaggcatacataactgcctattataaaaatgaaagaaccaagcggcaagataaaagtggcatcttgctcaattctcagctcatggatttgagcacactaggact

SEQ ID NO: 464452 - DNA, 122 bp, Homo sapiens
gcaggccctaggccagcgctggaggatgtggggagaggctgggagaggggtggggatgaccgaggtgtcagcctgagcaaggagcctccatatctgggaagattctgccaatcaaactgcct

SEQ ID NO: 464453 - DNA, 122 bp, Homo sapiens
gctggctcaaatccccgtggaagatgcacctgtgacctgcccaggctgcaaaaccaggtgcgctgccatgggcacgactcactgggctccattttcaccacagggaacttggaccgcctgac

SEQ ID NO: 464454 - DNA, 122 bp, Homo sapiens
ccttcattctccactcgctgggggcccgagcccacaccaccttcctagcaaagcaagcagcgggacgccaaggccagcaggccgcattaagaacgctggactgagccaaaagcctacacaga

SEQ ID NO: 464455 - DNA, 122 bp, Homo sapiens
ccgacgcctctcaactcccttcgctgcccagggcagagggtaccacgggctgtgggccagcgagatactcacagatgccctggaggagccacttgggcttgtttttccaccagaccccgaag

SEQ ID NO: 464456 - DNA, 122 bp, Homo sapiens
atctgcctcgcatttccttaaaaagaaacctgaagtgcagaatgtcaagatggttgaatccgcatggtagatatgtggatatttgttatttgcaggattttttaatatgctgaaaacagtgc

SEQ ID NO: 464457 - DNA, 122 bp, Homo sapiens
acttcacagtgagtgaaatgattcctcatctgtaaaatggtatcacacttctaactagctcgtagctctccataaaataggcctaaccacaggtatgttttgagacttaagtgagatcacat

SEQ ID NO: 464458 - DNA, 122 bp, Homo sapiens
gcctgcggacagatggcttcctttttccctcccacacagacccaagcttctgtgtggaagcgtgaacctcagacacttagacgtctccagttccttcaggattgagcaagtcagggtgggga

SEQ ID NO: 464459 - DNA, 122 bp, Homo sapiens
cgctgccaccgagggccaggggcccaggacagtggctgaatgtggcagagccttgggctccgtagtgagtgccccacgcactggcaattggtcgacttggggctgtgcgctagcgttagccg

SEQ ID NO: 464460 - DNA, 122 bp, Homo sapiens
tggcctagagagtttctttcttgttggggttgttcaccggtgggaggtgcaccattgtgccgtgctgactatattcatagagttatgtaaccatcactctcatctaatttcagaacaaaagg

SEQ ID NO: 464461 - DNA, 122 bp, Homo sapiens
aagccagggggattgagcaacatctcaaaggcaaatcaccgaggaaagcaatcgacctaccgatccgctcaggaaaagtcactgcaaggagactgtaattggcagtgggggataccaggaaa

SEQ ID NO: 464462 - DNA, 122 bp, Homo sapiens
atcaccttaagtcaacacagcaaaaccccgtctttactaaaattacaaaaaaattagccacgcgtggtggcgggcacttctagtcccagctacttgggaggctgaggcaggagaatctcctg

SEQ ID NO: 464463 - DNA, 122 bp, Homo sapiens
ataactgttctgagctggccactgtcccagggattcatccagctttatgtgacttttcatcgccttggctgttgagcagaatgaaattcagtgtagcttgtgatgcagatgccaggaaaaag

SEQ ID NO: 464464 - DNA, 122 bp, Homo sapiens
attagcaagcggtgcagtgagcacggactgtctcccaaaacagcggggttaggcagggttcgtactagtagctgaaccaaaaaagggaaccgacctcacctgcctcccctagggaaggcgat

SEQ ID NO: 464465 - DNA, 122 bp, Homo sapiens
ctgtggcacaggcattctgctgagtgggacctgagagcttctgggtacaggaggagtgaccgtgcggcacctgggacccccagccaggccggacctctggctggttctgctttccaccggtg

SEQ ID NO: 464466 - DNA, 122 bp, Homo sapiens
cggcctggacggggtggggggcgccgcggaggccggcgggacttcccatgtctttctcctcgagctcggaaaaagttcccacccggggaatcccgaccctccaacttcgagaccgccggttc

SEQ ID NO: 464467 - DNA, 122 bp, Homo sapiens
tccgcccttgcctggtccgccaggtgcaattggggtcgcccggatggtaggggtatggaacgtttttcccggaaatgccaccactatggatcagatttatgaatgagtaccttttttcattc

SEQ ID NO: 464468 - DNA, 122 bp, Homo sapiens
aggttgagggtgactaaggtaacgaccggagacagctggcgcttctgcgcgagtgaagggcgcccggtcccggcataaaaaaaaaaaaagttttgtcaacgatgcccgcgttcgggactggg

SEQ ID NO: 464469 - DNA, 122 bp, Homo sapiens
gtcgcaaattcccaggcagattggctccatcggtctaatcaagctgcacttgacgctccgcgggcctgctgcgcccccgccccctcaggcgaaaactcgcctctgcccaaggctgtgcgggg

SEQ ID NO: 464470 - DNA, 122 bp, Homo sapiens
attccactcccgtttcggagacaagtggccggcagctactccccgcgcaggcagctcctccggcgccccagctgagctcccgccgcccctcaggctctgcttcccaccccctaatcccgctg

SEQ ID NO: 464471 - DNA, 122 bp, Homo sapiens
agcgacgcagaagatggtgatttctgcatttccatctcaggtaccgggttcacctcactacggagtgcgagacagtgggcataggtcagtgggtgcgcgcaccacgcgcgagccgaagcagg

SEQ ID NO: 464472 - DNA, 122 bp, Homo sapiens
cgggacccgccgggtttccatatgaagggtcgagccggcgccttgggagcgctgaatggccgctcgcggtccggcgggcgcgcacgccccgcggcccgggctggatttggccgcatttgcat

SEQ ID NO: 464473 - DNA, 122 bp, Homo sapiens
caacatggcgaaaccctgtgtctactaataatacaaaagttagcgaggcatggtatcacgcgcttgtaatctgagctactggcatggctgaggcaggacaattgcttgaacctgggaggtgg

SEQ ID NO: 464474 - DNA, 122 bp, Homo sapiens
cgtcatcatcatggtcattccgtttaaattccttcagcagcttgaggcaccgaaccatgacgtcggtccctggcaacacaagcacgggtttgccagcaatgagtgaaagcagtgctgcgtgg

SEQ ID NO: 464475 - DNA, 122 bp, Homo sapiens
gactgggggaaacagagtggaaagtggtcagaaatggggctggaacagtaatcaggaagccggaacctccattgcctcaagagctaagttcagtgtcaggcctttgtctcgagggcaacggg

SEQ ID NO: 464476 - DNA, 122 bp, Homo sapiens
ggtgggaaggaaatgtccctgagagccgggacgcgctgcctccgctgcctggaggagctgcgctgtcctgccagctaacttttgcccacggtttccactgcccgggtgacctttctgagcgg

SEQ ID NO: 464477 - DNA, 122 bp, Homo sapiens
gagcccacgcccacccggaactcgtgctggcctgtaagcgtagtgcacagccctgattcccgccggagcctctccctccacacctccctgcaagctgagggagctggctccggctttgggca

SEQ ID NO: 464478 - DNA, 122 bp, Homo sapiens
gcgtcttctatccccaggagtttcctatgctgggaagggggttgggggtggcattgggcccggcagcctggggccaggctgggattttccaccactgcctggttcacggccatgtggtcacc

SEQ ID NO: 464479 - DNA, 122 bp, Homo sapiens
caaacagtcattcagaaagtttagttggaactgagatcacaatggaaagagatagcagctcgtggtgttttacctcggacctcttgtgcttggcacaggaaatgaaagcttccgtgaacatg

SEQ ID NO: 464480 - DNA, 122 bp, Homo sapiens
attaatcgttattcttatttttctttactgatagacgctaatgaactgaagacgatccttcgagagctaaagtacagaattggcatccagtcggccaagttacttcggcatctgaagcagaa

SEQ ID NO: 464481 - DNA, 122 bp, Homo sapiens
cccgatggccgcacgtttgtgtcaggcgcctgtgatgcctctatcaagctgtgggacgtgcgggattccatgtgccgacagaccttcatcggccatgaatccgacatcaatgcagtggctgt

SEQ ID NO: 464482 - DNA, 122 bp, Homo sapiens
gcgggtgcagagatggatgtgctccctgcgcagtggggctgcgttcagccctccagaggacgggctctgatgtgctgcccgtggacccgccctgtggacacggtgagacccgccctgtggac

SEQ ID NO: 464483 - DNA, 122 bp, Homo sapiens
tttccacctctactagggacagagctggtgggtaggaccccagggaggctactacatcaacgagatgaaaatctggtcctcccaagaggctggccacgttcgtcccactaatgggtctcagg

SEQ ID NO: 464484 - DNA, 122 bp, Homo sapiens
ggagctgctcccagcgcccacgagggcgcctggtggtacccgagggcgcctggtggtacccgagggctgtgaacaaacctcacctctgggtgccacgaccctttcaccccagacgggagctc

SEQ ID NO: 464485 - DNA, 122 bp, Homo sapiens
gcccactcttacttactttctttcggagcctcagcttggccgcctttagcccaggcagtgcggaggggaagcggggaggagagaggagcctgcgggctgcagcagccgggcagtcccggaat

SEQ ID NO: 464486 - DNA, 122 bp, Homo sapiens
agagtgcggggaccgcccagcccacgcccaaccggaacttgcgctggcccgcaagcgccgcgcacagccccggttccgtcctgcgcctgcaagctgaaggagccggctccggcctcgccagc

SEQ ID NO: 464487 - DNA, 122 bp, Homo sapiens
cagttgggatttttctatcagagaagttaaaatacgatgttgcattcacttttatgtgtgcgtattaatgcagtgaatacaaccaggacaggctccttcatcgcatgtctccatctagaatt

SEQ ID NO: 464488 - DNA, 122 bp, Homo sapiens
gtctgtgtgcatgtatgtgcgtgtttgcataagatctgcaggtctgtgcgcatgtgtgcacgtgcttgcatatgatctgcattgtgtcatgtgtgtagtttgcgtatgatctgcatatgcat

SEQ ID NO: 464489 - DNA, 122 bp, Homo sapiens
ccaaaccagctccccacccacctctcacacttgccaggctatatttagcctgagagtctgcgcctgtgtttattcagaggttgtagtcacacatgaaacaatgccctccccggggcgtgtgc

SEQ ID NO: 464490 - DNA, 122 bp, Homo sapiens
attctagaaaatcccacccaggcacgtccctggtcaggactttagacccggtggctaccacgtggccatggctagctgtgtccacacggcccctccgaagcgccttggccccagctgcactc

SEQ ID NO: 464491 - DNA, 122 bp, Homo sapiens
atcacttgaaaacactctttgactaaagtatgataccactattatacctaataaaatgaacgcttctataatatctttcaatacttgttacttaatccatattcactttccctaatttgttc

SEQ ID NO: 464492 - DNA, 122 bp, Homo sapiens
cgcccgccccctcgcgcccgccccctcgcgcccgccccctcgcgcccgccccctcgcgcccgccccctcgcgcccgccccctcgcgcccgccccctcgggtaacaaacatggcccccggcgg

SEQ ID NO: 464493 - DNA, 122 bp, Homo sapiens
tgagcttagaacatctggaactccgaggtccaagctgaatgaccggtatttaggctctttcggctttttatagccattggggcccaaggatgctgtgataacctaacagtaggttggaagtg

SEQ ID NO: 464494 - DNA, 122 bp, Homo sapiens
tggtaaaagatcctgggcatccactggttatctcggagtggcaggggcactcagtccctccgcaggttcttaagccgttcctccaggtctgcatcagcatcagctagggctgaggctgcggc

SEQ ID NO: 464495 - DNA, 122 bp, Homo sapiens
gaaatgagggtcatctgtcttggaaatatgcaccgctgagtggatctgcctgcccatttccggagccctgtgcctggcgactgctgggggatgggcagttgcagtggtgactctggaggggc

SEQ ID NO: 464496 - DNA, 122 bp, Homo sapiens
agcatggtaagtgtcaggtggcccttccaggagctgttgcagacgtccgggtccagcactcggaccttggcctccatcagtccaggcggcagctcctcaaagtcagacacgaagccccagcc

SEQ ID NO: 464497 - DNA, 122 bp, Homo sapiens
ttcagcctctccgcctgtttctttagcattggtttttctgtaggagacaagccttcaatccgaaaggaagtgatttgcatagggctttgttgtttagcatcccgttccgagctttttcatta

SEQ ID NO: 464498 - DNA, 122 bp, Homo sapiens
gacctggcgggaggctgggtgtccaccctttcccctgcagtcctgaaagtccggtccgagcgcggacggggcggggaggggctgggcgggccaggccagctccattggcgccaggcgggtgg

SEQ ID NO: 464499 - DNA, 122 bp, Homo sapiens
gttaatttcagctcagaaaagcagaaacgatacccttggtactggactggaagaaaactacgaagtgagagagccatgaagattcagaaaaagctgactggctgcagcaggctgatgcttct

SEQ ID NO: 464500 - DNA, 122 bp, Homo sapiens
aaccagggcgcgtccgcacagacttggaggcggctgcatgctgctacctgctccagaaggcgtccggtggccgctccgcagtttcagagcctagagacaagcagaggaaggaagacaggaca

SEQ ID NO: 464501 - DNA, 122 bp, Homo sapiens
cctggcttagaacctttgacagtgtgccctgatagactctctttggtcagaatttttttgcgagtttcatagaatcgtctcatttatatgcacttaaacacctaaaaacattcaagagaaaa

SEQ ID NO: 464502 - DNA, 122 bp, Homo sapiens
tcaactctatagctctaactggctagaagtgcccaacgtggaatgtttcttttttaaaggcggctcttgaagcgacccggaagcggaagtggaagaaagttctagtggcttgaggtatccgc

SEQ ID NO: 464503 - DNA, 122 bp, Homo sapiens
tctggatattttaaagcatggaaaccctgagccctgactcctatcacatgtagaatcaaccgggtgaaaacagaaacacttcagaagcttcagaggggctgctgattctctatgaatgaaag

SEQ ID NO: 464504 - DNA, 122 bp, Homo sapiens
tgcgtcttgctttcagaaaacccatatgtaaatatctgaaatcacaccattattccctggcgccatgagtcatattttattgtgctctaggttcatgtgtcttcctgtaacatcagagtcca

SEQ ID NO: 464505 - DNA, 122 bp, Homo sapiens
ttggccttctggtccttcttgtacttcatgcgccggttctggaaccagatcttgatctgccgctcgctgaggttcagcaggttggccatctctacacggcgaggccggcacaggtagcggtt

SEQ ID NO: 464506 - DNA, 122 bp, Homo sapiens
aaactcacctcttgactgccacctacgagccatgatatcttagccaagtgctttcttctacgtcttagtttcccatatcttagatggggatattggtttttatctcacggaattaaaatggg

SEQ ID NO: 464507 - DNA, 122 bp, Homo sapiens
cagcaagcaggccctggtgttccactgagtgggctgcgggtgcttccaccttcagcgcctcggcaaagcgtcaggagtcccccgcggccgggtcaagtcctctgtagcctgtgttccccccg

SEQ ID NO: 464508 - DNA, 122 bp, Homo sapiens
tggaaagtggaggatccggtttgctctgggcgggtctggaagcagagccggcggagggagcgccggggccctgggctgcaggaggttgcggcggccgcggcagcatggtggtgccggagaag

SEQ ID NO: 464509 - DNA, 122 bp, Homo sapiens
atgctccctagggccactgactggacgtgagcatctcaaccagcactctgagatctgggtcgcccatgacaagactgtttgcagatcctctttataaaattggctacaatgctcatctccaa

SEQ ID NO: 464510 - DNA, 122 bp, Homo sapiens
ggtgaccctgatcaccctctgggtgtacgtgtacgtggacccaaacaatgtgctggacgccgagaaggcctttgtgtctgtgtccttgtttaatatcttaagacttcccctcaacatgctgc

SEQ ID NO: 464511 - DNA, 122 bp, Homo sapiens
caggagtccagtgttttagccttcgaaggaccatggtgcttccacgtcatcgtgttgtggcgctcccggctatggcagtaccgtagttttcctctcttctgcctgcggtgaccattgggctg

SEQ ID NO: 464512 - DNA, 122 bp, Homo sapiens
ctaaatttctccttacactaaattctctggtctggtgttgccaaaatctccaaagtccgtcggaccttgcagcgctctgccgagccgcagcctagagaacctgaagaggcagtacgcgccgc

SEQ ID NO: 464513 - DNA, 122 bp, Homo sapiens
gcctggtggggtgggttccaaccaacccgcccctcgagtgccggaatcagcaggacgaatcgggtcccaaagatgtgggcaagactgttccgagggtcgaaactctggttcaggataagatt

SEQ ID NO: 464514 - DNA, 122 bp, Homo sapiens
agggcagggtcagctctcggctgcacttgggcaagagatagctggagctatcgccgcctgcgccgcgtccctgcttgtggcacaaggggcgggtgaaggggcaaccccctttctccctctcc

SEQ ID NO: 464515 - DNA, 122 bp, Homo sapiens
ataacagaccaggaaaggaattatctgattcagaatacagcctgtactccatcctttcctcggtgaaacctcaaattccttagggtgacattgagggccatttatcatgaccaacctcaccg

SEQ ID NO: 464516 - DNA, 122 bp, Homo sapiens
tccctctgtctctctgtcacttgttcttgtctcatcacaaatctttgctcaaagtttcttcgtggtcccctttcctgaggacaagccctgccctctgcctgcgggcccgcgtcctctcctct

SEQ ID NO: 464517 - DNA, 122 bp, Homo sapiens
gcctcgcacctgggctttaacccttcccagtcacgggagtgggcggagtgcacgcagggacggagtcgggggcgagcagcgagagaggccgggcttgacccttgaggcggggtgggcagcgt

SEQ ID NO: 464518 - DNA, 122 bp, Homo sapiens
gcagccagccgctgggtgcagggctggtggccaccagctactcctgaggctaagcagccccggggtgacacagctcctttgtgtgtgtgtgtgtgtgtgtgtgtgtgtgtgtgtgactgagt

SEQ ID NO: 464519 - DNA, 122 bp, Homo sapiens
gtctcctcggaggcagagcacagagctggagctgcaggagaggaggttgagagcctgaggcggggatcccagaccagcaggcagctgtgcatttatcctgctttggcagctcagccccaccc

SEQ ID NO: 464520 - DNA, 122 bp, Homo sapiens
agtgtgaagctcacttggtagcccaaagatttcactgggatcagtcactgtatttgaaaacgtcataactccactttgagcttttttaagagcaaagtgtcattggccctactttcagtctc

SEQ ID NO: 464521 - DNA, 122 bp, Homo sapiens
gtccccacgaccaccccaggaccctgtccacacctgctgcattcagtgccagcctcagctcgtaggagttcatggttccagaggtgtcctcatcgaacttgttaaatatggcctgggcagga

SEQ ID NO: 464522 - DNA, 122 bp, Homo sapiens
gaccgggcgatctcacacttgctgacatccagtccccttttgggcatgaaacccatgccccgctgcggctctttgctgctgaacgtgttcaggtagtgcacgaaaggcggctcgtcggtaat

SEQ ID NO: 464523 - DNA, 122 bp, Homo sapiens
gaggatggtgactgggatgcccaacagccagaagaaaccgggggggtttcagagcaggaacgtgagggcccgggctggtggcaggcaggggtgagacgaagccatgcagcgggggtccccca

SEQ ID NO: 464524 - DNA, 122 bp, Homo sapiens
agctttgcagttgaaatgagcatctaaaatcaagggccaagtcccaacaaaatttcgtctcgattttcttctgagaaaatgaagtaatttcttattctcctaaacataggagtataagaaaa

SEQ ID NO: 464525 - DNA, 122 bp, Homo sapiens
gagacaagtagaagttggggtgctcttgttgaatgtctggctctgaactctagaggaggccgcaggggctgggcaggaaggaggtgaatctctggggccaggaagaccctgctgcccggaag

SEQ ID NO: 464526 - DNA, 122 bp, Homo sapiens
gagccggctctgcgtctggctgcgccggcaagaagccacaattacgcaggcaaaagagcccggggattagccccagcacctgggaccctgaatggtgagaaggcacctagggggtgttggaa

SEQ ID NO: 464527 - DNA, 122 bp, Homo sapiens
tctgcgccgcggcgtgcagtggggtcatgccgtcgtgggcgcgcgcgtgcgggtccgcgccgcattcctgcaccaggtactgcgtcacctccaggtggccctcctggcacgccaggtacagg

SEQ ID NO: 464528 - DNA, 122 bp, Homo sapiens
atagttcattctctgtgcaccatctctctacttttccatactgtgaggtgttgagggcggcgtctgaattttgctaatctgtagattcccaagacccaatgccagctcctaaaggtgtgcca

SEQ ID NO: 464529 - DNA, 122 bp, Homo sapiens
gcctccacccagtggagatgctcccctccttgagcccctcagcccctcacatgtggaaaccgcccaggccagccaggcctgtgatccacttgcctggccacagtccatctgggctccaggac

SEQ ID NO: 464530 - DNA, 122 bp, Homo sapiens
ctattattatctccaatttaaagatgaggaaattgagacactgggacttaaacttgcctacgttcatttagcaacaaggtggtaaagccaagatatggcccttggccccggcacccatgcac

SEQ ID NO: 464531 - DNA, 122 bp, Homo sapiens
aggcagcgccctctgtatccttgttcaaaacaaagtgcgattcggctgaagccgactgaccgcgattcagggccgccttgggtggggttttgaactgtgcagctggaagcagtgttttccga

SEQ ID NO: 464532 - DNA, 122 bp, Homo sapiens
agagagagagagattgttccagctgctctcgctagagaaagggagtgacccaaggggccgcgagtgaagggacaggatggcttaggtacctctgcccacaggaccccacaacagggagaggt

SEQ ID NO: 464533 - DNA, 122 bp, Homo sapiens
cgccactctgggcggctcccttctccaatccaatcagcagcgggaggtgccttgtcgagccgacacctctcaccgccacgtcatctctctgggcctcagtgccttgaatggtataacaagag

SEQ ID NO: 464534 - DNA, 122 bp, Homo sapiens
gtgattttggctgggcgaaagaaaacagatcagttgagctcctctagctggaggaaatgacgagtttaactcctggacttccgcttccggggtgcccaggctcccagaaatcctcgcggcaa

SEQ ID NO: 464535 - DNA, 122 bp, Homo sapiens
cggcgtggccgagctggggcctgggaagggctcagccgctgggcgtggggcgcgacagagcggcagcactcaccatagccaaaggagtccgctgccggttgttaggcaaccgacgtgtacac

SEQ ID NO: 464536 - DNA, 122 bp, Homo sapiens
ccaagcaagaggccaggcttcgtgcaaagaagggcagcatctcgccccgagcgccaacaccgcctggcacgtctctgtgctggaggtaatcgccactcaagtctctgcccatcttcctggga

SEQ ID NO: 464537 - DNA, 122 bp, Homo sapiens
tttgaagggctgtcagcatttccattctccggccccttcgttcggggaggcatttataaccgagccataaaaaattcacccggggctgcaacttggcatctcccagactgcgctccaggcag

SEQ ID NO: 464538 - DNA, 122 bp, Homo sapiens
gttaagtcccacagtgggtgctgtgaaacctacataaaggaaaagttggctctctgtatgcgcaagtttcgtatcctgtgaattctgtattttcaatccacatttggttgaaaaatttcagc

SEQ ID NO: 464539 - DNA, 122 bp, Homo sapiens
ccccacccctctcaatctcccatcccttgcaaactcttctggtggctctggtggtgaagtcgggcggggagggagacttaggacttgggaagagcccagtctccgttctctctcagctctcc

SEQ ID NO: 464540 - DNA, 122 bp, Homo sapiens
ttctctcagctttcttggtgagatctttggcaaccttcctactgttgattgtaactggtgcgacttggaacacgatgtcactcttccagaactcttctcagacctagataaaacttactctg

SEQ ID NO: 464541 - DNA, 122 bp, Homo sapiens
aatcaatgaatagtacacaataaatgaccattaacttgtctacactacaaaaaacagtggcgagcttattaaaggtgtccagagcttttttttttcactttttgcttttttaaatgtaatcc

SEQ ID NO: 464542 - DNA, 122 bp, Homo sapiens
gggtcaggagtcaaaatcatgaaaagcaatgaaaagaaatgaagccaagagcagccagtgcgatgagaagaaaactgagtggtgccctggaagccagggaagaacatgtttccaggaaggag

SEQ ID NO: 464543 - DNA, 122 bp, Homo sapiens
gggcactcgagaaggcgcctggtccccgggaaggtcccgggccgcgtaagtctcgcctagcgggagtcaccatcttaacgtgcgaattgagttgaaagccggataaacctcgagtgctcagc

SEQ ID NO: 464544 - DNA, 122 bp, Homo sapiens
ctgctgctacacacgcctgggagagcccagcgagagcccagaaagcgggttctgttctgccggagggataggcgtgtgtggattttccccactgtgcgccaggcacaggggctccaccagct

SEQ ID NO: 464545 - DNA, 122 bp, Homo sapiens
ggcagcttcagggactcttctccagggaactggaagggagcggaagaacttattcttaagcgaaggagccctatcagcgaccaagctcaattggtggaaggccccttcccctagccccagtt

SEQ ID NO: 464546 - DNA, 122 bp, Homo sapiens
gggagcctcgctgaataagcacagcggacaccctgccggatccagaggggtggaagtcagcggtgggtctgtgacgactgcgatcagcaccacgagctaaagctcagctcgagccggaacac

SEQ ID NO: 464547 - DNA, 122 bp, Homo sapiens
cctttgcgtcctctgtgactcagggctctgatgtgagtctctggctcagggtctctgttccgggccccaggtctgattccatctctccagcagcatttacccggtgtctgcctctagcctct

SEQ ID NO: 464548 - DNA, 122 bp, Homo sapiens
tggctgtgcacatgcctgttgaacatggctaggtgacctagcttgtcacacgtgtacctgcgtgcattgctcacatggctccagaggctgagctgcagttgccccgacatgccacatgccac

SEQ ID NO: 464549 - DNA, 122 bp, Homo sapiens
agggccacgggcccatctctcccgtggatgctgctacaaatattccatgcaagatattcacgagattccagtcatgtaaagtgtatgataaaatctcaaatcaaactgcctcaaaggaagaa

SEQ ID NO: 464550 - DNA, 122 bp, Homo sapiens
gcccaggtgagcggggcctgcggaggcagcgaggggcgccggccgggaaccggcagaacgcgtgcagccagaagacaggagagataatacattcccttaagtaataaaagtttccaggacaa

SEQ ID NO: 464551 - DNA, 122 bp, Homo sapiens
tgtctctccattaaaatggtggttttcctggaatagacgttattttcagggctttggaagcgatgtggttaccgttgtatgcttagcatgcatgcatttatttttgcatctattcaaaagta

SEQ ID NO: 464552 - DNA, 122 bp, Homo sapiens
cacggctcgaaacaccggcgcctctcgcggtgctaaaaggatgggcgcgcaccctccttccggcatccgtagaacccccgcctttgacctagcttcaggagattactttccgggtcagcgtg

SEQ ID NO: 464553 - DNA, 122 bp, Homo sapiens
cgatttgcccggagggagggggctttccagggatcccccagactgtgaccctgagggccacggttcgggtctcactgtcgcccagccggggggtcggaacttaacccctcccgcgccttgga

SEQ ID NO: 464554 - DNA, 122 bp, Homo sapiens
cgcggctctgccttcacggagtcccctggggctgtgctgagcagaaagcagcttcgccctcgcagtgcccccggcctccccgggtctgtgcagaggagaactcagctccgccctggcgatgc

SEQ ID NO: 464555 - DNA, 122 bp, Homo sapiens
ccgctctccctgagggtcctgggaaggcggcacgagaccggaagtgcccccctcaggtgacgtcacagtaccgcgccggagctgatccgggaagccgatgtcagcctggcgcgcggcgcaca

SEQ ID NO: 464556 - DNA, 122 bp, Homo sapiens
aattaatgctgaatctgtaattcggatgacatacaaccccggccagtgctccaaatgaggcgattaaagaaagggctcttctcctgcctcgccagagaacaagcaaaaccgggggcttcttt

SEQ ID NO: 464557 - DNA, 122 bp, Homo sapiens
gccgtgatggggtctccagcctccttagcagggtgctgagtacatttggcagcatgcgggcgtggaactagtgtccctcacttgcccccatcactcatagggttgggcctgcagccctcacc

SEQ ID NO: 464558 - DNA, 122 bp, Homo sapiens
gcagagaagcagggcctaaacagtgcaaggcctttgggaaaggactgtgaggcagagtgacggggatccaaatcattgctggtctccctggaagttgggaggctgcaacaggagccccgctt

SEQ ID NO: 464559 - DNA, 122 bp, Homo sapiens
agatggctgtgtgcgcaggcgcaagactagcgctcttgggaccggaagttaaggcgttcgcggcgtgtggtaagtgaggggggcgggacgggtgtaccgggttgtggcggcgatggctgtcg

SEQ ID NO: 464560 - DNA, 122 bp, Homo sapiens
ttgcagaaagggggccctgaggcagaaggtggtccacgaagtcaagagccacaagttcaccgctcgcttcttcaagcagcccaccttctgcagccactgcaccgacttcatctggtgaggga

SEQ ID NO: 464561 - DNA, 122 bp, Homo sapiens
tgaacggggctcgcccgggagtggaaggctgacggaggcctgggttggggtggggggccccggcccggctgtacctgctgctccccgcggagctctcccacgtagtactgctccagccagcg

SEQ ID NO: 464562 - DNA, 122 bp, Homo sapiens
gaactcaagatgcgtgcagccgcccggacgatctgataaacatggggctgagtgaaaacacgggaacaaggagacacccaacacagtatcacctacattgctccattaaaacagctgaacat

SEQ ID NO: 464563 - DNA, 122 bp, Homo sapiens
ctctgtcacccaggccagagtgcagtggcccaatgtcagctcacgataacctctgcctcccgggttcaactgattctcttgcctcagcctctcaagtagctgggattataggcacacgctac

SEQ ID NO: 464564 - DNA, 122 bp, Homo sapiens
actttcgcggcaaatggttatagctcttaaggctgcgctcttggagttgttcattcctcccggtgggttcgtggtctggctggcctcagaagtgaagctgcagatcttcgtgttgggtgtta

SEQ ID NO: 464565 - DNA, 122 bp, Homo sapiens
gcaggggggcccgggccccgccacagcgggttcctctcggttccacccagtccctcctttcgccttgggactccccagcaccgcatgctcaccatttcctggcttccaggtattctggcgtc

SEQ ID NO: 464566 - DNA, 122 bp, Homo sapiens
gcttccgcgccctgcatcccaacactgggagcctcccggcgcggcggggcttctggtgatcgagggacaattgcttttttcagaccatgcacggtctaataatgcgttcgcattattatggt

SEQ ID NO: 464567 - DNA, 122 bp, Homo sapiens
gatagtggaaataccatgtgctgctccgggaagcttttcccagtgtttgagtgacgtgagcgtgtggcgggaagaagctgcgtttggctgcgggacagtggcggctccagcatttccatata

SEQ ID NO: 464568 - DNA, 122 bp, Homo sapiens
ctaacctggactgctttcacttctctcaacttgccgactcaagctgctgcagcacttctccgtctcctccctgcttctttcgtttcctgcacctccttccccagcgtgagcgttaagggcgc

SEQ ID NO: 464569 - DNA, 122 bp, Homo sapiens
ggccttttatatttactcaactcagcagctgagcagttcattagcaaatcctgaaatgcacgtaggtcataagctccaggaatgtgaagactgttttataaagcaatcttagaaaggcaacc

SEQ ID NO: 464570 - DNA, 122 bp, Homo sapiens
aacctcccaggaggggcgcggcttcggacttagcttctgcccaatgagagagggtctccccgtgactgtgctgccagggaagccacttgaccctggtgcccccaaggagggattcagcccga

SEQ ID NO: 464571 - DNA, 122 bp, Homo sapiens
agcagcagcagcatgaatgagacggggccttctagaacagtgggctttctcatagacagccgaatctcgctttcgtgacccagcaacaagccctctccttaggacagccacccttgaaaaat

SEQ ID NO: 464572 - DNA, 122 bp, Homo sapiens
ttggttaaagcgcctgtctagtaaacaggagatcctgggttcgaatcccagcggtgcctccgtgtttcccccacgcttttgccaacattaaacattgtgaggacagttgcagaaactcataa

SEQ ID NO: 464573 - DNA, 122 bp, Homo sapiens
gatgctagaattctctataaaaacacacacaagcaaagagagggcctggggctcgtccggcggtaacagcagcacagtacaaggcacggatgcggaaccggctcccaaaccccgcgcctcac

SEQ ID NO: 464574 - DNA, 122 bp, Homo sapiens
tacaaaggtctggcaaaacaaatttagttcttcatctgcattgcaggaaaaacaaaaccacgaaggctggcatgttccttctgcacaactgggaagacattaggtgctggaaacccccaaca

SEQ ID NO: 464575 - DNA, 122 bp, Homo sapiens
ccgctaggacactgcagctatagtccccaaggtgtgcctggccgctgctagtactggctccgggctgagtccgttcctcaactcttaaagcccgtggagtgcacagaaggaactttctgctt

SEQ ID NO: 464576 - DNA, 122 bp, Homo sapiens
tcctgatccgtgcaccaaagcccttggtcatttagcttcaggttctcaaattaagtcctccgcggccgcgctgtggctcatgcctgtaattccagccctttaggaggcgcagttgggaggat

SEQ ID NO: 464577 - DNA, 122 bp, Homo sapiens
cgatcctaccgaggagccaggacccttcagagcgccccgctgccgggctccagaccccaccgaaggttggagaacccacttcctcgtgccgcaccttgactctggggagagtaggtagtgag

SEQ ID NO: 464578 - DNA, 122 bp, Homo sapiens
gccactttcggggacttaagaagtgtttgcttttgaaagacatctggtttctgtggctaacgcccagtggtcaggccgcccaggtcacaggccggccgggggcgggcggtgggtggggactg

SEQ ID NO: 464579 - DNA, 122 bp, Homo sapiens
ggtaccagggtctctccccgtaccagggtctctccccagaaacaaactcgcattcgtaaccggcatcttggccttgcgctaggggtgactcgcccaagcctccatgaagggacgcttgcaca

SEQ ID NO: 464580 - DNA, 122 bp, Homo sapiens
tagtgcatatttcatcaaacactaggcaattatgaaaatggtttaagaactacagtaccacgtacagtaatttaatctgtccattccccttccccacctcctccaaagataaactcgtagtt

SEQ ID NO: 464581 - DNA, 122 bp, Homo sapiens
gtgatgcctccagctttgttctttttgcttaggataatcttgctatgcaggctctatgtacgaaaaagaaagcaattcagctcttcttggtcatggaggacacctactgactcatttgtggc

SEQ ID NO: 464582 - DNA, 122 bp, Homo sapiens
tcgcaacaaccccgggggtctcataaacacagcaaagactcgcttccacaatcttccaaacggagtcaagtgctgtcaagtttatggaggaagaatgccgatcagttttcctctatctccat

SEQ ID NO: 464583 - DNA, 122 bp, Homo sapiens
cactcggtaccagttatcttgctacgcagaaggccactgggagaatcccatttggcacgccggaaaaggctttcaactttatctcccgccatgtaaataaccccgagtgcctgactgaggga

SEQ ID NO: 464584 - DNA, 122 bp, Homo sapiens
ctgcctgaaaagacggcagcctaagctgtcactctttcttcactcagcccagcatctgttcgcatcttctgtcactcagggcctgagaaggtggggttttaaacgttatccaatcagcgacg

SEQ ID NO: 464585 - DNA, 122 bp, Homo sapiens
ggagccctcccctgctctctggcgggggttccttctggtttttgggtcttcgtccgcatccgcatcttcccaggggccctggattccgaatccagagctctccagtggctgctgcaccttcc

SEQ ID NO: 464586 - DNA, 122 bp, Homo sapiens
tgtcagtcctaatccaacgttcctattggtcagttcccaagcggttggagacaaagctcgcgcgcacattggacccgggtgggaggtggtaccgcaggccgcgttgaccggaaagtaggtcc

SEQ ID NO: 464587 - DNA, 122 bp, Homo sapiens
gtcctgggtaccgagcatgggcgctgcgtcagtgcgcgctggcgcaaggttggtggaagtcgcgttgtgcaggttcgtgcccggctggcgcggcgtgggtaagctgcctgtcggctacggtt

SEQ ID NO: 464588 - DNA, 122 bp, Homo sapiens
cctcgaccacgtagccggtgctgctgctgataggtagtccctcatgctgccgcgagaccccgcgacccgacataaacgctgcagctgctgcgacgcggaggcgcgccgctgccacgctgcag

SEQ ID NO: 464589 - DNA, 122 bp, Homo sapiens
gaagtccacctaacggcctcatctgaactttgcatctgcaaagaccttgtttccaaacaacgcccacattctgagattgggggtgaggacaccaacatatcattttggggggacaccatgga

SEQ ID NO: 464590 - DNA, 122 bp, Homo sapiens
gccatgctccagacaaggcggctctgaggcccagagagcccggggacacaagctggttcccgtgaggtgagaccggcctggtacgggacgggaacggacagaaggcagggggcaagattcga

SEQ ID NO: 464591 - DNA, 122 bp, Homo sapiens
gtctgtaacctaggagtaacagactgtaccatctagcctgcatgtgtaccatctagcctgcgtgtgtcgtaggctagattgtccagatttacgtaagtacactgtgatgtccacacagaaac

SEQ ID NO: 464592 - DNA, 122 bp, Homo sapiens
ttaaaaaaaaaaaaagttaatggcagcacagtgctgtgaacttttgttatcctgatgcaacgctgttttactttataaaaactttatgctgccttccttcaaagcagtcacctcactctatt

SEQ ID NO: 464593 - DNA, 122 bp, Homo sapiens
tccgctttcccccgggccggatgccagcccgccgagcgcagggcagcggggagctggtagcgagacacgagtgacgactgcaccgaaggctgcgtagctctgcagctcccggtcacgtgagg

SEQ ID NO: 464594 - DNA, 122 bp, Homo sapiens
cttttcctctctccagtgttgatgctcagaatcccaggccgcctgctcagcctcagctatcggtgcgcacgtgaccgtgtgtgtgccctgagatgcaggagcaccgagaggcaggctttgtc

SEQ ID NO: 464595 - DNA, 122 bp, Homo sapiens
gtctaagtaatctgcagagggctgggaaaaatccagaacaaagctctcgctctctgctgtcgtcaagctcacaatgttgtctaggagctcggtgatgttgaatggcatatctagcgggtcat

SEQ ID NO: 464596 - DNA, 122 bp, Homo sapiens
cacctcttcgtccttagtggctgggagtaatctcagctgcgttcatccaatcgacagacccgcccctccacgctgtcgcctggggctacgagacgccattattctgtttccggcagttttac

SEQ ID NO: 464597 - DNA, 122 bp, Homo sapiens
tttctgttaaacgcatgctggggaggcgccagatctccttccttccacccccacgtctcccgacctccagcagctgcagggaagagctggaagggaaagtggaaacccaaccttcatgggtt

SEQ ID NO: 464598 - DNA, 122 bp, Homo sapiens
tcgccgaacgtttcagggcgcctgcccattggtggcggcggcagaaggttggccaatcaccggggccgttgctcggaggtcaagtcccacctccctcccttgagccagtagctcctcccact

SEQ ID NO: 464599 - DNA, 122 bp, Homo sapiens
gctaaggagctgatcttcagctcacaacagcgtctcctccgtgttctgttcctgaggtggcgagtcatgtgtggctgccacttcgtttgcacggggcatctcagtcacggtgctctaagcag

SEQ ID NO: 464600 - DNA, 122 bp, Homo sapiens
gcttcatttttctgagcgcctcggagtccccgcgtagttagtcggagtctgaaacttgcacgtccccacccccattttgttactcagccagtcaccgcttcctgctggcccccctttcctcc

SEQ ID NO: 464601 - DNA, 122 bp, Homo sapiens
cgcagtcacccgcgcttccgcgtcccggactagggaaactgaggcacggtaggcgcgtcgcgcgcaactcccgcctcggcgcctgccccctggaagaaacccaggcttccagagttcttcgc

SEQ ID NO: 464602 - DNA, 122 bp, Homo sapiens
ctgccaccctgctcctggttctctgcctgcagttgggggccaacaaagctcaggacaacacgtgagccatgcccttctcctccccacaaaaaaaattgcagggagggctcctctcccagtct

SEQ ID NO: 464603 - DNA, 122 bp, Homo sapiens
tgatatccatcagaaagctgggagcctgcctgggcaggatgaccataacgttccggcgagcgttttgtttatttataactgatgtccccatagcgagtgcttggcaaagaagtgaaccttgc

SEQ ID NO: 464604 - DNA, 122 bp, Homo sapiens
ttgactctcaaatcaaggaactgattgattcccctttaacaggatctatggcaaataggacgtctgcccccgccgccacgccccgctctttttaaaacctgagaacccccttgccaacagtc

SEQ ID NO: 464605 - DNA, 122 bp, Homo sapiens
tcccgccctccaaggtcacctcgcggtccgacatggctgctggggctccttcggggccaacgatgtgtacttctagggctgttttttaaagcaaaggagtgaacacaggtaaaggcacgaga

SEQ ID NO: 464606 - DNA, 122 bp, Homo sapiens
tgttctaagtaaattaattaaaataccacaatcatcttaaaaggtagacatagccaagtgcggtggctcatgcctataatcttggcactgggaggcggaggtgggaggattgctggagccca

SEQ ID NO: 464607 - DNA, 122 bp, Homo sapiens
cctgatttcacataaaattcctgagaagacactgaaaaggtgaaaatccccgacaactcccgctaaagagagggaaacagaaccgatccattgatagaatctggcaggaattggtgaaaaca

SEQ ID NO: 464608 - DNA, 122 bp, Homo sapiens
cgcaacagcccggagccgtggccttgcctgtggctggaggagttggcaaagcgtggggcccgcggatgccagcacaggctcatcgacctcccccagacggcgcctttgtcccctcctctctc

SEQ ID NO: 464609 - DNA, 122 bp, Homo sapiens
ctgagaaggatctgaggctgttctaagctgcctgccatagcccacgttttgcagagtcaccgtctgaccacagcatgcacttacacccctgcccatctatgagcgaacatactccaatgaag

SEQ ID NO: 464610 - DNA, 122 bp, Homo sapiens
aggatttacatcctagttaaatcttcattccaggatggctgcaagcaaatatattccacacgtcccatctaaccactgctcatacagaatcaaagtacatcaaggttggaaggggattcaca

SEQ ID NO: 464611 - DNA, 122 bp, Homo sapiens
ccacctgggcgcgggacccgaaagcccagcgtcgacgacgcagccacttccgattccggtcggagcaccgccccgtccccgaacacgtgacacacacttccggcctcctctcccgccggccc

SEQ ID NO: 464612 - DNA, 122 bp, Homo sapiens
ctggccgcggtccgggggtggggggcgggagttttcaggctcctggaccaggagggaagccggctccggctactcccagctgcctggagcccgagttcctgtctggcggctgcgcggccggg

SEQ ID NO: 464613 - DNA, 122 bp, Homo sapiens
accctaccttgccctagatgtggggttctcaaagtgtggtccctggatcaggatcagcatcgcctgggaacttgtaagaaaggcatgttcgggcctagggtggccagccatcttgttttctt

SEQ ID NO: 464614 - DNA, 122 bp, Homo sapiens
ccgagtgaaagtgcagttgcccgtaccgatatttcaaaagccagaagatggttgcacagccgaagcccgtggccacactgagatgagacttcggctggggcagagaggccaggaattcgctg

SEQ ID NO: 464615 - DNA, 122 bp, Homo sapiens
tgcgcgggtctgggtccgccggccaatccctcacggtagggcgggccctgaggttggcttcgtaaacaattggagcctaggccaatccgaagtcccagagcacagacagactaggacaagag

SEQ ID NO: 464616 - DNA, 122 bp, Homo sapiens
gcctctccggctcccgacaccccccagtccatggactctccccccatcaatatccctccccgtgatctatgctaattgatctcgccctggtcagttacccacccatcgccccatgtccgtcc

SEQ ID NO: 464617 - DNA, 122 bp, Homo sapiens
cactcatgctcccgcgtttcattcccccggcaaagactgggcgccgcagatttctgtctccggaaaattccagttaattcaagaaacccatccccggacgtgtgcccgcccccccccgaagg

SEQ ID NO: 464618 - DNA, 122 bp, Homo sapiens
ggctgtttttcctatccaatgtgtagatatgacaacagataaccatactaaatagaaaggcgtgcttacaaaactggatacttgtaacaaattcttttgtttaaagaatgtcccccattctt

SEQ ID NO: 464619 - DNA, 122 bp, Homo sapiens
ctctgcccctcacgcccctcgctagggtgctgtacaggcgggtggggggaggggatcggccgctgcttttcaagaaggttctatttgcaccctaagtttataaacttttgtttttgtttttt

SEQ ID NO: 464620 - DNA, 122 bp, Homo sapiens
agggggggaacataaaaaggagcctagtcttcggctggaccaatcagcgcgctgagctggcggagctgggcgcctaaatggcccaatggggggccgcgcgggatcagagcccgccctgcctc

SEQ ID NO: 464621 - DNA, 122 bp, Homo sapiens
ctgtgcccagaccttgtaaagcagcagcctcttagatgactttcccctctgctcagatcccgagtatcccgctctggggtttaggaaagccggccgctacagccacacaagcccccaccaca

SEQ ID NO: 464622 - DNA, 122 bp, Homo sapiens
ctttaagaaatcggagctgcagccatctgtttttctcttaatgctgcatctctgttctcacggtggtccttggggtgaggttagagaaggagccgagggatcctgacaccacctccacagca

SEQ ID NO: 464623 - DNA, 122 bp, Homo sapiens
ctgggtgtaagcttcggtgcagagcagcggcacactcttccctctgtgtgtgaggaggcccgggggcggggacaggaggctggggttcgcagcacccatgggaacagccagccggggttgag

SEQ ID NO: 464624 - DNA, 122 bp, Homo sapiens
gacggcaggcacgaggggacaggcgcacacaggaggtcgacgggggagtcgtcggtcaggcggagaagctcctgctctgtgtgactgggccctgggcaaacaaggagggccgtgacaccaca

SEQ ID NO: 464625 - DNA, 122 bp, Homo sapiens
gagaaaataaagacaatgtagtgtcttggtttcttttgcccccaaaagccacattcattccgtttaaaggactcctcttattcagagatagattgtcctttccttttatgaaaaaaatggtg

SEQ ID NO: 464626 - DNA, 122 bp, Homo sapiens
ccagccagcgagcgctcctaaaccctggccgccgccggttataaatgattcatgcagccccgcctccctcggcggccacttgatgttccctgcgctccagcccggcggtccaccgcctctcc

SEQ ID NO: 464627 - DNA, 122 bp, Homo sapiens
gatccgcctgcctcggcctcccaaactgctgggattacaggcgtgagccaccacgcccggcgtatggcacattttcaaaaccagagactttgcactggcatcacacgtttaaccaggttcca

SEQ ID NO: 464628 - DNA, 122 bp, Homo sapiens
gaaggacgcggtgaggtgccggggagcgcggcgcgggtcctcggcctagctctcgccggacgaaggccgcccgctgccgcttcaggcccgcctcacgcctaccggcctctcccgacttgtct

SEQ ID NO: 464629 - DNA, 122 bp, Homo sapiens
tacggagacatcaaggaacggctggggggcctggagagggagaacgccaccctccgacgccgcctcaaagtctacgagatcaaggtcagaacttggagaggagggcgcctgatagagtgtat

SEQ ID NO: 464630 - DNA, 122 bp, Homo sapiens
cgcactcactggtcgtcatgcgctgtctgtcatgaagctggccacaccttccatggggtgcgggtcctgggagtcctggctggacctcattggcttgtggcgccttcactcggagagacgcg

SEQ ID NO: 464631 - DNA, 122 bp, Homo sapiens
gaagagagaacagacacggggcggctgagcagcagtgtgttcatggagaaagaatcaaagcgcacatcttgtactttgatgcccataggaagggctctcctctggcccctctggctttgttt

SEQ ID NO: 464632 - DNA, 122 bp, Homo sapiens
acagggctcactcaagcactgtcctttagttccattttctggtgttgaatacaagcaccacgaacaatatagtgacaaatgggtccaagggattttcacatttttaagaatgcagttcctgt

SEQ ID NO: 464633 - DNA, 122 bp, Homo sapiens
tggtgggcagcttggtgacgggaccactccccacactcggagccccttgtcgaggctgagcgtctgttctgggtggtggggccatgtcagtggatcctcataggttggactagctgcatgtc

SEQ ID NO: 464634 - DNA, 122 bp, Homo sapiens
cgcgggagatactcacagggtgaccgtgcggttgggcagagtatctgggggcaggacctgcgcgagttccaggctgctgcacaccaccttgccctcggcggcgcccgccgccctgccagccc

SEQ ID NO: 464635 - DNA, 122 bp, Homo sapiens
tgatgctgatgtggctgttttgcggggccacgctttgagaaccactgctgccaggtactgcggaggtagcaactgcaggaagccaccacccttaccctacctagggctgatgagggaaagac

SEQ ID NO: 464636 - DNA, 122 bp, Homo sapiens
tttattagctcccaaacattctcagggataatttatttgtgtttgttagtttcctggggccgctaaaacaaaatatcaaaaactttgtggcttaaaagaacagaaatttcctctctcacagt

SEQ ID NO: 464637 - DNA, 122 bp, Homo sapiens
tgttgccaggctgggccgagggaagcaggaaggctccccaccgaggacagaggtgaagtgcgggggtggacatgactcggaaacaccaacgtccaccagcgtgaaaccctgaaatccctgga

SEQ ID NO: 464638 - DNA, 122 bp, Homo sapiens
ctgatggcattcttcactcaacatgggacagtgttccagtccctctaccacaggagcgcccggcagcgtaatctccgcttttttgtgatcaccagtgccatccgcaaatgcctgaaggagga

SEQ ID NO: 464639 - DNA, 122 bp, Homo sapiens
agatcagacgctcggattcaggctgggtcagacagggcctggccaagaggccgccagcctcgggatggacgaggaagggcgaggcctgaaggaatcttctacagtgacagctgcctctggat

SEQ ID NO: 464640 - DNA, 122 bp, Homo sapiens
tgtgtgtgtgtgtgtgtatatatatatgcgcaaagtcactagcatttgattcattcagcacgatagctgtactttcaagtatgcatacataaaaatttgtgtatttgtgatcttgtcgtaac

SEQ ID NO: 464641 - DNA, 122 bp, Homo sapiens
tttaaggctctaggcttactggagttgctggcctttgtcgttctgagtgtaggcatgttccgggcatgtctgcactctatacgacccagggaaatttactaaggtggcatccactgggtacc

SEQ ID NO: 464642 - DNA, 122 bp, Homo sapiens
cggtgcagtgagtcgggccgcgaacctgtgttggttacagccgcacaatctggggagacccggggctgcgggctcggagctgcccagagagggcgccggggccgcagtcgccgcgcaggaac

SEQ ID NO: 464643 - DNA, 122 bp, Homo sapiens
gccttttctcccgactgttgctactattctttttagggcatctttcacttccagctgggccggggtgagcccatgctgcacacgcgcctgcgtccacactgcaaggacttcctggagaagat

SEQ ID NO: 464644 - DNA, 122 bp, Homo sapiens
aaagttaagtgggcgcgacccacttaactgttcccaccccttccggcacggcaccggcaccgtcctgggcgcccctcagggttcttgggacctggatttattgacctgctcagagaggagcc

SEQ ID NO: 464645 - DNA, 122 bp, Homo sapiens
gtgggtgtgctccatgggattgaccacacatgaaggcattggtgtggggacgctgtgggtcgacacccgggtgcttgcattgatgagcagactgcgactaatggggctggggttggcgatct

SEQ ID NO: 464646 - DNA, 122 bp, Homo sapiens
aaaatggaagtgaatccccctaaacaggagcacctgctggcgctaaaaggtaaacttttgcgaacctgattcccccttttctgtttccttgcattccctacttatcgaagcctttgccatgt

SEQ ID NO: 464647 - DNA, 122 bp, Homo sapiens
catgctcatcctggaccaatcactgtggccaaagaagcagcgtcccctggttagctaagccggtgtcacagaaccacatctggctatgagggtgtgggtgataagagccacatcatgaaact

SEQ ID NO: 464648 - DNA, 122 bp, Homo sapiens
ggtctggcgggctccgagaggcccgggagcggcgcgcagagcagcctccggccgccgccgcgcaggtaaagcccccgcccagccctgggagcgtggattcccacccaccccatgaccatccc

SEQ ID NO: 464649 - DNA, 122 bp, Homo sapiens
ctagagggccaaagcagggtgcctggagagatttccagacctgtggagagataatgagaccggggcatggtcagacacagactgttgagaggcacatgttaaaacttcatgtagattctgat

SEQ ID NO: 464650 - DNA, 122 bp, Homo sapiens
gcggcgcaggccggggcccgagggcgcccccaaggccgagccagggaccgggaatctgagcgccccgccaagcgactgggtctgaatgcaactgaaagcgccgagtccccggctcctaaggg

SEQ ID NO: 464651 - DNA, 122 bp, Homo sapiens
aaattctgccttgggtaaacatgtatagtatttcctcaagagctacatttccccagcctacggtaaacaaggggaaagataccaagttcatcacagattatttctcttcaatcttgtatgat

SEQ ID NO: 464652 - DNA, 122 bp, Homo sapiens
ggacggaatcggagctctggaggctgggctggccaagcgccccgaaggcccgatgcctgacggctcatgcggcctccttgtttgcagggcctgggcaaaaatttacactgagtcccactctt

SEQ ID NO: 464653 - DNA, 122 bp, Homo sapiens
gaacagaggctttgaagaacaagcaacatgcaggccctctgatcgggggcaccttcctgccggccccagggcaggctgtgtctttaagtacaaccatgccactcacacacaaagcgccctgc

SEQ ID NO: 464654 - DNA, 122 bp, Homo sapiens
tttaaatgccacccaggctggaagtagcagtggtttgagattcaaatgtttaaaaagcggcggagggtctcctgccaattgtttgtggaaatagcgcacagctggaaagaacatccgtcact

SEQ ID NO: 464655 - DNA, 122 bp, Homo sapiens
ctaagaggcaggcgtgggggctttcagacagcagaaagacggggctggtgtccaggagggcgcgggcatgggtagggcagcgcccgggctgtgctcagtccaaccggggctctgcggggcgg

SEQ ID NO: 464656 - DNA, 122 bp, Homo sapiens
aacgtagcgggacaagagagaccctaggggtagcgttgccttgggtgcaagtttgagaagcggctattaggtacacaggtgcttctttctaaattcaagttactgaagctagaccccgcggc

SEQ ID NO: 464657 - DNA, 122 bp, Homo sapiens
cccggactctgacggtgtctctgcctctctgtgcctccgcagatccccgctcctggccctcgcctcgccacctcattgatgggcaaccaactggaccgcatcacccacctcaactacagcga

SEQ ID NO: 464658 - DNA, 122 bp, Homo sapiens
caggggtggagtcggatacgccccgcggacaccatgcacccaatcagcgacgagctgtcgcggatcgcgggacacgccccctgatccaaaggcccgagaagctcttgcacaggacagcctct

SEQ ID NO: 464659 - DNA, 122 bp, Homo sapiens
gggagcgggagggtgggggtgggggaagaatgggctgatggaaggctctgaagtagcagccggagcgcagaaaatctcagaggaggggaaatgctagcagctcccaaggagagagaccaggc

SEQ ID NO: 464660 - DNA, 122 bp, Homo sapiens
tgctctcttctctgcaatgacaatttagctctccttggctgaacagtacatgtggtcctccgggatggaccaggtcctgctgacctcttcaaccacatctctcgctatttcccacaggcatg

SEQ ID NO: 464661 - DNA, 122 bp, Homo sapiens
ccctctccaacctctttgttcttcttgcccgagttttctttatggagtacttctttcctccgcctttcctctgttttcctcttcctgtctcccctccctcccacctttttctttccttccca

SEQ ID NO: 464662 - DNA, 122 bp, Homo sapiens
gctgacggcgaggaacctgcttggcaatgtggcaaggggattttatccactcaaccaacacgtctgagtatttccgaataggttttattaccaggtgcttaaagaatgtgtggtgacataaa

SEQ ID NO: 464663 - DNA, 122 bp, Homo sapiens
ccgcgggaccgactagagtacgacgaggaccgactagagcacagtgaggaccgtccagagcgccccctcggagagccccagggcttccaggacggcgcccgcgcatgcgcggacgccgacgg

SEQ ID NO: 464664 - DNA, 122 bp, Homo sapiens
tgggatcttagctatgtgttaataacttgactgacatcataccactgatactgttggactcggttctgttattggaccctggaccctccagagatcttgaacctcctcttcaatatcaagga

SEQ ID NO: 464665 - DNA, 122 bp, Homo sapiens
cccggtagatgtaagggaaaaactgcattacccagaaggcactgccccttgcgtcggccgcggactctgggccattgacgacccaggacaggagagttttctgcgggccagggcggcggagg

SEQ ID NO: 464666 - DNA, 122 bp, Homo sapiens
acaggcgcctgccactacgcccggctaatttttgtattttattttattttttagtagacacggggttttgggtgttgaccaggtctcgaactcctgacctcaagtgatctgcctgcctcagc

SEQ ID NO: 464667 - DNA, 122 bp, Homo sapiens
agtcagtagcgcagagactgtgataagaaaaatcacaattcccagaatgccgcggtgctacggcagccgaaggggccattccgtgtgcagcgctcccgcccaccctccggtctcggcggctc

SEQ ID NO: 464668 - DNA, 122 bp, Homo sapiens
gcccagccaggacccaggccaccaccgaggtccgcaccccatgcggcagacagacaccaacggtctcgtgtcgggctgctgctgttctctgagtgtccttaggacactggcctgagaagatg

SEQ ID NO: 464669 - DNA, 122 bp, Homo sapiens
cttccttcctcctgtcctttccacactcttcctgccttccccaaagtcactgggtaactacgctgtacacgtcagtaccaagccttctttaggggctggggattcagaatagaataaggtcc

SEQ ID NO: 464670 - DNA, 122 bp, Homo sapiens
aactttgggggcggggcctaattcctgggtagagttcgggatcctgggtgtggaccccgacgaggtggggatcgtcactcacctgctcccgtttccccagtgtcccattacaggctctttcc

SEQ ID NO: 464671 - DNA, 122 bp, Homo sapiens
tgctcctagttgccgctgcaagaggcttcgggctcaggatcaggagcttacccctactcccgggaccctctggcgtccccaccatgtgaccgagtctccctgcaacaaacaatgacttcaaa

SEQ ID NO: 464672 - DNA, 122 bp, Homo sapiens
cggttacagagtgggtactctaagaaggagttcatcctattatagtccatgcgtcaaggccgcaggagggtcggcccgtttgggggagacaccctcttgccctacaacctttcggcagtatg

SEQ ID NO: 464673 - DNA, 122 bp, Homo sapiens
cttcctttgccgcgcaccggtagccttgcactgccgtgggctgcggtccgacctggggcgcgtcccacgccagccctttggagcatgggctgcattgttccggtttcctaggacggtcctga

SEQ ID NO: 464674 - DNA, 122 bp, Homo sapiens
agaaaagggagagagctgggacttgaacccagccagcctacttctagtctagaagctaggcgattatctccatacctcacagaatggtgcagatatatctgggagaagcaactactctagac

SEQ ID NO: 464675 - DNA, 122 bp, Homo sapiens
cctccccgccctgcgcgccataaggcactcgcacgtctccagtccacagctgcgttaaggcggggagggggtagacaaaaaggatcttgttttcaaaagtctcactcaggtttgggggagga

SEQ ID NO: 464676 - DNA, 122 bp, Homo sapiens
caagcagcaccgccccatctgtattcacctagcacctgaaaggattctaatctgtccggccgatggggacggaaacttgcgcatcaacccgagagacttgaaccttcctttcccgccccgcc

SEQ ID NO: 464677 - DNA, 122 bp, Homo sapiens
gcgcccgcagcccgggcctcttggtgccgccatcggagggagtcggcggggacgggagagcgaccggcgccgcgacttgggctgcgacctgggcggccaccgggggctcctcgggcgggcgg

SEQ ID NO: 464678 - DNA, 122 bp, Homo sapiens
gcgtgctctggggctagggaggggtcgaaggtcataggggcgcgtggtggtggaggcgggcgggtccggagggtttcgtgaccccacaatttgcttctgcttctgcaagactgccctaaact

SEQ ID NO: 464679 - DNA, 122 bp, Homo sapiens
gcacctccccctgcccctgagccccttgccggatacactcacagcagctgcttataggtccgctcctggtaggtctgattgctgacgtaggtgatgtagacagagaagtggtcggccgcata

SEQ ID NO: 464680 - DNA, 122 bp, Homo sapiens
gaccttatgtaacccagcgtcggcagcaaggagccggtcacaggctgaccaacgtcaaggcgtttcactttggaagcgcaccagatgagtgtggtattgagagcagacggctgggtgcaatg

SEQ ID NO: 464681 - DNA, 122 bp, Homo sapiens
gagcacagagcggccgccagggggcgccttggggcaagagtggtgggggttgtggctgggcgggtctctgttcctggaatggggcaggagggagaaggaggagccagcggaaggacggtgtg

SEQ ID NO: 464682 - DNA, 122 bp, Homo sapiens
tggttcttttctccgacacgcaaaggaagcgctaaggtaaatgcatcagacccacactgccgcggaacttttcggctctctaaggctgtattttgatatacgaaaggcacattttccttccc

SEQ ID NO: 464683 - DNA, 122 bp, Homo sapiens
actccaactgcagtcacctgtgtgccgcccgcctgtggtcctgggagcccgaggccagcccggctgccgcatcctgctcttcgcactccaggtctcagacaggagtcactcgcctcttcgtg

SEQ ID NO: 464684 - DNA, 122 bp, Homo sapiens
actatgtgccatgcattacaccttttcctgtaattgtttattgctcataaccaccctgtgcgaaagatgtggtcacatttttataaatgaggaaactaaaactcagacagaataagtaatgt

SEQ ID NO: 464685 - DNA, 122 bp, Homo sapiens
gggatttgtagttttcgaggagccagggccgaaggcgctaacgacttctcggaaactccgcgggggtcccttcgcgctcggggtggtctccagacttcttgttcgccatctgtggtgaaact

SEQ ID NO: 464686 - DNA, 122 bp, Homo sapiens
cagccccgcgacccttgtgtgcgtgggctcgggttctggcgggagcccctgggccgtgcgcgcagccggctcgctccgcctccagccgcgcacgcgcgggcccctcccccgcccggcgcgca

SEQ ID NO: 464687 - DNA, 122 bp, Homo sapiens
accccttggcctgtttgcctccactcccattaacatccctccaccatggatcccgtgtgccggatttgagacttgcaggcagtgtctttaggaaggaactttaccgggcctcactgccagag

SEQ ID NO: 464688 - DNA, 122 bp, Homo sapiens
cttgacagcccgcctggactcgctcatctgcagcaaagccctctgagatactaccctaaccgatttaatccgttccaattcagctgtcaagtaaagggggtgttatcgtagaccaggatcaa

SEQ ID NO: 464689 - DNA, 122 bp, Homo sapiens
caggtgcctctgggtgccagggccttgctccagcccctttggtttcatctcccagcctcccgagacccacatcgttatgatctgagctttgcacttaaggagctgtggtcctgagcaaagcc

SEQ ID NO: 464690 - DNA, 122 bp, Homo sapiens
acttggcagatgcacctgcggaggagctccaggagaaggggagccccgcggggcctccgccgtctcagggacagcctgccgccaggcccccgaaggaggtccccgccagccggctggctcag

SEQ ID NO: 464691 - DNA, 122 bp, Homo sapiens
ctcttatggagtattaaaccaccagacagccaactttctgatcatttatctcagggaattcgctccatgggtccatgggggagaaacctcagagatgtgctggaccaacttccttggctagt

SEQ ID NO: 464692 - DNA, 122 bp, Homo sapiens
agcgaagactggttttggggaccggagagcccaggactccctttgttggagttttgcccacgcgttgtaattaagcctcgcacaatatggtgagagtgggcgttgattctggagacaccagc

SEQ ID NO: 464693 - DNA, 122 bp, Homo sapiens
tgcgagacggggtggggcgaatcctcccgggtgggcatcgtggggtgggggtgggcgttccgcgaggggcatcctcccgggcggacgttgggggattctcgggggagggaggggcgcggggc

SEQ ID NO: 464694 - DNA, 122 bp, Homo sapiens
cgtaaccccacagagcagccggaggcgccccgtaacctcatagagaagcgggaggcgccccgtaaccccatagagcagcgggaggcgcaccataaccccatagagcagccggaggtgccccg

SEQ ID NO: 464695 - DNA, 122 bp, Homo sapiens
attcccatgctgtgtattttcgtgtctgaattctctgactttcgtctcagcccgcacccacgctgccgcagtccgcgctcgctgcttttaggctgaacgcggctgcgccgtgcgggtgcccg

SEQ ID NO: 464696 - DNA, 122 bp, Homo sapiens
ccggctcactgtacttggtgagtgtccttggccacagccccgagcaagccttcacccaaacggaacccggactgtagctaagctcaaccccaaatggagcccccacttcagactgatccaat

SEQ ID NO: 464697 - DNA, 122 bp, Homo sapiens
gggcaggggtttgttccgcggatgtgccgcttcctgaaagttcatccacctggagaaagacgcaggtgcagctcgtccaccccagcaaggcttcttggggaaaatgaaagccaaggctgccg

SEQ ID NO: 464698 - DNA, 122 bp, Homo sapiens
gaagcgagaaagagagggagacctgctattgtggccaacgatcccgcgaagaggcaacggcggtccacgaacgggattcagcctcccatcaagcccagccggcgctcacctggaacccgcgc

SEQ ID NO: 464699 - DNA, 122 bp, Homo sapiens
aggaagcacgaggtggatctccccagaaaagtgctgaacaaatgttggctcgggttcacccgggaatttcttggaactgaacaagggaagttcaacgccaaggggccctgctttagagggga

SEQ ID NO: 464700 - DNA, 122 bp, Homo sapiens
gcatcgagatgccaaagccagtgaccctgccctttgccctcccaccatggacaataggtacgtgtcccctgcccctggtgaccccaaagagggctcctgggccacaagcccctgacacattt

SEQ ID NO: 464701 - DNA, 122 bp, Homo sapiens
caggcagctcgtagctcttctccagggaggagctggaagcagccgtggccatctcttgctcgaagtccagggcgacgtagcacagcttctccttaatgtcacgcacgatttcccgctcggcc

SEQ ID NO: 464702 - DNA, 122 bp, Homo sapiens
gtgaattggcttgttcctggcacgcggtctcagactgaaggtcgtggaaatcctttcggacgccattcaggggtggactcggactggaagagtggccttgactctcacctccatcttgatgc

SEQ ID NO: 464703 - DNA, 122 bp, Homo sapiens
ggtcgctgccctggccgctccgaggagtcttcgcgccccgctgccccacgctgagggcatcgaaatccagcgtcttgctctcgaaggcgccctccacgttgcagaacatgccgccgtatttc

SEQ ID NO: 464704 - DNA, 122 bp, Homo sapiens
cctttctcctttccccatgtcccttgatctttctttggaaacgtgcacccccttggagtgcgcagcaggaggcccctgaatagagagaataaagctaaggggtagtggacagctgcggctag

SEQ ID NO: 464705 - DNA, 122 bp, Homo sapiens
gatgttgctgcctgggacgctctgtggctggctggggcagaggcagggctggtagtgccacgtgcagttggcctcctgtgtgtactggtactcgccatggccgtcctgcgtgtgcgtgttgt

SEQ ID NO: 464706 - DNA, 122 bp, Homo sapiens
cagcaatgatgatttctactgttagggtttcagttgtacttggatctgggagggggaagccgatgcacccagagaccctagggctgggctgtaaccacacacctgaggagatgctttgggaa

SEQ ID NO: 464707 - DNA, 122 bp, Homo sapiens
ggttagggcaaactgtcccccgggagaatgtcggtgccttagttgatagctttgtgtttccggaagcctggcttccaataaaggtggttaattgggagaagtggaatggtacattcttgctt

SEQ ID NO: 464708 - DNA, 122 bp, Homo sapiens
aggagggagaggagaggaagaagaagaagaagaggaggagaaggaagaaggagacagcagcgagatatcagagagaatatgcaagagatgaagggcactgcagagagatggaagcagggcaa

SEQ ID NO: 464709 - DNA, 122 bp, Homo sapiens
ggtcacatgaaggactgcgcgttccaaactgaccaatcagatagatgattgctatctccacgggaggaactaaaaagacagccattaggagagttcttctaatataagtccctctgtaatga

SEQ ID NO: 464710 - DNA, 122 bp, Homo sapiens
ggactagaaggggttttgtcatagcatcacgccactctcaggcccttctgcattccacgtcggaaaactcagttcctaagactcactcatagtgacctctgcagaagagtggagatgcagtg

SEQ ID NO: 464711 - DNA, 122 bp, Homo sapiens
cagccgtcgtggggtcacgagaccccgagtgcatttctttgctcagttacatttggggtccgctctgacgcacagctcatctcagctcctgcagtaacaagtcacattacgataaggctctg

SEQ ID NO: 464712 - DNA, 122 bp, Homo sapiens
agggtcccgacaccgggatcttggcgtccttgaagatactttctaggtccgagggggcggcgttctcgctgaggtttccgatatacagtttgttcattgtgaagagtggttgtttaaaaaaa

SEQ ID NO: 464713 - DNA, 122 bp, Homo sapiens
agcgtcaccacgaaggtcaggtcagccaccgccaggctagcaatgaagatatcagctgagcgcctcttctcccggctgctccgaaacacggtccagagcaccagaccgttgcccgtggtgcc

SEQ ID NO: 464714 - DNA, 122 bp, Homo sapiens
acccagggagaccccgaggggaaaggaacagagacaccaagactctgagacagaggatgccgcagctgaagaaaggcaccaggcaaacagagacacggggcagagtgacagggacggagagg

SEQ ID NO: 464715 - DNA, 122 bp, Homo sapiens
ggattctgggtcgcgcagccgtggagctacctcaaggcggaactggggagtccagggcttcggcagcctgaacacccggtgtgaaaggaaggtggcagacgtggagcggcgcgcatgcgcag

SEQ ID NO: 464716 - DNA, 122 bp, Homo sapiens
tttatttttttgagacagagtctcgctgtgtcgtcaggctagagtgctgtggcacgatctcggctcactgcaacctccaactccctggttcaaaggattctccagcctccacctcccgagta

SEQ ID NO: 464717 - DNA, 122 bp, Homo sapiens
ggtcaagcatcctttatcaactgcgaggtcttcgaggcccaaaagaggtgccctgagtcgcgaagtacccacccttggggcagccaacgccgcagccctggctccaggcccaggttgtccgg

SEQ ID NO: 464718 - DNA, 122 bp, Homo sapiens
ccgtgtgttccttttgatttgcccagggtctcgagtgccacctctctaccctgtgagatacgcagaggaccctgtaaatgccgtgccccgcatgcctcggcctgggcgtgagccgtacgcgg

SEQ ID NO: 464719 - DNA, 122 bp, Homo sapiens
aaccagaatttgcatggggaatggctagtccttgagcttattggctgatagcacagtgggcggggtacatagcacgaccccccggagccccgcccatattaatttgcataacggccccggcg

SEQ ID NO: 464720 - DNA, 122 bp, Homo sapiens
gaagcggtttcccactttgaatacgaagtgcagagctctgcgagcagccatgattcccgccgcacgcagccgtcacgcgcaccgtacagcccagtccacgaagggcgccacgggccgtgacg

SEQ ID NO: 464721 - DNA, 122 bp, Homo sapiens
ggtctcccgccgtaaggtggaatgggccgtagagagtgattgtgttgccagccatgtgtccgcgttgcctgacatggagccactcagccggctccatggcacctggaggagagccacacccc

SEQ ID NO: 464722 - DNA, 122 bp, Homo sapiens
cgacatcgtgccacacacacacgctcgcggccgcccgggccacaaccacgggagcgcccacgagacccctccagcgctcgccgcacgcctcggccccgcccccggtaagaggccccgcccac

SEQ ID NO: 464723 - DNA, 122 bp, Homo sapiens
ccgaggctcagatccagggagcagcaatatgtgtgggcccacccatctttctccacaagccgcaggagcccagcggcaacagtggggagaccctgctctgcctgcccccaccctgccactgg

SEQ ID NO: 464724 - DNA, 122 bp, Homo sapiens
cccaaatgcccttcctaaatcacagtctcatcatgtcttccctgtattaaaatcccctgccgctcccctctttaacctgcctcagaatatccccccatcttgagccccaagcaacagtttca

SEQ ID NO: 464725 - DNA, 122 bp, Homo sapiens
agggccaacagatgaggacaggaggcttctcgaatggaagaaggttctcctccctagctgcgtgagtgcacactccccagcaggaggaggaatgactctttgctaccttctcctgtgcttga

SEQ ID NO: 464726 - DNA, 122 bp, Homo sapiens
gggccttggcaggcacgtcctgcggcttgtagtacatctgcacgtcccagtcgatgaagacgctgttccccaggtagatgaactcggacctgcagaggcactcagggtcacggtcagccccg

SEQ ID NO: 464727 - DNA, 122 bp, Homo sapiens
cttgaaaggtggctgggagcgccggacacctcagacggacggtggccagggatcaggcagcggctcaggcgaccctgagtgtgcccccaccccgccatggcccggctgctgcaggcgtcctg

SEQ ID NO: 464728 - DNA, 122 bp, Homo sapiens
tggcgcggttcgcagcaatacccctttctcaaggatgcagccgcggtggccggaggagaacgaaggccttcttagttcgcccgccctctccacggctttacattcacctcccgcttaggctg

SEQ ID NO: 464729 - DNA, 122 bp, Homo sapiens
ctgcagccgggatcgagaccggggtgaggcaggctccctgcagaagggccccaaggacttcgaccgcttcctcgtgggcaaagagctgggcagagagaaggcgggcaaggccgctgagggca

SEQ ID NO: 464730 - DNA, 122 bp, Homo sapiens
agggccggctgcgggacctcagaacgcacagatgtgggtgtgcgcggacggtccagaaaccgatccccatgctctccgagggatgatgcacactgttcattatatctgttttatttgtgccg

SEQ ID NO: 464731 - DNA, 122 bp, Homo sapiens
atatataaaccttattaaaattttgcaactgggcagggtgggtcacacctgtaattcctgcgctttgggaacctgaggcgagaggatcacttaagcccaggagttaaagaccagcctgggca

SEQ ID NO: 464732 - DNA, 122 bp, Homo sapiens
gggcctagggggtgttgggggacataaggattttggtttagggttctccagccccccaaacgctagcctcttccatccacaccatcaggtcctggcaacacctcatctacgagcaggtataa

SEQ ID NO: 464733 - DNA, 122 bp, Homo sapiens
cctgcatacgggatgaggtgagcagcgccgctgctgagagggggcgcgcgcgggtgtgagcgtgtgtccgtgtgcgagtgtgtgtgcgccgggcgggcgggcactgcagcttcttcctccgt

SEQ ID NO: 464734 - DNA, 122 bp, Homo sapiens
ttgtaagttcattatgtaagatccttttttttttcataatatgtattcttggctgctatgcgtggtttttcaggaaatttaattatcttactgagatgtgaaagcaaaactagtaacagaac

SEQ ID NO: 464735 - DNA, 122 bp, Homo sapiens
accctgaagtgccagcaccaccagcaccagatcctccgccgccacaccgcactgaggacacgccggccgggccgcctcgtctcaagttgtataaagttgtctccgtgtcccctcctccctct

SEQ ID NO: 464736 - DNA, 122 bp, Homo sapiens
aagaaaatttctcagggattcacatctttcccagtcaccccctggccagtgaggaagcaccgtgcatcgagaagagcatagctttgagtcgtctatgtggagctggttccatctgagctctg

SEQ ID NO: 464737 - DNA, 122 bp, Homo sapiens
ggcgcgggcccgggcttcaggctgtggggccgggagtgcggggcgggactgctgcggccccgcgtcctgtggagtctgcggcgcggggagtgggggtcggggcggggaggaacgtggggtgc

SEQ ID NO: 464738 - DNA, 122 bp, Homo sapiens
cactgtgcagactcttgggaacttgagggtctcccatgagagacgtggctgttccggatgcgaactgtctcctgttggcttcagaagggctggatctgggatctaaaacagatccggtgggt

SEQ ID NO: 464739 - DNA, 122 bp, Homo sapiens
gcacacttggcccacacttggccactgagtttgcacttcactgaagggctgtgggaacgacggcaaggatagaggaaagccagattagggaagacactggctctcagaaccttagggatctc

SEQ ID NO: 464740 - DNA, 122 bp, Homo sapiens
tgtgttttgtcaacagtggcttggcagctagaataggaaggacagaggaagttaaacccacgctggtttccagaagtcagctacaaaaaatgaacctctaggaccagatggttttatggctt

SEQ ID NO: 464741 - DNA, 122 bp, Homo sapiens
ggagcgcaccgggcagggaggggctctggccgggcctcagggtcgggcttgtttgctcagcgaaactggtcagaggcagccgggagggagcccgacgccgccaaggtcccggggcctgcgct

SEQ ID NO: 464742 - DNA, 122 bp, Homo sapiens
gcactctcctccagcgtccccaccccggagcccgcagggaagggaggctggtggtggtgacgcccatgtgctctgtgtctgcatcgcaggtgtttgagatcctgctgagccgaggctactcg

SEQ ID NO: 464743 - DNA, 122 bp, Homo sapiens
gaggcatgcgcactggggtggagccacagaggttcctgctgtttgcagcggggaggagcccggcccctcttcttcctgtgtgcaacctgggattcaaagctgcaaggcaggaagcacagcag

SEQ ID NO: 464744 - DNA, 122 bp, Homo sapiens
ctagcgaattgcactcagatggtggcaattgagggaagggggctgaactgccgagggcgccggcctgagttcaagccctgccacccccaggttggctgacactcctgggcaaggtgttttac

SEQ ID NO: 464745 - DNA, 122 bp, Homo sapiens
cggtggccagcaacggaaggacggcagggagcgaacacactccagcccctacggtctctccgctctcccagctgagctgtcttccccggaggccgggctgcaacccgagaaggcgccgcgcc

SEQ ID NO: 464746 - DNA, 122 bp, Homo sapiens
ttccaaggcccggacgggaggcggccacaggctcctgggtgtgctgtgggacgtaccactcggtggcagggcctggccagagagctgccctgcaggcctgtgggatccttcaacgcgaagct

SEQ ID NO: 464747 - DNA, 122 bp, Homo sapiens
caccctgtgctgtttctcgcctgtttaagctggtgtttccagctggagacaaagtctgaacgtgctgtctctttcgcatggccctaacgggagccacagaaatttgggggccacagagccag

SEQ ID NO: 464748 - DNA, 122 bp, Homo sapiens
atttgggggtacagagggttaaactaccccactggatggggagtctaggagctcaggtgccgctcctgcctgtgttccagccctggtcttatcactgcttccggtgagaagggtccctgagg

SEQ ID NO: 464749 - DNA, 122 bp, Homo sapiens
gattgtcaaggtgtgtgagtttctgccctggggccccagcacgagacttttatccactcccgtacctgggctgggccttggagagcaagatactcttgacctgactgtgtctgtcacttggc

SEQ ID NO: 464750 - DNA, 122 bp, Homo sapiens
tctcagccttgtaggtgtaggtggagtgtcctaagctctgggggtggggggacacgtttacgtgtctgcaaaccgctacattctgctaagacatctcaggagcccgccaagcccttagtgaa

SEQ ID NO: 464751 - DNA, 122 bp, Homo sapiens
acagcggcaccaagatcctgggcatgctgagggtgctgcggctgctgcggaccctgcgcccgctcaggtgactccctccccagcactggaacacctccaagaggtggccccctccgcaggga

SEQ ID NO: 464752 - DNA, 122 bp, Homo sapiens
ataacctccagatgtatttttaaaaacacctctggatttagctcagggtctctcacaagacgtgtagaaactgtcacaaggtgtgacccttttatcttttgaggaggtgagaagttattctt

SEQ ID NO: 464753 - DNA, 122 bp, Homo sapiens
accagccaatggtgatgctcaagtggaaggcctgaggtcaaagctgcagagagccaagatcgtgccactgcactccagcctgggcgacaaagtgagcccctgtctcaaaaaaaaaaaaaaaa

SEQ ID NO: 464754 - DNA, 122 bp, Homo sapiens
cagtaaaagtgtcagaggctttttagggcagcgagaaaacgggaacttcattccttgaaccgggaataaattctgcctccaaccagaatgggcttagaagagggtcctccagctcctcatga

SEQ ID NO: 464755 - DNA, 122 bp, Homo sapiens
gcgcccgactgccagtgcgcatgcgtttgaaggcggtgcagggcggggagcacacccctgcgaagtgccgggcaccctttgggcggctcccgccggcgagctggacagcggcgcgcgccagg

SEQ ID NO: 464756 - DNA, 122 bp, Homo sapiens
cgcagccagcgcggcacagaacgagcgagcgagcgagcggagaggcggctacagcctgagcgccgggccggtagcggccgcgccggcgagcggactagcgggcggcgagcagcgcggagcgc

SEQ ID NO: 464757 - DNA, 122 bp, Homo sapiens
taattgcacatctttgcctctcctactcctctgataagagggcagtgtgttttcctgttccgtgatgtgactcagaagcatgtacatatatcccagaagacagcctcccgggatggagctga

SEQ ID NO: 464758 - DNA, 122 bp, Homo sapiens
ggcgcgggcagggagggggaccctcggcccgcggatccccctccgctcttcagcctgaagcgacgaggagaccagaaatgtcaatagttctgatttttaaaaatcatccccccttccccgcc

SEQ ID NO: 464759 - DNA, 122 bp, Homo sapiens
ccatcaagctggaggaaggtgagctctgggtggcagcggccgccactgtgggagggtgcacggctcgtgcgcgctgtggcggaatgtggcgggagtcgtgttaacagcaacacggaagtgtg

SEQ ID NO: 464760 - DNA, 122 bp, Homo sapiens
agagagaaaagaaacgctggcccgaaccccacgatcaggccccagccttttccaatctctcggaaacagatcaagctataagcaattcaatcgttgctaaagagacacgccggaagccgccg

SEQ ID NO: 464761 - DNA, 122 bp, Homo sapiens
tctccctgtgctcccgctgctgctgatcctgaaagttgaacacggggctggggttgcacacggtatccagggaaggtaacgatgataacagtcctgagtcaggccaggtcactgctcatggc

SEQ ID NO: 464762 - DNA, 122 bp, Homo sapiens
cggagcctgccggaagttgtagtagtatgtgggcggggcgccgcttaagggcttgtactgcgcatgcgccaggcttctgccgcacttaccttgaagaaagtgaatggttaaaaagcgtagag

SEQ ID NO: 464763 - DNA, 122 bp, Homo sapiens
actagagaatcgcggtggtgcggaggtgcgcaggacaatgtgggttctccggggctgggacgaaaccttcatcatctgagcagccgactcgcccagggctactccggcacatggagaccctc

SEQ ID NO: 464764 - DNA, 122 bp, Homo sapiens
tgagagaatgaaactactccccttatcgcgggggcatgtacaaccccctgtgatctggttcgtaatattcagtgggggagagggtgacattactccccatatcgcgggaggtttacacactc

SEQ ID NO: 464765 - DNA, 122 bp, Homo sapiens
catctgacctggtcaaacctgctgtccccgcccttccttgtattaccctccccaagtcaccgtcgacctctctgaagctctggaaagggaggagaataaacgtttgtggccctactgcgggc

SEQ ID NO: 464766 - DNA, 122 bp, Homo sapiens
ccatactccaggctctaaccacacttgctccttttcacttgtagaagcacatggccaccgcgtctcacggagggccatcagtcacccccaaggcgctgcagacctaaagtgtggagaactcg

SEQ ID NO: 464767 - DNA, 122 bp, Homo sapiens
cttattcttttaattgaatcagactagtcccagctactcgggaggctgaggcaggaggatcgcttcagcccaggagtttggaagtttgaagctgttgtgtgctatgatcgcacctgtgaata

SEQ ID NO: 464768 - DNA, 122 bp, Homo sapiens
gccggcgggccggtgagctcactagctgacccggcaggtcaggatctggcttagcggcgccgcgagctccagtgcgcgcacccgtggccgcctcccagccctctttgccggacgagctctgg

SEQ ID NO: 464769 - DNA, 122 bp, Homo sapiens
gacagtgtgcctgctcggtcccaggactctgtttactttgtctgctttgctaaagaaggccggtgaaccaggaccaccgcacacacaggcccaccaggggcaatgctcattccaagacctta

SEQ ID NO: 464770 - DNA, 122 bp, Homo sapiens
accttcaataaatgtcaattaaatctagttgattgatgtccagttgaagtatatccttatcgaatttctccctgttggatctgtcaattattgatagagggagctcttattaatatctgcag

SEQ ID NO: 464771 - DNA, 122 bp, Homo sapiens
ccccactggctcctgctggcccaagagcggaggccctgagccagtcactggcccagcatccggtgtcacttacaaacacaggacggctgccaccttctgcaggagaactggccctcccgcgc

SEQ ID NO: 464772 - DNA, 122 bp, Homo sapiens
gctctgacctcgcgggagcagtcgcctaaaagaggctccgcccttggccgcttggggtggcgcccgccaaacccgctcctaaaaggagcctctctccctctgtctgctctaagcgccttggg

SEQ ID NO: 464773 - DNA, 122 bp, Homo sapiens
ttaataagtaaaatgttgatcatggaagatccaggctagattttagattgagtctgtgtacgttggctctgcagtgatggcaaggattacaaaatgatttctgtctatagtagctttgggaa

SEQ ID NO: 464774 - DNA, 122 bp, Homo sapiens
gggacagccgcctgctggtggggcgtgggcacgtgggcacgctgcggcacggcgggaagccgcgagggcagggcagacgccaagaggcccagtggcgtcatcagggtttccctcaaagggat

SEQ ID NO: 464775 - DNA, 122 bp, Homo sapiens
cagccgcggtcatgctggggacacgcggagggagcgcgcccgtgtgaagacgaagacagccgcagtcatgctggggacacgcggagggagagcgcccgtgtgaagacgaagacagccgcagt

SEQ ID NO: 464776 - DNA, 122 bp, Homo sapiens
aaaaagtccttggctttgaagtcgccggatggcgtaaataacactgacactcaaatcccccgtctgatttcagattgggtcgatttcacgcaggttctatagaatttgccaagactgctggc

SEQ ID NO: 464777 - DNA, 122 bp, Homo sapiens
ggcacgggcaggaaccccagctgtgcgtgggtctgcgggccagcatgagttccaggtgggcgcgggcttggcgggccctgccgtcggagcggctgtccagcgccgccaacctgggctgtgag

SEQ ID NO: 464778 - DNA, 122 bp, Homo sapiens
gaactccttgcctcaagggatccttctgcctcagccctcccaaagtgctggtattataggcgtgagctgccacacctggcctgggtaggacttctgtttctagctctgtatctttcttgcat

SEQ ID NO: 464779 - DNA, 122 bp, Homo sapiens
aggcaagggaaaaccaccaccatcagcccaagcgcacataagggaggcgggggcatcgggcgtgtgatgcaaagcaggtcacaatccagcgatcttggtataatagggggacattttttttc

SEQ ID NO: 464780 - DNA, 122 bp, Homo sapiens
gcagggatagagcaaagaagcgaccgcatgtggaaggctttccaggcggaatgctccagccgtagcgagttggaaaatttagagtggggagggggcagtagagatgttaactggcccctcct

SEQ ID NO: 464781 - DNA, 122 bp, Homo sapiens
actaataagaaaacaacagagtgcttacgggggccagcttgagatcctgcaggatatcatcgaaataatggaactccgtgagttccagctccaccatctcgttcttcagctccaggatgcgg

SEQ ID NO: 464782 - DNA, 122 bp, Homo sapiens
gatgaacatggcgtagcaggtggcactcacaatcatgctgagcatggtcagccagatgtccgtcatgctctcgggcgcctgccggccatacccaatgcacagcatgtggctcatggccttga

SEQ ID NO: 464783 - DNA, 122 bp, Homo sapiens
ctagaaggaaattaattcttcattatgcagaggacttgacaagttgttttccagagaggccgttcgtagttatgtcacactacttctacttgactccacaaattcttctgccctttagccct

SEQ ID NO: 464784 - DNA, 122 bp, Homo sapiens
gatttaaaaataatagacagatagaagtaaatatataaaactagatctaaagagacaagacgaagggaacttagagtgctctcattacagcatgaataaaaaggtagaagcagagaagcgtg

SEQ ID NO: 464785 - DNA, 122 bp, Homo sapiens
cctagctgccacctctcccccagcaaggtgaacgggggacctagaggcatggtgtcggggcgaggatgaggcagcaagaaggagcggtgggggcggggtgcagccgagtcagcacccagcgg

SEQ ID NO: 464786 - DNA, 122 bp, Homo sapiens
gtgcggatgctcccggaacgcccattttacaggtggagaggctgagcctctcagccacaccgacttcctgctgccttatccaagaactggtttcttgccctggatgcggccaagtcacagct

SEQ ID NO: 464787 - DNA, 122 bp, Homo sapiens
gaattaaactggctgagatattatggtatatgtagcttacacatgcagcaccactcacttcgggaagagacaagtcttctgcagtgagtggtgctgcataggatgtaccagcttttagtgaa

SEQ ID NO: 464788 - DNA, 122 bp, Homo sapiens
gcgccaccatcgagggcacagcctgacccagccccgcgcagaaggtgttggtaaggcggccggcgaaagaggctagcggggcgaggggcgggaggccagcgggcagcggcgcaggggccagc

SEQ ID NO: 464789 - DNA, 122 bp, Homo sapiens
cctgcccctcgcctcgactccctttcaccaacaccgacacccacattgacacctccagtccggccagccgctccactcgttgcctttgcatctccacacatggcgtcctccgcgcagagcgg

SEQ ID NO: 464790 - DNA, 122 bp, Homo sapiens
cctggaggagctctgggttatttgggtccaaatgtgactcctgtgtgtgctacgtagcctcgggcgagtcactcaccctctctgagcctcaacgatcacatctgtaaagtacaacagtcatg

SEQ ID NO: 464791 - DNA, 122 bp, Homo sapiens
tcattcccctcgggaatcaggagtgacctggagcactgtggtgagcgtctgcagggggcgcgatgggggtcctgttggctgctcatgctgcttcagttatccccgtcactgaggaagcacct

SEQ ID NO: 464792 - DNA, 122 bp, Homo sapiens
ggagggtggggacgggagaggatcctggtgctgggcttcacagtcgaggaggatgattgacgcccccactcaagagcccacatcggctccaaataccatgaaattctccttgtgatacgtct

SEQ ID NO: 464793 - DNA, 122 bp, Homo sapiens
ccgggctgggatgcgtcggcctgctttggtggagacaccagggcctgcagtgggctgaaccgtattgtttccctttgaggccagtcctggtcctcgtccccatccatagctcatgctttttg

SEQ ID NO: 464794 - DNA, 122 bp, Homo sapiens
ataaaaataatagcagctacatcattggattattgtaaggattaaatgaaagaagtgagacgtttaacacaatgttaggcatggttaatcttcatgtctggtagttattattatcatcatga

SEQ ID NO: 464795 - DNA, 122 bp, Homo sapiens
gtcatgccttcagcttcttatgaggtttctgagtcagctcctggctgtcatcagagaacacgaaggaggggccagggaagttccaggaagtcattccaaagtgattgcttggtttccctttt

SEQ ID NO: 464796 - DNA, 122 bp, Homo sapiens
ctacaaaccaggggtcaaacagcctggagaagtccgagtcccaccccaaagtcctgcaggcggcggcggaatagtcggtgcggggccagcatcagggtaagaggagggaggactttagggtg

SEQ ID NO: 464797 - DNA, 122 bp, Homo sapiens
tgttggcctcctttttctggtcccaatccacaagcaatgaataaaacccaaaatctttctcgcacctactcattttttcttagagcacaatcagataatttttagagctagttttgagatca

SEQ ID NO: 464798 - DNA, 122 bp, Homo sapiens
ctggattggatggtgtcaggaaggaggtgggacaaatctatgacttatgggcatcttaatcgtacctagaacgctgaagaaatgaagcaggcccaaagtttgactggaaaagagcagcagtc

SEQ ID NO: 464799 - DNA, 122 bp, Homo sapiens
gggctacccagtgctggcactgagccaggcgcttaatcccatttctccctcaaagccaggcggcgccgtttcggcccatttcgcagcaggggaagctgagctcgcccagcgagggcctctca

SEQ ID NO: 464800 - DNA, 122 bp, Homo sapiens
aaatcagagttttcataggctaacgatttgtaacttcataaaagatccccctctagtttccggaggacagcgagctcctcccacctcattccactctaaaggggaaaacaaggtgtacaggt

SEQ ID NO: 464801 - DNA, 122 bp, Homo sapiens
ctttgacgggagtcacctttcccccgctctattcccacctccctgccctttacatccttccgtgaaccaaagtggccagttgcacaaccaccaagaccatgaaatagatctgaagcccactt

SEQ ID NO: 464802 - DNA, 122 bp, Homo sapiens
ccccagggccagaacagccaccacacctgcgctggccagggcctgcacgtagcccgacaccgccgatgccagggcgcccgtggcctcatccgccacttccaggaaacctgccagggagggag

SEQ ID NO: 464803 - DNA, 122 bp, Homo sapiens
tccccctctcctccgggcgggccaccacgctgggacctcggcccacagcccggctcctcacgcggctcctgttttattaacctgactgtcggggctctcgccactgaatagggcctgtcgcg

SEQ ID NO: 464804 - DNA, 122 bp, Homo sapiens
ggaccagccctgctctgagggccattacactctggtgctttaatcaaatcagtctcagtccgtgtggtgaggacaggaacaaggcggaggtaaagaagaagaaaacagattcgaggatgggg

SEQ ID NO: 464805 - DNA, 122 bp, Homo sapiens
gatgtgacgccatgacaagtcaggctggtcataattggccccagttaactcgcatagatgcgtcaccctttcatacacactccagggcaagaaattttgtattgtttctttgaagttatcca

SEQ ID NO: 464806 - DNA, 122 bp, Homo sapiens
ggacccaaagagtgagcagtagcaagacttatagcaaagagtgaaagaacaaagcttccacggtgcagaaagtaacccccatgggttcccactgctagcttgggcagcctgcttttattccc

SEQ ID NO: 464807 - DNA, 122 bp, Homo sapiens
ccgaggggcggaagcacaggctcagcttctcctccaagctgcaggccggggccgggaaaccgtcggcgcccccacccgcctcggcccccgcctccgccccaggctcggggctcgcgttacag

SEQ ID NO: 464808 - DNA, 122 bp, Homo sapiens
aaaggtgcatagagatatagccaggaaaggttcccaggtgagagtaagaactctccaggccgatgttaccagtggaacaaggggctggttcattctggaatcttccttcctatacctggggg

SEQ ID NO: 464809 - DNA, 122 bp, Homo sapiens
gggctggaggagggctcgagctgcgaggacggcacggagcagcggggtgggactcggggtcgccccaggagagttccgcggcccgggggggcagaggcatgcacaagtggggggcggaagga

SEQ ID NO: 464810 - DNA, 122 bp, Homo sapiens
cttggcgcccacactctctctgcttgtcttcccctggcccgagaagcctgtccaaccggccgagagccatttccctacggggtctcgtccctctgcacgtgcccagggctgggaccccagac

SEQ ID NO: 464811 - DNA, 122 bp, Homo sapiens
ccctccgctcctctgaatccttccagttcttcttaggccacttaaacgccaccgtctccacgaagtcctgtcggatcaccctcataggaagtgacaaaccacgttttgaacccctctcccca

SEQ ID NO: 464812 - DNA, 122 bp, Homo sapiens
tgtgagagggtgagagtccgtccgtgtaggtgagggagctagcaagagtgtgagcgagtgcgaatgtccctacaagtgtgggcgcgtgatgtgtttgaaggtgtgtttgttcgagagggtgt

SEQ ID NO: 464813 - DNA, 122 bp, Homo sapiens
ggggttcccaaggtcaggaagtgtgatccgatgggaagaaaacaggaattagaagttggacggggacttcctccagcaaagggagcacagaagggtgacagaaagaatgcaggaagatatag

SEQ ID NO: 464814 - DNA, 122 bp, Homo sapiens
acagcgcggccccgcccccttcttgactccgccctctcagcgaggctcaggtgcacaagccggaagtgcgctctcccaggtgagtgactaaactttccgggtcacgtgacagggcggagccg

SEQ ID NO: 464815 - DNA, 122 bp, Homo sapiens
ttctccctgatctctgaatagccagtgggtgcaagtgacagcttgctttaggacagcttgcgttagggttgcaagtaacagcttgcattattacaaactcctctgtcccggtcagaaaaaga

SEQ ID NO: 464816 - DNA, 122 bp, Homo sapiens
gtctggaattacgatccaccctgtgatctgtcacttttatatacacacaggggaggggaccgtttccatagagagggaatatcacagcccacttaggaacaataccggagaagcaggagccg

SEQ ID NO: 464817 - DNA, 122 bp, Homo sapiens
aaagcaagaaaagtgtatgaccttaggcacaccttgaaaataatgctgcctgttcaagaccgttcagtccagggaccattcaatctataggtgccatgggttaaaaaaggaaggttttccga

SEQ ID NO: 464818 - DNA, 122 bp, Homo sapiens
tgatgccgttaggggtgcatggttgactcctgggcctgagacggcctcaggatgctgcagcggccttggcatcctcttcagcagggtggcggccggaactggcaccttccccccggtctctt

SEQ ID NO: 464819 - DNA, 122 bp, Homo sapiens
accccgcctcttcttgcaacctgtgttggcctcatctacccagcaactgtcgacgtcacacgacctgggcctccctgaatgggagatatttactaggcaatcccgcctactgttctgaggtt

SEQ ID NO: 464820 - DNA, 122 bp, Homo sapiens
gaagggacggggaaacgtggggagaggccgaaccccaggggcctagggcgaggccgcgagcgcagggagaagccgagggcggaaggagcccgggtagccgcccagcagcgcctcaccccgct

SEQ ID NO: 464821 - DNA, 122 bp, Homo sapiens
atgctactgtgtggatgaacactgaacacatcatattgtcatcccagccctgtgggaggccgaggcgagaggatcacttgacatcaggagctcgagaccagcctggccaacttggtgaaacc

SEQ ID NO: 464822 - DNA, 122 bp, Homo sapiens
ccaagccctccttggggtcaggaccgtagaaaacggaagctttctggacgccacaacctgcggagcaggtgcggggcctcactgccggggcaaggagacctcaggaccctctctcctgtggg

SEQ ID NO: 464823 - DNA, 122 bp, Homo sapiens
tcccggggaaggtcccagtatgacaagcctaggatggtgagaagcccagggacacaaagccggcttggttccttggcaacatcctgaggaatccagcggctgcacactggctcccttcctct

SEQ ID NO: 464824 - DNA, 122 bp, Homo sapiens
gccgcggagagcagctttggagagccgccctggctgatcatgaataatttgccagggaaccgggacagggtggggtggggaaggggtgaggaaggagggttgtgtgtgagaagcccggtcag

SEQ ID NO: 464825 - DNA, 122 bp, Homo sapiens
attaacgcccggcaaagcgcccggaactagaagcagcgaagaacccgggtgggcagcgaccgtgacagccgagccggaagcggagctgcgggaggggcctcgacgctcctccatcttttatt

SEQ ID NO: 464826 - DNA, 122 bp, Homo sapiens
gggggagggaatactcacatcaggaacatgggatcctcaggctccacgtccctcatgaagcggaacatcctgatctcagctccagggggctccacactggaaagatatggaagctcagatac

SEQ ID NO: 464827 - DNA, 122 bp, Homo sapiens
gggcataaaagatctgatctgtggaagtcaaaacactaaactttttagccaggcaggtctcgtggcctgcacctatagtccgagccactctagaagctaaggcaggataattgcttgagccc

SEQ ID NO: 464828 - DNA, 122 bp, Homo sapiens
cggaaatccacccagccatgctgtctttggagaaaggcaggctgcactcgggagcaggcacgctgccccaggccagccttgcagggactttcaatacagtttgtcgggttaggaaagaacac

SEQ ID NO: 464829 - DNA, 122 bp, Homo sapiens
gtcgcaaaaaaaaaaaacaaaaaacaaggtttcctggacaggcactcgccagggcgctctcgaagccgtggggctgggggaaggcgccgtgtgtccggcctgtggtgggttcagaggctgag

SEQ ID NO: 464830 - DNA, 122 bp, Homo sapiens
ccaggatcacactgaaaagtaacagcaagatgaacttgaacttcccagtgccagtcctggcgttttctctgcattctccagacccaggctgcattagacaatctctctctctcttttttttt

SEQ ID NO: 464831 - DNA, 122 bp, Homo sapiens
tatcacctgcactggatcggaaatggtcaacagttttgaacaaacataaagtaggccgaccgaagttcaaacatttaattcttttgtctagctcacgttttcatatgggttttaaattttta

SEQ ID NO: 464832 - DNA, 122 bp, Homo sapiens
ttggggtgtcgtcgaaagctgtggaggctggaggtaagctagctaccagaccgactagggcgaggctcacgaattaattaccacaaccctaccaggtattggcgcttcctgcttgcagccca

SEQ ID NO: 464833 - DNA, 122 bp, Homo sapiens
gtcccacagggaccttagttccgggtgaggagcgctgatctttctggcaccctgcaaaagcgactgctttttcagagtcgttattgtgactgccggagaccctagagtatagggtataaata

SEQ ID NO: 464834 - DNA, 122 bp, Homo sapiens
cccgcagagaattaccttttccagggacggcaggaatgctacgcgtttaatgggacacagcgcttcctggagagatacatctacaaccgggaggagttcgcgcgcttcgacagcgacgtggg

SEQ ID NO: 464835 - DNA, 122 bp, Homo sapiens
atataacacctactctcaaatattatttccatcttttttggcactcagaactaaaatttgcgtaagcagcgcaagcaatggagatttacctcactacatcttagttttacaaagatgtggaa

SEQ ID NO: 464836 - DNA, 122 bp, Homo sapiens
gcagcgacgcctacaacaccgcctgcggcttcgggcacagatgcggctgcggcgcctcaacgccaccaccaccctaggcccccacactgtgcctcccacgctgccccctgcccctgccacca

SEQ ID NO: 464837 - DNA, 122 bp, Homo sapiens
tcaagtttcccgcccttctagcccgcgctacacccttcccagctcgccactttattttctcgttgttggcgcagcccgttcttccggcctaaaccaaatctcattttcgttcctcgcctcct

SEQ ID NO: 464838 - DNA, 122 bp, Homo sapiens
ggggggtggggtggcgggcgggcaggctggcgggggagacttgaaaccgttccggtgctccgattggctctcttggagaaaaggggcgtggcccctccttactatgcggtgagaggacctaa

SEQ ID NO: 464839 - DNA, 122 bp, Homo sapiens
taacataacactgtttaaggtatcagcactctgatttccttcaggtaaactattacttcccgaatttcagtacatgtggttttggtgtcacttttcctcaatctattatttcagtagtgcat

SEQ ID NO: 464840 - DNA, 122 bp, Homo sapiens
cctgagcagggtggagtcaggggtcagtgggggtggggaggggccgaccaccagctgccacgcccaggaggaggcctcccgggacacccacaggtgggattccaggcaggcccaagctgggg

SEQ ID NO: 464841 - DNA, 122 bp, Homo sapiens
aggtggcaaagggacaaagtgtccccctacaataaaggacgctcagcagcaaaaggggaccgactacccacgcatgcttcaaagggacagcctcggtgacgctgcgagtgaaagaagccaga

SEQ ID NO: 464842 - DNA, 122 bp, Homo sapiens
ctctgcgtccagcagaaccatctggggcacctggaccgggcggtggggtggacagagagacgagccccagctgggaccgaaaacatcgacccctccgagaggtctcggccggaccggcgcaa

SEQ ID NO: 464843 - DNA, 122 bp, Homo sapiens
aacagtgaagcagcagcaaagggcactggtggtttcccaagtggagacgctcagaggctccgtcctgagatggggaagttgggattagccttcatcaatgctgcaggaggtatgataagcag

SEQ ID NO: 464844 - DNA, 122 bp, Homo sapiens
ggcgtgggcacgccggccgctcagaaagcgcgggaaaggcacgcagccacgccccaagggcgcagcctaggacaggggcttctggagcttctggcagccgtctgccctcatggcctttgcac

SEQ ID NO: 464845 - DNA, 122 bp, Homo sapiens
tgacccaggggcgcctgtgcaatgttccccactccctagcagtggccctcaggggaaccccgggctgtcctggtgtgatccctgcacccaagagcagcaggagaatgcattgtcccagtgga

SEQ ID NO: 464846 - DNA, 122 bp, Homo sapiens
gtgagggtcctggttggggtctgtactagagtaataagagccccttccaggcaacagccgcgaacgttctgccgtggatgcttggaaagcggggatctgagtagatggtgtttagggtagac

SEQ ID NO: 464847 - DNA, 122 bp, Homo sapiens
gatggccccgtgggagtcccaggcccaggtacggccccgaccccgcccaggcggtgccggcgctcacagtgtcctcggtggcgcatgaagctgtctcgccacatgaacttcttggcgcagac

SEQ ID NO: 464848 - DNA, 122 bp, Homo sapiens
cacttcttgaagaagttgatcctaatcctgcgaatttcgtgggagctggaatcatccacacgaaaaccacccagattggatgcctgctgcgcttggagccgaacctgcaagcccaggtcagg

SEQ ID NO: 464849 - DNA, 122 bp, Homo sapiens
ctaaccaaaagcaatgtaagtgacagcactacagcaaaccccacatcctggccaattagacggctagcagcctcaaccattcggaacacagctgtgaaccagaagtaggcaactgcaagaaa

SEQ ID NO: 464850 - DNA, 122 bp, Homo sapiens
gggcttaaataattccacagagggcaatcatacctgtcatgcgcggttcgcaggcggcatcgagagatgcacaggcctccgtattttctgtactaatttgccacatatcgggcacttcatgt

SEQ ID NO: 464851 - DNA, 122 bp, Homo sapiens
ccgcctcctcgctcggcattctgggattggtagttttagtccagattgtgacgtcaatttcggggtggcgcgcggtggtgcaaggatgcagttagagcactgaaatcttagaaaggaggcaa

SEQ ID NO: 464852 - DNA, 122 bp, Homo sapiens
ggggattggaggaggtttttatttccctttgtgcgggtggctggggccggatcgaggcggcgggggccgcgggactgggggctccccgctgagccgagaggagcgcgacaaaggatgcgtcc

SEQ ID NO: 464853 - DNA, 122 bp, Homo sapiens
tacagaatctgaaaggacaggtctctgaaacatttctctgacttgttctagactgccttccgggaaaatctggatgcttgccgtttaaaagccaatgaagcccctccacgtccttggagccc

SEQ ID NO: 464854 - DNA, 122 bp, Homo sapiens
ttttttttttttttttttgagatagagtcttactctgccacccaggctggagtgcagtggcgggatcacagctcacttaagtgatcctaagcacaagcaatcctcccacctcagcctcctga

SEQ ID NO: 464855 - DNA, 122 bp, Homo sapiens
gcctggacgtgagtcgagtccagtccagtccctcactgagctctaaaaaagcagtgaccccgatccagggcccagctcccaccaccagccaaggttaggtatccaggttgcccacaatgacc

SEQ ID NO: 464856 - DNA, 122 bp, Homo sapiens
agcacctgggaggcggcggggaaggttggccctggctggtctgacacacgcctcggggctcgtccttcatgggccaggcctggtgctccacctaccactgctgggaagccatggaggcttct

SEQ ID NO: 464857 - DNA, 122 bp, Homo sapiens
tgagatgacacggtgcctgaggtctgcttcagaatatcccacatgtatttaggtattactcgtgtgattaagaagtaaattttttaaaagatcaaagaatttctcctgccacatctagaaga

SEQ ID NO: 464858 - DNA, 122 bp, Homo sapiens
gaggagtgagaagtcttaggaggtaggaggcaggaggaactgaagcccagctgtgaaggccgcagactgcagtgagaggaggtgagtgcttatgctgggttattctaggcttctgagtatgc

SEQ ID NO: 464859 - DNA, 122 bp, Homo sapiens
gcaggtgactagtgacaggaagttttcatttctggcagtgaactgatggcttcagatactcgcgagggagcttttcgaggggatcccaagaagcctgggaactggcgggtccgcggccattt

SEQ ID NO: 464860 - DNA, 122 bp, Homo sapiens
tgggaacacaggactgagggtagagcagctagagaaccttgggatgctgaaggcctcgcccggggaaacccccatgaggacactctctggcgggcggagctccttgcaaatcgcggctgcag

SEQ ID NO: 464861 - DNA, 122 bp, Homo sapiens
tgggcgatgggcgggtagaaacctcacacaccaaagcccatcgagctaaactcaaggttgcgaaccccaaccccggtgggaacacggtctgcagacacgctcccttaagtccctgtcgcaca

SEQ ID NO: 464862 - DNA, 122 bp, Homo sapiens
ggaactatttcaggcatataggatacagcaatggcttgctcaatttattgagacttgtttcgtggctcagcatatagtctgtcttggtgaatgctccacattcccaccaacagacttataaa

SEQ ID NO: 464863 - DNA, 122 bp, Homo sapiens
gaaagctgtccaagcccaattccattttcacaagaggctttctttttggaaacatgatagcggtctcgctggtgtgcgcaccaggagcgttgcggccgcggcttcctcctgcggcgaatctg

SEQ ID NO: 464864 - DNA, 122 bp, Homo sapiens
tcctgtacctccagagttatatacaaattgtaatcattcattgatatgtattgttacaagcgtaatatgtacagctggccctctggatccacaggttccaaaactacggattcaaccaacct

SEQ ID NO: 464865 - DNA, 122 bp, Homo sapiens
gccgctgccgtgcccactgcgcaagcgcgaggccccgcaccaccgagacctggcggaccccgttgctagagcggcagattgcggctcaagcgtctgagaaaatctaggctggggtcgagagt

SEQ ID NO: 464866 - DNA, 122 bp, Homo sapiens
aaaaagtggatgctgcaaatgacttctgatcgagttttctctttgggtaactccgaggtgcgtatattattaattcttccacccaacgcacgtaaccgggaggtcataactatcgctgaata

SEQ ID NO: 464867 - DNA, 122 bp, Homo sapiens
atgggcttttaaccagcagggggggccacaggcttgtgattgagctctgaccctttggcacggggactgaaagcagatgtgacagtcttacagaaagagcatttagcttctacacatggtaa

SEQ ID NO: 464868 - DNA, 122 bp, Homo sapiens
gcccactgttgctctgagccttcacttcctcagggaggcttcctcaggatctcgaacctgcggaaggaggaccagtctgtgtacttctgccaagtccagctggacatacagatcagggaggc

SEQ ID NO: 464869 - DNA, 122 bp, Homo sapiens
taagaaggcaggtccccggattgacaaaacaatctgggagaagtgcatgcgtgctttgcacgtccggcggagcgggagagcccgctcaacagcctagcggtagactcggggatagttggaga

SEQ ID NO: 464870 - DNA, 122 bp, Homo sapiens
ccagtaatattttgaaaactttttaaaaattaagcaagcccttttaataattactcctttcgcaggtgttcttggtaaagttttaacgtcacataatgtaagtattgtgtatcatcgttttt

SEQ ID NO: 464871 - DNA, 122 bp, Homo sapiens
gtttgtttcctccttcccagatcattgtcctctgccctgctttagaacctcagagaaactcgtttctgggctcttttatctgctcaaagtgacagttactttcacacagagattggggacct

SEQ ID NO: 464872 - DNA, 122 bp, Homo sapiens
gaaaccaaggccgggggtggcggagggcacgcggatgaggggctcaggcctaggaagggccggtcctggacaccgcgccctcccctgcagccaggcgccgaggcctgcagcacccggagcgc

SEQ ID NO: 464873 - DNA, 122 bp, Homo sapiens
taccattatactgacttggaaacagaagctcagggaatttaaatggtttgcccaaggacccgccctccgtccctcccttcctccattcctctcttcctccctttatacataccactgtgttt

SEQ ID NO: 464874 - DNA, 122 bp, Homo sapiens
aaaggttaattttgtaactaaaagctgatgtaatattactaagaaactgcaaaagattaacggatggaataaaaaaccaattaaggaaatactgagggaagctcagaaagtttgtgtgtgtg

SEQ ID NO: 464875 - DNA, 122 bp, Homo sapiens
tgtccggcctccaacgagtgtgagatcaccaagcggagacgcaaggcctgccaggcctgccgcttcaccaagtgcctgcgggtgggcatgctcaaggagggtgagcgctgggcaggggctgg

SEQ ID NO: 464876 - DNA, 122 bp, Homo sapiens
ccacgaagggcgggtagccgctgagtaggatatacaagatgacgcccaggctccacaggtcgcagcgcttgtcgtagatgctagcctcctcgctgaaggcctccactacctccggggccatg

SEQ ID NO: 464877 - DNA, 122 bp, Homo sapiens
ccgcagcttacgcgctgctggccctgagcctgttcccttcctgcagtccccaggagctgacgctattcggtttgtttttaaacactccagctgagcaagcgtcttctcaggacgtcctgcgt

SEQ ID NO: 464878 - DNA, 122 bp, Homo sapiens
caggctcggcctcccgcaccaggtttcagcagggcctggaagtgcttcttggtgatagaacggcaggtgatggcgccaggagcccacagggccgaggtggggacggggagacgtgcaggaac

SEQ ID NO: 464879 - DNA, 122 bp, Homo sapiens
ggggcgcagctgtgagcgcccccctctccccccgcctgcccccaccccctctgagctccccgctttgctctgaaaaaaaccaaaagcatctctcgatgctggggtttcttcacataaagtga

SEQ ID NO: 464880 - DNA, 122 bp, Homo sapiens
catttgtcttgtatgaaattttggcaagtgcatggggacccaatctgtgtgggcactgctcgagaaaaggccaggaaatacggcaaaaactatttgcactgaatatttattttttgagatgg

SEQ ID NO: 464881 - DNA, 122 bp, Homo sapiens
tctgagaagaatagtgggtgagaggttctagaacttagatttttctaaggaatgttaccacgttgctaagctatgtaacatatcttaacaaccagggagccacacaggctccttggagtaag

SEQ ID NO: 464882 - DNA, 122 bp, Homo sapiens
taggccaccttctcccctaggggcatctcctgaccaaagaatccagagtcaagacctctccgtgctccatttagaaatgaggcagccaggccctcatctttcagaagggcccagacacccca

SEQ ID NO: 464883 - DNA, 122 bp, Homo sapiens
ggttgtatgtccagctggcatttagttaccagaaatcctttcaaattttgctagtttatacgctgtaggtagaaagtatttttatcttatggtttctgtagcacttggtactcaacaaggat

SEQ ID NO: 464884 - DNA, 122 bp, Homo sapiens
attgatctttgcttatcacatacaaaactctcataaaggaactgggttttccccaaactgcgtcaaaacatgaatgatggtgaggggaatttgccgaggtatgaattcaggtaccagcagat

SEQ ID NO: 464885 - DNA, 122 bp, Homo sapiens
cggccggcagttccgcagggcagctgatggacagcaagtcctcaatcttggtccctattacgggaaaacgagcctccggggcggcctggtagtctccctgtgacccacagttccctggggcc

SEQ ID NO: 464886 - DNA, 122 bp, Homo sapiens
gtactttactacaattaatcaatttttttgattaattatagtaaaactgacttaagaatgcgtggatcatttatttgtttgtcccaggaacgtgaagctagacgtgttcattgtccctgtta

SEQ ID NO: 464887 - DNA, 122 bp, Homo sapiens
atgtccaggtggccgaggggcagcgggtcgtgggggttcttgaagtagcagaggcagcagcggcgcccgtccaacacgaaccgacggctgcggtagccacgcagtcgcgctggttcccgcgc

SEQ ID NO: 464888 - DNA, 122 bp, Homo sapiens
ctggtgaatcatcagggcctaggacaaacatcactcacttggtcatctgaaggccaggaacgattgtgtcattatgtatgtgcatttctcaactaagccttcaagagggtgatgggacgaga

SEQ ID NO: 464889 - DNA, 122 bp, Homo sapiens
tctatatttttttcagcgcatcatgtctatttttcacgtagcaactcccttccgggcattcggaaaacgctcctcgtcggatatttctacccacaggatgctctttctgtttaacatggaag

SEQ ID NO: 464890 - DNA, 122 bp, Homo sapiens
tttcaaaattccagtgctcaggcttcatctcagactagaaaaacaatctctgagctgaggcgcaggcatcagaattccaaggctgagtaccactataagctagcatagaaactgccatatct

SEQ ID NO: 464891 - DNA, 122 bp, Homo sapiens
tctttcccccactgtatccccacccccacttgttctgctccgccttccgccaccctcgcccggccctccagtccgccacgcagcttcagtcgtcgccggttaccatggcaacggcggcagca

SEQ ID NO: 464892 - DNA, 122 bp, Homo sapiens
gcccttgactagaataatctcaggcaagcaaggatgtaggagccattccagcttcctccccggagctctgccggcagaccatgcctttgttttgggacagcaactcttatcatttgccctca

SEQ ID NO: 464893 - DNA, 122 bp, Homo sapiens
ccctcctccattcccaaaagcctgggaaagctgcaccatggaatgtcagctccttctccccgtcaggggatgacagttttagagagcagcagcaatagtgcttcctattagaaatggggaaa

SEQ ID NO: 464894 - DNA, 122 bp, Homo sapiens
tcactctttgtttaacatcctctgaaagcagacaattgatcggctctcagatcatgcctgcgtagtacccccaccccctccacctctgcaatcctttcagtgagctgagaccccactccagg

SEQ ID NO: 464895 - DNA, 122 bp, Homo sapiens
tccctctagcaggaagcccccttggccttgcggcctgcgtcctcattcggcgaactctcccgttcacggcttcctgtacatctgcccttgtggttggggtcactcctcgcaggcactgtggc

SEQ ID NO: 464896 - DNA, 122 bp, Homo sapiens
acagaagccggtaaagggcatcaaacacaggagcctcccacgctgctcccatcctccgtgcggcatgggctgctgtttccagccttgaccacgcttcccacctgcaccctggtgggcggtcc

SEQ ID NO: 464897 - DNA, 122 bp, Homo sapiens
ggaggactccagacagctggccttcttatgccagcccgcttctgtgggagaggccctctgcgtaggtgactgggcagggaagaggctaagacactgaaagattgaattcctcacccaaatgg

SEQ ID NO: 464898 - DNA, 122 bp, Homo sapiens
ccctgtttaattcataaaacacaactggcagaagtattacttgaagcaaaacaaaagtaacgtgggaacttgcttatttgctaagccacaatgtatttttccaggaatagcataaatttgcc

SEQ ID NO: 464899 - DNA, 122 bp, Homo sapiens
ggccctggggtgggtcggggccgtgcagaacagcggctgggggaatgcctgagccgagctcggctggggagtctttacctctccgggtgccctgccctcccctttccttccatgctcgctgc

SEQ ID NO: 464900 - DNA, 122 bp, Homo sapiens
gaattgagttccagacaggccagacccttcctaaggggctcagggtgggagatgactcttcggagaggccgcaggaacggctcaagggagcccgtgggggaggcagctgtggccgccctgcg

SEQ ID NO: 464901 - DNA, 122 bp, Homo sapiens
cgggtgggggcccctggagatggccgtggtggggtgactcacaagcttgtaaggggcagccggccctgccaaatggacgcagccaggaaggacggagtgactgggcgggggcaggggtcaga

SEQ ID NO: 464902 - DNA, 122 bp, Homo sapiens
ctttcctaccatccctctaaatcacagtttccaggtgacttttctaagcatggcttttctcgttcactcctgttcaaaaatcttctcaccaattttgtcaccatttactcagctgagtgcct

SEQ ID NO: 464903 - DNA, 122 bp, Homo sapiens
ccttttgcttcattggttttgtcacttgatgtggatggtttgtatccactggaagcagctcgtgctttgccaaaactgaggagggaagtttctccaacttttgccagggtttggcatgggaa

SEQ ID NO: 464904 - DNA, 122 bp, Homo sapiens
caatgtcctgaaagtggcagatgacctcatcttccactgtccacagggcacagggcagaccggggtgctctatggggtcctggccgatgcctgggtccaggggtgttccccaggtggtcagg

SEQ ID NO: 464905 - DNA, 122 bp, Homo sapiens
gacctttcacaggtaggcagacttgaagcttcccaggtgaagcctcgtgtcggttctcttcgtattctctttgctcttgtttgtattcgaaaggcatttgagtaactggatctaggcagatc

SEQ ID NO: 464906 - DNA, 122 bp, Homo sapiens
tttaccgtgatggatcgtttggctcaagggctgatagtggtaggggcgtgtgtatggaggcgggggataccggatggtatgagatccagctgctcctggatgaagcaaaatattctgtggat

SEQ ID NO: 464907 - DNA, 122 bp, Homo sapiens
tctccgcagacgctgccctcccgcctcaggccccgggccccgggcaccgggcccgccctgcgtcctgaacctcggcatcccgctctccggtccacgggaccctgctctgcggaccgccgacc

SEQ ID NO: 464908 - DNA, 122 bp, Homo sapiens
aaaagtctgagatccccaggggatctggcacaggaaaatgaagtcattttacatttgtggcgtgattcaaattggaatcacacaagtcagaacgacaggatgctggagtactttgtttagct

SEQ ID NO: 464909 - DNA, 122 bp, Homo sapiens
atagatacaaattatccattgtcctgttctggttaattttcagtcttaaaaaaaatgactcgtgttaagtgacagcacacatatccattttaaaagcttgtaagttctggttgatactttca

SEQ ID NO: 464910 - DNA, 122 bp, Homo sapiens
aaagtggccaacactaacgtgtccttgcaggcactatggggcaccaaggtggctgtgaatcggcggagcgcagatgccctgcctgcccctgtgcctggcgccaacagcatcctcgagccgat

SEQ ID NO: 464911 - DNA, 122 bp, Homo sapiens
tctagttgggagatacattctaaagggtcttctccattgcttttctccccaaattaatctcgatttggcttgtctgttcacatttgcatgaggaactgaactgttgttttcatagggaaacg

SEQ ID NO: 464912 - DNA, 122 bp, Homo sapiens
gcagccacctgcgcggactgggcccctccgagagggcaatctggagggtgacgttgtggtcgtgggcatctggcagcttcgatttcccctgcgtcccctgccgcgccctaaggggtgaaggc

SEQ ID NO: 464913 - DNA, 122 bp, Homo sapiens
cggtggactccgccacacacccggccttcccgcctaccacctggcagcgctgcccggctgcgcactgcatgccttcgcaggagggctccactggggacagtacagctggggagggaagggaa

SEQ ID NO: 464914 - DNA, 122 bp, Homo sapiens
aacattcggtggagtcgcggacacttccgctcggggactgaggttgctgcagtttttccgcgatagtttggggcagttccgcgcgttgcaggcccttctgaatttcctggacctacgcattg

SEQ ID NO: 464915 - DNA, 122 bp, Homo sapiens
ggtcgcacaactctggacgtgctagaaccgtggggccgcgcgctgggtgggtgaattacgcgggatggaatcatagctcggtgaagctataacaactgaaacccaagagccatggaggttcc

SEQ ID NO: 464916 - DNA, 122 bp, Homo sapiens
gcgagggagaaaccggtcgcttctttccgaaaggccgaagtcgagagaaataattgactccgacaggtttgcttcgcccagtctctgatagtgaggggcacagccgggctagcaaagtgggc

SEQ ID NO: 464917 - DNA, 122 bp, Homo sapiens
cttgcctaacgagcaggaaactgtgcatggtttctcgagtccttggagagtgaaggcccccggggtcgctcccgggcacggagagacgattggttcacggcctagtgttcggtttgttccca

SEQ ID NO: 464918 - DNA, 122 bp, Homo sapiens
gacacttccaggcaacttgtctgggcagggccccttcaagacggcagctgggagtgacaccgaaagaacaggctccagtgatctctgctgcttgtacccattgtcagtcccccagggttgtc

SEQ ID NO: 464919 - DNA, 122 bp, Homo sapiens
gctcctacgctgccttgggccgcaggcctgctaagccctccgctctcgcttccctgcgcgcgaaataagtcccagggccaatgtggcctccccacccagtgcttccgggggcgccaaaaaac

SEQ ID NO: 464920 - DNA, 122 bp, Homo sapiens
ggggggaacagtggacacagctgtgctatggggttctttgaatttgatgttttgagcatgcgatgggctgccaaagtgtcatccattactgggacagatatgaatttgttcatgaatatttt

SEQ ID NO: 464921 - DNA, 122 bp, Homo sapiens
agtttattctcgctgtgactgggactcagcaccaggtgcttggaggcatttaagactgagcgaggcctccttccaggaatttacagcctggaaagtggaagcggggttggggggagggggag

SEQ ID NO: 464922 - DNA, 122 bp, Homo sapiens
ctcgggaagggtaacctggatagggcagtctcctgcttcagaggattcctggcgtccaagcgccgtctcttctctgacatacagtcctgtctcccctgcccgaggctgccggtcgccttcct

SEQ ID NO: 464923 - DNA, 122 bp, Homo sapiens
aaaatgacaaagtggagagagttttattgggtttcttgagcttcagatgataaacaccctcgtccagtagatatgtgcaataaacagaggatccagggatagaaagaagttacagatatata

SEQ ID NO: 464924 - DNA, 122 bp, Homo sapiens
cagcttgccagcagcaggaccgtgatgtgagtgatagcccagccagctcattcagccaggcggcccgattcccaggttcccacgcatcgccgggaaggttggccttcctctgaggttgagcc

SEQ ID NO: 464925 - DNA, 122 bp, Homo sapiens
agggggctgggggctgcagatggtgcctgaagtgccctggccaccccttccccagatcagcggacagctctcccctcgcctcttccggaagctgcctccccgggtgtgcgtgtccctcaaga

SEQ ID NO: 464926 - DNA, 122 bp, Homo sapiens
atccgcccacctccgcctcccaaagcgctgggattacaggcgtgagccaccgcgcccggccgagtagtttacttctttaggcatcacttcctgggtagaacgggtttcctaagggagtaagg

SEQ ID NO: 464927 - DNA, 122 bp, Homo sapiens
ccatgtacagctacatctttagggccgctcgggttaatatatgtcgtcagaggctcctcacgccaatcccggggcggcaggggcggcgcctcgagctctcggcaataaaactttttgatgtt

SEQ ID NO: 464928 - DNA, 122 bp, Homo sapiens
cactgagtggtgactcacctgtgagatcatgtgattattcaagggtggctgttgctgaggcgtgggtgggagagcaggaagttgctgctgctgctgctgctgttgctgctgggcagtacaag

SEQ ID NO: 464929 - DNA, 122 bp, Homo sapiens
tgtgataaacatttgtttaatgcatgaataaacacttacaaaaagaaactgtgagccgatcgaagcttctcactcccgggaatgacctaggagacattcttgaagggagataagaccgctgg

SEQ ID NO: 464930 - DNA, 122 bp, Homo sapiens
gggcactcacaggtattgtggtcacgggggcaaatggccatccggttccctgctctccaccggctttctttagcatccagtgggcctgcacccgaatgtagttgctgcttcccaggctgagc

SEQ ID NO: 464931 - DNA, 122 bp, Homo sapiens
tggacaaaacattcaacaaccagccctacagccactgggatgggtatttagcagggcaagcgttgggcacacacaaaggatgcttgaaatagaaaggcagagatcctccttctcgagcttca

SEQ ID NO: 464932 - DNA, 122 bp, Homo sapiens
tgaggacactctaaggtgcgctagagggatgccttcatcagcttagtgcaatgggtaacccgtgatttctgtgtttccctgatgatcagctgccctctggcactccaactggctttatgagc

SEQ ID NO: 464933 - DNA, 122 bp, Homo sapiens
gctgcggggcgatggagcgaaaagtaggaaggaggaaagagatggtccagccgtggggggcgggggaggcttctggccagaccattactccgccccgtccccaccctcaaggagagccgtta

SEQ ID NO: 464934 - DNA, 122 bp, Homo sapiens
cgtgcgatgggggtgtagctcgcttcttcagtgccccgctgctcaaacctctagccggagcgtgcagaggggcacgttgaggagctctaaccccaaggcagcatctaggagtgaatgtttat

SEQ ID NO: 464935 - DNA, 122 bp, Homo sapiens
tctccaggcttccctctcctcctccttctgcctctcccctgtccccgttccattctcctgcgcccctcgccagcgcgctcgcagcccatcggctcctgccggggcccctctggtgccagccg

SEQ ID NO: 464936 - DNA, 122 bp, Homo sapiens
ttaagctcaatgtaacccagagcccaccatatagttttataggtgctcaattttctatatcgctattaaacttttttctttttttctaaaaactagctgggcccaaagtttcaaacaacagc

SEQ ID NO: 464937 - DNA, 122 bp, Homo sapiens
gtctttggggggactcatgggagcatctttccacagtgaactaactgctaaatcttaaggcgtctacttcaaggtcacagaacatgctgtgaaatattaaaatccaccaggctccacacgct

SEQ ID NO: 464938 - DNA, 122 bp, Homo sapiens
tctaagcgtgtttgcgggtaatttcacgagagcgccctctcatgtgacgcagttagcacgcgcttggtttctcaacccgactgtgacaccttcattacacagacgggtccaagagacccaga

SEQ ID NO: 464939 - DNA, 122 bp, Homo sapiens
ggaggctgaggcaagagaatcgcctgaacccaggaggcagagtttgtagtgaagtgagatcgcgccactgcgctccagccttggcaatagagcgagacaacgtctcaaaaaaaaaaaaaaaa

SEQ ID NO: 464940 - DNA, 122 bp, Homo sapiens
gagtgacaggcggcggggtgatgattggcagctgccgagctgcctggactaggacccgggcgggggcgcagaggtggtcgcaggaggcgccccacaccccgggccttgcgccctgagctagg

SEQ ID NO: 464941 - DNA, 122 bp, Homo sapiens
cagagagagaggacaggagacatagtgaccacggatacaaaggaaaggaaaattttgcaacgggttagctggagatccattaccaacacctggacaggctgtcggaggctgcgttcagtcca

SEQ ID NO: 464942 - DNA, 122 bp, Homo sapiens
gggccgggccgggggagccccgccgccagccaccccaggggcacaacctccgaggagcggcgccggccgaacgtccccacctagagagcccttggggtgccgggtcccacccatcagccctg

SEQ ID NO: 464943 - DNA, 122 bp, Homo sapiens
gggcaggcggcaacgaggtttggcccgggttttgccaacattcagatcgtcagttcctcacgtacacaagaagagggagggataataccttggattcctgcctacatccaggggttccgtgg

SEQ ID NO: 464944 - DNA, 122 bp, Homo sapiens
ggggcggggggctggacacactgacctctggctgtgggcccgtgcccggtggtggggtgccgggaaggggggtggctggaaagtggggcttgcgctgggtcagcgcccggtgtccgcccaca

SEQ ID NO: 464945 - DNA, 122 bp, Homo sapiens
ggaaggcggaagtcgcggcctttgcgtcccgcccacaggcgacccgagccgccagccgggcgtgagtaagtctagggcccagtttccggctgcgccattgctgtgtgggtcttgggacctcg

SEQ ID NO: 464946 - DNA, 122 bp, Homo sapiens
gtgcttctgaggaggtgctccgatctcaggagccagaggcccggttctgggtttcagactcgactgcaaacgatgagtccctcgcctctcgcctgcggcccttctccacccctcagctcctg

SEQ ID NO: 464947 - DNA, 122 bp, Homo sapiens
ccagaaaattttgaaggtctttctgaaaagctagggtatttaacatttctccaacttccacgtttactgagtggctcaacaaaagaatgcatttctcagaaaggaggatgaagctaagcagg

SEQ ID NO: 464948 - DNA, 122 bp, Homo sapiens
gaccaagcttgtggcttcttctccttactcttcctccttggtgtctctatgttagagggccgttagcatctgctggggcctggtcgcattcaccctgctctgccactcactggctgtgtgac

SEQ ID NO: 464949 - DNA, 122 bp, Homo sapiens
cccagccaactaggggtgagctcccgtggccacctgtgacagtcagcccctcgcagtagacgtgccgacgtggctcccgaggtggaggggaagctggaggccctgggggctcttctccctga

SEQ ID NO: 464950 - DNA, 122 bp, Homo sapiens
aagaagagagaatttagcctggtttttacactcccaccgtcctgagacttccaatcacaacgtaatatataaagaaaaaatgttggcatcaggatcttttttttcagaataacctcatgttt

SEQ ID NO: 464951 - DNA, 122 bp, Homo sapiens
gaatctttaaagcgcagctaggacaggaaataatacagggttgggggatgtggacgggggcggagagcagagaagtaaaggaataaaaccaacttcgctggcaacttcaataaatccggtaa

SEQ ID NO: 464952 - DNA, 122 bp, Homo sapiens
aggcctgagcccacctgccaccctccctgcagtagtaggaatagacaaggttgatgcagccgcccagagtcagggctggaaggacccgggaggcctcggcctgttgggctcaccccttcctg

SEQ ID NO: 464953 - DNA, 122 bp, Homo sapiens
ggggcaggaatccggcggcccagaactggaggtgagccctggcaggcccaagggagccttcggcttttcttgggcgccggagtccgcagcacaggctggctgagggctggtaagggagccgt

SEQ ID NO: 464954 - DNA, 122 bp, Homo sapiens
cagtttctagcctgtcctacccgaatttgcatgtcccgtctcaaagcctcatgcaagccacgtgctctcttcccatctgatgagactgcagcgcccttccttccatttctctctgctcaagg

SEQ ID NO: 464955 - DNA, 122 bp, Homo sapiens
gcggtttggtctaacacaaagaagcactaaagaaactaccgaagggtaggtcatctcaggcgaaactataccaggtaatgttttctttagcaccattccatgttctcttagcatcttcttga

SEQ ID NO: 464956 - DNA, 122 bp, Homo sapiens
ccccgccagtccccatccagaaaagcacaggggagctctgagggctcaggcggcactgagcggggacgcggcaactccttgaagggcaaaagtgatgtgaaggacgagccacgaggggaatg

SEQ ID NO: 464957 - DNA, 122 bp, Homo sapiens
tggtccagatcagctttcctagctccagaccacagctctcatctggagtccagatcctgccgcaaacacttgtaagtggtaatagatttcctttactttgtctctcagccctccctactgtc

SEQ ID NO: 464958 - DNA, 122 bp, Homo sapiens
tgagggagacgtcccgcatcacggtgcttgaggcgctgcggcaccccatccaggtagcggcgcaggcctggccctccctgagtgcaagtgcctggctgagtcccttctgccccacgagcaca

SEQ ID NO: 464959 - DNA, 122 bp, Homo sapiens
ggcccaggggtgtcctcccagctcctgtgtctccacgtgctgcaggcctgcaggggtgcccgtggctgctccattcacgcccctccaggagccccgtctggcccggggtcggtcatccggca

SEQ ID NO: 464960 - DNA, 122 bp, Homo sapiens
cgcccacccgtttgctctccactcatctcacagctcaggcagaaagaaggtgaggtttcccgcgtttactgaaaaatcatccgttgcattggctctaaaggtatccagaccctccctcaatt

SEQ ID NO: 464961 - DNA, 122 bp, Homo sapiens
ccgctccgccagcgggcgggtggcgcatgcgcggcgtgggccgcggagttgtgaatggtgcgtcttgtttgccggagttggaggcgggcgggcgcgcgaggaggaggggtggggccggcggg

SEQ ID NO: 464962 - DNA, 122 bp, Homo sapiens
tgagaaatgttaaataaacaaaatgaaatgaagtattgaatgaatgaatgaatgaatgaacgaggatctctgtgtcattttgtagcaaagcacatgttacctcaagtcttgtgatagctgtg

SEQ ID NO: 464963 - DNA, 122 bp, Homo sapiens
tgcttgccttcccaggtgggggaaggtggaacactgtccatcccctggacaaaaacgctgcgcctcggggccttgaacccggttttgtttgaaaggaagcaagagaaaataagtgtttttcc

SEQ ID NO: 464964 - DNA, 122 bp, Homo sapiens
ataatccatagttgaaatgagtgagttttgttgcagtttaattataaacagttcatgactcgcttttcagggtttgaaggcagggttgggactttccgttaacagggtttggatcctgatca

SEQ ID NO: 464965 - DNA, 122 bp, Homo sapiens
gggtagacatagaaaagaatgggaggttttcattaatgcatgagttaaaagtatgatgtgcgtttcaaaaagtggacaccttcaggcagtttgctgagaaggcagcaagtaaaacaaacagg

SEQ ID NO: 464966 - DNA, 122 bp, Homo sapiens
gaacgcctcagcccttgggtggtggatgggattgggcgccgtggagcagggggcggtgctcgtcggggaggctcgggccgcacaggaccccaccgggcggcggtgcacaagcatagtgggct

SEQ ID NO: 464967 - DNA, 122 bp, Homo sapiens
ccagtccagccccatgcgctggcactccttagccattgggtggtccatgggactgggtaccgtggagcaggggacagcactcgtcgggaggctccagccacgcaggagcccacagcggggac

SEQ ID NO: 464968 - DNA, 122 bp, Homo sapiens
accccacccagcccggagcatcctcctggcctccctccagcccagcctccccctcctcagcgctcccagagcccgagaggggaagcagccccagctctgcccccacacaaaccgcaatgcag

SEQ ID NO: 464969 - DNA, 122 bp, Homo sapiens
cgagaaatggaggctgtgattctggtctttgccatgtctgccacgcctctaccgtgacatcgcttttccttcttcctcctgatctcattgtggtttgtccccaacactggtcttggcagtgg

SEQ ID NO: 464970 - DNA, 122 bp, Homo sapiens
ttgattttccttttctacattgtgattctcttaataccttcagatgtttgctacctaggtcggcaagtaggtctgtcagtatgacttgcgtatgaaagagaaagctcttctgtgtttagaca

SEQ ID NO: 464971 - DNA, 122 bp, Homo sapiens
tggacggaaccacgtactttttacatacattgattcatgtctcacgtctccctaaaaatgcgtaagaccaagctgtgccctgaccaccctgggcccctgtcgtcaggacctcctgaggcttt

SEQ ID NO: 464972 - DNA, 122 bp, Homo sapiens
aggacctggccatgctgtacccagcacagaggcatgtgtgccctctgccccaacaaatcccgtgctggaaacgcatcctacggatacttcacaggccctccagctgcgtgcatggggacgcg

SEQ ID NO: 464973 - DNA, 122 bp, Homo sapiens
tctcctattcctgcctacttcttacctctccgcccactaggattttgcccaagcatatcccggattctggttggccgttgttctgtcattcctatcaaagctttgcctatccctacgtctca

SEQ ID NO: 464974 - DNA, 122 bp, Homo sapiens
ctattgtgggactgagccctcaacgtgtgggatctgatgccatgtcccggcaaaatggaacggaatgagagaacacgcacctggtgtctgtggcaggattgcttgcttggtgtgtgtgggaa

SEQ ID NO: 464975 - DNA, 122 bp, Homo sapiens
ctctagctgaagacaagaagacactcaggtatgtggcagcacttgggataggccacagggcggcgagacatcattccttccaggacatctatcctgaaagatccatcaggaatactgtgatg

SEQ ID NO: 464976 - DNA, 122 bp, Homo sapiens
aatggtcagatccaccctaggaattcagtattattgatgctcagagaggtcaagtaaactcgaatagggtcacacatcttgtacatggcaaagtcaagattctgtttctaatatctgagtct

SEQ ID NO: 464977 - DNA, 122 bp, Homo sapiens
ggcgggcgcgcggggcactgtgggtagcgccggggctcaccaggcggaggcggggcccggcgtcaagctccgcctccgcgccccattggctggcatcacctccgcgcgcctgactgacagcg

SEQ ID NO: 464978 - DNA, 122 bp, Homo sapiens
cctccccttcaggctcagggtctgagtcctccacctcaaggccggctccattcagcttcacgtcctgctgtaaaggccccggggccacagaagccaggtcatccccgtaggtggaggacgac

SEQ ID NO: 464979 - DNA, 122 bp, Homo sapiens
gcagcccccagcccggtgcgccggccccgacaagtcccagccctcggaggcagggcggggcgcagggactcccgggacccgcacctgtaaggccgacaaagcccccgcaagcgccccacccc

SEQ ID NO: 464980 - DNA, 122 bp, Homo sapiens
cttgggtgctccctggccaccgcaacttcctgccccgggcggctccaggctccgggtggccgctggcttacataccaatggagtatgcagggactgtacacgaaacgcagaaggggagggaa

SEQ ID NO: 464981 - DNA, 122 bp, Homo sapiens
ctcggatccgcacggaagccatccggatccccgctgtctgggaccaaagtcccagggcctcgcaaacggcaactagaccccttaaagggcctacggacttggatcctgaagagcctgagaga

SEQ ID NO: 464982 - DNA, 122 bp, Homo sapiens
cccgacagcgacaagatcatctactcacacttcacgtgtgccaccgacacggagaacatccgcttcgtgttcgcggccgtgaaggacaccatcctgcagctcaacctcaaggagtacaacct

SEQ ID NO: 464983 - DNA, 122 bp, Homo sapiens
aaattaggcaggaaactcactctgaggacaagacgatgtctactgtaatccacctgcagacgtgttagaaatttgcactaagtcacagatgcttatagtgtgtgtgttgagggcgggtattc

SEQ ID NO: 464984 - DNA, 122 bp, Homo sapiens
catggggcccccaggagcccctccgggccgcgacctggcctcagtgcccccggaactgaccgccagcagacagtccttccgcatggccatgggaaaccccagtgagttctttgtggatgtga

SEQ ID NO: 464985 - DNA, 122 bp, Homo sapiens
gccaccgcgccgcctctgcctcggcgcggaacaaacggttaaagattttgggcagcgcctcgcggggggaggagccaggggcccaatccgcaattaaagatgaactttgggtgaactaattg

SEQ ID NO: 464986 - DNA, 122 bp, Homo sapiens
catccctacaggattctgtgatctggcccctgcctgcctatttatctaatctcatgtgtacgtccctccctctggttattctgacatttacactggatattctctctgcctgaatcactctt

SEQ ID NO: 464987 - DNA, 122 bp, Homo sapiens
gagaggaggtgtcagggctccctcctcctgcgccttctttcacggcgccgcagggatgggcgcagcacagctgacttctgtttgtgcttgactccgggggtggcagccagagaccacagctc

SEQ ID NO: 464988 - DNA, 122 bp, Homo sapiens
gctctgctttggcaacacgctcttaccttctgctcaagatcttagaccaagtacacgcttcgctgccagaggcacgaaacccatcccgcttttcccttcaactgtactcctccaccaagccc

SEQ ID NO: 464989 - DNA, 122 bp, Homo sapiens
gtgtgggggttgctgcacgagggggagcaaatcactgcgtccgctccccacggccggcggcgctgtctcttctcggcacccagcacacaccggctccaggctccgatcagctggcggcgtcg

SEQ ID NO: 464990 - DNA, 122 bp, Homo sapiens
ggccgctggcacctgactcacctgaagagtcggtcccggccctgggtctggttggtgaagcgggtgaaggcgtccatggcttctagcccaaaggccacgagtcgcacggggctcaggcgtgg

SEQ ID NO: 464991 - DNA, 122 bp, Homo sapiens
ctagcacactgtgggaatcatctctcttcctcactggtaggatgaagtttctgacttaaccggaaatcacaaacccaaatgcctccagagcccagtcaggtaacacaattcagagaagctgg

SEQ ID NO: 464992 - DNA, 122 bp, Homo sapiens
aggagtttagttgacaccaagaggtcactcccctgaggagccggctgcagggcggtgattcgcccccgggatggtggcggcgattccgtgcgccttcctgcagttggacatcagttatattt

SEQ ID NO: 464993 - DNA, 122 bp, Homo sapiens
acaattaggcagcatttcaagtgttcagaaataatcccaaaaataatagaacagactccccggttgctactacccagatgtaacacaggatttgaggacttttaaattcttaaaaaattaag

SEQ ID NO: 464994 - DNA, 122 bp, Homo sapiens
cggtgtcggggaaggcctgggctgaagctacaggagaaggtgggacggggatctcctccccgggctggggtcaccattagctccgactgcagtgtgaagagccctgtctcagggtgtctcct

SEQ ID NO: 464995 - DNA, 122 bp, Homo sapiens
aggccaggaatcggagacatctgcgagagaggcggagcaatcctggcagagttcagccggcgctgaagaagccgcaagaaaacgtggaacaagacctctgtctagtgaaggtcatttatgtg

SEQ ID NO: 464996 - DNA, 122 bp, Homo sapiens
tctggggctgacaaaaaggggcaaggatatgatggaaacgattgtcttgtcccctgcgtccggcaattctgaagacagcatcaaagatgggccgtgaagagaaaggaccccgagggcggccc

SEQ ID NO: 464997 - DNA, 122 bp, Homo sapiens
cacttcctgttttcaggagagagaaacgtgaagtttagagaggaagggaagtgacttccccggactcctgcagctctttagtggctggccctggtcttgtacagggataaaaagaaactcca

SEQ ID NO: 464998 - DNA, 122 bp, Homo sapiens
cagggggcggagcctgaccggacctgggtttttcgggcggctggcggacttgacagagagcgggaggggcccggatcctgggcctaaggagggtggggcgtgtgcttgacaggcagggacag

SEQ ID NO: 464999 - DNA, 122 bp, Homo sapiens
tgccacaccaccagctaacccccagcagtgaaatcaagaaatgtggcagcaaggtacccccgggctatactaaaaaggaaagagaactaatatgtaacgagtacctatgaatgtctcagtca

SEQ ID NO: 465000 - DNA, 122 bp, Homo sapiens
ttctacagctcacaattgtcagccctcgccaaaaccgtggcacagcggtgtgttacctgccgacagcacaatgcgaggcagggttcagccattctgcccggcatacaagcttatgaagcagc

SEQ ID NO: 465001 - DNA, 122 bp, Homo sapiens
agataggccggctgctgcagcgggtgggcagctccaagggccagcactggcagctccaggcgccggcacaggctttggctctgtgcaaggctgcggctggaccagacataccgtaagtggct

SEQ ID NO: 465002 - DNA, 122 bp, Homo sapiens
tgagcgtgtggtttctccccctttctttctgtcgtgtaggaaaatgctttagttagggcccggcttggaggcagggctgaggagtcagcggaggctgaggccagaggacagcttgcccgtca

SEQ ID NO: 465003 - DNA, 122 bp, Homo sapiens
tggccctgattataacgtagacacatcaatgctgtcttggacctgtacacgctctacacacgttggccctgattataacgtagacatgtcaatgctgtcttagacctgtacacactctgcac

SEQ ID NO: 465004 - DNA, 122 bp, Homo sapiens
gattctaatgaccatttccctgacgaagcaaccaggcttgagatagtatatggtgacactcgttaagtgattccctgtgagtgagggataaacctgtgaatggaataaggtccacgggcccc

SEQ ID NO: 465005 - DNA, 122 bp, Homo sapiens
cggtgctggctgctcatctgcatacggaagttcggcacattatgaattatttattttcctcgagggaaaaaattaaatgaaaagcaacaaaatacattattaacaagtgagacaaacttcaa

SEQ ID NO: 465006 - DNA, 122 bp, Homo sapiens
tattttaaaatacactttcccgacagggcacaatggttcatgtttgtaatcccagcacttcgggaggcagagatgggaggatcacttgagccgaggagcctgggcaacatagagagaccccc

SEQ ID NO: 465007 - DNA, 122 bp, Homo sapiens
agcaggggggaatcctgaatcgagctgagagggcttccccggttctcctgggaaccccatcggccccctgccagcacacacctgagcaggtaggaccatgcacaccccttcccaattctttg

SEQ ID NO: 465008 - DNA, 122 bp, Homo sapiens
gagaagcaggataatgctaccggtcgaaatatcaagggtgggacaggatgatagtacccccgacatcgcagggcatatatacaccaccctatgatagcggtcgtaatattcagagggagata

SEQ ID NO: 465009 - DNA, 122 bp, Homo sapiens
ggtgtgcgtgtgtgcctgtgtttgtgggtgcgtgctcagacgtgggtcctcaaggggtcccgggcctgccccttccttctctgggcctcagttgtctcctgggagacccgtggatgatccgg

SEQ ID NO: 465010 - DNA, 122 bp, Homo sapiens
aatatgcatccttggataaccgagaggataaacactcacatcgctcagatgctttagctccgtgggcagtgtagtgctgggctcaatcagccgggaagaggaagcggctgtcgggatgaagt

SEQ ID NO: 465011 - DNA, 122 bp, Homo sapiens
ttaatccggtgtctgagttttgtctgcggctcgtcctgctgcaggaggatcacctgagcccgggagtttgaagttgcagtgagcccagatcgtgcctctgcactccagcctgggcgacagag

SEQ ID NO: 465012 - DNA, 122 bp, Homo sapiens
aggaggaagaaggggtcagcttcaagcctgacgttctaggggggagccgcttcttaagtacgtgctaggatcaagggtgcatttgcaaacttttcaaaatgccttagaggaggtaggagtca

SEQ ID NO: 465013 - DNA, 122 bp, Homo sapiens
gcaggtgcccgtgatccggaatggtggctccaacacccttaatttccagttccacgaccccgcgcccaggactgtgtgcaatgggggctacacaccaagacgagatgcttcccagcacccgg

SEQ ID NO: 465014 - DNA, 122 bp, Homo sapiens
gtcatctcaaggagtgatgctggaagagttatattcccgggcacttcccctcttttgtgacgctgtggtgtgctcctccttatccctctattcatagtagattttaagacattgttattcac

SEQ ID NO: 465015 - DNA, 122 bp, Homo sapiens
ccgccaagccgccggcgacaccttccaacccctttagctctccgcaccgtccctccccaccgccccgcctccacccgcgccgcgatcaagtcctcatagccttttagggaatttgctcagca

SEQ ID NO: 465016 - DNA, 122 bp, Homo sapiens
tctcaggagatgattcggcctcccctcctaccctggggcgccctcggggtctcactgccgcggaggaagaaggcagcgccgccctcgcctgcagaaacctcattcccgagaaagtgcgggac

SEQ ID NO: 465017 - DNA, 122 bp, Homo sapiens
gcccctcgctcggggaatcccgggggtgccagggcacccagggtcagggaagtaagatgccgggccgcctaccttctccaccccgtagcccgttccgaaaatcctttaaaccgagatttaat

SEQ ID NO: 465018 - DNA, 122 bp, Homo sapiens
aaaaaaaaaaaatgagactgagccaggtgcagtggtcactcctgttatctcagcactttgcgtggccaaggcgggaggatgtcttgaggccaggagttcaagactaggctgggcaacatagc

SEQ ID NO: 465019 - DNA, 122 bp, Homo sapiens
cacagggatcctaggtgcacagtgttgaggagttgacgactcaacacttggctgggaaatcgaaatgtctttgatgtgagttctgtaggtagtggcagtttcctctgctctcaaccaaattc

SEQ ID NO: 465020 - DNA, 122 bp, Homo sapiens
ccgcgtcacatctccaacctttgcctcgccctgcctgtcatcccggttttctttcttgcccgcctaagtgtggcggacagggatactattccccgccttccataccgccccttcctccttgt

SEQ ID NO: 465021 - DNA, 122 bp, Homo sapiens
tccccggagtctgagtggggagcactatccgcaccccgtagagtgagtgcgggcggctttcgcaggtgctcaggactggagatctggaccggtggctgtgccgcccggatggcatttgtggc

SEQ ID NO: 465022 - DNA, 122 bp, Homo sapiens
ggctcccagccctcccacaggtaccgtgtcttctgtgctggtgtcgcacccgccggccaccgccaccctgcgtcttagacgtcccgccgcagctgtgtttccacctcatctccagcttgagt

SEQ ID NO: 465023 - DNA, 122 bp, Homo sapiens
gctctgtacctcaggccatggggacgaccgctccctgtcatgcagacccctcagaggggccgcccccggcccggcccagctctggccagggtgtctcacgctcttggttttgtgtttaagga

SEQ ID NO: 465024 - DNA, 122 bp, Homo sapiens
gttggggcgtttccattttaaatattagcggggtgtcccgggaggctgataactggcttccgtccatttcccacacgtgtttgcaaaacgaatgtgtcagatgtgcagatgcgcatccctgg

SEQ ID NO: 465025 - DNA, 122 bp, Homo sapiens
ccttttgaggaaggagcagcgggccactgggggtggtccaccgggactggtgtggtagagcgtctgcggggccgaggggcgggagcggcgcggggactggaacagctcgtcccctagttttg

SEQ ID NO: 465026 - DNA, 122 bp, Homo sapiens
tgttgaactcctcctcagcccgcacaggccaacccaaggttccgctcctccgtggggccacgccggcctcccacatctcccatgggctccgatctcctgtggccccacgccctgtccccaca

SEQ ID NO: 465027 - DNA, 122 bp, Homo sapiens
atctagttcctactaatccatgcaaaagttattaactgataagcccaatcttgttcagcacgttcttctaaatgcctgacctaaataacttctgcttggttaacttgtgttcattctcacct

SEQ ID NO: 465028 - DNA, 122 bp, Homo sapiens
gcgcccccgacgccggccccgagccactcccacaggtctcaggaccctgcccagcgcgcgcgctccgccacaaggccccgcccacggccggggccttcttggccacaggccgggtgctctgt

SEQ ID NO: 465029 - DNA, 122 bp, Homo sapiens
tggttccttttccttcccctggggagaaggcctggctcccacgccctccccgcatagtcacgctcaggttgctggaggcctgggtcgccccctcctgcaagccccgagagtcgccagacgcg

SEQ ID NO: 465030 - DNA, 122 bp, Homo sapiens
cacaggtcaaatctaagttctcttccctttcagcccccgctttggtggctgttgctgctgcggctctgctgcaggctaaccttgtttttgctcgggtgggaggctggccatggtgatctcat

SEQ ID NO: 465031 - DNA, 122 bp, Homo sapiens
aagattgctgaaagagaacaacactggaatcaaaatatcactttcccacaagtcacagttcgtatgtgcttaaattttctgcatcctcagaaacaaacaaataaaagaaggagggaagagta

SEQ ID NO: 465032 - DNA, 122 bp, Homo sapiens
gtgtgtgggttgttacccatgagcatacccaccctgctattgggtaagtcatgcgcgcgacgactgtagcccatcctgccaggctgtcacgagtctaaagggcagcatatgcagttagtaac

SEQ ID NO: 465033 - DNA, 122 bp, Homo sapiens
tgcctttgctgttagtttttctcaagtggcacttacagagtaaacagggacccccgacgacgagctgacagcctgctgatggaaacagatactaatcacatcactgaagtaatgagcgtgca

SEQ ID NO: 465034 - DNA, 122 bp, Homo sapiens
gacttccctagccagactcatttcctgagccctctctatctaacgtttcttctgagtcttcgtgttcaccctatcaaacaccataccaatctcagactgaagggcctttgcatttcattata

SEQ ID NO: 465035 - DNA, 122 bp, Homo sapiens
gcacctggcagagggaacagccagcgcagaggcccccaggcaggacagagctcaggagggcgggggcccagctggttgactacgtctccctcaaaggtgcaggtgtctcgggcacagggctg

SEQ ID NO: 465036 - DNA, 122 bp, Homo sapiens
ggccaagtgatcagcaagcattcagggagtgtattagaaagtatcaagccgtaagcagaacgctttgatatcctgtgtgtgtgagagatcattgattgcaaatctagtgggctcaagcacaa

SEQ ID NO: 465037 - DNA, 122 bp, Homo sapiens
acagtctgaaatatggccccgtgggatgttaaagacctgactggcccccagcctgagacccgtaaagggtctgtgccgaggtggattagtcaaagaggaaagcctcttgcaatttagatgga

SEQ ID NO: 465038 - DNA, 122 bp, Homo sapiens
gtggggtcacagcaaacaaaaaggctttcgtaaactcaaaagccctctgtggccctgccacggggacgtcatctctggcgatctgaaggacaggggcagggagggaacgggaacctcaggcg

SEQ ID NO: 465039 - DNA, 122 bp, Homo sapiens
agccaccaggtcaaatgctgtgtgcccccagtatgtttttccctaagcattctagaaccccgctgcagcttccaaaattgattgcactataatacggtcactgctgccatccaggtgccaca

SEQ ID NO: 465040 - DNA, 122 bp, Homo sapiens
tggtgaggaatatcctaagttccaggggtcatgtatgagttttggattttataccaaggtcgtagaatttctagagaaatccttttgaatagagaggaggtaaatggatctcttgagtctca

SEQ ID NO: 465041 - DNA, 122 bp, Homo sapiens
ggcatgctttccccgggaaggaggcgcgcgggggctctgcccgcacgtgaggggcagggccgcaggctcaagcctagagccggtttctgttagcagcggtgtttggctgttttatcaggcat

SEQ ID NO: 465042 - DNA, 122 bp, Homo sapiens
ccttttctttgccgcgctcggattctgagtttcacaagaatgtacctgggtgccccttagcgggatatgaatagcttcttcggaaccccagcggccagctggtgcctcctggaaagtgacgt

SEQ ID NO: 465043 - DNA, 122 bp, Homo sapiens
gtgtacgctatttgttgtggggtggccgaaggggatgtcctgttttcaccagaggcacagcgcgaaggggaaacttcgacactggaaggaacgagaataaatacttaattacggacgcactg

SEQ ID NO: 465044 - DNA, 122 bp, Homo sapiens
accggaagtagcgtgggccgtgaggaacgggaaatgacctcagcacgtcggaagtgtactcgtttccaaggcgacggccctgctgcctctccagccaagtggctggagtcgggaggctggaa

SEQ ID NO: 465045 - DNA, 122 bp, Homo sapiens
tgtttgtttgaatgcattattatttttttaatagaaaccacatcacttcatttgttacagcgaataattcaagagggtcccagaaagctttttcatccacagaattacagaaaggataagca

SEQ ID NO: 465046 - DNA, 122 bp, Homo sapiens
gatatgacgatccacggtggtcacacagcgtgttcacgttattgtcagtaatatcttccccgcctctggaaattaccaactatgtcacagatgggtgcacatcctctgcgctctttggagta

SEQ ID NO: 465047 - DNA, 122 bp, Homo sapiens
ccctgcctccccctgcacctgtgtcctcggtcacgtgttccgtcagggtgctgggcatggcgccgacatggaagcgctgcctgtctgctcctcagtgtgccccttgcagcttggctggcgag

SEQ ID NO: 465048 - DNA, 122 bp, Homo sapiens
caaaagagacctatctttttcctcagggctgacgtcagtttgattttactgacaactattcgagcgtgtgtagcagttggaagcggccccacgaccgccccacctcccaccttccacttttg

SEQ ID NO: 465049 - DNA, 122 bp, Homo sapiens
gccacaggagttaatgacaacacacatacacaagggctttaggtctgagttactagaggccggtcggactgaacctcaccaggtacggctggggttctaaaactggacacggttttccctga

SEQ ID NO: 465050 - DNA, 122 bp, Homo sapiens
tctgtgtgtggtgcagctagcgtggaccatgtcccacggagggcccacccctaccaggtccgtcttctggcatggccatggctgggccttccgcctcacccgctctgggagggagccctggc

SEQ ID NO: 465051 - DNA, 122 bp, Homo sapiens
cccgttagactcttcctgaggtccccggagtggcacagggggttgtggtggagagtgaagcgaagaagtcacagagcgtggagctgaccctcatgttagtgtgatagatttctagtcacgtg

SEQ ID NO: 465052 - DNA, 122 bp, Homo sapiens
aacttcatggaagggctatgtagtaacatggttaagagtctagactctagaccagactgccggggttcaaatccaggttctgcacttattgattatgtggtttacagatgagaaatctaatc

SEQ ID NO: 465053 - DNA, 122 bp, Homo sapiens
tggtttcttttgagcagccactcccatgggaacaggtgtctgacttgagccatcttggagcggagcctccatgaatgcattccagcaaaggagactggggcaagaaaatgtgccccagggca

SEQ ID NO: 465054 - DNA, 122 bp, Homo sapiens
aagagattctcttttccatgctttaggaaaatggtttggagaaggaagtgactaacgcagcgcttgtctgcattctccccaggccgctgtgttcatcgacttcctcatcgacacttactcca

SEQ ID NO: 465055 - DNA, 122 bp, Homo sapiens
gtgctgaggaagacccgatggagagctccgctcacagcgatgccattaggttctcaccgccgccaccagacgcagtggaacacagtgagcttcgagaactccaaacgtctttcttttttcct

SEQ ID NO: 465056 - DNA, 122 bp, Homo sapiens
gaacagccgaagagcggagaagactgggagcataaccgctgggcagcgggcagcggacagcgggcggcatgaaccgccccactttgccggatacctggagctgcaggaacgacccacaccca

SEQ ID NO: 465057 - DNA, 122 bp, Homo sapiens
gccactgccaggggactgtgaggaggagccgaggatgcagcctcgtgttgggcccatgcccgttcccagccactcagtctttcccactgtctacctcctgccccggtgcttgcttccaactt

SEQ ID NO: 465058 - DNA, 122 bp, Homo sapiens
gccccgaggcgctggcgagccagggtgtggtcaagggccctggctgccaccacggtctcccgcagagcccctaccaggcgcgcgcgtccctgacccagtcgctcagcatcaaagtgcaggtc

SEQ ID NO: 465059 - DNA, 122 bp, Homo sapiens
tgttcccgccatctggaatgccttccctgcatttgttcccatcagggttgggactagcaacgtgacaggtgatggagttgctgagggtgcaaaatttaaggaggcacctactcccagggtca

SEQ ID NO: 465060 - DNA, 122 bp, Homo sapiens
gaaatccaagagatcacacaatctgccatctgcaaactggagaacgaggaaagccagtggcgtaattcagtctaagttcagaggcctgggaagtggggtgtcaatggtgcaaggagcaccaa

SEQ ID NO: 465061 - DNA, 122 bp, Homo sapiens
ggacgttcgctctctctgcagccaccctgtctggtcatctcctcttgaggattcagaccccggacttcccagtgcctgctgtgctgccttgggctgagcacccgggacctaacaacgatgcc

SEQ ID NO: 465062 - DNA, 122 bp, Homo sapiens
cacgtttctaccattgacactaaaaaatctaaattgggtttatttttatggttgcccttacgccctcacaaaactattgtaagatatcagagtcctagggcctcctatattctcaaaaatat

SEQ ID NO: 465063 - DNA, 122 bp, Homo sapiens
gataggatgagcagggccaatgactctaaagtcttctataaaataagtgaaaaagaggaacgaggaaatgccaatcagaaaatcatatgcatgctttggggtgtccagcctgtcaaaatgga

SEQ ID NO: 465064 - DNA, 122 bp, Homo sapiens
gaagtttaattatttttcttattgtttgcatattctccctcccagatactttacagagggcgctaaagctgatcccctgggagcttcagagtttaatgacttcgcctgaagatttcctattc

SEQ ID NO: 465065 - DNA, 122 bp, Homo sapiens
ggcacagagcagcccagtccctccccagacgaagggccactcctttcccagcccacctgccgggggctgagctagggtcccttgcgtcctcctcataactgaacttcccagggctgtctgcg

SEQ ID NO: 465066 - DNA, 122 bp, Homo sapiens
cagaaccgctaccggcgatgctactgctgtgggtgtcggtggtcgcagccttggcgctggcggtactggcccccggagcaggggagcagaggcggagagcagccaaagcgcccaatgtggtg

SEQ ID NO: 465067 - DNA, 122 bp, Homo sapiens
caacagagcggctcccacgcggatccccctcctgcttgctttgagggtgctggtgggtggcgcccgtgatccacttggtccttagggtccacgggtcgggccaggagcttgtagtcgtcccc

SEQ ID NO: 465068 - DNA, 122 bp, Homo sapiens
ctggcagagggaaagggattttttttttctccctccctgccgaggaaaaaacagttctaacgaggagttactttgtagttttaactcatattcaaatactcccagccgagaagctgccatcg

SEQ ID NO: 465069 - DNA, 122 bp, Homo sapiens
ctgggggagcggccgtggaagtagttgtaatactgggacacgtaggtcaagatgctcagccggtcaggcaccttcaaggccaccatgtcctcggcatccagcaaggctgggatgcccaagtg

SEQ ID NO: 465070 - DNA, 122 bp, Homo sapiens
actagggttatgcctcaacacagccttactggcgatgaactgctcttccatgagaggaaacgaactatgtaccaaacattctgcatggcctggctaatatgcataagcagcaactgagagga

SEQ ID NO: 465071 - DNA, 122 bp, Homo sapiens
caagccctaattgattttctccaaactgttatccagacccacaaccccacctgggctgatcgccaccggttgctcatgttcctctttaagagagatgaaaggcgaaaggcggagagggctcc

SEQ ID NO: 465072 - DNA, 122 bp, Homo sapiens
caggcactgcactgtatacaactctaaatgcaccctgcatggaacccattgcagggcacacgcagtctacatgtatcccaggttttatgctcacagagcctgcaatactccgtgtctggaat

SEQ ID NO: 465073 - DNA, 122 bp, Homo sapiens
acagatgcgccctgatgcgtctgtctgtggagacggcagtgagaccccggctgccgctatcggggtgcctttggggtagctgccgagcctgccgggccttgcctggatggggggcagccctg

SEQ ID NO: 465074 - DNA, 122 bp, Homo sapiens
tgtgtgtgtgtgtgtgtttgtgtgtgtgcgtgcgcgcgtctgtgtgccttctatctcttacgtctctctctctctctcccccctctcgctctttccgccgccctctctttctatctctgtcc

SEQ ID NO: 465075 - DNA, 122 bp, Homo sapiens
gctcatttttttctggcctctagtacatttctttctggcaaaactcaagctctgttttcacggagatgatgcactgagccatggcatccctaggtggtttgattcatttctgcaccccggtg

SEQ ID NO: 465076 - DNA, 122 bp, Homo sapiens
gggggaaggggccctgcatggcacagaacattccacatgcgtgtactctgtcaggggccacgtccctgcctcgctgcttgtccttggtgtgaccttgggctgactttctccatctgcagaag

SEQ ID NO: 465077 - DNA, 122 bp, Homo sapiens
tgcactggggttaataatgtatccggtcccgaccagatcagcttgagggctcctgtcggacgagccccggcctctgacttgcttatatagggctcaggggctatataaagctgcacggtcat

SEQ ID NO: 465078 - DNA, 122 bp, Homo sapiens
gatgaaagaaagctggtgctaggtatggcaacactgctgggaggaaggctccctccttagcgtccctgaggattcacttttcctacactagcttaccttttcattcttaagatactgttctg

SEQ ID NO: 465079 - DNA, 122 bp, Homo sapiens
acatactttttgagcacctatgctgaaggaccagatttgtgccagcacttggaaggagcccgcgtgggagcccagatggtgggcgagaggacagaagcagggctggcacgggaagattgggc

SEQ ID NO: 465080 - DNA, 122 bp, Homo sapiens
aggaggccagtacttacgctcgacgggtgctgaacggcagcctcgtgttgcagcctcacccgctggggcatcatgacgtcatcctgcagtaaagaacacactttccgtttgtttgtttgcat

SEQ ID NO: 465081 - DNA, 122 bp, Homo sapiens
agatgctgggtgtcaaccgggacgacgtggggattactgcaccatgtgaatacctcactgcgcgtgaaacatcagccaaataaaataatggcttaaagctgggacaggagctactgtgaaga

SEQ ID NO: 465082 - DNA, 122 bp, Homo sapiens
caaaagtggaaaacatggcactcacaggccacagaagggacagtgttttacaggatgagccgggtcagggaggacggtgatttataggatttacaggatgagccgggtcaagaaggcagagc

SEQ ID NO: 465083 - DNA, 122 bp, Homo sapiens
aactcagaagagctttctaaggctgttggtgcaccttagggcaggagagcgtctttgctacgccgcgcaggagtgtgtctgcttctctgtgcatctacacgtgtttgcgtgtccctgtaaag

SEQ ID NO: 465084 - DNA, 122 bp, Homo sapiens
tccccgcccgtcttctcttctgcgtttcccgggctagggggcgtggggagtggttttaggcggcgaagccgctcggcagcaccttccttctttgccaggcagacgcccgttgtagccgttgg

SEQ ID NO: 465085 - DNA, 122 bp, Homo sapiens
ttccacttcattttcctaccttccggatgacgaactgcgtctcagacaactgaaaggactcgcctgagtcccacagccggaaagaggtcggggtgctgccccccgcgcggggcgggcagagg

SEQ ID NO: 465086 - DNA, 122 bp, Homo sapiens
ccagagtcctcgggagtcgtccaggtacacgccccagaatattggtcatagcggtccacccgggactgcgcgacccggaatccttggaaggacttctcggaaggactcctctctgacaggtg

SEQ ID NO: 465087 - DNA, 122 bp, Homo sapiens
ccaacacacaggtgatcccggaggctgcaggcacccaggcacccaacacacaggtgatcccggaggctgcaggcacccaagacacaggtgatcccgaaggctgcaggcacccaagacacagg

SEQ ID NO: 465088 - DNA, 122 bp, Homo sapiens
acaaagaggccctggaggagggtggggctggccggggacaggaggggtggccaagaaagtcgcaagaaaactccggcccccaagaaaaagagagggcatgggttgcggagccgacatcacgg

SEQ ID NO: 465089 - DNA, 122 bp, Homo sapiens
tctcaccctgtgtagctccaggtgtgtggcctcctgctgctgggaggaaacgcaccgagtcgtggtgctcagtggcaccctaaatgccctgggagcctgtgaaccccaaaaatctgagacag

SEQ ID NO: 465090 - DNA, 122 bp, Homo sapiens
ctttgaagtagaaggcagcacactgtcatccacaggcacaaatgcagagaatactgttcccgagaaagggctcttccttcagaaactgctggggaatgagcttcaaaaacaacagggaaaaa

SEQ ID NO: 465091 - DNA, 122 bp, Homo sapiens
aacacagcgaaaccccgtctccaccaaaaaaaatacgaaaaccagtcaggcgtggcggtgcgcgcctgcaatcgcaggcactcggcaggctgaggcaggagaatcaggcagggaggttgcag

SEQ ID NO: 465092 - DNA, 122 bp, Homo sapiens
cttccaatttccatcttatggcctagaaatgccactcagcccgaaccctaagaggctcaccggggcactcctgctcctcatctcacggctgcatcagtaacaacagaggcagagcccacaaa

SEQ ID NO: 465093 - DNA, 122 bp, Homo sapiens
gcggtgccgcagagtgcagggcgggcggggccaggccagcagggagtgagcttgtctggccgcctcgcctcggagccactgcactgctggctgcagacacaggctgcaccatgaagccagcc

SEQ ID NO: 465094 - DNA, 122 bp, Homo sapiens
ggcctgggttgccagctcccttggtcggggtcctgctcgctggggcttgtgtgttctctgcggcgggccgcgtccccgctgagcctcgcggtgacagccgcctttggcagcgagcgctcggg

SEQ ID NO: 465095 - DNA, 122 bp, Homo sapiens
ctctccctgtaatactattctgaactctctttaaatgcattaccacaaataggctgggcacgctggctcatgcctgtaatcccagcactttgggaggctgaggcaggtggataacctgaggt

SEQ ID NO: 465096 - DNA, 122 bp, Homo sapiens
gaaggctgagaaaggggagtgttggggaaggaaggaatgggacgatgtgtacttttctcccggaactgtagttctattgccccaacctgggctcaggtagcggccagtaaactaggagacag

SEQ ID NO: 465097 - DNA, 122 bp, Homo sapiens
gccaaaggccttatctcaggctgcaaggctggctgtgctggcctgtctatggagttaacacggaagcagagggactatgatggggaggggaggaaatgtatgttttccaatattgtcattca

SEQ ID NO: 465098 - DNA, 122 bp, Homo sapiens
cggccgcctttcattgttagggctctcttctctgcccaaactaggaacctgtctccttgacggctaaatgtccacttttcattcttaatgaaacccggttgcactcatggcttttcttctta

SEQ ID NO: 465099 - DNA, 122 bp, Homo sapiens
acaagccgtcgtcgtcgtaggagacgacagctctgtgccggttattctagaagaagccgtcgtcgtcgtaggagacgacagctatgtgccggttattctagaacaagccgtcgtcgtcgtag

SEQ ID NO: 465100 - DNA, 122 bp, Homo sapiens
tggacaaatgacttggagagtggaacccaaacttgccactctgggaataacccacaagaccgtatgtagtggcccgaagtgaagagatgaaaaataaatattggattgaagcattttctctc

SEQ ID NO: 465101 - DNA, 122 bp, Homo sapiens
gaagtccaagatcaaggcatggggatattctgggctgggcgagggtctgtgcccaagagccggcacctcctctctgtgtcctcacatgggaaaggcgtcgggtctctctggggcccctttta

SEQ ID NO: 465102 - DNA, 122 bp, Homo sapiens
gccttcgacctcgctctctatttgtgaggtttaggagttcttcagacaaggtgatgtccacgtgcactcctcagaaattattagcctatttgtaaacctaaacaaaataacagctattgtct

SEQ ID NO: 465103 - DNA, 122 bp, Homo sapiens
tttaattttgccttcctaagattgctggtattctagctcttacctctatgttctttctcacgtctcctaaagacaaaattgtttaatttacatgattataaagatctgtttatgaaaatgga

SEQ ID NO: 465104 - DNA, 122 bp, Homo sapiens
ggcgatcccctgcgagcgctgctgctcctgaaggcgctgcagggcctgcgcgtggagtggcgcgggcgggatccgcgcgggccgggtcgggcacagcgcagcgcgggggccaccgccgccga

SEQ ID NO: 465105 - DNA, 122 bp, Homo sapiens
ctgaagccccatatatgctcatttgtatgatgtgtgagatgcacagaggaatgtcgaagccgaatgagtcttccagatgcaatggttctgtgactgaactctgttatagccacacacctccc

SEQ ID NO: 465106 - DNA, 122 bp, Homo sapiens
ttcagctattgagtctctttcatctttatgggactatattttgaaaatcactagaaactgcgtggttcccatatattgggctcaactgaaactttaaactcatgcaataactgttaatattc

SEQ ID NO: 465107 - DNA, 122 bp, Homo sapiens
agattttcctgcggggtcagtggggacgcggaggagacagcctgcccttgtccaggctgtcgtggacctgaaggaggggcgcaaggggttagagtggagggcaccgcagcaggctccccttg

SEQ ID NO: 465108 - DNA, 122 bp, Homo sapiens
gttgggtattcgggcacgccatggtccggccacgccgtaaactggaactggcggacctcgcgtttctcactggagccattctggggaccacaaggatgtcacctgtcactccggctcaacct

SEQ ID NO: 465109 - DNA, 122 bp, Homo sapiens
gagctttttagttttaattaaggaatgcctcagcagcagtcttctaagtggttcaactaccgtactgcattacttctcacgaagcaagccatcctccctagggtggccagaatgatctttta

SEQ ID NO: 465110 - DNA, 122 bp, Homo sapiens
ttcaatggctttctggacttcatcctccgacctgatgatccccgggcccaaaccctccgtcgcctcttcgtctttaagctgattcccatgttgaaccccgatggtgtggtccggggacacta

SEQ ID NO: 465111 - DNA, 122 bp, Homo sapiens
tactactgatggcctttcgggggtccctgccccaaccggagaggccggtgcacagggccccgccaggggctgggggcatcccggcttccacaatgcagctgctctgggcctcgggagaggag

SEQ ID NO: 465112 - DNA, 122 bp, Homo sapiens
tgcccaggaaagcacagaactcaagtgtggtggccgtctgagctgtcctttcgctggccccgctgtccgcaggggcttcctacctgtgtgagaggtcgtagcgggagacagcaacagagagt

SEQ ID NO: 465113 - DNA, 122 bp, Homo sapiens
taacagtgaataactagttttacagcataagaggtaaagtcgcaggtggaatatcagctgcggccaaccatggaaaattttttatttgattggaatcagaagctgaaaactggtagccctta

SEQ ID NO: 465114 - DNA, 122 bp, Homo sapiens
aacctgacggtgttgctctagatctggtttccacctgctttgggtttcttttcccttccccgtcttctgcttccgcctttcccaggtgtcctcttctttctcgctggtcttcgtgcccttgt

SEQ ID NO: 465115 - DNA, 122 bp, Homo sapiens
gggggcgtccggggaggcccgggagggtcccgggctggtgggcagggccgggggcggcggcgtgggggcggcaggggccgcggcgggctcgggcgggctcgggcgggccgggccgagccgcc

SEQ ID NO: 465116 - DNA, 122 bp, Homo sapiens
atgagcattttggacaaaagcatgggttatttcttatgcaaaatggcattgtctgtccttcgatggcactggttttgtgattttctgagcttcagagcctcattatccacttaccatctatt

SEQ ID NO: 465117 - DNA, 122 bp, Homo sapiens
tcatcctccagcctcgtgggggagtcaagtctccgtaggcggagagcccggatgcaggcgcggctaggctgccctctctatggtgagccccccggtccctcctccgcagcacccggagtgcc

SEQ ID NO: 465118 - DNA, 122 bp, Homo sapiens
actaagtcgaatttgcagttaggaagccttcctgggttcctgggacagcgccgagtgctgcgagcaaaggccgagcccgctgccagaggctcgcgccgctcgcagcacagaacctgagagtg

SEQ ID NO: 465119 - DNA, 122 bp, Homo sapiens
gtcatggcaacgcctgcacaacacacacacacacagcagctctaacacagacagctagcgcggtctcacacatgggctcatcccagccacacagtgggtcacagacgagcacacaaagggtc

SEQ ID NO: 465120 - DNA, 122 bp, Homo sapiens
gaggagaccaacctttcccagggacggtgtgaggccgtattgtgaagcatctgacactgacgatcttaggacaacctcctgagggatggggctaggacccatgaaggcagaattacggagag

SEQ ID NO: 465121 - DNA, 122 bp, Homo sapiens
gaggcgccggtggaagcacaaaccacccggcgagtcagagcaggggtcggggcccctggccgcaccgtgccgcgcatgcgcagggtcccggggtccctggggtcccgggtttgtgcccccgg

SEQ ID NO: 465122 - DNA, 122 bp, Homo sapiens
cactctaacggtgacgatgttgggatgctgggccttgaggatggtgttgatctccctcagcgacgtgatcgggaagccctccttctccttctccatcttcagccgctttagagccacaattt

SEQ ID NO: 465123 - DNA, 122 bp, Homo sapiens
ctgcgcataacaggctctagtctccgggctgtgggaagccagcaacacctctcacgcatgcgcattgtagtcttcccacctcccacaagatggcggagggcaagtagcaagggggcggggtg

SEQ ID NO: 465124 - DNA, 122 bp, Homo sapiens
gtttcgtggcctcttttgattataactggggtcaccaagaaggtttacttaattaaataccgcatttctaagagaagatactttgtgtaagaaaagatgccacatttagtggtttaactttt

SEQ ID NO: 465125 - DNA, 122 bp, Homo sapiens
tttttacattttattcgtttatttcttggctcaggaatgagaatgtaagtgaagagagggcgcccgaggcaatctgcccaggctctaccgatgctcagaacccggggcccagttttcactct

SEQ ID NO: 465126 - DNA, 122 bp, Homo sapiens
cagacgccagcagccggggttgttcccttggccgaatggcagagtccagttggggcttcccgaggacaagtttcccggccccacggggtttggtttttagggggtcccaagttcccacagtc

SEQ ID NO: 465127 - DNA, 122 bp, Homo sapiens
aacctatcagatcgcgctcactgcctcctcctcctcctcctcctcctcctcctcgtacttcggtgaacacttttgcacaacttacccagctgatcactcgcgccccctcgcttttccatttc

SEQ ID NO: 465128 - DNA, 122 bp, Homo sapiens
aggagttaacttgaaaaggatggcggtggcctgagagagggcagttccagcgtctaagagcggtgcctccatgggatgagaaatacaaatataacgcctcggtgtccatcatgagacgccgc

SEQ ID NO: 465129 - DNA, 122 bp, Homo sapiens
ctgcacgctggtcctggctttccagtggacttggggccttgagttcccgactgagggactcgcgtggtcggatgcgatcttgtcctgtagttgtccagccgtcgcgggtgtctttgcctttg

SEQ ID NO: 465130 - DNA, 122 bp, Homo sapiens
actgggacatactccccttccacactacgggggcataaataaagcagtcagggctcacaccgggacacagctcccttccccaagacaccagccacccttctggtcacacagccaccaaagca

SEQ ID NO: 465131 - DNA, 122 bp, Homo sapiens
aggccaggtcaggccccgccctctgcccgcccacgacttgtccggcgacgtcgcagggcgcggaagcgagagggggccaccgagaaactaaacctgttactgctgcgaatacgccggcaggg

SEQ ID NO: 465132 - DNA, 122 bp, Homo sapiens
actcctgaagtaagcttttgttggagagagaattccggaggtgcctggtccctatcaggacgcagctcctgaggcatctaaggaaatatatgaccaggtaagagcatagcgtgtgcttaaca

SEQ ID NO: 465133 - DNA, 122 bp, Homo sapiens
aggaaatcctattttagcaaagtgatctactgttactgttgttagtgcacccctctcctgcgtctctgcttcacatccactccctcgccgcccgcccccaaacacttggattcttcctagcc

SEQ ID NO: 465134 - DNA, 122 bp, Homo sapiens
aaagaaaagaaaaggtcttcatggtcctacgaggaagactggcttccatgaagcaaggaacgtggctgactgtctacacttgcgctaacaatagctcgggaaagaaaacacagtttttgtgc

SEQ ID NO: 465135 - DNA, 122 bp, Homo sapiens
aggcctcagtccaaatgccccggtgggcacatgttaccatgtctgggttccaggccagctcgaatcttcaccccacctctccccgctccagtgaacctatatactcagcacctggcttccag

SEQ ID NO: 465136 - DNA, 122 bp, Homo sapiens
gacctcaagtgatccacctgccttggcctcccaaagtatatgtttacaggcatgagccaccgtgcctggccaaggttgattcttagtggccatctgcactaaatgcatttgttagacaaatg

SEQ ID NO: 465137 - DNA, 122 bp, Homo sapiens
cagcgcctcataaatttgtggtggcatcagtgcactttagtgtatatgtgtgtgtgttctcgcagcccctcaagtataaaaggtacaacagtgtaagattagataaatctctggttggattt

SEQ ID NO: 465138 - DNA, 122 bp, Homo sapiens
ggtcgggctgccgggctggggcatcgggagtccgagtggtggaacccagaaggtcccagacgcaggtatgggcgatccagggcggggcactctgcctgggcggtggcctgggttgtaaagtc

SEQ ID NO: 465139 - DNA, 122 bp, Homo sapiens
ggccctgcccagcgttcctcctgcacgcagccccatcgtcgccgccgccgcgggactcgccgcctccccccggccttaactccggccgggccataccattccgcgcggccgggggggggggc

SEQ ID NO: 465140 - DNA, 122 bp, Homo sapiens
cacttcagccaaagattcctctaccaggtgagagggcaggcgcttggcccgaggtggggccgcctccctgcgcttgcgaatgtgcagccacgtgttctctgttgacctgcttagtgagcagg

SEQ ID NO: 465141 - DNA, 122 bp, Homo sapiens
agcctgggcggggcggaccaaagcctgggcggggcgggcgggggtcgggcttggagggaccggctaggggcccgggggagtagcagaacgggtgcggcaatagcgtgagactggtggcaggg

SEQ ID NO: 465142 - DNA, 122 bp, Homo sapiens
gtcaatgggccgcaggggccggatcggtggcctaatggattcaggcctgcacggcagaggcgcacccggcggcctgcccgcgctctcaatagcggacaatggagtcccggggtgacctgaac

SEQ ID NO: 465143 - DNA, 122 bp, Homo sapiens
actctgcaccagcgtggggtggtggcgggcagccggcaggagattaagctgtgcagtcatcgcggcatctcctgtgaggcagcagagcctcgcttcttttcatttcctctcctgatgagaaa

SEQ ID NO: 465144 - DNA, 122 bp, Homo sapiens
acatcatcctccagctcctccacacactgagatggctccatctctcctgtgagggggcaacgcaggcatctgggctgctgccccaccagggccatacctggaaggactccccttcccttctt

SEQ ID NO: 465145 - DNA, 122 bp, Homo sapiens
caggtttcaaataaattcaattatgtcataataatatcatacaagtatttgagttgaatccgtgtaacatattttaaaacaggcggacctatccggcagtggtgcagacggcctgacgaggt

SEQ ID NO: 465146 - DNA, 122 bp, Homo sapiens
cagctgccccgccccgctccccagcgccccggaagtgatctgtggcggctgctgcagagccgccaggaggagggtggatctccccagagcaaagcgtcggagtcctcctcctccttctcctc

SEQ ID NO: 465147 - DNA, 122 bp, Homo sapiens
cacttgtaagaaaaaacatctgttggtgtcaaaaggtcagcaggaagtgagtgggatttacgtggctgggattggccagaccagcactcctcgaaagagagacacacacatggcttaactta

SEQ ID NO: 465148 - DNA, 122 bp, Homo sapiens
gagtgaatgaacgaacgcacgcatgcaaacccgaaagtccctggaggaaatggtcaccttcggaggtttagtctggcccagaagccctaagaccacggactgtgccaggtcccactccaaac

SEQ ID NO: 465149 - DNA, 122 bp, Homo sapiens
aggtgctgggacacgctttcgcgaggtcaaaagctagtgggcgcgcatttcggcctcaaacgctgcagagagggtcagaagctacccaggtcccacttagtggttcagccttgttttcttgt

SEQ ID NO: 465150 - DNA, 122 bp, Homo sapiens
cctgggatctgtactgacttcagatggtctttgtgactgtaggtcaccatctccccgatccgctggctccccgaatacgcctgctcttcctccgccactctcgcctctcgtgtctggctgtc

SEQ ID NO: 465151 - DNA, 122 bp, Homo sapiens
gtgggacccaggctgcccccccacccggcctgcaccagcgccgccttctctgggagccatcggtggcacccaggcggcccctccacctggctccaggctcagctcctccactcccagattcc

SEQ ID NO: 465152 - DNA, 122 bp, Homo sapiens
cccacagggcgccccacctccccgttaactcccgctaaactttgctgagcggtgtttaaccgcaccctgctcactgacgactcagggagagtgctttttaggtgcaaatatcggcaccccat

SEQ ID NO: 465153 - DNA, 122 bp, Homo sapiens
tgaggaccaacacgactccaccggcacccaactcaccggcagccaactcacccacacggccgcagtactaaggaccaactgcgcgtgcgaccgcgacctctttagcccgccctcctgtgcct

SEQ ID NO: 465154 - DNA, 122 bp, Homo sapiens
cctgggccggtgggccggctggccgctccgaatgcggggccgcggggcccgcggagcccacgcccacccggaactcacgctggcccgcaagcgtcctgcgcagcaccggttcccaccggcgc

SEQ ID NO: 465155 - DNA, 122 bp, Homo sapiens
tggctccgctcctccttgctgcctccctgagtcgctctgtccctgggactgctaagggcacggggcctgtagtgacggttccggccgccagggaagatgctgggtacgttttgtcctttcca

SEQ ID NO: 465156 - DNA, 122 bp, Homo sapiens
gactctgtcttcaaagcctgcgctgcatctgtgattaatcgcaatgcaaacacatacccacgcacgcatgccaattaagggttcgagagtcccccttcagcttccggatgagaactggggtt

SEQ ID NO: 465157 - DNA, 122 bp, Homo sapiens
gcgggtttcagacagaagatcctgggttggattttgggcgacatcacatgggtaggtggacgtaatttccaaaggtgagggaaggtagctggcctggagctttaaatgagttagaagttgtg

SEQ ID NO: 465158 - DNA, 122 bp, Homo sapiens
gtgtagagtaagagcaatcagtgacgataaagacatcagtcaaggagttaagtcagaagacgtttcaagatgacagtaaatcaaagaactgcagataacagacagctgactgtttaggggct

SEQ ID NO: 465159 - DNA, 122 bp, Homo sapiens
ttttcctgatttaatcagcttcatttttaaaaatgctgattggccaggtgcagtagctcacgcctgtaatcccagcacttttgagaggtggaggcaggaggattgcttgagcccaggagttc

SEQ ID NO: 465160 - DNA, 122 bp, Homo sapiens
cttgaacgatgccgctttctatctttagatggggaagacttccggtcccggtctctatcccgctctctgtcaggagtccgtgatcgcttcctttcctccttggaaggtgatgcatcacggtc

SEQ ID NO: 465161 - DNA, 122 bp, Homo sapiens
cggagcaacctaggtggtttctagtgaggtcgatgagagaaagacagccctgtttacccacgaggccttcagaaaatctccccaggcggggcatgtccgcttcgtgttgtcctgtcctgtgc

SEQ ID NO: 465162 - DNA, 122 bp, Homo sapiens
cactcttgctaacaatttagtgtctatacaggaaggctggtgtctctgttacaggtggcccgttccttaaagcctttagggttaatcgcagctgcactgagtggccaagcagaccctgttgg

SEQ ID NO: 465163 - DNA, 122 bp, Homo sapiens
ccccgtctgggaagtgaggagcgtctctgcctggtcacccatcgtctgggaagtgaggagcgtctccgcccggcagccgccccgtccaggaggtggggggcagccctcgcccggccagctgc

SEQ ID NO: 465164 - DNA, 122 bp, Homo sapiens
gtgtttccctgagttctgtgagccatcctagcaaattaactgaacccaaggagtggaccacgggaaccctcatttatagcacgttggttagaaccgcaggttaggtctggcgattgccatct

SEQ ID NO: 465165 - DNA, 122 bp, Homo sapiens
ctgatgtagacaggcagcttctcctgggtcagcgacagccggtacccagccagcctgccacggccgctgccacggatacagagcctgtttacctatgacgtcactaccttcctgactccgga

SEQ ID NO: 465166 - DNA, 122 bp, Homo sapiens
atcatcctcccacgggccaccgccaacagccaggtgatgggcagtgccaactcgaccctgcgggctgaagacatgtactcggcccagagccaccaggcggccacaccgccgaaagacggcaa

SEQ ID NO: 465167 - DNA, 122 bp, Homo sapiens
tacctgctagtggccatctctgctgccaggtgaaaagagcctgacttagaatgaagtcagcgaaggaaagcagagtggagagaaaaagagagactgagtcctgatgacatcatttatttacc

SEQ ID NO: 465168 - DNA, 122 bp, Homo sapiens
cagatggctttggggaagcaggtcagggagcagctgccctgagatcaatgctgagtgcaccgcaagtttggtttcttttcatttctccctctcccttcttctcaagtttataggggtggttg

SEQ ID NO: 465169 - DNA, 122 bp, Homo sapiens
gcttcctccacgcacacgcggtccaatccccatgacttcatgttttgtgaagatgcaaagcgagttcatgccggcgcctttctgaatcagagatccgtttagaaaccatgaaagctgcagac

SEQ ID NO: 465170 - DNA, 122 bp, Homo sapiens
ggcgctcctgggcggtctggagctcatcaagttccgagagtcaggcatcgcctcggagtacgagtccaacacggacgagagcgaggagcgcgactcgtggtcccaggaggagctgccgcgcc

SEQ ID NO: 465171 - DNA, 122 bp, Homo sapiens
gcgggagaaggcaggggactcgggcaccggcaccttgaggaagcgcgtggagggcctgggcgatggcgtgctgctgccaccggccgcgcccacgggcttcacgcgcacatctacctgcagct

SEQ ID NO: 465172 - DNA, 122 bp, Homo sapiens
cgcgaggggcggggcggagccggggcgggggccgcgcggggggcgggggcggctgggagacgcgcggggcggggggcgcccggggctcgcggcccccacgcaggtagctggcccgggccctc

SEQ ID NO: 465173 - DNA, 122 bp, Homo sapiens
agcagggcctggtcaggccttctgatgccctccatgggggccaagcccatctgggctcctcgcgtggcaggcagtgccagcagcagggcacagctcagcaccgctgcggtcagcatggcctg

SEQ ID NO: 465174 - DNA, 122 bp, Homo sapiens
ggtgcgggatataatctcctggtgcgccgttttttaagctggtccgaaaagcgcaatattcgggtgggagtgacccgattttccaggtgcgtccgtcacccctttctttgactcggaaaggg

SEQ ID NO: 465175 - DNA, 122 bp, Homo sapiens
agggcgtgatgtgaacccggttccaggagcggacggggcgtccggaaaagggggcggcttcgactgcggctctgattctgggtctctgatccaacgttcccgctgttccgctcgcagcccgc

SEQ ID NO: 465176 - DNA, 122 bp, Homo sapiens
ctcctaagttgtccaggctcgcacaggaagcctgatgtgactttctgcctctgatgacaacggggaaggaacgcgggggcgtctagacttcaatctgtgtatctgtgtttagtgatgcctca

SEQ ID NO: 465177 - DNA, 122 bp, Homo sapiens
ttgtttttacatttataaattactcataagctgacgaaacagaaaacagagactcatctccggttcccggtacagtgaggtgagagctgctgtgctgggtgcgggaagcgcctggccccagg

SEQ ID NO: 465178 - DNA, 122 bp, Homo sapiens
gcagcacgtttatgtgcgcacatatgccgggttcctgccagcctgcaggggacttccctccgtctttgtctttgtattgtgtgctgtcatcctcatacatccgcagtgtgttgtgaggatga

SEQ ID NO: 465179 - DNA, 122 bp, Homo sapiens
gccggagctgggaccccaggagacgagcgctgcacccggccgggacgcgtcgcccctccgcgcctgtttatcccggctcggattaccgcgcagggagccgccccctcccgcggtccgcgagg

SEQ ID NO: 465180 - DNA, 122 bp, Homo sapiens
acgccacacaccacgtcctctgtcctgatacagtggcaggtaagagcgcggggaatcacgcgcgttttgtcaaatgtgttctcatttccctgcgcattcagccacaacggctgacatggact

SEQ ID NO: 465181 - DNA, 122 bp, Homo sapiens
ggagcggctggggtctcagatcgccgtgcgtgacttggtgctgcgccaggtgggcgccatcgccgcggcctgctgggggaggcggcctttgaggagcgggcgcgaggcggggccaggcgggg

SEQ ID NO: 465182 - DNA, 122 bp, Homo sapiens
cttctgggatgcggcagatgctggctggatatgtgttcgctggtgtccttccgtgatccccgtctgtggctgacaccatctgtggcccaacatgaccccagccagagccaaggggaatcatt

SEQ ID NO: 465183 - DNA, 122 bp, Homo sapiens
agctgtcagcatcgttcatcctcatgttcgctgggctggggggaggaactggcagctgttcgccagtgattcagttttcttcgttgtgtgtttcgtaagtggtttttaaccaggcgccctta

SEQ ID NO: 465184 - DNA, 122 bp, Homo sapiens
cgagcgggaggcgcaaggcgttgtggggagtgtagtttttcgcgtcgcggcgcttacaaccgtagactgcggagagttgcggccgtccggagaggtctcggtgcccgctgtccgcgttgcaa

SEQ ID NO: 465185 - DNA, 122 bp, Homo sapiens
ttctcttcacacttagctttctggactggtgctttgggctcctttgtggcccgcttcttacgcttaggtggctctacactcttcctacgacctcttgtagttctgggagtaggggaagtggt

SEQ ID NO: 465186 - DNA, 122 bp, Homo sapiens
attttactgcccaggaaactctaagtctgacttgtcaaagccctggagccaggaggctgccgggggccccaaccatgcccctgagggaaggaactgtaaaagctctgcagcccctccccacc

SEQ ID NO: 465187 - DNA, 122 bp, Homo sapiens
caaatgagcaatgagagaaccctggttaaccactctggatttggctcctgcaaggcacctcgagaactaacacaacacgtgcccatctgacatatggactaaatgagggcaccaagtcaaca

SEQ ID NO: 465188 - DNA, 122 bp, Homo sapiens
ggcgctaaagttggcggctgggggagggaggcgagcggccgcccagtctcggtgtgagtgcgggaaccagagggttattttcgaaatgctgaatgctccatgctaaaaatgtttaataataa

SEQ ID NO: 465189 - DNA, 122 bp, Homo sapiens
ctgggggtgttaaaagcgtagcgacttcctcctcctccccgcccccgctcctgtacctcccgctacaatgtcttccgggtcgctagcgcctcgacgccttctgggaaaatagctcatttcct

SEQ ID NO: 465190 - DNA, 122 bp, Homo sapiens
tcactagggagtgccagacagtgggctcaggacagtgggtgcagcgcaccgtgtgcgagccgaagcagggcgaggcattgcctcactcgggaagcgcaaggggtcagggagttccctttcct

SEQ ID NO: 465191 - DNA, 122 bp, Homo sapiens
ggttttcccatggagtcagctcagcggcgtgactctcctctgacagctccagctaaactccgcttcattccactggtcaatggcctgccggcgtctgctggtgccgttcggtgtgctcttca

SEQ ID NO: 465192 - DNA, 122 bp, Homo sapiens
gccccttcatttgcataacgtcatctttccgcccaccgcagccaatcgcggcccgggagccggctcgctggcggcgccaggccacgctctctcattaacatcccgctcccggtggcgcaggg

SEQ ID NO: 465193 - DNA, 122 bp, Homo sapiens
tggctacagtggtgaaggtgaagggtggcaggctagattagcaccatctcctcccctcctcgcctgcggcctcagtactttccactgtggtcccaggatacgccaggtcaactgtgatcaac

SEQ ID NO: 465194 - DNA, 122 bp, Homo sapiens
gcaccgctgagcttgttgaagacgatggtgttcatggtgtcggttggtagggacgcgcggcgcggccgcagagcctcggggctgggccgccgggagctccgcagcggggctcggcttctagg

SEQ ID NO: 465195 - DNA, 122 bp, Homo sapiens
actgactttgctacttcagtgaaattatcacatcagtcaccagctcatctcccatgcctccgacaacagagcgagggagggtcgggggcgccgcgaatggctcctgagacccactgaggacg

SEQ ID NO: 465196 - DNA, 122 bp, Homo sapiens
gggtcacacggagctgcacgtgggttacagagaacgtctggattatagacgcagaagtcacggaagagcagagtcacacggagctgcgtgtgggttacagagaacgtctggattatagagaa

SEQ ID NO: 465197 - DNA, 122 bp, Homo sapiens
cacatgccgcaaactgcacactgcacactctgccctctctgctggcccacaggcccctcccgtggatggacctgcagggttgcctcccctcatgtcgcccccagccgcacctgaaggccccc

SEQ ID NO: 465198 - DNA, 122 bp, Homo sapiens
cgcccacacagccgggactcgcggcctttgaggacgtgggcagggccagtctcgccacgccgcggccaatgccccgaccacacgctggccacaggagtcctggctcccattggctgcagcgg

SEQ ID NO: 465199 - DNA, 122 bp, Homo sapiens
tcgtgccgtaaaggggcggagactgaaggaacaaaatctcgcgatgtttccgaggcaacgcgctggtgtgggttagggctgagaaagaacgacaggaacagagacgtcgcgaggattaagtt

SEQ ID NO: 465200 - DNA, 122 bp, Homo sapiens
tgtattgcacgcacccactcagctacctgaatcccagcagagacccaacgacagacgctgcggtggaaacgcacggcctctggtccctccataactagtttcctcggaccgttctgagattt

SEQ ID NO: 465201 - DNA, 122 bp, Homo sapiens
gccccaaagcagcatataaagcaaatccttcatttctcccatacgtcttaagtagtgaaccgcaaggatggtgcagactaagattgggtctacctataagatctggaggggaaaacggcaag

SEQ ID NO: 465202 - DNA, 122 bp, Homo sapiens
gctggccttaaagaccctagaaccctctgggatgggtcatgtactgtaagcagaaggcaccggagatgcagaaggctgtctcctgaataccccgcttttattcgcatagcttcaggctagct

SEQ ID NO: 465203 - DNA, 122 bp, Homo sapiens
ggagccagtcccgcgctggggcagtggcagacccgaggcgtgaggcgcgcatgcgtagcgcggcctttattgcgtcactgcgagtccagagcgcacggctggatcatgagcacgcccgcgct

SEQ ID NO: 465204 - DNA, 122 bp, Homo sapiens
ggcgtagaaggttccaaggtcccaaactggaattgtcctgtatgcttggttcacacagtgcgttattttaccttcctctgagctgctaatcgcctgcctctgagctgggtgagataaatatc

SEQ ID NO: 465205 - DNA, 122 bp, Homo sapiens
cgaggccagcccgctcttcggcatcagcaggcaggacctggagacggacgactttgagatcgtggtcatcctggaaggcatggtggaggccacagccatgaccacccaggcccgcagctcct

SEQ ID NO: 465206 - DNA, 122 bp, Homo sapiens
gaggctgaggcaggagaatggcgtgaacccgggagaatggtgtgccccgagcctacttcccgcgcagtcctccaagacgcggcctccagcaggggtcgctgcttcgctgccgccctggcctc

SEQ ID NO: 465207 - DNA, 122 bp, Homo sapiens
aaacctgcccaggaaccgcactctcaactgagaagagtccggggcgcgtccccgcccggccgcccggctgtcactcaagctctcctgaacttccccgcccgactcggggaggggtcggggaa

SEQ ID NO: 465208 - DNA, 122 bp, Homo sapiens
gctctgagctccttttgatgggttcataaattagcgcactcttagccaggcagtggctcacgcctgtgatctcagcactttgggaggtaaataggagagaatcacttgagcccaggagttca

SEQ ID NO: 465209 - DNA, 122 bp, Homo sapiens
gttcagttaggaagagattgcaattgttctgaccagggactgtgagggccttgagcagcacggtggcaggggaatcaaggcattgagatatatgaggttttccaagataggttccagtgaaa

SEQ ID NO: 465210 - DNA, 122 bp, Homo sapiens
cagcatgcccttggcctccccgggcctcccgtcctgggctcagcatgcccttggcctccccggacctcccgtcctggcctcagcatgcccttggcctccccgggcctcccatcctggcctca

SEQ ID NO: 465211 - DNA, 122 bp, Homo sapiens
gatttgcaaggtgaaaaagttctggagatctgttgcacaacaatgtgaacgtgcttaacacgagtcaaccatacacttaaaaacagtaaagaaggcaaattttatgttgtgtgtttttacta

SEQ ID NO: 465212 - DNA, 122 bp, Homo sapiens
catgcctcagggcttgtatggcactgtaggcttcttggtcgccaagaggcagaccacagacggtcttgaggaggactttatgttcaagtgctgaaagcagccaggattagcacccagggaac

SEQ ID NO: 465213 - DNA, 122 bp, Homo sapiens
tgccagccttgatctgctgagctctctgggatgtttctgagaaggccagagtgcattgcccgcccaaggatgtctcacctaattagtccattagagtcagtgggcctcagatcatgaatctg

SEQ ID NO: 465214 - DNA, 122 bp, Homo sapiens
gttacagagtccacactccacgttacagagtccacactccacgttagagtccacactccacgttacagagtccacactccacgttagagtccacactccacgttagagtccacactccacgt

SEQ ID NO: 465215 - DNA, 122 bp, Homo sapiens
ccaaggcagggcgtcacttgaggttaggagttcaagattagtctgggcaacatagcaaaacgtcatctctacaaaatataaacaaagtaatcaggaatcgtggcacacacctgtggtcccag

SEQ ID NO: 465216 - DNA, 122 bp, Homo sapiens
aggcccggctgctgggggctcccggagctctcggggggcggggacagcgaggtcccccgacggctcagcctggcagtagcagctggcttcctctcggtgcacggcaggctctgctccccggg

SEQ ID NO: 465217 - DNA, 122 bp, Homo sapiens
ctgggcattctgctgcttcgtgatccacttcacgatgttggttgcagaggtcaggtcctccgaggttggggctggctgggccgtgagataagcgaggagcacataggatgtcatctccacct

SEQ ID NO: 465218 - DNA, 122 bp, Homo sapiens
ctgcggagccgctgaagccagcccagtaggaccccgaaccaggtggagcccggagggggacgagtctggggtctcctgcggctctggctcagcgacccacagtgtcaccccagggatggcag

SEQ ID NO: 465219 - DNA, 122 bp, Homo sapiens
tcagccctcggggacagaccgaaggccagggctgtacctggctcagaaccaggcgccaagcggcacgggactctccttctgcactcgcagcgcgtgagtgcaattggagatcctggactcaa

SEQ ID NO: 465220 - DNA, 122 bp, Homo sapiens
gcctgccttccagcccagttaggatttgggagttttttcttccctctgcgcgtaatctgacgctgtttggggagggcgaggccgaaacctgatcctccagtccgggggttccgttaatgttt

SEQ ID NO: 465221 - DNA, 122 bp, Homo sapiens
ataaagtttaaataagccaagtcctgcaaaatgcttagtgcaggtttggaatgcaccaagcgatgacaaatctcaacctgtctttatgctgagaccactccccagtttccggagccgcggcc

SEQ ID NO: 465222 - DNA, 122 bp, Homo sapiens
gaagcgaaaggtggctgtctgcagcgctctaacccaaagaaaaggtaaatatcagcctgtcgaggagggtcgagccctccaagtacctgcagacccctttaacccacccggacgccctgccc

SEQ ID NO: 465223 - DNA, 122 bp, Homo sapiens
gtttgcgctccccaccagcctcacttacacttgtggacactgcggccggtgtcctgaggacgtgtgttgggaattcagccacggggaatggaggtcccttggttcatatagtcacaggctct

SEQ ID NO: 465224 - DNA, 122 bp, Homo sapiens
aagcatagctattaaataaagactgatcttcactgagtttaagagtctcagaaagccgggcgcagtggctcacgcctgtaatcccagcactttgggaggctgaggcgggtggatcacctgag

SEQ ID NO: 465225 - DNA, 122 bp, Homo sapiens
ggaggaggccagatgcggccagcgtctccaacagggtgaccatccgctcggcttgctgagcgtttaaacaaatgtttagacaggctgtggggactcccctgagttgagccttggccaggggt

SEQ ID NO: 465226 - DNA, 122 bp, Homo sapiens
agcttgctcatcgtttccatacagttttatttgcaatttgttggaaccatggagaacaatcggcagatacacatgttgcttctgggaacagcattcaactccagatgctttttctgctaagg

SEQ ID NO: 465227 - DNA, 122 bp, Homo sapiens
tccctgcccaccttctctacactgcccgcccgcccccgcccgcccccgcccgcccccgcccgatcccgccggccctggctgccaggatgggcgttcttaggctctgcctaccccaggccctt

SEQ ID NO: 465228 - DNA, 122 bp, Homo sapiens
actgggagcctcggggcaacgggactctaactcccggcatcctcggctcccggctgggcacgccctccgccgtcctgtttgtagttcccgctgtccccagcgtcctattgttcccccgtagc

SEQ ID NO: 465229 - DNA, 122 bp, Homo sapiens
acacctataggagttcacacagatgagcccctatggagcacttgaaatgaggggggcaagcggacctgggtttcactgaagagggaaaatgcagaagcaaatgatttggctactatcacatt

SEQ ID NO: 465230 - DNA, 122 bp, Homo sapiens
ctgagttgacttagcggccatactctcaggctgctgacagtcctgtcactgccctaagcacggtgccctaacacccgtgagtcatagagctgtgctaggtgcagcaggagagacgcgtccca

SEQ ID NO: 465231 - DNA, 122 bp, Homo sapiens
attgagggatatggtgttggttgctttgatcttctcagtaaggtaggagacaaggccattcgctgagataagggaagccacactgtgtcatcttggagtttgagagtggacatggtttgaaa

SEQ ID NO: 465232 - DNA, 122 bp, Homo sapiens
ccgccggtaggcgttcagggcctgcagcacgcgctgcgcgtggcacggacccgcgcacggcgcttcgcagcccggctccgactcctccggcgcatggccttgccgcatcctgccggggagag

SEQ ID NO: 465233 - DNA, 122 bp, Homo sapiens
ctgtcctagtccactgtagtctcccactgtgggagttgccttgctaaatagttttctttccggggtcacatgtttaacccttgcactgacactcttagcacagagtcttgaccacctctgtg

SEQ ID NO: 465234 - DNA, 122 bp, Homo sapiens
agtaggagacacacctcccactgcccccagccacgcgagctatgggcagaatcggggcaacggtaatatctggatggggcaggctcccctgaggctgtgcttaagaaaaaaggaatctggag

SEQ ID NO: 465235 - DNA, 122 bp, Homo sapiens
cggaattgcaaagtccggagtggataggaccgtgaggacggtcttttttcttgggcaacacgcattatggtcgagagatcagttgttaaaccgcccctgttcaaatcccagccctaccagtg

SEQ ID NO: 465236 - DNA, 122 bp, Homo sapiens
agaggaggacaaaggggatgaccaggtggctctcccccgacggactcccggcccagggagcggatagaccactcccagagagagtgtggctttgagccttggagaggatgctctccttctcc

SEQ ID NO: 465237 - DNA, 122 bp, Homo sapiens
attccttaggacttaatctttcagccagtataaactattgagacttcagggcaagaaagacgcatgaaacttgtgacctacatctactgcttgaaatattgggccaaattttcagatctatc

SEQ ID NO: 465238 - DNA, 122 bp, Homo sapiens
agggcgccgggggttactggctctgcgaggagtcctgggggcctcacatcctgggaagggcgtcacaggacattacagggtgcagctgtaacactgagctgataatccaagggcttatgggg

SEQ ID NO: 465239 - DNA, 122 bp, Homo sapiens
caggacggcgcgctctgggtgcgcttgtgtgcccctgtgaggctcctgggttccacggggcgcccaggttatacggatctcagagtcctgtatttattcggtgcttctaacttcatccactc

SEQ ID NO: 465240 - DNA, 122 bp, Homo sapiens
tgtttgttttaaagcgtttttcctcccttagatggtttttccaaaaccaccctttggtaacggggtggacggtgtgccgttgctaagcaacgcgagggcgggccttgttgctggatttccct

SEQ ID NO: 465241 - DNA, 122 bp, Homo sapiens
tccacgcgggctgcggggacgcgggcctcggtgctgcagactttctcagggcgcctgggtcgcggcaggcgcggagtcccgagcgcagcagctgctccgccggcctcgcctccgacccccgc

SEQ ID NO: 465242 - DNA, 122 bp, Homo sapiens
cgagtgcggtggccacgcgtcatcgccgcccccgccctgacgccccaaggcgggcccatgcgccccccgccccactgtgacgcccaggccccgccaggaccgccccctccagacgcaaggcg

SEQ ID NO: 465243 - DNA, 122 bp, Homo sapiens
ctcctttacgtcatctccggtcaatgcatacttgagtctattcctgaggaagacgatcagcggaagacattccctcagcttgtggggacctgtcgatggacgaggtgcaaatatacccttta

SEQ ID NO: 465244 - DNA, 122 bp, Homo sapiens
ccatgagtagcaagccagggtcaagccaggcaggcggctccagggctggttccttcccctcgcaccactgaggtcaaaggtgggaggatgccgtgaaacagaggccgagtgtccacactccc

SEQ ID NO: 465245 - DNA, 122 bp, Homo sapiens
ctccaagctaaaccacctaaccagcaatgtcagagtgctgttctcaccacttcagctgcccgagtctttgggacatttgtgcaggaccaaaagaacagccgcatccatgagaaaatcctaac

SEQ ID NO: 465246 - DNA, 122 bp, Homo sapiens
cttcactttaccagcggtttttcttcattttccctcctccccctgcagctgcttcagcttcggaaaagttctgaagtcatggaaagttggggctgtgctcccagccaggggctaggccggat

SEQ ID NO: 465247 - DNA, 122 bp, Homo sapiens
ggaactccctgaccccttgcacttcccgagtgaggcaatgcctcgccctgcttcggctcacgcacggtgcgctgcacgcactgtcctgcacccgctgtctggcactccctagggagatgaac

SEQ ID NO: 465248 - DNA, 122 bp, Homo sapiens
attaggaggttggttcctcaccggagggtcgggaacaagacgccagagcccttcttccagcgcctgcagcgagttaaggccgagggtatgcctctggcgggctcatcttccaacacagaaga

SEQ ID NO: 465249 - DNA, 122 bp, Homo sapiens
gagctgggaatgggtatggggagtgtcaacatgcatgcatgccaagtgctgaccagtgagcggaggagaggccagagtgggagcagagaggagctctgggaccctctccaggggaatcctga

SEQ ID NO: 465250 - DNA, 122 bp, Homo sapiens
gcttccccagcccaagcccgcactgtggaccccagaggtcggaggggagcccggcgacaccgcgccccttctgcagcccacccctggctggagcacccaccactcgtgccttagcacattcc

SEQ ID NO: 465251 - DNA, 122 bp, Homo sapiens
gatcggctccgcaagctgtcctgccggctggctctgctggctgccgtaatgaaggctccccggagccatgccacacctgcccgtgtgcgtgtcgcccgtggctgtcctcactctaccacggt

SEQ ID NO: 465252 - DNA, 122 bp, Homo sapiens
cgatgctgccacgtgatgggcctgggggaaagccccgatcccaagcgccaacagagcagccgacctcagccaacctcaaccaacacgtaggcgaggatgcccagggtgagcgccagcggcga

SEQ ID NO: 465253 - DNA, 122 bp, Homo sapiens
acagattattccaggacagaagttttggctctgaaagcttggctctttcaggaggagaagcgggaaattacctttcaggtttccagtgattgtggttttgagtaatcagcaaaggggtgggg

SEQ ID NO: 465254 - DNA, 122 bp, Homo sapiens
tacgcgataaatcagttccacatcaacagtcacaggtgtcatcacttcccagagggtggccgggggagagtgggggctgtgggatcaggggtccagggtcacctgcaggccgcctcctgtac

SEQ ID NO: 465255 - DNA, 122 bp, Homo sapiens
gaaaatttaccaataagaaaaaaaaaaaagaagttcatgaggtcttgaagtggtagggggcgggtatgataataaagctgctaatataggctgggcatggtggctcatgcctgtaatcccag

SEQ ID NO: 465256 - DNA, 122 bp, Homo sapiens
tccttagccccggccgcacacgttacacactcgatcacacaaagcgttgcactttattcccggcatctaggcgatgacacaatctccagaacaaagacaacattgacaaacccaacaaaaac

SEQ ID NO: 465257 - DNA, 122 bp, Homo sapiens
cctttcattcatccagccgacgggcacgagcatccatctgccttctgccaggctctgtcccgggctctgttaataccacagtgaattcgtcccgaagccagccccggggagtggggagtgga

SEQ ID NO: 465258 - DNA, 122 bp, Homo sapiens
gagtccttgggccctggaaggagcgcagcctctgagacactccgctccagcccggcttagcgcgccttcatattcatcatcaaaataagacggttagaatcttgcagcagtgaggcggccaa

SEQ ID NO: 465259 - DNA, 122 bp, Homo sapiens
tgaggtcccagggacgcagctgggggtgtcctggaattcacgactctgcagcccgaggtgcgccgcgtgcgcaggagggggtggggtccgggggggcacggactcccctctcacgttgcttg

SEQ ID NO: 465260 - DNA, 122 bp, Homo sapiens
actttttttttttttgagaccaggtcttactctgtcatccgggctaggagtgcaggggcgcgatctaggctcactgcagcattgacctcgtgggttcaagcaaaccttccacctcagcttcc

SEQ ID NO: 465261 - DNA, 122 bp, Homo sapiens
cgcggcggccagggccgaggtgtggagaagcccccgcacctggcagccctaattctggcccggggaggcagcaaaggcatccccctgaagaacattaagcacctggcgggggtcccgctcat

SEQ ID NO: 465262 - DNA, 122 bp, Homo sapiens
ctcacccgtggggcggaacaccctgtgatgacatttcctccatttccacaggctctcacccgtggggcgggacaccctgcgattacatttcctcagaaggcagctttcaaggcaaagctccc

SEQ ID NO: 465263 - DNA, 122 bp, Homo sapiens
ggataacgaaggaggtctctataccatggctcgtacaaggtggactgcccgcaaatctaccggtggtatagcacccaggaagcaactggctacaaaagccacttgtaagagtgcgccctcta

SEQ ID NO: 465264 - DNA, 122 bp, Homo sapiens
cttctttttctctcatacactttatccatcagaaaagtctagtcacctttacttacaaaacgtatccagaatcctgccacttcacaccacctccactgctacccaccatcatctctgtcttt

SEQ ID NO: 465265 - DNA, 122 bp, Homo sapiens
ctgcaacacagagtggtaaagagctagtctcaatcatgcacatgacaacaccagtaggaacgacaaaaattaaagacagaaggaaactagcatcctggatgacaacaaggaacagagttgct

SEQ ID NO: 465266 - DNA, 122 bp, Homo sapiens
tgaagtacaagaagaacaacgagtgatgtgcttgtctgttgtgtcggaaataacccagcacgcggcacttcctgtctctggataaggtaggtatgcagccatggcacgtgcgggaaagcggg

SEQ ID NO: 465267 - DNA, 122 bp, Homo sapiens
catcagcatgggctggggtgagtggcgtgttccttcttcagcaagacagggagaggaagccggataggaggcagctactgacgttgacatgcccacctcctgtagacccacccggcccttgt

SEQ ID NO: 465268 - DNA, 122 bp, Homo sapiens
cggcttaggtctctaagcagatcgaaagtcggggtccagaccgagaggatcttcaggtctcgtccacccaatctcaagcctctggaagggcgggctgccggcgacctcctccagtcccggga

SEQ ID NO: 465269 - DNA, 122 bp, Homo sapiens
gaagttaagagaaggcagtgggtcttctattggggggaaaaatctgtggagtgatggcgccgtctatgttcgactaaactaaagtgtcacccagaaaatcagttttgagaatagctaaactc

SEQ ID NO: 465270 - DNA, 122 bp, Homo sapiens
aggagcttctcaagaaaagaaacctggactgtgaaagtcacctcctaggccctctggggccgtatccgggggtgcctgggaggagggtggaaaggattctgcagtcaccgagctatgggcga

SEQ ID NO: 465271 - DNA, 122 bp, Homo sapiens
ctagggaaccctggggaggcggcggggagcaggaggggtgtgtgttgtggtgaggaggagcggaagtcggaagctccagccgtcacagccacattcactgggcaagccgactgtgagccagg

SEQ ID NO: 465272 - DNA, 122 bp, Homo sapiens
ggacaccagcactcgcgactccacaaactccctcagcctccgggccggaagtcagcggcgcgattcgctccgcccattacgcacgcccctgcgcaggcccgcaagccgaattgccggactgc

SEQ ID NO: 465273 - DNA, 122 bp, Homo sapiens
attcttcttccagtttttttcggtttcctggggttgtgcaagtttgcattaggccacagccgagccacaatccttattttactaactcttggacttcacctggttgtcttggagcctgacat

SEQ ID NO: 465274 - DNA, 122 bp, Homo sapiens
ccggaacgaaccgtcgccagcaagcacagcagtaggaccagggggatgcaagagcgggggcggccggggatcgtgcttctcgctcaggtccagattcccggcaaccaggccggcggaatcac

SEQ ID NO: 465275 - DNA, 122 bp, Homo sapiens
tacgggcagcggcgcagggaacggtgtcctgggcggcctcacaccgacggcgcctgccggcggggacaagaaagtcatcgcaacgaaggttttgggaacagtaaaatggttcaatgtaagga

SEQ ID NO: 465276 - DNA, 122 bp, Homo sapiens
agccgttcctactctctctgtgtgacggcttagcctggccagccagccggtgagtggaagcggcggctcctgactcctggtggcggcactgtgaccccctccccctcaacactgcaagtgtg

SEQ ID NO: 465277 - DNA, 122 bp, Homo sapiens
gccatagatctttttctgcgccccgcgccggcgcggggcgcctttgcgagggcggagctgcgttctcctctgcacagccttttggggtaccacggaggcgaagcagcattctcctcagcaca

SEQ ID NO: 465278 - DNA, 122 bp, Homo sapiens
aaggtctcagaaatgtgatcttcttttaatttttcttggtatcttttttctttgtgtcctcgcagtgtggtttctggacaccatgtaggagtgttactttgatttcaggtttttggaaacac

SEQ ID NO: 465279 - DNA, 122 bp, Homo sapiens
ggtaggcagcccccagccgcctgccttgccagccggtgcgttttcgtggctgaaacaagccgcgccctttgaaagcgttgacacttgttctgccgagaggtcagctgagctccgaatggatg

SEQ ID NO: 465280 - DNA, 122 bp, Homo sapiens
ccactccccaaaggagagtggtgcacacgttcagtgctactggttcccaagggctaaaaccggagcccctaggggcctggacgcaacaaaccaaagcccagcggccggccactgaaaatggg

SEQ ID NO: 465281 - DNA, 122 bp, Homo sapiens
agtaagttcgcttctaaactttcaaaaagtttcacgtcccaagatggggtgaaggtgagacggtggagatgaaccggggcagacagagaccaccccaaataccggacccgggggaaatgggg

SEQ ID NO: 465282 - DNA, 122 bp, Homo sapiens
gagccgccacatcccggcagccctcctacctgcgcacgtggtgccgccgctgctgcctcccgctcgccctgaacccagtgcctgcagccatggctcccggccagctcggtgaggccctagcg

SEQ ID NO: 465283 - DNA, 122 bp, Homo sapiens
ttaaacattcatctttccggacctggccaagcaggaagcgccatcatgggagctgacgtccgccacaagaaggacctaaaggttcggcgcaaagagcccaagagccaggatatctaactgag

SEQ ID NO: 465284 - DNA, 122 bp, Homo sapiens
ctgagtcacatggcagcccagtgtgcccagcccctccccccataccctgcagcacttgcccgtccacgcagcctgagaccctccatctggagcgcgtcacaccatgaatcccgagctgctgt

SEQ ID NO: 465285 - DNA, 122 bp, Homo sapiens
aagacaccgaccccagtgctgcctctccaggatcagtgacagaccccgaggttctggagccgggaaaaaaccatgacattgtgcaggtagatgaaatgccgcgttgtgcgggtgaggacccc

SEQ ID NO: 465286 - DNA, 122 bp, Homo sapiens
gttgacttccaggaacccttgggggagacggcgctgagctggatgtgtgccacgggtagccggaggctttgtccaattcttttccccttccaggaaccggggttttgtgtctttccactctg

SEQ ID NO: 465287 - DNA, 122 bp, Homo sapiens
acctgggaggtgcacggttggccaccagggcgcgctgctggactctccccagaaatcgggcggaggtttaggcctcagagtcacttaaacttgtaaccctaccggtagccgtggagtctagt

SEQ ID NO: 465288 - DNA, 122 bp, Homo sapiens
ttcccccctcgcagcctcggtccttccccgctgcctgcaagtcagcctggctccgagtcacgtgtcagtgcctgaggcagagactgcgagaaaaaaacgcgcttcattccttcttccaccgc

SEQ ID NO: 465289 - DNA, 122 bp, Homo sapiens
taaggagaagcagttgtgacccgctgtagaggtgggagctgttgtctctcccatcccccgcgtcccagccctgtgacatggcctttgttctctcgcaggaagtctcgggtctgaagaggaaa

SEQ ID NO: 465290 - DNA, 122 bp, Homo sapiens
aaagaggtcgtgccgcattctgcgccgcgtccctcttccttcagtcccgccgagtgtccccgaccagaggtgacctcctagaaggggaggtccccaaactcgaggccctgcgtgtagggaag

SEQ ID NO: 465291 - DNA, 122 bp, Homo sapiens
gtggtggggccctcgacctcccctccccactctggagcgctgcctcacagcccaaccaagcgacacggaagagacaaccacaggaatagcagctgcggagctccatggcctccctgtgcccc

SEQ ID NO: 465292 - DNA, 122 bp, Homo sapiens
ccgccaacagcaccttctctcctaaggatgctccctggccgccagactttctgtgcagtgcgcagcctgtgttcactgacaggaaagagcgatttcagcgcgtgtcattctaaacaatgatt

SEQ ID NO: 465293 - DNA, 122 bp, Homo sapiens
gatatgttccttcaaatctgctgagaattaaataaacatctctaaagcctgacctccccacgtcaagaggtgatctgtgccattttgtgtgtgattcttttattgtcgggtctctagggatt

SEQ ID NO: 465294 - DNA, 122 bp, Homo sapiens
cagtctttcatcgtaatttgatccaaatgagggactgaacccctctctttagctttctcacgtatgaacatcagcttcatccttcctcttcagagtaggaacaatgtggttttggatattga

SEQ ID NO: 465295 - DNA, 122 bp, Homo sapiens
cctcccccgggaagggcaatgccggccgcgagaccaagggggaggaggggcagtgctgggcgggtaaaactacgcacaagcgaaggaatctgggcccccagcctctcgccgcccgctctcca

SEQ ID NO: 465296 - DNA, 122 bp, Homo sapiens
ctgccccaagtgcatggatgtgtacacacccaagtcatcaagacaccatcacacggatggcgcctacttcggcactggtttccctcacatgctcttcatggtgcatcccgagtaccggccca

SEQ ID NO: 465297 - DNA, 122 bp, Homo sapiens
gcctattttgacgctgcctaaaggagcccacgaagaagtaaatgacggggttggcactaccgtttagaggggacaggaaaatggaaactagatggacatgacagaaaatgacttccaaatcc

SEQ ID NO: 465298 - DNA, 122 bp, Homo sapiens
ctagaatgcttataagtacaaataattgaccagccagagcctaatcttacatgtctgctccgaatatctagaacaaaacaacagaagattcccaagtttaatctgacttcaactagaactat

SEQ ID NO: 465299 - DNA, 122 bp, Homo sapiens
gcgtgagggaggcaggtggccccacgggcaatggggacaagaaccatgtcctgtgtgcaccgggtgccaggagaaccccggccttgagatgggctttgccacttgccagttgtgccatcttg

SEQ ID NO: 465300 - DNA, 122 bp, Homo sapiens
acaacatgcagcacccagggttcacacagcagctggatggggctgcctggggctgccatgcggccgttcccccgggtgctgtaataacagtaattattataatacatatgcccataactcac

SEQ ID NO: 465301 - DNA, 122 bp, Homo sapiens
tggaaacacatgtagtcataaaaaggtagacggaaagtcaattagacacgcgcgcacacacgcacacattcacaagccggtgctaagtgtgcacccggcgcagctggctcccgggccgcggc

SEQ ID NO: 465302 - DNA, 122 bp, Homo sapiens
cgctctaggacgcagtctgcatgctcgtggcactcgctgggcgagccgtcggggcagaagcgctgtgcgcgccgctggcagccggacgcctggtcgcccacgaagccgggctggcacgggcc

SEQ ID NO: 465303 - DNA, 122 bp, Homo sapiens
tgaaccttcaccactgctgggctgtggaccctcacttccgccgccaggaagtttcggggtcgcccaccttccctcccaggctgctccgcgtcggcggcgccccgcgcgattggctgcgccgc

SEQ ID NO: 465304 - DNA, 122 bp, Homo sapiens
ggggcggtccgcgaggggaaatgcgtccgtggccggggcgatcgttgttctttcctacctcgaaaatctctgagaccccggggccagtcctttccggtctatcacccccctgccacctccga

SEQ ID NO: 465305 - DNA, 122 bp, Homo sapiens
tgagtgttaataggctattgtccggaaacagtctccccccgcagtttgctccttggcattcgaaaggccccaggcagcaagaaacgttcggctgaccgctttgccgcccactctctgcatct

SEQ ID NO: 465306 - DNA, 122 bp, Homo sapiens
tgccagtgtccccaactccacccagtgaagtagggctggtattactaaccctggagtcagcgctagcaaacaagggctcagaggtcaagggctggaagccaggtctccagactcccaggcca

SEQ ID NO: 465307 - DNA, 122 bp, Homo sapiens
ttttgcacgaagcggccgcacagttgtagcatttcggtcacagcccgcttcgaggtgcagcgcacccgaaagtcttctcggggagtggcggagaccaaggcctggctctctgtgccagccgc

SEQ ID NO: 465308 - DNA, 122 bp, Homo sapiens
gcagatctcctcgcgggtggagtgtgaggagcaaagccctcccttaactataaaaacccgcggattcgctgacataaacgctgtttttttaatcctttggtttctgaggcatggtcaggact

SEQ ID NO: 465309 - DNA, 122 bp, Homo sapiens
ttggcctctctcaaaccttgccctgtgcttggctctactctcggccatgaaagtccaaaccggaaacgagcggctaaacccaggggtgggggagggggaggcagccttgaccatcttcctcc

SEQ ID NO: 465310 - DNA, 122 bp, Homo sapiens
gcgatcccagaacgccagtggcttcccaccgcaaaggctttcttcctggctgaaggtgcgcgccatccccaagctggcggccactctgctcctgcgtccattccaggcagagtctgacatgg

SEQ ID NO: 465311 - DNA, 122 bp, Homo sapiens
agacccgcgagcggggcgcgcgcccgccgcctcctccccgcccggccccttcccccacggcgcagtcctgcaaggactgggggcgcagcgcagggctccctgttacctgcaggaaggcggcg

SEQ ID NO: 465312 - DNA, 122 bp, Homo sapiens
cttcagcaccccgcctacccgctctacctctcgctttcaaactggagaggcgcggaagcgcgtgtggagcgtcggactacaaatcccagcatgcaacgctctgggctgcggcggtgtattct

SEQ ID NO: 465313 - DNA, 122 bp, Homo sapiens
gaacccctctcctggtcaccgagaatcagtccccgtggagttccccctccacctcgccatcgtttcctcggtcctcggcccagtggaagtcactaccctcgaggaggaggcagcggcagccg

SEQ ID NO: 465314 - DNA, 122 bp, Homo sapiens
aaggctgtaaacctcacctactgcaattcagatgtggctggctgagcagctctcagcagccgtcagcactgacaactaagcaaaatgagactctcacaccaccccagacaatagtaagaaca

SEQ ID NO: 465315 - DNA, 122 bp, Homo sapiens
attgaaataattgtctggtttttgtctttggttctgtttatgtgatcaattacatttattcgtttgtgtatgttgaaccagcgtttcatcccaaagatgcagccgacttgattgtggtggat

SEQ ID NO: 465316 - DNA, 122 bp, Homo sapiens
ccggaagacgaggtggtgacacgcttccggcctttgtgactcattgtgtctgtgtcgaggcgtcgggagggcctaagtccgtgtgcggtgcccttcggccggcctgagccccagagtcagct

SEQ ID NO: 465317 - DNA, 122 bp, Homo sapiens
ggttgcagtaagctgagatctcaccactgcattccagactgggtgacaagagcgaaacttcgactctagctgggcatagtgccacatgcctgtagtcccagctacttaggaggctgaagtgg

SEQ ID NO: 465318 - DNA, 122 bp, Homo sapiens
ggtgtgcatccttctggggcccctcctaatgggatagcgacagaggtctctgcaggtgcccgggctcacagatcgcctcctggatgaggcccgggtggccgcgattggctgcgcgggcagca

SEQ ID NO: 465319 - DNA, 122 bp, Homo sapiens
acattccacatgcagcacttggaggtccatagttacctgggcctggagttgcaaagaatacggagggttaaacttagctgtcaaatgtcagacatctaaaccaggatttctcaacattggca

SEQ ID NO: 465320 - DNA, 122 bp, Homo sapiens
caaggctaccccatgcatactgagtggacacgcgggaccctcatgtgtgtgtgagaaacacgagaatcaccaactgcccacgtgtatggagaacgctcccaagacctacactggaagtgcgt

SEQ ID NO: 465321 - DNA, 122 bp, Homo sapiens
tctgcaggcctgaggaacagccacaaaggaggggaggaaagggagctggggcccagcctacgagcacagaacacaaccgatgccatgctcttctagcaacggggcatgcaagcttgactggc

SEQ ID NO: 465322 - DNA, 122 bp, Homo sapiens
agccgcgccttttcctgttgctgccgcaccttcagctgctctatcatgcgctggttgtagcgctgcatctgctcccgctcctggagaggaatatccagaggggctgagggcagctgcactct

SEQ ID NO: 465323 - DNA, 122 bp, Homo sapiens
cagtagaatataaacgacttgaacatgaaaagcaaactttgaagtaagatagcaggaaatcggggctccaaggcctttgaatgttggaagaaattggatttctccacgtattttgttttatt

SEQ ID NO: 465324 - DNA, 122 bp, Homo sapiens
gcagcattttgtggagaacgacgagatgtactctgtccaggacctcctggacgtgcatgccggccgcctgggctgctcgctcaccgagatccacacgctcttcgccaagcacatcaagctgg

SEQ ID NO: 465325 - DNA, 122 bp, Homo sapiens
agaggaaaagtggggaagcgagaaagagacggagacccgccgtcctggcctacgaccccgcgaagagggaacggcggtccgcgcatggtacccagaccctgatcaagcccagcaggcgccgg

SEQ ID NO: 465326 - DNA, 122 bp, Homo sapiens
tctctccaggtgaggacctacgcgcgagggggcggggccagacgggctcacatgatttgccggcgactgtagcgccggtcccggccacaagctgtcggctcggttcggtcgcgttacagggc

SEQ ID NO: 465327 - DNA, 122 bp, Homo sapiens
ttagctgcctgtaacccaagcctgccagctacgcctgccaggcccagacccccaaggccgcgtgggacctgcctccaccagcagctgagttcccagagctggggcgggccgggtgggtggta

SEQ ID NO: 465328 - DNA, 122 bp, Homo sapiens
gccatacggtcacagagctttcaatgaaaagtaacataattgctcatttcaccaggcccccggcttggggcgccttccttccccatggcgggacacctggcttcggatttcgccttctcgcc

SEQ ID NO: 465329 - DNA, 122 bp, Homo sapiens
acagcaccagcgggggcatggggaggggtgacaggttgggcggggtccctggggctggggcgtagcccctctctgcaggccccacagtctgtgaccgtgcagggagggtgctgggagtctcg

SEQ ID NO: 465330 - DNA, 122 bp, Homo sapiens
ttttacgcggtcctccatggtgtttgggtttctcacagtgtggcagtctcaggataataccgtagtacttttcaccaggcagctgtcttctatgagcaaggtctccaagagaaaggaagtgg

SEQ ID NO: 465331 - DNA, 122 bp, Homo sapiens
taaaggagaaaatgaagaaggtgggtaatgcaacgaggtgaaaagaaacgttcctactggcgagaaaatgaataatgatattggtctccttcgccctgtaaggagccaaccaacctacctac

SEQ ID NO: 465332 - DNA, 122 bp, Homo sapiens
gaagcttcgcctcacacgttgttccctacaggcgcctgtggaccccaggttccatcctcccgggtctgtcctccaggccatagcccgcgccggtccctgtgcctgtcgctctccccaccgca

SEQ ID NO: 465333 - DNA, 122 bp, Homo sapiens
cgccgccgctggtctacttggagctcaaccgaacgtggctacccgggcgagggagcgaggcgggcggcaacgtcccgcgatggatggccgcctcggccaatcggcgcacgcgggggcgggcc

SEQ ID NO: 465334 - DNA, 122 bp, Homo sapiens
gtgacttactgagagatccttcatgtcctagacttatgccattcctgatgactgcccaagcggaccatggaagcttctgggctcatcactggagaagctccctctgcctgcactgtctgctg

SEQ ID NO: 465335 - DNA, 122 bp, Homo sapiens
ttctgccctagacattgaatcggacactagtgatattcaggatcagtgatgtcagtgatacgagttgcagagtcttcaaaaggccagctctgcagtggtattttggccactattaccgttag

SEQ ID NO: 465336 - DNA, 122 bp, Homo sapiens
gggccaaccagatggtgctgagggaaccagacaggaattccacagcaggaagatggacttcggccccagtctagctttccaggctcacctctctgctaccctctgctccagccacactccac

SEQ ID NO: 465337 - DNA, 122 bp, Homo sapiens
atgttctccagagctgacccacatcccataggatttaggcctacaaagaattcagtgaagcgttaaaacaagtaatacactagcacagttggcgagctcaggagagctgcccggcagttcgg

SEQ ID NO: 465338 - DNA, 122 bp, Homo sapiens
ggccgcaggtttgcctggggccttggtgccagactgcttctgggatggctctgccatcagcgttgacggtctggtccatctaccacagtcgatctgcagtgctgatggccacaggtttgcat

SEQ ID NO: 465339 - DNA, 122 bp, Homo sapiens
tccaagatggcatgaatcgggctaaggtccctgggggtgcagatggtactgctgaggtcccgggcttagtgtgagcatcttgccagcctcaggcttgagggagggctgggctagaaagacca

SEQ ID NO: 465340 - DNA, 122 bp, Homo sapiens
tctgaaggggaggagttgtctggaaagaccagagctgggtgctggggatctggagcagctcgggacccgcgctgcagggagctgggatgggagaggtgagggagaggaggatgggactctgg

SEQ ID NO: 465341 - DNA, 122 bp, Homo sapiens
ggacgcggaaagggggtggtggcatgtggacatagctacggtgttggagcgtggaggccccggggaggaggcggagcccctgcgaaggggcgggggaggggctgaactggaacctggtggcg

SEQ ID NO: 465342 - DNA, 122 bp, Homo sapiens
ccgtccccaggaccctgcgagggaggatggctctccatttcactcaccatgaggcctccacgctcagctcccgtccccggcctcatcgtcgggctcagactgctccgccggcggccactgcc

SEQ ID NO: 465343 - DNA, 122 bp, Homo sapiens
gtgtccagaggcaatgttggaagtgacatctcattccctgacgctcctgagtcccacagacgcccatcaggccggtctgaggaggggcaagtgcatcaggacagacctggctcgggtctcct

SEQ ID NO: 465344 - DNA, 122 bp, Homo sapiens
ccgccgcgctccgtgggcaactcctactactgctgggctgggctgggctgggctgggctgcgccggagctcgcctgcacagatcagctccggagaggggaaaaccacgctcctcggaccaag

SEQ ID NO: 465345 - DNA, 122 bp, Homo sapiens
agtggaacctgaggtcagagaaaaaacattcaaggagaatactggaaaagattagatgtccgtgggccaaatccactcaagtgtggtgattcctacacacacagagacagacacagaaataa

SEQ ID NO: 465346 - DNA, 122 bp, Homo sapiens
tgttgcaaagattgcgagttaagcttttgtttgttttgtcgagatggagtctcactccgtcgcccaggctggcgtgcagtgtcacgatctcggctcactgcaacctctgcctcccgatttca

SEQ ID NO: 465347 - DNA, 122 bp, Homo sapiens
ctcatttttctctccttagcacctaggttaatgcttgttgcattataaataatgaataaacgtttgttgtaagtaagcaaatgaataaacaaacgtatgttgctgctatcccttttcctggg

SEQ ID NO: 465348 - DNA, 122 bp, Homo sapiens
tggaaggagacatgttggctcatctcatcagtcagtaatgaatcacgtggccctgaatagcgttagcatttgattctggaaggctctgctgtgtgattttaagcagtgtgcagtagaaactc

SEQ ID NO: 465349 - DNA, 122 bp, Homo sapiens
ttccagcctgagccacagctcccttccctggaatgttgcaggcttggcctgggctcccagcggctgaccctggcatgggggtgggggggcagtgggaagggacggagcaggtggtgtgatgg

SEQ ID NO: 465350 - DNA, 122 bp, Homo sapiens
gccaggacagccgacaagctcagcctatgactttgcagactcgccaaccagtgtgacggacgctactggaacttgccccggcccagctctgggactcgttaatgttgttttggttcaggggc

SEQ ID NO: 465351 - DNA, 122 bp, Homo sapiens
cttggcaccttgaccctgtggcagggacatctcggcccaggaaagaatgaggtttaggcacggcctaaccacctaagtgagggcactgaagctgccgggggaagggcaaggtccgcgttgca

SEQ ID NO: 465352 - DNA, 122 bp, Homo sapiens
gtgtgctctgccaagtgaaagaagccagacctaaaggccacctgctgggagtcctgctgacgtggcgttctgataggaccacgtgctggggatgggagcggccggggcctgctggggaggga

SEQ ID NO: 465353 - DNA, 122 bp, Homo sapiens
tacccaaacgtttttcaacccttacccccatccctccctcccacctccagtagtccccagcgtctgtttttgccatctttatgtccataagtacccagtgtttagctctcacttataagtga

SEQ ID NO: 465354 - DNA, 122 bp, Homo sapiens
tttccagcatggctgactctcacacccaaatgctgacaggaggtctcaggaggggcacagcgatgtgtactttaaataaggaccctggctgtgtgaatcaaacacacaccaaagttcgtgag

SEQ ID NO: 465355 - DNA, 122 bp, Homo sapiens
ttgccagtgtccagatgcgcagtcggtcagccctgggactgcccgagtgttgcctgcactcggcagccgtgacccagagctcagctacgcagcacaggaaaaacagggctgtcgtggaggaa

SEQ ID NO: 465356 - DNA, 122 bp, Homo sapiens
ggacgggagggaccccactggggtcctgggagccgcccccgggcagcctcaccttccgcacgcgcttcttccggatgctctccacggcgaacacctgctcgccgatggctgacagctccatg

SEQ ID NO: 465357 - DNA, 122 bp, Homo sapiens
aaggtcacccagacagaaagtaatgaagtgaggaatcaggaagagaatataaatctaaatcggctgcgtggttctagaacacacatgcatgatcacaaagccattctatttatggatgtgca

SEQ ID NO: 465358 - DNA, 122 bp, Homo sapiens
gggcggccagctacgggaatttacagtgtgtgcagcctctgtgctgtgttcccataacagcgggcagtgtggggaggggcacaagattgaattttcctagcagggcatgacggggtaccgca

SEQ ID NO: 465359 - DNA, 122 bp, Homo sapiens
ggcgtagatctttcttcccccttgctgtgtttttgtgatcaagactttagctcagcagcacgaggggcgggaaggcagaaatcccgggaagggagagagccccaggagtggtctctagaaga

SEQ ID NO: 465360 - DNA, 122 bp, Homo sapiens
aagctagctgacccaggggcggccacaggagctctggcccgctgaggctggcgatgaggccgcagggagggttactgcgtgcttgtgacagacgatttttaaagtcagggcttgaaagaaca

SEQ ID NO: 465361 - DNA, 122 bp, Homo sapiens
ggactcataggaggaatttgtcagaaaagactccttcagcttcagttgcaaagtcatacccggccctgcggatccagaagtacagcttaggacccagcagtcagggctgattcctccggaga

SEQ ID NO: 465362 - DNA, 122 bp, Homo sapiens
gtcgtagctccctgacgctggggcgcaaccccttcgctcctcctccccgctggccgcggccgggcttccccagctcttgctgcttcgggcctgtgacttctgcaaccccgggctgggggccg

SEQ ID NO: 465363 - DNA, 122 bp, Homo sapiens
tatataagtaatcctatcctctagagttactctgtagtttgctagctctttaatatgtctcgtttgatcccccaacagccctatgagttagagcaactagagttatcttcattttgaatata

SEQ ID NO: 465364 - DNA, 122 bp, Homo sapiens
gctgtcgttgtttggggttttggaaaattctcttctgagagggtcagaacaaccctgagtcgtgaccagggccagagctcaagctactcagggaaaccgcggtcccaagggtggtggggtca

SEQ ID NO: 465365 - DNA, 122 bp, Homo sapiens
gccatctgcagagttatgtcagatttctccccagcatcggagttaccaggctgttcatatcgaatcaaagcagagggaggaggagagcgagaggcaggagatctatctgcattagctatgct

SEQ ID NO: 465366 - DNA, 122 bp, Homo sapiens
ggaactacggacagtgagccctggcgctcgctgccctgcgccttaatttgctggcggcggcgatcccggaggcccgcagccagtcagcgccgtctcacgtcaccgcttcctgattccgccgc

SEQ ID NO: 465367 - DNA, 122 bp, Homo sapiens
gcacgcccccccacgcccggacgtgccctctccgcgcgggggactcgcctaggtctcctacgtctgcccctgcccggctcccggcggccccagctgtcaccggtaaggaggcggcaggaggc

SEQ ID NO: 465368 - DNA, 122 bp, Homo sapiens
gaaatcagctccacaatcagagatagttttaatgcccttgaattattttgtgatttagctcgtactatttatcacatcttttggatttgaagttttaaaaaatgggcagtttgatcaagtat

SEQ ID NO: 465369 - DNA, 122 bp, Homo sapiens
tggatgacttggagttatggaattccagctccgaaagcctggcttccagccggctcacctcgacgtccagctcgcgcttgctgcggctctcctcctccaggctgctcttgagcctctggatc

SEQ ID NO: 465370 - DNA, 122 bp, Homo sapiens
cgaactcctgacctcaaatgatctgcctgccttggcctcccaaagtgctgggattacaggcgtgagccaccacgcccggtgctgatggcatttggaaccaccctgtagttacatacacaagt

SEQ ID NO: 465371 - DNA, 122 bp, Homo sapiens
ctgaacatgtttgcatcaacctactggtgatgcacctttgatcaatacattttagacaaacgtggtttttgagtccaaagatcagggctgggttgacctgaatactggatacagggcatata

SEQ ID NO: 465372 - DNA, 122 bp, Homo sapiens
ttgccacttttttggaactacctccatttttcttaaacagcaataaagcaaaacagggaccgccgggctgcagcccctggccccggagatgacggctggtgcccgtgcttgaggcgtcaggc

SEQ ID NO: 465373 - DNA, 122 bp, Homo sapiens
tcctggaaacgtggtggtggcagtgggggagccagcagtactggaatgcgtgcccccccgcggccacccggagccttccgtgtcctggaggaaggacggtgcaagactcaaggaagaggaag

SEQ ID NO: 465374 - DNA, 122 bp, Homo sapiens
gcctctgccccctcaggccaggggtctggatgcatatagcgttcccctagcctctttccccggggagaatgtaggatacaggcccagcctcctggcctttctccatcagggactcagttgtc

SEQ ID NO: 465375 - DNA, 122 bp, Homo sapiens
ttaaatgaaggacacaattaatagcccacctgctgggctaaggagagaatagtgtgatagcgaagctgagctaattctttgatgctaggttaaaagtcttggtccttaacctcatttcaaat

SEQ ID NO: 465376 - DNA, 122 bp, Homo sapiens
atccacatggtctccccatccacgctagaaattgatcccaaacaccaaccgctgcatagacgtcggcgactttggtctgcaccccccgaacttggtgatacctcatcaagccaaacccctcc

SEQ ID NO: 465377 - DNA, 122 bp, Homo sapiens
cgagcagttaacgttaaagcccgctctgtaccaccgcggatgtgactgctgtaaataccacggggcagggctctcatgcttcagaaacacgtaagcaagacgcaccgagccagccccggaca

SEQ ID NO: 465378 - DNA, 122 bp, Homo sapiens
gctgctaacagtcccctgctcctccgaggactttctcctcttcctgtgactggtctcccccgtaccttccccagggagagccatgagactcaactgggcctgtagctactggttctgcttcc

SEQ ID NO: 465379 - DNA, 122 bp, Homo sapiens
aaggaatcctccgaaaagcgatggaaagtgacggagaaaggcagaagcaaacccactgggcgccaccccactcccgtgtcccgagacgcccccggccccgcccatactccctcccggctccc

SEQ ID NO: 465380 - DNA, 122 bp, Homo sapiens
catctccccagagggaccggccatggccctggtcactgtggcatcttcccagagcaactgcgtctcgctgcccagggaggtgattccatttgtgatcagtgagagggagagggaataaagtg

SEQ ID NO: 465381 - DNA, 122 bp, Homo sapiens
cccctccgacgggcaggtctccttccgaggctagtgtcacctccactccacagaggaaaacgtcagtctcggaaggagtttgctcagggtcatccaatgggggcccagaaacacagctgggc

SEQ ID NO: 465382 - DNA, 122 bp, Homo sapiens
tttggcaccacccctctgagggtgccctctgaggccccatcccaggggctgcggggaagccgggcctggggaccccctcccaccctgggctgagcccccaccccactgcctgtgctgcctgt

SEQ ID NO: 465383 - DNA, 122 bp, Homo sapiens
gaaaggtactttggaaaatctgattgaataaggaaaaagaaaaaaaagtatttgtgagctcgagagaaatgtagggaattatacaagggtttcttgaacactttgtgagttcaaaaagtttc

SEQ ID NO: 465384 - DNA, 122 bp, Homo sapiens
ctaacttcccccttcgctccgccctcgagccaatcaacagcctctaatctcctctggccccgcctgcaagcccgccccggcccagtcacaggcttggttcgcccaggccccacccccggccc

SEQ ID NO: 465385 - DNA, 122 bp, Homo sapiens
cgagaggggggtgctgaggatttggggctaccctcggagcccacaaaccacagacacccccgtccccagccttcacccacctccccctcgtgcctgtggtccacacacccaccacggtagca

SEQ ID NO: 465386 - DNA, 122 bp, Homo sapiens
ttagcctcaaaatcacaaactcaaaatgtaggaaagtgttcagagaaatgtgggtactggcgcttagtagtactgtgagcaggatagatgattttctaaccgctaaccttaaatactctgat

SEQ ID NO: 465387 - DNA, 122 bp, Homo sapiens
ccatcaaagttcatgacgtgaacgacaactggcctgtgttcacgcatcggttgttcaatgcgtccgtgcctgagtcgtcggctgtgggtacgttgcatgcccactctgtcctcctccctccc

SEQ ID NO: 465388 - DNA, 122 bp, Homo sapiens
ccggctcctcccagggctggattccatgagcctctgtccttccccttcgcagagctgacacggggagagtggtcataagctggggcgtaaatgactgaggacggcccgggggccagtaaaca

SEQ ID NO: 465389 - DNA, 122 bp, Homo sapiens
ttttcaacaaatcccagctcttgttcttttgttgcttcattctttctttgctttgctgggcgttttgtctaattctttgttcaaaacgccagtaacctggacagcttgcagtcaagaccccc

SEQ ID NO: 465390 - DNA, 122 bp, Homo sapiens
aggatggatgaaccctggtgcagcccactgcaggccgtggcagccaatgggagccgaaggcgggggtggcagggctgccaggcctgcacacagggctgcattgaccaagcagccccggggac

SEQ ID NO: 465391 - DNA, 122 bp, Homo sapiens
gccttttggtgtttgttctccgaaaggcgggaaaagcgaactacacctcccgactggccgcgcgcggctgcgcctgcgccctgttacctgtcgccatcttgccccttcagaggcaccgcaaa

SEQ ID NO: 465392 - DNA, 122 bp, Homo sapiens
atattccataggatcatagtgaaatcaccttctgaatggagtatttatagctggcactgccgggcagttatcttgtctagaattatatccaaattttgctcaatcattctgggaatagcctt

SEQ ID NO: 465393 - DNA, 122 bp, Homo sapiens
tctactttccaaaactatttaacagtttaaattctacccagcaatgtgtgaaaagaccatcgctctgcattatttcaagcatcatatgtatgttttattctttcttaattcttctcaataga

SEQ ID NO: 465394 - DNA, 122 bp, Homo sapiens
cgctggtccaggggcaggtactcgccctcctgggtcatgtagggcttgatgagctgggcccgcacgtgggcctccacaatgtggctcttgcgcaggttgcccacgcgccacatgaggcagag

SEQ ID NO: 465395 - DNA, 122 bp, Homo sapiens
ggtcgcaggctgccggccagtcgggctggtaggtcacgagctgcacgcggcacaccagggcgcccagagcctcgcagtcctcaacgtcgcacaggtaccgtgcagccagcacgttgcccttg

SEQ ID NO: 465396 - DNA, 122 bp, Homo sapiens
aggatcttggcctctctgtgaggtttatgcaccaatgctggcagccctgggcaggggcctcggcctcctttttgttttccacttcagacaggtaccgtgcagatgttaacaaggtttgagcg

SEQ ID NO: 465397 - DNA, 122 bp, Homo sapiens
gccaggacgggctgggtgggcagactggcgcaggggcaggggcactcactgggcggccagcggtgccgtgatggagcgcttcatgagcacgggcagcgtcagcaactcgctcagctgcacag

SEQ ID NO: 465398 - DNA, 122 bp, Homo sapiens
ctgtacactgtcctgaaattctctcccctggaaatcctcctgctgcttcgaatgtgaatccgtgtgcattcccagagaggaattcatgtaaacaagcctaccccaaacccctcacatctcag

SEQ ID NO: 465399 - DNA, 122 bp, Homo sapiens
ctactgccttctcccaagtaggggcctccagtactgccacagcaggggccgcattcctggcgcctcttcattcgaaaaacctctttccaggagacttcgctgattctgaacgaatactttaa

SEQ ID NO: 465400 - DNA, 122 bp, Homo sapiens
agaaatggagagagacagattcttcatggcgtgatttgaacatctggatctgtccatgcccgaagccaaatactcctgactttcaaattaagtgagccgataaaccctagcctctttatttt

SEQ ID NO: 465401 - DNA, 122 bp, Homo sapiens
ctctgaagtttgcctaagatggacctgataaggggagttcagtacacatcagtgcaggcccggccagggggtgatgatggcagttcctgggcagatccagctggctttagggtaggaggggc

SEQ ID NO: 465402 - DNA, 122 bp, Homo sapiens
tgctccttgaacatggggcactgcctgttgccatgtctctgtgagcacctaagggttatacgcggaggtaccaaacacaggacccttgagaaatgtcagccttgtcatgtaatggcatgagg

SEQ ID NO: 465403 - DNA, 122 bp, Homo sapiens
aactgcatctatatctaggattaagaggccaaaaccaaaatatcttcatgaacctttgaccgtaagtttctgtttttgtgctctcatttacttgaagttatattttttctaatttattgaca

SEQ ID NO: 465404 - DNA, 122 bp, Homo sapiens
ctcatttcacgggattgggttctcctaacttcattgtttggtgagttgctttgctttgctcgttgccccgatcttctgtgtattctgcgcagaccccgcaagtgctcctgcactccctccca

SEQ ID NO: 465405 - DNA, 122 bp, Homo sapiens
gtctctcagggatgagcctgccggagtcggcaccggttttagggaaagcgcggccagagacgattggttcgcttgtcagtgttgggttttgttttgtttcgttttgtttttacctattcatc

SEQ ID NO: 465406 - DNA, 122 bp, Homo sapiens
acaatcactagggaagtgacacagccgggaaactccgcccctcacacccccgcgcgctcgcgccggccgcagccccacagctcgccccggccgcagccccacagctcgccccgcctctctcc

SEQ ID NO: 465407 - DNA, 122 bp, Homo sapiens
cccaggtccctgacgtcaatcgcctggtctctagactcccaggcggggcccgctttagcccggtcctaggggcttccccaattgccagggcaaccgaagccacgtctctatggcaatggggg

SEQ ID NO: 465408 - DNA, 122 bp, Homo sapiens
cccacgaacctgcgctatggaggcctctctaggagggccggagcccaacggagtcataaacgaagaggcgaaagcgggagctacggggaagcgaagaggaagggcgccggcaaatgggggca

SEQ ID NO: 465409 - DNA, 122 bp, Homo sapiens
tggacgccccaaaagcaggtcagtttcgggcctccgagctgggtctggcagttggaaacgcgcgctgcctaggcgccgaattccttgcttttctcgcctggagtcgctcggcaggcgcccag

SEQ ID NO: 465410 - DNA, 122 bp, Homo sapiens
aaggcggggacggcggggctgcagcgtgtgggccacgacgctaggccggttcctcaaaggcgcggcctctgtacggagcagggtacgcagcgtgtgtcgccccatttgtgggggccgcggag

SEQ ID NO: 465411 - DNA, 122 bp, Homo sapiens
gcagtagcgaccgcgccctcaggcccacaagcccgaaggtctgggcagggtctggaatggcggtggagacactttatccgcaggcgtttcacctcgcgccccacccaggcgcacaccaagtt

SEQ ID NO: 465412 - DNA, 122 bp, Homo sapiens
agcacccagctcagtggcctgccttgtgcacagcaggtgtgcgtctttgtttgctgaagtcgtcacttctggtaggcagcagctacgtctcagtgtcagggctgtgtgagcacctgcttcga

SEQ ID NO: 465413 - DNA, 122 bp, Homo sapiens
gcggggaggagccgcctccattggccggccccgcggcatcacgggagctcgcggtgcgcccgggtggcgggctgctttccacgcacctgcacctgcgcagccctccaaggcgctcttttgga

SEQ ID NO: 465414 - DNA, 122 bp, Homo sapiens
gtgcacccacctgtggatcccctggcgctgaacatctgttggaaagctcaggtgtccttgcgtggtcctttccacgttggggaaagctgctcgctggagaacttcctcccgcgtctttagta

SEQ ID NO: 465415 - DNA, 122 bp, Homo sapiens
ctggagggcgcattggtgtgcagagtgtagcggctggtctggccctgggaaccccagacccgcgaagctggagggcgcactccccggcctcagagccccaaaccggaggcgctgtccaaacg

SEQ ID NO: 465416 - DNA, 122 bp, Homo sapiens
cattgtttggttgagtgtttatctttttcaattctgtatttactcttctgttcaaaagcccggggcaactgaacaaaaggataatgcttcatatctcacttaagagtagaaattacagttca

SEQ ID NO: 465417 - DNA, 122 bp, Homo sapiens
ggatcacttagcagccttgtgtgggatcggtgagatcttctgtgctgatcttggagaaaccggagcgcctgcagcgtattgacaccagaatgaacaagcgccgctgcttcccgcttccgctt

SEQ ID NO: 465418 - DNA, 122 bp, Homo sapiens
agatctttaagtttgtgcttctgtcttttgacaaaggttcacaacttctccagccctccacgaagaagctggaaggagcagggtgcacaggctctttgaagatgctgagtgaggtcccaggg

SEQ ID NO: 465419 - DNA, 122 bp, Homo sapiens
ccaccccgaccggtcggaagagtgcgactgagtgttaagtgtgggtgtgggttgcttaaacgtgtagcggtgagttaatcacagaagtacattgtacaagaaaatgcacttgaatttggaca

SEQ ID NO: 465420 - DNA, 122 bp, Homo sapiens
ccgggccccacaggatccgtgcgaaatccggaacctcgctggcgatctgggttttttgcgcgtgggagtaaacatttcccaagtccctcacactctgggctgctagtgaggttctgccagaa

SEQ ID NO: 465421 - DNA, 122 bp, Homo sapiens
ccattgcaagttccaaacattgtgcaataatttggaaatccagttaacgatgggaaaaatcgagccactcagagtcggcaacttgcaagagaaaagtcaagaagcggcacccgcacgcacgc

SEQ ID NO: 465422 - DNA, 122 bp, Homo sapiens
ctgaccatggggtcaggtttctcatgatggtttggcaccatccctttggtgttgtccacacgatagcgagtgagatctggtagtttaaaagtgtgttgcatccacccgtttctcacacctgc

SEQ ID NO: 465423 - DNA, 122 bp, Homo sapiens
atatttgagggaggagtggcatttgtgtaatatttaacctgatctttctgccacataccccgtctatgtgtgtgccttgggaataggccagtcattgcttcattgaatcattgaatcatcct

SEQ ID NO: 465424 - DNA, 122 bp, Homo sapiens
tccacagggccgggggctgctcgggttccttctccgcagagcccagggatgcgacaagtgcgaggggccaggccagcagcatcatggcagcggcaaccaggagccggaccgggaagagcgtc

SEQ ID NO: 465425 - DNA, 122 bp, Homo sapiens
tcagtacctagactgagaggcccacccatctcacagagcagctctgagcaaaggcaagagcgctttggcctttgagcagtaggacttgctcctaatctgcaatgtcagtattttcttgtgtt

SEQ ID NO: 465426 - DNA, 122 bp, Homo sapiens
tgggattcatccaccgacccgcagaaacctaccctccaacgctccccgcaggctccgctccgtggccccacctcctgaggccccgccctaggaacctcacctctcgaagccccacctccccg

SEQ ID NO: 465427 - DNA, 122 bp, Homo sapiens
atgcctgtgatcctagctacctgggaggccgaggcatgagaattgcttgaacctgggaggcggaggttgcagtgagctgataatcgcaccactgcactccagcctgggtgacagagcaagac

SEQ ID NO: 465428 - DNA, 122 bp, Homo sapiens
ggcttccaccagcagcccctgagcagcctccagctgcggtgatgggtgtgtgagacctaacgggctctctctgctgttaacttaggctacagcctggggacttgcctgtccacttacccaat

SEQ ID NO: 465429 - DNA, 122 bp, Homo sapiens
aggggactgacctattacccccaccccaggagctggtgctggaacctgcgcagaggcgggcgcgcctggaggggctacgctacacggcagtgctgaagcagcaggcaacgcagcactccatg

SEQ ID NO: 465430 - DNA, 122 bp, Homo sapiens
ctccctgaccccttgcacttcccaagtgaggtaatgcctcgccctgcttcggctcacgcacggtgcgcgcacccactgacctgcacccactgtctggcgagatgaacccggtacctcagatg

SEQ ID NO: 465431 - DNA, 122 bp, Homo sapiens
gcgggtgggtgggggggagccgaggaacacggcgaggcgagcggcgtcctgaatgcgagtcgtgtgcgtcttattatcaagttaattaaagctagcatctgacaatgtcactcggctgtaga

SEQ ID NO: 465432 - DNA, 122 bp, Homo sapiens
gtgtccgtcccgcgcgtccgacctgtgatctccgagtgggtgcgtgcgcctgagaccgcgcggtgtgtccgagtgtccgcatccacgtgtccctacgatcgtgtgcattgcggggcatccac

SEQ ID NO: 465433 - DNA, 122 bp, Homo sapiens
tgctgggtcaccagtagaatggacccttcctccacctcagttcagagcacagtgatgattcgtgactttctttcccaatagaacttcaaatctctgaagacggggggtggggggatgtgctt

SEQ ID NO: 465434 - DNA, 122 bp, Homo sapiens
ctccccatcctcgcttcctagctgccgccccgaagagtggctggggagcaggcatttgtgcgtcttgcaagcttcgacagataggaagtcccaggcggggactgtgacccccgccgctgccc

SEQ ID NO: 465435 - DNA, 122 bp, Homo sapiens
tctgtgcatgtggagtcgcacagctcagcctgtccctgacatgtctctgtgctttgtaggcgggggcacgaacagcatcaccgtgaggaatgccacattcacctgggccaggagcgaccctc

SEQ ID NO: 465436 - DNA, 122 bp, Homo sapiens
ctcagctgctgggcgggggaccggggggttctccccgccagggctccccttcccctcttccgttgaccccgaaacccatcaggttgacccctcggcgtttcagaatccggctggcccgagtg

SEQ ID NO: 465437 - DNA, 122 bp, Homo sapiens
aggggtcaggaagttccctttccgagtcaaagaaaggggtgacggacgcacctggaaaatcgggtcactcccacccgaatattgcgcttttcacaccggcttaaaaagcggcgaaccatgag

SEQ ID NO: 465438 - DNA, 122 bp, Homo sapiens
aaagaagtacagcaatgtacagaatcagaagtatgagggcactgaatagaaaataattatcgtattttttataatgtcgattttgggagaagtgaggatatggcaagtaattgaatgggtgt

SEQ ID NO: 465439 - DNA, 122 bp, Homo sapiens
ccgccgccgccatgccggacagctgggacaaggatgtgtaccctgagcccccgcgccgcacgccggtgcagcccaatcccatcgtctacatgatgaaagcgttcgacctcatcgtggaccga

SEQ ID NO: 465440 - DNA, 122 bp, Homo sapiens
cgcccggcttagcctcctctcctcggcttctgtctctcgacgctcgtccgccagtccggccgggaatctcccgctgcggggctccaaaccccgcccccggagacgacacctgggccgggcag

SEQ ID NO: 465441 - DNA, 122 bp, Homo sapiens
tgatttgtttacccataagcagcccgttgttctggatcacacaccaggcagagcatgactcgggaggctggctggtaagcaggaactagatcatgcaaaaccatatacaccatggtttgaac

SEQ ID NO: 465442 - DNA, 122 bp, Homo sapiens
cttgcgggagtccacggccagctggtcgaaaagtgaggatcttgccccctgccctgaggacgcggctgcgggccaggttggtcacactcagcacacacaccttcagtttgggcacctcctga

SEQ ID NO: 465443 - DNA, 122 bp, Homo sapiens
aatggaccatgttctttcttacttccaaatctttgagtatgtggttctgtcttcctacttcgttagtctactttactctttcttagctccagttctttcactagctcttaatataaatccct

SEQ ID NO: 465444 - DNA, 122 bp, Homo sapiens
ctgaggacagtcactgaagtgtacctgagaaggtggggatgaccctggatggcagatgcacgcggatgcatgttccgagctagggaatctgggttggccaaccccgagatccgttccttgtc

SEQ ID NO: 465445 - DNA, 122 bp, Homo sapiens
aggagacccaagcccagcagacaccatcaaggccaatcagggccacatccccgccgcacccggcgagacaggaagcgtgatttgctggtgtgatcagtcagttgcacctccccgccctgcag

SEQ ID NO: 465446 - DNA, 122 bp, Homo sapiens
ctggtgcgatgcacggacagacaagattgaacggatcgacctggagacaggtgagaaccgcgaggtggttctgtccagcaacaacatggacatgttttcagtgtctgtgtttgaggatttca

SEQ ID NO: 465447 - DNA, 122 bp, Homo sapiens
agcagcgcggggagaagaggttgtggtagtccttttcacagtagggctgtccatcccgctcgaagaagttccgggatccgatctcctcctggcagtgggtgcagacgaagtgctcggggtgc

SEQ ID NO: 465448 - DNA, 122 bp, Homo sapiens
tgaaaccagcctaacacgtggaaggccccagggccacgccattcagtgtgatttcagcgccgcgttaatggggggaatgtcgcttcccggctggggcccctgtgtgtgcggcgtctgcacgc

SEQ ID NO: 465449 - DNA, 122 bp, Homo sapiens
cggcagacgccaggctgaccccgctccagtttgggaacctgcagaagttggatgggcccacggagcagtgcccggacccgctgcccttgccggccggcaactgcacggacgaggtgagtccc

SEQ ID NO: 465450 - DNA, 122 bp, Homo sapiens
gagctttcagcacggcccagaccagattactctgtctcacaaccactttgctgacctgcccggggggccaccgaatactccccgagcgcatactatttacagaagagtcaagataagccgga

SEQ ID NO: 465451 - DNA, 122 bp, Homo sapiens
agcttgtcttgtctaagcctgcccctttccctgctaacagtgcttcaattgttaacaagacgtttatgtttccacaagtcttttctgagtcatgggccccagtgtttgacatggtgagatag

SEQ ID NO: 465452 - DNA, 122 bp, Homo sapiens
aaacgtgtcccaagcctgcctccgagtctctcgggcggtcgcatccacacactcgcacgacgatgacctgcttgcatcaaacctgcacacatcacgaacaggcgccctccatcacacccaat

SEQ ID NO: 465453 - DNA, 122 bp, Homo sapiens
actctagtttttgtttagcattcccctgtccttagggcacaaaaaccttgtggaagtattcggtggtacacatgaaggaacccgggctgggtgtctgtccacctttgtatttagtaaatata

SEQ ID NO: 465454 - DNA, 122 bp, Homo sapiens
catctccaagatcttccccgggctggctgccgaccagagccgggcgctgcggctgggcgacgccatcctgtcggtgaacggcaccgacctgcgccaggccacccacgaccaggccgtgcagg

SEQ ID NO: 465455 - DNA, 122 bp, Homo sapiens
cctacactccttgaacctcaggcactgacggaggcattttctaaagaacagtgacaaggacggccagtacctcccccgcagtctgactcaagctactcctccaccctcctccccagctggcc

SEQ ID NO: 465456 - DNA, 122 bp, Homo sapiens
gagatcaattctggcccactacgggtctcagaccagaagcaggcctgagagaagtgtgcccggatcccctaggctgggggacccagaggagaggagcctccctctcgccaggtccactccca

SEQ ID NO: 465457 - DNA, 122 bp, Homo sapiens
ctgcgctctgccctctgcgggcccggcactcggcctctagactctgtggcgggtgggcggcggccgggaggagatgtgcccggctccctccaaaggaccctcagatctgtcagtctgcggac

SEQ ID NO: 465458 - DNA, 122 bp, Homo sapiens
cccccgtgtgcgccctgaaaggtccccgcaaaacccacccctcccgtggagtcgcctcctcgagcccttcatgggtcccagcagctttcctcgcagacccccgccctttggccccgaagccc

SEQ ID NO: 465459 - DNA, 122 bp, Homo sapiens
aaaatagtcttgtgggaggggcagtttctgccccaggattagtaagagacagccagtgagcgacagcagggagcctagtcattatctaccctctccacctctcttttcctgccctctgaagc

SEQ ID NO: 465460 - DNA, 122 bp, Homo sapiens
aacccagcgccgaaggcgaggtgggcgcgggccgaaggaggtcctgggaggtcggcggcgcggagggatctccgcgggagccgttggggctgttggcctcgggctgaggtgcaaggaccagg

SEQ ID NO: 465461 - DNA, 122 bp, Homo sapiens
aaacgtgtaacaggaattgtccgttcccatggccagtcctcatgtagagccacaagatggcgcagaggatgacatgaaatcatgtacgcgagcgtgatttgctactaggcagctctgtaggg

SEQ ID NO: 465462 - DNA, 122 bp, Homo sapiens
ggattccacctccttccctcctgggtgaggagcgggcagcgtggataattccctcggaggcgccccaacccaaatctacatacataaagcccaggctggcgttttgagtgatcggtttatta

SEQ ID NO: 465463 - DNA, 122 bp, Homo sapiens
gaagcaaagagtactttgccaaggtctaggaaagggtagaagaggacaaggggaagcttccgtgatgaaataagaaatttaatcactgtgtttctaagaggtcttttatttatatcttaaaa

SEQ ID NO: 465464 - DNA, 122 bp, Homo sapiens
tttttccttcaacagaccattagaatgtgacctctgtgaagacaacagaaatggaggaggcgatccatgggcatcttctgaagctgttttggttaactttgatttggaagtcctggttccag

SEQ ID NO: 465465 - DNA, 122 bp, Homo sapiens
attcgtcctcttcttcttcaccttcgtcaaaattgtcatcatcctttaaggcctccccagcgaagtacagcacagcctgtggtccgctcacggaaaaagtgtccaatttcaaaatcagaggc

SEQ ID NO: 465466 - DNA, 122 bp, Homo sapiens
tctggagggggctttgcagcttttagagagacacacaccgggagccgaggctccagtctccggccgagtcttctcgcagccgcaacccacctggggccagcccagagctgccagcgccgctc

SEQ ID NO: 465467 - DNA, 122 bp, Homo sapiens
caagaggggactgtgagtccaggtgagtgattattatagtttggaataggcagttgggggcgggaggtggtggcagcagaattaaagagaaacgaccagatcccagaggtatgtagcaacta

SEQ ID NO: 465468 - DNA, 122 bp, Homo sapiens
cagcctggacagaacacaaggactgttgctgccctgagcacccgagccaggcatggtgcccgcacctgcccgcccgctgcacccaccttgaagtcgtaggccgactgcttgatgacctcagg

SEQ ID NO: 465469 - DNA, 122 bp, Homo sapiens
gtttgtacaacaattatgtggacaccctatataatatggactctattatctttctgaaatcgattctgcggttccatagcacacactccaacaccacacacaccgagccctggtgctgagtt

SEQ ID NO: 465470 - DNA, 122 bp, Homo sapiens
catgatgagagaacagctcttaccataggagagatattgttgattaattaatttattgaacgtttgttgcattataatgctccaagccctgtgcaagagaaatatggtccttgtcttcatga

SEQ ID NO: 465471 - DNA, 122 bp, Homo sapiens
tggccttctccccggtcggcggcattcccaccaggactctccctagcatgtgcacagtgacgcagaaaccgatgcccagagacagcccccaaagggcgctttgatttatacagttgtaattg

SEQ ID NO: 465472 - DNA, 122 bp, Homo sapiens
atgttacctgaatattcactggaggagcagtgatagggagggaggggaaacggaaccagtcgggtgccaaggcctctccgaagcctgcgactcccgctacagacgtcagggggcgccagagg

SEQ ID NO: 465473 - DNA, 122 bp, Homo sapiens
ctcgtaagagactccgtgggcaggtttttactgggactggtcatggaggcaccctctgcccggcatgtaccaaaatcccaggctcacagaaggaaagcggattcagcataaactgcactgtg

SEQ ID NO: 465474 - DNA, 122 bp, Homo sapiens
ggagccgtccgggcctcgggtggccacagctgccgggtcctcctcccactctgcggcccgcggcccctgggacccgagaaccctgataccgggtccgtgaaatccctgctgctgggctcgct

SEQ ID NO: 465475 - DNA, 122 bp, Homo sapiens
ggaaggattcccaagaaatccttactgatggccacctatggggtgggctcggggcagagccggagggaagctgaaggctttctccctgtaattcacatacatctctatgtggaattactttt

SEQ ID NO: 465476 - DNA, 122 bp, Homo sapiens
ttcctggtcctggacacgggtggggcgggggctccgcagcagcagtggagttgaggcttccgtatgagctcgctcctggtcagtttgagggtggacataccagacatcctgcatcttcccag

SEQ ID NO: 465477 - DNA, 122 bp, Homo sapiens
tggtctccagggaaggcggcagcagccgtgggtggtatggaagcccctgctctgctgcgtcgtgccagagcggactgtggggacacagcagggagtttgccgactttgaggaggaggaaagg

SEQ ID NO: 465478 - DNA, 122 bp, Homo sapiens
atcttaaggtgtgcagtgactaggccaaggacatccggtggttagagaaggacgcgcctgcgatgccagcctcaagtctttgccttcctggaactctgctccagggtcgcacctgcccaaag

SEQ ID NO: 465479 - DNA, 122 bp, Homo sapiens
gggattaaagaaaaaaattcttctctccctgtcacttcaaaaggtcgcccaaccagcgagcggggggtttacccacgactctggctcgcaccccttgcgggcctgcgcaggcggccccgtag

SEQ ID NO: 465480 - DNA, 122 bp, Homo sapiens
cctggggtcaggagtccaaggttagggtgagggctttcccgtggtgttggcagcagctggcgcctgcgccctccgtgcaggagagcagctccctccagcggcttccctcgcgctttgtgcct

SEQ ID NO: 465481 - DNA, 122 bp, Homo sapiens
atacatactaggttaagtctccacaagactttgtatcactgacccccaatccagttatgtcgtcctcagtcttgtgcacatgccacactcattttttcttctagtctttttcctatcataac

SEQ ID NO: 465482 - DNA, 122 bp, Homo sapiens
tgttaagtgtggtttagcacttcactgggctgctgtaagaatcactgggcatgaggtctgcgcaaccactttagattctagagtgatcagaggatcagagccatccacggaagccctggctg

SEQ ID NO: 465483 - DNA, 122 bp, Homo sapiens
aatttacaggttgaggtagggaggggcccaggagagtgtagaaggggcagggggagggagcgtgtcggcaggtcaggctcttctcacagccttcctgctgagcacacacacacaggccgtat

SEQ ID NO: 465484 - DNA, 122 bp, Homo sapiens
ctgtttaaacaacctttggactactctgagcaatttttttttttttttttttttacagggcgtcactctgtcacccagagtagagtgctctctgcagttaagcattttttttttgggtgggg

SEQ ID NO: 465485 - DNA, 122 bp, Homo sapiens
gaccaatgaaattagatgtagtagtcaggctcttttctcctcaggaatgttcaccaacttcgagtcaaacctgcctgcattcagctcctcaagtacacaccccaggtcttttattttcttgc

SEQ ID NO: 465486 - DNA, 122 bp, Homo sapiens
caccgcgcccagccgcaagtgtctttttcatataatgacttatcttattgctggatctaacggtaggtttaattgtagttctttaaggaatatccctactgttttccatagtggttgtgcta

SEQ ID NO: 465487 - DNA, 122 bp, Homo sapiens
gaggcaccttcagggttcccctagaaaatcgagcctcggcccagaccactgagtcccggacgcccccggagggagcctgaaatcctagagtatgacactgagtttcaaaggggagccgctca

SEQ ID NO: 465488 - DNA, 122 bp, Homo sapiens
taattgtgctttctttctggggcttctgccttttgtcaaattaacagctctcgaaagaagcgcatatgttcagctgacctgcagttggacctaacatttctttcccaaactgtcagatattt

SEQ ID NO: 465489 - DNA, 122 bp, Homo sapiens
cggcgcgtccagagttgtttgttcttccaggtgagttcgtggtctccagggcttcaggagcgaagctgcagaccttcacggtgagtgttacagctcataaaggcggtgcggacccaaagagt

SEQ ID NO: 465490 - DNA, 122 bp, Homo sapiens
aattcttcatcccagaaggcattcagatagattcgagatgcccactaagcagaaatatcacggaatggtatcaggagtaaaggagggttggggagagggaaggttttgacgtgctcatctct

SEQ ID NO: 465491 - DNA, 122 bp, Homo sapiens
tcagagagttggaatgcgggcagccgcgcgggggaggcgcggacagctgcgcccggccgccggggagggggcgcgccgctgctttttttaatcgtatgaccacttattttaagagtttccaa

SEQ ID NO: 465492 - DNA, 122 bp, Homo sapiens
acaggggtgggcctccgccttctccgccttctatcggacctttcttcggatggatttctacgtaaactcggaaggcgatcaaatgcaggcggccaacctccagcgcttttttttttcctctc

SEQ ID NO: 465493 - DNA, 122 bp, Homo sapiens
tctcccggaactgggctctcctccgcgccccggttcctgggccctcgacgctcagccccacgcaagcagctgaggggacaggagccctgcaggtccaggcctggccccctaacctcctgggg

SEQ ID NO: 465494 - DNA, 122 bp, Homo sapiens
gccccgggccgggaccaccgcagcgctaaggaccccgccgcgccgccgcccagaccgcaacgcgcccagcactaattcccagcccagtcgcctccggcaccggcacgcatggtcctgcgact

SEQ ID NO: 465495 - DNA, 122 bp, Homo sapiens
aaaacctgctgcacatagggtgcacaatgagtttccatcttcttgcctctttttaaggggcgagaactcagtccgggagtgtcttaaactacagaccttcatgggaaaccttgttgcttctg

SEQ ID NO: 465496 - DNA, 122 bp, Homo sapiens
gaatttcctcagtggcctagcatacaagtgccttaggcttactgtaattcaatccttttgcgaatcctatatccaattacccagatatctacatctaaaaaaagcttgtcttcatcaaactg

SEQ ID NO: 465497 - DNA, 122 bp, Homo sapiens
ccagcccgcaccattgttaacacaggttgaagcctcatccgtccgcacatctgaggcttgcgttgactccttctgccctggaattcttttgtttgctgctgaataaataaactacatttctt

SEQ ID NO: 465498 - DNA, 122 bp, Homo sapiens
cacggtctaataaattcccgtttgtttccgctgggagcagccattaaacgcgccctgacacgtgggcgcaggaacctcccttctacctctggtgttcagagatttccttctcgacccacttg

SEQ ID NO: 465499 - DNA, 122 bp, Homo sapiens
gggcggcgggagggcgcgagggcgtggggatgttggcagcggggtctcttgaaagcgtttcgccttccgctgtcccgcgccgggggcctgctgggaagcctgttggccccaaatcggccccc

SEQ ID NO: 465500 - DNA, 122 bp, Homo sapiens
cttgaaagatgagtagggatacttcacgcaggtgccaggtgctatcaggagaggccggggcggcggggcagaggcagagggcagggatcgctgagtgagtcctgcgggcttggggcgccctg

SEQ ID NO: 465501 - DNA, 122 bp, Homo sapiens
agctgcagggaactacggtagcaatagtgtcacggtcactgcggccactgcaacacagtacggtaaatgcggctctaggctcagactaaagcatccgcgcctcagcaggtgacgcacgcaga

SEQ ID NO: 465502 - DNA, 122 bp, Homo sapiens
ttgtaaaccggccttggagtggcggggccgcggtgggccagctgggaaatgagacggcagcggggaggatcccgcctctcccagctcgtcagaatccaggcccaacgggacggttccccaga

SEQ ID NO: 465503 - DNA, 122 bp, Homo sapiens
acagcgcggggctcacccgggtgagcctgttgggggcatggggctgaataaggggccaagcgaggggcggcggggccggccggggtcggcgcgcgggcggggaggatgggtccggccgaagg

SEQ ID NO: 465504 - DNA, 122 bp, Homo sapiens
acccaccttctaatcctcaatgttttgtttaccatactgtcctcaagttcaactctatcacgctggtgacctgtattgccaggcagtagcaataggcctctgggggctctacctaactccat

SEQ ID NO: 465505 - DNA, 122 bp, Homo sapiens
attttttccacttaacaatatatcttggagattgtttatatcagtatacaagcacttccacgctttttttttaaatagctacatcgtattcctgggtaggaaaggacattttacttaatcag

SEQ ID NO: 465506 - DNA, 122 bp, Homo sapiens
gaataaaacaaattcaagatcaacactatctagggatttgggaaggttagatgtatatcccgaaaataatagctagcgagaaggaaatctaagaaaatgtttaccttaggagactaaaaact

SEQ ID NO: 465507 - DNA, 122 bp, Homo sapiens
ggcgaggatcggggctcctgggtggcagcggcggtaacctgggctccagggtaacggaggcggaggcctagactgcactacgaagagaccgcagccaatcatgatgactctacccgagctcc

SEQ ID NO: 465508 - DNA, 122 bp, Homo sapiens
tttcctgggccgtttccattccacgcttatcttcagcaataactgaaccacatcgggatgcgtcgctcatttaaaatcagaactcttccctatgggatctactcccagccactgattgtgtt

SEQ ID NO: 465509 - DNA, 122 bp, Homo sapiens
agttcatctcctcttactatatccataaataccgtgtagctttaaaatgcaccccagggccgggtgccgtggctcacgcctgtaatcccaacactttgggaggctgaggtgagtggatcacc

SEQ ID NO: 465510 - DNA, 122 bp, Homo sapiens
ccgcctggccaggccatggtggggcgggagcctgggggacgcccgactctttagtgggggcgctgaggggtgcacccccccgccagcccctcacagcatctgtatgccaggccccctcatca

SEQ ID NO: 465511 - DNA, 122 bp, Homo sapiens
gcgcgccaccccgtagcgcctgggggcgggagcgggcgagccgagaagctcgtcttggcgcgtctattggctggtactgacgcccatccggaccccgaggccaggcagttggccaagggggg

SEQ ID NO: 465512 - DNA, 122 bp, Homo sapiens
gcctggggtaataatttaaaacaacaaaacctctactcaatattacatgttttggctgggcgcagtggttcacacctgtaatcccagcactttgggaggccaaggcgggcaaatcacctgag

SEQ ID NO: 465513 - DNA, 122 bp, Homo sapiens
taattaaatttagatagccacatgtcactagtgtttggaaagacctgagctggttcagatcgaggccgcagtgtgctggctattctatctctcactcttctagtgagattgttttctcaatc

SEQ ID NO: 465514 - DNA, 122 bp, Homo sapiens
cccagtcagttgctgtgcgccagtggtgtggctggggtgggtggacacacagaggggacacgaggatcagcaggcaagatgtacaaagttggagacgatgcacgctacatgttagaattcta

SEQ ID NO: 465515 - DNA, 122 bp, Homo sapiens
gtcatgataggtggtaatgaggaagctgtcctcctcatgtaatacatgtggccgactgtgcgtgtagcctccctggaggccagtttgggaatctgcattaaatgccttaattaggtgcaaac

SEQ ID NO: 465516 - DNA, 122 bp, Homo sapiens
tcgcctgtccgggctgatggtgcggaatgagtccgcgggcaccgaggccttggagcccgacgccatctcctcagcagcccgagggccgaggcagccgttggccacttttcccgccctcggcc

SEQ ID NO: 465517 - DNA, 122 bp, Homo sapiens
ctatagtcctgggctttctgatgtttttggttcagcctctaacgattttggcctttgtaacgtcagtttttttgaaaagccactttaggaatagaccaaaggggctggtggatacctctgcc

SEQ ID NO: 465518 - DNA, 122 bp, Homo sapiens
ggcccacagaccctgtgtaggaaaagcacttgcccctgcggggcaggccctggcagagcccggtgaggcagtgagggccctgcaggataagtggaaatctccccaggggggatatgggggtg

SEQ ID NO: 465519 - DNA, 122 bp, Homo sapiens
cactcgacggccaggtatacggtcatcagtggtcaccaccataatgcagaaagagccaagcgtcacacgtgaggtgagagcaccgttcgccctgcaggtggagcagatgaaaccccctcccc

SEQ ID NO: 465520 - DNA, 122 bp, Homo sapiens
gcagaggattgtgaagtttggccatgcaggcatctgaacctcacagacagggaagagtttcgcagctgcattctaggtggcccagcctgctaacgcctttgtgaccatgtttgccacacttc

SEQ ID NO: 465521 - DNA, 122 bp, Homo sapiens
gagtcactctgccaattcaatcaagcattgaccacgcggggtcaggaggatcatctcatgcgatctctgtaacaactccgctttccacagcagaaagcaaagacctgggagaggtcgggaca

SEQ ID NO: 465522 - DNA, 122 bp, Homo sapiens
cacacacacacacacacacacacacacacacacacacactgcggaccgggggcccagctacgcacacaccccaaaacaaacgagggatctactcgggaccctcagccgggcggccgggcgcc

SEQ ID NO: 465523 - DNA, 122 bp, Homo sapiens
gatccgaagggggaaatgactctgaggcgcccggacgtcgctcggaagccaatcagagagcgtgacgtcagtttggcgcggagtttggcggccggggcttacagtggcgggagttggaggcg

SEQ ID NO: 465524 - DNA, 122 bp, Homo sapiens
aactttagcccgaccccgcactccctcccccaaatctgcaaagcccgcgcgctctgaccccgccaggacctcgagccctcgctgcgcccccgcgcactctgcatcccgcacctcgagccagg

SEQ ID NO: 465525 - DNA, 122 bp, Homo sapiens
ttccagacccatctgagttgaaatcttggtataataattttctaagtatagttttgttggcggggcacttaacactctctgagttgcctgttattcagaaataaaaaagggtgatggtaatc

SEQ ID NO: 465526 - DNA, 122 bp, Homo sapiens
gtgaggacaggcgctcctgctttcccgcccaaatgttgtattttccaagcctacccttgccggccacgcccccaacctgggcctataaaaaccgccccccgcaggccctagcgggcagacac

SEQ ID NO: 465527 - DNA, 122 bp, Homo sapiens
ctgaaacagactagcagggacccagagcacaacaggcctgtgtttcctgtggtttacaaacgtttttgccttataagcccttggttcaaataaaacgttttacagaagtatcagtcaataaa

SEQ ID NO: 465528 - DNA, 122 bp, Homo sapiens
tatcatctacatttcagatattttgaaagcttttcttcagcctatctctttttccatatacgaatgtcctttttctcttttattactcatactgaagcaaaattactcatactaagggacac

SEQ ID NO: 465529 - DNA, 122 bp, Homo sapiens
ctcctaagtgactggacagggacggaggggcggcggctatggcatccgggacgacagcgacgatagccgaggcaagaaaaagcttgcaccgcagccctgtcgggaaccgccggcgcctgcct

SEQ ID NO: 465530 - DNA, 122 bp, Homo sapiens
tggggaggggccgggcgcggcggtgggtgggtttgaccctcatttgctggaggcgggcggcggaggaggggaggagggggcagtgggcggaggcgggggctgggaggaggtgccgcgagggg

SEQ ID NO: 465531 - DNA, 122 bp, Homo sapiens
cgcccgggctgtgacacatcagcaccgccctcgcggctggggccccgtattgtcctccgccgcctcccaccgcatgcccagcctcgcgtctactcagcccggtggctgtcgcgcgtggaatc

SEQ ID NO: 465532 - DNA, 122 bp, Homo sapiens
aggtcaaagagggaaactgatcttctggaagctctgagaaggctacagtggctcatagagcgccagcggccagcaaccaagcgaacgttctggacaacggggagatgagcagccacaggagg

SEQ ID NO: 465533 - DNA, 122 bp, Homo sapiens
agcagatctagctgaaagtgctgggagaaggtctgtccttctggactggaatatgaatgacgacattgtgggatcagagcctacacttctggagggaaaggcctctcacgtactcaactgct

SEQ ID NO: 465534 - DNA, 122 bp, Homo sapiens
tggccaacaggatgtcagttacttgacagcagggcccgtgctgggctccatgcccggcttcgccagcgtctggcgccgggagcgcaggtgctccaagagtgtgtgttcaatgaattgttact

SEQ ID NO: 465535 - DNA, 122 bp, Homo sapiens
tcctgcacatctcaaagggcgtcagacgtcagcagaggtacgaccacttccttcctccagcgcttcacctcccttctttccagaaagaggaaatgatgcgagtccacaccgcaggccacagc

SEQ ID NO: 465536 - DNA, 122 bp, Homo sapiens
ggaatgtggttgtggatcggaatagacctgtgccagatgaatttcctcagactgcacccgcggcaaatcggtgacccctctgctttaggccgaattgtacatattaactattttccttttcc

SEQ ID NO: 465537 - DNA, 122 bp, Homo sapiens
aggaaacggggccctgcgcgtcgccttgggcccggatcgccttctcaggctctgcagctccgaccctgcgctgttcccgaccggtgtcggccgctcaaaccttcctccgggcccgataccgc

SEQ ID NO: 465538 - DNA, 122 bp, Homo sapiens
agaataacaaaaggcaaccttgcatccggcggaacctgcaggcacgggccattcttcccgcgacccagggctctgccggaccgcttcccccgtcgctccagtcagacgccaaagctggagaa

SEQ ID NO: 465539 - DNA, 122 bp, Homo sapiens
tcattcctggggaaggtcaaggtctatagtgtgccttgtttcactttagagtcaacatctcgctatttggggggaacggactttagaacagaaaaaaatagctgcttgggagaaagagtttc

SEQ ID NO: 465540 - DNA, 122 bp, Homo sapiens
agcttgctcagtaggagggtgtagatgacagccacttctcagtgcctgagaggattaaatcgataatatagtgtgtgaagtctcctgagacagagcctggtacatggtagattcccaaactg

SEQ ID NO: 465541 - DNA, 122 bp, Homo sapiens
atagggtttgatactgtctgtggtttcaggcatccactgggggtcttggattatattcttcgacgacaaggggggattactgtatatggtgacaaaaatatacatgaacacatgcaggaagg

SEQ ID NO: 465542 - DNA, 122 bp, Homo sapiens
tgaaaaccaggtctttccaggcacgctcagtgttgatgggctatttgcagagagaccctccgaatacaaagcaacatgctattctaaagtgactggggcccgggtgcggtgactcatgcttg

SEQ ID NO: 465543 - DNA, 122 bp, Homo sapiens
taggccagaagcctggggctgaggacactcctgcgggagcgtgaggatagcctctcttcccgccctatttgcaagctcagatgtctgttcattcactagaaagccaccaaggctccatggta

SEQ ID NO: 465544 - DNA, 122 bp, Homo sapiens
gaggccaacacgggtagatcacttgatgacaggagatcgagacctacctggccaacgtggcgaaaccctatctctactaaaaatacaaaaattagccaggcatggcggcatgtgcctctaat

SEQ ID NO: 465545 - DNA, 122 bp, Homo sapiens
ctaaaatgtgtgtagtcaacaaatgctgtgaagctacattcacaatttgtatggatgagccgtctgattggaataagactcagatgtggaaggtacaagctcttcaagatgagtgacccttc

SEQ ID NO: 465546 - DNA, 122 bp, Homo sapiens
ccccgccccgtggttggctcagagaggccgaggcaggagcagctccgcgggccttgagggcgtgtcaggcggctgtgttccttcgccacgcaggcgccccgcgccttttcccgcagctctgc

SEQ ID NO: 465547 - DNA, 122 bp, Homo sapiens
gtcaggatgatcccgatgaggccgtggactgcgccccacctcctctgtcttcctgagcagcggcctgacttgaagcccagggagctgcagcgaggcctgtcatgcttccccctcgtgaggaa

SEQ ID NO: 465548 - DNA, 122 bp, Homo sapiens
tggttcaatgatgagtgagctctgacgaggttgcttaacaggattctcaacaggttgaaacgtaagagtagaagagcaattgtattgaaattcttaatggggcttttacacttgtatatttc

SEQ ID NO: 465549 - DNA, 122 bp, Homo sapiens
aaggcaagctgggatgcgcggagtagcgggtggaaagctggactggagttctcactcggccgctgggtgacttcggtgcactagggatagtaacagtaccacctcgtagggttgtagaaaga

SEQ ID NO: 465550 - DNA, 122 bp, Homo sapiens
tgcagtgatgctgtttggggcagggggtgcaactgtcactttttctggtgccctctgacccgacattccaagtcccgaaaggccgaacaggcatcgcacagtcccccctaccgagctggcgg

SEQ ID NO: 465551 - DNA, 122 bp, Homo sapiens
cgcaaaacactgagcatccaggacagaagccaaggcgcttggcttggttgaaggccagtgcgcatgcgcgagtttacccttcgcggactgggcgagctcttgccactcctacctccgggctt

SEQ ID NO: 465552 - DNA, 122 bp, Homo sapiens
ccatttgtcatgctggagactaagaacacatcaggtataatggaattctggcttgggcaacgctcatcatttgttcagacatgtcatcagtttattctgacattctgtgcgattcctctact

SEQ ID NO: 465553 - DNA, 122 bp, Homo sapiens
ccgtgagggcctgggctcctgggtaaacattaatgggctcagtacccagcaggtcatgtgcgcgatcaggggatctttgacctgcaactgctcccgccccgtgtctcctccctgcaggtgcc

SEQ ID NO: 465554 - DNA, 122 bp, Homo sapiens
agaaaaagaagcatggaggtcagaaaccaaaggcatctgagactaagggaagagcaggtacgtgggtttggggcaagaaacaggacacagcctgtagggcccacaaggagcctctgggggct

SEQ ID NO: 465555 - DNA, 122 bp, Homo sapiens
tgtggtaagatcacatgagcacatctgcgtgaacacttgcagccagtgaagtgtggccgacgacgaagaagacaacctgcctccttcacgcagaccgaatggcaacggcatcccctggggga

SEQ ID NO: 465556 - DNA, 122 bp, Homo sapiens
cgatggggcaaaaagccacggcggcgggggtaaaaagtcgctgcgggcaaaaagtcgcggcggcggggacaaaaaggcgcggcgggcaaaaagccgtggcgcaggggggacaaaaagccgcg

SEQ ID NO: 465557 - DNA, 122 bp, Homo sapiens
ctccaagacccagaaacatgtgctggcaggaaagtggctcttcctcaactgcagggagggcgttcccgacggcctctgattcaggctctcaaggtacagaaaccttccaggtaatggatcct

SEQ ID NO: 465558 - DNA, 122 bp, Homo sapiens
acgccaggccagaacacggcgggctaacagggcgctggcctgcgtgcccacctctaggtccgctaatatgtgcccagctctaggtccgctaatgtgctacgcgataactgaaagacagcaca

SEQ ID NO: 465559 - DNA, 122 bp, Homo sapiens
agtggagcgccaggctcgagccgccgagattggagggtcttgggcagggggcggggcgtgcggggcaaggaagcggagacccagacagctgcaggcgcagagagaaatatccaaagacagag

SEQ ID NO: 465560 - DNA, 122 bp, Homo sapiens
cgggccccttccgatgggtctgctggctcaggtgcgggcgatggccggggagccgcgccccgcacgtgactcagcactttccccagagcccggactgcggagaacaatatcctcctccctaa

SEQ ID NO: 465561 - DNA, 122 bp, Homo sapiens
gacgagtaggcggctgccaggttagggaggttcagctcgttatcctcctcgctgcggggccgctcgcccttccagccgtccgcgggctgcgcgctcttggcctcgggccgcgggggcttctc

SEQ ID NO: 465562 - DNA, 122 bp, Homo sapiens
atgatccgtcctggaagcctgtgggtgccatgctccacagaaggcaggaacagacagcgtcgcaggaatctcggggcagcctgtgccaaggtctatctgtcctgaacgcactcgaagaccag

SEQ ID NO: 465563 - DNA, 122 bp, Homo sapiens
tcacctcctctcccaacttgtcctttaaaatatatgtatagaaagaaaggccttaaaaggcgttaaaccacgtttttctaagacaaaagatcagtcttattttgtgacatgtgattcagggt

SEQ ID NO: 465564 - DNA, 122 bp, Homo sapiens
cacggcccgaggatctgcgcctgcccctctcgcaggctggaccaatccagagcaacgatccggggaagctggcctggcctcatgaataattaatgtgccagagccggtccgcaggcggggta

SEQ ID NO: 465565 - DNA, 122 bp, Homo sapiens
gcactgaggtcagaggaccttggtgcctgtgtctactgggcaatgggtgttggcaacttccgccaggaaaatggaacaatttgctctttagctcctaagggcaagtgctttcttgagctttg

SEQ ID NO: 465566 - DNA, 122 bp, Homo sapiens
gacggatctaaataggtctgaattacgctcactcctgatcatgctgaggagccatcacatcggggacttgagaggtcctgagtggcaggacgcagaggcaccgttctgtacacctggtggag

SEQ ID NO: 465567 - DNA, 122 bp, Homo sapiens
actggcatctgccggctttgtgcaggcagccccgacggtttccacagcgagcgccagctccggccagcctgggacagctcatcccagccgactacacctgcttctggtcctgtccacatttt

SEQ ID NO: 465568 - DNA, 122 bp, Homo sapiens
gcctgagagcgcctgtccccactgggcacttggactgagcgtcaagaaccgagggcggcccgtgggagtcttccttccgcggcccgggcgcggttctggcttcatctgcatcgctctggcgg

SEQ ID NO: 465569 - DNA, 122 bp, Homo sapiens
ccaggtcggcaggggtcagggctcacctgaggccagcggtgcggggccgacctgcctgagcgaggagtaatgcatttttaaaagggacattctcgccttcgaatgggcctaatatggtctct

SEQ ID NO: 465570 - DNA, 122 bp, Homo sapiens
tgatggcctctcctaagctgtggtgttcatcagtttaaaaactctaggagttgaaaggaacgttagaggtcatttgggttagcctgctccccagtgcagaaatatttcttactttatcccta

SEQ ID NO: 465571 - DNA, 122 bp, Homo sapiens
aagactctcgcacgcgcacgtgtgtgcctgcatgcactcacatgtgtgtttccaaccggccgacagtgacgcacgtatgccctcgccactcggcaagcacctcgtgctccttggtaaccagc

SEQ ID NO: 465572 - DNA, 122 bp, Homo sapiens
gtgccatctgttggcccacactggaattactcctacgtatatttttacctttcaaaggtccggaggtgagttagcagttttttctgggctacagacaaaaccagtaatccaattttctaatt

SEQ ID NO: 465573 - DNA, 122 bp, Homo sapiens
tttgttgagttctgtgtctgtcctttatagcacctaccagtgttgcatggtggtgggtggcgaattgagctagaccatgtgtggttgaagtgcagtttgcttatcctaagttactcttgttt

SEQ ID NO: 465574 - DNA, 122 bp, Homo sapiens
agttcttcggggtttttccccaggaccggcgggtacggcgggtacggcgagggaccaagccggatttgcgattgggatgcagctgcgtttcaccaggggcaaaaagctcctttcctcctctc

SEQ ID NO: 465575 - DNA, 122 bp, Homo sapiens
ccaatcacagcggacgccgggaatacttgcctgctcttccattggtcgtgggtcacacgacgtgaactggggcggtggcagcacgccaggcctctgacgtcccagggctcaagcgcggagga

SEQ ID NO: 465576 - DNA, 122 bp, Homo sapiens
cagcttcctgagcagcctgtggttgctccagccgggtagagacagccacattccaagctccggggtggcagggaagctgggtagggagttcctacagggagcggcagcccaggctcgggcag

SEQ ID NO: 465577 - DNA, 122 bp, Homo sapiens
aaggaggctgtggcctggatggcagaacaccctgtatgagatagctgtcacatgcaaacacgtgcacatgcagacaggggagacaaggagcaacgaagaagtttgaaggagggggctcaggg

SEQ ID NO: 465578 - DNA, 122 bp, Homo sapiens
atctgctgagaaaaatgctttgagataaacctggagccacagctctctgcacagtcagatcgcaggaacgcggcctagctgcttcagccacgttctcgcggcgccacctggtggccatggac

SEQ ID NO: 465579 - DNA, 122 bp, Homo sapiens
cgtgcgtccaaggccccgcccccgcggcgcgagcccgggcctgagctgggacttgggccccggggcgctgctcctccgcaaccgatccaccgcatcctggcaactgagcaggctccgccacc

SEQ ID NO: 465580 - DNA, 122 bp, Homo sapiens
gtggccactgggcgggcgcgtggagcccggcgggctgggcagcagccgccgccgccgctgcgagtcaacgtggtgctcagcggcctcctcggcaagttgtttccaggcccagcgcgagcgtc

SEQ ID NO: 465581 - DNA, 122 bp, Homo sapiens
tttttgtgcagccaggcaggccctgtactttttctctgcgcgaccctcctcgggcagcaccgggtctcgaactctcacgccttactcccaagcaggttctgtagtccagcccccgcggctcc

SEQ ID NO: 465582 - DNA, 122 bp, Homo sapiens
gaccttagcaccaggggagactaatttagacctcagctgctgaccgggcagagtggaccacgcctataatcctagtactttgagaggccaaggcgggtggatcacctgaggtcaagagtttg

SEQ ID NO: 465583 - DNA, 122 bp, Homo sapiens
taaaacgtttctaattggcgcaggttcttatattacagcagcagggcagacatgtgaccacgaaaagaaaaggcctgtctttaattttttcctgtctttctctggggatttggtggtggggg

SEQ ID NO: 465584 - DNA, 122 bp, Homo sapiens
tctggggaggattgtgcctttatcacatcgaggacgccatgtgtctgaagtctcagaatacggtcctttatcacgtcaggggtgccctgcgtctcaagtctcgcgaggtggtcctttatcac

SEQ ID NO: 465585 - DNA, 122 bp, Homo sapiens
cagccacagcagctgcagccccagcgccaccacccaaccccggcggcctgggccggtgcgcgctctcggggcccagggattggctcgcactccccattcagggaccgcgagggctagcgggc

SEQ ID NO: 465586 - DNA, 122 bp, Homo sapiens
tggcacctacatccatggacggatggatgggtaaacagacatggcacctacgtccacagacggatggatggacgaagagacgtggcacctacatccacggacagacagaaggacaaacagac

SEQ ID NO: 465587 - DNA, 122 bp, Homo sapiens
ttctgcacaaatcccaggaaccccacttcacatcctctatcccaatgctccatctagtggcgtgatgggaaaatgtggtcagatgacttccccagagcacctcgggaaacttctcaggctgc

SEQ ID NO: 465588 - DNA, 122 bp, Homo sapiens
tagctggaaaaaatagccagaagctgtaagctcaggaagtgatgagccagccaagggctccgttcacaacaccctgcacagtgaacagagctgagtaaatggggctgcttagcgaaaatcat

SEQ ID NO: 465589 - DNA, 122 bp, Homo sapiens
ggggtttttttgttattttcccccagtttggttggctccttttccttatctgagccaattcgtgcccagcaggatggggaaatgggctgaaaacgatcctactataatacgcccattattac

SEQ ID NO: 465590 - DNA, 122 bp, Homo sapiens
tttccttctaagtaatataggaagattttgtgttacttttccaatttcatcctgcaaccacggttaaaaatcactactattcacttcttaccatttgatctgttgacagtttcagccatcag

SEQ ID NO: 465591 - DNA, 122 bp, Homo sapiens
gttctacagatctggaaaatgggaggagggatattgaaatgatttgagtacaggatagagcgtaggtgtcaatcacagagaatattacaggagtatatcttggttggtatggtttctggagt

SEQ ID NO: 465592 - DNA, 122 bp, Homo sapiens
gggagggtgggtgagctggctgcgggagccgtggggctcagggtttcggggcgtgtgtgtcggggagggcggggggaggtggctgaagggacgcgccgctcggtgagcgcgccgaggaagag

SEQ ID NO: 465593 - DNA, 122 bp, Homo sapiens
ataatggaatccattctctgaggcaacacttacccatttaccaagattccttcagcctgacgatcctgtctagctttcaaattcagtgatcctatgagtccataaaatgactagcactctta

SEQ ID NO: 465594 - DNA, 122 bp, Homo sapiens
gctgagcctgctgctgggcgcgctgctgggcaaaggtaaggccggggcgggtgcctggcgcgccgacgcatgcgaacttcccggttccgggggagctcggggtgagggcagccgaagcgagg

SEQ ID NO: 465595 - DNA, 122 bp, Homo sapiens
cctcgcttgagcaggctggcccggtagcggccctccagcgtgcagttccagcgctcaaagcggaactggaactggcactcgagcgcactcatgctcacggcctccaccagcgtctctgccac

SEQ ID NO: 465596 - DNA, 122 bp, Homo sapiens
ctataccccagcaagggggctgcgctttagcaagggggctgcacatttatgtcttctgcccgtcctttctttgagtaccaggtaaagacttacaaataattcataaatgaggacgtcagtta

SEQ ID NO: 465597 - DNA, 122 bp, Homo sapiens
ccgctccgagaagccggcagcagagtacccgcggtcgcgccctcgctgcttaacaaaggccgccccgctcggcccgccccctcatgaatagttaacaaacctccagccaatcactggccgga

SEQ ID NO: 465598 - DNA, 122 bp, Homo sapiens
cctgtttatcaaactcccatggtttctttctttcacttgatcggcatgactttttaagggcgtggtctcttgatctgtccctctagttttatttttggagtttctttttttgtcttaccagg

SEQ ID NO: 465599 - DNA, 122 bp, Homo sapiens
aaagaagcggggaagtcggttccaactactcctcgcagccagtcctcgagcgccctctgccgtgtacatgggagctctttgtcttaaccttgcaagcgcttactcctgggtgttgctttccg

SEQ ID NO: 465600 - DNA, 122 bp, Homo sapiens
cctggtggtggagaaggatacaaccatcaatgagatcgaagacactttccggtacggtaccgcgcgaggcctgaacgggcccttctgctgctcggtggagtgcggggcgaggctggaggctg

SEQ ID NO: 465601 - DNA, 122 bp, Homo sapiens
aaaaaggggcccaaggggtggggctgacgctgcagctggcgcagctcaggattagagcagcggagccgcctagcagccaccttcccccgccagtccgcgcgcccgggccggggctaggcccc

SEQ ID NO: 465602 - DNA, 122 bp, Homo sapiens
ggggctgtgacccgggggggtctgcacctggagggccaccagtcattgctgtcttggtctcggcaggctatccggctcctggtgacgacatccactagcctgcagaaggagatcgtggagag

SEQ ID NO: 465603 - DNA, 122 bp, Homo sapiens
tgtatggatttaattctggcctcttgacattatattttcttggacacaactgctattacacgaccctgatttatctctaaatcagaaaatagggaagtattgtaaatggctcattgagagtg

SEQ ID NO: 465604 - DNA, 122 bp, Homo sapiens
cagctctcagtactgaagtccaggcccagtttctggcactcaagtttctccatgacctaacgtctgactctgtgcaacctcaacagcctgtctccacctcctccctttccatctgctagtcc

SEQ ID NO: 465605 - DNA, 122 bp, Homo sapiens
gtgtgtcacctccaggcagaagcagtgaaaaatccatgcctgaaaaaaatcatccattctcggctgggcgtggtggctcacgcctgtaatcccagcactttgggaggctgaggcgggcagat

SEQ ID NO: 465606 - DNA, 122 bp, Homo sapiens
cctctttccctcatcaatgttaggggcagagacacaccgagactcgtagccctacctccccgccagactccttctgcaggcctccaccccggcgtgtcctgagtccacgctttcctaaccca

SEQ ID NO: 465607 - DNA, 122 bp, Homo sapiens
gagggtgagacagaaatattaaggagggttggggagagaaagacaccaagatagcaccctcgggtcgattattacaagaacattaatcctatggtatcagggctctactcttaggatctcat

SEQ ID NO: 465608 - DNA, 122 bp, Homo sapiens
acacacgcccaaacattacttccagttcgctctggcctccaaaccttggcttgctgaaaacgggcttcagctcccagccaggtattctcctgctgcctaattaaaggggcggagccccgggt

SEQ ID NO: 465609 - DNA, 122 bp, Homo sapiens
accgaagcttaaggggattctcccatttggcctgtcctcccctaaagtcaccacctgctgcgtttctgcagcgcttaccatgtgagtttcaggagccccagggtgcaggaaggaggagcgga

SEQ ID NO: 465610 - DNA, 122 bp, Homo sapiens
acagttccacaggcgcaccggaatgcgcctcccctttccacccgccagcattcccaagcacgcctcggcttctgactgttctgtgctttgggaggaaaactcatcttcaggtttttctccaa

SEQ ID NO: 465611 - DNA, 122 bp, Homo sapiens
tgcccaggcccaagcccgttctctgtctcgccggctgtgggatggcagggtgcacagggccgtgctcctgcttctgcaatcccacatcagcctccctcggaagctcacttatccttttggtc

SEQ ID NO: 465612 - DNA, 122 bp, Homo sapiens
ttgccagggtttcatacctgttcatgattgcaacaatgtgctcttcttttggctttcaaacgtcggaattagcaattctttgcctatttttctaatattaaaaccagtttctgcatggaatt

SEQ ID NO: 465613 - DNA, 122 bp, Homo sapiens
ccgcccttacccccagggagcttactgtgagcaagggaaagacagacaatgaaaaggaatcgcagaaatcacatcattacagattatacgacaggtgtcaagaagcagcaaagcatccagag

SEQ ID NO: 465614 - DNA, 122 bp, Homo sapiens
gctagggtttggacaagtcagactcggttgggagaaacgtctgggaaaaggtgtgtcccacgaagattccctgcacacacttccctccggaagtttggtcggcacagctgaacatagtccag

SEQ ID NO: 465615 - DNA, 122 bp, Homo sapiens
aagagttctcctttccacgtaggtcacccaccgatggtaacctacatgcacaaacacactcgcacaatcacaacagagaaaatgggacatacaggaaatggcccgggtggaggcgaggacgg

SEQ ID NO: 465616 - DNA, 122 bp, Homo sapiens
tcccgtggacccacctccgtccggcccgcgggaccagggtgcgggtcctccagccggggccgctcaccagtactccaccacgatgcggaccccactgcccggctcgacctcctcgggagggg

SEQ ID NO: 465617 - DNA, 122 bp, Homo sapiens
tgtctatctctggaccaatcagctgtggggtctgtaacaacatggcagctcccatgagaacggcatggttggagtcagaagaggaagaagcagaactgggcaggtgagctgggaagagaata

SEQ ID NO: 465618 - DNA, 122 bp, Homo sapiens
agtgtggctgggggggcgctgggactccattctgaagccaaaggcactgggaagggcttccgcagaggagggtttggcaggggttgccaggaacagcctggatggggacagggaacagataa

SEQ ID NO: 465619 - DNA, 122 bp, Homo sapiens
atgtgcccctgagggtgggtctctaaaatggcccccttgggtgtggccgtcttctgtcgtcgaaactgtagggatgaaataatccccagtctcccatagcgctcccaggcttattaggatga

SEQ ID NO: 465620 - DNA, 122 bp, Homo sapiens
agctgcagggcctctgacaacggatgcaggaacactgcaaaaggaaacccacagtcaccacggggccccagacacggcaacccgccctgtcagtctgtttgactgtcacgctctattcactt

SEQ ID NO: 465621 - DNA, 122 bp, Homo sapiens
ataaactcaaataatgtgtattgcattcttggtcaaatgcctgatacatggtaagcactccggaaagggtgactttattcactccgtggccagtatgagaataactctagtcaatatccctc

SEQ ID NO: 465622 - DNA, 122 bp, Homo sapiens
gacaggcgctcccgttctgctttctctcggcctcgaacggacgcctcctcctgccggcgccgggctagcagctgtagcttccagtctgggatggtggccatggtcgtcttgaggtgagggta

SEQ ID NO: 465623 - DNA, 122 bp, Homo sapiens
gcactcctcagcccttgagcggtcaatgggactgggcgccgcggagcagggggcagcactcgtcggggaggctcgggctgcgcaagaccccacggtgccggggcagggtggggtggggtggg

SEQ ID NO: 465624 - DNA, 122 bp, Homo sapiens
ggatgaaatgatattacactaggaattgctaaaaaataattagatgaattagtgaagttacggataaaacaggattggccgtgagttggtaattaatgaatctggatgattggttcattaaa

SEQ ID NO: 465625 - DNA, 122 bp, Homo sapiens
tccctggaggggcccaggaccagggttttgtccctgctctgagcacttgggtgctggtaacgccacaggttgtttctggtgctttctccaaagctctgtggcagacagaaccaggggcatca

SEQ ID NO: 465626 - DNA, 122 bp, Homo sapiens
ggaacatggaggggacagtaaggaaataaaagctagccaccccagccagcagcagcaacccgcttgggaccccttccatgctgtggaaggtttgtcatcctgctcttcacaataaaccttgc

SEQ ID NO: 465627 - DNA, 122 bp, Homo sapiens
aggatttgtttaataaagccaaagccagtttatattcccaatacatgtctaaaattcaggcgatttttttcttcaagctttggcattcaaagtatatgttccagaattcttcaaagttaaga

SEQ ID NO: 465628 - DNA, 122 bp, Homo sapiens
gagattttccatgtggatatggcaaagaaggagacggtctggcggcttgaagaatttggacgatttgccagctttgaggctcaaggtgcattggccaacatagctgtggacaaagccaacct

SEQ ID NO: 465629 - DNA, 122 bp, Homo sapiens
tccgtgagcttcatgaagcaacaccgccaagggcctgagcaaagggcgctctgctccactcgagtgaaagcaaaatgctttcggggttgaatcactgtttttcttgactccctttggagatc

SEQ ID NO: 465630 - DNA, 122 bp, Homo sapiens
atgtctgttcgtgtggatgaagtgggaccagcccgggaaggacgctccttcctctcttaacggtgccatctgtcacgatacacggtgtgtttgggctgacttttcctgtgcttctgtaacgt

SEQ ID NO: 465631 - DNA, 122 bp, Homo sapiens
ctctctccactcctctatgctgaggcagtggaggccaggacccagcatcagccttgcctccgaccctgtctccacccacaccaatcaattgtgctccatctttgaactttgaactcaaagga

SEQ ID NO: 465632 - DNA, 122 bp, Homo sapiens
aggcgggaggcggcgggaggcggggggcggggccgcagctccgccctcgggaaatggctccgcctccctcgccgggagctgccttcaggggccgtatgcagcgactccccaccccgcgggcc

SEQ ID NO: 465633 - DNA, 122 bp, Homo sapiens
attcacatgccgcaacacccagcagaaatgagtccctttcacaggggaattaagtcacttcggtataattctcagaaaggactgctgcctacacttgctatttcaaataaaagacacagcca

SEQ ID NO: 465634 - DNA, 122 bp, Homo sapiens
ccttgggtagcagggcttcccccgcgggccctcgcgggccctcgcggtgcccggcaaggacgcgctgtgcgcctgcgtccttccccaccagcgtgaagccacctctcaaagcgctggatccc

SEQ ID NO: 465635 - DNA, 122 bp, Homo sapiens
ctgagggggaagcttagctgagtcagtgaagcacttaaaggggccgaggccaggaggagccgccgttacttcccttctcgccgctctcccgacttttcaccgaggcacgactcttccccctt

SEQ ID NO: 465636 - DNA, 122 bp, Homo sapiens
cactttggagcctaacgagccatcgctgcgtctgagactgggacccggaagtaaacaggccggacgtgacgcaagccgctcggcctagggatggtggctggccgggttgtcatggaaaccgc

SEQ ID NO: 465637 - DNA, 122 bp, Homo sapiens
tgtatttgctgatacacagagagagcaaagattgtagctgaaaatttccctctattgatgcgattcataaggtgtacctcttgtgtgaattatctgattgttttgaaggattaattcagtca

SEQ ID NO: 465638 - DNA, 122 bp, Homo sapiens
gccgttgttgttttcatggagcaggttggagagcttccctgaccctggggcgctgagggccgggcgggagcagacggtgctcccttggttccaggctgtgggcctgtgtgtgtgtgtgcgcg

SEQ ID NO: 465639 - DNA, 122 bp, Homo sapiens
tggggacagggtcagatttcagttcacaagaaaaaacaacttttggaaaccattggcccacgtacagatgctcgacctcctcagcgagagttttctctggttctgagtgagcacagcagagc

SEQ ID NO: 465640 - DNA, 122 bp, Homo sapiens
cctgcgccccggccgtggctctgtggagctctccgtcccagggaaccttctcctggctttcgtgtcctgccccttcccagatttccccacccctctggctgtgccttctgtgccttccccgc

SEQ ID NO: 465641 - DNA, 122 bp, Homo sapiens
tcttactgaatcctgtgggttctcagaacactgtactccaccacagaaaaaccaatctgacggcaaagccaggccacctcctcctaacccctccctccccatgtttgttttagctgggtaaa

SEQ ID NO: 465642 - DNA, 122 bp, Homo sapiens
cattcccaagcagcatggttcccgtgagaaactgaaaactaatttcttgaatctacaatgcgacttccatcttccaggtgtaaccagagtttttcctggagcgattccagcttgtttccttt

SEQ ID NO: 465643 - DNA, 122 bp, Homo sapiens
ggcgtcgtcggggggacccttcccctggggcgggcggcaggtggggggtgtgggcctggccggccggctcgctaggcgcggggtctaggccaggctggggctgcttggaggctgcgccctcc

SEQ ID NO: 465644 - DNA, 122 bp, Homo sapiens
aaaataatgtagtcaatattccccgtatgtttcatgcattcctacctccaagcctctgcacgtgtccttccttttgtctggaatgccctactctactccatccccaccagtcctgccctacc

SEQ ID NO: 465645 - DNA, 122 bp, Homo sapiens
ccatggtcactaggggctgggggggtggggacaaggaggatatggagttaatggaattgacggagttgatggagtttccgtttgggcagatacaaagttctggagatggatggcggtgatgg

SEQ ID NO: 465646 - DNA, 122 bp, Homo sapiens
ccagctgctgccgctgctgcaggcggcgactgcgtccccggaggcagcacgcgaaccaggcggcgcagtcctggaagatgagcagccccaccacgttgaccaacagccccaggacgccgacg

SEQ ID NO: 465647 - DNA, 122 bp, Homo sapiens
aaagtgaggagggtttggcccagaaccaacaggactgggtgaagaatcagctccggccaccgcagcaaatcccaccccacgcgggaacttgaagtccggcacgtaggtcccgcggcggccgg

SEQ ID NO: 465648 - DNA, 122 bp, Homo sapiens
tctcctgggctccaggagggctcagaacagcccacagtgaccagctgagccccgcagccccgtaccccaccagcagccagctccaaggggctgaagcgactctggctgggggagcacgtgag

SEQ ID NO: 465649 - DNA, 122 bp, Homo sapiens
aagaggatcacttgagcccaggagtttgtgaccacccttgtcaacatggcgaaaccctgccgctaaaaaaatacaaaaattagccaggtgtggtggtgcacgcccatagtcccagctactcg

SEQ ID NO: 465650 - DNA, 122 bp, Homo sapiens
ctgcacaagcatggttcagaccgccccctgggcttctacatccgagatggcatgagcgtgcgtgtggctccccagggcctggagcgggttccaggaatcttcatctcccgcctggtacgtgg

SEQ ID NO: 465651 - DNA, 122 bp, Homo sapiens
ttgctctaagtgcctgtttactcccggccacctgggtagtttctttccgggttgggagtgcgcgccagctgcagttgggaagggggcggtgggttggggtgcgggtcggctcgggctcgcct

SEQ ID NO: 465652 - DNA, 122 bp, Homo sapiens
tggcgattcacaggaggggaccgggcggcagggcggggcggggcctgcggggcgcggggccgcggcgcggagccggcgcagcgattgggttcacccggggggccgcgctgcgcggagtgcca

SEQ ID NO: 465653 - DNA, 122 bp, Homo sapiens
actctacagacagaagcaagcttcggggtctgaaagcaatgaacggactacagattgtggcgaccccagccaccacatacacactctcgggggctgctcccttttgagggcctgacgtgggg

SEQ ID NO: 465654 - DNA, 122 bp, Homo sapiens
cacgccattggctcacaagctggccctaccacaccaccaggaggaatatatattgggcaacgactaatagcaatagaaaaactcatgcttctttctcctggcatgacttcatgtatatgaca

SEQ ID NO: 465655 - DNA, 122 bp, Homo sapiens
gatcagttgagctcctctagctggaggaaatgacgagtttaactcctggacttccgcttccggggtgcccaggctcccagaaatcctcgcggcaaaggttaaacacgtgactactccctagt

SEQ ID NO: 465656 - DNA, 122 bp, Homo sapiens
agtctcctccctgtttggaggctcaggtgaatcagtcccctctctcccaccctgcccttgcgctgggctgcctccactctgctcccatggccatatctgtagaaggaggctcttcagtcttc

SEQ ID NO: 465657 - DNA, 122 bp, Homo sapiens
ggatttgaaaattaaggtagatactgttcacactggcaaatatttaagatgaatattaaacgtgtatactaaaatgtttattggtaagtaattcattaaatgggaagatatactagatgaag

SEQ ID NO: 465658 - DNA, 122 bp, Homo sapiens
gcacgaagtcctccaggcccccagaggccacagcctgggcccggtgggccagggaccagccggtgacacttttaagtccaggctggctttgggggagctggaaacaggcttcctctgggtgg

SEQ ID NO: 465659 - DNA, 122 bp, Homo sapiens
ggcgcgtgcgcggggcgggtcctgcggtgggcgaggggcagaggcctgcggtgcgcgggacgcgggcggggagaggggcggggcgaggggcgcgcaggcgcgagggcggcagcgaccgcctg

SEQ ID NO: 465660 - DNA, 122 bp, Homo sapiens
gcctctgcttccctctgtcccaggatccaaggccctgtctctaggagagtcctgggtcctcggggagtggtccagagggcccctcctgtcgtgcccgcgctgaccatctgccccaggacaaa

SEQ ID NO: 465661 - DNA, 122 bp, Homo sapiens
gagcagcccccaggcgattggctagacaatcgaacgatcctctcttattggtcgaaggctcgtccagctccgagcgtgcgtaaggtgagggctccttccgctccgcgactgcgttaactgga

SEQ ID NO: 465662 - DNA, 122 bp, Homo sapiens
atctgcccctctctccatctcgctgctgtgtccagctctctctctcgctcattccttcctcgccatctggggatctccccggctccgtgtcccctgcattgccccgcgccccaatcaccggc

SEQ ID NO: 465663 - DNA, 122 bp, Homo sapiens
gccttacctgtggggacgcccgcagcgccaggagctgccgccttgccaccccacgggacgcgcacctccagccccaatccacccgcgccccgctgcctcttcgcggcgctctcgcagccaag

SEQ ID NO: 465664 - DNA, 122 bp, Homo sapiens
ggcccagaagcataggtcatgcttaggattgcagctggagcaggagaactgaaaatgtcccgttgccccacaactctagcatggagtaagtaatagcaatctacagtgtggggagagaaccc

SEQ ID NO: 465665 - DNA, 122 bp, Homo sapiens
ttttgggaaggcttcattcacactatttcaggcagatccctaaataatttgaatttatagcggtaatttcaacctggactttcagagcactttaatatttgaatattgtatcagaaagagaa

SEQ ID NO: 465666 - DNA, 122 bp, Homo sapiens
agccctggtcactgagacaaaagatacagagacaccgggacacagagaggtacaacgggacgtggagttggatcgagctgtctcgtaaggaatatcggaaggggtggggacactactgggag

SEQ ID NO: 465667 - DNA, 122 bp, Homo sapiens
actcactccccaggctgaggaaagccgggggaactaggggcaggagttctggtttctcatcgcaggtccatcagactctgggtgacagctagcagagccctagccctctcggtgcctcagtt

SEQ ID NO: 465668 - DNA, 122 bp, Homo sapiens
ggagtgagccacctcccttccctgcccgggcctcagggcctgaccttgcctgcctgcctgcgaagtcatatttgaatggaagggacactgctgtagcccaggggtcaagagcctgggctctg

SEQ ID NO: 465669 - DNA, 122 bp, Homo sapiens
atatacaagtctaaagttcaataacatttatgtcccacagtcagactggagttaccaatgcgggagtcttcagcatgcagcaatagcattggaagccaaaaggcggaggagctccccaggga

SEQ ID NO: 465670 - DNA, 122 bp, Homo sapiens
aggcaggggcagagtgggacagaggcagggagggcagggtggtgagcccaggacggtctccgtggcttcctatcgtgcccaggttgccagggatgcagtgagatgcgtctgagagagaactc

SEQ ID NO: 465671 - DNA, 122 bp, Homo sapiens
ggatacttgtgtcattcctttgaggcacggtgggctttccttggttcaaaccatagattacgtttacccgatggtagacgacccttacatgatgggcaggatagcatgtgtcagtcaatgtc

SEQ ID NO: 465672 - DNA, 122 bp, Homo sapiens
ctccggagctctcctcccgggggggagagcagctcctctcgtggtgcggttgcttgttctcgcagccagaacacactgggccagggctgttgtgtgtaaacacacacacgcacacacacctg

SEQ ID NO: 465673 - DNA, 122 bp, Homo sapiens
aaaggcacaccggaagtggaagaactggtaccagaacccatgtctgtctactcccaagtccgtgtttctcctctagaccacaggctctcagagcatagttcccagaccagcaacatctgtaa

SEQ ID NO: 465674 - DNA, 122 bp, Homo sapiens
gggcagggagaggagggcggcgggagcctgagccggaatcgcagcgtgagcaggtggagccgcgttgggagcccgccgggtcgagctgagtaaggcggcgggctcggcgggggccatggagc

SEQ ID NO: 465675 - DNA, 122 bp, Homo sapiens
ccgtggccagcaacagaaggccggcagggagcgaatgcactccagcccctacggtctctccgctctcccagctgagctgtcttccccggaggccggtctgcaaccagagaaggcgccacgcc

SEQ ID NO: 465676 - DNA, 122 bp, Homo sapiens
aggtgccaccagcaccccatggcacttcctgtcctgagctgctcttactcgctctcgggacggtcatgccaaggaagtcccctgtccacagccgggacgccctgggtggtgctcgtggcggc

SEQ ID NO: 465677 - DNA, 122 bp, Homo sapiens
ggattacaggcatgagccaccatgcccggccaggatgttctgaatattaaactagctgaccggtggacattagctgtgctgtggaaaagtgaagcagaatggctttttatcccttgtgtatg

SEQ ID NO: 465678 - DNA, 122 bp, Homo sapiens
gcaccaaacccggtgtctccagggacgggcggagaccagcgggtgggcttgggcagtacgcgcttttctcttccgactttgggccaaagccttgtccggagatcacagtgtctcgctcgggg

SEQ ID NO: 465679 - DNA, 122 bp, Homo sapiens
gacagccccgcgcgcctcgctgggagcacccgggccgaggctctgattctggggggaggccgactccaccctggctggaggaactgggtgctcctgcccgctggcccctcgcgcgtgaggat

SEQ ID NO: 465680 - DNA, 122 bp, Homo sapiens
cgtcctgccggcccctccgtggacgcctgacttcccaggggtgacagggaggccctttcccgggcccctgcggttctgtcttgttctgactgcttcctggccacagcctgatagtgaacttg

SEQ ID NO: 465681 - DNA, 122 bp, Homo sapiens
tgaaggaggttgagaattgtggaaagagccgcgaaagccgggaagctcgtatcctaggttcgacgtctctcctgactgacgggatgtgacactggctgaatcaatgttcccctcctcatctc

SEQ ID NO: 465682 - DNA, 122 bp, Homo sapiens
cggccggaggaggtgttggaggcagacacccaccagcgctccatctcaccctggagataccggtgaggacctggggattccgctgtggcgtggggctgcccctcccctggcggggccctgac

SEQ ID NO: 465683 - DNA, 122 bp, Homo sapiens
cggggcggagggcaggggtgcaggtgctgtctgtgctggtcccgcagagttgacgggcgccgacctgaaggactgcgtcagcaacaacagcctgagcagcaatgccagcctccccagcgtgc

SEQ ID NO: 465684 - DNA, 122 bp, Homo sapiens
gtggtggtggtggctgtggtggtgctgctgctccgaggacatgaggttgttgatggagaacgggtggttgaaggcgtagtggtgttccggcttcaggtgggcctcaggcggcaggcccgggt

SEQ ID NO: 465685 - DNA, 122 bp, Homo sapiens
ttatttcttatatcttactacaagtagtaagtaagtaatatgccttgtattactaccttacgtacaatctctgcctgacttgagagaaactattcattgacaactcaaatttgcttgaacat

SEQ ID NO: 465686 - DNA, 122 bp, Homo sapiens
catgccctgtgtggatgaagctgttctgcaggggctggctgatgtcctgggccgacaggccggccacggaggtcaccacgttgcgagggaagggccccacacacagcgtccgtgtgttctgg

SEQ ID NO: 465687 - DNA, 122 bp, Homo sapiens
gattacaggtgtgagctaccaggcccagccaataactgttttttctgattaaaatatacacgcttatcacagttatttaaaagaaggcaaggtgatttaaattctagctccttcatagagta

SEQ ID NO: 465688 - DNA, 122 bp, Homo sapiens
aaagaagaaactccctaatttccacccacttccaacccaaatccagctcagaccaacccccggcccatgccctaactgagctcagggtctcacccagcctgaaggtctcaggtcattgccct

SEQ ID NO: 465689 - DNA, 122 bp, Homo sapiens
cgagaagtagcagtactgtccccagccatgcgagagaagctccggggaggcagcggcacccgcggggagcgggacacctagagctagccattggcactcggacgccgtcccggtcccggccg

SEQ ID NO: 465690 - DNA, 122 bp, Homo sapiens
gtcttgggccttcctgcttcccagagtttcacaggtaggacgcatgtgaggggagcagtccgtacttctgttggaggatggctgtagtactttccagggcactgaggaggaaacaggacagt

SEQ ID NO: 465691 - DNA, 122 bp, Homo sapiens
ccccggccaatcgtgcggcggcacggcccgggctcaccgcccctcggagtcttggcgctccgagccgcgcgttttgccctcacccgcccaattgttgccgcctcggccccctcccccttccg

SEQ ID NO: 465692 - DNA, 122 bp, Homo sapiens
ggtcggcccgtttgggggagacaccctcttgccctacaacctttcggcagtatgtcacagcgctggggctcgaatccatggcctgacccgctcgcctgggcaagcgcttccctaggaagggg

SEQ ID NO: 465693 - DNA, 122 bp, Homo sapiens
aggacttccaccccagaggccattgtggcgggggtgggcaaccctggttgggaaggaaaccggtcagagacaaaggtctctggctctccgaagccaaggctccaggaccctcgcccccattc

SEQ ID NO: 465694 - DNA, 122 bp, Homo sapiens
cgggctggggcgccgggtccctcccccaccgcccagcgagcccccctcccccgacccagacggcccctgtcctcccatgccctggccggtcactcacccgcttggatgccttccttccggga

SEQ ID NO: 465695 - DNA, 122 bp, Homo sapiens
gctccccagggccacagactaggcactgccattgtcccagccctggcttgtgtccagtcccggctctcctcccggtgactctggggagaacggtgtgataagccctaagggacacagagacc

SEQ ID NO: 465696 - DNA, 122 bp, Homo sapiens
gagtgaggtcttcccatcagagaccctgagccccgaagctttggaatcagcagcgttcagcgcgatggaggcgcggtgccaccaggtggcgccgtcaacccctcacttagggctaagcgccc

SEQ ID NO: 465697 - DNA, 122 bp, Homo sapiens
tcccatccaggcttgtcggcggccaccggcggaccgggcttcgagatggcctccccgccgcggtgctccccgacagcccatgacagggaatgcaagttgccgccaccctccgcccccgccag

SEQ ID NO: 465698 - DNA, 122 bp, Homo sapiens
ttggaatgacctatgacatcagagattccgaccttcctgattggaaggaccggactctgtcggcgcctggcagttcaggtgaacaacagtaacttctcagagctgttctccactcctgactt

SEQ ID NO: 465699 - DNA, 122 bp, Homo sapiens
aacttgatgacttgggttaaaggcaggtcatcaagtttcagggctactggagaagatccacgaaatgtgggcagtaccgaaacctgctttgaaagacagtctaaggaggctgaactctagtg

SEQ ID NO: 465700 - DNA, 122 bp, Homo sapiens
ccctcctccttgacttccgtccgtggctgctgaattgaaaatattgtgactcatttacaccgcatcagggtgaggcagggtacaaataaattgataaacgaccgctggcctacacagtccgt

SEQ ID NO: 465701 - DNA, 122 bp, Homo sapiens
gagagctgaagagggtgctgttctgccggcctcctcagctgagctctgggttgaggaagacgtccatacctttcatttattcaagtggaaggagggaggagcaagagcaggggagggtaagt

SEQ ID NO: 465702 - DNA, 122 bp, Homo sapiens
gccttcctccatcctgggcagtggcggggcttgcaggaggcctcagagctctgtcggggccggacggaccgctgtcgtcgccagtgcagggacagaagggaggaccccttggagggcggtgg

SEQ ID NO: 465703 - DNA, 122 bp, Homo sapiens
ccacctccatcacttactaaacatgtgtctttggaaagctacttaaagttaccaagcttccgtgctgtcatctgcaaagggtagaacagtaatacctgcctggtagaaatatgatgagcatt

SEQ ID NO: 465704 - DNA, 122 bp, Homo sapiens
ggtcggccggtccagcgcctccaggaagtcgaagctggggcagtggcgcttgttgaaaggcgcgggctcagcaggccgggccacggatcgctcacatggcgagcgcttggaagcgggtcccg

SEQ ID NO: 465705 - DNA, 122 bp, Homo sapiens
gtgtataaataattgcagtgctgctttgcttccaaaactgggcagtgagttcaacaacaacgacaacaacagccgcagctcatcctggccgtcatggagtttcttgaaagaacgtatcttgt

SEQ ID NO: 465706 - DNA, 122 bp, Homo sapiens
gggcggggggcaagcccggccgggccgcggcggcgcccctcgcgcctcagtcgcacactccggggtcaccagactcaagcgccgccccctcactgcccggccattttttcggcgccacacac

SEQ ID NO: 465707 - DNA, 122 bp, Homo sapiens
tccggctacaatcagaaaaactacagtgtgtcagtggttttcggtttcctgtttgtaaagcgagaacctcccccgactcgaactgtcgttcttcctcaaaaccaaccgagacggccccttct

SEQ ID NO: 465708 - DNA, 122 bp, Homo sapiens
ccaacttgcttaggattttatccgaggtaacgaccccaggatcacaattttgtagctgaccgaagcacggcgagaaaattcctccgcaagaaacgggttccggccacgagcctataaaaaac

SEQ ID NO: 465709 - DNA, 122 bp, Homo sapiens
ccgaccctcccggagactcaaaggcactgcctccagcagccacgtgggggcagggaggggcggtgctctgggctcagttgttccccaagctgccccaggcttctctttggtgtttacctttg

SEQ ID NO: 465710 - DNA, 122 bp, Homo sapiens
ttttcacctccactagctccatgtctctctctggcatggccactggtgctgatgacgtatcggcacctgctgatttgccacacatcgactccccaaagtgttcccagaacagagtaaccagg

SEQ ID NO: 465711 - DNA, 122 bp, Homo sapiens
tgaacttaaacgagccttcctcctaggcgagccactgacacatgatctgtgtaatccacccggcacgtgtttaatcggactccaactgcaactgcctttgtagccagccccggctctataat

SEQ ID NO: 465712 - DNA, 122 bp, Homo sapiens
aggggcagtgtgctctgcctttgacaccttgattttccttcaaggcttctgctctggactcgccatctgtgagacttcctacccacccaccccttaaaaaacacacacacacttttaattgt

SEQ ID NO: 465713 - DNA, 122 bp, Homo sapiens
tggggggcagggagggtcgccaggcgccagtagctctttttccccctccaaagtttaagtcggcggcggcggcggcggcccaggaggaagtgtccggagcgacagtgcagtcgaccaatcgg

SEQ ID NO: 465714 - DNA, 122 bp, Homo sapiens
ggtggtcgatgggactgggcgctgtggagcagggggcggcgctcgtcagggaggctcgggcggcacaggagcccacggagagggtgggaggctcaggcatggcgggctgcaggtcccgagcc

SEQ ID NO: 465715 - DNA, 122 bp, Homo sapiens
ctcttcctttctagtgggccggtcaggctggggcctgggtcagagcggtgctgcccgtgccgcctgaagagctgcagccagaacaggtggctgagctgtggggccggggtgaccggatcgaa

SEQ ID NO: 465716 - DNA, 122 bp, Homo sapiens
gaagcatagctacggaatcagaagagtctgtgctgtggccaaagcatggggtgggaggtgcggaggcaggaagtccctgaacacaccaagagtcagaactcagggaggcagcggagagagga

SEQ ID NO: 465717 - DNA, 122 bp, Homo sapiens
ggcgctccccgccctctgctgccagaaccttggggatgtgcctagacccggcgcagcacacgtccgggccaaccgcgagcagaacaaacctttggcgggcggccaggaggctccctcccagc

SEQ ID NO: 465718 - DNA, 122 bp, Homo sapiens
tggggacaagaattagtccccaaattcagtgttcttcctagtattaaacattgcccctttcgacaaattttggatttcattcttgttatatttcagtactcttgctgatttattttaggttt

SEQ ID NO: 465719 - DNA, 122 bp, Homo sapiens
aatcaaaatgttaaaacttgcacgcaaacagtgcctctgaggaaacttaaagcttagattcgtgcagcaggcacaagactcagtagctacaagtgtacaaaatgcctgtgttttatacatac

SEQ ID NO: 465720 - DNA, 122 bp, Homo sapiens
atttttgcaaatctaaagttgctccatacaatgactagtcacctgggggggttgggcgggcgccatcttccattgccgccgcgggtgtgcggtctcgattcgctgaattgcccgtttccata

SEQ ID NO: 465721 - DNA, 122 bp, Homo sapiens
tgagcaaagcaaggccgtatctgttgcccacatggcacactgatgactacagtcaccacacgtcttctcgtgccagggcctgggctccaggagcagttcccatccggaaggtgccattcttg

SEQ ID NO: 465722 - DNA, 122 bp, Homo sapiens
gggcaggcactcaggcaagggtggggcagaggagctagacccgctctgagggagtacggccgccgtgccggcagcctgacctaaggctgcttcagccccgcccacctcagcaggtacctgcg

SEQ ID NO: 465723 - DNA, 122 bp, Homo sapiens
ggtggggagatgctgtggcggcagatgccgggttcagatctccggctctgcaggctttttcgggaacgttaacttgagtcagccacgaccttaattaagatttgagaaaacagaagcccgcc

SEQ ID NO: 465724 - DNA, 122 bp, Homo sapiens
cattacagagagagcttgttctgccgaggtcaccccaaagtggggatgaaggcactggggcgggggctcggttgagagagcagagccattattcccaagtgtgtctgcctgcctgctgatcc

SEQ ID NO: 465725 - DNA, 122 bp, Homo sapiens
tgttgatgcttcatatctgagcggcttcttggagagcgggcacaccaggaactccagcagcgccggatcgaaggcgcggggcggctcctgagtcttctcgctcctgtcggccaaaggccgtg

SEQ ID NO: 465726 - DNA, 122 bp, Homo sapiens
ccgttttattcggcactgaaatgctgtttaacctcagcaagagtaggcgtgggaaggtggcgctcttccccacagcacaccaggcaccccccagctgctcagcggaagtgggcagaggcaag

SEQ ID NO: 465727 - DNA, 122 bp, Homo sapiens
agccatcctcccaccttggcctcccaaagtgctgggattgtaggcatgagccaccgtgtccggtccttactgggaaattttaagtcacctaagaggttcacgctctatttctattggagggt

SEQ ID NO: 465728 - DNA, 122 bp, Homo sapiens
aaggttaaaagcctatttaacccaacatatagttgtgctgatattttaataggaataaaacgcacctgtgttaagtaatactatggaatgatgtataataatgtctctgaggaaattcatta

SEQ ID NO: 465729 - DNA, 122 bp, Homo sapiens
gacatgatcttcctgcgcacgtgtgagggggcattgaagtaacgtttgcggtttttactgcggtccgaggtaacgaagggattgaacttcatggtgaccctccggctactagctgcctcaga

SEQ ID NO: 465730 - DNA, 122 bp, Homo sapiens
atgcggcctcctgtccagctggaggacagggagctagagaacgggtcagccgcaaggccccgcgtgtccatagagggcagtcttggtttaccgaacggatactacactccaaattgcatttg

SEQ ID NO: 465731 - DNA, 122 bp, Homo sapiens
aaagcaaagtgtgtgagtgtgcggtggtagcctgaccttaaacttcccacggcaaagatgcggaccctgagcgggcacgtgtgaacacggctctctaccccgcagtctctaggagaccagga

SEQ ID NO: 465732 - DNA, 122 bp, Homo sapiens
tattctatccattatctattcacttccccgaagcttttatttaaaaactttatggctgggcgcagtggctcacgcctgtaatcccagcactttgggaggttgagacgggtggatcacgaggt

SEQ ID NO: 465733 - DNA, 122 bp, Homo sapiens
cagccgacgcggcttggatgctggccttagcccgtgcagatctggtaaccaccatctttccggctccctcgcgaccaccacgacttccctcttccctggcgctccggaaatgcgtcagagaa

SEQ ID NO: 465734 - DNA, 122 bp, Homo sapiens
gaggccgcactaggatcgtagaaggagtggagccgtgctctcaccctgtcttagaggacccggaagcgccaagtgactgagggccgaagacactcacctgtggagcctgtgcacgtaggtag

SEQ ID NO: 465735 - DNA, 122 bp, Homo sapiens
agggtcattccaccctttgaaagcttcctgatcctgcctcccacctgcacgtgtggggcacggaggtggactatctgggggacatgttcacttacagtggctgcacccgggaagtgcgctct

SEQ ID NO: 465736 - DNA, 122 bp, Homo sapiens
caataaaatcagaagataccccgaatacaagtagctgacgctcagagagcagtattaaggcgagcacccgcagaccggacctggataactccttggagttcacctctagcggccccctcccc

SEQ ID NO: 465737 - DNA, 122 bp, Homo sapiens
aacatgcccctgcaggagctgtctaacgccctcatggcggctgagcgcttcaaggagcaccgggacacagccctgtacaagtcactgtcggtgccggcagccagcacggccaaaccccctcc

SEQ ID NO: 465738 - DNA, 122 bp, Homo sapiens
tcagggcccaggctttctgggaatggaggggaggggaagggcggcatgcagggagctgaccgtggggttatttctgaccctggagtcatcagcttcccagtcacagatggagtggcggcggg

SEQ ID NO: 465739 - DNA, 122 bp, Homo sapiens
gggagcacttcacctacaagggcctttagcggcttcagggcccagccacacccttctccacgtacgtgttccagacccagtcaccccgagcagggagaaccaaccctcataataagaactgt

SEQ ID NO: 465740 - DNA, 122 bp, Homo sapiens
gaggctggagatgctgcaacccaaagccgggttttgactcatctctcacaagtggagccccggctgccgcataggtttttcagagaccttaggcccactcatctccccttaaagggggccct

SEQ ID NO: 465741 - DNA, 122 bp, Homo sapiens
agacccggcttcctgaggggaagtcgccgccactaccggcttatgactggacagcacagacgccatggcggcgagacgcgctactgcgcttgcgcggccagcccagcgcccaggaagcctct

SEQ ID NO: 465742 - DNA, 122 bp, Homo sapiens
gaagcatttgtggttagtgagtcaaaaagcaccaccgtttagctgcacttggtgtagttgcgattagtgcctttctgttctgagagacatgtatggcactctttcataagatcttgttacat

SEQ ID NO: 465743 - DNA, 122 bp, Homo sapiens
agcccaggttctaaatggagtgctgttgttaatgtggtaccaggggtcctgggttccagacgagacatcagatttcacacagaaaatgaggaaggctggatttgctgatacatctaattata

SEQ ID NO: 465744 - DNA, 122 bp, Homo sapiens
ccagcatagagaacaagcaggactggataaagcatatccgcgaagtcatccaggagcggacgatccacctgaagggagccctgaaggagcccattcacatccctaagaccgctcccgccaca

SEQ ID NO: 465745 - DNA, 122 bp, Homo sapiens
cagaatctccgttgtacaaatggggaaaccgaggtcctacggcgttaggtaatcaatacgcggtctcatgactagtaaccgggactgggctgtctcattctagagccttccttctacactct

SEQ ID NO: 465746 - DNA, 122 bp, Homo sapiens
atcaagttcgaggaggcagtcatcgctcgagaccgggccctggagggccgctgaccctgccggagataaaggatacagagagcccctccccacgtgtgtcttgtgtcttgtgtggcggcctt

SEQ ID NO: 465747 - DNA, 122 bp, Homo sapiens
tttggtgttagaggactcacacctggggctggacctgagtgtttttctaagtgtggctaccgctgacgggcaggtgccatccatcaggctgaggctcggctcttatgctaacctgaggcccc

SEQ ID NO: 465748 - DNA, 122 bp, Homo sapiens
actgaacacgtgtccctgaaggcggcctgcgcccagcccccaacccctaatccctttaaacgtttcaaggagcacagacaatgggagctggggtgcctggacccctcctctgtctaccttgc

SEQ ID NO: 465749 - DNA, 122 bp, Homo sapiens
aacactgtcacctttagcagtgaaggatccagtgagattttccaggttaacggtcataaccgcctactggtccaacgttcagaagtaacacaggcacctggagaatacacagtagatgtgga

SEQ ID NO: 465750 - DNA, 122 bp, Homo sapiens
gtagaaaaaaaaaaatgcttgagttaaggtgtgctgtggaagccaaggttcttattatgtcgatgaagcctccaggtagcaaccctgagagagaataaatggtaaatgtttctcttaaacct

SEQ ID NO: 465751 - DNA, 122 bp, Homo sapiens
cccataagcgaaagcaaagccctcagtggagcctgtcggggtggtggggacgccccctttcgtgcaaaacgacttcacggtgaatttcaagtgtccgcaggggatggaaggggggattccag

SEQ ID NO: 465752 - DNA, 122 bp, Homo sapiens
cccctcctcctgctgccaccgcccactgagctgcctgggctgcagacgccctggttggagcgtctggggccagatgttatagggcaagctaaaaataaccgggcaggccagccaccatcgag

SEQ ID NO: 465753 - DNA, 122 bp, Homo sapiens
gtgggggtcagggtctccaagcctgaattagagaccctgtgtgtacccttagggaatagacgatctaataaattaacaaaacaaggaggctggaaaaggtcaaaccctaagtgctacataga

SEQ ID NO: 465754 - DNA, 122 bp, Homo sapiens
cttgccctcatccttcagcgtggtgcccaggatggaatacaggcggacgttgccgtcctacggcagggacagagaggaagtgagccacccctgaacacacacaccacacccatcctttgtga

SEQ ID NO: 465755 - DNA, 122 bp, Homo sapiens
agcgaccaatcgaagagtagaatgcctgcgtccctcactggagcttcagcggtcggaacgcgggggtggggcatgtcctgccgaaatttgcgtccttagagcggaagtacggccggaagccc

SEQ ID NO: 465756 - DNA, 122 bp, Homo sapiens
ccccacaacacagagcaagagggcaagggccgggtaaccatggtgggtgtgagggccctgcggtggtcagaggattgccacaaaaactctgtgcaccctccgcgttccaacacgagcagaag

SEQ ID NO: 465757 - DNA, 122 bp, Homo sapiens
catctcctccctcagacacaggaggcagcaggcctgggctcctccaaacccaggaacggacgatcccagtaggaagcacccatgagcccagcgcccggctcccacctgccccttccaccacc

SEQ ID NO: 465758 - DNA, 122 bp, Homo sapiens
cagcttctcgagatctcataggtttctgtggctggcacagccggtgagctcagcgccctgcgggggccgtgggtgcaggcgccctctcgcctggcgctgccccgccccctcccccttgccag

SEQ ID NO: 465759 - DNA, 122 bp, Homo sapiens
gagcgcagaccctgagtccgtcacccatggatcgcagcgcggagttcaggaaatggaaggcgcaatgtttgagcaaagcggacctcagccggaagggcagtgttgacgaggatgtggtagag

SEQ ID NO: 465760 - DNA, 122 bp, Homo sapiens
cacacccaggtctggacacgctgtccctgaggccagtgcccggagcgccccccgcggagccgctctccaccaataagagcctgaggtcccgagatgatgagatgcggggccgctgctcagcc

SEQ ID NO: 465761 - DNA, 122 bp, Homo sapiens
cactggacacatatgtgcccatgatgatgaggacggtgcccacgaggaagcccaccaggccgatggccaggcccagggcacagaccagggtctccatggcatctggtggtggaataggcacc

SEQ ID NO: 465762 - DNA, 122 bp, Homo sapiens
attgaagcacaaggcgataacgcaacttgcccagcagcacatggttattaataggtggagcgggaattagaagccaggttttgtactttcttaccagtgctgtctccacaagaacacactat

SEQ ID NO: 465763 - DNA, 122 bp, Homo sapiens
ggtgtcttagaagacagaaggtcagagctggacaggtagtgggtgagggcctcaaatgtccggttgtgcatgagggatttttctgaagttgctgcaccctctcagtgtccacaaaggtgata

SEQ ID NO: 465764 - DNA, 122 bp, Homo sapiens
gggacttctgcccttcctgggcccgggcctcgggggcgattccgggtaggtaaagcggaacgagggcgtggcctctcttgtgagcccgccctccccgtgtcgctcccgccttgagggcgggg

SEQ ID NO: 465765 - DNA, 122 bp, Homo sapiens
caggaccaggcacaatgacagcagcatctgtttattgacaattccaggtcattcctaacacgccgcagcagggctctgtacagtccggcccggtggggaggagggagggaaggcaggcacac

SEQ ID NO: 465766 - DNA, 122 bp, Homo sapiens
tcactgagctgagcggcgacgctggcttcccaccgaccacttcgatttcaccggaatgctcgagtggggctacagttccacctgcagccctgagagctctcacctgccctcgaggacgggtc

SEQ ID NO: 465767 - DNA, 122 bp, Homo sapiens
cttaaaccctgaaaccgaatccgatgaagactgtcaccaggggtcaccagggatgaggaccgtcaccaggggtcagcagggatggagaccgtcaccaggggtcagcagggatggagaccgtc

SEQ ID NO: 465768 - DNA, 122 bp, Homo sapiens
tttaaaagtcacctgaacagaaagccacttgcacccctttagggccagtctgggggacaccggagggaatgaacgtgcgccacggctgccccggcgcccctcagcgccccacattccgcggg

SEQ ID NO: 465769 - DNA, 122 bp, Homo sapiens
aaaactccagaaaactgaggggtctggatggaagctttggtggggcgtcctccacccacccggtttccatcaataatcccccaccccttacccaggtccctgcattgcttgatttttgcttt

SEQ ID NO: 465770 - DNA, 122 bp, Homo sapiens
tttctttatgtccaccagcctctccaagacagcagccaagttagggtcatcagactccaccgaccagatggggggcacagcagggtatgactcctgaagggaaaagagcaataagagcaatc

SEQ ID NO: 465771 - DNA, 122 bp, Homo sapiens
ggtgtgcacaggtggcagcgcagagagaacccgggcaggtggagctgggctgaatgtccacgttctgcctgtggacagggcctcgggtgagagacttcacaatgctgagcagacaggctcgg

SEQ ID NO: 465772 - DNA, 122 bp, Homo sapiens
acggcgagaccaggcacctacttaaagtgtcacacgacctgggtataccctccattcagacgcactcacccgcacacgcgacccatagtcagagatctgctcagatacagcccatagggagt

SEQ ID NO: 465773 - DNA, 122 bp, Homo sapiens
accaaattgccctgtcaagggaaacagaatgagacaaaaatgaagaaaacggcagccacacgctcacactggtagcataatgccatcggttgcccagcattacggggcaacatatacggcat

SEQ ID NO: 465774 - DNA, 122 bp, Homo sapiens
ctcttccggagatccggctctctttggaagattctgcctagcagccactgggtacgtatgcgcacccagacacacacggaaaggcagcaggccctctagaaatgtagaagggaaatgtggga

SEQ ID NO: 465775 - DNA, 122 bp, Homo sapiens
gaaccaaaagatctgttgaaaattccttcacggacaagaggctacggaaacaaagcctaacgaaaaatgacaaactagatttacattttattctcgaccagagatcgccccactgagcggag

SEQ ID NO: 465776 - DNA, 122 bp, Homo sapiens
gttcacacaaccagtagtagcaaatgggaaatgggatctgatccaagactcttcaccacacggcatgctttatgtgtgggaaatccaggaaagtaaaaagaataacagtcaattgtaatttc

SEQ ID NO: 465777 - DNA, 122 bp, Homo sapiens
tctgtattttttttttttttttaggatcctcctgactggcaggagattttgacttatttccgtggatctgaattacaaaattactttacaaagattctagaagatgacctaaaagccatcat

SEQ ID NO: 465778 - DNA, 122 bp, Homo sapiens
gcagctgacctcacttattttcatagaagcaatgcggaagccacaggctgcagttaatctcgccagcagcgccccgcctgctgacagcggtacggtcagtcctgggggggcgcagggaataa

SEQ ID NO: 465779 - DNA, 122 bp, Homo sapiens
tcctgtgggaagtggaacccgcaggccctgtggagaacagcttggcagctgctgacaacacgaaacacactctcggcaaaccacccagcagccacacctcgtcatttacccactggaaatct

SEQ ID NO: 465780 - DNA, 122 bp, Homo sapiens
tctcttctcccaggtggacagggcacaggcagcggagagaagccgtgtagggccgggtcccgtgttccaccaagcatgacaccataaaacactggcgaacgatcagggccaggccccgtgtt

SEQ ID NO: 465781 - DNA, 122 bp, Homo sapiens
cgcctccgcccctggttggccagcgccacggctgtcgcacattttgcctgtcatcgaggtcgcaaagcgccgctttgcggctccacgtgaccaccctcctgtcaagcgctgagcgcgcgact

SEQ ID NO: 465782 - DNA, 122 bp, Homo sapiens
agaactcaaaagtgatgtcaaagttaggaactttgaactgaggatctcaaatcacagtaacggataagattgctaaggtagtgactctccaagaggttcatagtaatactaagctgttattt

SEQ ID NO: 465783 - DNA, 122 bp, Homo sapiens
tccttgtaacccaatatagttacagctccgacgccatgttcttcctgggtccagctccaacgccatgtccttcctgggtccctccaaagtagggttggaggatcaactagtggattccggcg

SEQ ID NO: 465784 - DNA, 122 bp, Homo sapiens
gggcgcggctcaggccaggccctcaggttagtgggtccccgctgtccccgcgcttcggcccgtcctctcgcgctatgctctcctgatgaacgccccgcgagcggagtcacccccgccagcga

SEQ ID NO: 465785 - DNA, 122 bp, Homo sapiens
tgcagtgagcgtggaaggggagactcgaacctgctgatccctcagcttctgcaggtgtcccgcgtgcatgcatctcagcaggctgagtattaagaaacttgacctctaaatgtaagtcacct

SEQ ID NO: 465786 - DNA, 122 bp, Homo sapiens
cacatatttccctttttggaaagtcacactgtacaggagaaggctaaaagagcctggaagcgctagagtagaaaaacatgtcaatatttgataaatgcagtgtttcggaactagtttgatca

SEQ ID NO: 465787 - DNA, 122 bp, Homo sapiens
gtgaagacagggccaggggagcgggtccacatggagcgtgtggagacagggccaagggagcgagtctgcggggcgcgggtccgcacggcgcgggtggagacacggccagggaaggtgttttg

SEQ ID NO: 465788 - DNA, 122 bp, Homo sapiens
cgagagacacccttgcaggtaagcactctcctgcagcagctagtctaactctggctcccccgtgtcacacgcggagatcgactccacacccacccacgcacgatcaccatgtgcaaagttga

SEQ ID NO: 465789 - DNA, 122 bp, Homo sapiens
aggacgagacggggactgaacagacttgcttagttcctgacattcaaggaagaactttaacgtccatccacggagcctcaaaggctaaaaataatcatccctttcaatagttcctgttgtga

SEQ ID NO: 465790 - DNA, 122 bp, Homo sapiens
caaagtaagtgttcactgaaacccaatgacctttcaaacactgattcaaatactgattaacgagcatgtaggaaccatcataacacatcgcatcatcttccccatagtctccaggctccagc

SEQ ID NO: 465791 - DNA, 122 bp, Homo sapiens
ggataagggggtctactataacttctcaagtattgatcctgtggaacccctacaacaaggcgtggggagatacttttattttacaaatgaggaaattgttacccagagaggcaagtgatttg

SEQ ID NO: 465792 - DNA, 122 bp, Homo sapiens
acacagcagctcaggcggcgccaggttcctgggaatgtcagtgcggcacggtagttggtgcggatcccgcggagcttggagttaaattaaggaagaataaaagagatgaacatctcttaaag

SEQ ID NO: 465793 - DNA, 122 bp, Homo sapiens
tctggggagcacaacagcagtgcagacacccacctccggagagcctttggtctctactagcgagcccctgagctcaaagatgtacaccacttcaataacaagtgaccctaaggccgacagca

SEQ ID NO: 465794 - DNA, 122 bp, Homo sapiens
cagagcaggcccaggactcatggccgcgtccactcacgggaaaagcatcgccaagcacgccgggcagggaagatgctattctctagaatacctgcatgctgtccaaggtgttctgcgcgaag

SEQ ID NO: 465795 - DNA, 122 bp, Homo sapiens
cagagggatgatagcggccttgccccgagcgtttatccggctgcaggcgtcattcttggtcgcctgtgtgtccagagccccagcgcaggaagggagcgcaattcccaccgcgcccgctgggt

SEQ ID NO: 465796 - DNA, 122 bp, Homo sapiens
aagtcatgaagtctatgcgcggagccctgtgcaaaataactcccgctgctgcctgcccggcgttgattcccaatttatttcaagagagtcggctttggggagagagtctgcagggggaggga

SEQ ID NO: 465797 - DNA, 122 bp, Homo sapiens
tcaaacttcctgccacaagcaatccttgtgccttggcctcccaagtgttggaatgacaggcgtgagccgtcgtgcctggcccctaatacttttaacttagaactctttgaaggtaatctact

SEQ ID NO: 465798 - DNA, 122 bp, Homo sapiens
tgggcggtggagtggggttagaagttctttcttaaaaaccgtgtatcttcccgcgagaaccggattgagcgttggcgccccgggtcaggctgcgaggccgcaattatagtgggatggggcgg

SEQ ID NO: 465799 - DNA, 122 bp, Homo sapiens
gagccctcagccactcagtgactgacgtttacggtcacacgaaggaatcactacaccaagcgctgaagggacgcgtgtgagccccatttcgctggtgggtaacaggctcagagatgctgtgg

SEQ ID NO: 465800 - DNA, 122 bp, Homo sapiens
atttatcaattagttatagtcaattcatttgtcaattagcacattgttctcatgctatcacgtctgttgttaccttaaactgttatttaaacagttgtacttttacttaactttttttttat

SEQ ID NO: 465801 - DNA, 122 bp, Homo sapiens
acgtgaccctgcgctacgcccggccggcggcgggggaggctgcggaaagagcgcggtgagcgctctgaggagttggcttcgtctgcgctgtagactctacggtgtagagtgtggcgctcttg

SEQ ID NO: 465802 - DNA, 122 bp, Homo sapiens
tggccgccgcatctcccacccgccaggctgccaaccgaaacgactgcagactatcacatccggcatgaagccccgcccccgtactgctacctgtctccagccccgcgcggtcttctcagccg

SEQ ID NO: 465803 - DNA, 122 bp, Homo sapiens
ggtcagaaggtggcaacaccaaaagtagcaacgctgggcacacggtgaagttttgttcttcgggtctcacgcgtggcggcatgtccagggctcacgtgacctgccccacgctgccgccacag

SEQ ID NO: 465804 - DNA, 122 bp, Homo sapiens
ggtatgtcgggctcccggggcctggagatcttcgtgcgctgtgagcaaggatcagggaaccggaagggcttggtttgatggcgagcggatgcgcggtgttaaactaagggatgacagggcct

SEQ ID NO: 465805 - DNA, 122 bp, Homo sapiens
acaaccaccagaaatatcttccagtcctcatcaagtcccagaaccagtcattcaaattgccgtggggagtgacatcaactccccacgaaagtgaaagccgcccaggtgtttggattcaaagc

SEQ ID NO: 465806 - DNA, 122 bp, Homo sapiens
tgcgtctccccttccgcggctcggagaggaaggcaggagagcccccaaatattcccctcccgccccctagggaaactgaagctgaaagagccagcgaaagaaaaaaaaagtctcggagtggg

SEQ ID NO: 465807 - DNA, 122 bp, Homo sapiens
gcgggcggcagcctggtccccgcggcgcgccagcaacactgcacgcaggtgcgcagccggcggctcatgaaggagctgcaggacatcgcgcgccttagcgaccgcttcatctccgtggagct

SEQ ID NO: 465808 - DNA, 122 bp, Homo sapiens
cttggagaccctcacagcacacagacctgggagctcaaaggctgaatttaccttccagggcgtagcaggcctctgatcagttcccaccccactgcagagtatcccagtgtcacagaactttt

SEQ ID NO: 465809 - DNA, 122 bp, Homo sapiens
ctgaattacttcctcattaaagaggcgggcagattcttgggccccgcgtgcagccaccctcgctgcctccctccccgccccgctccgccctgctggtcccgcctgccgtccgcaattaggcg

SEQ ID NO: 465810 - DNA, 122 bp, Homo sapiens
tccgcccgccgaccctctaaagcaaacctgcacaccctggggcagctgaagctctcaaggcggtgccgagaacctcggctggggcgggctggccagcagcgtctacaccccagaacccgccc

SEQ ID NO: 465811 - DNA, 122 bp, Homo sapiens
ggtgagactctgccgagtgaggtataggtcttctcaccacgcctgtactgcagacacggtcgtgtagagtagcagctgatttgacctgtcccagattttaagtgatattccaaaagggactt

SEQ ID NO: 465812 - DNA, 122 bp, Homo sapiens
ctttgtctgaagacgagttgtgggtggagggtactgcagaatagaggccaggtaaccagccgttttgctattctatctcagaggcattttgctgtgtggacctttgtttttatgcctcttta

SEQ ID NO: 465813 - DNA, 122 bp, Homo sapiens
gtccccttcctaggaaaggagcctgggctgccctgatgagtctcctgtctctctctctcccgcaggatgaagatgagacgctacaagctctttctcatgttctgtatggccggcctgtgcct

SEQ ID NO: 465814 - DNA, 122 bp, Homo sapiens
ataaccaaaagaatcaccaaaaatctttaccagtacatattgatagctttaccttgcttccgttccattctgatatgcaaatggatgtcagaatgttagattataaagtagtttttaactat

SEQ ID NO: 465815 - DNA, 122 bp, Homo sapiens
gaacgcgaggtctagttggcattctgggatacatagttcctgggcgggtgggggcggattcgttggtgtaatctcttttcggcttaaagagccagaagcgacaccacagactccggcgggtc

SEQ ID NO: 465816 - DNA, 122 bp, Homo sapiens
cacatatcaggagcttggggcatcctcagctcaggaaaagggacctcctgggagtgcctgcgcccacacgggatcaaaacggtgcccagccttcagaaacctcagcccgagttccaggggta

SEQ ID NO: 465817 - DNA, 122 bp, Homo sapiens
tggcgagatgtgcgtcaacgtgctcaagagggactggacggctgagctgggcatccgacacgtactgctgaccatcaagtgcctgctgatccaccctaaccccgagtctgcactcaacgagg

SEQ ID NO: 465818 - DNA, 122 bp, Homo sapiens
tatacaaactcagggaattttaggtctttgacaatgtgatgttgagacctttctggcatacgagttttaggatttgtctgttattttacctctatgcagaggttttgtggacctaagctttt

SEQ ID NO: 465819 - DNA, 122 bp, Homo sapiens
ggttttgccacattgcataggctggtctggaattcctaggctcaggtgagacatctgcctcggcctcccaaagtgttgggattacaggcatgagccactgcacccagcctgagattcttaat

SEQ ID NO: 465820 - DNA, 122 bp, Homo sapiens
attccctgaggtctggacgttcaggccctctcggtctgggagatcccggagaaccacccacggggctttaaaaaatgttggtgcccaacatctccccgaaatagggcccgccctatctcggt

SEQ ID NO: 465821 - DNA, 122 bp, Homo sapiens
atgagctaaaggaaagctgccctacacagtttaacctactgcttcttaaatgacaatcctcggggtctttccttcacattcaatctctgataagctattttataatttcctgatgacagtta

SEQ ID NO: 465822 - DNA, 122 bp, Homo sapiens
cctaagcaccgactcgcaccccacagctaagaccatggtcaggcagatgcgtgattcaaacgcaggggatttcagggcccaggccccggggagagccagggacttaggtgaggagggaacgg

SEQ ID NO: 465823 - DNA, 122 bp, Homo sapiens
attagtttacggattggagtcagtaaaagacctacctccggcggcagccgatcaatactccgcggcttgtccattcattaacccattgcgttcctgccggagcctagaatcgggtagatgtc

SEQ ID NO: 465824 - DNA, 122 bp, Homo sapiens
ccaaccttggcgctaggtttgtgccttatggggatccgtcgtctcgcgagataacggttccgctgctggcggggcgtttgcagtggcccttgtgaactatgtttctgccgttaccagtgttg

SEQ ID NO: 465825 - DNA, 122 bp, Homo sapiens
atcaaagaacttaagtggatgttttggtacaacttatagaaaaggtaaaggaaaccctaacgtgcacgcactgccttggtgaccaaggaaggcaccccacggctatggggaaattagcctga

SEQ ID NO: 465826 - DNA, 122 bp, Homo sapiens
cccagcacggggccggggagtgtgagtgtgtcctggcacaggcaggcagaaggtgtccaacgtgcaactggagagcgcagaggtggctcaagtccccttcctcgcaggagtctggaaggcta

SEQ ID NO: 465827 - DNA, 122 bp, Homo sapiens
gctgtgaagtgtacaagtttctagtctcatctttcagtagaatgggtacaagctttccctcggggctctgggggtgggagggttgtaaaagtgggagaaagcaaagtacgtgggtggggggt

SEQ ID NO: 465828 - DNA, 122 bp, Homo sapiens
ggagattctattggccctgtgataggactattaactgacctacaagaataaaagcacaaacgtagacatctaattcctttgctccttgcccaagtgaacatttttcaaaagagctaaccagt

SEQ ID NO: 465829 - DNA, 122 bp, Homo sapiens
aaaaccttagagatgaataatccatttttttaaaaatccagatcactggcagggagattacgttatagccccaaagagtagttaacagattagggtctttgcgtatagaacctcacggagtc

SEQ ID NO: 465830 - DNA, 122 bp, Homo sapiens
gatcggagctgggccccggtgccagctgagtccggggctgcggcccatctcatggagagccgggggcgccccaaactctgcgccacagcctcacacatgcagcttggttcctgccctgtgtt

SEQ ID NO: 465831 - DNA, 122 bp, Homo sapiens
atagaagcactgggttcaaaaagaaaggaagggattaaggtctgcatatgcaaaggtgcccgattagggtagagagtgagaaaagtaagtttaaaataggaagtgctatcagcctacagctt

SEQ ID NO: 465832 - DNA, 122 bp, Homo sapiens
ggggaaggcaggagcagaatttgacattcccttccccaacaataacacggctaaaactcccgcgggaagcgtttcaggcggagagagagccggtcactccatccccacgggattaccctccc

SEQ ID NO: 465833 - DNA, 122 bp, Homo sapiens
gtgtctgtcaatacttttggaaaatctcagccattattacttccaacatgtcttctccttcgctctttctgctccttccggcacccgccgcccactcgcaccttctgtatttgtctctctgc

SEQ ID NO: 465834 - DNA, 122 bp, Homo sapiens
ccttggctttatctcccttagcatccccttcagcctttctcttgggcatggtggcggcagcgacggcagcgggacataggtgctggacgcgggacgcagcggcgcgcgggctttggtcggac

SEQ ID NO: 465835 - DNA, 122 bp, Homo sapiens
ggcacacggggaggatgtaattggtgaagggcactggtgcctccagctccaccagggccacgtcagcgctggaggccgtgccctggtacagggggttgctctccacctgcctcacccgggca

SEQ ID NO: 465836 - DNA, 122 bp, Homo sapiens
gcaaccactctcctcccgctggctgcttcttacgacttttcttttgttgttgccgtgacccgggtctgttttctcctctgttgtttaaggtgttttcctgctgcaccggctctgcgccctcc

SEQ ID NO: 465837 - DNA, 122 bp, Homo sapiens
gttgagtccctttgcggtttcttctctggcctgatccagggacccctcttactcccatgacgttatgggcatacgtttcacatttattattgggattggtaatcagatcttttaatctcctt

SEQ ID NO: 465838 - DNA, 122 bp, Homo sapiens
cttgttatcaaaagcctggagtgacaccactgaaggctagtctgccgtggcttctctgtacgccgcccccctcctcccaccctccactccctggcagtggaccaggtaatcttaacctctct

SEQ ID NO: 465839 - DNA, 122 bp, Homo sapiens
agaaatggccttgaaaagaggctgaacttcggaagtggcctcggagggaggcctagcaaccgcgtcctcctctttgcgctgcctcttggatgctagtcgcgtacgcggcctcagtctgcgaa

SEQ ID NO: 465840 - DNA, 122 bp, Homo sapiens
gtatccaggcgtcccggcgtcccggcgctacgaggccaccggctgcgggtctgagcctgtcgctttccggctgcccgactttaactcacaccgaagcctggcgggagaacggatttctcaag

SEQ ID NO: 465841 - DNA, 122 bp, Homo sapiens
gcgcgaggggcgcggctttagtccagggggcggagcctgaccggacctgggtttttcgggcggctggcggacttgacagagagcgggaggggcccggatcctgggcctaaggagggtggggc

SEQ ID NO: 465842 - DNA, 122 bp, Homo sapiens
agtggggcccgcctcttttctgacctaagggcaggagtgaggggccgggaggattacgggcggctccccctagacgcgcccccaggcgagctggagactggggcactccttgcttggtagag

SEQ ID NO: 465843 - DNA, 122 bp, Homo sapiens
gagtgggcgcttctcctgtccttccacgagccacgggaggaaaccaggagcccttggtcccgccaggacctaacgtgggtccctggggccccgtgccaatgacctgcttcctttcacggacg

SEQ ID NO: 465844 - DNA, 122 bp, Homo sapiens
cttcgtaattcacaagaggaagacccccggaggcggacgaagccaaccgaactcagttcccgggagccgtgacaagcgacggccaggcagcagaaatggcccacccattaggctgcagacag

SEQ ID NO: 465845 - DNA, 122 bp, Homo sapiens
ttgtcgaggtgcaccagggtgtactttcagatctataatacacagtctggccatcacaaccgcattatttccctcatctcattccaaccctggtgtggtaaaaccaaagagacacaggatca

SEQ ID NO: 465846 - DNA, 122 bp, Homo sapiens
ttgccaagcgagaaggtaacaggcaatagaggaaacaggagaccctgccagttggaataccgtaggctttctgagctgctccatcccactgcccctacaagttcagaacagcatcatttctc

SEQ ID NO: 465847 - DNA, 122 bp, Homo sapiens
ggagggcagggctgatgtcggacgtgcgggatgccagagtcgggtgccaaggcgcctcctcgacctcctcgcaccagcgtcccccgcccggtttccgcctccgcccgaagtgggggcgtgtc

SEQ ID NO: 465848 - DNA, 122 bp, Homo sapiens
ctgggctgaagtgccgtgaggcaacggtttgtcttcaataacatcatccaaggtcaccaccgcacatcctgcgcatctttctccttgcggattgatgaagctgctcccgtccacgtataact

SEQ ID NO: 465849 - DNA, 122 bp, Homo sapiens
ctgcccctgcaatgagtcttcacacataccatactggcctctccttctcagggatgggagcgagtggagaatggcgagtataacttaggttggcaactctttttttttttctccttttaata

SEQ ID NO: 465850 - DNA, 122 bp, Homo sapiens
ctttggcttccatgtggaggcgcgagtcccgttcccgcacacggtaattgctaaattacccgccatctgctccgctctcagacataaattacctgcgaggaggaaagacgcagaggctgcgc

SEQ ID NO: 465851 - DNA, 122 bp, Homo sapiens
caccccgcccagtgggctggtcactccggcgggtcctcgacccggccagcgcccgccggccgccagagcgcctcacctgtatgtagttgttttcacagtagtctgccacccgagtcaggttc

SEQ ID NO: 465852 - DNA, 122 bp, Homo sapiens
actcgatcacgtcctgggtgcatgtgcgcgtacgcgcgcacacacatgtacacacgcacacgcatgcatgcatgcacggtggggcacccaagccgatgcccgctcctcgaggctgggggcta

SEQ ID NO: 465853 - DNA, 122 bp, Homo sapiens
gctattactcccagtatctcaggaagtgtacaccgcttctgtgacattgttcctaatatccggagggggagagggtgatattactcgcaatatcgcaggctgtgtacacccaccctctgata

SEQ ID NO: 465854 - DNA, 122 bp, Homo sapiens
tgttgtgagagagacgaaagggttacactgcggttctcactgcctgcctgaagtgacagccgaaggctgagcagacctccgggaagtggtcatgaggatctggctcgatctgctgaaaatat

SEQ ID NO: 465855 - DNA, 122 bp, Homo sapiens
aggtactccaaaccaagaggaaaagcatccttgtggcatgtgggtggattaggcccaaggcgcaggtgagctctgctgcagaaggaacctacacaccaagtcccaaatgcccaagtgctgac

SEQ ID NO: 465856 - DNA, 122 bp, Homo sapiens
gcctggggagggcatgggctcttcctggcccctgctgctggctgctatggtggctggagccgggtgggctggataattatgccttacataagtgggaggccggatccctgaccattgcccaa

SEQ ID NO: 465857 - DNA, 122 bp, Homo sapiens
ctggggaaaggtcagtacgtggaagagagagatcagtagtacctgctcgctacaaggaggcgcctccaaatgtcaatgcctattttcaacaagtgggacccaaagtgattcatgccagtgct

SEQ ID NO: 465858 - DNA, 122 bp, Homo sapiens
gcagctcgatccagagcttgaggaaggcgggcagcgagccgtagacctccagcatgtaggcgtagtcgccgcccgatttggagatggtggtgccgagctccgcgtagcagagcgcgcccacg

SEQ ID NO: 465859 - DNA, 122 bp, Homo sapiens
ggggcccgcagcctccagggcaggcgctggctggaggctcttcctgcccgcagtcctcaccgccatagcccacgtggcacaggcacactccttgcacacaccgcccacgtccccggcagtca

SEQ ID NO: 465860 - DNA, 122 bp, Homo sapiens
gccccgtgggatgctggagggcctgcgccaggtggcctcggccagtggctgcctgaccttcgagcgctttgtggccgacctgcccacctagctgctgagcgccatcggctgcccccgggacc

SEQ ID NO: 465861 - DNA, 122 bp, Homo sapiens
aaaaggctaagcagctctgtgtttaaatgcaggtcagagcagcaaatgcagtcttactgacgggctgtcactcagttttacacattcctctctcctctgtctttttttttttcttcctcctc

SEQ ID NO: 465862 - DNA, 122 bp, Homo sapiens
ccattgccccgccccacgccacacccacctcggctcggtcccgcctctccccgcgcgccccgggctccacctaagccggcacgaggtccactcatggctccgcccccgactccccgcccacc

SEQ ID NO: 465863 - DNA, 122 bp, Homo sapiens
tcagtatgccagtgacgaaattcacaacttgattctccctcagggctgccgagtgtctgacgggacaaatccttccaacggccgcagcaggtgcttcttctagccctgtgttgcaatgacct

SEQ ID NO: 465864 - DNA, 122 bp, Homo sapiens
tggcgcaggcaggcagggggtggatggagcgggtaacgagggagaggcgagcttggaggacgcacatcatacaagtgaggaactggcacagctgcagcctcatgagaccccgccccgatgag

SEQ ID NO: 465865 - DNA, 122 bp, Homo sapiens
accaagaaacagtaagagctggaagggcagttcccacctctaaagctgctgatcccaggccgatgctacagatgagctttagatatttccttctctattttgtaagtctcaaattggggaaa

SEQ ID NO: 465866 - DNA, 122 bp, Homo sapiens
aatcatcacttggccccgagccgcacccctgggagaggtggaccctcgacgtcgggctgacgacgaccacaggacgggaagcaggagcggagaatccataaatctgaacctcattcccgatg

SEQ ID NO: 465867 - DNA, 122 bp, Homo sapiens
acagaccccaggggatctgacttagctgccagcctgattctccagaggaggaactcagtacgcggccagcccacctgatcctgaaaccttgaggtgggtatatgtggttagaacaactagat

SEQ ID NO: 465868 - DNA, 122 bp, Homo sapiens
aaggcaatccccgcccaggctttaacaggatctttaccaagtggtctcacatcactgttacgctacgaaggtgagactccttttggagaaacatacaatgacaccaatcgtatcgtaaacac

SEQ ID NO: 465869 - DNA, 122 bp, Homo sapiens
tcacccccctgcgatggggctcctaagagccagggggagagaggggctggatcttactcccggtatcgcaggaggtgtgtacaaccactgcgatattgggaggcatatcatcagctcccacc

SEQ ID NO: 465870 - DNA, 122 bp, Homo sapiens
gcttgggaaaggcacaggccctggggttgttaggtttggtttcacagagtctgtggcatacggttctggccttgttgctctgtggaagcacatgttgtcaagggagggaggtttattaaatt

SEQ ID NO: 465871 - DNA, 122 bp, Homo sapiens
aacaatcaatacacagtatatgaacaaatcttcagtgaaagcacttgtgagctcccgtcccgctgtcatcccacagcacgcgacctctgcagggtcaggttgcctgttctgaagctcattac

SEQ ID NO: 465872 - DNA, 122 bp, Homo sapiens
gtggctcctcaacagacacccagcaccagatgttacaaacaagccattttgcagcatctccgcgagcgccgcccagctgccctccctggcttcctacctttcggcctgcctcgttgttgtgc

SEQ ID NO: 465873 - DNA, 122 bp, Homo sapiens
ccagtgcatcttcaacagagctgcgggcaagagacaggaggtctggtgaggtctagccaccgaggacccagtgggccactgctagccataggccagtccgcctagactgcggcttggacagg

SEQ ID NO: 465874 - DNA, 122 bp, Homo sapiens
cgacggcgctgtccggcattatgaactcatttggttggcatactacagtggcaactccaccgattataatccaagggttgaccaccgtttgcccaccggtcactgccgtccctccttcctca

SEQ ID NO: 465875 - DNA, 122 bp, Homo sapiens
tggggtaataagggctgttccttctaggtcgaggctcacaggggatgggtctcagcaacacgggacagagaactggaggccaccattgagtctggggcacagcacctctgcagtccctgcct

SEQ ID NO: 465876 - DNA, 122 bp, Homo sapiens
ttgtcaagggaacaaaaaatgctatcacttcccgttagccagagcttaagaatttagctccgaactcatacctacttcattcttatgcactgactcgatttcctgtccttttcaattgctcc

SEQ ID NO: 465877 - DNA, 122 bp, Homo sapiens
catgctttgcatgttgatggaactgaacggccctggctggtgcagttccgccttcctcagcgagggagggattccagggcagatgtaaatgggaacttaaggccattcatcaattcattcag

SEQ ID NO: 465878 - DNA, 122 bp, Homo sapiens
tctggcttcaagttgcggctctgtcggccggaaccctccagcatgttcacgatctcgccacggtcaatgctctgcagggctgtgtacagattctccactgtgggcgcagaagagagatgcac

SEQ ID NO: 465879 - DNA, 122 bp, Homo sapiens
gctcctctcctcgagaagttcacaaggggcccaaatgtgacagggggagctatcagaaggcgggaggtgacttcttgccagggagcaagccagggcaagaagagaggcgccgtgaagcctgc

SEQ ID NO: 465880 - DNA, 122 bp, Homo sapiens
ggctccttatcctcccgcctcagcccggcaaagtattgggattactggtgtgaaccaccacgtttggccatcagtcatggcattaatattaggttctatgattacaacctcgtggtcgtcct

SEQ ID NO: 465881 - DNA, 122 bp, Homo sapiens
atggtaaatcaagtcatggactaaaaaccctaaactccacctgcaagaaggaggcaacatcgcccagggaggggcaggtggcccccatggccatgacacatatgcacagtgatgtctgttcc

SEQ ID NO: 465882 - DNA, 122 bp, Homo sapiens
taggtggtcagcatttattggatgaatgaatggatcaatatttgattgagtcttgaagtacgaatagaatttggcgaagtggacaaggcaggaaatgtgtattcaggcatgaggcttagctt

SEQ ID NO: 465883 - DNA, 122 bp, Homo sapiens
atagcagggggctggcagtttcatgatcatgtgacccacgtgtgtgtttgcacacgcgcacgaaggaacgcatgcacccttccacacagcgagaggagttgggcagtttccactctcagcag

SEQ ID NO: 465884 - DNA, 122 bp, Homo sapiens
tccttaaagccacatccctcagtgcagaagcctggccgtccgcagcctgtggtgcacgtgcggggcccatctgtgccgggtgtttgtcattattaagtgaccctgatgagaataaccttgca

SEQ ID NO: 465885 - DNA, 122 bp, Homo sapiens
cctttacctcctggagtggtctatgctaatctagcgccagcccagacccctcctgcatatcgatgggcggcagggaccgccgctgaaacaggcagagccctggctcaccggggaaggggtgg

SEQ ID NO: 465886 - DNA, 122 bp, Homo sapiens
ggaggcagaaccgtgtgttttcgtgtgtccatatggtaggtgtgcacatccacccacaggcgggagagtctgggatgggggccagaagggacttctccttttcactctacgttcctctcata

SEQ ID NO: 465887 - DNA, 122 bp, Homo sapiens
attttttaagagagaagatgcaaaaatccttttaggaggggagaagggaggcggagggaacgcctgtcaaataactttgtggtaaaatcatagagaagttggaggcagtatctaatgagagt

SEQ ID NO: 465888 - DNA, 122 bp, Homo sapiens
atcaagtttaattcctctcactctgtgtgtgatgaaggtgctataggttattgtactgaccgtgactctagttcccatcatgacttagaaggtgctgtaggcggctactacccagaacccag

SEQ ID NO: 465889 - DNA, 122 bp, Homo sapiens
agagagaaggaggtaagtgccacactgaagtcgacggtggaagccctgcacacccaaaaacgagagctgagatgctctctggagagagagagggagaaaccagcgtggttgcaggcagaatt

SEQ ID NO: 465890 - DNA, 122 bp, Homo sapiens
tgggcagtttgcagatgtactaatttctgcgtgtagacatcctagaaaaataagaaggctcgaagagacagtaacaaataattatacagccgttctgctttaacagatacagagcatgcatt

SEQ ID NO: 465891 - DNA, 122 bp, Homo sapiens
aggctcctaagggaaagggagggaaaatgggaaagatctgagcagggcatgttgctgcaacgctgacccactcgctggccatcagggtcctgccccagtagacctctgagattctaatgcag

SEQ ID NO: 465892 - DNA, 122 bp, Homo sapiens
gggagagatgcgcgcgagcccctccgctctctgcccagcctttccttccagcctcgctcgcgcccctgtctcaaaggcctcataggactcccagagtctcctatagtcgggagcccccagcc

SEQ ID NO: 465893 - DNA, 122 bp, Homo sapiens
ccgagcttttttatttttaacgtagctgcagctattgcacactagtaattttctgctctgcgaccgtttttctgcgctgtaataatcacgctaaaagtagtgcaggttttactgcttacaag

SEQ ID NO: 465894 - DNA, 122 bp, Homo sapiens
ctgcttcccagcattcacctgcagtcaagctgctcccaaggagctcgttcaaagagggggcgacttaggcagacactctggtcatgatctaaccatgttaattaagcatggtttaattaact

SEQ ID NO: 465895 - DNA, 122 bp, Homo sapiens
ttccgccaggtttcctcagtcatagacgtggacctactgcctgagacccaccgacgggtgcggctgcacaagcatggttcagaccgccccctgggcttctacatccgagatggcatgagcgt

SEQ ID NO: 465896 - DNA, 122 bp, Homo sapiens
agctccgcccgtcttgccctggtgctcatgatcctgcaggaggtgctggtgtcctgggagcgcagagcggggctgcgccagcgtggtccacaggctggagtgaggggtgggccagacgctga

SEQ ID NO: 465897 - DNA, 122 bp, Homo sapiens
atatctcacagcttgaccatcctagtggaacggagggagaccagacagagagcagacgaccgacccaggcagcatccggctcagacacagacatatcttcatttcaagggacctattcttac

SEQ ID NO: 465898 - DNA, 122 bp, Homo sapiens
aggcggccgcgggtcttgctgggaaatgaagtcccaaagcgtcagtgtttcttgcgagaccgcccagagcgctgaaagtaactcggccgccagggtcacaacaaacttgctggcagcggcgg

SEQ ID NO: 465899 - DNA, 122 bp, Homo sapiens
ttcccttcccaggccttctccttggcgcctccatggagcgtggcgcagagagggtgcttccgcaggaaggaggtcttggcgagagaaactggttccgggtgacccagatcctaatgaacatt

SEQ ID NO: 465900 - DNA, 122 bp, Homo sapiens
gcagaggtctattagtcctttttcttctcccctccaagggcactgactagtgattttcttcgggtgcaacatcttagttcatgttgaatgactgttatgtactgggtgctgtgatataaatg

SEQ ID NO: 465901 - DNA, 122 bp, Homo sapiens
gccaggggcctacggccgcgctgccctgcatcctcatagctggtgcctgttctgagcgagcgccaagtctcgggcaaaccggcacacctattagtgtcgtcttttgattcctccccaccaca

SEQ ID NO: 465902 - DNA, 122 bp, Homo sapiens
tgctttcaggggctcggtctcacgagaggcaggggacgagaactggggactcattgcattcgaagagagaattttacggtccctgagaggtcagtgagcggaccctctgacatggaggtatg

SEQ ID NO: 465903 - DNA, 122 bp, Homo sapiens
tgcatggacgtccaggtgccacgtgggcatctcgtggtgctgcagaaggcgggaggccggcgggtcccctgcgcttgtccccgccacggcccttgcccgctgtggacccggaggctcagtgc

SEQ ID NO: 465904 - DNA, 122 bp, Homo sapiens
tcagaatagagcgtttaagactccatgtccccaagtagtttgacagacatgccaaatcctcgccatcccaccctaacttcattgcagggtctccagcaactactaaataggttgatccagca

SEQ ID NO: 465905 - DNA, 122 bp, Homo sapiens
gattttcgccttatcgtaggaccaggaaccgaacttcatggtacagttttggtaatcaaacgggaagtaggtcacgtcgattttacaggagctcttaaagatggccggaggtatccaagtca

SEQ ID NO: 465906 - DNA, 122 bp, Homo sapiens
tgcgcctgggaagccgggctgtttctgggcggggctgcagactcctcgtgctcgtgtcaccgtgtccttcccaggagacagagaaggaggagagcccggaaccagggccggagcggcgggcg

SEQ ID NO: 465907 - DNA, 122 bp, Homo sapiens
cggtcctggcacgctggggctggtctccgaacggcccgccggactaaccttgaccctgagcgaacggccttgaactttgaaacaaatgctcccatggccagatgtcgcctctccggctcctg

SEQ ID NO: 465908 - DNA, 122 bp, Homo sapiens
ccagataggcagcgtgtccgggcccgagggatggaatgctgccccggggagcggctacagcgcgggatcctggggagatagctcaaggcaggccagggaaggacaggccgggcaatgggcgc

SEQ ID NO: 465909 - DNA, 122 bp, Homo sapiens
ctcacacatacccgctacttccatctaggccactcttcctctgtctcttgacaaggcaatcgtgcaatcaatctccgcaggccccagcttaaatgtcacttctcaggataacctttctcgat

SEQ ID NO: 465910 - DNA, 122 bp, Homo sapiens
tggaactcacctcttccttcactttggtggcaggagattggagcctggctctcttgctcacgtggcttctccttccattctccaagtcgagaagagaccttagtttttctgcttctaactca

SEQ ID NO: 465911 - DNA, 122 bp, Homo sapiens
caggcagcccatggcaggtgaagccggacatgccctgaggcctgggtgtgggagactggccgggatgcgggtacccacaggcacccctcagccccgcacactggcagttaggagaaagagaa

SEQ ID NO: 465912 - DNA, 122 bp, Homo sapiens
cgcaagacaaggtctctgaacacatgctgcggctctatgacaggtacagcacggtccaggcggcccggacaccgggctccctggagggaggctcgcagccctggcgccctcggctcctgcgc

SEQ ID NO: 465913 - DNA, 122 bp, Homo sapiens
cttgaatctttcctaggtgatcttaatgtgcagccagggctgagaactgctgggtgtggacggtggagcctggagttagtattctacgagtagacttaattggctttacggtgcattttttt

SEQ ID NO: 465914 - DNA, 122 bp, Homo sapiens
atagaaaggcagagtcaggcccgagagcgccccgcacccaccccacggccaccccaaggtcgttccaccccaaggtcagtccaaggccagcaacggcggtggtgaccctgacgaccttggag

SEQ ID NO: 465915 - DNA, 122 bp, Homo sapiens
cttctaagttgcacagctgcagggaagcctgctcaggtcatgtttttttgacttgtctttcggctcgctgtctggcaaggtcaccggctctggctcgcggctctgtcgacaaaacttaactc

SEQ ID NO: 465916 - DNA, 122 bp, Homo sapiens
ttctgcaggtgatccttttgagtaatttgtttcacgcaggcgccctgctgtagggtaaagcggcagattcatgctgctgtcatttgtcgttaaaactgtgggcttcttggccaggcgcggtg

SEQ ID NO: 465917 - DNA, 122 bp, Homo sapiens
gaagacggagaacgaaaggcggggtgggtttgggtaaagttgaggcgccctccgcagccccgctcctgcctcccctgcaaggtctggctgggggaagggtgggtatcccctcccctcccctc

SEQ ID NO: 465918 - DNA, 122 bp, Homo sapiens
gagtcaggggctgtgtgaaattatgctgacaagcagaaatgagcaagcatggcttcttaacgtttgttacttgtctcacatgatcaacaggcaagcaaaaaattaaaccacttcgtaagtga

SEQ ID NO: 465919 - DNA, 122 bp, Homo sapiens
acaatgcagcgagtcgcctggcatatcaatgacatgaagcggaaacacgagcacgcggtccggttacaggtgagcccgcgaggtgtcggtgcccggcagggttgcaggtgtagtgacttact

SEQ ID NO: 465920 - DNA, 122 bp, Homo sapiens
gaatgtacattccgtagaaatcataatgagaggtgacaacgttctagcagccctcactctcggcgcctcctcagccttggcgtccactctggcagtgcttgaggagccctttagcccaccac

SEQ ID NO: 465921 - DNA, 122 bp, Homo sapiens
agcaaatgctctatttcctggtgctttccttacatccatgtacacagtgaaacatgccctcgattttactgcctgtggtttctggtgctgaacaatttctgctttatcacataccttacctt

SEQ ID NO: 465922 - DNA, 122 bp, Homo sapiens
cagcggctctgcctcccccagagtgcccccctgccttggccccaagtgctcccgaccgcccggccaagtccccacggaatggagatgctgagccggctgcctttccccgcggggggccccga

SEQ ID NO: 465923 - DNA, 122 bp, Homo sapiens
acctagagctagagaaggctccaggagttgagtgcttggctccagggcctgggcagatggcgcatctggccgggataaggtgtaggcctgggagaacagggtcagtgcaggccacaggtgag

SEQ ID NO: 465924 - DNA, 122 bp, Homo sapiens
actctatgtcacgccaccttgctcgctgatctaactcttctccttgatggtgagctccttcgggatgagactggtgtcccaggatctgcaggtccccagaagctgccacataggagacacat

SEQ ID NO: 465925 - DNA, 122 bp, Homo sapiens
ttttttttctgtgttggttgccagtttatagtgccaacacgtggcgcgcctttgatggcccgggtgcacaccgagcactctcgggtgctcctatctccttcattcacttgctgagctacgcc

SEQ ID NO: 465926 - DNA, 122 bp, Homo sapiens
ttgggcattggtttctgttcggctctgtttacggggctgtgggatgggtacatagacactcgtctacttgaacttccagggactcgggaggcctgcagttgaataacaagagaccgtgctgg

SEQ ID NO: 465927 - DNA, 122 bp, Homo sapiens
ccagggctgagaagagagcctgagcatggcccccagcatcactagggctaagctgcatgtcgctgggcgggccctacgcctctccgagctcacaggctagacctgaccaggcgcactgccca

SEQ ID NO: 465928 - DNA, 122 bp, Homo sapiens
aggttctccggccacgagtggcggtacttgatgagtatgggctcacagccctgccgggcccgctcgcacacagacttacagggcttgatgggctcgtgctggaagtcaatggtgcagatggg

SEQ ID NO: 465929 - DNA, 122 bp, Homo sapiens
atgagtcatttcgataggagtgatgtctccgacgtggggaatccctgtggctcggcagtgcgagtgagtcacagctggctctgtgtgttgggctggaaatgagggcctgctgggtcagggca

SEQ ID NO: 465930 - DNA, 122 bp, Homo sapiens
cccaggactttaccacgatgtgaggggtttctcccaccccagggactccccacttttctgcgggaaccagctggggtcctttgactggtttcagttccaacgctgcctggaggtcatgcaac

SEQ ID NO: 465931 - DNA, 122 bp, Homo sapiens
gaaggctggagatcatgaagtagaaaagcctcctgttagagatgaggatgccccgcccttcggccccagagcaaaggatttccccgcttccggcgtggcccaaagaatcaagacccggtcag

SEQ ID NO: 465932 - DNA, 122 bp, Homo sapiens
aaaagaggtaaatttgaataggccttcttcggagtagacactccaaaaggctcataaacacgaaaatgtgctaaagcttactagtaatttgggtattgcccaccagtagactggcaaaattt

SEQ ID NO: 465933 - DNA, 122 bp, Homo sapiens
cccgccctctgctcagctgcacacaggccctggacgatgatctgcaacgggaggcccacacggtgacagcgcacctgacctctaaggtgggtggggcctggagaccaaggcgtggaggcagt

SEQ ID NO: 465934 - DNA, 122 bp, Homo sapiens
ctaatcctataaattttctccttctacctgagggtcttgtcccgccccccacatcttctccgcccctcacgcttctgagagcccaagcagggttacccggcgaagacttccggggccgatgc

SEQ ID NO: 465935 - DNA, 122 bp, Homo sapiens
ttctggagatcagaccgaggagacgggcccagctggcgtcttaaagcaaggagggggagtcgggaggaggtgagacccctgcacccaggtggggctcccaaaccgttctggatttaccacac

SEQ ID NO: 465936 - DNA, 122 bp, Homo sapiens
ttcagccacggttagattcttggagaaacagccctcagagaagtcactttcaagaaagcacgtgtgttttccagctcttgcagtgttcttctccctgaagcacctcatcagtacctgtatct

SEQ ID NO: 465937 - DNA, 122 bp, Homo sapiens
tccccaaggaagcaccaacgcctggccgcagggggcagttgtcatggggacgccagggcccgctgagctgcctccttagcaacgggactccccggccagttgccatggaaacagcatcccct

SEQ ID NO: 465938 - DNA, 122 bp, Homo sapiens
gtgccgcgtgcgccagggacccaggggacaatgttggagaggtggaaggtcccgagcgagcgcctctcccgctgcccgccagagtcaggcttctggtccctatggaggagagggccgctggg

SEQ ID NO: 465939 - DNA, 122 bp, Homo sapiens
agggctccgcgaggggtggtgcgactctaaccccacggtcgccacagcagctggagaattcggccaaacctgactctttctccaggggcgagggctccgccagaccgcgtggacaaggaacc

SEQ ID NO: 465940 - DNA, 122 bp, Homo sapiens
gttcgggagtatggctatacgtctgtgaaagcaacacacaatcaagaaaacgagcgttcccgtcacccccagtccctgctcctctttcgtgaaatcaaggaaacgagcgttcccgtcacccc

SEQ ID NO: 465941 - DNA, 122 bp, Homo sapiens
ttgagaccatcccggtcaacatggtgaaacccagtctctattaaaatacaaaatattagccgggtgtggtggtgggcacttgtaatcccagctacttaggaggctaaggcaggggaatcact

SEQ ID NO: 465942 - DNA, 122 bp, Homo sapiens
agcacctactacatgccagaatctggagacacagatgcacggacacagcagggaacaggacgggaagctcagggagccccgttctagttggggaagaccgacgagataagtatctagcaggc

SEQ ID NO: 465943 - DNA, 122 bp, Homo sapiens
ccccaaaggccggtttctacccgatgatctcttgggccccgtcccgagagtgaggcacggcgccaccaggcacccccgatacgcagcgtgttgtgaagtgcccttgtgagcagcgggggata

SEQ ID NO: 465944 - DNA, 122 bp, Homo sapiens
cggggactgggtgctctcgagccagtcccgccttctcagggcgttacagcttctgtttatcgtgcactttctctcagtaggaatttctccacgttcattgtgatagtgagttacaaggatta

SEQ ID NO: 465945 - DNA, 122 bp, Homo sapiens
ggcaacatggtgaaaaccagtatctacaaaaaataaaaaaactcaccgggcatggtggtgcgtagtcccagctactcagaagatcacttgagcccgggaggttgatgctgcagtgagccact

SEQ ID NO: 465946 - DNA, 122 bp, Homo sapiens
ttccaaaactcatttaggtaaagagaagtgatgacttggctacagaggaaaaaggagggccgggaagggaagtgcaggctaggaaaagtgactaaaaacaaaagtagtagcaccagttacac

SEQ ID NO: 465947 - DNA, 122 bp, Homo sapiens
tggattaggcaaggctgctaaagagagacaggaaatggctgtgttagtgcttcggacctccgttagaagtagcagttcatggtgttgaaggtttgttgttgaaaataccttcctgaggcacc

SEQ ID NO: 465948 - DNA, 122 bp, Homo sapiens
ctctcgggcatcggtttctcccagcaaagcttggagggtttagctgcgcggagagctcagcgagctcttctgtgtctgtttggggcgtgtgggctccgggagcgtgaggaccgggaagctag

SEQ ID NO: 465949 - DNA, 122 bp, Homo sapiens
ggggcccaccgcggggcgggtctttcgggcgggaaagattgcggcgcaggctccctttcccgcccgctgtcccgcctcgtctccctcgggcgggaacgcgagccagtgccgcaatcacccac

SEQ ID NO: 465950 - DNA, 122 bp, Homo sapiens
ggcgccgggagctcgcggcggaagtgggatctcctgggccgtagtgggcgttgtgtgtttcgggggcgggggcgggggcgggggccggggcggggacggggcctctggccgcctggctccaa

SEQ ID NO: 465951 - DNA, 122 bp, Homo sapiens
tatgggggattatggtaaagacatgtgagttccacttttgacacatgttggtaataatcacgaacgcatgatgtaattattcattttgtttcaagagacattttttttcccacataggagcc

SEQ ID NO: 465952 - DNA, 122 bp, Homo sapiens
gcaaacgcttgaagtcaatttaatttccccttcatttttatttctcatgtctgatcgagccgtattggtacttcctgtacagtttctttccaatccatctttgcttctcattctccttcaac

SEQ ID NO: 465953 - DNA, 122 bp, Homo sapiens
ggccgcggcccggcgctccttccccaccgcggcccgacgcaccccggccgccgccatgagcggctcctcaggcaccccgtatctgggcagcaagatcagcctcatctccaaggcgcagatcc

SEQ ID NO: 465954 - DNA, 122 bp, Homo sapiens
tccaggacagagccacaagcttgtccccagctcagggaggtccaggggcggcagagggagcgacaggctgcgaagcccaccggtgaccacgtgtgaacccgcgtgcgcccccagctcggcca

SEQ ID NO: 465955 - DNA, 122 bp, Homo sapiens
gagtcaggtatcccagggatctgtgacgagggagctggggcatgggtgtcggaccaaagacgcctaagtttgaatcccagctgtgagcttgggcaagctcctcaacctctctgagcccatgc

SEQ ID NO: 465956 - DNA, 122 bp, Homo sapiens
tgagaatttttttctttttgaggatgcttggcatcttccccatttgctctggaccaaagacgggcatcaagacgcaggtcacttctggacacctgagcattcaacgagctgtgtcccacggg

SEQ ID NO: 465957 - DNA, 122 bp, Homo sapiens
agcctatgtgcctttgtgcccgtgttgtatcccacgtgttttgaggacatgtattttgcacgtaaaggtgagctcctgctccaagctggttctgataccaaaggagtccctggcttatccta

SEQ ID NO: 465958 - DNA, 122 bp, Homo sapiens
ctctccttcccccggggcggcgggggcgctctagggccgcaggttggaggggtcggactccgggatctgcaggatgcggcacacggcgcggatcggccgcaccagcttctgggccgaggccg

SEQ ID NO: 465959 - DNA, 122 bp, Homo sapiens
gcacgtgaataattcagcagtcgcgcgggggccggttgcatcagcgccgccgccgccgcgcggcgcccaattccccgcggaggggagtagccaattaaggcacttgaaaagggagtcgggtg

SEQ ID NO: 465960 - DNA, 122 bp, Homo sapiens
gcgacctgcgaggacacagcaagcggggtgacgctgagcagaggcttggtgtggagtccgcgcccgcagggtccctccccgccccgcgggtgcttcccgccacctcgctcgcctctgcgtcg

SEQ ID NO: 465961 - DNA, 122 bp, Homo sapiens
attagtctaacaacagaggcctggttggagccaaaagaaaaacaaaacgaaaatttcaaacgatctcagagttatacagttcccaaagcctgggttattctctaataatactacctatggga

SEQ ID NO: 465962 - DNA, 122 bp, Homo sapiens
tcattcaaggaccgtgacagcacagacggctgctgggagaggcgatgctttgcggaaccccggatgcaccagcaccccactggcagggccccggggactctgtgctctctggtttcctggtg

SEQ ID NO: 465963 - DNA, 122 bp, Homo sapiens
tggcctaggctccgagactgatgacccgggaagctggggcctgcgctctgctctgtggctcggcatgctgtgcagctgacctgagcagctcttgaggagtcactgctcatttaccagtcaca

SEQ ID NO: 465964 - DNA, 122 bp, Homo sapiens
gcagtcgtctcaccttgtgcatccgtggtcgtccctcgtcccgccttgcacatctgcggtcgtctcaccttgcacatccgctgtcgtcccaacttgcgcagccgcggttgtcccaccttgcg

SEQ ID NO: 465965 - DNA, 122 bp, Homo sapiens
gcgcctttctgcctgtgaggtagcccagactagcaaggaaaaccaacaaggagtcatcttcgtggccacatggttggactattcacgaacttactgctggtttgcctcaagtactcctggtt

SEQ ID NO: 465966 - DNA, 122 bp, Homo sapiens
gcggcatcagatcccggcgggaggcccgaagtcgctagaaggtggggacggccttggaggcggggggccgggccggatccccgggcgtccccggcgtcgcctcctcgtccagaccccggcgg

SEQ ID NO: 465967 - DNA, 122 bp, Homo sapiens
aaactcatctgcatggcaattgatgtgaaggctcttttctccatcttgtaggtgaggtaacgggcttcctaagagaacttatgggacttgtccaagctgtactgtataaatggccgatgtaa

SEQ ID NO: 465968 - DNA, 122 bp, Homo sapiens
acgacgcagcggtgtgagaaccagcaaccggaaccgcaaaagcacggctttcccggagcccgggctctggactggcacccactgcgcatgctccagagcggcgaccaatgggagcccggcgc

SEQ ID NO: 465969 - DNA, 122 bp, Homo sapiens
ctttaatgaggatgggagcccccagggagccgaaatccaaagtagaacgatgccgctttccggtttcttgcaatttcttcagttgcttctcccttttccaatgggcctagtgagcaggaact

SEQ ID NO: 465970 - DNA, 122 bp, Homo sapiens
gctagcatctttgaaacagtgggctctgtcttactgggggccaaagtgagcgaaaccatccggaagggcttgattgacgtggagatgtacaactcgactcaagggctgctgatggccggctc

SEQ ID NO: 465971 - DNA, 122 bp, Homo sapiens
acgcaggagtccccggcccgcctcctccaagacagtgtgcgcattttgcccgagacaacacgggcctcagaccgggtaccgtgcccaagcacacacgggcacacgcccctcccacctccggg

SEQ ID NO: 465972 - DNA, 122 bp, Homo sapiens
tatacacatatacacatacagtcacacatcgcccgatggcagggatggttctgaggaaggcgctgttaggcgatttcgtcgctgtgcgagcatcatagtgtgaacttactcaaacctagatg

SEQ ID NO: 465973 - DNA, 122 bp, Homo sapiens
caccatgaaaaaacggtcccgcctcagcctcccaaagtgctgggagtgagtcactgtgtccggccaagttctgtgtattatcatacattgtcctagaatagagtgctctgataaattggtat

SEQ ID NO: 465974 - DNA, 122 bp, Homo sapiens
ttttcaccccatctcccccatccctgcgactctgaagtgctgagttgtcctgtgctgtaacgcggggcctgttacccctctgggagaggagactgtggaccattttcctaaacaagataaga

SEQ ID NO: 465975 - DNA, 122 bp, Homo sapiens
ctccgcctggcctggcccggcccgcgagatccctgacgctccagttcggaatctgggatccgcaggctcccagatccgccgctggcccggctcccacccgcccgtcagccgcctccccctca

SEQ ID NO: 465976 - DNA, 122 bp, Homo sapiens
ggatgggctccatgacgctgggccggaagaagctgtcgctgaccctgcgctttggcttctcgcggggcacggccgggaagcccgggcgcggcgctgcgggcgtggcgacttcgtcctccagg

SEQ ID NO: 465977 - DNA, 122 bp, Homo sapiens
cccggattatttaagactcgatttgctatctcttggactcagcctcgcacaccccctgcgcgaggcagctcctcaatggatacaaacagcgagcgtctcaatggatacattctccgggccag

SEQ ID NO: 465978 - DNA, 122 bp, Homo sapiens
ttccgggcaggtaccgggcagctggagacgccagagccggcgggtaaggtgcgggcggtgcgccgggccgcgggcgcgcaaggaggggcgagagggtggggaggggcggggccggcgtcctc

SEQ ID NO: 465979 - DNA, 122 bp, Homo sapiens
actgcaaacaaggcggcctctaggggcagcatggctgcctcctgctgttgacacagggcgcgaccttggccctcctccaaatgatctatgagggcaggtcagagaacaaaggtgtcacgcct

SEQ ID NO: 465980 - DNA, 122 bp, Homo sapiens
gtttggatgtgagggagggaaagagaatcctaagtgtattagtagtggtgggaggaggttcggtacagtggtgtcatttggaagacaaatcgttggtgtttaacctctatgacccgaaagtc

SEQ ID NO: 465981 - DNA, 122 bp, Homo sapiens
gaccagatatgtctccttgcagcttgttgtgaggcactggcaagcatggtaacacatcaccgttctttgcttctcatctttctttgtttcatgttcctgagttgacttctcctaaataaagc

SEQ ID NO: 465982 - DNA, 122 bp, Homo sapiens
cagccaaatgaaataagagctaactcattcaagcaggagccccggaggactaaaagaatccggcctctcccaggcctcctcacctgagcagggctccctcctgactaccgcccacccactcc

SEQ ID NO: 465983 - DNA, 122 bp, Homo sapiens
gcggtggccgcggaacagcttccctcagcccgaggtggggcaggcgcgggggcctgggctcgggcgctgcccggcggcccggagaggcgtccgcagggggcacggctgctcgggcggggccg

SEQ ID NO: 465984 - DNA, 122 bp, Homo sapiens
cagaaaggcatgggaggggcacaagggactctcttggggtggaagatcaccttcgtggcacgagcaaagacagccatcaaaactcatcacacggaacactggggagctgtgtgtcctactgt

SEQ ID NO: 465985 - DNA, 122 bp, Homo sapiens
gggggggatatttgggggggcaagtcccttctcaggtgaagctgctgatggagatggagccgccgccaccgccgcctctgagcgcccgggtcctggctccggcccggcgactgccgccgcct

SEQ ID NO: 465986 - DNA, 122 bp, Homo sapiens
ggaagcgcctgaggttggtggtggtttcagtaggtgctgaaggccacgagccattttagccggtgcatatggggaagggagacaatcatgacatgggcattcctgataaaggaggccaccgg

SEQ ID NO: 465987 - DNA, 122 bp, Homo sapiens
cccaccagctcccctccctactgggcgagctgctttgaattgctcgcagtttgccggaggcggtgtgctgggttggacgctccgggaaacaaagcaacccaaaacagctcccagttgacgtc

SEQ ID NO: 465988 - DNA, 122 bp, Homo sapiens
ttcatcaaagacgagtgactcagtgcttttcctgctgtctggccacatgatccacatgcccgcaaaggggacgtgtcttgaacatgtcatgatttcccctgaatttcttatgttattctttt

SEQ ID NO: 465989 - DNA, 122 bp, Homo sapiens
cgggagtttcggtttcctttctcctctcagaagcacttaggtttcagtttcccttcagcacgaattaggcgaggcactttcgtggaaagtttagcatccttcccttcaatcagaatcttaag

SEQ ID NO: 465990 - DNA, 122 bp, Homo sapiens
gctcccggggtggctagtgctttgattggcagagcacagaaatccggcggcggggggccacggaaagactcgggcccagggaccacggagggggcacctggcgcggagcccccaccctaccc

SEQ ID NO: 465991 - DNA, 122 bp, Homo sapiens
cgttatccagagggtgcagttgtgccaaggtttgaaagactgtgagaaccccaggacgcacgtgctgggctcccctctgctcccactactcttgctgctttaaagatgatggactttcagct

SEQ ID NO: 465992 - DNA, 122 bp, Homo sapiens
ggggggcagagagctggttttcgggaaaaccaatgtgttggaccccaaacatccaccctccgctcggatccaagttctctgagaactgaaacgacatcccgggacgaatgggagagttaggc

SEQ ID NO: 465993 - DNA, 122 bp, Homo sapiens
aatcagacaggaagccaaataatccggggcgttgagtcgctttgccctgactgcgagagccgggtgtagggcggggagccaaggatctgaccgcgaggggcgggcgcggcggggaggggcgg

SEQ ID NO: 465994 - DNA, 122 bp, Homo sapiens
ataaaacttggaggggcccgcaggaatggaatactttttcttcctgtgtttaaatttctacggaaaatctgaccggcgcggccaccgcccctgccataggcgggcggagagcgcttatatct

SEQ ID NO: 465995 - DNA, 122 bp, Homo sapiens
cacgggcccctgcgctggatacggcgacggtttctcattttgcctttgccagctctcattcgctgagaggcatagacctacaaagtgagcagttttagtattctgattaagatagaatctct

SEQ ID NO: 465996 - DNA, 122 bp, Homo sapiens
tgctttcccttagttaccatggaaacaggacagggtgcttagagcaggtgtcagcagcttcgaaatcaagatgaatcagctgatggctcgtcatctgggggaggtgctgaccgagccccggt

SEQ ID NO: 465997 - DNA, 122 bp, Homo sapiens
cgattcccgggttatgagctacatttcccagaagccctcaaggcaggacgcccttagggtcgcgtagagttgcatgctgggaaatcctgacagccgcttccaactctgtggatttccgggtt

SEQ ID NO: 465998 - DNA, 122 bp, Homo sapiens
ggccaacaggtagggagcgctccccggcctccgcgccgccagtattacgggttaccatcccgttttccccattgaactgatgagaaaactgaggttcagagggttgagtacctcgatattct

SEQ ID NO: 465999 - DNA, 122 bp, Homo sapiens
cgccgctcccgcgccctctcaaccatcctgggattcccgggcccacccgacccagcggcgcgaccctggccctccgggaccctccgctgactccaccgcgcacttcccgggacccccacaca

SEQ ID NO: 466000 - DNA, 122 bp, Homo sapiens
tttccaaacaggattatagcttttaaccgggcctccctcacctaccctgtgattgcgcagcgggtcagatctggaccagtaagttctggtctattcagtttgagccaggctctagggccagt

SEQ ID NO: 466001 - DNA, 122 bp, Homo sapiens
tgggatggggcggcgttgggggtgcggccctgaaccggagggatttagagactggagacgcggcctctaagagaggttgaaactgtgtgtgtgtgggagaaaatgataaccaccctcccatc

SEQ ID NO: 466002 - DNA, 122 bp, Homo sapiens
cgtagaccccagaacccaccaggctgtgctctctctcaggcggcagggtctggccagcaccgcccctggggcggggccggacgcgagggctggggcggggccagacacgcgagctggggcgg

SEQ ID NO: 466003 - DNA, 122 bp, Homo sapiens
cttggccttcctggtcgctgtcaggtatgcgccaagcatcacagcgtttgggtatgaaaccgcccagtcacccgatgtgaaacccccacgactcctctctcctcccccgccaggctccgacc

SEQ ID NO: 466004 - DNA, 122 bp, Homo sapiens
cccaaactaatgttctcccctgagcaaatttcgagacacttaaaatcccagctaagatcacgtccttctattcaaaaccctcagttaatctcaacgccctcagaatgaagcgacaacttctc

SEQ ID NO: 466005 - DNA, 122 bp, Homo sapiens
gttcccaggtctacagctcctgtgagggccccaagaacctcctcctgcggcggccgcccccggcccttaagccgaacctggagagcgcccccgcacacactaaaatctcccggggagcagcg

SEQ ID NO: 466006 - DNA, 122 bp, Homo sapiens
ggagccaggcgcacctgctgggggcccagggtggtggggctgtgatcagaaaggaagccgcgtggtgacacataaagcagggctgcccccacacgagtccccagaggaatcttaagctcccc

SEQ ID NO: 466007 - DNA, 122 bp, Homo sapiens
ccaggctttgtgctatttgcatggaggcttcggctggcagagccccctcctttccccacacgctattccccataggtgtggcatccaggcttttctggggttggggagggggccaatgacct

SEQ ID NO: 466008 - DNA, 122 bp, Homo sapiens
gaagtccaccacggcctcctcgtcgctccagtagagcaggttgatgtctgcgtggtagctcgctggagtggacttgtgggtgttctcaggcctgcgagcgggagaggcctcgttaggagctc

SEQ ID NO: 466009 - DNA, 122 bp, Homo sapiens
ctcctgaccctgggcaggacaggagggcaggtagctgcacatggggatgagcctgtcatgcgaccatcacagagagggccctccactgaggctgacacatgccacctcaaacaatttggtgc

SEQ ID NO: 466010 - DNA, 122 bp, Homo sapiens
ctgtggcccccggctgcggaggagtccgagacgcagctgccgcgccggggcctgagctgccgcctcctccgccgcccgaaaacccggagtgccccgcacaggtaagtggcccgggtccgggc

SEQ ID NO: 466011 - DNA, 122 bp, Homo sapiens
ggccgagcagctctggcaggcggcgggcgggtgggctgcgcgcgggctgtgtcctgggtccgcctagcgcggccttgtggccccgaccctctcctcccctggtgatgctggaggaggtaccg

SEQ ID NO: 466012 - DNA, 122 bp, Homo sapiens
gctccaccagggcgaccctgggcgctgagaagcgggaatcttccttggggaccagggcgacgcctcctgctgccgcccccggcgggacagccgcggctcctcctccagccgccgcgccaccc

SEQ ID NO: 466013 - DNA, 122 bp, Homo sapiens
aaatgcaaaagattttattcattgcagttctcagtaataattccactttactatccagtccgttcatgcagagttaccaaggttgtcacgttgagatgctggacttgaaatctggagtcctg

SEQ ID NO: 466014 - DNA, 122 bp, Homo sapiens
ggcgcgcagacggggctggcatctaccatatggggggcatccgggccgaaccaagtgacccgcgtggggggtcccgctggggactccgtgccgcaccctcccaagccggccccaggggccca

SEQ ID NO: 466015 - DNA, 122 bp, Homo sapiens
atcccagaaagcgcctttcagggctgtgagctggggccattttcacatttaccgcttcaccgagtccccatctgacggggatgaataggcatttagcgaatttacttagcgatgcttccaca

SEQ ID NO: 466016 - DNA, 122 bp, Homo sapiens
ctgtttattggacacctacagtagccaagccctgggcggacctgcttatacttatgtaatcgccagcctcacaataaccaggggaggtaggtgttctgaccatggcggacacagtgcgtccc

SEQ ID NO: 466017 - DNA, 122 bp, Homo sapiens
ccaaagaaaaggtagtcagatcaatgctacccttcaggcagccggggcggcctggggacgcgcagcgtccgtcgcgcaatcgctccagcttgaatgcgagacacgcgggtttaatttttcat

SEQ ID NO: 466018 - DNA, 122 bp, Homo sapiens
gcggggagggggatggggggacaccggggaagcttttcccgcgtgcgcggccccgcgtcccgccaccggaagccgtacacaggccacagagaggatgagctggctagagagacgcgagtcgg

SEQ ID NO: 466019 - DNA, 122 bp, Homo sapiens
ctgggtctaagagagctgcagcccagggtcacagacctgtgggccccatggccgggaaggcggcagaggagagagggctgccgaaaggggccactccccaggatacctcggtgagtgagcaa

SEQ ID NO: 466020 - DNA, 122 bp, Homo sapiens
ttccttctccatgaccctccggaagctcatgcagagtctggagctcgtgggccctcaggccgccttcttgtccttggtgtggagggactcagtggcctccgggaccctgtctgggcatctcc

SEQ ID NO: 466021 - DNA, 122 bp, Homo sapiens
gtgtctcccccaaaattcttatgttgaaaccctaacctccaatgcaactatatctggagacggtgcctttatggaggtaattaaggttaattgaggccgaaagagtgtggctgtaatccaat

SEQ ID NO: 466022 - DNA, 122 bp, Homo sapiens
tttatattattgtaattaatttaaatttaaatgtagtagccatgtgtggctattggacaacgtgcctctaggtcattatcactggtatctagatagatgagacaattcacagaagcctcaca

SEQ ID NO: 466023 - DNA, 122 bp, Homo sapiens
tccaatacccaatgggagtgggaagtggggacgcgtcacgagtatcctggaagaaggacccgacacaagttgggagaagaagtgaaactcaggggagtggggaatccccaacgctgcgcctc

SEQ ID NO: 466024 - DNA, 122 bp, Homo sapiens
actcaccagcaatatacagtcattcctggtaaccaataaagcaacttacttactttaaaacgaacaacaaaaaaaagtgttattagttttctccatgcggacaaaagcaacaaaatgttttt

SEQ ID NO: 466025 - DNA, 122 bp, Homo sapiens
gtgctgattttcgcctgtgagacttcctcccacgggcgccgctggctagtcagactttcccgcgtgcctcctgccccgccctaacaggctaacttttccgcgccgggcctggctctttgctg

SEQ ID NO: 466026 - DNA, 122 bp, Homo sapiens
tggaactggacactgagaccgatctgaactttgctttaaggtggcagcatcttgagtactcgctgttctgaaacttacgaaaccaaaacggcgctgatgagtctgtttgggatcccgctgtg

SEQ ID NO: 466027 - DNA, 122 bp, Homo sapiens
gcacctttaacccacgatgcctgcaacccttcccgttgtcatgggagaccccagtcacaccgcagcaaagcccctccagccagactgccgttggtgagacaaatccctcccttcccggctcc

SEQ ID NO: 466028 - DNA, 122 bp, Homo sapiens
ttgcagcaccatggtttctaggtagattctagttcccatcacacttcgcgtcttaacttgcgggtaaccctaagcaagttacttaaaactttctatgcctcagcttgcatgtgtaaaatgag

SEQ ID NO: 466029 - DNA, 122 bp, Homo sapiens
gcagagatcggggccctggggatcatgggagtcaggcccctgcccttgagtgggctttgtcgcttacatgaagtcgggctgttcatctttccttgttgtggcattggaactcagccaagcag

SEQ ID NO: 466030 - DNA, 122 bp, Homo sapiens
cagcgcccggcgagaggctcggagtttgatcacacacagcgtccggcttcctgtccccagcgccccctcccgccccgtttcccttgcccctccctctccccggcccgatccgcccgccggct

SEQ ID NO: 466031 - DNA, 122 bp, Homo sapiens
tctctgagggctggctgcgtgagtgaactgccttgaggtcgcctgggctcccacggaccccgccttcgccctctgtcctctttgtgtgtttcgtgacaggagggacgtgcgacgtccacata

SEQ ID NO: 466032 - DNA, 122 bp, Homo sapiens
gtgcggggagggggttgcaaaaggagccgagcggcttctgctcaatggcggaaaagccgccggtgctctgacggcctcgttcccctagcagttgcgggggagtttcctgccggcgcggctgg

SEQ ID NO: 466033 - DNA, 122 bp, Homo sapiens
tttcactagctcagatcacaatattacacaatatatccatgtaacaaacctgcacaggtacgctctgaatctaaaaaaaaaaaaaaaagtcagtcagagcatgttactgctcaaaccctcca

SEQ ID NO: 466034 - DNA, 122 bp, Homo sapiens
cccgtggctgtccctctccatggtctctgaggggaagagtcctccaggcttagctgatgtcgaggagaagatccatcttggtccctggcttctcaggcatgtagggtaaaggagttggaggg

SEQ ID NO: 466035 - DNA, 122 bp, Homo sapiens
ctgagtgcagcctgtagggggcaacaaatcaacacctctctgccagcccatttctcaacccggcagctttcccagccaaagagttaaggtctaggctgaggagatttgccccagaacaaaga

SEQ ID NO: 466036 - DNA, 122 bp, Homo sapiens
cccagcctcccctgcttccttctcctcttaccagccaagtacaagaagtagagatcagctcggactccaacactgtccagggagatccagcccctctttagagtgaagcaagatttaaaggc

SEQ ID NO: 466037 - DNA, 122 bp, Homo sapiens
tccaaacatcaaaagaaacaaactccagacgcgctaccttaagagctgtaacactcactgcgagggtctgcagcttcattctagaactcagtgagaccaagaacccaccaattccggacaca

SEQ ID NO: 466038 - DNA, 122 bp, Homo sapiens
tggggtcgaggtcaaggaaagttcgcaccgagatcccctctaatttattcaaaggtttggcggcggcgcgtaattttttccccctcttccgcctacacccgctgcgtctcctggtgtctcgt

SEQ ID NO: 466039 - DNA, 122 bp, Homo sapiens
cctgggcctccgacgtccgtggcgctttccgtcgcgcgagtgcgattgggccgcctgtcacgtgacccgagaccccacgcccggttggctgccgcctggttaccaatgggagactagcgggc

SEQ ID NO: 466040 - DNA, 122 bp, Homo sapiens
aatggggagtagaatgatggttaccagagtaacccttaggggaagtgggagagaggtatacgaagagagattgatcaacaaagtataaagttacagttaggaaaaataagttctggtgttct

SEQ ID NO: 466041 - DNA, 122 bp, Homo sapiens
gcggaggtggagctggcggagagcgggaggcggctgcgactgccgcgggaccagatccagcgcatgaacccgcccaagttcagcaaggccgaggacatggccgagctgacctgcctcaacga

SEQ ID NO: 466042 - DNA, 122 bp, Homo sapiens
cttttaaaaaaattgtgtactgcctacaggtctttatggaagtttcacctttctttgtgtcgcactggcatcggctgtataatttttgcagctagaccacattttaaaaaaatctacatttt

SEQ ID NO: 466043 - DNA, 122 bp, Homo sapiens
gcagaacagctctctcctctacccccagctctgttgggatctgaggtgaggcgctggaggcgggatggagagcagtggaaaaggaggtatctgataccctgcagtaagcttctttttcctgt

SEQ ID NO: 466044 - DNA, 122 bp, Homo sapiens
tgcctggagccccttgaaggcagggaccgcctcttgtctaactctggcctggtgtccacccgtgacttaggtcacaaataaatacctgcaggcatggggctggacagaggtggaggcctaca

SEQ ID NO: 466045 - DNA, 122 bp, Homo sapiens
cgtgaatgcgggggagagaagtcacaggcagagaaagacagaaaatgaggaggtggaaaccggctgtttgggggatgggctaattgcccaagtaaggctctgccctgagacctggggattat

SEQ ID NO: 466046 - DNA, 122 bp, Homo sapiens
atctgagcttagggagtccgggctcacggggcggggagcccagagcggccgcccagcatccgagggacacagccctcctgcagcccccagccacaccccctgcgtggcccgccttgtcccag

SEQ ID NO: 466047 - DNA, 122 bp, Homo sapiens
catttcctccaaggtagaaaggggtaataatctgacctacctcaccagagtgttgtaagtcggaataactaattaacgctagtgcagcacttttgaaagtaaaaagcactttgcaataatta

SEQ ID NO: 466048 - DNA, 122 bp, Homo sapiens
gtttaacgggcttccttagcaggcggtccctggtgattgcaaagacaaatgggtcctactcgttctggctgccagcaaacttttacttcccttctttagaaacatgtattttaaacatagaa

SEQ ID NO: 466049 - DNA, 122 bp, Homo sapiens
atattccagaggtcactgtccttcattatctaatatcaagtttcttaaaagctaatgcctcgtatattttgttcagtttttcattcacatcaggcaggagggaaaaaccagtctctaaaact

SEQ ID NO: 466050 - DNA, 122 bp, Homo sapiens
cactaagcaccaaacgctggaattagaaaaagagttcttgttcaatatgtacctcacccgcgagcgccgcctagagatcagtaagagcgttaacctcaccgacaggcaggtcaagatttggt

SEQ ID NO: 466051 - DNA, 122 bp, Homo sapiens
gagccactgtggaagcaagtactcatgttaacagcttcgagatgctctgcatgtgaggaccggcggggaagcaagacctcggaaacaggattttaaatggagcagcaagcctcggccgctca

SEQ ID NO: 466052 - DNA, 122 bp, Homo sapiens
cctgctcgcgctctcggcgctcggtctcccgtttcggcctccctgggcttcgctccccaccgcgttcatcctgctcctcgctcgccagctcccgtgcgggggctctaagctgctcccttcct

SEQ ID NO: 466053 - DNA, 122 bp, Homo sapiens
ccgacacgggcgagatgctgaacggcgcaggcctggacaaagctcttaagatgtccctgccgcggaggtcgaggatccgctcgtccgtgggtgagctgggaggggcgcggcgagggagggtg

SEQ ID NO: 466054 - DNA, 122 bp, Homo sapiens
ggcctgcgcatcgggtgagacgctggctgcttgcggctagtggatggtaattgcctgcctcgcgctagcaggaaggtagtgtggtgtgactaacgggtatttattatatcctcgatggctcg

SEQ ID NO: 466055 - DNA, 122 bp, Homo sapiens
cattttgcgtctctctggctcccagcacaataagaaatgtcagcctcggcttggcgactgcgagcccgccccgcgcgaagcgagattggggagctcctctagtctggccggagccagggctg

SEQ ID NO: 466056 - DNA, 122 bp, Homo sapiens
taataataaagcaatttcaacttttttagattaaggggtataccctagttttctaaacttcgatgagagttgtgcatttgctgaaggcttattacatgaagagtgacagtctaaattgtttg

SEQ ID NO: 466057 - DNA, 122 bp, Homo sapiens
agaaaagaaatactactcctgtctcaacatcgctcactactgccccaaggttcagcccatcggggacatccccatcattgacaatgaacgctgtaggagaccatgtgctgcctgaaaaaaat

SEQ ID NO: 466058 - DNA, 122 bp, Homo sapiens
aggggaactgggagcccaacaccagcacagctgccagctctttttcccacttaacggattcgggaaccatctcaaaggaagctgcaagagggagggaagcccagctctctgggaatgtgtca

SEQ ID NO: 466059 - DNA, 122 bp, Homo sapiens
gcaggctggctgggctgcagggcgagcagggtcccagtgctgcgcggcgccggctgggtgcgctctgagcccgtgactctgctcgcgcctttataatccaacctgccgctgatgtcatcctc

SEQ ID NO: 466060 - DNA, 122 bp, Homo sapiens
gaatctcgggctcagggttggcggttaacgagggagcagcggggtcttggggagggggctcgacacccctgaaggtgccccctaaaggagccactgttagaggggcaccccatctttgtggc

SEQ ID NO: 466061 - DNA, 122 bp, Homo sapiens
ggccaaataggctgcagacgacgctttcgcgtatcttgggaaatgtagttccagtgttggcgaagacgccacgcggtgacaaacaggagtaaggcggtccccaggcgagggccaattggcag

SEQ ID NO: 466062 - DNA, 122 bp, Homo sapiens
cactttggggggagttgagagtcagacttccgtgtgctgctgggaatccaggggcgggatcgtcacctcttcgaagtggccgtcgtccccgctctcatagtcactcatcatgacctcggact

SEQ ID NO: 466063 - DNA, 122 bp, Homo sapiens
agaggccatggtcagcaagactcggggtagcaacaaaaggcgggaggccacaggcagcagcgccggcatccaaacaaaagacaggagcagagaggcctgagagcaggaggcgaattcgatct

SEQ ID NO: 466064 - DNA, 122 bp, Homo sapiens
ccaaaaccagatagaggaacattctacgggatagccagcctaaacttctcaaaactgtcacgaaaaacaaggaaaaactgagaaataatgcagttttaggatacctcgggttgcatcttgga

SEQ ID NO: 466065 - DNA, 122 bp, Homo sapiens
ctggggacactcctggaactcccagggaccccgcctgagagcccttgttgccagggcagccgttgggcttgaagagccccaggagctccaatgtggggccagcttcactcttttccaggctg

SEQ ID NO: 466066 - DNA, 122 bp, Homo sapiens
cagcaaagatgtgatgttctgaacacaacacacattttgagatcattgtccttatggccacggagaaataaacgctaaagtttcacttttatgttgtagcaaaaaggacagtcttaattggt

SEQ ID NO: 466067 - DNA, 122 bp, Homo sapiens
caagagccccggcggcggcggcggcggcccgcccgggtctcgtgtgttgtggtggtggtgcgtgtctgtctgtcagtcagtccctggccgtgcggctcctggcacgcgactcccaggcactc

SEQ ID NO: 466068 - DNA, 122 bp, Homo sapiens
tgggcacctgtctgcgaggtccggcgtctccaagaggctaaacctgctgcctgtaaaacccggggcgcggggcccgacccaccgagatctaggcgaaagcgaatcccactcggccccgacgt

SEQ ID NO: 466069 - DNA, 122 bp, Homo sapiens
gtagcccgcggccggggacagcagggcgctgcagcacagcagccaggagaggcgggtccccggccgcgccggccgccggccgcggcgcacggacatcttgcaggcagcacgcccggccgccg

SEQ ID NO: 466070 - DNA, 122 bp, Homo sapiens
tcccagcttctggtactggctggcaattcttggcgttccttggcttgtagctgtaagatgcgctctaatatcagtctctgttgtcatttgccttttctctgtgtctgtgttcaaatgtcctt

SEQ ID NO: 466071 - DNA, 122 bp, Homo sapiens
gcctgtgtcgtcgtccctgtttgttcttcaaacgtcaggatttctccgtgtttcccagaccgtaacgtacatttaaaaagcttgctttctgtcacatatgcccttttatattatggacataa

SEQ ID NO: 466072 - DNA, 122 bp, Homo sapiens
gagcctgtttcttcacagtggtcagcccccttgtctgcctgataaatgtctgtctgctcacgcacttggctccgcagaagtgagcttgctgggtccatggggatattcactggagattttgc

SEQ ID NO: 466073 - DNA, 122 bp, Homo sapiens
caaacaaatgtcggtgggagtctggctgagtgttcaggacgtttgcgaaaagaagcctcgcgcctgtggggaagcagcctttacgcatgactgggactggagtagcgtggagttttaagatg

SEQ ID NO: 466074 - DNA, 122 bp, Homo sapiens
ctgcgggggaggggggcagggagcgctgtgggctgctgggggtgcagggggccccgcgggcgcgcgtcacggccgtcttctcacctccatcccgacggctgcgaggcagaaagcgaaagcgg

SEQ ID NO: 466075 - DNA, 122 bp, Homo sapiens
cagctatacctccggtgacaatcatccaagtaggcctgaaacgtcttgggctttgaaatccgcaccatggcgggggccgggggcagtggccccacgcggggagcggcccacggggagcagag

SEQ ID NO: 466076 - DNA, 122 bp, Homo sapiens
atgtttgtaattcaatattatcacagtggttttcaacccaggtggcccatcagaattgcccgggcagctcttaaaaaatattgatgcctaggctaccgccaagaccagtgaaataagaatct

SEQ ID NO: 466077 - DNA, 122 bp, Homo sapiens
ctccagtcctctttttgccctcagcattggggagaatcttcaactgctggtggaccggcccgatggcacctactgtttccgtctgcacaacgaccgggtgtactatgtgaggtgaggcgggg

SEQ ID NO: 466078 - DNA, 122 bp, Homo sapiens
gcgggtcctgggcgatgggggtggagccgccatggagggcggggctacatgatgaaggggcgtggccagagacggaggctgcgccggatcccacgttccactcaccgaggttgggggtcttc

SEQ ID NO: 466079 - DNA, 122 bp, Homo sapiens
aggtgatggaacaggaacggggtccttccatgtgggaaatgctgagcctgcgctgccaaccgcctccgggtgagacatcttgtggacagctgggacaggcggcagagtaagaggcagtggtt

SEQ ID NO: 466080 - DNA, 122 bp, Homo sapiens
tccatgtctggccgtagtggacagcgctgcggcgaacatggggtgcgggtgtctcttctgcgtactgatgtggcctccgcgtgtcacgcccgggagtgggacagctggattacgtggtggtt

SEQ ID NO: 466081 - DNA, 122 bp, Homo sapiens
tgcgtggggaatgagggacaagcgcgagaagaaagggaaaggcctttctctctggtgacgcgcgatcacaaggcgttccctctacgtggacgctcaccattggcggagaccgcactgacgtc

SEQ ID NO: 466082 - DNA, 122 bp, Homo sapiens
tttgctccctggcagggccccgggagaggagcgggcaccacccgataggtgacattgtcccgtcacaggtggggctcagctgacagtggctcccaggcctggacgcctgatatccctgagaa

SEQ ID NO: 466083 - DNA, 122 bp, Homo sapiens
ccgcgccctccccctgcggaggagccccaccgccgcggcgccctcaccctgctcgttacccgggtgagtagcggtctcatctgctcgccggccccatcagcctccatggccggccggccagc

SEQ ID NO: 466084 - DNA, 122 bp, Homo sapiens
gctcacaccaggggagcagatccctcaccatcctccttcctctccaggtgccctacgagacgctgaacaaacgctttcgcgccgctcagaagaacattgaccgggagaccagccacgtcacc

SEQ ID NO: 466085 - DNA, 122 bp, Homo sapiens
caagtgctccacccgcctcagtctcccaaaatgctaggattataggcgtgagccaccgcgcgcagcctgggaacttttaaagcagtgctttgaggtcatggtggattgtagagaatgagaat

SEQ ID NO: 466086 - DNA, 122 bp, Homo sapiens
cgaccttgtttatacgtggtgcctgttactggtcgggtctgtacaggcagtttccactggcgttttttaccaggccagcctagagtagaatgaccgcatgttaaaatatagattcctgggcc

SEQ ID NO: 466087 - DNA, 122 bp, Homo sapiens
tgaacctgggaggtggaggttgcagtgagccgagatcgggccactgcactccagcctgggcgacagggcaaggctccatctcagaacaacaacagcaacaacaaaaggccgggcatggtggc

SEQ ID NO: 466088 - DNA, 122 bp, Homo sapiens
atggcccctgtcctgggtggtactgctgcaggacctgggtttccgggggtgtccgggagtcggatgggcctcactctcctggcctccactgggtccaggagtggcgatctgtgagccaatgg

SEQ ID NO: 466089 - DNA, 122 bp, Homo sapiens
tcaggcgggatgctccggccgaggtcccgccgcagccctcccccagcccccaggtcgcggcgccctcacccgggacccctccggacctggcgcatccatctgcagccgccccgaccccgctc

SEQ ID NO: 466090 - DNA, 122 bp, Homo sapiens
gttggttgagcaccgtgtctgcggggtttgtctgtgctgttgtgtgttgcaaggcttttgcgacacaaaccagaccctgtcaccgcccgacttccctccctcgagggccctctttgcattta

SEQ ID NO: 466091 - DNA, 122 bp, Homo sapiens
tagactaggctgcatgggcccctagaccctgaggagggcgtccatgatggctagccgacccgcgttaatttagtcagccacgctcagggctcaccgtcatcagttcctaaattcacctgcag

SEQ ID NO: 466092 - DNA, 122 bp, Homo sapiens
agaaagaagaaggagacagtatggtacccacagactttaattattgatattccccctcaccgccctcagggatcgggagaagtcacacgaccatagggagcttggacttggtggtcgtcacg

SEQ ID NO: 466093 - DNA, 122 bp, Homo sapiens
tcacattgattcaattctacagctcactagacctgcccaagacaggaccaatcaatgtcccgggagggcagagagggtggtggggccacacttagccatatggaaagacagtattctcagat

SEQ ID NO: 466094 - DNA, 122 bp, Homo sapiens
ctccaaccagttctgcaactgccctgagtctgtgtcttagcaaagaggccattagccacccgactccctggcttatcactgggcccttcctcatcagacacagagatcaaattctgagggtg

SEQ ID NO: 466095 - DNA, 122 bp, Homo sapiens
caaataattacagatgtcctttattaatgaaaatttgtacaacttcttttggattaataacgtagaaaaatgtatacccactttggaagttatagagaaggaacaaaaccttaactcctggt

SEQ ID NO: 466096 - DNA, 122 bp, Homo sapiens
cacgctgacctcccttctccagagcttggaggcagcgacctctctggagtgagggggaagcgggagtggggaatctttacttttgaagtagactgtgacctctgctttgtgatgggacaggg

SEQ ID NO: 466097 - DNA, 122 bp, Homo sapiens
gtgtcccatccttttctcctctaaataactaagcagtttctgtttctcaccactgaacagcgactaatacaaggatgaaattaaaagttctgtttaggacatgtaaatattctgatacctat

SEQ ID NO: 466098 - DNA, 122 bp, Homo sapiens
gctccgcctccggccatcccctggctctccccactcctccctggaatgccgtcatgccggcgatgaatatttatgaggcacacgcggccctcccgccctgccagcctcccgccttcccgctc

SEQ ID NO: 466099 - DNA, 122 bp, Homo sapiens
cccggcgctcctccagcgctggctgttcgcgggcagggtgggctggggctcctgaatatgcggggggcggggcgggggccggcgtgagctgtcacctgagaggaccggcggggttgccggga

SEQ ID NO: 466100 - DNA, 122 bp, Homo sapiens
cagagaggacaaaggtggaaagacacacgaaaggggcccgagacgggggctggagacgcgcggaacccgggctgcggagagggtgctggggtgcgcggcagggccagggcagcccgcacagg

SEQ ID NO: 466101 - DNA, 122 bp, Homo sapiens
ttctcttctcttggcaggtttgagacagttccagaaagaacccaagctcaagacgcaggacgagctcagttgtagagggctaattcgctctgttttgtatttatgttgatttactaaattgg

SEQ ID NO: 466102 - DNA, 122 bp, Homo sapiens
agatgggggattatgccacattcatctatgtttaaatcttggcaggctgataatttcaggcggcactgtcctagccagctaaaactcttctccaccctattgccctcgctgcgccctttctt

SEQ ID NO: 466103 - DNA, 122 bp, Homo sapiens
tccttcgtgtacctgtggtacccaaagcagacctgcacaattatttatttcatgacaactcgaggaccctgggggcactgtgttcttggctggaaagaactgcagggcagaaacatcatcaa

SEQ ID NO: 466104 - DNA, 122 bp, Homo sapiens
tcatttcatttcatttcatttcatttcattatttcatttcatctcatttcagttttgagacggagtttgggtcttgttgcccaggctggagtgcaatgatgcagtctcggctcactgcaacc

SEQ ID NO: 466105 - DNA, 122 bp, Homo sapiens
gcaggcgccctaggactggcgctggctcagggtccctgcgagctgcacgcactgcgcaggcgccccagagctggtgtgggctgagtggccacacgagccacatgcactgcgcaggcgccagg

SEQ ID NO: 466106 - DNA, 122 bp, Homo sapiens
cccaggcctcccttgctttccagaattcaactcaactcacctgtggcccgatgagctcggcgattcagctcgccctaattccccaaacctgtgcaggttacctgacgtggcaaaaggcactt

SEQ ID NO: 466107 - DNA, 122 bp, Homo sapiens
ctgattgttcattatttatattttccttgtaggtgatcaaagctaaaaggaaagatgtttcggatcaaatgtactgcttatgggaatagctccccaacatgtcgccctttgttcacttcttc

SEQ ID NO: 466108 - DNA, 122 bp, Homo sapiens
gttcaactatagtcatgattgccattatacaggtgagaaaactgagtaacacacttattccgaggaaccggcaaggaagctgcagtagttgaacttgaacccagatctcttaaccagtaagg

SEQ ID NO: 466109 - DNA, 122 bp, Homo sapiens
cagaaagacttgaacacttaccaagtgaataattttattaaggtcctgaaggtgagtgtccggaggtgctgggtaaaacacatcacaggtaagaaatgggaaacctacctcagcatttctga

SEQ ID NO: 466110 - DNA, 122 bp, Homo sapiens
cggacacggagcctggctccacccgtccgcccagccttggggttctgccagagcgccgggcgcagagcaagcgggtctgagctccagcacctttggcagctcccggccccggggtgcgaacg

SEQ ID NO: 466111 - DNA, 122 bp, Homo sapiens
tattataaacaatgagaaattaccaacacatggtaggaattcaactgtgaaaagttcccacggaaaaatgcccccactgacatcattcggggtctgactccatcagccgcatgcagaggcac

SEQ ID NO: 466112 - DNA, 122 bp, Homo sapiens
cctccccgtgttgataaattgagcttctcttctccacggttcagggcgtcggggtggggacggggccatcctgcacaaccccccctcgcctcttaatgccttttcacccctgagagcctgtc

SEQ ID NO: 466113 - DNA, 122 bp, Homo sapiens
tctcttattatataaatcttctagtggttctgcttctctgatcaaaccctgactaatatacgttgctaaaacagctttggggagagaattagatggagaaaatagcatctagctgaactctt

SEQ ID NO: 466114 - DNA, 122 bp, Homo sapiens
tggaatgtctcccactttctgcctaacctgcacgtccatcagcacctcatcaatgagaaacgactcctccggggagaatttccccctgcctggtcccctctcctagagagcccttcgccaac

SEQ ID NO: 466115 - DNA, 122 bp, Homo sapiens
ggactggggtgggggccggggatgcctgtgctccagggagctgtggagaggcccacccggcgtcctgcaggtgggggtgtgcggcagccaggggctcccagaccggggcagagccagcatcc

SEQ ID NO: 466116 - DNA, 122 bp, Homo sapiens
ggctcagagttttaagaaaaaccacaaagtgctatgaagtttgaggctaccaggatggggcgccaagccaaggttcctccggacgcgcgaggctggtgctccaggcgggctggcgggaagag

SEQ ID NO: 466117 - DNA, 122 bp, Homo sapiens
aaaggcaggaagaaacgatggtaggccttgtcatcttcgaaggagaggaaggacagcaaacgaattgctatagcgtccccatgcgcacttggcgcttctcctcaagcggagcaggaacggaa

SEQ ID NO: 466118 - DNA, 122 bp, Homo sapiens
gccaggaccaaatgcccccggaagcggggagcgacagcagcggagaggaacatgtcctggcgcccccgggcctgcagcctccacactgccccggccagtgtctgatctgggcttgcaagacc

SEQ ID NO: 466119 - DNA, 122 bp, Homo sapiens
ctccacaagcaaaaacggggcttcatggtggcatgggcaagccctagagactcatggggacgtagaggcaggcagagcgaagaagcggcgagaccgcagggaatgctggaggcctctcgcat

SEQ ID NO: 466120 - DNA, 122 bp, Homo sapiens
cacacgcacacacacgcagccaaggatccacacactcggacacacacacatttgtcggcccgcggttcgctgcgcactctccgcattgccccctcgaaactcccctggcagagtctgtctag

SEQ ID NO: 466121 - DNA, 122 bp, Homo sapiens
tatcattataaaattatacggtgatgattctggcttgttgccagagattattgcatcccccgctagggtactgaccttaagaatatcctcataaacagcatactcatcaggttcccacccca

SEQ ID NO: 466122 - DNA, 122 bp, Homo sapiens
atgacaggcataagccactgtacccgaacttgttgtggcttttacaaatgcactaattgtcgggctcggtggctcacgcctgtaatcccaaaactttgggaggccaaggcaggcggatcatc

SEQ ID NO: 466123 - DNA, 122 bp, Homo sapiens
ctacccattggccgatcttcattcacactcactgagtagtgggcactttgaaagaccggccgatgagtgttggcatctgtgatgttgatgtgcacatagcagtgatcatgaagggcacggtc

SEQ ID NO: 466124 - DNA, 122 bp, Homo sapiens
aagtaattttttaaattaaagattacttaaaaattcagtattctgaaaccggtcagaaaccgtttgtcctggtttgggatttcaggttcattccggcgaactgaatagtcaccactcacaca

SEQ ID NO: 466125 - DNA, 122 bp, Homo sapiens
aatcctgtgggttcagccagggctgtgcccctccctcctgggcttctctctctctgcagccgcctccacctccggcgctagcacctgctagagaccagctttctgtgggtgtgggagggagg

SEQ ID NO: 466126 - DNA, 122 bp, Homo sapiens
aggagtggaggcaaatgggatagactagccctcccgcccgggatcccgcgtctcggggaacggagacccgggcacacgccacttgcttgctgggaggttccttacaagttacatagaggggg

SEQ ID NO: 466127 - DNA, 122 bp, Homo sapiens
tcctgcggagaattccaatttccccctaaatcgctcaacaagcgagaaggttttgggattcgaattcagtggggcaagcgaagtcgcctttccttcttaaacagatggaatccctggtccac

SEQ ID NO: 466128 - DNA, 122 bp, Homo sapiens
ggctgcagagacagcagccttaaggctggccacaagcagcggggcctgaagctggaggagcggggaggagagttgaaagaggatcctagcactgcttgaaggtcatgggcagccagcgggtg

SEQ ID NO: 466129 - DNA, 122 bp, Homo sapiens
cagccaggcccagcgcccgaagggcaggggcggtgcgggcaggggcggtgcaggcaggggcggtgcaggcaggggcggtgcaggcaggggcggtgcaggcaggggcggccactgctgggaac

SEQ ID NO: 466130 - DNA, 122 bp, Homo sapiens
cctggcgccagggacttcccccctacccccaccacaggcccctcgccaggtgagaggcaccggcagagtcccagacagatgccccagacaggcggctcagcgcaacccccggcccttcccct

SEQ ID NO: 466131 - DNA, 122 bp, Homo sapiens
acctgagaatgccataaaaacgaccgtttctgggccccaccactgccacagaatcagactcgtgagcaagaacccctggggtttccccagcagtttccccagcagtttcccaggtcatactt

SEQ ID NO: 466132 - DNA, 122 bp, Homo sapiens
cccaacgcgcatgcgcagcctcaatgctgggattggacggagcctcgccggctgcgtacacgtcacttccgaggcgggaggatgaagttgattgactatggtctctccggctaccaggtagg

SEQ ID NO: 466133 - DNA, 122 bp, Homo sapiens
ccctaggccgggccgacttacggagtcgccggaagcggaagtcgctgaggggtggtgaagcggttgggaaagtgtcggtttatcttcgcgccccttgcgttcttgccgcggcttgcctgggc

SEQ ID NO: 466134 - DNA, 122 bp, Homo sapiens
cccagaagatgttattcattaggtaccatgagcaaagaccaggagatgagcatggggttccgagcagggtgaatgcacaactgacagggtgggtagagtggagactgtgtcctttaaggcag

SEQ ID NO: 466135 - DNA, 122 bp, Homo sapiens
cttcccctgagtgctgaatttcaaggccatgaagccatggtcaagagacttgactgggaacgggccttaagctttcagtgactcccttctaaatctagagcagtggttctcaaagtgtggtc

SEQ ID NO: 466136 - DNA, 122 bp, Homo sapiens
ggcggaagctgcctggtgcatttcaggagaaacagcgaggccggtgtggctgagacagagcgggcaaggggagcaggtcgcagaggacggcccacgccggggcagagggtagagcctcacgg

SEQ ID NO: 466137 - DNA, 122 bp, Homo sapiens
ccaatgaagagatacaaggtccaagtctggaagggttctgagcacaggagcttttgtcctcgtggagttgggatgtgccaccctcccagcatgtgaatgaatttttgcttaccttcccgtga

SEQ ID NO: 466138 - DNA, 122 bp, Homo sapiens
tcagtgctccttggtggccgaggaggtttcctcactagaccagctcgttggtgctgcttacggtactgttcctggaagctcagccttgagtcttattctccagccctctcaaccactcaggg

SEQ ID NO: 466139 - DNA, 122 bp, Homo sapiens
gtctccagaccacccagagaaaggtctgtgtccaaaagccgggggatgcggtggggaggccggggcccagcaagcctgagctccgcttgccacttggctccagctccacccaaagttccccg

SEQ ID NO: 466140 - DNA, 122 bp, Homo sapiens
tgtaatccgcccgcctcggcctcccaaagtgctggaattacaggcgtgagccaccgcccccggccctggcaccgtatttcaaggccgaaaattcgcatcctcagtgccagcaattctcctcg

SEQ ID NO: 466141 - DNA, 122 bp, Homo sapiens
ctattgcttttttaaaagcaatagctggtgacctgacttctcaccggccttagcactccacgccccagatgtggcccaggaaactctttggaactctctactccagagtgaatggggaatag

SEQ ID NO: 466142 - DNA, 122 bp, Homo sapiens
tgcaacttggcagaggtttggggcccacacacctgtgctgctgatactggcctccaaagccgttgacacctgctgtgtcctttttgtctgcctttctcatactgccacccagctcaggtgat

SEQ ID NO: 466143 - DNA, 122 bp, Homo sapiens
tctacaaacccagatcaactaactctcctcataagtaagaaatcagagtcagagtgctagcgatccaaatcacttagcaaaagtgagctggaaagagctacactgatgtgatggtttggagt

SEQ ID NO: 466144 - DNA, 122 bp, Homo sapiens
gaagcacggagaatttacaagcctctcgattcctcagtccagacgctgttgggtcccctccgctggagatcgcgcttcccccaaatctttgtgagcgttgcggaagcacgcggggtccgggt

SEQ ID NO: 466145 - DNA, 122 bp, Homo sapiens
ctcgcgaatacctttcacgtcaaacaagaatgaatcgtagacaacaccagaattcacaaacgctgcaattaatactcaaactgcaagtgtggaaacgtttctgcacttgcaacttatttcca

SEQ ID NO: 466146 - DNA, 122 bp, Homo sapiens
tgatcagaatatctgagaatcaaatctttgtgatagatatatgaatggtacccgttacaacggatccttgtgggaaatatggggtttaaaatattcaaattgttattatctagaaatgatgt

SEQ ID NO: 466147 - DNA, 122 bp, Homo sapiens
ccaaaatagtcacagaaagcatttagtttgcttttgatcacttctttgtcatattctcatcgagccattacagtaaacaaggcttataatatttgtctttcttttaatggttaggttgctgc

SEQ ID NO: 466148 - DNA, 122 bp, Homo sapiens
ccagatcggccaggaaaggggggcttttggggctggctctctgagttctccagaattctacggaaactggaaatttctctctgggctcacatacgatttcagggagaaaccaccctggaagg

SEQ ID NO: 466149 - DNA, 122 bp, Homo sapiens
ggggtttcaccatgttggccaggccggcctcgaactcctgaccttgtgatccgcccgcctcggcctcccacagtgctgggatgacaggctgagccacggcgcctgctgatttctttttttaa

SEQ ID NO: 466150 - DNA, 122 bp, Homo sapiens
ctgatcctaatggcaacctgatggcctgagaccagctgcctcgctccggaacaggcacagcgatgccctgtgcaggaagaagggcggagcagggtgaccagattcctgccaggcaaaaacct

SEQ ID NO: 466151 - DNA, 122 bp, Homo sapiens
ctgttgtctagaaaagcagaatagacacaatttgttttcattttgtctttcagccaaaaacgtatttagtcaagttagcttaactcctttaaaccaaatatgtttgagttaattttgttttg

SEQ ID NO: 466152 - DNA, 122 bp, Homo sapiens
accttagaggttaatcagaataactgggatcagccacggacacctggtgagcgattagcccgcagagtgactacaatcctgaaagatacttgagaaactgtttaacaggcaactctaatttg

SEQ ID NO: 466153 - DNA, 122 bp, Homo sapiens
gtggtgtggccctggctgctgaggcactgagacgaagctccccctccaccgggagcggtccggcgtcactcgcctgcacggctgcctgctgaacctgcatcctggagatgtggcccgcgagg

SEQ ID NO: 466154 - DNA, 122 bp, Homo sapiens
cacagcgccgttattccgtttctatatcagtaaacacatttcattttccgtagaccagggcggggtgacgggtgatcccagtcctcgcagtgaattccgggcagcaaaattcaaaacacatg

SEQ ID NO: 466155 - DNA, 122 bp, Homo sapiens
cttcactaataccgaagaaaaaactgtccatagtgaccggggccgggacccgtaggcccccgacacccccggcccgcgttcggctctcctgactcaaaaacgctaaggcagctgcagtaccg

SEQ ID NO: 466156 - DNA, 122 bp, Homo sapiens
gtccaaagcggcacggaggcttgaaaggggaggtcgagtcaccggcggaaggaaaataaacggcgcagcagagaaagggtcttggccgctggtcaacaccacgccccacctgccacacatgc

SEQ ID NO: 466157 - DNA, 122 bp, Homo sapiens
gcggctgaagcagcgacggaggcggaaaatcctcggaagatgtggcattactaccgacgccggtacctgctgcattgagagcagaggcgctgccactaccgctgccccttcgagggaacatt

SEQ ID NO: 466158 - DNA, 122 bp, Homo sapiens
gggaacaggtccttccgggacacgaggcagctggagagctctgggtgtgacagaggaatacggaaacagggagaagaaacaaagaaacagagaaatgaggaaacgaggaaggaaaagggtgg

SEQ ID NO: 466159 - DNA, 122 bp, Homo sapiens
gtctagatgttgctgtaaaggaattttttagatgcaattaccatttaaatgagtagatttcgagtcaagggaactacccttcatgatgtgggtgtgcctcacctaatcagccaaagaaaggc

SEQ ID NO: 466160 - DNA, 122 bp, Homo sapiens
gggaatttgtcagaaaggcaagttctcaggcctcatcccagaaccaccaaatcagaacctcggggctggggcccagcaaccggtgctgattctgatggccagtaaagtataagaactctgaa

SEQ ID NO: 466161 - DNA, 122 bp, Homo sapiens
gggctgggccagggcctcctgcgcgttccctggctgcttcctagtgctttcttggggcctcgccgcctctcgcggcctgcagccctctggccgggcgcggtgctcccgcctttgggccccgc

SEQ ID NO: 466162 - DNA, 122 bp, Homo sapiens
cccggccattggtccggtatggaagcggggcgggaccttagcccttgacagcagttgtgacggggaggattggaccgcccggattagggctaattaagggtggatgggtggcgggcggggaa

SEQ ID NO: 466163 - DNA, 122 bp, Homo sapiens
cattgcctaattaactcacctggaacatgaagctgaagctttctttttcgacaaagagcacgcatttgcccatatagagataattttatcattgtcaactgagagcagctgattgaaattca

SEQ ID NO: 466164 - DNA, 122 bp, Homo sapiens
ctcctcctgctcactgggggcgcgtcccggtaaaccagaacctcagcccatcaactcactcgtggggttactgaggaggagaatctttggttctcaccgtcatggctcacccagtggctgaa

SEQ ID NO: 466165 - DNA, 122 bp, Homo sapiens
ggcaacatagcaagaccccatctctacaaaaagttgtggggttttttttgttgttgttgtcgttgttgtttttaatcacaggcatggtggcagacgtctgtagtcgtagcttctcaggttcc

SEQ ID NO: 466166 - DNA, 122 bp, Homo sapiens
gaggagctgcggcgcgcccctctcaccgcgattgttcacttgccaggcgccacgtgtgggcgacgtcactgggctttatgctttcatcgccgctatctgcctacgtgagctgctctcctccc

SEQ ID NO: 466167 - DNA, 122 bp, Homo sapiens
cccaaggtacattggggctggcgggcttggtgggtgggtccccccggagctgcctgagtacgttgggactggcaggcttggcgggtgggtcccccctggagctgccggtgtatgttgggact

SEQ ID NO: 466168 - DNA, 122 bp, Homo sapiens
gtaagccaatcagagttgggcatggagggcagagccttcaatttcattggccactcggagcgtgactgtcttgatcgaaggtttcactgaactcattggctggtctggtaaaaggtagcggg

SEQ ID NO: 466169 - DNA, 122 bp, Homo sapiens
cctcttcccctgcgaggccgagagggtgcagagctggtggcttcaggaggtggctgtgagcgcgggtctggggccaagagcagaggacaggagaagactgccaagccaccaccggtcctgcg

SEQ ID NO: 466170 - DNA, 122 bp, Homo sapiens
ggagcacacgaagtcgtggcttattctggcttcagtatgtggggtggagaaggcgatccacgcagctgcgtctatttcctgtggatcaatcgcaaaatacgttctgtaagccccgcccccac

SEQ ID NO: 466171 - DNA, 122 bp, Homo sapiens
gccccgaggcagggacagctagcggtctgtggagacaagactgtccccttcccgcctccccgcattcagcccctcacctgttggctggattggggtctagaggccgctaagacacctcagga

SEQ ID NO: 466172 - DNA, 122 bp, Homo sapiens
gtgatctctgccagcctgaggcgggaggcacatgggtgagctcttggcgcagaggctgctcggcctcctcctgctggatggtaccccagctccttagtgctccttcagctgcgctggctgga

SEQ ID NO: 466173 - DNA, 122 bp, Homo sapiens
ctgcctgtcattggccggctcttgctccggaaaaaccaatcataggtcttatttctgaaacgtcacgaagaggcgggggaaaagaaacaactacatccccaaatggccaagagctactgagg

SEQ ID NO: 466174 - DNA, 122 bp, Homo sapiens
ttccgtcgtccctcgctcgcgcagagccccggctcacaccagcggccttaactggagaggcgggaacaggacgcggcccacctccgccaaccactcattggtggtggtgccaggagaggcgg

SEQ ID NO: 466175 - DNA, 122 bp, Homo sapiens
tccagtgcataggcatgagcacatggacaggtacaccaaagggaggtaaaccctctcttacgtgctctgtatgtggggtacactgttagcagccatcccatctggatgactgtcctgcttcc

SEQ ID NO: 466176 - DNA, 122 bp, Homo sapiens
ttggagttctgacaactcagacatttgagattggctgatgagggggtgctttgttgacatcgcccctctctctacctctcagcaaacctagaaggccttaggctggcccccagggctagttg

SEQ ID NO: 466177 - DNA, 122 bp, Homo sapiens
acctggctctcttcagggcagagagagactgtatccctgtcttcagattctccaggggttcgagaccccagaaaggcccagactctgcactccggctcccccaagggtagttggatgtgctc

SEQ ID NO: 466178 - DNA, 122 bp, Homo sapiens
tcactttcccggttcttctcccactgacccaggtaaatcacaagagggataaagccccagcgaatggcaaactggctccccttgaagagctgctgtagtctctgcttggcctctttgctcag

SEQ ID NO: 466179 - DNA, 122 bp, Homo sapiens
catggggctgttcctggctccagagacttcagtatcgatcccaagaccgagactgctgtccgggccgcctgcccactgccttgtgggaacctggggccaggtccctgtcatgttcccagagc

SEQ ID NO: 466180 - DNA, 122 bp, Homo sapiens
ctttgagtagagggaagggggagtttgagtgttaggtgcatgttggtgggagtatgggagcggggcttgaggttagaaagacagatggagatttgaagaccatcaaaactctgctaaggtat

SEQ ID NO: 466181 - DNA, 122 bp, Homo sapiens
cagcccaaggaccaaaggagggggtggcaggggccttgcagggcgctgtgaggtccaggccggtcttggcgccgagagcccctgcactcaaggccacattccctcgacaacggctgcacggg

SEQ ID NO: 466182 - DNA, 122 bp, Homo sapiens
aattggtgaggtcatggctaacttccaaagctcagtgcagatattgcctctgaaaacttccgaagccctcaagcttttacagccaggtcagaataaaccactcctgtgtgttctcctagcac

SEQ ID NO: 466183 - DNA, 122 bp, Homo sapiens
tgggtcccctgtatgcacgctccctgggcgcctcctcctactacagtctccttactgcgccgagattcgccaggctgcacggtgagctccgcggaacatcagctgccaactggcagcgcacc

SEQ ID NO: 466184 - DNA, 122 bp, Homo sapiens
gcgctcgaggtgaccgggaaggtgtccccgcgggtcactcgctccatctggtcctggagacgagatgccagggcgaggcctaacctgcctgctggcgcccaacgaagattttaacgttttct

SEQ ID NO: 466185 - DNA, 122 bp, Homo sapiens
catctgacagagcacatgaagacccatgctggagccctgcatgcctgtccccactgtggccgtcggttccgagtccatgcctgttttctccgccaccgggacctatgcaagggccagggctg

SEQ ID NO: 466186 - DNA, 122 bp, Homo sapiens
ttcctgccaggcgaagtacagagagcggactctggagaccccctgaccttgcccgatagtcgcgctgtcacctgttcactccttggggtcaggggtcggggagaggggtgagaccgtctctt

SEQ ID NO: 466187 - DNA, 122 bp, Homo sapiens
ggctcctttctcttgcccccagaacagttgttagtggttacttcgcctccctggaggctgcggacagtgtctttgttctctactctggtacggagcttgtgactctcaggcacttagcaagt

SEQ ID NO: 466188 - DNA, 122 bp, Homo sapiens
gataaccccttaccatctgctgcccatccatcaccctttctctttgcctttggtctcacgcggcttatagaacctgcttagactgctaaggcaaggccctctcggccgctccactaactttt

SEQ ID NO: 466189 - DNA, 122 bp, Homo sapiens
gatctctttctttgaacactgctaaaagaaacacacaggtaatagacgtgtctggtggatcggggcttgtccccaaaaagccggaaaggctgagcgagtgattgaaggcagggtgagactgg

SEQ ID NO: 466190 - DNA, 122 bp, Homo sapiens
ctggacgaacttgggcccagactggcgctccgtggcaccccctcccccggcctcccgcttcgcgccctcatcccgccccccggcgcggcctcaccagctccccctgggcagcccaaagaatg

SEQ ID NO: 466191 - DNA, 122 bp, Homo sapiens
ggggactccactgatgcctgggattgattgccagcatgcagcgggggctccgctgatgcccggtatccaccagcgtgcagcgggggctctgctgatgcctgggcttgcatgccgctgccgct

SEQ ID NO: 466192 - DNA, 122 bp, Homo sapiens
gcacttaagaaatgacagtggttgatattgcttttggattgaagcatcctgggtgtcccacggtggaattcatagacattagagagtgggtgacgggctaggaaaggctgcatagactccaa

SEQ ID NO: 466193 - DNA, 122 bp, Homo sapiens
ggtgcgggtggtcctgggagcccataacctctcgcggcgggagcccacccggcaggtgttcgccgtgcagcgcatcttcgaaaacggctacgaccccgtaaacttgctcaacgacatcgtga

SEQ ID NO: 466194 - DNA, 122 bp, Homo sapiens
gcccaatgtagcctcatcctgattagcctgcaagccctaccctgattggctggtgagccccgcccctttgacctgcaaacactgccccatctgactataagctccatcctttacctataagc

SEQ ID NO: 466195 - DNA, 122 bp, Homo sapiens
tctcaactactttaaagtattatagcaatctgaaaacaagctctcgcatttgactctcggcggccatcgctgagctcctcgctgctcagctagaatcaaacaggtgtgttctcacggatttg

SEQ ID NO: 466196 - DNA, 122 bp, Homo sapiens
gggagggccgttggctgagagttctaaggcgtccctacacctttcttttaaggtggttggcgtttaaagttttaagtttacagttgaggaaatcgtgtcttaactgtgttaagttacaagtt

SEQ ID NO: 466197 - DNA, 122 bp, Homo sapiens
actgtatacgtacaatgcataggccaaaggcgaccctatgacccagagattagaaagactcggacgtcttttgactgggttcaggtcacactactcccaaaatacgacacctcggcatttga

SEQ ID NO: 466198 - DNA, 122 bp, Homo sapiens
cggggcggggaaagggttaatttccatgcaaaccgggagccgtggggcccaggggcatcacgtccgcagcggagggaggcagcggcgcgcaggccgggccgccagggactcaccggggtcga

SEQ ID NO: 466199 - DNA, 122 bp, Homo sapiens
gcaggcacatgtgaggagcacacactccacgagcagatgccagtacacgtgcagagcacacgccccaagagcaggaggctccggggtgggcgcgagaacattcctgtcagcactgttctcag

SEQ ID NO: 466200 - DNA, 122 bp, Homo sapiens
cgccgcgcctccgcctgcccgcccccgccggccgaggctgggctgcgggaggcggccgggcggccccgagcttcgctagggcgaccaaaacaaaggcagcatccggggctgggtggatgcaa

SEQ ID NO: 466201 - DNA, 122 bp, Homo sapiens
tgttgcagccacaagatgttggggcctgagttcttcagtggctgtgtggtgcaaacctcccgctgactctcagtggacataaaacataagaaatctaaacatagctgtattaatacattgag

SEQ ID NO: 466202 - DNA, 122 bp, Homo sapiens
ccgctgtgcttactgcttcttagggcagaaagcgagggcgctgtgctcatgacccacccgcgcgcatgggagcagcgggggggagggctccgggaggcgcggggcgggctcggggctgcgcg

SEQ ID NO: 466203 - DNA, 122 bp, Homo sapiens
tggtcccgacctactccccatgcccacgcggagccagggctcacgacggatgtcgagcagcgcaggggccgatggcacaccgagaccgtgtgtgcaccctgcccaggcttggggcccacggg

SEQ ID NO: 466204 - DNA, 122 bp, Homo sapiens
gaggaatgttctgattggttgggtaatataaattcagcatccaccttggactagagtccacgcaatctcacccaaactgagggctgctacatggaggggtggctcttcaaaggaaaatctga

SEQ ID NO: 466205 - DNA, 122 bp, Homo sapiens
ctgctcccctgctcccctgctccgacctaaagtgaaacctgaaacctggctgctttgctgcggtcacccgggcacccagaggccgaccttttgggtcaggggagggaagggagatgcggatg

SEQ ID NO: 466206 - DNA, 122 bp, Homo sapiens
cctgctcctaaaaattggctccattagcaaccatccattttgagggggtggagccaccatcggcattcaggtggtcgagtcaccatccgtgttcagtgggtagagtcaacatccgtgttctg

SEQ ID NO: 466207 - DNA, 122 bp, Homo sapiens
ccagcccgcctgcgccccctttatacgcgcgggccccacccccgtgcgcgcgggcccggccgcgattagcataatgtagtattttcagtttcaacaacaccacggcgattggcggccgcccc

SEQ ID NO: 466208 - DNA, 122 bp, Homo sapiens
ctgtgtgcctagtatctcctgggcactgtcccaatccagggatggttaaggaatggtccccggtctgaaggagcccagacatgaactgagctgagccctcaacagctggtggtgacacaagg

SEQ ID NO: 466209 - DNA, 122 bp, Homo sapiens
tagtcacacggagagagaagaaaggagattagcagggtgactttcaccctgcaacagtcacgctggagtactctggtgaaggatcaagaatattaccagttttctgatgaagaaaggaatat

SEQ ID NO: 466210 - DNA, 122 bp, Homo sapiens
tcggcggcaccccccacccatccccttcgcccctcctccgctccctctgtgctcccgaggcgcagtgcgctccggcctttgaccttctcaggctccgctgggccccgcaccgctggcccggt

SEQ ID NO: 466211 - DNA, 122 bp, Homo sapiens
tgcccatacccgcagcctccttctcctcagccagacagtagtagggggtcccatcttctgcggccacgacgggcgtggggggcttcccctccacttgcagcgagaggcggtagctgcgcagc

SEQ ID NO: 466212 - DNA, 122 bp, Homo sapiens
ccagcccccggcctcgctatcctagttctctgcttggggtcctgcttctgctcttgccgccgcctctcccgcttcttccgggggggacatgccgcagaatctagactgctcagtgctccgac

SEQ ID NO: 466213 - DNA, 122 bp, Homo sapiens
gccacggccagcagcgctcgcgtcctccccagcaacagttactcaaagctaatcagatagcgaaagaagcaggagagcaagtcaagaaatacggtgaaggagtccttcccaaagttgtctag

SEQ ID NO: 466214 - DNA, 122 bp, Homo sapiens
gcagcagggagtcaaccctaacctggtgtttaatttccagggtatagaagaccagaacaacggaatagactttaaaagtgatttaatcactgattcttcacttcatgcatccctggtcacta

SEQ ID NO: 466215 - DNA, 122 bp, Homo sapiens
tcgtctctcctaaggtctttggccacagttcctgggcaactcaaaagcctgacgataggccgctggactcgagttcttctccgggcacacaggttcaaacgggtcaagagccccacgccggg

SEQ ID NO: 466216 - DNA, 122 bp, Homo sapiens
ggcctcagagggagtcggcaagaatggagagcagggtccggtagggtgtgcagagggccacgtggcctatccactggggagggttccttgatctctggccaccagggctatctctgtggcct

SEQ ID NO: 466217 - DNA, 122 bp, Homo sapiens
actgcatcctaagtcaataaagaacaatcttcttgggccgggcacagaatcacttgaacccgggaggcggaggttgcagtgagtggagattgtgccactgcactccagcctgggagacagag

SEQ ID NO: 466218 - DNA, 122 bp, Homo sapiens
gctccagaagaccaacctggagcgccctcgcccggagcggcggcctgcgggggcacagagcggctcctggctcctcagaccgccgcagcccgtggctcctgccctgggtctacccagggcta

SEQ ID NO: 466219 - DNA, 122 bp, Homo sapiens
tctatcatcgtctcttcatgccccactgttttgaaggcctgacttgggtaggtttgaacccgcagttctgtccttgaagggggtggggccggggcgcttgttttcgagagctcgcgctggcg

SEQ ID NO: 466220 - DNA, 122 bp, Homo sapiens
gctgggcacaggcaccgtcctggcacaggtggcagatggacgtattgtatcaccccaccccgtgcttacctgaccgatagcgctcatctcgtgaccctgaagaccgtcggcggtggtagcga

SEQ ID NO: 466221 - DNA, 122 bp, Homo sapiens
cactcttggttaacccctcccctcaaggcaggaactcccaggatctctatgcacagattccgggtcctccagagtcggtccctggcaggaaatgtcaatagagtccagcccattaaccacag

SEQ ID NO: 466222 - DNA, 122 bp, Homo sapiens
aggcgtccgcgcaggggaaagccaggcgctggcacaccgcgggcgcgggtttctcccagtcggagtcgccagaaataaagcgctagctctcggtgtaatggaaactcccgaaatccttacaa

SEQ ID NO: 466223 - DNA, 122 bp, Homo sapiens
cacttccggaagaattgcactggactgtgggtatcctggtctccgcgtgtgtgagtaccgcggcgcgaggttagtggtagctgggtgcagacgccgtggcgctggtgagtaaaggcagaggc

SEQ ID NO: 466224 - DNA, 122 bp, Homo sapiens
gaaaccccatctataccaaaaacaaacaaacaaaaaaacaaaccacaaaaattagctgggcgtcatatgcctgtagtcccagctacttgatactcgggaagctgaggtgggaggatcactta

SEQ ID NO: 466225 - DNA, 122 bp, Homo sapiens
tggcggcgttttagaaaagctgtatttgaaaagcaaccgattggggtgaaggcgggggagcggaatcctgattacactgtcccaatttcagttgaggtgggcttttaaaagaaatcccaatt

SEQ ID NO: 466226 - DNA, 122 bp, Homo sapiens
atttctcttcctcacttgagccaggatctgcggctgtcccagtgaatgtttgacattggccgatactcagcattaccaggaggtggtggacgatgttcactggttggcatcaccattccggg

SEQ ID NO: 466227 - DNA, 122 bp, Homo sapiens
gcggggagaaaacccggaagccaggagtcgaagccggggtagcacggcttcttggttgggcgagagggctgcccttctgtccgcctggtggaaaagccctgcagctttgccaggtggggtga

SEQ ID NO: 466228 - DNA, 122 bp, Homo sapiens
cattaagctgggacctgagggtctacaaatcatcaaatagcaccccctgttctttgtcttcgcatatctgctggtggtggtaccagaagccccagaggcaagttggcccctgtgattagtaa

SEQ ID NO: 466229 - DNA, 122 bp, Homo sapiens
aatggagatttgatatctaaatttctggaaacctagttagtagctaggaaacttataggtcgcaggtttttccatgcctgggatttcttgggacccagggacattttttagtgtgctttggg

SEQ ID NO: 466230 - DNA, 122 bp, Homo sapiens
gtttaatagtctgttatgggtacttttggtatggtcccttatacagggactagccattggcgtatgtatctgtcactcctccccatgaaacagtgagctccctgaagcgaaaaactgatttt

SEQ ID NO: 466231 - DNA, 122 bp, Homo sapiens
cctcgggcgcgggagctgggccagggggcgccaaggagcagctgggacaccttggccagccggcgccgtgggcgggctcgggccccgcagaggcaggaccgggactacacccaggagggcca

SEQ ID NO: 466232 - DNA, 122 bp, Homo sapiens
ggctgagtcaaaactggcggtgagcagtgtcctgcatccttccagccatggccttgaagccggggttctggcctggacacgtgccactctccaggccaatagtctcaccacccctcccgcca

SEQ ID NO: 466233 - DNA, 122 bp, Homo sapiens
aaactccatgtatggcctggcattcaaggcctttccctatcaggcctgtccttgccttcccgcatccatctcctgctgtagcttcatctacctatgatcaaaaccagatacgataagcaatt

SEQ ID NO: 466234 - DNA, 122 bp, Homo sapiens
acctggcctccaggggcgctggcctggaatgctgagcagctgtcgtccgggagccgcgaccgcatgatcctgcagagggacatccgcaccccgccactgcagtcggagcggcggctgcaggg

SEQ ID NO: 466235 - DNA, 122 bp, Homo sapiens
cgcgatcccccaagaacccctccagggccggcctgcggaggagccgatcctcgcaccctccgctccctccactggccctccaggtcgattccctgggctccaggctcccccgcgcgggcgcc

SEQ ID NO: 466236 - DNA, 122 bp, Homo sapiens
gcccagtcaacacggcgaaaccccatctccaccaaaaatacaaaaatcagtcagtagtggcggtgtgtgcctggaatcccaggcactcggcgggccaaggcaggagaatcacgggagcccga

SEQ ID NO: 466237 - DNA, 122 bp, Homo sapiens
atggctctgtcctttcctgggccaagtctctcaacactgaaccctcaggttcagtctctgcgcttatgaatgagaagcagaaaccacaccttcaaggaagtgagctgcgaacagagaagctg

SEQ ID NO: 466238 - DNA, 122 bp, Homo sapiens
tcacccaggctgaagtgcggtggcacgatctcactgcaacctgcgccttctgggatcaagcgattctcctgcctcagcctcccgattagctgggattacaggcgcatgccaccaagcctggc

SEQ ID NO: 466239 - DNA, 122 bp, Homo sapiens
gacttcgaagtggtttgcaatccgaaagtgagaccttgagtcctcagatggccggcaacgcgccgaggtcacgctccccagaaacacccctctcccctcccctaccccagctccccctgggg

SEQ ID NO: 466240 - DNA, 122 bp, Homo sapiens
tgtgtgaggacgcgtggatttcctttccttgctttgcctggcgaggctgccctcgcatcccgacgtgtttaacacaggacaccagcttctccaccgggaggaagccttgcgttctgagctca

SEQ ID NO: 466241 - DNA, 122 bp, Homo sapiens
cgccaaatccctgttttctggggtaagcccccctccccccactcttggacccaagctgcccggaaggaagaaggaagcattgtttgtcaccggagaaaaccacctgtggtttgcaaagggcc

SEQ ID NO: 466242 - DNA, 122 bp, Homo sapiens
agtgcgggactgggtctgggtgggtgggcgcggccgcagcagtcgcagcggggccatcttcggcgggcgagtgggctcggcctgtgcaacccgcacctgcgtccctcgcccggcccgatggc

SEQ ID NO: 466243 - DNA, 122 bp, Homo sapiens
ggcgtccccgtgcagtcctggcaacctgtcaccgaggaggacgtgactcggagctgcctccgctttctccaagccatattcctttaagatgatgtaatagtcatttccctggatggtttctt

SEQ ID NO: 466244 - DNA, 122 bp, Homo sapiens
tcccgggtcagctggagccgggcagggtaagaggaacaggcagctgcaggaaaatggcggcgccaggctcctcctcggagctttccgggctgccccgggtcacgtgactcggacaccgcccc

SEQ ID NO: 466245 - DNA, 122 bp, Homo sapiens
attgtcatcctgagcaaagcacagggctgagaacaaggagggagagggaggaaagagcctcggataaggcagtgctggggccagagggaaggctgctgtcatctctcaactgggattagcta

SEQ ID NO: 466246 - DNA, 122 bp, Homo sapiens
ctggcagcggtaggtcccgctcatgtctcggctcactcgctccagccgcagcttcccgtccggagtctcctccaggggcagccccgagggcagcagtgcagcctccttgtccacgcgggacc

SEQ ID NO: 466247 - DNA, 122 bp, Homo sapiens
acgatcacggccaggtgtggtggctcatgcctataatcccagcactttgggaggccgaggcggatggaacgaggttaggagatcgaaaccatcctggaaaaaggtgaaaccccgtctgtact

SEQ ID NO: 466248 - DNA, 122 bp, Homo sapiens
tgtccgcgcactgcctcacgggagttgtagttctttcctttgtctgagctcagcggagaccgccgccgagactacgactcccagcagctccgcgttccccctttcctcaaaagaaaaagatc

SEQ ID NO: 466249 - DNA, 122 bp, Homo sapiens
ctcaggtccctaccaggcgaggagaggacccagaggacggggatccgcatggatccttcccgcctcaccctggccctgggtcccacaagcctgatgggggcaacgcggcctcactgctgttc

SEQ ID NO: 466250 - DNA, 122 bp, Homo sapiens
taaattttaaaatgctgttctctgaaaattttacttcactctagcgatggcccaaacactcggaaaaaaatgtagcatgaggatggggagccaggttgataggtttttcacttagttaacta

SEQ ID NO: 466251 - DNA, 122 bp, Homo sapiens
gtccagtgatttggtatcagaagatctaagttttctccttctctctgccatttaaagaagcgtgttgcaatttccccagcagaagtgaaagtgattcgcctctactcaaatgtctgcatagg

SEQ ID NO: 466252 - DNA, 122 bp, Homo sapiens
catggccatacacgcccctggagagcggcatgacggttgagcacagcctcctcctgccagcggtgacaggccctacaacagccccactgactggggtcccgtggcctgggtaaagtcaaagc

SEQ ID NO: 466253 - DNA, 122 bp, Homo sapiens
agaccggagtcacccgcgatgttcctctttgccctggtgcgtagtcctaccctaattgagcgacaagtacagcctggagcctcgcggtcgaataatccaaacgaagatgacggtcatcggaa

SEQ ID NO: 466254 - DNA, 122 bp, Homo sapiens
cgggcaggtccgcactccgcagaggcgagcgcgctccggttccagccgggaggtgggcggcgacccatcccgctagaatccgtccagtctctgctcgcgcaccgtgacttctaaggggcgcg

SEQ ID NO: 466255 - DNA, 122 bp, Homo sapiens
ccccagcccccccaaagggcggggcttgggctgaatggaggtgtgtgtgccctgagagggcgggagagcctggcccaggcttcagaggcccctctgaccacaagggctcctttgcttgcaga

SEQ ID NO: 466256 - DNA, 122 bp, Homo sapiens
catagtgagtcctactaatttctccctttctgcttgtctcccttgtctctccttagtaagcgatacgaatcccagcttcgggatcttgagcggcagtcagagcaacagagggagacccttgc

SEQ ID NO: 466257 - DNA, 122 bp, Homo sapiens
cgacttccccacggaccgtcacttccggtctcccccaaacctgccaccgacggccacttccgtttccccgatagtatttggggatctcgaagcgatacttccggctccccccaggtccccaa

SEQ ID NO: 466258 - DNA, 122 bp, Homo sapiens
ggtccagaggcctctgagggagcactgtgggtccctcgctgctctggatcctggttgtcccggtatttgaaggcgtccagcgctccatctccttgctctgcactctttaggtgtccgttaaa

SEQ ID NO: 466259 - DNA, 122 bp, Homo sapiens
gtcagagctacacattgagaacctgaacatggaggccgaccccggccagtaccggtgcaacggcaccagctccaagggctccgaccaggccatcatcacgctccgcgtgcgcagccacctgg

SEQ ID NO: 466260 - DNA, 122 bp, Homo sapiens
cccctcctgctcccaccccgggctctgaagccaggaaacccaagaggaaatgactgagcccgtctgggtccccgcccgctcgcgctcccctggccacaccctccgcctggacgcagcagcca

SEQ ID NO: 466261 - DNA, 122 bp, Homo sapiens
ttgggcccacagcccgagtccttccccagcctccacccaacacgccccgaacatcctgatcgctccccagccagtcacccagcactggtccttcggggtgagctccagcgagaccggggaga

SEQ ID NO: 466262 - DNA, 122 bp, Homo sapiens
tgcagatggtatctgcccatctcctgttcaagaagaaagaaccacgtgcccaatgtgggccgagaaaggaagacgccctgtgcactcagagggaaatgcatctctgcttctagagataactg

SEQ ID NO: 466263 - DNA, 122 bp, Homo sapiens
agaccagacaactttgtatttggtgagttatacagatgatattagcagatgatataccatcgtgttcaacttatttgggtgcaaggacacagcaaaagttaggagatgattgttgtattgga

SEQ ID NO: 466264 - DNA, 122 bp, Homo sapiens
cagcattagccactcctgcggcctctgccttcgagtttacgcagaactctcaccgcttcccgtccatgccgtggccactcacatccccgcctgcctggcccagctcagcccagcccagtccc

SEQ ID NO: 466265 - DNA, 122 bp, Homo sapiens
cgcgggagtggggaaggcggaggcggggggccaggatggccacggctggccgcagctatccggcgtgtcgagctctcctgagtcggaaggaaggagaggagggggtggggagggcgtcttca

SEQ ID NO: 466266 - DNA, 122 bp, Homo sapiens
gatggaagagttaaagcccacgtggagcaaatgacactctgtttctgatctgattctccccgcctcttagagacgctgtcttggtagtgacctggctgtgggttgttctgtgactgtgtaga

SEQ ID NO: 466267 - DNA, 122 bp, Homo sapiens
agccagcccagggagtggtgatgggctgggtgctggctgtccctgcacatagcagtgccccgcggcagtaactacaactgctgcctgcccctcacccctggttatgctcggcctcccctgtg

SEQ ID NO: 466268 - DNA, 122 bp, Homo sapiens
agcacgggcgggtgtagacgatgccgtacatgacccagcaggtgtgcaccacgtagaccacgaacacgcccaccaccaagctggtgaaggagctgcggccgctccacatggcggccccgcgc

SEQ ID NO: 466269 - DNA, 122 bp, Homo sapiens
tggccaccgccttgcactgcgcccatgcttggagccccgagccccaggccaggccctgcccgcccgctcagccctgctcgccatgctcccgcccttgctgctggggcggccggcagggagcc

SEQ ID NO: 466270 - DNA, 122 bp, Homo sapiens
agcgacggagtctacgccatcgtggccacgcttctcatcctggacatctggtgaggaccccgcgtcacctgccccagctatcaggtggccaatgtgtcttgagtccctggcgtctcatcctg

SEQ ID NO: 466271 - DNA, 122 bp, Homo sapiens
acctcttgatctgcccgcctcggcctcccaaagtgctgggattacagctgtgagccaccacgcctggctattctgacaattttcacaatggaaacaatttagggcacttgtgtacggttggc

SEQ ID NO: 466272 - DNA, 122 bp, Homo sapiens
caattcctgtcctgggcgtacgtcaagatggcggcgtctgtattaaacaccgtgctgaggcggcttcctatgctatctctcttccgaggttctcacagagttcaggtaactcttcgaaagac

SEQ ID NO: 466273 - DNA, 122 bp, Homo sapiens
ccttgagctggagtcagcctcgggtctggaatctgcctcccccggccctacagctggacccggcttcagcgattctcattgggaggaatggcagccagtcccccaacggagtgaccacagcc

SEQ ID NO: 466274 - DNA, 122 bp, Homo sapiens
ggccagaggagctgttgagagcccagaggcctatggttgacagcccagagaacagaggctcgaacaacagaggattattctcaggccttgaaatctaattgaaaatttcctgctaggtatta

SEQ ID NO: 466275 - DNA, 122 bp, Homo sapiens
ttaggctaaggattttgtttgttcactgttctatccccaagcctagagcactgcccagtgcggaatagctaataaatattgttgaatggatagatgaatggcaattttgttggtatgctcta

SEQ ID NO: 466276 - DNA, 122 bp, Homo sapiens
gcatggccgggccgtgggccgaggctccagctcgggcctcacgggctgcagatgctgggccgaggctgctcagcggctgtcctgccccacacaggagtctctggggctcggggtctcccagg

SEQ ID NO: 466277 - DNA, 122 bp, Homo sapiens
tgttcaaatttatgactgagagggctaagaaggtacttaatttcctcagatgatactttgcgaacatgtggtctatttggttgacctttgcaaatagttgaacaaccacaccgtgtattccc

SEQ ID NO: 466278 - DNA, 122 bp, Homo sapiens
acgaatgtaaccacctctcggcccggccggaagaagccacctcccccgcacgcgtttagccggcccccgcgattcggcctaatgcgacgattggctatggctccaaatcccgcccttccgat

SEQ ID NO: 466279 - DNA, 122 bp, Homo sapiens
gaggaagaggtgagatccccgaagttcgaagtggctcaaggccaagggagttgtcgccggcgaggtcgccgagggctgatcttcggttaacagcttgggttctggtgagcctttccatatcg

SEQ ID NO: 466280 - DNA, 122 bp, Homo sapiens
ccttctcagagcttacgcccgaaacccggcccccagggcacatggggctcgccttgaccacggtttccctggcgaccccaggggcacttgggacggttctcactgcccgcgcagggccgggc

SEQ ID NO: 466281 - DNA, 122 bp, Homo sapiens
taggttccataggcagttcttaccaagaagatgtcgattccattctccaacacccactaccgaattccacaaggatttgggaatcttcttgaagggctgacacgcgagattctgagagagca

SEQ ID NO: 466282 - DNA, 122 bp, Homo sapiens
tgacattggggccacagaaatccaagcgcagcatcagccccgtgtggatggccgtgttgacggcgcagagcagccacacggctgtggccagcccgctgcagaacaccttgctcatcatgctg

SEQ ID NO: 466283 - DNA, 122 bp, Homo sapiens
acacgcagagaacattcatccacagtggtcgacgcaaatatacaagcaaagggatgaagacgaaagatatttagggggtaaaatctcctattcttgtggttgatgtgtgtgaggatgggatg

SEQ ID NO: 466284 - DNA, 122 bp, Homo sapiens
ctcagccaactgagttgaggaaagaaaaaaagcacagctgaggtgttgaaaatgtgaatccgtactggataagggataatagaaatagcctctgtccaacaacctttcaacaattagaatgt

SEQ ID NO: 466285 - DNA, 122 bp, Homo sapiens
tggcccttcctcatgcttctgaagtggacatattcagccttggcgagaagctccgttgcacgggtttccccttgagcccattttacagatgaggaaactgagtccggagaggaaaagggaca

SEQ ID NO: 466286 - DNA, 122 bp, Homo sapiens
aggtgccaacctcagaattcaggtccacccaggtcagcagattccagcgccctgaagagccggccctggagggcttcctattataggcctcagggatgggcccccgggggccgggctgcaag

SEQ ID NO: 466287 - DNA, 122 bp, Homo sapiens
gcagaaggaagacagctctgtcccaccaaccctatagcagaacatttgtattgagtggcacgtgggctgagtcatttgtaaggtctcaaaaacctggacactttggaacgtagcaatcggat

SEQ ID NO: 466288 - DNA, 122 bp, Homo sapiens
ctcctctgaatccagccgtgtgcttgctgctgggaggtgtacagacagataaaacaggagcgtggccaaaagcagccctttgcatgcctgccaaacgcacactcgggggccttttaatcttg

SEQ ID NO: 466289 - DNA, 122 bp, Homo sapiens
ccgccacgccccgctctttttaaaacctgagaacccccttgccaacagtccctgcataagcgtggacaagagttcagagatctatttgagcacaaaagcagaaaaaacaaaaacaaaacccg

SEQ ID NO: 466290 - DNA, 122 bp, Homo sapiens
aaggccacttctcagcgcctcaccagcctccaaactgcccagtgctctatcagtcatccccggcagccagatcccagcctcccagctgaggtcactcctgcttgtgagcacctgcagatgga

SEQ ID NO: 466291 - DNA, 122 bp, Homo sapiens
actacacgcagtacatccctctgtccatatatgacctgcagacgtggatgggcagcccgtcgatcttcgtctacgactgctccaatgctggcttgatcgtcaagtccttcaagcagttcgca

SEQ ID NO: 466292 - DNA, 122 bp, Homo sapiens
cagccggcagcccatggtggggaccccttctcctcctccctgccccgtgcaggtggtcctcgccttgcaggtgcagccccctcaccagtgcccagtgggtggtacaaagtacacgcagcagt

SEQ ID NO: 466293 - DNA, 122 bp, Homo sapiens
ctgcacttctgcctggtgtgtcctgggcgaggctctatacctagagcataatcaaaatctcgaatttaccaaggttttcaccaaaaataaaagttgctaagagttaacattataacatgtaa

SEQ ID NO: 466294 - DNA, 122 bp, Homo sapiens
aggtcgaattgtaaataacgctatttgattggctagaacaaccaaccaattgcaaagaaacgctagaatcacctaatttgcataccacagggcacacagagacaattcatccaatcaatgtg

SEQ ID NO: 466295 - DNA, 122 bp, Homo sapiens
ctctctgtcacgttgtagaaggagacctcaccagcatcatagtccaagaaaatccccacccgctggagcggggtccgcaggggtagggcagtcattggggaggtaagagcccaatattcttt

SEQ ID NO: 466296 - DNA, 122 bp, Homo sapiens
gggaccctgggggcggggagcaagaggctcctcgaggctggccatggttcctccccgggccgcggaggggcaggccgcgggcgggaggggcgcggcgggccggggctcggtgggctccgccc

SEQ ID NO: 466297 - DNA, 122 bp, Homo sapiens
tctgaatgtctaaagacctctcattctccacttctgttgtattattagtttctgaccacacgatggagtcatttcttcacatttcctcacactgattttgtttattaagaaaatcaatccag

SEQ ID NO: 466298 - DNA, 122 bp, Homo sapiens
aagagctgagtgatgacaaagtgaagtagcaaggctcgtgctgctagggctgatggttaacgacctcagtttcctcatctgtaaactagtgagaaaaatactatctgcctcatgggtagtta

SEQ ID NO: 466299 - DNA, 122 bp, Homo sapiens
cgtgtccggcttcgaggagttccaccgggccgtggaacagcacaatggcaagaccattttcgcctactttacgggttctaaggacgccggggggaaaagctggtgccccgactgcgtgcagg

SEQ ID NO: 466300 - DNA, 122 bp, Homo sapiens
cacgctcgccgctatggttacttgccagccgacccacgcgagccgctatggttactagcccgccgcccctcgcgcccacgcccctttcgctatctcgcgacagctggagaagcctcgcttcc

SEQ ID NO: 466301 - DNA, 122 bp, Homo sapiens
gttttctcactccactgcttgtgcttaactgaagcaaaaggaaatgcattgaaggatattcggtgcttgcagaattaatgggaagccagtgtcaggcctctgagcccaagctaagccatcat

SEQ ID NO: 466302 - DNA, 122 bp, Homo sapiens
acagacttatttcataactccttccctcataagaactaacagtaaatggtaccatttggacgagaggatacctgaccggtctcagtgcacctctccgcaacccgggaccatcacgccctctg

SEQ ID NO: 466303 - DNA, 122 bp, Homo sapiens
cttcggggctggcatcgactccacctgcctgttctggagcacgttctgtggggagcaaggcgcctgcgtcctctacgacaatgtggtctaccgatacctgtatgtcagcatcgccatcgcgc

SEQ ID NO: 466304 - DNA, 122 bp, Homo sapiens
tcccagcccagacaattcaaatctgccttctatcaggacctagaaaggatgtaaaacggccgggtataaatatcccctgggtctggggaaactgtcaggagcagtgacatcacaggaaaaac

SEQ ID NO: 466305 - DNA, 122 bp, Homo sapiens
acgataaagaaaatcaaggggctaagacccaaggtgagcagccgcctcaacatcaactaccgacacagacacccagaaaactctaaaccacaagatggcaaagagacaaaagcaatccatca

SEQ ID NO: 466306 - DNA, 122 bp, Homo sapiens
tgctttgcttgaagtttacttttccttccttgaaagggtattttccattataacaggcaacgtcaatttaagaatactggcaatttgtgagtttaacttttagatataactttaacaggata

SEQ ID NO: 466307 - DNA, 122 bp, Homo sapiens
agcctgcaggtgggtttgttagggggagaccgctctgccaatactggctttcccatcgcccggccatctgcaactgccagacgcaaagtgaggctcgtccaccgagccccacttcccagagc

SEQ ID NO: 466308 - DNA, 122 bp, Homo sapiens
ccatgctgtcttgttctaaatgaaaggaaaatcagtttgccgcacttgaacaacaagcctcgacccaggactgtgagtgcaacctggtgtcgttacccaagtcacgtcacccacaccgatgg

SEQ ID NO: 466309 - DNA, 122 bp, Homo sapiens
aatctgattaaaaggtctaatcatctatggagggataaggaagttgtggctttatatattcgttaaatgttttattcctgtatgtgattcacttttctaggtatagaggacatatcagtgaa

SEQ ID NO: 466310 - DNA, 122 bp, Homo sapiens
cagagtcacgaagtccttgcccagcgcgtaggccaggcggaccatggcgtccagcagaggcgcatagtagcgatggccctcccgggcctgcaggcgctgcagggccctctctccggccgcga
